United States Patent Application Publication US 2005/0255487 A1 - sequence listing, part 81

SEQ ID NO: 2226031 - RNA, 19 nt, Homo sapiens
  misc_RNA (1)...(19): siRNA sense strand
augcagagacggcgaagga

SEQ ID NO: 2226032 - RNA, 19 nt, Homo sapiens
  misc_RNA (1)...(19): siRNA sense strand
agguuaagggccacggcaa

SEQ ID NO: 2226033 - RNA, 19 nt, Homo sapiens
  misc_RNA (1)...(19): siRNA sense strand
aggugaaggcucauggcaa

SEQ ID NO: 2226034 - RNA, 19 nt, Homo sapiens
  misc_RNA (1)...(19): siRNA sense strand
ggaugaaguugguggugag

SEQ ID NO: 2226035 - RNA, 19 nt, Homo sapiens
  misc_RNA (1)...(19): siRNA sense strand
ggugaaggcucauggcaag

SEQ ID NO: 2226036 - RNA, 19 nt, Homo sapiens
  misc_RNA (1)...(19): siRNA sense strand
aggugaacguggaugaagu

SEQ ID NO: 2226037 - RNA, 19 nt, Homo sapiens
  misc_RNA (1)...(19): siRNA sense strand
acccuaaggugaaggcuca

SEQ ID NO: 2226038 - RNA, 19 nt, Homo sapiens
  misc_RNA (1)...(19): siRNA sense strand
acguggauccugagaacuu

SEQ ID NO: 2226039 - RNA, 19 nt, Homo sapiens
  misc_RNA (1)...(19): siRNA sense strand
agaaagugguggcuggugu

SEQ ID NO: 2226040 - RNA, 19 nt, Homo sapiens
  misc_RNA (1)...(19): siRNA sense strand
gugacaagcugcacgugga

SEQ ID NO: 2226041 - RNA, 19 nt, Homo sapiens
  misc_RNA (1)...(19): siRNA sense strand
cugaugcuguuaugggcaa

SEQ ID NO: 2226042 - RNA, 19 nt, Homo sapiens
  misc_RNA (1)...(19): siRNA sense strand
acuucaggcucuugggcaa

SEQ ID NO: 2226043 - RNA, 19 nt, Homo sapiens
  misc_RNA (1)...(19): siRNA sense strand
aggugaaggcucauggcaa

SEQ ID NO: 2226044 - RNA, 19 nt, Homo sapiens
  misc_RNA (1)...(19): siRNA sense strand
ggugaaggcucauggcaag

SEQ ID NO: 2226045 - RNA, 19 nt, Homo sapiens
  misc_RNA (1)...(19): siRNA sense strand
acccuaaggugaaggcuca

SEQ ID NO: 2226046 - RNA, 19 nt, Homo sapiens
  misc_RNA (1)...(19): siRNA sense strand
acguggauccugagaacuu

SEQ ID NO: 2226047 - RNA, 19 nt, Homo sapiens
  misc_RNA (1)...(19): siRNA sense strand
aggagaagacugcugucaa

SEQ ID NO: 2226048 - RNA, 19 nt, Homo sapiens
  misc_RNA (1)...(19): siRNA sense strand
gugacaagcugcacgugga

SEQ ID NO: 2226049 - RNA, 19 nt, Homo sapiens
  misc_RNA (1)...(19): siRNA sense strand
cugaugcuguuaugggcaa

SEQ ID NO: 2226050 - RNA, 19 nt, Homo sapiens
  misc_RNA (1)...(19): siRNA sense strand
gcaagaaggugcuaggugc

SEQ ID NO: 2226051 - RNA, 19 nt, Homo sapiens
  misc_RNA (1)...(19): siRNA sense strand
gcuagagaaaggaggggaa

SEQ ID NO: 2226052 - RNA, 19 nt, Homo sapiens
  misc_RNA (1)...(19): siRNA sense strand
aggucaacacuuucgauaa

SEQ ID NO: 2226053 - RNA, 19 nt, Homo sapiens
  misc_RNA (1)...(19): siRNA sense strand
gugaagacgacgacuacau

SEQ ID NO: 2226054 - RNA, 19 nt, Homo sapiens
  misc_RNA (1)...(19): siRNA sense strand
augagagagagguaguuaa

SEQ ID NO: 2226055 - RNA, 19 nt, Homo sapiens
  misc_RNA (1)...(19): siRNA sense strand
ccgaaauucaagcuggaga

SEQ ID NO: 2226056 - RNA, 19 nt, Homo sapiens
  misc_RNA (1)...(19): siRNA sense strand
agggagagacccaugaaca

SEQ ID NO: 2226057 - RNA, 19 nt, Homo sapiens
  misc_RNA (1)...(19): siRNA sense strand
cagcaaaugaccaggagcu

SEQ ID NO: 2226058 - RNA, 19 nt, Homo sapiens
  misc_RNA (1)...(19): siRNA sense strand
uucaaaggauccuggguga

SEQ ID NO: 2226059 - RNA, 19 nt, Homo sapiens
  misc_RNA (1)...(19): siRNA sense strand
gugguggagagauggcaaa

SEQ ID NO: 2226060 - RNA, 19 nt, Homo sapiens
  misc_RNA (1)...(19): siRNA sense strand
gcaucuacuucaaaggauc

SEQ ID NO: 2226061 - RNA, 19 nt, Homo sapiens
  misc_RNA (1)...(19): siRNA sense strand
ugaaugagagagagguagu

SEQ ID NO: 2226062 - RNA, 19 nt, Homo sapiens
  misc_RNA (1)...(19): siRNA sense strand
aggaaaacaccgucaccaa

SEQ ID NO: 2226063 - RNA, 19 nt, Homo sapiens
  misc_RNA (1)...(19): siRNA sense strand
aaguaaagauucagccaga

SEQ ID NO: 2226064 - RNA, 19 nt, Homo sapiens
  misc_RNA (1)...(19): siRNA sense strand
ggggagaauauguggacaa

SEQ ID NO: 2226065 - RNA, 19 nt, Homo sapiens
  misc_RNA (1)...(19): siRNA sense strand
ggugauugguggagaggcu

SEQ ID NO: 2226066 - RNA, 19 nt, Homo sapiens
  misc_RNA (1)...(19): siRNA sense strand
cuuuggagucaguggagaa

SEQ ID NO: 2226067 - RNA, 19 nt, Homo sapiens
  misc_RNA (1)...(19): siRNA sense strand
gccgaaaggcuguggagca

SEQ ID NO: 2226068 - RNA, 19 nt, Homo sapiens
  misc_RNA (1)...(19): siRNA sense strand
ccgugugcuugcagaguuu

SEQ ID NO: 2226069 - RNA, 19 nt, Homo sapiens
  misc_RNA (1)...(19): siRNA sense strand
cuucuuauggcaagggcua

SEQ ID NO: 2226070 - RNA, 19 nt, Homo sapiens
  misc_RNA (1)...(19): siRNA sense strand
agguguggcgagaggauau

SEQ ID NO: 2226071 - RNA, 19 nt, Homo sapiens
  misc_RNA (1)...(19): siRNA sense strand
ggacuuuaugaggaagaaa

SEQ ID NO: 2226072 - RNA, 19 nt, Homo sapiens
  misc_RNA (1)...(19): siRNA sense strand
augucauggcguacaauaa

SEQ ID NO: 2226073 - RNA, 19 nt, Homo sapiens
  misc_RNA (1)...(19): siRNA sense strand
cggcauacacuggagaaga

SEQ ID NO: 2226074 - RNA, 19 nt, Homo sapiens
  misc_RNA (1)...(19): siRNA sense strand
ggaaaucugcugagggcac

SEQ ID NO: 2226075 - RNA, 19 nt, Homo sapiens
  misc_RNA (1)...(19): siRNA sense strand
guggagaauuauacccuga

SEQ ID NO: 2226076 - RNA, 19 nt, Homo sapiens
  misc_RNA (1)...(19): siRNA sense strand
gugaaggaggucauugaau

SEQ ID NO: 2226077 - RNA, 19 nt, Homo sapiens
  misc_RNA (1)...(19): siRNA sense strand
aguccaacccagagaucca

SEQ ID NO: 2226078 - RNA, 19 nt, Homo sapiens
  misc_RNA (1)...(19): siRNA sense strand
ccauguuacaguagacaaa

SEQ ID NO: 2226079 - RNA, 19 nt, Homo sapiens
  misc_RNA (1)...(19): siRNA sense strand
ggggaaaaggucagaaaga

SEQ ID NO: 2226080 - RNA, 19 nt, Homo sapiens
  misc_RNA (1)...(19): siRNA sense strand
uggacaagauuggaggaaa

SEQ ID NO: 2226081 - RNA, 19 nt, Homo sapiens
  misc_RNA (1)...(19): siRNA sense strand
ggaauuuaaauguugggaa

SEQ ID NO: 2226082 - RNA, 19 nt, Homo sapiens
  misc_RNA (1)...(19): siRNA sense strand
gggcaagugcuguugguga

SEQ ID NO: 2226083 - RNA, 19 nt, Homo sapiens
  misc_RNA (1)...(19): siRNA sense strand
ccguauggugauugaauau

SEQ ID NO: 2226084 - RNA, 19 nt, Homo sapiens
  misc_RNA (1)...(19): siRNA sense strand
ugaaagaaccaguggcugu

SEQ ID NO: 2226085 - RNA, 19 nt, Homo sapiens
  misc_RNA (1)...(19): siRNA sense strand
uccaaagaugucagagaua

SEQ ID NO: 2226086 - RNA, 19 nt, Homo sapiens
  misc_RNA (1)...(19): siRNA sense strand
gagaauauguggaugcaac

SEQ ID NO: 2226087 - RNA, 19 nt, Homo sapiens
  misc_RNA (1)...(19): siRNA sense strand
caaagaaauuagugaggug

SEQ ID NO: 2226088 - RNA, 19 nt, Homo sapiens
  misc_RNA (1)...(19): siRNA sense strand
agauuauggccucgggcaa

SEQ ID NO: 2226089 - RNA, 19 nt, Homo sapiens
  misc_RNA (1)...(19): siRNA sense strand
guuccaaagaugucagaga

SEQ ID NO: 2226090 - RNA, 19 nt, Homo sapiens
  misc_RNA (1)...(19): siRNA sense strand
gcacauaguugaugaccag

SEQ ID NO: 2226091 - RNA, 19 nt, Homo sapiens
  misc_RNA (1)...(19): siRNA sense strand
cuuaaggccaacagaguuu

SEQ ID NO: 2226092 - RNA, 19 nt, Homo sapiens
  misc_RNA (1)...(19): siRNA sense strand
gagauauggaugacgccua

SEQ ID NO: 2226093 - RNA, 19 nt, Homo sapiens
  misc_RNA (1)...(19): siRNA sense strand
ggaaauacuauaaagugga

SEQ ID NO: 2226094 - RNA, 19 nt, Homo sapiens
  misc_RNA (1)...(19): siRNA sense strand
ugccagauuacgaggaauu

SEQ ID NO: 2226095 - RNA, 19 nt, Homo sapiens
  misc_RNA (1)...(19): siRNA sense strand
aagcaauaaaggaagcuau

SEQ ID NO: 2226096 - RNA, 19 nt, Homo sapiens
  misc_RNA (1)...(19): siRNA sense strand
auggaaagacagcgcauau

SEQ ID NO: 2226097 - RNA, 19 nt, Homo sapiens
  misc_RNA (1)...(19): siRNA sense strand
agucagagugugaugcuuu

SEQ ID NO: 2226098 - RNA, 19 nt, Homo sapiens
  misc_RNA (1)...(19): siRNA sense strand
uuugauuagcuauggacaa

SEQ ID NO: 2226099 - RNA, 19 nt, Homo sapiens
  misc_RNA (1)...(19): siRNA sense strand
caguagagucacagcaucu

SEQ ID NO: 2226100 - RNA, 19 nt, Homo sapiens
  misc_RNA (1)...(19): siRNA sense strand
guuuagagaccuuuagcca

SEQ ID NO: 2226101 - RNA, 19 nt, Homo sapiens
  misc_RNA (1)...(19): siRNA sense strand
caauaguugaaguauggaa

SEQ ID NO: 2226102 - RNA, 19 nt, Homo sapiens
  misc_RNA (1)...(19): siRNA sense strand
agacaaaacaaguuggacu

SEQ ID NO: 2226103 - RNA, 19 nt, Homo sapiens
  misc_RNA (1)...(19): siRNA sense strand
caaagaugucagagauaug

SEQ ID NO: 2226104 - RNA, 19 nt, Homo sapiens
  misc_RNA (1)...(19): siRNA sense strand
caccaaaugauguccguau

SEQ ID NO: 2226105 - RNA, 19 nt, Homo sapiens
  misc_RNA (1)...(19): siRNA sense strand
uuucauugguggagaagcu

SEQ ID NO: 2226106 - RNA, 19 nt, Homo sapiens
  misc_RNA (1)...(19): siRNA sense strand
uuaauaaauaccagggcaa

SEQ ID NO: 2226107 - RNA, 19 nt, Homo sapiens
  misc_RNA (1)...(19): siRNA sense strand
gcuacaucuuggaggucua

SEQ ID NO: 2226108 - RNA, 19 nt, Homo sapiens
  misc_RNA (1)...(19): siRNA sense strand
gcauagaugucuuugagga

SEQ ID NO: 2226109 - RNA, 19 nt, Homo sapiens
  misc_RNA (1)...(19): siRNA sense strand
ccuuauuaccauaggaacu

SEQ ID NO: 2226110 - RNA, 19 nt, Homo sapiens
  misc_RNA (1)...(19): siRNA sense strand
ccuacaaucucuaugcuga

SEQ ID NO: 2226111 - RNA, 19 nt, Homo sapiens
  misc_RNA (1)...(19): siRNA sense strand
gaggucacuaugaggcaaa

SEQ ID NO: 2226112 - RNA, 19 nt, Homo sapiens
  misc_RNA (1)...(19): siRNA sense strand
gcuuugagaaggccagcaa

SEQ ID NO: 2226113 - RNA, 19 nt, Homo sapiens
  misc_RNA (1)...(19): siRNA sense strand
gagaaggccagcaagguca

SEQ ID NO: 2226114 - RNA, 19 nt, Homo sapiens
  misc_RNA (1)...(19): siRNA sense strand
cuuugaauccauugacgaa

SEQ ID NO: 2226115 - RNA, 19 nt, Homo sapiens
  misc_RNA (1)...(19): siRNA sense strand
gauaagaccuucaggccuc

SEQ ID NO: 2226116 - RNA, 19 nt, Homo sapiens
  misc_RNA (1)...(19): siRNA sense strand
cagaauaauccucaggucu

SEQ ID NO: 2226117 - RNA, 19 nt, Homo sapiens
  misc_RNA (1)...(19): siRNA sense strand
ugagugaguucaugggacu

SEQ ID NO: 2226118 - RNA, 19 nt, Homo sapiens
  misc_RNA (1)...(19): siRNA sense strand
uggaugagaacuaccacaa

SEQ ID NO: 2226119 - RNA, 19 nt, Homo sapiens
  misc_RNA (1)...(19): siRNA sense strand
cggagcaccaauaagagaa

SEQ ID NO: 2226120 - RNA, 19 nt, Homo sapiens
  misc_RNA (1)...(19): siRNA sense strand
ggacagaguuugacaggga

SEQ ID NO: 2226121 - RNA, 19 nt, Homo sapiens
  misc_RNA (1)...(19): siRNA sense strand
acaacaaugccgugguuaa

SEQ ID NO: 2226122 - RNA, 19 nt, Homo sapiens
  misc_RNA (1)...(19): siRNA sense strand
acauggaguccgagguuua

SEQ ID NO: 2226123 - RNA, 19 nt, Homo sapiens
  misc_RNA (1)...(19): siRNA sense strand
agaaguuaccugugggauu

SEQ ID NO: 2226124 - RNA, 19 nt, Homo sapiens
  misc_RNA (1)...(19): siRNA sense strand
gcuacauggaggagaugaa

SEQ ID NO: 2226125 - RNA, 19 nt, Homo sapiens
  misc_RNA (1)...(19): siRNA sense strand
cgguggaaaugcacaacaa

SEQ ID NO: 2226126 - RNA, 19 nt, Homo sapiens
  misc_RNA (1)...(19): siRNA sense strand
agaugaagaacguggagau

SEQ ID NO: 2226127 - RNA, 19 nt, Homo sapiens
  misc_RNA (1)...(19): siRNA sense strand
acauggaggagaugaagaa

SEQ ID NO: 2226128 - RNA, 19 nt, Homo sapiens
  misc_RNA (1)...(19): siRNA sense strand
cuaaaugcugggaaacaaa

SEQ ID NO: 2226129 - RNA, 19 nt, Homo sapiens
  misc_RNA (1)...(19): siRNA sense strand
agaucaaggacaagaaguu

SEQ ID NO: 2226130 - RNA, 19 nt, Homo sapiens
  misc_RNA (1)...(19): siRNA sense strand
uggucaaacugcuuaacaa

SEQ ID NO: 2226131 - RNA, 19 nt, Homo sapiens
  misc_RNA (1)...(19): siRNA sense strand
acaaaggguuuuaaggcaa

SEQ ID NO: 2226132 - RNA, 19 nt, Homo sapiens
  misc_RNA (1)...(19): siRNA sense strand
caacagacugcgugggcca

SEQ ID NO: 2226133 - RNA, 19 nt, Homo sapiens
  misc_RNA (1)...(19): siRNA sense strand
ccaaaauagaugaggccau

SEQ ID NO: 2226134 - RNA, 19 nt, Homo sapiens
  misc_RNA (1)...(19): siRNA sense strand
gaacgguggaaaugcacaa

SEQ ID NO: 2226135 - RNA, 19 nt, Homo sapiens
  misc_RNA (1)...(19): siRNA sense strand
ccugcuacauggaggagau

SEQ ID NO: 2226136 - RNA, 19 nt, Homo sapiens
  misc_RNA (1)...(19): siRNA sense strand
agguaugagaagaugauca

SEQ ID NO: 2226137 - RNA, 19 nt, Homo sapiens
  misc_RNA (1)...(19): siRNA sense strand
acaacaagaucuacgccau

SEQ ID NO: 2226138 - RNA, 19 nt, Homo sapiens
  misc_RNA (1)...(19): siRNA sense strand
gcaccugcgaugacaguau

SEQ ID NO: 2226139 - RNA, 19 nt, Homo sapiens
  misc_RNA (1)...(19): siRNA sense strand
gcugagugccugggagauu

SEQ ID NO: 2226140 - RNA, 19 nt, Homo sapiens
  misc_RNA (1)...(19): siRNA sense strand
uacuaagggaugcgauaaa

SEQ ID NO: 2226141 - RNA, 19 nt, Homo sapiens
  misc_RNA (1)...(19): siRNA sense strand
acaugcugcuggaggugaa

SEQ ID NO: 2226142 - RNA, 19 nt, Homo sapiens
  misc_RNA (1)...(19): siRNA sense strand
guggaaaugcacaacaaga

SEQ ID NO: 2226143 - RNA, 19 nt, Homo sapiens
  misc_RNA (1)...(19): siRNA sense strand
uggaaaugcacaacaagau

SEQ ID NO: 2226144 - RNA, 19 nt, Homo sapiens
  misc_RNA (1)...(19): siRNA sense strand
acaaagcgauuuaaagcga

SEQ ID NO: 2226145 - RNA, 19 nt, Homo sapiens
  misc_RNA (1)...(19): siRNA sense strand
aacaaagguaugagaagau

SEQ ID NO: 2226146 - RNA, 19 nt, Homo sapiens
  misc_RNA (1)...(19): siRNA sense strand
cugaauagcaccugcgaug

SEQ ID NO: 2226147 - RNA, 19 nt, Homo sapiens
  misc_RNA (1)...(19): siRNA sense strand
cggaguggaaggagcagau

SEQ ID NO: 2226148 - RNA, 19 nt, Homo sapiens
  misc_RNA (1)...(19): siRNA sense strand
agacauccggacagaguuu

SEQ ID NO: 2226149 - RNA, 19 nt, Homo sapiens
  misc_RNA (1)...(19): siRNA sense strand
aaaagagaacgguggaaau

SEQ ID NO: 2226150 - RNA, 19 nt, Homo sapiens
  misc_RNA (1)...(19): siRNA sense strand
cgagggaaguuuaacacca

SEQ ID NO: 2226151 - RNA, 19 nt, Homo sapiens
  misc_RNA (1)...(19): siRNA sense strand
ggacacacuacgacagacu

SEQ ID NO: 2226152 - RNA, 19 nt, Homo sapiens
  misc_RNA (1)...(19): siRNA sense strand
gagaagauggucaguggca

SEQ ID NO: 2226153 - RNA, 19 nt, Homo sapiens
  misc_RNA (1)...(19): siRNA sense strand
agaguuugacagggagaua

SEQ ID NO: 2226154 - RNA, 19 nt, Homo sapiens
  misc_RNA (1)...(19): siRNA sense strand
cagccaucgaaaagaauaa

SEQ ID NO: 2226155 - RNA, 19 nt, Homo sapiens
  misc_RNA (1)...(19): siRNA sense strand
acgugguggcuguggucaa

SEQ ID NO: 2226156 - RNA, 19 nt, Homo sapiens
  misc_RNA (1)...(19): siRNA sense strand
uggaggagaugaagaacgu

SEQ ID NO: 2226157 - RNA, 19 nt, Homo sapiens
  misc_RNA (1)...(19): siRNA sense strand
ugggugaaaucguccgcaa

SEQ ID NO: 2226158 - RNA, 19 nt, Homo sapiens
  misc_RNA (1)...(19): siRNA sense strand
acaucguagcuguggugaa

SEQ ID NO: 2226159 - RNA, 19 nt, Homo sapiens
  misc_RNA (1)...(19): siRNA sense strand
ugaggaagcagacgcacaa

SEQ ID NO: 2226160 - RNA, 19 nt, Homo sapiens
  misc_RNA (1)...(19): siRNA sense strand
cuuuggagacgauggauca

SEQ ID NO: 2226161 - RNA, 19 nt, Homo sapiens
  misc_RNA (1)...(19): siRNA sense strand
cugaggaagcagacgcaca

SEQ ID NO: 2226162 - RNA, 19 nt, Homo sapiens
  misc_RNA (1)...(19): siRNA sense strand
gugaaaauccguaguggga

SEQ ID NO: 2226163 - RNA, 19 nt, Homo sapiens
  misc_RNA (1)...(19): siRNA sense strand
ugaaugugacugugggagu

SEQ ID NO: 2226164 - RNA, 19 nt, Homo sapiens
  misc_RNA (1)...(19): siRNA sense strand
ggacagaguuugacaggga

SEQ ID NO: 2226165 - RNA, 19 nt, Homo sapiens
  misc_RNA (1)...(19): siRNA sense strand
acaacaaugccgugguuaa

SEQ ID NO: 2226166 - RNA, 19 nt, Homo sapiens
  misc_RNA (1)...(19): siRNA sense strand
acauggaguccgagguuua

SEQ ID NO: 2226167 - RNA, 19 nt, Homo sapiens
  misc_RNA (1)...(19): siRNA sense strand
agaaguuaccugugggauu

SEQ ID NO: 2226168 - RNA, 19 nt, Homo sapiens
  misc_RNA (1)...(19): siRNA sense strand
gcuacauggaggagaugaa

SEQ ID NO: 2226169 - RNA, 19 nt, Homo sapiens
  misc_RNA (1)...(19): siRNA sense strand
cgguggaaaugcacaacaa

SEQ ID NO: 2226170 - RNA, 19 nt, Homo sapiens
  misc_RNA (1)...(19): siRNA sense strand
agaugaagaacguggagau

SEQ ID NO: 2226171 - RNA, 19 nt, Homo sapiens
  misc_RNA (1)...(19): siRNA sense strand
acauggaggagaugaagaa

SEQ ID NO: 2226172 - RNA, 19 nt, Homo sapiens
  misc_RNA (1)...(19): siRNA sense strand
cuaaaugcugggaaacaaa

SEQ ID NO: 2226173 - RNA, 19 nt, Homo sapiens
  misc_RNA (1)...(19): siRNA sense strand
agaucaaggacaagaaguu

SEQ ID NO: 2226174 - RNA, 19 nt, Homo sapiens
  misc_RNA (1)...(19): siRNA sense strand
uggucaaacugcuuaacaa

SEQ ID NO: 2226175 - RNA, 19 nt, Homo sapiens
  misc_RNA (1)...(19): siRNA sense strand
acaaaggguuuuaaggcaa

SEQ ID NO: 2226176 - RNA, 19 nt, Homo sapiens
  misc_RNA (1)...(19): siRNA sense strand
caacagacugcgugggcca

SEQ ID NO: 2226177 - RNA, 19 nt, Homo sapiens
  misc_RNA (1)...(19): siRNA sense strand
ccaaaauagaugaggccau

SEQ ID NO: 2226178 - RNA, 19 nt, Homo sapiens
  misc_RNA (1)...(19): siRNA sense strand
gaacgguggaaaugcacaa

SEQ ID NO: 2226179 - RNA, 19 nt, Homo sapiens
  misc_RNA (1)...(19): siRNA sense strand
ccugcuacauggaggagau

SEQ ID NO: 2226180 - RNA, 19 nt, Homo sapiens
  misc_RNA (1)...(19): siRNA sense strand
agguaugagaagaugauca

SEQ ID NO: 2226181 - RNA, 19 nt, Homo sapiens
  misc_RNA (1)...(19): siRNA sense strand
acaacaagaucuacgccau

SEQ ID NO: 2226182 - RNA, 19 nt, Homo sapiens
  misc_RNA (1)...(19): siRNA sense strand
gcaccugcgaugacaguau

SEQ ID NO: 2226183 - RNA, 19 nt, Homo sapiens
  misc_RNA (1)...(19): siRNA sense strand
gcugagugccugggagauu

SEQ ID NO: 2226184 - RNA, 19 nt, Homo sapiens
  misc_RNA (1)...(19): siRNA sense strand
uacuaagggaugcgauaaa

SEQ ID NO: 2226185 - RNA, 19 nt, Homo sapiens
  misc_RNA (1)...(19): siRNA sense strand
acaugcugcuggaggugaa

SEQ ID NO: 2226186 - RNA, 19 nt, Homo sapiens
  misc_RNA (1)...(19): siRNA sense strand
guggaaaugcacaacaaga

SEQ ID NO: 2226187 - RNA, 19 nt, Homo sapiens
  misc_RNA (1)...(19): siRNA sense strand
uggaaaugcacaacaagau

SEQ ID NO: 2226188 - RNA, 19 nt, Homo sapiens
  misc_RNA (1)...(19): siRNA sense strand
acaaagcgauuuaaagcga

SEQ ID NO: 2226189 - RNA, 19 nt, Homo sapiens
  misc_RNA (1)...(19): siRNA sense strand
aacaaagguaugagaagau

SEQ ID NO: 2226190 - RNA, 19 nt, Homo sapiens
  misc_RNA (1)...(19): siRNA sense strand
cugaauagcaccugcgaug

SEQ ID NO: 2226191 - RNA, 19 nt, Homo sapiens
  misc_RNA (1)...(19): siRNA sense strand
cggaguggaaggagcagau

SEQ ID NO: 2226192 - RNA, 19 nt, Homo sapiens
  misc_RNA (1)...(19): siRNA sense strand
agacauccggacagaguuu

SEQ ID NO: 2226193 - RNA, 19 nt, Homo sapiens
  misc_RNA (1)...(19): siRNA sense strand
aaaagagaacgguggaaau

SEQ ID NO: 2226194 - RNA, 19 nt, Homo sapiens
  misc_RNA (1)...(19): siRNA sense strand
cgagggaaguuuaacacca

SEQ ID NO: 2226195 - RNA, 19 nt, Homo sapiens
  misc_RNA (1)...(19): siRNA sense strand
ggacacacuacgacagacu

SEQ ID NO: 2226196 - RNA, 19 nt, Homo sapiens
  misc_RNA (1)...(19): siRNA sense strand
gagaagauggucaguggca

SEQ ID NO: 2226197 - RNA, 19 nt, Homo sapiens
  misc_RNA (1)...(19): siRNA sense strand
agaguuugacagggagaua

SEQ ID NO: 2226198 - RNA, 19 nt, Homo sapiens
  misc_RNA (1)...(19): siRNA sense strand
cagccaucgaaaagaauaa

SEQ ID NO: 2226199 - RNA, 19 nt, Homo sapiens
  misc_RNA (1)...(19): siRNA sense strand
acgugguggcuguggucaa

SEQ ID NO: 2226200 - RNA, 19 nt, Homo sapiens
  misc_RNA (1)...(19): siRNA sense strand
uggaggagaugaagaacgu

SEQ ID NO: 2226201 - RNA, 19 nt, Homo sapiens
  misc_RNA (1)...(19): siRNA sense strand
ugggugaaaucguccgcaa

SEQ ID NO: 2226202 - RNA, 19 nt, Homo sapiens
  misc_RNA (1)...(19): siRNA sense strand
acaucguagcuguggugaa

SEQ ID NO: 2226203 - RNA, 19 nt, Homo sapiens
  misc_RNA (1)...(19): siRNA sense strand
ugaggaagcagacgcacaa

SEQ ID NO: 2226204 - RNA, 19 nt, Homo sapiens
  misc_RNA (1)...(19): siRNA sense strand
cuuuggagacgauggauca

SEQ ID NO: 2226205 - RNA, 19 nt, Homo sapiens
  misc_RNA (1)...(19): siRNA sense strand
cugaggaagcagacgcaca

SEQ ID NO: 2226206 - RNA, 19 nt, Homo sapiens
  misc_RNA (1)...(19): siRNA sense strand
gugaaaauccguaguggga

SEQ ID NO: 2226207 - RNA, 19 nt, Homo sapiens
  misc_RNA (1)...(19): siRNA sense strand
ugaaugugacugugggagu

SEQ ID NO: 2226208 - RNA, 19 nt, Homo sapiens
  misc_RNA (1)...(19): siRNA sense strand
ggacagaguuugacaggga

SEQ ID NO: 2226209 - RNA, 19 nt, Homo sapiens
  misc_RNA (1)...(19): siRNA sense strand
acaacaaugccgugguuaa

SEQ ID NO: 2226210 - RNA, 19 nt, Homo sapiens
  misc_RNA (1)...(19): siRNA sense strand
acauggaguccgagguuua

SEQ ID NO: 2226211 - RNA, 19 nt, Homo sapiens
  misc_RNA (1)...(19): siRNA sense strand
agaaguuaccugugggauu

SEQ ID NO: 2226212 - RNA, 19 nt, Homo sapiens
  misc_RNA (1)...(19): siRNA sense strand
gcuacauggaggagaugaa

SEQ ID NO: 2226213 - RNA, 19 nt, Homo sapiens
  misc_RNA (1)...(19): siRNA sense strand
cgguggaaaugcacaacaa

SEQ ID NO: 2226214 - RNA, 19 nt, Homo sapiens
  misc_RNA (1)...(19): siRNA sense strand
agaugaagaacguggagau

SEQ ID NO: 2226215 - RNA, 19 nt, Homo sapiens
  misc_RNA (1)...(19): siRNA sense strand
acauggaggagaugaagaa

SEQ ID NO: 2226216 - RNA, 19 nt, Homo sapiens
  misc_RNA (1)...(19): siRNA sense strand
cuaaaugcugggaaacaaa

SEQ ID NO: 2226217 - RNA, 19 nt, Homo sapiens
  misc_RNA (1)...(19): siRNA sense strand
agaucaaggacaagaaguu

SEQ ID NO: 2226218 - RNA, 19 nt, Homo sapiens
  misc_RNA (1)...(19): siRNA sense strand
uggucaaacugcuuaacaa

SEQ ID NO: 2226219 - RNA, 19 nt, Homo sapiens
  misc_RNA (1)...(19): siRNA sense strand
acaaaggguuuuaaggcaa

SEQ ID NO: 2226220 - RNA, 19 nt, Homo sapiens
  misc_RNA (1)...(19): siRNA sense strand
caacagacugcgugggcca

SEQ ID NO: 2226221 - RNA, 19 nt, Homo sapiens
  misc_RNA (1)...(19): siRNA sense strand
ccaaaauagaugaggccau

SEQ ID NO: 2226222 - RNA, 19 nt, Homo sapiens
  misc_RNA (1)...(19): siRNA sense strand
gaacgguggaaaugcacaa

SEQ ID NO: 2226223 - RNA, 19 nt, Homo sapiens
  misc_RNA (1)...(19): siRNA sense strand
ccugcuacauggaggagau

SEQ ID NO: 2226224 - RNA, 19 nt, Homo sapiens
  misc_RNA (1)...(19): siRNA sense strand
agguaugagaagaugauca

SEQ ID NO: 2226225 - RNA, 19 nt, Homo sapiens
  misc_RNA (1)...(19): siRNA sense strand
acaacaagaucuacgccau

SEQ ID NO: 2226226 - RNA, 19 nt, Homo sapiens
  misc_RNA (1)...(19): siRNA sense strand
gcaccugcgaugacaguau

SEQ ID NO: 2226227 - RNA, 19 nt, Homo sapiens
  misc_RNA (1)...(19): siRNA sense strand
gcugagugccugggagauu

SEQ ID NO: 2226228 - RNA, 19 nt, Homo sapiens
  misc_RNA (1)...(19): siRNA sense strand
uacuaagggaugcgauaaa

SEQ ID NO: 2226229 - RNA, 19 nt, Homo sapiens
  misc_RNA (1)...(19): siRNA sense strand
acaugcugcuggaggugaa

SEQ ID NO: 2226230 - RNA, 19 nt, Homo sapiens
  misc_RNA (1)...(19): siRNA sense strand
guggaaaugcacaacaaga

SEQ ID NO: 2226231 - RNA, 19 nt, Homo sapiens
  misc_RNA (1)...(19): siRNA sense strand
uggaaaugcacaacaagau

SEQ ID NO: 2226232 - RNA, 19 nt, Homo sapiens
  misc_RNA (1)...(19): siRNA sense strand
acaaagcgauuuaaagcga

SEQ ID NO: 2226233 - RNA, 19 nt, Homo sapiens
  misc_RNA (1)...(19): siRNA sense strand
aacaaagguaugagaagau

SEQ ID NO: 2226234 - RNA, 19 nt, Homo sapiens
  misc_RNA (1)...(19): siRNA sense strand
cugaauagcaccugcgaug

SEQ ID NO: 2226235 - RNA, 19 nt, Homo sapiens
  misc_RNA (1)...(19): siRNA sense strand
cggaguggaaggagcagau

SEQ ID NO: 2226236 - RNA, 19 nt, Homo sapiens
  misc_RNA (1)...(19): siRNA sense strand
agacauccggacagaguuu

SEQ ID NO: 2226237 - RNA, 19 nt, Homo sapiens
  misc_RNA (1)...(19): siRNA sense strand
aaaagagaacgguggaaau

SEQ ID NO: 2226238 - RNA, 19 nt, Homo sapiens
  misc_RNA (1)...(19): siRNA sense strand
cgagggaaguuuaacacca

SEQ ID NO: 2226239 - RNA, 19 nt, Homo sapiens
  misc_RNA (1)...(19): siRNA sense strand
ggacacacuacgacagacu

SEQ ID NO: 2226240 - RNA, 19 nt, Homo sapiens
  misc_RNA (1)...(19): siRNA sense strand
gagaagauggucaguggca

SEQ ID NO: 2226241 - RNA, 19 nt, Homo sapiens
  misc_RNA (1)...(19): siRNA sense strand
agaguuugacagggagaua

SEQ ID NO: 2226242 - RNA, 19 nt, Homo sapiens
  misc_RNA (1)...(19): siRNA sense strand
cagccaucgaaaagaauaa

SEQ ID NO: 2226243 - RNA, 19 nt, Homo sapiens
  misc_RNA (1)...(19): siRNA sense strand
acgugguggcuguggucaa

SEQ ID NO: 2226244 - RNA, 19 nt, Homo sapiens
  misc_RNA (1)...(19): siRNA sense strand
uggaggagaugaagaacgu

SEQ ID NO: 2226245 - RNA, 19 nt, Homo sapiens
  misc_RNA (1)...(19): siRNA sense strand
ugggugaaaucguccgcaa

SEQ ID NO: 2226246 - RNA, 19 nt, Homo sapiens
  misc_RNA (1)...(19): siRNA sense strand
acaucguagcuguggugaa

SEQ ID NO: 2226247 - RNA, 19 nt, Homo sapiens
  misc_RNA (1)...(19): siRNA sense strand
ugaggaagcagacgcacaa

SEQ ID NO: 2226248 - RNA, 19 nt, Homo sapiens
  misc_RNA (1)...(19): siRNA sense strand
cuuuggagacgauggauca

SEQ ID NO: 2226249 - RNA, 19 nt, Homo sapiens
  misc_RNA (1)...(19): siRNA sense strand
cugaggaagcagacgcaca

SEQ ID NO: 2226250 - RNA, 19 nt, Homo sapiens
  misc_RNA (1)...(19): siRNA sense strand
gugaaaauccguaguggga

SEQ ID NO: 2226251 - RNA, 19 nt, Homo sapiens
  misc_RNA (1)...(19): siRNA sense strand
ugaaugugacugugggagu

SEQ ID NO: 2226252 - RNA, 19 nt, Homo sapiens
  misc_RNA (1)...(19): siRNA sense strand
ggacagaguuugacaggga

SEQ ID NO: 2226253 - RNA, 19 nt, Homo sapiens
  misc_RNA (1)...(19): siRNA sense strand
acaacaaugccgugguuaa

SEQ ID NO: 2226254 - RNA, 19 nt, Homo sapiens
  misc_RNA (1)...(19): siRNA sense strand
acauggaguccgagguuua

SEQ ID NO: 2226255 - RNA, 19 nt, Homo sapiens
  misc_RNA (1)...(19): siRNA sense strand
agaaguuaccugugggauu

SEQ ID NO: 2226256 - RNA, 19 nt, Homo sapiens
  misc_RNA (1)...(19): siRNA sense strand
gcuacauggaggagaugaa

SEQ ID NO: 2226257 - RNA, 19 nt, Homo sapiens
  misc_RNA (1)...(19): siRNA sense strand
cgguggaaaugcacaacaa

SEQ ID NO: 2226258 - RNA, 19 nt, Homo sapiens
  misc_RNA (1)...(19): siRNA sense strand
agaugaagaacguggagau

SEQ ID NO: 2226259 - RNA, 19 nt, Homo sapiens
  misc_RNA (1)...(19): siRNA sense strand
acauggaggagaugaagaa

SEQ ID NO: 2226260 - RNA, 19 nt, Homo sapiens
  misc_RNA (1)...(19): siRNA sense strand
cuaaaugcugggaaacaaa

SEQ ID NO: 2226261 - RNA, 19 nt, Homo sapiens
  misc_RNA (1)...(19): siRNA sense strand
agaucaaggacaagaaguu

SEQ ID NO: 2226262 - RNA, 19 nt, Homo sapiens
  misc_RNA (1)...(19): siRNA sense strand
uggucaaacugcuuaacaa

SEQ ID NO: 2226263 - RNA, 19 nt, Homo sapiens
  misc_RNA (1)...(19): siRNA sense strand
acaaaggguuuuaaggcaa

SEQ ID NO: 2226264 - RNA, 19 nt, Homo sapiens
  misc_RNA (1)...(19): siRNA sense strand
caacagacugcgugggcca

SEQ ID NO: 2226265 - RNA, 19 nt, Homo sapiens
  misc_RNA (1)...(19): siRNA sense strand
ccaaaauagaugaggccau

SEQ ID NO: 2226266 - RNA, 19 nt, Homo sapiens
  misc_RNA (1)...(19): siRNA sense strand
gaacgguggaaaugcacaa

SEQ ID NO: 2226267 - RNA, 19 nt, Homo sapiens
  misc_RNA (1)...(19): siRNA sense strand
ccugcuacauggaggagau

SEQ ID NO: 2226268 - RNA, 19 nt, Homo sapiens
  misc_RNA (1)...(19): siRNA sense strand
agguaugagaagaugauca

SEQ ID NO: 2226269 - RNA, 19 nt, Homo sapiens
  misc_RNA (1)...(19): siRNA sense strand
acaacaagaucuacgccau

SEQ ID NO: 2226270 - RNA, 19 nt, Homo sapiens
  misc_RNA (1)...(19): siRNA sense strand
gcaccugcgaugacaguau

SEQ ID NO: 2226271 - RNA, 19 nt, Homo sapiens
  misc_RNA (1)...(19): siRNA sense strand
gcugagugccugggagauu

SEQ ID NO: 2226272 - RNA, 19 nt, Homo sapiens
  misc_RNA (1)...(19): siRNA sense strand
uacuaagggaugcgauaaa

SEQ ID NO: 2226273 - RNA, 19 nt, Homo sapiens
  misc_RNA (1)...(19): siRNA sense strand
acaugcugcuggaggugaa

SEQ ID NO: 2226274 - RNA, 19 nt, Homo sapiens
  misc_RNA (1)...(19): siRNA sense strand
guggaaaugcacaacaaga

SEQ ID NO: 2226275 - RNA, 19 nt, Homo sapiens
  misc_RNA (1)...(19): siRNA sense strand
uggaaaugcacaacaagau

SEQ ID NO: 2226276 - RNA, 19 nt, Homo sapiens
  misc_RNA (1)...(19): siRNA sense strand
acaaagcgauuuaaagcga

SEQ ID NO: 2226277 - RNA, 19 nt, Homo sapiens
  misc_RNA (1)...(19): siRNA sense strand
aacaaagguaugagaagau

SEQ ID NO: 2226278 - RNA, 19 nt, Homo sapiens
  misc_RNA (1)...(19): siRNA sense strand
cugaauagcaccugcgaug

SEQ ID NO: 2226279 - RNA, 19 nt, Homo sapiens
  misc_RNA (1)...(19): siRNA sense strand
cggaguggaaggagcagau

SEQ ID NO: 2226280 - RNA, 19 nt, Homo sapiens
  misc_RNA (1)...(19): siRNA sense strand
agacauccggacagaguuu

SEQ ID NO: 2226281 - RNA, 19 nt, Homo sapiens
  misc_RNA (1)...(19): siRNA sense strand
aaaagagaacgguggaaau

SEQ ID NO: 2226282 - RNA, 19 nt, Homo sapiens
  misc_RNA (1)...(19): siRNA sense strand
cgagggaaguuuaacacca

SEQ ID NO: 2226283 - RNA, 19 nt, Homo sapiens
  misc_RNA (1)...(19): siRNA sense strand
ggacacacuacgacagacu

SEQ ID NO: 2226284 - RNA, 19 nt, Homo sapiens
  misc_RNA (1)...(19): siRNA sense strand
gagaagauggucaguggca

SEQ ID NO: 2226285 - RNA, 19 nt, Homo sapiens
  misc_RNA (1)...(19): siRNA sense strand
agaguuugacagggagaua

SEQ ID NO: 2226286 - RNA, 19 nt, Homo sapiens
  misc_RNA (1)...(19): siRNA sense strand
cagccaucgaaaagaauaa

SEQ ID NO: 2226287 - RNA, 19 nt, Homo sapiens
  misc_RNA (1)...(19): siRNA sense strand
acgugguggcuguggucaa

SEQ ID NO: 2226288 - RNA, 19 nt, Homo sapiens
  misc_RNA (1)...(19): siRNA sense strand
uggaggagaugaagaacgu

SEQ ID NO: 2226289 - RNA, 19 nt, Homo sapiens
  misc_RNA (1)...(19): siRNA sense strand
ugggugaaaucguccgcaa

SEQ ID NO: 2226290 - RNA, 19 nt, Homo sapiens
  misc_RNA (1)...(19): siRNA sense strand
acaucguagcuguggugaa

SEQ ID NO: 2226291 - RNA, 19 nt, Homo sapiens
  misc_RNA (1)...(19): siRNA sense strand
ugaggaagcagacgcacaa

SEQ ID NO: 2226292 - RNA, 19 nt, Homo sapiens
  misc_RNA (1)...(19): siRNA sense strand
cuuuggagacgauggauca

SEQ ID NO: 2226293 - RNA, 19 nt, Homo sapiens
  misc_RNA (1)...(19): siRNA sense strand
cugaggaagcagacgcaca

SEQ ID NO: 2226294 - RNA, 19 nt, Homo sapiens
  misc_RNA (1)...(19): siRNA sense strand
gugaaaauccguaguggga

SEQ ID NO: 2226295 - RNA, 19 nt, Homo sapiens
  misc_RNA (1)...(19): siRNA sense strand
ugaaugugacugugggagu

SEQ ID NO: 2226296 - RNA, 19 nt, Homo sapiens
  misc_RNA (1)...(19): siRNA sense strand
ggacagaguuugacaggga

SEQ ID NO: 2226297 - RNA, 19 nt, Homo sapiens
  misc_RNA (1)...(19): siRNA sense strand
acaacaaugccgugguuaa

SEQ ID NO: 2226298 - RNA, 19 nt, Homo sapiens
  misc_RNA (1)...(19): siRNA sense strand
acauggaguccgagguuua

SEQ ID NO: 2226299 - RNA, 19 nt, Homo sapiens
  misc_RNA (1)...(19): siRNA sense strand
agaaguuaccugugggauu

SEQ ID NO: 2226300 - RNA, 19 nt, Homo sapiens
  misc_RNA (1)...(19): siRNA sense strand
gcuacauggaggagaugaa

SEQ ID NO: 2226301 - RNA, 19 nt, Homo sapiens
  misc_RNA (1)...(19): siRNA sense strand
cgguggaaaugcacaacaa

SEQ ID NO: 2226302 - RNA, 19 nt, Homo sapiens
  misc_RNA (1)...(19): siRNA sense strand
agaugaagaacguggagau

SEQ ID NO: 2226303 - RNA, 19 nt, Homo sapiens
  misc_RNA (1)...(19): siRNA sense strand
acauggaggagaugaagaa

SEQ ID NO: 2226304 - RNA, 19 nt, Homo sapiens
  misc_RNA (1)...(19): siRNA sense strand
cuaaaugcugggaaacaaa

SEQ ID NO: 2226305 - RNA, 19 nt, Homo sapiens
  misc_RNA (1)...(19): siRNA sense strand
agaucaaggacaagaaguu

SEQ ID NO: 2226306 - RNA, 19 nt, Homo sapiens
  misc_RNA (1)...(19): siRNA sense strand
uggucaaacugcuuaacaa

SEQ ID NO: 2226307 - RNA, 19 nt, Homo sapiens
  misc_RNA (1)...(19): siRNA sense strand
acaaaggguuuuaaggcaa

SEQ ID NO: 2226308 - RNA, 19 nt, Homo sapiens
  misc_RNA (1)...(19): siRNA sense strand
caacagacugcgugggcca

SEQ ID NO: 2226309 - RNA, 19 nt, Homo sapiens
  misc_RNA (1)...(19): siRNA sense strand
ccaaaauagaugaggccau

SEQ ID NO: 2226310 - RNA, 19 nt, Homo sapiens
  misc_RNA (1)...(19): siRNA sense strand
gaacgguggaaaugcacaa

SEQ ID NO: 2226311 - RNA, 19 nt, Homo sapiens
  misc_RNA (1)...(19): siRNA sense strand
ccugcuacauggaggagau

SEQ ID NO: 2226312 - RNA, 19 nt, Homo sapiens
  misc_RNA (1)...(19): siRNA sense strand
agguaugagaagaugauca

SEQ ID NO: 2226313 - RNA, 19 nt, Homo sapiens
  misc_RNA (1)...(19): siRNA sense strand
acaacaagaucuacgccau

SEQ ID NO: 2226314 - RNA, 19 nt, Homo sapiens
  misc_RNA (1)...(19): siRNA sense strand
gcaccugcgaugacaguau

SEQ ID NO: 2226315 - RNA, 19 nt, Homo sapiens
  misc_RNA (1)...(19): siRNA sense strand
gcugagugccugggagauu

SEQ ID NO: 2226316 - RNA, 19 nt, Homo sapiens
  misc_RNA (1)...(19): siRNA sense strand
uacuaagggaugcgauaaa

SEQ ID NO: 2226317 - RNA, 19 nt, Homo sapiens
  misc_RNA (1)...(19): siRNA sense strand
acaugcugcuggaggugaa

SEQ ID NO: 2226318 - RNA, 19 nt, Homo sapiens
  misc_RNA (1)...(19): siRNA sense strand
guggaaaugcacaacaaga

SEQ ID NO: 2226319 - RNA, 19 nt, Homo sapiens
  misc_RNA (1)...(19): siRNA sense strand
uggaaaugcacaacaagau

SEQ ID NO: 2226320 - RNA, 19 nt, Homo sapiens
  misc_RNA (1)...(19): siRNA sense strand
acaaagcgauuuaaagcga

SEQ ID NO: 2226321 - RNA, 19 nt, Homo sapiens
  misc_RNA (1)...(19): siRNA sense strand
aacaaagguaugagaagau

SEQ ID NO: 2226322 - RNA, 19 nt, Homo sapiens
  misc_RNA (1)...(19): siRNA sense strand
cugaauagcaccugcgaug

SEQ ID NO: 2226323 - RNA, 19 nt, Homo sapiens
  misc_RNA (1)...(19): siRNA sense strand
cggaguggaaggagcagau

SEQ ID NO: 2226324 - RNA, 19 nt, Homo sapiens
  misc_RNA (1)...(19): siRNA sense strand
agacauccggacagaguuu

SEQ ID NO: 2226325 - RNA, 19 nt, Homo sapiens
  misc_RNA (1)...(19): siRNA sense strand
aaaagagaacgguggaaau

SEQ ID NO: 2226326 - RNA, 19 nt, Homo sapiens
  misc_RNA (1)...(19): siRNA sense strand
cgagggaaguuuaacacca

SEQ ID NO: 2226327 - RNA, 19 nt, Homo sapiens
  misc_RNA (1)...(19): siRNA sense strand
ggacacacuacgacagacu

SEQ ID NO: 2226328 - RNA, 19 nt, Homo sapiens
  misc_RNA (1)...(19): siRNA sense strand
gagaagauggucaguggca

SEQ ID NO: 2226329 - RNA, 19 nt, Homo sapiens
  misc_RNA (1)...(19): siRNA sense strand
agaguuugacagggagaua

SEQ ID NO: 2226330 - RNA, 19 nt, Homo sapiens
  misc_RNA (1)...(19): siRNA sense strand
cagccaucgaaaagaauaa

SEQ ID NO: 2226331 - RNA, 19 nt, Homo sapiens
  misc_RNA (1)...(19): siRNA sense strand
acgugguggcuguggucaa

SEQ ID NO: 2226332 - RNA, 19 nt, Homo sapiens
  misc_RNA (1)...(19): siRNA sense strand
uggaggagaugaagaacgu

SEQ ID NO: 2226333 - RNA, 19 nt, Homo sapiens
  misc_RNA (1)...(19): siRNA sense strand
ugggugaaaucguccgcaa

SEQ ID NO: 2226334 - RNA, 19 nt, Homo sapiens
  misc_RNA (1)...(19): siRNA sense strand
acaucguagcuguggugaa

SEQ ID NO: 2226335 - RNA, 19 nt, Homo sapiens
  misc_RNA (1)...(19): siRNA sense strand
ugaggaagcagacgcacaa

SEQ ID NO: 2226336 - RNA, 19 nt, Homo sapiens
  misc_RNA (1)...(19): siRNA sense strand
cuuuggagacgauggauca

SEQ ID NO: 2226337 - RNA, 19 nt, Homo sapiens
  misc_RNA (1)...(19): siRNA sense strand
cugaggaagcagacgcaca

SEQ ID NO: 2226338 - RNA, 19 nt, Homo sapiens
  misc_RNA (1)...(19): siRNA sense strand
gugaaaauccguaguggga

SEQ ID NO: 2226339 - RNA, 19 nt, Homo sapiens
  misc_RNA (1)...(19): siRNA sense strand
ugaaugugacugugggagu

SEQ ID NO: 2226340 - RNA, 19 nt, Homo sapiens
  misc_RNA (1)...(19): siRNA sense strand
cggacaaguacauggauac

SEQ ID NO: 2226341 - RNA, 19 nt, Homo sapiens
  misc_RNA (1)...(19): siRNA sense strand
uaaaagaacuugaacggga

SEQ ID NO: 2226342 - RNA, 19 nt, Homo sapiens
  misc_RNA (1)...(19): siRNA sense strand
acugaaaaccacuaguuaa

SEQ ID NO: 2226343 - RNA, 19 nt, Homo sapiens
  misc_RNA (1)...(19): siRNA sense strand
aaaagaacuugaacgggaa

SEQ ID NO: 2226344 - RNA, 19 nt, Homo sapiens
  misc_RNA (1)...(19): siRNA sense strand
gagugaaggacaagaaaau

SEQ ID NO: 2226345 - RNA, 19 nt, Homo sapiens
  misc_RNA (1)...(19): siRNA sense strand
accgaagagugaaggacaa

SEQ ID NO: 2226346 - RNA, 19 nt, Homo sapiens
  misc_RNA (1)...(19): siRNA sense strand
gcaccaaggaccagccaca

SEQ ID NO: 2226347 - RNA, 19 nt, Homo sapiens
  misc_RNA (1)...(19): siRNA sense strand
gcucuaaaucagccggaca

SEQ ID NO: 2226348 - RNA, 19 nt, Homo sapiens
  misc_RNA (1)...(19): siRNA sense strand
cgaaccuaucugagagaca

SEQ ID NO: 2226349 - RNA, 19 nt, Homo sapiens
  misc_RNA (1)...(19): siRNA sense strand
agcuuaaagaacuggagaa

SEQ ID NO: 2226350 - RNA, 19 nt, Homo sapiens
  misc_RNA (1)...(19): siRNA sense strand
gcuuaaagaacuggagaac

SEQ ID NO: 2226351 - RNA, 19 nt, Homo sapiens
  misc_RNA (1)...(19): siRNA sense strand
gcgugggcuuacagcagaa

SEQ ID NO: 2226352 - RNA, 19 nt, Homo sapiens
  misc_RNA (1)...(19): siRNA sense strand
gggaggaagaagagagugc

SEQ ID NO: 2226353 - RNA, 19 nt, Homo sapiens
  misc_RNA (1)...(19): siRNA sense strand
gaggcuuucccguggagaa

SEQ ID NO: 2226354 - RNA, 19 nt, Homo sapiens
  misc_RNA (1)...(19): siRNA sense strand
cuggcuaacggguggaaca

SEQ ID NO: 2226355 - RNA, 19 nt, Homo sapiens
  misc_RNA (1)...(19): siRNA sense strand
cugagagacaagugaccau

SEQ ID NO: 2226356 - RNA, 19 nt, Homo sapiens
  misc_RNA (1)...(19): siRNA sense strand
acucagagguguaaggaca

SEQ ID NO: 2226357 - RNA, 19 nt, Homo sapiens
  misc_RNA (1)...(19): siRNA sense strand
gcggaagguaugaagggaa

SEQ ID NO: 2226358 - RNA, 19 nt, Homo sapiens
  misc_RNA (1)...(19): siRNA sense strand
ggagugaaacugcggguga

SEQ ID NO: 2226359 - RNA, 19 nt, Homo sapiens
  misc_RNA (1)...(19): siRNA sense strand
ggguguacuacgaguccaa

SEQ ID NO: 2226360 - RNA, 19 nt, Homo sapiens
  misc_RNA (1)...(19): siRNA sense strand
cggaagguaugaagggaag

SEQ ID NO: 2226361 - RNA, 19 nt, Homo sapiens
  misc_RNA (1)...(19): siRNA sense strand
cggugaaagcagagaacuc

SEQ ID NO: 2226362 - RNA, 19 nt, Homo sapiens
  misc_RNA (1)...(19): siRNA sense strand
aggcgauggaauugggaaa

SEQ ID NO: 2226363 - RNA, 19 nt, Homo sapiens
  misc_RNA (1)...(19): siRNA sense strand
uggcgaagugcgugagauu

SEQ ID NO: 2226364 - RNA, 19 nt, Homo sapiens
  misc_RNA (1)...(19): siRNA sense strand
ccacagagaucgagcggac

SEQ ID NO: 2226365 - RNA, 19 nt, Homo sapiens
  misc_RNA (1)...(19): siRNA sense strand
gaugaaauccagagccuca

SEQ ID NO: 2226366 - RNA, 19 nt, Homo sapiens
  misc_RNA (1)...(19): siRNA sense strand
aggcccugcaagaggaaua

SEQ ID NO: 2226367 - RNA, 19 nt, Homo sapiens
  misc_RNA (1)...(19): siRNA sense strand
cauauggaaucaaggcaga

SEQ ID NO: 2226368 - RNA, 19 nt, Homo sapiens
  misc_RNA (1)...(19): siRNA sense strand
acuugcaggcuuagaaauu

SEQ ID NO: 2226369 - RNA, 19 nt, Homo sapiens
  misc_RNA (1)...(19): siRNA sense strand
acuacagggaggaguguga

SEQ ID NO: 2226370 - RNA, 19 nt, Homo sapiens
  misc_RNA (1)...(19): siRNA sense strand
ggccauugccacagagauc

SEQ ID NO: 2226371 - RNA, 19 nt, Homo sapiens
  misc_RNA (1)...(19): siRNA sense strand
acaucuacgagcauauuaa

SEQ ID NO: 2226372 - RNA, 19 nt, Homo sapiens
  misc_RNA (1)...(19): siRNA sense strand
ucaagaugacacagcuaau

SEQ ID NO: 2226373 - RNA, 19 nt, Homo sapiens
  misc_RNA (1)...(19): siRNA sense strand
aaagagacaucauggguau

SEQ ID NO: 2226374 - RNA, 19 nt, Homo sapiens
  misc_RNA (1)...(19): siRNA sense strand
caucauggguauaaaagaa

SEQ ID NO: 2226375 - RNA, 19 nt, Homo sapiens
  misc_RNA (1)...(19): siRNA sense strand
caaagagacaucaugggua

SEQ ID NO: 2226376 - RNA, 19 nt, Homo sapiens
  misc_RNA (1)...(19): siRNA sense strand
auucacaugcaaagagaca

SEQ ID NO: 2226377 - RNA, 19 nt, Homo sapiens
  misc_RNA (1)...(19): siRNA sense strand
gauccaauacauauggcaa

SEQ ID NO: 2226378 - RNA, 19 nt, Homo sapiens
  misc_RNA (1)...(19): siRNA sense strand
uggaaaagcggaaaugcaa

SEQ ID NO: 2226379 - RNA, 19 nt, Homo sapiens
  misc_RNA (1)...(19): siRNA sense strand
gggaacaaccggaaggugu

SEQ ID NO: 2226380 - RNA, 19 nt, Homo sapiens
  misc_RNA (1)...(19): siRNA sense strand
ccacagucaccuauggcaa

SEQ ID NO: 2226381 - RNA, 19 nt, Homo sapiens
  misc_RNA (1)...(19): siRNA sense strand
gggcaagaaccuuacccua

SEQ ID NO: 2226382 - RNA, 19 nt, Homo sapiens
  misc_RNA (1)...(19): siRNA sense strand
agguguaugaacugagcaa

SEQ ID NO: 2226383 - RNA, 19 nt, Homo sapiens
  misc_RNA (1)...(19): siRNA sense strand
ugaacugagcaaugugcaa

SEQ ID NO: 2226384 - RNA, 19 nt, Homo sapiens
  misc_RNA (1)...(19): siRNA sense strand
acccauugcccgagcucaa

SEQ ID NO: 2226385 - RNA, 19 nt, Homo sapiens
  misc_RNA (1)...(19): siRNA sense strand
gagagggauuguccgggaa

SEQ ID NO: 2226386 - RNA, 19 nt, Homo sapiens
  misc_RNA (1)...(19): siRNA sense strand
guguaugaacugagcaaug

SEQ ID NO: 2226387 - RNA, 19 nt, Homo sapiens
  misc_RNA (1)...(19): siRNA sense strand
cagugaagugugaggccca

SEQ ID NO: 2226388 - RNA, 19 nt, Homo sapiens
  misc_RNA (1)...(19): siRNA sense strand
ugaccaugucggugggaaa

SEQ ID NO: 2226389 - RNA, 19 nt, Homo sapiens
  misc_RNA (1)...(19): siRNA sense strand
gggauaagcuggugagguc

SEQ ID NO: 2226390 - RNA, 19 nt, Homo sapiens
  misc_RNA (1)...(19): siRNA sense strand
caaacagagcacugagcaa

SEQ ID NO: 2226391 - RNA, 19 nt, Homo sapiens
  misc_RNA (1)...(19): siRNA sense strand
gauccgaaacgcaggccaa

SEQ ID NO: 2226392 - RNA, 19 nt, Homo sapiens
  misc_RNA (1)...(19): siRNA sense strand
ggacaucaggcaacgggaa

SEQ ID NO: 2226393 - RNA, 19 nt, Homo sapiens
  misc_RNA (1)...(19): siRNA sense strand
aguuguaucccuuggagaa

SEQ ID NO: 2226394 - RNA, 19 nt, Homo sapiens
  misc_RNA (1)...(19): siRNA sense strand
agucuuucacccugggaua

SEQ ID NO: 2226395 - RNA, 19 nt, Homo sapiens
  misc_RNA (1)...(19): siRNA sense strand
cuguggacuuucagcggaa

SEQ ID NO: 2226396 - RNA, 19 nt, Homo sapiens
  misc_RNA (1)...(19): siRNA sense strand
acuucaaggagaauggcua

SEQ ID NO: 2226397 - RNA, 19 nt, Homo sapiens
  misc_RNA (1)...(19): siRNA sense strand
ccucugagaaguaugaaaa

SEQ ID NO: 2226398 - RNA, 19 nt, Homo sapiens
  misc_RNA (1)...(19): siRNA sense strand
cuuccuggccguuggguau

SEQ ID NO: 2226399 - RNA, 19 nt, Homo sapiens
  misc_RNA (1)...(19): siRNA sense strand
uaagacaugucgagggcca

SEQ ID NO: 2226400 - RNA, 19 nt, Homo sapiens
  misc_RNA (1)...(19): siRNA sense strand
cuucaaggagaauggcuau

SEQ ID NO: 2226401 - RNA, 19 nt, Homo sapiens
  misc_RNA (1)...(19): siRNA sense strand
ugaccaugucggugggaaa

SEQ ID NO: 2226402 - RNA, 19 nt, Homo sapiens
  misc_RNA (1)...(19): siRNA sense strand
gggauaagcuggugagguc

SEQ ID NO: 2226403 - RNA, 19 nt, Homo sapiens
  misc_RNA (1)...(19): siRNA sense strand
caaacagagcacugagcaa

SEQ ID NO: 2226404 - RNA, 19 nt, Homo sapiens
  misc_RNA (1)...(19): siRNA sense strand
gauccgaaacgcaggccaa

SEQ ID NO: 2226405 - RNA, 19 nt, Homo sapiens
  misc_RNA (1)...(19): siRNA sense strand
ggacaucaggcaacgggaa

SEQ ID NO: 2226406 - RNA, 19 nt, Homo sapiens
  misc_RNA (1)...(19): siRNA sense strand
aguuguaucccuuggagaa

SEQ ID NO: 2226407 - RNA, 19 nt, Homo sapiens
  misc_RNA (1)...(19): siRNA sense strand
agucuuucacccugggaua

SEQ ID NO: 2226408 - RNA, 19 nt, Homo sapiens
  misc_RNA (1)...(19): siRNA sense strand
cuguggacuuucagcggaa

SEQ ID NO: 2226409 - RNA, 19 nt, Homo sapiens
  misc_RNA (1)...(19): siRNA sense strand
acuucaaggagaauggcua

SEQ ID NO: 2226410 - RNA, 19 nt, Homo sapiens
  misc_RNA (1)...(19): siRNA sense strand
ccucugagaaguaugaaaa

SEQ ID NO: 2226411 - RNA, 19 nt, Homo sapiens
  misc_RNA (1)...(19): siRNA sense strand
cuuccuggccguuggguau

SEQ ID NO: 2226412 - RNA, 19 nt, Homo sapiens
  misc_RNA (1)...(19): siRNA sense strand
uaagacaugucgagggcca

SEQ ID NO: 2226413 - RNA, 19 nt, Homo sapiens
  misc_RNA (1)...(19): siRNA sense strand
cuucaaggagaauggcuau

SEQ ID NO: 2226414 - RNA, 19 nt, Homo sapiens
  misc_RNA (1)...(19): siRNA sense strand
ccaugguggugaaggucau

SEQ ID NO: 2226415 - RNA, 19 nt, Homo sapiens
  misc_RNA (1)...(19): siRNA sense strand
acgugcagcuguugcgcaa

SEQ ID NO: 2226416 - RNA, 19 nt, Homo sapiens
  misc_RNA (1)...(19): siRNA sense strand
aggacaagcagcagguguu

SEQ ID NO: 2226417 - RNA, 19 nt, Homo sapiens
  misc_RNA (1)...(19): siRNA sense strand
cggccaugguggugaaggu

SEQ ID NO: 2226418 - RNA, 19 nt, Homo sapiens
  misc_RNA (1)...(19): siRNA sense strand
gguuugagcugaugggcag

SEQ ID NO: 2226419 - RNA, 19 nt, Homo sapiens
  misc_RNA (1)...(19): siRNA sense strand
guguuugaguggaaggacu

SEQ ID NO: 2226420 - RNA, 19 nt, Homo sapiens
  misc_RNA (1)...(19): siRNA sense strand
aggagaaggucgucgcgca

SEQ ID NO: 2226421 - RNA, 19 nt, Homo sapiens
  misc_RNA (1)...(19): siRNA sense strand
cggaugaacacgugggcuc

SEQ ID NO: 2226422 - RNA, 19 nt, Homo sapiens
  misc_RNA (1)...(19): siRNA sense strand
agcagguguuugaguggaa

SEQ ID NO: 2226423 - RNA, 19 nt, Homo sapiens
  misc_RNA (1)...(19): siRNA sense strand
uggucuacgucacgcgcua

SEQ ID NO: 2226424 - RNA, 19 nt, Homo sapiens
  misc_RNA (1)...(19): siRNA sense strand
agaaaggaggagaagcaaa

SEQ ID NO: 2226425 - RNA, 19 nt, Homo sapiens
  misc_RNA (1)...(19): siRNA sense strand
cccaaauaauaaaggugaa

SEQ ID NO: 2226426 - RNA, 19 nt, Homo sapiens
  misc_RNA (1)...(19): siRNA sense strand
ccgaagacaauccaggaaa

SEQ ID NO: 2226427 - RNA, 19 nt, Homo sapiens
  misc_RNA (1)...(19): siRNA sense strand
acaauguguaugugagaau

SEQ ID NO: 2226428 - RNA, 19 nt, Homo sapiens
  misc_RNA (1)...(19): siRNA sense strand
cuguaugccgagauggaaa

SEQ ID NO: 2226429 - RNA, 19 nt, Homo sapiens
  misc_RNA (1)...(19): siRNA sense strand
cuaaacuggauaucagaaa

SEQ ID NO: 2226430 - RNA, 19 nt, Homo sapiens
  misc_RNA (1)...(19): siRNA sense strand
cagaaggacaagagcucau

SEQ ID NO: 2226431 - RNA, 19 nt, Homo sapiens
  misc_RNA (1)...(19): siRNA sense strand
uguggaugauagcgguaaa

SEQ ID NO: 2226432 - RNA, 19 nt, Homo sapiens
  misc_RNA (1)...(19): siRNA sense strand
agaugauugugacgagauu

SEQ ID NO: 2226433 - RNA, 19 nt, Homo sapiens
  misc_RNA (1)...(19): siRNA sense strand
agguaaagaacuauggugu

SEQ ID NO: 2226434 - RNA, 19 nt, Homo sapiens
  misc_RNA (1)...(19): siRNA sense strand
auaucagaaaggaggagaa

SEQ ID NO: 2226435 - RNA, 19 nt, Homo sapiens
  misc_RNA (1)...(19): siRNA sense strand
aguggugacuacugaagaa

SEQ ID NO: 2226436 - RNA, 19 nt, Homo sapiens
  misc_RNA (1)...(19): siRNA sense strand
acuccaauagagagagaga

SEQ ID NO: 2226437 - RNA, 19 nt, Homo sapiens
  misc_RNA (1)...(19): siRNA sense strand
ggugacuacugaagaaaau

SEQ ID NO: 2226438 - RNA, 19 nt, Homo sapiens
  misc_RNA (1)...(19): siRNA sense strand
cagaaaugguuuugauacu

SEQ ID NO: 2226439 - RNA, 19 nt, Homo sapiens
  misc_RNA (1)...(19): siRNA sense strand
acgagcaggaagucgauua

SEQ ID NO: 2226440 - RNA, 19 nt, Homo sapiens
  misc_RNA (1)...(19): siRNA sense strand
gugacgagauucagugcca

SEQ ID NO: 2226441 - RNA, 19 nt, Homo sapiens
  misc_RNA (1)...(19): siRNA sense strand
gcaugcauaccgaagacaa

SEQ ID NO: 2226442 - RNA, 19 nt, Homo sapiens
  misc_RNA (1)...(19): siRNA sense strand
uggaucuacuuguggauga

SEQ ID NO: 2226443 - RNA, 19 nt, Homo sapiens
  misc_RNA (1)...(19): siRNA sense strand
uuauagaccaacagaagau

SEQ ID NO: 2226444 - RNA, 19 nt, Homo sapiens
  misc_RNA (1)...(19): siRNA sense strand
cgauuaugaucccgaaacu

SEQ ID NO: 2226445 - RNA, 19 nt, Homo sapiens
  misc_RNA (1)...(19): siRNA sense strand
uccaauagagagagagagu

SEQ ID NO: 2226446 - RNA, 19 nt, Homo sapiens
  misc_RNA (1)...(19): siRNA sense strand
auaaaauacucacgcagaa

SEQ ID NO: 2226447 - RNA, 19 nt, Homo sapiens
  misc_RNA (1)...(19): siRNA sense strand
acucguaucacuccagaaa

SEQ ID NO: 2226448 - RNA, 19 nt, Homo sapiens
  misc_RNA (1)...(19): siRNA sense strand
cgguaaagaguccuugauu

SEQ ID NO: 2226449 - RNA, 19 nt, Homo sapiens
  misc_RNA (1)...(19): siRNA sense strand
ucuuugggucagaguuaaa

SEQ ID NO: 2226450 - RNA, 19 nt, Homo sapiens
  misc_RNA (1)...(19): siRNA sense strand
gagacgagcaggaagucga

SEQ ID NO: 2226451 - RNA, 19 nt, Homo sapiens
  misc_RNA (1)...(19): siRNA sense strand
ggaagaugauugugacgag

SEQ ID NO: 2226452 - RNA, 19 nt, Homo sapiens
  misc_RNA (1)...(19): siRNA sense strand
caugcauaccgaagacaau

SEQ ID NO: 2226453 - RNA, 19 nt, Homo sapiens
  misc_RNA (1)...(19): siRNA sense strand
aagaaucugccuaugcaaa

SEQ ID NO: 2226454 - RNA, 19 nt, Homo sapiens
  misc_RNA (1)...(19): siRNA sense strand
cagcagaaggagucuuaca

SEQ ID NO: 2226455 - RNA, 19 nt, Homo sapiens
  misc_RNA (1)...(19): siRNA sense strand
agaacagaaagaaaggaaa

SEQ ID NO: 2226456 - RNA, 19 nt, Homo sapiens
  misc_RNA (1)...(19): siRNA sense strand
cauucaaagccauggccua

SEQ ID NO: 2226457 - RNA, 19 nt, Homo sapiens
  misc_RNA (1)...(19): siRNA sense strand
ugugaaugcaagagagguu

SEQ ID NO: 2226458 - RNA, 19 nt, Homo sapiens
  misc_RNA (1)...(19): siRNA sense strand
gcaaaaugacccacgggaa

SEQ ID NO: 2226459 - RNA, 19 nt, Homo sapiens
  misc_RNA (1)...(19): siRNA sense strand
caagagagguuuccgcaga

SEQ ID NO: 2226460 - RNA, 19 nt, Homo sapiens
  misc_RNA (1)...(19): siRNA sense strand
cggagacagaggaagagua

SEQ ID NO: 2226461 - RNA, 19 nt, Homo sapiens
  misc_RNA (1)...(19): siRNA sense strand
caaccaaugucaaugcaca

SEQ ID NO: 2226462 - RNA, 19 nt, Homo sapiens
  misc_RNA (1)...(19): siRNA sense strand
augaagccacagagagaau

SEQ ID NO: 2226463 - RNA, 19 nt, Homo sapiens
  misc_RNA (1)...(19): siRNA sense strand
aucagugcguccagggaua

SEQ ID NO: 2226464 - RNA, 19 nt, Homo sapiens
  misc_RNA (1)...(19): siRNA sense strand
aggaaggaaccauguugaa

SEQ ID NO: 2226465 - RNA, 19 nt, Homo sapiens
  misc_RNA (1)...(19): siRNA sense strand
cagucaguuuccaggugaa

SEQ ID NO: 2226466 - RNA, 19 nt, Homo sapiens
  misc_RNA (1)...(19): siRNA sense strand
gugaaauggagaccaguca

SEQ ID NO: 2226467 - RNA, 19 nt, Homo sapiens
  misc_RNA (1)...(19): siRNA sense strand
acaggaaacucuagccacu

SEQ ID NO: 2226468 - RNA, 19 nt, Homo sapiens
  misc_RNA (1)...(19): siRNA sense strand
ccacagaaaugcaaagucc

SEQ ID NO: 2226469 - RNA, 19 nt, Homo sapiens
  misc_RNA (1)...(19): siRNA sense strand
caaugcagccaguggacca

SEQ ID NO: 2226470 - RNA, 19 nt, Homo sapiens
  misc_RNA (1)...(19): siRNA sense strand
cauuggaagccgugguuau

SEQ ID NO: 2226471 - RNA, 19 nt, Homo sapiens
  misc_RNA (1)...(19): siRNA sense strand
cgacaauucugacgcccaa

SEQ ID NO: 2226472 - RNA, 19 nt, Homo sapiens
  misc_RNA (1)...(19): siRNA sense strand
ccugaagaaccuagaggau

SEQ ID NO: 2226473 - RNA, 19 nt, Homo sapiens
  misc_RNA (1)...(19): siRNA sense strand
augaauugcacuuggaaca

SEQ ID NO: 2226474 - RNA, 19 nt, Homo sapiens
  misc_RNA (1)...(19): siRNA sense strand
ugguacaagaacucggaua

SEQ ID NO: 2226475 - RNA, 19 nt, Homo sapiens
  misc_RNA (1)...(19): siRNA sense strand
acaacagauucuugaacca

SEQ ID NO: 2226476 - RNA, 19 nt, Homo sapiens
  misc_RNA (1)...(19): siRNA sense strand
cauuauugguacaagaacu

SEQ ID NO: 2226477 - RNA, 19 nt, Homo sapiens
  misc_RNA (1)...(19): siRNA sense strand
gcuccaugggauugauuau

SEQ ID NO: 2226478 - RNA, 19 nt, Homo sapiens
  misc_RNA (1)...(19): siRNA sense strand
ccuaaagccugaaaccuga

SEQ ID NO: 2226479 - RNA, 19 nt, Homo sapiens
  misc_RNA (1)...(19): siRNA sense strand
cauaaguucuccuugccua

SEQ ID NO: 2226480 - RNA, 19 nt, Homo sapiens
  misc_RNA (1)...(19): siRNA sense strand
cugaauaccacgggaacuu

SEQ ID NO: 2226481 - RNA, 19 nt, Homo sapiens
  misc_RNA (1)...(19): siRNA sense strand
gauaaaguccagaagugca

SEQ ID NO: 2226482 - RNA, 19 nt, Homo sapiens
  misc_RNA (1)...(19): siRNA sense strand
agguagaggacaugccaaa

SEQ ID NO: 2226483 - RNA, 19 nt, Homo sapiens
  misc_RNA (1)...(19): siRNA sense strand
aagaaagaauggugggauc

SEQ ID NO: 2226484 - RNA, 19 nt, Homo sapiens
  misc_RNA (1)...(19): siRNA sense strand
aggaggaggaggagguaga

SEQ ID NO: 2226485 - RNA, 19 nt, Homo sapiens
  misc_RNA (1)...(19): siRNA sense strand
cguguaucccugagaacaa

SEQ ID NO: 2226486 - RNA, 19 nt, Homo sapiens
  misc_RNA (1)...(19): siRNA sense strand
acaugaaggucuugcagga

SEQ ID NO: 2226487 - RNA, 19 nt, Homo sapiens
  misc_RNA (1)...(19): siRNA sense strand
cugacaauuaccuguauaa

SEQ ID NO: 2226488 - RNA, 19 nt, Homo sapiens
  misc_RNA (1)...(19): siRNA sense strand
gcucagugcuauaacacca

SEQ ID NO: 2226489 - RNA, 19 nt, Homo sapiens
  misc_RNA (1)...(19): siRNA sense strand
cagccugggcaguggcauu

SEQ ID NO: 2226490 - RNA, 19 nt, Homo sapiens
  misc_RNA (1)...(19): siRNA sense strand
cuucaagcccagcgagcau

SEQ ID NO: 2226491 - RNA, 19 nt, Homo sapiens
  misc_RNA (1)...(19): siRNA sense strand
ccgucugccuguugugcua

SEQ ID NO: 2226492 - RNA, 19 nt, Homo sapiens
  misc_RNA (1)...(19): siRNA sense strand
cgguggagugugaggagga

SEQ ID NO: 2226493 - RNA, 19 nt, Homo sapiens
  misc_RNA (1)...(19): siRNA sense strand
aggagguagaggaagaaaa

SEQ ID NO: 2226494 - RNA, 19 nt, Homo sapiens
  misc_RNA (1)...(19): siRNA sense strand
gagcagauccuccgccgaa

SEQ ID NO: 2226495 - RNA, 19 nt, Homo sapiens
  misc_RNA (1)...(19): siRNA sense strand
ccgaaauguccuccagcau

SEQ ID NO: 2226496 - RNA, 19 nt, Homo sapiens
  misc_RNA (1)...(19): siRNA sense strand
agaaagaauggugggauca

SEQ ID NO: 2226497 - RNA, 19 nt, Homo sapiens
  misc_RNA (1)...(19): siRNA sense strand
gugaggaggaggaggaggu

SEQ ID NO: 2226498 - RNA, 19 nt, Homo sapiens
  misc_RNA (1)...(19): siRNA sense strand
gcaguggggaagaggggua

SEQ ID NO: 2226499 - RNA, 19 nt, Homo sapiens
  misc_RNA (1)...(19): siRNA sense strand
gcccaguggagaucagcaa

SEQ ID NO: 2226500 - RNA, 19 nt, Homo sapiens
  misc_RNA (1)...(19): siRNA sense strand
agugugaggaggaggagga

SEQ ID NO: 2226501 - RNA, 19 nt, Homo sapiens
  misc_RNA (1)...(19): siRNA sense strand
ccgcagccuuugugaacca

SEQ ID NO: 2226502 - RNA, 19 nt, Homo sapiens
  misc_RNA (1)...(19): siRNA sense strand
agauggaguuugaggacau

SEQ ID NO: 2226503 - RNA, 19 nt, Homo sapiens
  misc_RNA (1)...(19): siRNA sense strand
gcaugguguaugagggcaa

SEQ ID NO: 2226504 - RNA, 19 nt, Homo sapiens
  misc_RNA (1)...(19): siRNA sense strand
ugucaaaauuggagacuuu

SEQ ID NO: 2226505 - RNA, 19 nt, Homo sapiens
  misc_RNA (1)...(19): siRNA sense strand
gggacaucaucaaggguga

SEQ ID NO: 2226506 - RNA, 19 nt, Homo sapiens
  misc_RNA (1)...(19): siRNA sense strand
ccgcgaagggcaagaccaa

SEQ ID NO: 2226507 - RNA, 19 nt, Homo sapiens
  misc_RNA (1)...(19): siRNA sense strand
ggaacuacagcgugcgaau

SEQ ID NO: 2226508 - RNA, 19 nt, Homo sapiens
  misc_RNA (1)...(19): siRNA sense strand
ggaccaugccugaagccaa

SEQ ID NO: 2226509 - RNA, 19 nt, Homo sapiens
  misc_RNA (1)...(19): siRNA sense strand
gcaugaaaucuuugagaac

SEQ ID NO: 2226510 - RNA, 19 nt, Homo sapiens
  misc_RNA (1)...(19): siRNA sense strand
gacaaggcauccugugaaa

SEQ ID NO: 2226511 - RNA, 19 nt, Homo sapiens
  misc_RNA (1)...(19): siRNA sense strand
gggaccuggcagcgagaaa

SEQ ID NO: 2226512 - RNA, 19 nt, Homo sapiens
  misc_RNA (1)...(19): siRNA sense strand
ccuucuaugccuuggacaa

SEQ ID NO: 2226513 - RNA, 19 nt, Homo sapiens
  misc_RNA (1)...(19): siRNA sense strand
ggaagaaguuucaggaacc

SEQ ID NO: 2226514 - RNA, 19 nt, Homo sapiens
  misc_RNA (1)...(19): siRNA sense strand
cgaggagagaccuuggaaa

SEQ ID NO: 2226515 - RNA, 19 nt, Homo sapiens
  misc_RNA (1)...(19): siRNA sense strand
aguuugaggacauggagaa

SEQ ID NO: 2226516 - RNA, 19 nt, Homo sapiens
  misc_RNA (1)...(19): siRNA sense strand
ccuuggaaauugggaacua

SEQ ID NO: 2226517 - RNA, 19 nt, Homo sapiens
  misc_RNA (1)...(19): siRNA sense strand
ucaucaagggugaggcaga

SEQ ID NO: 2226518 - RNA, 19 nt, Homo sapiens
  misc_RNA (1)...(19): siRNA sense strand
gcaacaaucuggcagcuga

SEQ ID NO: 2226519 - RNA, 19 nt, Homo sapiens
  misc_RNA (1)...(19): siRNA sense strand
ggacaaggcauccugugaa

SEQ ID NO: 2226520 - RNA, 19 nt, Homo sapiens
  misc_RNA (1)...(19): siRNA sense strand
ugaacaaagaugacaacga

SEQ ID NO: 2226521 - RNA, 19 nt, Homo sapiens
  misc_RNA (1)...(19): siRNA sense strand
ugaaggagcuggaggaguc

SEQ ID NO: 2226522 - RNA, 19 nt, Homo sapiens
  misc_RNA (1)...(19): siRNA sense strand
uggaagaaguuucaggaac

SEQ ID NO: 2226523 - RNA, 19 nt, Homo sapiens
  misc_RNA (1)...(19): siRNA sense strand
ccuuggcgauguugggaau

SEQ ID NO: 2226524 - RNA, 19 nt, Homo sapiens
  misc_RNA (1)...(19): siRNA sense strand
ugcuguaugaagugaguua

SEQ ID NO: 2226525 - RNA, 19 nt, Homo sapiens
  misc_RNA (1)...(19): siRNA sense strand
acaucuaugaaacggauua

SEQ ID NO: 2226526 - RNA, 19 nt, Homo sapiens
  misc_RNA (1)...(19): siRNA sense strand
acucauagucacugccaga

SEQ ID NO: 2226527 - RNA, 19 nt, Homo sapiens
  misc_RNA (1)...(19): siRNA sense strand
agucacugccagaaaguuu

SEQ ID NO: 2226528 - RNA, 19 nt, Homo sapiens
  misc_RNA (1)...(19): siRNA sense strand
agaacaacgucguccacuu

SEQ ID NO: 2226529 - RNA, 19 nt, Homo sapiens
  misc_RNA (1)...(19): siRNA sense strand
cggugaagacggucaacga

SEQ ID NO: 2226530 - RNA, 19 nt, Homo sapiens
  misc_RNA (1)...(19): siRNA sense strand
uggaaugaccagagacauc

SEQ ID NO: 2226531 - RNA, 19 nt, Homo sapiens
  misc_RNA (1)...(19): siRNA sense strand
ucauagucacugccagaaa

SEQ ID NO: 2226532 - RNA, 19 nt, Homo sapiens
  misc_RNA (1)...(19): siRNA sense strand
ugacggaguucgaugggca

SEQ ID NO: 2226533 - RNA, 19 nt, Homo sapiens
  misc_RNA (1)...(19): siRNA sense strand
ugagaaagaggcagccaga

SEQ ID NO: 2226534 - RNA, 19 nt, Homo sapiens
  misc_RNA (1)...(19): siRNA sense strand
gggccaagagugacaucau

SEQ ID NO: 2226535 - RNA, 19 nt, Homo sapiens
  misc_RNA (1)...(19): siRNA sense strand
cgaaggagcccaauggucu

SEQ ID NO: 2226536 - RNA, 19 nt, Homo sapiens
  misc_RNA (1)...(19): siRNA sense strand
caacauucgaggaggcaac

SEQ ID NO: 2226537 - RNA, 19 nt, Homo sapiens
  misc_RNA (1)...(19): siRNA sense strand
aagcacaaccagagugagu

SEQ ID NO: 2226538 - RNA, 19 nt, Homo sapiens
  misc_RNA (1)...(19): siRNA sense strand
ucacugaccucaugcgcau

SEQ ID NO: 2226539 - RNA, 19 nt, Homo sapiens
  misc_RNA (1)...(19): siRNA sense strand
acgaugaauuccagcaacu

SEQ ID NO: 2226540 - RNA, 19 nt, Homo sapiens
  misc_RNA (1)...(19): siRNA sense strand
accaauacgucauucacaa

SEQ ID NO: 2226541 - RNA, 19 nt, Homo sapiens
  misc_RNA (1)...(19): siRNA sense strand
gggacaaggcauccuguga

SEQ ID NO: 2226542 - RNA, 19 nt, Homo sapiens
  misc_RNA (1)...(19): siRNA sense strand
gcaucgagcugcaggcuug

SEQ ID NO: 2226543 - RNA, 19 nt, Homo sapiens
  misc_RNA (1)...(19): siRNA sense strand
gcgauauggugaugaggag

SEQ ID NO: 2226544 - RNA, 19 nt, Homo sapiens
  misc_RNA (1)...(19): siRNA sense strand
uguugugauuggaaguauu

SEQ ID NO: 2226545 - RNA, 19 nt, Homo sapiens
  misc_RNA (1)...(19): siRNA sense strand
ggcgugguccuuugggaaa

SEQ ID NO: 2226546 - RNA, 19 nt, Homo sapiens
  misc_RNA (1)...(19): siRNA sense strand
gcgaagggcaagaccaacu

SEQ ID NO: 2226547 - RNA, 19 nt, Homo sapiens
  misc_RNA (1)...(19): siRNA sense strand
acacaugaacggaggcaag

SEQ ID NO: 2226548 - RNA, 19 nt, Homo sapiens
  misc_RNA (1)...(19): siRNA sense strand
ccucggucaugaagggcuu

SEQ ID NO: 2226549 - RNA, 19 nt, Homo sapiens
  misc_RNA (1)...(19): siRNA sense strand
ugaacuugaccgagagaca

SEQ ID NO: 2226550 - RNA, 19 nt, Homo sapiens
  misc_RNA (1)...(19): siRNA sense strand
auguugaacuugaccgaga

SEQ ID NO: 2226551 - RNA, 19 nt, Homo sapiens
  misc_RNA (1)...(19): siRNA sense strand
cggagccggaggagaacaa

SEQ ID NO: 2226552 - RNA, 19 nt, Homo sapiens
  misc_RNA (1)...(19): siRNA sense strand
uggaaaggccagugggcag

SEQ ID NO: 2226553 - RNA, 19 nt, Homo sapiens
  misc_RNA (1)...(19): siRNA sense strand
cagaagaaggugagaggga

SEQ ID NO: 2226554 - RNA, 19 nt, Homo sapiens
  misc_RNA (1)...(19): siRNA sense strand
cagaguacuucgacggcua

SEQ ID NO: 2226555 - RNA, 19 nt, Homo sapiens
  misc_RNA (1)...(19): siRNA sense strand
gagcagaacagcuuggaca

SEQ ID NO: 2226556 - RNA, 19 nt, Homo sapiens
  misc_RNA (1)...(19): siRNA sense strand
caacaauggcccugggacu

SEQ ID NO: 2226557 - RNA, 19 nt, Homo sapiens
  misc_RNA (1)...(19): siRNA sense strand
ugucgagggcuuugagaga

SEQ ID NO: 2226558 - RNA, 19 nt, Homo sapiens
  misc_RNA (1)...(19): siRNA sense strand
gugcaggagcagacacgaa

SEQ ID NO: 2226559 - RNA, 19 nt, Homo sapiens
  misc_RNA (1)...(19): siRNA sense strand
cggauauuuucucgaguua

SEQ ID NO: 2226560 - RNA, 19 nt, Homo sapiens
  misc_RNA (1)...(19): siRNA sense strand
aggcagacuuccgggacaa

SEQ ID NO: 2226561 - RNA, 19 nt, Homo sapiens
  misc_RNA (1)...(19): siRNA sense strand
acaucgaugacaacggaua

SEQ ID NO: 2226562 - RNA, 19 nt, Homo sapiens
  misc_RNA (1)...(19): siRNA sense strand
uguaaucagaagaaggaga

SEQ ID NO: 2226563 - RNA, 19 nt, Homo sapiens
  misc_RNA (1)...(19): siRNA sense strand
ugugaagagcuguguccua

SEQ ID NO: 2226564 - RNA, 19 nt, Homo sapiens
  misc_RNA (1)...(19): siRNA sense strand
gaggcagacuuccgggaca

SEQ ID NO: 2226565 - RNA, 19 nt, Homo sapiens
  misc_RNA (1)...(19): siRNA sense strand
aucagaagaaggagaauga

SEQ ID NO: 2226566 - RNA, 19 nt, Homo sapiens
  misc_RNA (1)...(19): siRNA sense strand
gcuauuauuucuuaggucu

SEQ ID NO: 2226567 - RNA, 19 nt, Homo sapiens
  misc_RNA (1)...(19): siRNA sense strand
cagauaauguccuggagcu

SEQ ID NO: 2226568 - RNA, 19 nt, Homo sapiens
  misc_RNA (1)...(19): siRNA sense strand
agaaauuagcaaugggaaa

SEQ ID NO: 2226569 - RNA, 19 nt, Homo sapiens
  misc_RNA (1)...(19): siRNA sense strand
ggguaauaaacuuagguaa

SEQ ID NO: 2226570 - RNA, 19 nt, Homo sapiens
  misc_RNA (1)...(19): siRNA sense strand
cguaugaugacuugggaaa

SEQ ID NO: 2226571 - RNA, 19 nt, Homo sapiens
  misc_RNA (1)...(19): siRNA sense strand
ucaagaaagaaacgggaaa

SEQ ID NO: 2226572 - RNA, 19 nt, Homo sapiens
  misc_RNA (1)...(19): siRNA sense strand
auugagaggccaugagaaa

SEQ ID NO: 2226573 - RNA, 19 nt, Homo sapiens
  misc_RNA (1)...(19): siRNA sense strand
cgucagaaagcaaggaaga

SEQ ID NO: 2226574 - RNA, 19 nt, Homo sapiens
  misc_RNA (1)...(19): siRNA sense strand
guguagagcaaaagaauaa

SEQ ID NO: 2226575 - RNA, 19 nt, Homo sapiens
  misc_RNA (1)...(19): siRNA sense strand
gggaaguuuaauagaguau

SEQ ID NO: 2226576 - RNA, 19 nt, Homo sapiens
  misc_RNA (1)...(19): siRNA sense strand
gauuguucguguagagcaa

SEQ ID NO: 2226577 - RNA, 19 nt, Homo sapiens
  misc_RNA (1)...(19): siRNA sense strand
cuaaaagaucagaaggaua

SEQ ID NO: 2226578 - RNA, 19 nt, Homo sapiens
  misc_RNA (1)...(19): siRNA sense strand
acuuauaacuggaaaggga

SEQ ID NO: 2226579 - RNA, 19 nt, Homo sapiens
  misc_RNA (1)...(19): siRNA sense strand
ccacauaucacaaggcuga

SEQ ID NO: 2226580 - RNA, 19 nt, Homo sapiens
  misc_RNA (1)...(19): siRNA sense strand
cugaagaggcagaaacaga

SEQ ID NO: 2226581 - RNA, 19 nt, Homo sapiens
  misc_RNA (1)...(19): siRNA sense strand
ggugaaaguagaauccaaa

SEQ ID NO: 2226582 - RNA, 19 nt, Homo sapiens
  misc_RNA (1)...(19): siRNA sense strand
ccagcaaggcagauggaau

SEQ ID NO: 2226583 - RNA, 19 nt, Homo sapiens
  misc_RNA (1)...(19): siRNA sense strand
cagaaaaccaucacaguaa

SEQ ID NO: 2226584 - RNA, 19 nt, Homo sapiens
  misc_RNA (1)...(19): siRNA sense strand
ucugauaaagagaggcuua

SEQ ID NO: 2226585 - RNA, 19 nt, Homo sapiens
  misc_RNA (1)...(19): siRNA sense strand
gagaaggaaaucaagacaa

SEQ ID NO: 2226586 - RNA, 19 nt, Homo sapiens
  misc_RNA (1)...(19): siRNA sense strand
guuaauacgaagcaggaau

SEQ ID NO: 2226587 - RNA, 19 nt, Homo sapiens
  misc_RNA (1)...(19): siRNA sense strand
ugaaguugguggagagacu

SEQ ID NO: 2226588 - RNA, 19 nt, Homo sapiens
  misc_RNA (1)...(19): siRNA sense strand
agaugaagugggaaguuua

SEQ ID NO: 2226589 - RNA, 19 nt, Homo sapiens
  misc_RNA (1)...(19): siRNA sense strand
ccucaaagacuguagcuca

SEQ ID NO: 2226590 - RNA, 19 nt, Homo sapiens
  misc_RNA (1)...(19): siRNA sense strand
uggaauaaugugaagccaa

SEQ ID NO: 2226591 - RNA, 19 nt, Homo sapiens
  misc_RNA (1)...(19): siRNA sense strand
aguuggaggugcaguguau

SEQ ID NO: 2226592 - RNA, 19 nt, Homo sapiens
  misc_RNA (1)...(19): siRNA sense strand
gggcacacuugaagcugaa

SEQ ID NO: 2226593 - RNA, 19 nt, Homo sapiens
  misc_RNA (1)...(19): siRNA sense strand
ccaauuacagcuaaagcaa

SEQ ID NO: 2226594 - RNA, 19 nt, Homo sapiens
  misc_RNA (1)...(19): siRNA sense strand
caacaaggauggguggcaa

SEQ ID NO: 2226595 - RNA, 19 nt, Homo sapiens
  misc_RNA (1)...(19): siRNA sense strand
aaagguaacuugugagcca

SEQ ID NO: 2226596 - RNA, 19 nt, Homo sapiens
  misc_RNA (1)...(19): siRNA sense strand
uggagaaguuggaggugca

SEQ ID NO: 2226597 - RNA, 19 nt, Homo sapiens
  misc_RNA (1)...(19): siRNA sense strand
ggacaacgugauccggaaa

SEQ ID NO: 2226598 - RNA, 19 nt, Homo sapiens
  misc_RNA (1)...(19): siRNA sense strand
gcaaggaagaucaguggau

SEQ ID NO: 2226599 - RNA, 19 nt, Homo sapiens
  misc_RNA (1)...(19): siRNA sense strand
ggauggguggcaagauaua

SEQ ID NO: 2226600 - RNA, 19 nt, Homo sapiens
  misc_RNA (1)...(19): siRNA sense strand
uggugaaaguagaauccaa

SEQ ID NO: 2226601 - RNA, 19 nt, Homo sapiens
  misc_RNA (1)...(19): siRNA sense strand
ggaaagggauuguucgugu

SEQ ID NO: 2226602 - RNA, 19 nt, Homo sapiens
  misc_RNA (1)...(19): siRNA sense strand
cuuaauggaaccaaagauu

SEQ ID NO: 2226603 - RNA, 19 nt, Homo sapiens
  misc_RNA (1)...(19): siRNA sense strand
cagaaagcaaggaagauca

SEQ ID NO: 2226604 - RNA, 19 nt, Homo sapiens
  misc_RNA (1)...(19): siRNA sense strand
gguucugagcccaaauaua

SEQ ID NO: 2226605 - RNA, 19 nt, Homo sapiens
  misc_RNA (1)...(19): siRNA sense strand
aggcagaaacagaaagugu

SEQ ID NO: 2226606 - RNA, 19 nt, Homo sapiens
  misc_RNA (1)...(19): siRNA sense strand
ggacucagggaaagguauu

SEQ ID NO: 2226607 - RNA, 19 nt, Homo sapiens
  misc_RNA (1)...(19): siRNA sense strand
caagaaagaaacgggaaau

SEQ ID NO: 2226608 - RNA, 19 nt, Homo sapiens
  misc_RNA (1)...(19): siRNA sense strand
guuagaaacaacaagcaau

SEQ ID NO: 2226609 - RNA, 19 nt, Homo sapiens
  misc_RNA (1)...(19): siRNA sense strand
caacagaacgggagggcug

SEQ ID NO: 2226610 - RNA, 19 nt, Homo sapiens
  misc_RNA (1)...(19): siRNA sense strand
agaaacagaaagugugcau

SEQ ID NO: 2226611 - RNA, 19 nt, Homo sapiens
  misc_RNA (1)...(19): siRNA sense strand
aaacugaacuacuuggaca

SEQ ID NO: 2226612 - RNA, 19 nt, Homo sapiens
  misc_RNA (1)...(19): siRNA sense strand
aagcaggaaucccgagaca

SEQ ID NO: 2226613 - RNA, 19 nt, Homo sapiens
  misc_RNA (1)...(19): siRNA sense strand
aagaagaaaaucugggcua

SEQ ID NO: 2226614 - RNA, 19 nt, Homo sapiens
  misc_RNA (1)...(19): siRNA sense strand
ccaaauauacucaagaacu

SEQ ID NO: 2226615 - RNA, 19 nt, Homo sapiens
  misc_RNA (1)...(19): siRNA sense strand
aguuagaaacaacaagcaa

SEQ ID NO: 2226616 - RNA, 19 nt, Homo sapiens
  misc_RNA (1)...(19): siRNA sense strand
aagcaaaagugguuauuga

SEQ ID NO: 2226617 - RNA, 19 nt, Homo sapiens
  misc_RNA (1)...(19): siRNA sense strand
aagaaagaaacgggaaauu

SEQ ID NO: 2226618 - RNA, 19 nt, Homo sapiens
  misc_RNA (1)...(19): siRNA sense strand
cgcucgagguuauggaaca

SEQ ID NO: 2226619 - RNA, 19 nt, Homo sapiens
  misc_RNA (1)...(19): siRNA sense strand
agaaacaacaagcaaucaa

SEQ ID NO: 2226620 - RNA, 19 nt, Homo sapiens
  misc_RNA (1)...(19): siRNA sense strand
cugaagaugaagugggaag

SEQ ID NO: 2226621 - RNA, 19 nt, Homo sapiens
  misc_RNA (1)...(19): siRNA sense strand
caauuacagcuaaagcaaa

SEQ ID NO: 2226622 - RNA, 19 nt, Homo sapiens
  misc_RNA (1)...(19): siRNA sense strand
aggacaacgugauccggaa

SEQ ID NO: 2226623 - RNA, 19 nt, Homo sapiens
  misc_RNA (1)...(19): siRNA sense strand
gagcaaaagaauaacacuu

SEQ ID NO: 2226624 - RNA, 19 nt, Homo sapiens
  misc_RNA (1)...(19): siRNA sense strand
gaggaaacccuguggcuac

SEQ ID NO: 2226625 - RNA, 19 nt, Homo sapiens
  misc_RNA (1)...(19): siRNA sense strand
ccaucaacugugagcgcua

SEQ ID NO: 2226626 - RNA, 19 nt, Homo sapiens
  misc_RNA (1)...(19): siRNA sense strand
uggugaagaccuacgagaa

SEQ ID NO: 2226627 - RNA, 19 nt, Homo sapiens
  misc_RNA (1)...(19): siRNA sense strand
gcacgaaguucaaggucag

SEQ ID NO: 2226628 - RNA, 19 nt, Homo sapiens
  misc_RNA (1)...(19): siRNA sense strand
aggagaagcucaaguccca

SEQ ID NO: 2226629 - RNA, 19 nt, Homo sapiens
  misc_RNA (1)...(19): siRNA sense strand
ggaagcugccggaaggaca

SEQ ID NO: 2226630 - RNA, 19 nt, Homo sapiens
  misc_RNA (1)...(19): siRNA sense strand
gguccaucucauuaagaau

SEQ ID NO: 2226631 - RNA, 19 nt, Homo sapiens
  misc_RNA (1)...(19): siRNA sense strand
ggaccugcaaggagaggga

SEQ ID NO: 2226632 - RNA, 19 nt, Homo sapiens
  misc_RNA (1)...(19): siRNA sense strand
acaaggagaaagagugcca

SEQ ID NO: 2226633 - RNA, 19 nt, Homo sapiens
  misc_RNA (1)...(19): siRNA sense strand
aggacgggauggaccgcua

SEQ ID NO: 2226634 - RNA, 19 nt, Homo sapiens
  misc_RNA (1)...(19): siRNA sense strand
cgagaaacucaccgagauc

SEQ ID NO: 2226635 - RNA, 19 nt, Homo sapiens
  misc_RNA (1)...(19): siRNA sense strand
gcuugaugaccucaggaau

SEQ ID NO: 2226636 - RNA, 19 nt, Homo sapiens
  misc_RNA (1)...(19): siRNA sense strand
uguugaugcuuaugggaaa

SEQ ID NO: 2226637 - RNA, 19 nt, Homo sapiens
  misc_RNA (1)...(19): siRNA sense strand
gugaaagagcuuaaggaca

SEQ ID NO: 2226638 - RNA, 19 nt, Homo sapiens
  misc_RNA (1)...(19): siRNA sense strand
gugaagaagcagagugugu

SEQ ID NO: 2226639 - RNA, 19 nt, Homo sapiens
  misc_RNA (1)...(19): siRNA sense strand
agauugagucagugaaaga

SEQ ID NO: 2226640 - RNA, 19 nt, Homo sapiens
  misc_RNA (1)...(19): siRNA sense strand
agucagugaaagagcuuaa

SEQ ID NO: 2226641 - RNA, 19 nt, Homo sapiens
  misc_RNA (1)...(19): siRNA sense strand
ugaaagagcuuaaggacac

SEQ ID NO: 2226642 - RNA, 19 nt, Homo sapiens
  misc_RNA (1)...(19): siRNA sense strand
gcuucagcauugaggccaa

SEQ ID NO: 2226643 - RNA, 19 nt, Homo sapiens
  misc_RNA (1)...(19): siRNA sense strand
ucauguugguagugacaau

SEQ ID NO: 2226644 - RNA, 19 nt, Homo sapiens
  misc_RNA (1)...(19): siRNA sense strand
guaagaaguuugaccggga

SEQ ID NO: 2226645 - RNA, 19 nt, Homo sapiens
  misc_RNA (1)...(19): siRNA sense strand
aggauuacccuguggacau

SEQ ID NO: 2226646 - RNA, 19 nt, Homo sapiens
  misc_RNA (1)...(19): siRNA sense strand
augaggaagugaagaagca

SEQ ID NO: 2226647 - RNA, 19 nt, Homo sapiens
  misc_RNA (1)...(19): siRNA sense strand
cuaaaguagagcuggaagu

SEQ ID NO: 2226648 - RNA, 19 nt, Homo sapiens
  misc_RNA (1)...(19): siRNA sense strand
gcgacaagggcucuggaga

SEQ ID NO: 2226649 - RNA, 19 nt, Homo sapiens
  misc_RNA (1)...(19): siRNA sense strand
cgacaagggcucuggagac

SEQ ID NO: 2226650 - RNA, 19 nt, Homo sapiens
  misc_RNA (1)...(19): siRNA sense strand
ggagaugugcucaggccau

SEQ ID NO: 2226651 - RNA, 19 nt, Homo sapiens
  misc_RNA (1)...(19): siRNA sense strand
cggaaggcuggcaggcauu

SEQ ID NO: 2226652 - RNA, 19 nt, Homo sapiens
  misc_RNA (1)...(19): siRNA sense strand
cgcuaaauuugaggaagaa

SEQ ID NO: 2226653 - RNA, 19 nt, Homo sapiens
  misc_RNA (1)...(19): siRNA sense strand
acggaaggcuggcaggcau

SEQ ID NO: 2226654 - RNA, 19 nt, Homo sapiens
  misc_RNA (1)...(19): siRNA sense strand
ucaccauccacgaccgaaa

SEQ ID NO: 2226655 - RNA, 19 nt, Homo sapiens
  misc_RNA (1)...(19): siRNA sense strand
gaggaagugaagaagcaga

SEQ ID NO: 2226656 - RNA, 19 nt, Homo sapiens
  misc_RNA (1)...(19): siRNA sense strand
uuggcaagaucacgggcaa

SEQ ID NO: 2226657 - RNA, 19 nt, Homo sapiens
  misc_RNA (1)...(19): siRNA sense strand
ucgucagauuccaguacua

SEQ ID NO: 2226658 - RNA, 19 nt, Homo sapiens
  misc_RNA (1)...(19): siRNA sense strand
ccuaauagccaucgcugca

SEQ ID NO: 2226659 - RNA, 19 nt, Homo sapiens
  misc_RNA (1)...(19): siRNA sense strand
ucgaguucccagugaguga

SEQ ID NO: 2226660 - RNA, 19 nt, Homo sapiens
  misc_RNA (1)...(19): siRNA sense strand
aagugaagaagcagagugu

SEQ ID NO: 2226661 - RNA, 19 nt, Homo sapiens
  misc_RNA (1)...(19): siRNA sense strand
ccaggaaguuucagggaga

SEQ ID NO: 2226662 - RNA, 19 nt, Homo sapiens
  misc_RNA (1)...(19): siRNA sense strand
ccgaggacuaugagggcaa

SEQ ID NO: 2226663 - RNA, 19 nt, Homo sapiens
  misc_RNA (1)...(19): siRNA sense strand
caaaugaaugugaggccaa

SEQ ID NO: 2226664 - RNA, 19 nt, Homo sapiens
  misc_RNA (1)...(19): siRNA sense strand
cgccaaauccuguaagaau

SEQ ID NO: 2226665 - RNA, 19 nt, Homo sapiens
  misc_RNA (1)...(19): siRNA sense strand
ccaucaaggauuacgagaa

SEQ ID NO: 2226666 - RNA, 19 nt, Homo sapiens
  misc_RNA (1)...(19): siRNA sense strand
ggucacugucagaaugaaa

SEQ ID NO: 2226667 - RNA, 19 nt, Homo sapiens
  misc_RNA (1)...(19): siRNA sense strand
ucaaggauuacgagaacaa

SEQ ID NO: 2226668 - RNA, 19 nt, Homo sapiens
  misc_RNA (1)...(19): siRNA sense strand
uggaugagaucaauggcua

SEQ ID NO: 2226669 - RNA, 19 nt, Homo sapiens
  misc_RNA (1)...(19): siRNA sense strand
cggccagcucugugacaaa

SEQ ID NO: 2226670 - RNA, 19 nt, Homo sapiens
  misc_RNA (1)...(19): siRNA sense strand
uuaguaaacgugauggaaa

SEQ ID NO: 2226671 - RNA, 19 nt, Homo sapiens
  misc_RNA (1)...(19): siRNA sense strand
uggacaaacaccagcagaa

SEQ ID NO: 2226672 - RNA, 19 nt, Homo sapiens
  misc_RNA (1)...(19): siRNA sense strand
cugaaguagaagaggacga

SEQ ID NO: 2226673 - RNA, 19 nt, Homo sapiens
  misc_RNA (1)...(19): siRNA sense strand
cgaauguaacagagcuauu

SEQ ID NO: 2226674 - RNA, 19 nt, Homo sapiens
  misc_RNA (1)...(19): siRNA sense strand
gagucagucgggaggcaaa

SEQ ID NO: 2226675 - RNA, 19 nt, Homo sapiens
  misc_RNA (1)...(19): siRNA sense strand
gcaccuguguggauggaga

SEQ ID NO: 2226676 - RNA, 19 nt, Homo sapiens
  misc_RNA (1)...(19): siRNA sense strand
uaguaaacgugauggaaac

SEQ ID NO: 2226677 - RNA, 19 nt, Homo sapiens
  misc_RNA (1)...(19): siRNA sense strand
gagaugacuucuuuggaca

SEQ ID NO: 2226678 - RNA, 19 nt, Homo sapiens
  misc_RNA (1)...(19): siRNA sense strand
gggccaaaugggaugauga

SEQ ID NO: 2226679 - RNA, 19 nt, Homo sapiens
  misc_RNA (1)...(19): siRNA sense strand
acaaacaggacaacagaga

SEQ ID NO: 2226680 - RNA, 19 nt, Homo sapiens
  misc_RNA (1)...(19): siRNA sense strand
uggaaagugcccagagcuu

SEQ ID NO: 2226681 - RNA, 19 nt, Homo sapiens
  misc_RNA (1)...(19): siRNA sense strand
gcaagugccccgaggacua

SEQ ID NO: 2226682 - RNA, 19 nt, Homo sapiens
  misc_RNA (1)...(19): siRNA sense strand
uuaaugacugugagagcaa

SEQ ID NO: 2226683 - RNA, 19 nt, Homo sapiens
  misc_RNA (1)...(19): siRNA sense strand
aaguagaagaggacgacau

SEQ ID NO: 2226684 - RNA, 19 nt, Homo sapiens
  misc_RNA (1)...(19): siRNA sense strand
gcccagagcuuaaaccgaa

SEQ ID NO: 2226685 - RNA, 19 nt, Homo sapiens
  misc_RNA (1)...(19): siRNA sense strand
aacaaaggcuucacgggaa

SEQ ID NO: 2226686 - RNA, 19 nt, Homo sapiens
  misc_RNA (1)...(19): siRNA sense strand
caucaaggauuacgagaac

SEQ ID NO: 2226687 - RNA, 19 nt, Homo sapiens
  misc_RNA (1)...(19): siRNA sense strand
gugaugaggccacgugcaa

SEQ ID NO: 2226688 - RNA, 19 nt, Homo sapiens
  misc_RNA (1)...(19): siRNA sense strand
aagaggacgacauggacaa

SEQ ID NO: 2226689 - RNA, 19 nt, Homo sapiens
  misc_RNA (1)...(19): siRNA sense strand
uggcagacgcugaagcaga

SEQ ID NO: 2226690 - RNA, 19 nt, Homo sapiens
  misc_RNA (1)...(19): siRNA sense strand
gggaagugcaagagucagu

SEQ ID NO: 2226691 - RNA, 19 nt, Homo sapiens
  misc_RNA (1)...(19): siRNA sense strand
ccuguaacauagcccgaaa

SEQ ID NO: 2226692 - RNA, 19 nt, Homo sapiens
  misc_RNA (1)...(19): siRNA sense strand
auuaaugacugcagccaga

SEQ ID NO: 2226693 - RNA, 19 nt, Homo sapiens
  misc_RNA (1)...(19): siRNA sense strand
aggacgacauggacaaaca

SEQ ID NO: 2226694 - RNA, 19 nt, Homo sapiens
  misc_RNA (1)...(19): siRNA sense strand
aagugugccucaaggagua

SEQ ID NO: 2226695 - RNA, 19 nt, Homo sapiens
  misc_RNA (1)...(19): siRNA sense strand
ugguagacagagaagagaa

SEQ ID NO: 2226696 - RNA, 19 nt, Homo sapiens
  misc_RNA (1)...(19): siRNA sense strand
ccugacaguauuauugaaa

SEQ ID NO: 2226697 - RNA, 19 nt, Homo sapiens
  misc_RNA (1)...(19): siRNA sense strand
augaaauacauguggccau

SEQ ID NO: 2226698 - RNA, 19 nt, Homo sapiens
  misc_RNA (1)...(19): siRNA sense strand
gggaacccgaucaaggaaa

SEQ ID NO: 2226699 - RNA, 19 nt, Homo sapiens
  misc_RNA (1)...(19): siRNA sense strand
cagcugaaccagaucaaaa

SEQ ID NO: 2226700 - RNA, 19 nt, Homo sapiens
  misc_RNA (1)...(19): siRNA sense strand
aaacaggacaacagagacu

SEQ ID NO: 2226701 - RNA, 19 nt, Homo sapiens
  misc_RNA (1)...(19): siRNA sense strand
cccgaauguaacagagcua

SEQ ID NO: 2226702 - RNA, 19 nt, Homo sapiens
  misc_RNA (1)...(19): siRNA sense strand
aagcaugggucuugcaaac

SEQ ID NO: 2226703 - RNA, 19 nt, Homo sapiens
  misc_RNA (1)...(19): siRNA sense strand
ccuguguggaugagaucaa

SEQ ID NO: 2226704 - RNA, 19 nt, Homo sapiens
  misc_RNA (1)...(19): siRNA sense strand
aggauuacgagaacaagaa

SEQ ID NO: 2226705 - RNA, 19 nt, Homo sapiens
  misc_RNA (1)...(19): siRNA sense strand
ccguucaaccugacaguau

SEQ ID NO: 2226706 - RNA, 19 nt, Homo sapiens
  misc_RNA (1)...(19): siRNA sense strand
cgugccaguuagaugcaaa

SEQ ID NO: 2226707 - RNA, 19 nt, Homo sapiens
  misc_RNA (1)...(19): siRNA sense strand
uaacagagcuauuugccga

SEQ ID NO: 2226708 - RNA, 19 nt, Homo sapiens
  misc_RNA (1)...(19): siRNA sense strand
agaggcagcuguaaggaga

SEQ ID NO: 2226709 - RNA, 19 nt, Homo sapiens
  misc_RNA (1)...(19): siRNA sense strand
gcucacaccugaaagacca

SEQ ID NO: 2226710 - RNA, 19 nt, Homo sapiens
  misc_RNA (1)...(19): siRNA sense strand
cagcgaacaaugaaauaca

SEQ ID NO: 2226711 - RNA, 19 nt, Homo sapiens
  misc_RNA (1)...(19): siRNA sense strand
gggccuacugugaaaccaa

SEQ ID NO: 2226712 - RNA, 19 nt, Homo sapiens
  misc_RNA (1)...(19): siRNA sense strand
gguuaaugguuaucgcugu

SEQ ID NO: 2226713 - RNA, 19 nt, Homo sapiens
  misc_RNA (1)...(19): siRNA sense strand
ucgauuauugugagccuaa

SEQ ID NO: 2226714 - RNA, 19 nt, Homo sapiens
  misc_RNA (1)...(19): siRNA sense strand
ccucacgggaagugcaaga

SEQ ID NO: 2226715 - RNA, 19 nt, Homo sapiens
  misc_RNA (1)...(19): siRNA sense strand
ggucaguucgaguuggaga

SEQ ID NO: 2226716 - RNA, 19 nt, Homo sapiens
  misc_RNA (1)...(19): siRNA sense strand
cuacaaacauugaugacug

SEQ ID NO: 2226717 - RNA, 19 nt, Homo sapiens
  misc_RNA (1)...(19): siRNA sense strand
ugggaugaugacuguaaua

SEQ ID NO: 2226718 - RNA, 19 nt, Homo sapiens
  misc_RNA (1)...(19): siRNA sense strand
gaguaucagucccgcguca

SEQ ID NO: 2226719 - RNA, 19 nt, Homo sapiens
  misc_RNA (1)...(19): siRNA sense strand
cgaucuucgaggagagaca

SEQ ID NO: 2226720 - RNA, 19 nt, Homo sapiens
  misc_RNA (1)...(19): siRNA sense strand
cugcucacccagagggcaa

SEQ ID NO: 2226721 - RNA, 19 nt, Homo sapiens
  misc_RNA (1)...(19): siRNA sense strand
uagacauguaucugcgaaa

SEQ ID NO: 2226722 - RNA, 19 nt, Homo sapiens
  misc_RNA (1)...(19): siRNA sense strand
gauuauaagggcugccuca

SEQ ID NO: 2226723 - RNA, 19 nt, Homo sapiens
  misc_RNA (1)...(19): siRNA sense strand
cacaagaacugcauggagu

SEQ ID NO: 2226724 - RNA, 19 nt, Homo sapiens
  misc_RNA (1)...(19): siRNA sense strand
uggucaaacagcuggccua

SEQ ID NO: 2226725 - RNA, 19 nt, Homo sapiens
  misc_RNA (1)...(19): siRNA sense strand
ucauggaugccaagcacaa

SEQ ID NO: 2226726 - RNA, 19 nt, Homo sapiens
  misc_RNA (1)...(19): siRNA sense strand
ccaaguacaucauggaccu

SEQ ID NO: 2226727 - RNA, 19 nt, Homo sapiens
  misc_RNA (1)...(19): siRNA sense strand
cagcagucuucgagagcuc

SEQ ID NO: 2226728 - RNA, 19 nt, Homo sapiens
  misc_RNA (1)...(19): siRNA sense strand
gucucaaggagcaggguga

SEQ ID NO: 2226729 - RNA, 19 nt, Homo sapiens
  misc_RNA (1)...(19): siRNA sense strand
uccagaaaucguagacauu

SEQ ID NO: 2226730 - RNA, 19 nt, Homo sapiens
  misc_RNA (1)...(19): siRNA sense strand
gguacaaagaagauggaau

SEQ ID NO: 2226731 - RNA, 19 nt, Homo sapiens
  misc_RNA (1)...(19): siRNA sense strand
aggaaacaccagugccaaa

SEQ ID NO: 2226732 - RNA, 19 nt, Homo sapiens
  misc_RNA (1)...(19): siRNA sense strand
cgucaacagugaugggagu

SEQ ID NO: 2226733 - RNA, 19 nt, Homo sapiens
  misc_RNA (1)...(19): siRNA sense strand
gcauggaacucgaggcuuc

SEQ ID NO: 2226734 - RNA, 19 nt, Homo sapiens
  misc_RNA (1)...(19): siRNA sense strand
cuguccggcuccugagaaa

SEQ ID NO: 2226735 - RNA, 19 nt, Homo sapiens
  misc_RNA (1)...(19): siRNA sense strand
agguggaauucaaacacaa

SEQ ID NO: 2226736 - RNA, 19 nt, Homo sapiens
  misc_RNA (1)...(19): siRNA sense strand
ccagaaaagaguuacgauu

SEQ ID NO: 2226737 - RNA, 19 nt, Homo sapiens
  misc_RNA (1)...(19): siRNA sense strand
aauacauccuguuggugaa

SEQ ID NO: 2226738 - RNA, 19 nt, Homo sapiens
  misc_RNA (1)...(19): siRNA sense strand
ccaacaaagaagaagcgga

SEQ ID NO: 2226739 - RNA, 19 nt, Homo sapiens
  misc_RNA (1)...(19): siRNA sense strand
cggagaaagacuacggaug

SEQ ID NO: 2226740 - RNA, 19 nt, Homo sapiens
  misc_RNA (1)...(19): siRNA sense strand
cugugauccuggagaaacu

SEQ ID NO: 2226741 - RNA, 19 nt, Homo sapiens
  misc_RNA (1)...(19): siRNA sense strand
caacaaagaagaagcggag

SEQ ID NO: 2226742 - RNA, 19 nt, Homo sapiens
  misc_RNA (1)...(19): siRNA sense strand
gugccagaaucacaagcaa

SEQ ID NO: 2226743 - RNA, 19 nt, Homo sapiens
  misc_RNA (1)...(19): siRNA sense strand
cccaagaagagcuacgaau

SEQ ID NO: 2226744 - RNA, 19 nt, Homo sapiens
  misc_RNA (1)...(19): siRNA sense strand
uguugaaagcugcgaaguu

SEQ ID NO: 2226745 - RNA, 19 nt, Homo sapiens
  misc_RNA (1)...(19): siRNA sense strand
agaagauggaauuauggaa

SEQ ID NO: 2226746 - RNA, 19 nt, Homo sapiens
  misc_RNA (1)...(19): siRNA sense strand
cggacaucccugugcauca

SEQ ID NO: 2226747 - RNA, 19 nt, Homo sapiens
  misc_RNA (1)...(19): siRNA sense strand
guauaaggugacuguccaa

SEQ ID NO: 2226748 - RNA, 19 nt, Homo sapiens
  misc_RNA (1)...(19): siRNA sense strand
uagcuaagccugagaaccu

SEQ ID NO: 2226749 - RNA, 19 nt, Homo sapiens
  misc_RNA (1)...(19): siRNA sense strand
gguuaagugguccucgaaa

SEQ ID NO: 2226750 - RNA, 19 nt, Homo sapiens
  misc_RNA (1)...(19): siRNA sense strand
acggaaagcagacagaaca

SEQ ID NO: 2226751 - RNA, 19 nt, Homo sapiens
  misc_RNA (1)...(19): siRNA sense strand
gaagaagcggagaaagacu

SEQ ID NO: 2226752 - RNA, 19 nt, Homo sapiens
  misc_RNA (1)...(19): siRNA sense strand
ccaacacgcugcugggcaa

SEQ ID NO: 2226753 - RNA, 19 nt, Homo sapiens
  misc_RNA (1)...(19): siRNA sense strand
cuaagaaacgcaugcgcua

SEQ ID NO: 2226754 - RNA, 19 nt, Homo sapiens
  misc_RNA (1)...(19): siRNA sense strand
gaauaauagcauagcccau

SEQ ID NO: 2226755 - RNA, 19 nt, Homo sapiens
  misc_RNA (1)...(19): siRNA sense strand
cggaagaagcugagucgca

SEQ ID NO: 2226756 - RNA, 19 nt, Homo sapiens
  misc_RNA (1)...(19): siRNA sense strand
ucauagacauuguggccau

SEQ ID NO: 2226757 - RNA, 19 nt, Homo sapiens
  misc_RNA (1)...(19): siRNA sense strand
aaguaugaguacauggaga

SEQ ID NO: 2226758 - RNA, 19 nt, Homo sapiens
  misc_RNA (1)...(19): siRNA sense strand
uggagaucgaagaggauau

SEQ ID NO: 2226759 - RNA, 19 nt, Homo sapiens
  misc_RNA (1)...(19): siRNA sense strand
cguuaauaagagcaagcua

SEQ ID NO: 2226760 - RNA, 19 nt, Homo sapiens
  misc_RNA (1)...(19): siRNA sense strand
aaggaaaccagaagggcga

SEQ ID NO: 2226761 - RNA, 19 nt, Homo sapiens
  misc_RNA (1)...(19): siRNA sense strand
acauggagaucgaagagga

SEQ ID NO: 2226762 - RNA, 19 nt, Homo sapiens
  misc_RNA (1)...(19): siRNA sense strand
ccgagauagcugagcagga

SEQ ID NO: 2226763 - RNA, 19 nt, Homo sapiens
  misc_RNA (1)...(19): siRNA sense strand
gcuucgagacgcagcucaa

SEQ ID NO: 2226764 - RNA, 19 nt, Homo sapiens
  misc_RNA (1)...(19): siRNA sense strand
agaucgaagaggauaugaa

SEQ ID NO: 2226765 - RNA, 19 nt, Homo sapiens
  misc_RNA (1)...(19): siRNA sense strand
gaggcaagaucgugggcuc

SEQ ID NO: 2226766 - RNA, 19 nt, Homo sapiens
  misc_RNA (1)...(19): siRNA sense strand
augaguacauggagaucga

SEQ ID NO: 2226767 - RNA, 19 nt, Homo sapiens
  misc_RNA (1)...(19): siRNA sense strand
agagcaagcuacugaccga

SEQ ID NO: 2226768 - RNA, 19 nt, Homo sapiens
  misc_RNA (1)...(19): siRNA sense strand
aguaugaguacauggagau

SEQ ID NO: 2226769 - RNA, 19 nt, Homo sapiens
  misc_RNA (1)...(19): siRNA sense strand
ugagcaaguaugaguacau

SEQ ID NO: 2226770 - RNA, 19 nt, Homo sapiens
  misc_RNA (1)...(19): siRNA sense strand
cagcagaagcagaggcaga

SEQ ID NO: 2226771 - RNA, 19 nt, Homo sapiens
  misc_RNA (1)...(19): siRNA sense strand
cugagaaggacgcggugaa

SEQ ID NO: 2226772 - RNA, 19 nt, Homo sapiens
  misc_RNA (1)...(19): siRNA sense strand
ccgccugaaccgaguagaa

SEQ ID NO: 2226773 - RNA, 19 nt, Homo sapiens
  misc_RNA (1)...(19): siRNA sense strand
ugaaccgaguagaagacaa

SEQ ID NO: 2226774 - RNA, 19 nt, Homo sapiens
  misc_RNA (1)...(19): siRNA sense strand
acuuuguggccaagaagaa

SEQ ID NO: 2226775 - RNA, 19 nt, Homo sapiens
  misc_RNA (1)...(19): siRNA sense strand
ucuguaaggaagagcccaa

SEQ ID NO: 2226776 - RNA, 19 nt, Homo sapiens
  misc_RNA (1)...(19): siRNA sense strand
ccaagaagucugugguggu

SEQ ID NO: 2226777 - RNA, 19 nt, Homo sapiens
  misc_RNA (1)...(19): siRNA sense strand
aagcagaggcagaagcacu

SEQ ID NO: 2226778 - RNA, 19 nt, Homo sapiens
  misc_RNA (1)...(19): siRNA sense strand
ugcaguacuuuguggccaa

SEQ ID NO: 2226779 - RNA, 19 nt, Homo sapiens
  misc_RNA (1)...(19): siRNA sense strand
cagcaagcgcggaagccuu

SEQ ID NO: 2226780 - RNA, 19 nt, Homo sapiens
  misc_RNA (1)...(19): siRNA sense strand
ggauggagaucgugcuggu

SEQ ID NO: 2226781 - RNA, 19 nt, Homo sapiens
  misc_RNA (1)...(19): siRNA sense strand
agaucgugcuggugguguu

SEQ ID NO: 2226782 - RNA, 19 nt, Homo sapiens
  misc_RNA (1)...(19): siRNA sense strand
cagcagaagcagaggcaga

SEQ ID NO: 2226783 - RNA, 19 nt, Homo sapiens
  misc_RNA (1)...(19): siRNA sense strand
cugagaaggacgcggugaa

SEQ ID NO: 2226784 - RNA, 19 nt, Homo sapiens
  misc_RNA (1)...(19): siRNA sense strand
ccgccugaaccgaguagaa

SEQ ID NO: 2226785 - RNA, 19 nt, Homo sapiens
  misc_RNA (1)...(19): siRNA sense strand
ugaaccgaguagaagacaa

SEQ ID NO: 2226786 - RNA, 19 nt, Homo sapiens
  misc_RNA (1)...(19): siRNA sense strand
acuuuguggccaagaagaa

SEQ ID NO: 2226787 - RNA, 19 nt, Homo sapiens
  misc_RNA (1)...(19): siRNA sense strand
ucuguaaggaagagcccaa

SEQ ID NO: 2226788 - RNA, 19 nt, Homo sapiens
  misc_RNA (1)...(19): siRNA sense strand
ccaagaagucugugguggu

SEQ ID NO: 2226789 - RNA, 19 nt, Homo sapiens
  misc_RNA (1)...(19): siRNA sense strand
aagcagaggcagaagcacu

SEQ ID NO: 2226790 - RNA, 19 nt, Homo sapiens
  misc_RNA (1)...(19): siRNA sense strand
ugcaguacuuuguggccaa

SEQ ID NO: 2226791 - RNA, 19 nt, Homo sapiens
  misc_RNA (1)...(19): siRNA sense strand
cagcaagcgcggaagccuu

SEQ ID NO: 2226792 - RNA, 19 nt, Homo sapiens
  misc_RNA (1)...(19): siRNA sense strand
ggauggagaucgugcuggu

SEQ ID NO: 2226793 - RNA, 19 nt, Homo sapiens
  misc_RNA (1)...(19): siRNA sense strand
agaucgugcuggugguguu

SEQ ID NO: 2226794 - RNA, 19 nt, Homo sapiens
  misc_RNA (1)...(19): siRNA sense strand
cagcagaagcagaggcaga

SEQ ID NO: 2226795 - RNA, 19 nt, Homo sapiens
  misc_RNA (1)...(19): siRNA sense strand
cugagaaggacgcggugaa

SEQ ID NO: 2226796 - RNA, 19 nt, Homo sapiens
  misc_RNA (1)...(19): siRNA sense strand
ccgccugaaccgaguagaa

SEQ ID NO: 2226797 - RNA, 19 nt, Homo sapiens
  misc_RNA (1)...(19): siRNA sense strand
ugaaccgaguagaagacaa

SEQ ID NO: 2226798 - RNA, 19 nt, Homo sapiens
  misc_RNA (1)...(19): siRNA sense strand
acuuuguggccaagaagaa

SEQ ID NO: 2226799 - RNA, 19 nt, Homo sapiens
  misc_RNA (1)...(19): siRNA sense strand
ucuguaaggaagagcccaa

SEQ ID NO: 2226800 - RNA, 19 nt, Homo sapiens
  misc_RNA (1)...(19): siRNA sense strand
ccaagaagucugugguggu

SEQ ID NO: 2226801 - RNA, 19 nt, Homo sapiens
  misc_RNA (1)...(19): siRNA sense strand
aagcagaggcagaagcacu

SEQ ID NO: 2226802 - RNA, 19 nt, Homo sapiens
  misc_RNA (1)...(19): siRNA sense strand
ugcaguacuuuguggccaa

SEQ ID NO: 2226803 - RNA, 19 nt, Homo sapiens
  misc_RNA (1)...(19): siRNA sense strand
cagcaagcgcggaagccuu

SEQ ID NO: 2226804 - RNA, 19 nt, Homo sapiens
  misc_RNA (1)...(19): siRNA sense strand
ggauggagaucgugcuggu

SEQ ID NO: 2226805 - RNA, 19 nt, Homo sapiens
  misc_RNA (1)...(19): siRNA sense strand
agaucgugcuggugguguu

SEQ ID NO: 2226806 - RNA, 19 nt, Homo sapiens
  misc_RNA (1)...(19): siRNA sense strand
ccaucuggccauagaacaa

SEQ ID NO: 2226807 - RNA, 19 nt, Homo sapiens
  misc_RNA (1)...(19): siRNA sense strand
aagagaaggacaaggccua

SEQ ID NO: 2226808 - RNA, 19 nt, Homo sapiens
  misc_RNA (1)...(19): siRNA sense strand
ccaagaagcuggagcacuc

SEQ ID NO: 2226809 - RNA, 19 nt, Homo sapiens
  misc_RNA (1)...(19): siRNA sense strand
cgugcuaugucguugaaaa

SEQ ID NO: 2226810 - RNA, 19 nt, Homo sapiens
  misc_RNA (1)...(19): siRNA sense strand
ccuggcaagagaaggacaa

SEQ ID NO: 2226811 - RNA, 19 nt, Homo sapiens
  misc_RNA (1)...(19): siRNA sense strand
gcaucauccccgaggaaua

SEQ ID NO: 2226812 - RNA, 19 nt, Homo sapiens
  misc_RNA (1)...(19): siRNA sense strand
uggaaggcgugguggaaac

SEQ ID NO: 2226813 - RNA, 19 nt, Homo sapiens
  misc_RNA (1)...(19): siRNA sense strand
ccauuguagcugaggagga

SEQ ID NO: 2226814 - RNA, 19 nt, Homo sapiens
  misc_RNA (1)...(19): siRNA sense strand
acaugcaggugguacgcaa

SEQ ID NO: 2226815 - RNA, 19 nt, Homo sapiens
  misc_RNA (1)...(19): siRNA sense strand
agaacauggcccaggacaa

SEQ ID NO: 2226816 - RNA, 19 nt, Homo sapiens
  misc_RNA (1)...(19): siRNA sense strand
cagaaagcucagccagaaa

SEQ ID NO: 2226817 - RNA, 19 nt, Homo sapiens
  misc_RNA (1)...(19): siRNA sense strand
gaggaagagccgagggaac

SEQ ID NO: 2226818 - RNA, 19 nt, Homo sapiens
  misc_RNA (1)...(19): siRNA sense strand
ggaugaagugcguggagga

SEQ ID NO: 2226819 - RNA, 19 nt, Homo sapiens
  misc_RNA (1)...(19): siRNA sense strand
ugucacaacugguggagga

SEQ ID NO: 2226820 - RNA, 19 nt, Homo sapiens
  misc_RNA (1)...(19): siRNA sense strand
gggaccaaagugaggaaga

SEQ ID NO: 2226821 - RNA, 19 nt, Homo sapiens
  misc_RNA (1)...(19): siRNA sense strand
ggaugaaugaggagaccca

SEQ ID NO: 2226822 - RNA, 19 nt, Homo sapiens
  misc_RNA (1)...(19): siRNA sense strand
gcgggaacugacagagcaa

SEQ ID NO: 2226823 - RNA, 19 nt, Homo sapiens
  misc_RNA (1)...(19): siRNA sense strand
gggacuuucugcagagcca

SEQ ID NO: 2226824 - RNA, 19 nt, Homo sapiens
  misc_RNA (1)...(19): siRNA sense strand
cugcaggcauacagcaaga

SEQ ID NO: 2226825 - RNA, 19 nt, Homo sapiens
  misc_RNA (1)...(19): siRNA sense strand
aucaagaacagaagaucua

SEQ ID NO: 2226826 - RNA, 19 nt, Homo sapiens
  misc_RNA (1)...(19): siRNA sense strand
gcaagaggcuguuacggca

SEQ ID NO: 2226827 - RNA, 19 nt, Homo sapiens
  misc_RNA (1)...(19): siRNA sense strand
cacaacugguggaggagau

SEQ ID NO: 2226828 - RNA, 19 nt, Homo sapiens
  misc_RNA (1)...(19): siRNA sense strand
cagacaaguuauugaggag

SEQ ID NO: 2226829 - RNA, 19 nt, Homo sapiens
  misc_RNA (1)...(19): siRNA sense strand
cggcuuuguuuguucguga

SEQ ID NO: 2226830 - RNA, 19 nt, Homo sapiens
  misc_RNA (1)...(19): siRNA sense strand
guggaagggagcaggccau

SEQ ID NO: 2226831 - RNA, 19 nt, Homo sapiens
  misc_RNA (1)...(19): siRNA sense strand
gggcacagggcaagcucuu

SEQ ID NO: 2226832 - RNA, 19 nt, Homo sapiens
  misc_RNA (1)...(19): siRNA sense strand
ccacaugaucuuagggcug

SEQ ID NO: 2226833 - RNA, 19 nt, Homo sapiens
  misc_RNA (1)...(19): siRNA sense strand
augaggagacccagaacau

SEQ ID NO: 2226834 - RNA, 19 nt, Homo sapiens
  misc_RNA (1)...(19): siRNA sense strand
cgcagaaagcucagccaga

SEQ ID NO: 2226835 - RNA, 19 nt, Homo sapiens
  misc_RNA (1)...(19): siRNA sense strand
gaaccuugcugggaggaga

SEQ ID NO: 2226836 - RNA, 19 nt, Homo sapiens
  misc_RNA (1)...(19): siRNA sense strand
ugaagaugcugcagcggau

SEQ ID NO: 2226837 - RNA, 19 nt, Homo sapiens
  misc_RNA (1)...(19): siRNA sense strand
gagcagaagauccgggugu

SEQ ID NO: 2226838 - RNA, 19 nt, Homo sapiens
  misc_RNA (1)...(19): siRNA sense strand
ucagcaaagauguggccaa

SEQ ID NO: 2226839 - RNA, 19 nt, Homo sapiens
  misc_RNA (1)...(19): siRNA sense strand
acaaguacccuaaggagga

SEQ ID NO: 2226840 - RNA, 19 nt, Homo sapiens
  misc_RNA (1)...(19): siRNA sense strand
acgugguguuugucagcaa

SEQ ID NO: 2226841 - RNA, 19 nt, Homo sapiens
  misc_RNA (1)...(19): siRNA sense strand
acgcaucggagcaggugaa

SEQ ID NO: 2226842 - RNA, 19 nt, Homo sapiens
  misc_RNA (1)...(19): siRNA sense strand
uguccguggagguggagaa

SEQ ID NO: 2226843 - RNA, 19 nt, Homo sapiens
  misc_RNA (1)...(19): siRNA sense strand
ggagaagccacgagaggag

SEQ ID NO: 2226844 - RNA, 19 nt, Homo sapiens
  misc_RNA (1)...(19): siRNA sense strand
ugcaggaagcacugagauu

SEQ ID NO: 2226845 - RNA, 19 nt, Homo sapiens
  misc_RNA (1)...(19): siRNA sense strand
ccuaaggaggacucggaga

SEQ ID NO: 2226846 - RNA, 19 nt, Homo sapiens
  misc_RNA (1)...(19): siRNA sense strand
ugaagaugcugcagcggau

SEQ ID NO: 2226847 - RNA, 19 nt, Homo sapiens
  misc_RNA (1)...(19): siRNA sense strand
gagcagaagauccgggugu

SEQ ID NO: 2226848 - RNA, 19 nt, Homo sapiens
  misc_RNA (1)...(19): siRNA sense strand
ucagcaaagauguggccaa

SEQ ID NO: 2226849 - RNA, 19 nt, Homo sapiens
  misc_RNA (1)...(19): siRNA sense strand
acaaguacccuaaggagga

SEQ ID NO: 2226850 - RNA, 19 nt, Homo sapiens
  misc_RNA (1)...(19): siRNA sense strand
acgugguguuugucagcaa

SEQ ID NO: 2226851 - RNA, 19 nt, Homo sapiens
  misc_RNA (1)...(19): siRNA sense strand
acgcaucggagcaggugaa

SEQ ID NO: 2226852 - RNA, 19 nt, Homo sapiens
  misc_RNA (1)...(19): siRNA sense strand
uguccguggagguggagaa

SEQ ID NO: 2226853 - RNA, 19 nt, Homo sapiens
  misc_RNA (1)...(19): siRNA sense strand
ggagaagccacgagaggag

SEQ ID NO: 2226854 - RNA, 19 nt, Homo sapiens
  misc_RNA (1)...(19): siRNA sense strand
ugcaggaagcacugagauu

SEQ ID NO: 2226855 - RNA, 19 nt, Homo sapiens
  misc_RNA (1)...(19): siRNA sense strand
ccuaaggaggacucggaga

SEQ ID NO: 2226856 - RNA, 19 nt, Homo sapiens
  misc_RNA (1)...(19): siRNA sense strand
ggaugaaacgaaugagaau

SEQ ID NO: 2226857 - RNA, 19 nt, Homo sapiens
  misc_RNA (1)...(19): siRNA sense strand
ccuuggaaguaguagauaa

SEQ ID NO: 2226858 - RNA, 19 nt, Homo sapiens
  misc_RNA (1)...(19): siRNA sense strand
cugauaaaugggaagauua

SEQ ID NO: 2226859 - RNA, 19 nt, Homo sapiens
  misc_RNA (1)...(19): siRNA sense strand
agucugagaaugaaaguaa

SEQ ID NO: 2226860 - RNA, 19 nt, Homo sapiens
  misc_RNA (1)...(19): siRNA sense strand
guaacaacaaagagcaaau

SEQ ID NO: 2226861 - RNA, 19 nt, Homo sapiens
  misc_RNA (1)...(19): siRNA sense strand
cuuggaaguaguagauaaa

SEQ ID NO: 2226862 - RNA, 19 nt, Homo sapiens
  misc_RNA (1)...(19): siRNA sense strand
cuuacaacgaugugggcaa

SEQ ID NO: 2226863 - RNA, 19 nt, Homo sapiens
  misc_RNA (1)...(19): siRNA sense strand
gagucuuccugcagcgaua

SEQ ID NO: 2226864 - RNA, 19 nt, Homo sapiens
  misc_RNA (1)...(19): siRNA sense strand
uuggaaagcuagugguuca

SEQ ID NO: 2226865 - RNA, 19 nt, Homo sapiens
  misc_RNA (1)...(19): siRNA sense strand
uugaggagauaaauggaaa

SEQ ID NO: 2226866 - RNA, 19 nt, Homo sapiens
  misc_RNA (1)...(19): siRNA sense strand
agguaacaacaaagagcaa

SEQ ID NO: 2226867 - RNA, 19 nt, Homo sapiens
  misc_RNA (1)...(19): siRNA sense strand
agucagugcugucggaaaa

SEQ ID NO: 2226868 - RNA, 19 nt, Homo sapiens
  misc_RNA (1)...(19): siRNA sense strand
cuggaguguucauguguua

SEQ ID NO: 2226869 - RNA, 19 nt, Homo sapiens
  misc_RNA (1)...(19): siRNA sense strand
cgggaagguuguugaggca

SEQ ID NO: 2226870 - RNA, 19 nt, Homo sapiens
  misc_RNA (1)...(19): siRNA sense strand
cuguggaccaggagggcaa

SEQ ID NO: 2226871 - RNA, 19 nt, Homo sapiens
  misc_RNA (1)...(19): siRNA sense strand
uguaaacgauggagaaaau

SEQ ID NO: 2226872 - RNA, 19 nt, Homo sapiens
  misc_RNA (1)...(19): siRNA sense strand
acuaaugaguacauggaca

SEQ ID NO: 2226873 - RNA, 19 nt, Homo sapiens
  misc_RNA (1)...(19): siRNA sense strand
aaugaauggaucacggaaa

SEQ ID NO: 2226874 - RNA, 19 nt, Homo sapiens
  misc_RNA (1)...(19): siRNA sense strand
uagaagacuugcugagcuu

SEQ ID NO: 2226875 - RNA, 19 nt, Homo sapiens
  misc_RNA (1)...(19): siRNA sense strand
gagaagaaaacgugauuca

SEQ ID NO: 2226876 - RNA, 19 nt, Homo sapiens
  misc_RNA (1)...(19): siRNA sense strand
aaaggagaucugugagaau

SEQ ID NO: 2226877 - RNA, 19 nt, Homo sapiens
  misc_RNA (1)...(19): siRNA sense strand
augaauggaucacggaaaa

SEQ ID NO: 2226878 - RNA, 19 nt, Homo sapiens
  misc_RNA (1)...(19): siRNA sense strand
gggaaagaagacaacgaca

SEQ ID NO: 2226879 - RNA, 19 nt, Homo sapiens
  misc_RNA (1)...(19): siRNA sense strand
ggaaaagagaaaacaguca

SEQ ID NO: 2226880 - RNA, 19 nt, Homo sapiens
  misc_RNA (1)...(19): siRNA sense strand
agguuguugaggagauaaa

SEQ ID NO: 2226881 - RNA, 19 nt, Homo sapiens
  misc_RNA (1)...(19): siRNA sense strand
caggcugaguuuugggaaa

SEQ ID NO: 2226882 - RNA, 19 nt, Homo sapiens
  misc_RNA (1)...(19): siRNA sense strand
uuucuuaccagguggcaaa

SEQ ID NO: 2226883 - RNA, 19 nt, Homo sapiens
  misc_RNA (1)...(19): siRNA sense strand
aagcagaaugaauggauca

SEQ ID NO: 2226884 - RNA, 19 nt, Homo sapiens
  misc_RNA (1)...(19): siRNA sense strand
gacuaaacuacaggagaaa

SEQ ID NO: 2226885 - RNA, 19 nt, Homo sapiens
  misc_RNA (1)...(19): siRNA sense strand
gaaauauaauagcuggcau

SEQ ID NO: 2226886 - RNA, 19 nt, Homo sapiens
  misc_RNA (1)...(19): siRNA sense strand
aguaguagauaaaggauuc

SEQ ID NO: 2226887 - RNA, 19 nt, Homo sapiens
  misc_RNA (1)...(19): siRNA sense strand
cuaaugaguacauggacau

SEQ ID NO: 2226888 - RNA, 19 nt, Homo sapiens
  misc_RNA (1)...(19): siRNA sense strand
ggaaagaagacaacgacac

SEQ ID NO: 2226889 - RNA, 19 nt, Homo sapiens
  misc_RNA (1)...(19): siRNA sense strand
caguggaucuauaugaaca

SEQ ID NO: 2226890 - RNA, 19 nt, Homo sapiens
  misc_RNA (1)...(19): siRNA sense strand
guggaugugcagacacuaa

SEQ ID NO: 2226891 - RNA, 19 nt, Homo sapiens
  misc_RNA (1)...(19): siRNA sense strand
gguuaaaggaaacgcucga

SEQ ID NO: 2226892 - RNA, 19 nt, Homo sapiens
  misc_RNA (1)...(19): siRNA sense strand
ggcaaauacacgugcacca

SEQ ID NO: 2226893 - RNA, 19 nt, Homo sapiens
  misc_RNA (1)...(19): siRNA sense strand
acaaacacggcuuaagcaa

SEQ ID NO: 2226894 - RNA, 19 nt, Homo sapiens
  misc_RNA (1)...(19): siRNA sense strand
acugauaaaugggaagauu

SEQ ID NO: 2226895 - RNA, 19 nt, Homo sapiens
  misc_RNA (1)...(19): siRNA sense strand
gcauuuaaagguaacaaca

SEQ ID NO: 2226896 - RNA, 19 nt, Homo sapiens
  misc_RNA (1)...(19): siRNA sense strand
cuugguaaucacaugaaua

SEQ ID NO: 2226897 - RNA, 19 nt, Homo sapiens
  misc_RNA (1)...(19): siRNA sense strand
acucauggucggaucacaa

SEQ ID NO: 2226898 - RNA, 19 nt, Homo sapiens
  misc_RNA (1)...(19): siRNA sense strand
acgaaugagaauaagcaga

SEQ ID NO: 2226899 - RNA, 19 nt, Homo sapiens
  misc_RNA (1)...(19): siRNA sense strand
ccauuugacagaacgggaa

SEQ ID NO: 2226900 - RNA, 19 nt, Homo sapiens
  misc_RNA (1)...(19): siRNA sense strand
uggaugaaacgaaugagaa

SEQ ID NO: 2226901 - RNA, 19 nt, Homo sapiens
  misc_RNA (1)...(19): siRNA sense strand
ucaacguggaaaagagaaa

SEQ ID NO: 2226902 - RNA, 19 nt, Homo sapiens
  misc_RNA (1)...(19): siRNA sense strand
auuuguaaacgauggagaa

SEQ ID NO: 2226903 - RNA, 19 nt, Homo sapiens
  misc_RNA (1)...(19): siRNA sense strand
cgucugguccuaugggauu

SEQ ID NO: 2226904 - RNA, 19 nt, Homo sapiens
  misc_RNA (1)...(19): siRNA sense strand
ccaccaacaccggcaaaua

SEQ ID NO: 2226905 - RNA, 19 nt, Homo sapiens
  misc_RNA (1)...(19): siRNA sense strand
gacuaucaguucagcgaga

SEQ ID NO: 2226906 - RNA, 19 nt, Homo sapiens
  misc_RNA (1)...(19): siRNA sense strand
cuacaagaugaucaaggaa

SEQ ID NO: 2226907 - RNA, 19 nt, Homo sapiens
  misc_RNA (1)...(19): siRNA sense strand
agcaaauuguucagcuaau

SEQ ID NO: 2226908 - RNA, 19 nt, Homo sapiens
  misc_RNA (1)...(19): siRNA sense strand
cauagaaagagaugugacu

SEQ ID NO: 2226909 - RNA, 19 nt, Homo sapiens
  misc_RNA (1)...(19): siRNA sense strand
cccuagacuuagaagacuu

SEQ ID NO: 2226910 - RNA, 19 nt, Homo sapiens
  misc_RNA (1)...(19): siRNA sense strand
gugucuguguccaaagcaa

SEQ ID NO: 2226911 - RNA, 19 nt, Homo sapiens
  misc_RNA (1)...(19): siRNA sense strand
cgaaggaggcacuuacaca

SEQ ID NO: 2226912 - RNA, 19 nt, Homo sapiens
  misc_RNA (1)...(19): siRNA sense strand
aagucagugcugucggaaa

SEQ ID NO: 2226913 - RNA, 19 nt, Homo sapiens
  misc_RNA (1)...(19): siRNA sense strand
gugaauacaaaaccagaaa

SEQ ID NO: 2226914 - RNA, 19 nt, Homo sapiens
  misc_RNA (1)...(19): siRNA sense strand
gguaacaacaaagagcaaa

SEQ ID NO: 2226915 - RNA, 19 nt, Homo sapiens
  misc_RNA (1)...(19): siRNA sense strand
augagaauaagcagaauga

SEQ ID NO: 2226916 - RNA, 19 nt, Homo sapiens
  misc_RNA (1)...(19): siRNA sense strand
gggcaaugauggaggccuu

SEQ ID NO: 2226917 - RNA, 19 nt, Homo sapiens
  misc_RNA (1)...(19): siRNA sense strand
guaugaaacacgaggaacu

SEQ ID NO: 2226918 - RNA, 19 nt, Homo sapiens
  misc_RNA (1)...(19): siRNA sense strand
aggagauggugaaugguga

SEQ ID NO: 2226919 - RNA, 19 nt, Homo sapiens
  misc_RNA (1)...(19): siRNA sense strand
cguaaggagauuagcacca

SEQ ID NO: 2226920 - RNA, 19 nt, Homo sapiens
  misc_RNA (1)...(19): siRNA sense strand
ucagcaaccuggaggcaca

SEQ ID NO: 2226921 - RNA, 19 nt, Homo sapiens
  misc_RNA (1)...(19): siRNA sense strand
gggugcugguuaugggaga

SEQ ID NO: 2226922 - RNA, 19 nt, Homo sapiens
  misc_RNA (1)...(19): siRNA sense strand
aggacugggugcugguuau

SEQ ID NO: 2226923 - RNA, 19 nt, Homo sapiens
  misc_RNA (1)...(19): siRNA sense strand
ugaacgaggagcuggccua

SEQ ID NO: 2226924 - RNA, 19 nt, Homo sapiens
  misc_RNA (1)...(19): siRNA sense strand
gcagagugugauaggcaga

SEQ ID NO: 2226925 - RNA, 19 nt, Homo sapiens
  misc_RNA (1)...(19): siRNA sense strand
ugaagaaaucccuggagga

SEQ ID NO: 2226926 - RNA, 19 nt, Homo sapiens
  misc_RNA (1)...(19): siRNA sense strand
aggcuaauacugagcuaga

SEQ ID NO: 2226927 - RNA, 19 nt, Homo sapiens
  misc_RNA (1)...(19): siRNA sense strand
caguguuggaagugguuau

SEQ ID NO: 2226928 - RNA, 19 nt, Homo sapiens
  misc_RNA (1)...(19): siRNA sense strand
ugguaugaaacacgaggaa

SEQ ID NO: 2226929 - RNA, 19 nt, Homo sapiens
  misc_RNA (1)...(19): siRNA sense strand
aaaccaucgcugagcagaa

SEQ ID NO: 2226930 - RNA, 19 nt, Homo sapiens
  misc_RNA (1)...(19): siRNA sense strand
gagacuagcugcugaggac

SEQ ID NO: 2226931 - RNA, 19 nt, Homo sapiens
  misc_RNA (1)...(19): siRNA sense strand
cucuaaagacccaaccaaa

SEQ ID NO: 2226932 - RNA, 19 nt, Homo sapiens
  misc_RNA (1)...(19): siRNA sense strand
aggugaugguuuggaggaa

SEQ ID NO: 2226933 - RNA, 19 nt, Homo sapiens
  misc_RNA (1)...(19): siRNA sense strand
ugauugaagaccucaggaa

SEQ ID NO: 2226934 - RNA, 19 nt, Homo sapiens
  misc_RNA (1)...(19): siRNA sense strand
ucgagaaugguaugaaaca

SEQ ID NO: 2226935 - RNA, 19 nt, Homo sapiens
  misc_RNA (1)...(19): siRNA sense strand
ucuaaagacccaaccaaaa

SEQ ID NO: 2226936 - RNA, 19 nt, Homo sapiens
  misc_RNA (1)...(19): siRNA sense strand
cagagcgauuacagcaaau

SEQ ID NO: 2226937 - RNA, 19 nt, Homo sapiens
  misc_RNA (1)...(19): siRNA sense strand
ccucuaaagacccaaccaa

SEQ ID NO: 2226938 - RNA, 19 nt, Homo sapiens
  misc_RNA (1)...(19): siRNA sense strand
agaagaaccacgaggagga

SEQ ID NO: 2226939 - RNA, 19 nt, Homo sapiens
  misc_RNA (1)...(19): siRNA sense strand
gcgagauggagcagcagaa

SEQ ID NO: 2226940 - RNA, 19 nt, Homo sapiens
  misc_RNA (1)...(19): siRNA sense strand
aggauauggugguggccuu

SEQ ID NO: 2226941 - RNA, 19 nt, Homo sapiens
  misc_RNA (1)...(19): siRNA sense strand
gagaagaaccgcaaggaug

SEQ ID NO: 2226942 - RNA, 19 nt, Homo sapiens
  misc_RNA (1)...(19): siRNA sense strand
ugaaggaggagcuggccua

SEQ ID NO: 2226943 - RNA, 19 nt, Homo sapiens
  misc_RNA (1)...(19): siRNA sense strand
uggcagagaagaaccgcaa

SEQ ID NO: 2226944 - RNA, 19 nt, Homo sapiens
  misc_RNA (1)...(19): siRNA sense strand
auugaggaccugaggaaca

SEQ ID NO: 2226945 - RNA, 19 nt, Homo sapiens
  misc_RNA (1)...(19): siRNA sense strand
ccaagacagaggagcugaa

SEQ ID NO: 2226946 - RNA, 19 nt, Homo sapiens
  misc_RNA (1)...(19): siRNA sense strand
agcagaaccaggaguacaa

SEQ ID NO: 2226947 - RNA, 19 nt, Homo sapiens
  misc_RNA (1)...(19): siRNA sense strand
agauggagcagcagaacca

SEQ ID NO: 2226948 - RNA, 19 nt, Homo sapiens
  misc_RNA (1)...(19): siRNA sense strand
uggaugugcacgauggcaa

SEQ ID NO: 2226949 - RNA, 19 nt, Homo sapiens
  misc_RNA (1)...(19): siRNA sense strand
uggcuuugcugguggugau

SEQ ID NO: 2226950 - RNA, 19 nt, Homo sapiens
  misc_RNA (1)...(19): siRNA sense strand
aguaugagaagauggcaga

SEQ ID NO: 2226951 - RNA, 19 nt, Homo sapiens
  misc_RNA (1)...(19): siRNA sense strand
cagaggagcugaaccgcga

SEQ ID NO: 2226952 - RNA, 19 nt, Homo sapiens
  misc_RNA (1)...(19): siRNA sense strand
gagaacagccuggaggaga

SEQ ID NO: 2226953 - RNA, 19 nt, Homo sapiens
  misc_RNA (1)...(19): siRNA sense strand
accacgaggaggagaugaa

SEQ ID NO: 2226954 - RNA, 19 nt, Homo sapiens
  misc_RNA (1)...(19): siRNA sense strand
gugaccaguaugagaagau

SEQ ID NO: 2226955 - RNA, 19 nt, Homo sapiens
  misc_RNA (1)...(19): siRNA sense strand
agccaguacuacaggacaa

SEQ ID NO: 2226956 - RNA, 19 nt, Homo sapiens
  misc_RNA (1)...(19): siRNA sense strand
agaagaaccacgaggagga

SEQ ID NO: 2226957 - RNA, 19 nt, Homo sapiens
  misc_RNA (1)...(19): siRNA sense strand
gcgagauggagcagcagaa

SEQ ID NO: 2226958 - RNA, 19 nt, Homo sapiens
  misc_RNA (1)...(19): siRNA sense strand
gagaagaaccgcaaggaug

SEQ ID NO: 2226959 - RNA, 19 nt, Homo sapiens
  misc_RNA (1)...(19): siRNA sense strand
agauagagcugcaguccca

SEQ ID NO: 2226960 - RNA, 19 nt, Homo sapiens
  misc_RNA (1)...(19): siRNA sense strand
guguggaggccgacaucaa

SEQ ID NO: 2226961 - RNA, 19 nt, Homo sapiens
  misc_RNA (1)...(19): siRNA sense strand
uggcagagaagaaccgcaa

SEQ ID NO: 2226962 - RNA, 19 nt, Homo sapiens
  misc_RNA (1)...(19): siRNA sense strand
ggacaauugaggagcugca

SEQ ID NO: 2226963 - RNA, 19 nt, Homo sapiens
  misc_RNA (1)...(19): siRNA sense strand
ucaaggaggagcuggccua

SEQ ID NO: 2226964 - RNA, 19 nt, Homo sapiens
  misc_RNA (1)...(19): siRNA sense strand
agaaagaaccggugaccac

SEQ ID NO: 2226965 - RNA, 19 nt, Homo sapiens
  misc_RNA (1)...(19): siRNA sense strand
agauggagcagcagaacca

SEQ ID NO: 2226966 - RNA, 19 nt, Homo sapiens
  misc_RNA (1)...(19): siRNA sense strand
aguaugagaagauggcaga

SEQ ID NO: 2226967 - RNA, 19 nt, Homo sapiens
  misc_RNA (1)...(19): siRNA sense strand
cagaggaacugaaccgcga

SEQ ID NO: 2226968 - RNA, 19 nt, Homo sapiens
  misc_RNA (1)...(19): siRNA sense strand
ucagcaagacagaggaacu

SEQ ID NO: 2226969 - RNA, 19 nt, Homo sapiens
  misc_RNA (1)...(19): siRNA sense strand
ccaugcaggccuuggagau

SEQ ID NO: 2226970 - RNA, 19 nt, Homo sapiens
  misc_RNA (1)...(19): siRNA sense strand
ccuuggagauagagcugca

SEQ ID NO: 2226971 - RNA, 19 nt, Homo sapiens
  misc_RNA (1)...(19): siRNA sense strand
agcagcagaaccaggaaua

SEQ ID NO: 2226972 - RNA, 19 nt, Homo sapiens
  misc_RNA (1)...(19): siRNA sense strand
accacgaggaggagaugaa

SEQ ID NO: 2226973 - RNA, 19 nt, Homo sapiens
  misc_RNA (1)...(19): siRNA sense strand
gugaccaguaugagaagau

SEQ ID NO: 2226974 - RNA, 19 nt, Homo sapiens
  misc_RNA (1)...(19): siRNA sense strand
cugcagaacaagauccuca

SEQ ID NO: 2226975 - RNA, 19 nt, Homo sapiens
  misc_RNA (1)...(19): siRNA sense strand
aggucaagcuggaggcuga

SEQ ID NO: 2226976 - RNA, 19 nt, Homo sapiens
  misc_RNA (1)...(19): siRNA sense strand
ccggauaguggauggcaaa

SEQ ID NO: 2226977 - RNA, 19 nt, Homo sapiens
  misc_RNA (1)...(19): siRNA sense strand
gagucaaguaugagacaga

SEQ ID NO: 2226978 - RNA, 19 nt, Homo sapiens
  misc_RNA (1)...(19): siRNA sense strand
ggacuuuaaucuuggugau

SEQ ID NO: 2226979 - RNA, 19 nt, Homo sapiens
  misc_RNA (1)...(19): siRNA sense strand
acaccaaaguucugaggca

SEQ ID NO: 2226980 - RNA, 19 nt, Homo sapiens
  misc_RNA (1)...(19): siRNA sense strand
uggaagauggcgaggacuu

SEQ ID NO: 2226981 - RNA, 19 nt, Homo sapiens
  misc_RNA (1)...(19): siRNA sense strand
ccaaaguucugaggcauua

SEQ ID NO: 2226982 - RNA, 19 nt, Homo sapiens
  misc_RNA (1)...(19): siRNA sense strand
accggaggcuggagagcaa

SEQ ID NO: 2226983 - RNA, 19 nt, Homo sapiens
  misc_RNA (1)...(19): siRNA sense strand
agaacgagaaggagaccau

SEQ ID NO: 2226984 - RNA, 19 nt, Homo sapiens
  misc_RNA (1)...(19): siRNA sense strand
agaagaaccacgaagagga

SEQ ID NO: 2226985 - RNA, 19 nt, Homo sapiens
  misc_RNA (1)...(19): siRNA sense strand
gccggauaguggauggcaa

SEQ ID NO: 2226986 - RNA, 19 nt, Homo sapiens
  misc_RNA (1)...(19): siRNA sense strand
aguaugaggcccugcugaa

SEQ ID NO: 2226987 - RNA, 19 nt, Homo sapiens
  misc_RNA (1)...(19): siRNA sense strand
acaucaaggucaagcugga

SEQ ID NO: 2226988 - RNA, 19 nt, Homo sapiens
  misc_RNA (1)...(19): siRNA sense strand
accacgaagaggaaguaaa

SEQ ID NO: 2226989 - RNA, 19 nt, Homo sapiens
  misc_RNA (1)...(19): siRNA sense strand
gagaacagccugagggagg

SEQ ID NO: 2226990 - RNA, 19 nt, Homo sapiens
  misc_RNA (1)...(19): siRNA sense strand
gcaaaauccgggagcacuu

SEQ ID NO: 2226991 - RNA, 19 nt, Homo sapiens
  misc_RNA (1)...(19): siRNA sense strand
ugcugaacaucaaggucaa

SEQ ID NO: 2226992 - RNA, 19 nt, Homo sapiens
  misc_RNA (1)...(19): siRNA sense strand
cugcugaacaucaagguca

SEQ ID NO: 2226993 - RNA, 19 nt, Homo sapiens
  misc_RNA (1)...(19): siRNA sense strand
augagaaaucugaaggcca

SEQ ID NO: 2226994 - RNA, 19 nt, Homo sapiens
  misc_RNA (1)...(19): siRNA sense strand
aggucaagcuggaggcuga

SEQ ID NO: 2226995 - RNA, 19 nt, Homo sapiens
  misc_RNA (1)...(19): siRNA sense strand
ccggauaguggauggcaaa

SEQ ID NO: 2226996 - RNA, 19 nt, Homo sapiens
  misc_RNA (1)...(19): siRNA sense strand
gagucaaguaugagacaga

SEQ ID NO: 2226997 - RNA, 19 nt, Homo sapiens
  misc_RNA (1)...(19): siRNA sense strand
ggacuuuaaucuuggugau

SEQ ID NO: 2226998 - RNA, 19 nt, Homo sapiens
  misc_RNA (1)...(19): siRNA sense strand
acaccaaaguucugaggca

SEQ ID NO: 2226999 - RNA, 19 nt, Homo sapiens
  misc_RNA (1)...(19): siRNA sense strand
uggaagauggcgaggacuu

SEQ ID NO: 2227000 - RNA, 19 nt, Homo sapiens
  misc_RNA (1)...(19): siRNA sense strand
ccaaaguucugaggcauua

SEQ ID NO: 2227001 - RNA, 19 nt, Homo sapiens
  misc_RNA (1)...(19): siRNA sense strand
accggaggcuggagagcaa

SEQ ID NO: 2227002 - RNA, 19 nt, Homo sapiens
  misc_RNA (1)...(19): siRNA sense strand
agaacgagaaggagaccau

SEQ ID NO: 2227003 - RNA, 19 nt, Homo sapiens
  misc_RNA (1)...(19): siRNA sense strand
agaagaaccacgaagagga

SEQ ID NO: 2227004 - RNA, 19 nt, Homo sapiens
  misc_RNA (1)...(19): siRNA sense strand
gccggauaguggauggcaa

SEQ ID NO: 2227005 - RNA, 19 nt, Homo sapiens
  misc_RNA (1)...(19): siRNA sense strand
aguaugaggcccugcugaa

SEQ ID NO: 2227006 - RNA, 19 nt, Homo sapiens
  misc_RNA (1)...(19): siRNA sense strand
acaucaaggucaagcugga

SEQ ID NO: 2227007 - RNA, 19 nt, Homo sapiens
  misc_RNA (1)...(19): siRNA sense strand
accacgaagaggaaguaaa

SEQ ID NO: 2227008 - RNA, 19 nt, Homo sapiens
  misc_RNA (1)...(19): siRNA sense strand
gagaacagccugagggagg

SEQ ID NO: 2227009 - RNA, 19 nt, Homo sapiens
  misc_RNA (1)...(19): siRNA sense strand
gcaaaauccgggagcacuu

SEQ ID NO: 2227010 - RNA, 19 nt, Homo sapiens
  misc_RNA (1)...(19): siRNA sense strand
ugcugaacaucaaggucaa

SEQ ID NO: 2227011 - RNA, 19 nt, Homo sapiens
  misc_RNA (1)...(19): siRNA sense strand
cugcugaacaucaagguca

SEQ ID NO: 2227012 - RNA, 19 nt, Homo sapiens
  misc_RNA (1)...(19): siRNA sense strand
augagaaaucugaaggcca

SEQ ID NO: 2227013 - RNA, 19 nt, Homo sapiens
  misc_RNA (1)...(19): siRNA sense strand
gcaaacugcuggagggcga

SEQ ID NO: 2227014 - RNA, 19 nt, Homo sapiens
  misc_RNA (1)...(19): siRNA sense strand
aggaggagguggaggagga

SEQ ID NO: 2227015 - RNA, 19 nt, Homo sapiens
  misc_RNA (1)...(19): siRNA sense strand
aggaagaggaggaggugga

SEQ ID NO: 2227016 - RNA, 19 nt, Homo sapiens
  misc_RNA (1)...(19): siRNA sense strand
uggugguguuggagguuua

SEQ ID NO: 2227017 - RNA, 19 nt, Homo sapiens
  misc_RNA (1)...(19): siRNA sense strand
gcaucaucgccgaggucaa

SEQ ID NO: 2227018 - RNA, 19 nt, Homo sapiens
  misc_RNA (1)...(19): siRNA sense strand
cggugguucuggaggaaga

SEQ ID NO: 2227019 - RNA, 19 nt, Homo sapiens
  misc_RNA (1)...(19): siRNA sense strand
aguaugaggaugaaaucaa

SEQ ID NO: 2227020 - RNA, 19 nt, Homo sapiens
  misc_RNA (1)...(19): siRNA sense strand
augugaagaagcaguguaa

SEQ ID NO: 2227021 - RNA, 19 nt, Homo sapiens
  misc_RNA (1)...(19): siRNA sense strand
ccaucaaccuggagcccau

SEQ ID NO: 2227022 - RNA, 19 nt, Homo sapiens
  misc_RNA (1)...(19): siRNA sense strand
ccaggugacugucgggaga

SEQ ID NO: 2227023 - RNA, 19 nt, Homo sapiens
  misc_RNA (1)...(19): siRNA sense strand
uggaggauuauaagaagaa

SEQ ID NO: 2227024 - RNA, 19 nt, Homo sapiens
  misc_RNA (1)...(19): siRNA sense strand
aggucaaggcccaguauga

SEQ ID NO: 2227025 - RNA, 19 nt, Homo sapiens
  misc_RNA (1)...(19): siRNA sense strand
ggaacaaguugaaugaccu

SEQ ID NO: 2227026 - RNA, 19 nt, Homo sapiens
  misc_RNA (1)...(19): siRNA sense strand
aggaagaagcggaggcccu

SEQ ID NO: 2227027 - RNA, 19 nt, Homo sapiens
  misc_RNA (1)...(19): siRNA sense strand
aguguaagaaugugcaaga

SEQ ID NO: 2227028 - RNA, 19 nt, Homo sapiens
  misc_RNA (1)...(19): siRNA sense strand
uggcagaggaggugguuuu

SEQ ID NO: 2227029 - RNA, 19 nt, Homo sapiens
  misc_RNA (1)...(19): siRNA sense strand
acgugaaaguugacccaga

SEQ ID NO: 2227030 - RNA, 19 nt, Homo sapiens
  misc_RNA (1)...(19): siRNA sense strand
cccaagagcgugagcagau

SEQ ID NO: 2227031 - RNA, 19 nt, Homo sapiens
  misc_RNA (1)...(19): siRNA sense strand
uggagguucuggagguaga

SEQ ID NO: 2227032 - RNA, 19 nt, Homo sapiens
  misc_RNA (1)...(19): siRNA sense strand
ggguauaucgacagccuca

SEQ ID NO: 2227033 - RNA, 19 nt, Homo sapiens
  misc_RNA (1)...(19): siRNA sense strand
gcaaguaugaggagcucca

SEQ ID NO: 2227034 - RNA, 19 nt, Homo sapiens
  misc_RNA (1)...(19): siRNA sense strand
aagaggaggagguggagga

SEQ ID NO: 2227035 - RNA, 19 nt, Homo sapiens
  misc_RNA (1)...(19): siRNA sense strand
cagcucuggaggaggauau

SEQ ID NO: 2227036 - RNA, 19 nt, Homo sapiens
  misc_RNA (1)...(19): siRNA sense strand
caucucuggaggaggauau

SEQ ID NO: 2227037 - RNA, 19 nt, Homo sapiens
  misc_RNA (1)...(19): siRNA sense strand
ugguggauuugguggcaga

SEQ ID NO: 2227038 - RNA, 19 nt, Homo sapiens
  misc_RNA (1)...(19): siRNA sense strand
cuucagugguggugguuuc

SEQ ID NO: 2227039 - RNA, 19 nt, Homo sapiens
  misc_RNA (1)...(19): siRNA sense strand
cugaauaacaugcaggauc

SEQ ID NO: 2227040 - RNA, 19 nt, Homo sapiens
  misc_RNA (1)...(19): siRNA sense strand
acauggagacagccugaaa

SEQ ID NO: 2227041 - RNA, 19 nt, Homo sapiens
  misc_RNA (1)...(19): siRNA sense strand
ccuacaugauaaaggugga

SEQ ID NO: 2227042 - RNA, 19 nt, Homo sapiens
  misc_RNA (1)...(19): siRNA sense strand
gagcgugagcagaucaaaa

SEQ ID NO: 2227043 - RNA, 19 nt, Homo sapiens
  misc_RNA (1)...(19): siRNA sense strand
gcucacugcagaaagaaca

SEQ ID NO: 2227044 - RNA, 19 nt, Homo sapiens
  misc_RNA (1)...(19): siRNA sense strand
gaggauuauaagaagaagu

SEQ ID NO: 2227045 - RNA, 19 nt, Homo sapiens
  misc_RNA (1)...(19): siRNA sense strand
ggagcaaggaagaagcgga

SEQ ID NO: 2227046 - RNA, 19 nt, Homo sapiens
  misc_RNA (1)...(19): siRNA sense strand
cagauacaucagaguguca

SEQ ID NO: 2227047 - RNA, 19 nt, Homo sapiens
  misc_RNA (1)...(19): siRNA sense strand
gcacaugugaagaagcagu

SEQ ID NO: 2227048 - RNA, 19 nt, Homo sapiens
  misc_RNA (1)...(19): siRNA sense strand
agguggagcuggaggccaa

SEQ ID NO: 2227049 - RNA, 19 nt, Homo sapiens
  misc_RNA (1)...(19): siRNA sense strand
gcaccaagacugugaggca

SEQ ID NO: 2227050 - RNA, 19 nt, Homo sapiens
  misc_RNA (1)...(19): siRNA sense strand
gcaucaucgcugaggucaa

SEQ ID NO: 2227051 - RNA, 19 nt, Homo sapiens
  misc_RNA (1)...(19): siRNA sense strand
augcagacucaguggagaa

SEQ ID NO: 2227052 - RNA, 19 nt, Homo sapiens
  misc_RNA (1)...(19): siRNA sense strand
gguagcagcuccagcguca

SEQ ID NO: 2227053 - RNA, 19 nt, Homo sapiens
  misc_RNA (1)...(19): siRNA sense strand
aguaugaggaugaaaucaa

SEQ ID NO: 2227054 - RNA, 19 nt, Homo sapiens
  misc_RNA (1)...(19): siRNA sense strand
ugaacaagguggagcugga

SEQ ID NO: 2227055 - RNA, 19 nt, Homo sapiens
  misc_RNA (1)...(19): siRNA sense strand
uggcaguggcaguggcuau

SEQ ID NO: 2227056 - RNA, 19 nt, Homo sapiens
  misc_RNA (1)...(19): siRNA sense strand
cacugauggaugagauuaa

SEQ ID NO: 2227057 - RNA, 19 nt, Homo sapiens
  misc_RNA (1)...(19): siRNA sense strand
uggagaaggaguuggacca

SEQ ID NO: 2227058 - RNA, 19 nt, Homo sapiens
  misc_RNA (1)...(19): siRNA sense strand
agaucaagacccucaacaa

SEQ ID NO: 2227059 - RNA, 19 nt, Homo sapiens
  misc_RNA (1)...(19): siRNA sense strand
aguuugugaugcugaagaa

SEQ ID NO: 2227060 - RNA, 19 nt, Homo sapiens
  misc_RNA (1)...(19): siRNA sense strand
aggucaaggcccaguauga

SEQ ID NO: 2227061 - RNA, 19 nt, Homo sapiens
  misc_RNA (1)...(19): siRNA sense strand
gaugaaaucaacaagcgua

SEQ ID NO: 2227062 - RNA, 19 nt, Homo sapiens
  misc_RNA (1)...(19): siRNA sense strand
ggcagaaccuggagccguu

SEQ ID NO: 2227063 - RNA, 19 nt, Homo sapiens
  misc_RNA (1)...(19): siRNA sense strand
gcagaacgccauugcggau

SEQ ID NO: 2227064 - RNA, 19 nt, Homo sapiens
  misc_RNA (1)...(19): siRNA sense strand
aggauauccaucagcacua

SEQ ID NO: 2227065 - RNA, 19 nt, Homo sapiens
  misc_RNA (1)...(19): siRNA sense strand
aggccaagguugaugcacu

SEQ ID NO: 2227066 - RNA, 19 nt, Homo sapiens
  misc_RNA (1)...(19): siRNA sense strand
ucgcugaggucaaggccca

SEQ ID NO: 2227067 - RNA, 19 nt, Homo sapiens
  misc_RNA (1)...(19): siRNA sense strand
agaccaaguaugaggagcu

SEQ ID NO: 2227068 - RNA, 19 nt, Homo sapiens
  misc_RNA (1)...(19): siRNA sense strand
gucaagaaacagugcgcca

SEQ ID NO: 2227069 - RNA, 19 nt, Homo sapiens
  misc_RNA (1)...(19): siRNA sense strand
gagcagaucaagacccuca

SEQ ID NO: 2227070 - RNA, 19 nt, Homo sapiens
  misc_RNA (1)...(19): siRNA sense strand
agccguuguucgagcagua

SEQ ID NO: 2227071 - RNA, 19 nt, Homo sapiens
  misc_RNA (1)...(19): siRNA sense strand
augucaauguggagauaaa

SEQ ID NO: 2227072 - RNA, 19 nt, Homo sapiens
  misc_RNA (1)...(19): siRNA sense strand
gcuaagaacagaaaggaca

SEQ ID NO: 2227073 - RNA, 19 nt, Homo sapiens
  misc_RNA (1)...(19): siRNA sense strand
ccuuggaggucgaggagga

SEQ ID NO: 2227074 - RNA, 19 nt, Homo sapiens
  misc_RNA (1)...(19): siRNA sense strand
cagcuaugguggaggagga

SEQ ID NO: 2227075 - RNA, 19 nt, Homo sapiens
  misc_RNA (1)...(19): siRNA sense strand
cggaggaggaagcggaaaa

SEQ ID NO: 2227076 - RNA, 19 nt, Homo sapiens
  misc_RNA (1)...(19): siRNA sense strand
cagccaugguggaggaagu

SEQ ID NO: 2227077 - RNA, 19 nt, Homo sapiens
  misc_RNA (1)...(19): siRNA sense strand
gcuaaugagaagagcacca

SEQ ID NO: 2227078 - RNA, 19 nt, Homo sapiens
  misc_RNA (1)...(19): siRNA sense strand
gggcaacuauggaggagga

SEQ ID NO: 2227079 - RNA, 19 nt, Homo sapiens
  misc_RNA (1)...(19): siRNA sense strand
aggaaguggagguggcuau

SEQ ID NO: 2227080 - RNA, 19 nt, Homo sapiens
  misc_RNA (1)...(19): siRNA sense strand
aggaggaaguggaggcagu

SEQ ID NO: 2227081 - RNA, 19 nt, Homo sapiens
  misc_RNA (1)...(19): siRNA sense strand
uggcuaugguggaggaagu

SEQ ID NO: 2227082 - RNA, 19 nt, Homo sapiens
  misc_RNA (1)...(19): siRNA sense strand
uggcuaugguggaggaagu

SEQ ID NO: 2227083 - RNA, 19 nt, Homo sapiens
  misc_RNA (1)...(19): siRNA sense strand
uggcuaugguggaggaagu

SEQ ID NO: 2227084 - RNA, 19 nt, Homo sapiens
  misc_RNA (1)...(19): siRNA sense strand
caacuauggaggaggaagu

SEQ ID NO: 2227085 - RNA, 19 nt, Homo sapiens
  misc_RNA (1)...(19): siRNA sense strand
aggaggugauggugguauu

SEQ ID NO: 2227086 - RNA, 19 nt, Homo sapiens
  misc_RNA (1)...(19): siRNA sense strand
aggaagugguucuggagga

SEQ ID NO: 2227087 - RNA, 19 nt, Homo sapiens
  misc_RNA (1)...(19): siRNA sense strand
uggcuuuggugguggcuau

SEQ ID NO: 2227088 - RNA, 19 nt, Homo sapiens
  misc_RNA (1)...(19): siRNA sense strand
agguaguggagguggcuau

SEQ ID NO: 2227089 - RNA, 19 nt, Homo sapiens
  misc_RNA (1)...(19): siRNA sense strand
cggaggaaguggagguggu

SEQ ID NO: 2227090 - RNA, 19 nt, Homo sapiens
  misc_RNA (1)...(19): siRNA sense strand
aggaaguggagguggucau

SEQ ID NO: 2227091 - RNA, 19 nt, Homo sapiens
  misc_RNA (1)...(19): siRNA sense strand
uggucauaguggaggaagu

SEQ ID NO: 2227092 - RNA, 19 nt, Homo sapiens
  misc_RNA (1)...(19): siRNA sense strand
uggcuaugggaguggguuu

SEQ ID NO: 2227093 - RNA, 19 nt, Homo sapiens
  misc_RNA (1)...(19): siRNA sense strand
uggauaaggugcaggcucu

SEQ ID NO: 2227094 - RNA, 19 nt, Homo sapiens
  misc_RNA (1)...(19): siRNA sense strand
agaagaaucauaaggagga

SEQ ID NO: 2227095 - RNA, 19 nt, Homo sapiens
  misc_RNA (1)...(19): siRNA sense strand
cugcuauccagaagaacua

SEQ ID NO: 2227096 - RNA, 19 nt, Homo sapiens
  misc_RNA (1)...(19): siRNA sense strand
ggcaaggaguggaugcuga

SEQ ID NO: 2227097 - RNA, 19 nt, Homo sapiens
  misc_RNA (1)...(19): siRNA sense strand
aggaaguggagguggccau

SEQ ID NO: 2227098 - RNA, 19 nt, Homo sapiens
  misc_RNA (1)...(19): siRNA sense strand
cuaagaacagaaaggacau

SEQ ID NO: 2227099 - RNA, 19 nt, Homo sapiens
  misc_RNA (1)...(19): siRNA sense strand
aggauugguacgacaagaa

SEQ ID NO: 2227100 - RNA, 19 nt, Homo sapiens
  misc_RNA (1)...(19): siRNA sense strand
gugccaaggaggugaccca

SEQ ID NO: 2227101 - RNA, 19 nt, Homo sapiens
  misc_RNA (1)...(19): siRNA sense strand
uggaggagguaguggaggu

SEQ ID NO: 2227102 - RNA, 19 nt, Homo sapiens
  misc_RNA (1)...(19): siRNA sense strand
aggaaguggcucuggagga

SEQ ID NO: 2227103 - RNA, 19 nt, Homo sapiens
  misc_RNA (1)...(19): siRNA sense strand
cgagaaucaauaugagacu

SEQ ID NO: 2227104 - RNA, 19 nt, Homo sapiens
  misc_RNA (1)...(19): siRNA sense strand
agaucgagugccagaauca

SEQ ID NO: 2227105 - RNA, 19 nt, Homo sapiens
  misc_RNA (1)...(19): siRNA sense strand
agugccagaaucaggaaua

SEQ ID NO: 2227106 - RNA, 19 nt, Homo sapiens
  misc_RNA (1)...(19): siRNA sense strand
uggccauagcggaggaagu

SEQ ID NO: 2227107 - RNA, 19 nt, Homo sapiens
  misc_RNA (1)...(19): siRNA sense strand
caagagaucgagugccaga

SEQ ID NO: 2227108 - RNA, 19 nt, Homo sapiens
  misc_RNA (1)...(19): siRNA sense strand
aagaaagguuccaggguga

SEQ ID NO: 2227109 - RNA, 19 nt, Homo sapiens
  misc_RNA (1)...(19): siRNA sense strand
caacagugcuucaggacga

SEQ ID NO: 2227110 - RNA, 19 nt, Homo sapiens
  misc_RNA (1)...(19): siRNA sense strand
cgaugaaagaugagaccuu

SEQ ID NO: 2227111 - RNA, 19 nt, Homo sapiens
  misc_RNA (1)...(19): siRNA sense strand
uggccaaagaccagaagua

SEQ ID NO: 2227112 - RNA, 19 nt, Homo sapiens
  misc_RNA (1)...(19): siRNA sense strand
uguucaaagccuugggaga

SEQ ID NO: 2227113 - RNA, 19 nt, Homo sapiens
  misc_RNA (1)...(19): siRNA sense strand
gguuacugccauaaacaaa

SEQ ID NO: 2227114 - RNA, 19 nt, Homo sapiens
  misc_RNA (1)...(19): siRNA sense strand
ccgaggaauaugaaggaca

SEQ ID NO: 2227115 - RNA, 19 nt, Homo sapiens
  misc_RNA (1)...(19): siRNA sense strand
cagaggaagcacagcaaga

SEQ ID NO: 2227116 - RNA, 19 nt, Homo sapiens
  misc_RNA (1)...(19): siRNA sense strand
cuuuaggguuacugccaua

SEQ ID NO: 2227117 - RNA, 19 nt, Homo sapiens
  misc_RNA (1)...(19): siRNA sense strand
cagugaaggauaaggagga

SEQ ID NO: 2227118 - RNA, 19 nt, Homo sapiens
  misc_RNA (1)...(19): siRNA sense strand
ugaaagugggcgaggagga

SEQ ID NO: 2227119 - RNA, 19 nt, Homo sapiens
  misc_RNA (1)...(19): siRNA sense strand
ccgucaacagccagggcaa

SEQ ID NO: 2227120 - RNA, 19 nt, Homo sapiens
  misc_RNA (1)...(19): siRNA sense strand
gcucagagguuccagggca

SEQ ID NO: 2227121 - RNA, 19 nt, Homo sapiens
  misc_RNA (1)...(19): siRNA sense strand
gcgaggaggaugauggcga

SEQ ID NO: 2227122 - RNA, 19 nt, Homo sapiens
  misc_RNA (1)...(19): siRNA sense strand
ccaaggaagagcugggugu

SEQ ID NO: 2227123 - RNA, 19 nt, Homo sapiens
  misc_RNA (1)...(19): siRNA sense strand
acagcaugauugacaggaa

SEQ ID NO: 2227124 - RNA, 19 nt, Homo sapiens
  misc_RNA (1)...(19): siRNA sense strand
gcgcccugauccugagcaa

SEQ ID NO: 2227125 - RNA, 19 nt, Homo sapiens
  misc_RNA (1)...(19): siRNA sense strand
gggcacagcucuugguggu

SEQ ID NO: 2227126 - RNA, 19 nt, Homo sapiens
  misc_RNA (1)...(19): siRNA sense strand
ccaaagagggcccugguga

SEQ ID NO: 2227127 - RNA, 19 nt, Homo sapiens
  misc_RNA (1)...(19): siRNA sense strand
cggcaaauacucagugaag

SEQ ID NO: 2227128 - RNA, 19 nt, Homo sapiens
  misc_RNA (1)...(19): siRNA sense strand
ccugaagguuaaagaugca

SEQ ID NO: 2227129 - RNA, 19 nt, Homo sapiens
  misc_RNA (1)...(19): siRNA sense strand
ggaauaugaaggacaccau

SEQ ID NO: 2227130 - RNA, 19 nt, Homo sapiens
  misc_RNA (1)...(19): siRNA sense strand
gggagggcagucagaggaa

SEQ ID NO: 2227131 - RNA, 19 nt, Homo sapiens
  misc_RNA (1)...(19): siRNA sense strand
uggccaaaggagacaguga

SEQ ID NO: 2227132 - RNA, 19 nt, Homo sapiens
  misc_RNA (1)...(19): siRNA sense strand
cggaucuacuggaugaaca

SEQ ID NO: 2227133 - RNA, 19 nt, Homo sapiens
  misc_RNA (1)...(19): siRNA sense strand
acuacagcgaccagggcaa

SEQ ID NO: 2227134 - RNA, 19 nt, Homo sapiens
  misc_RNA (1)...(19): siRNA sense strand
guggcaagaaggagaagga

SEQ ID NO: 2227135 - RNA, 19 nt, Homo sapiens
  misc_RNA (1)...(19): siRNA sense strand
ccaaugggacccugggcau

SEQ ID NO: 2227136 - RNA, 19 nt, Homo sapiens
  misc_RNA (1)...(19): siRNA sense strand
uggaugugguggagaguag

SEQ ID NO: 2227137 - RNA, 19 nt, Homo sapiens
  misc_RNA (1)...(19): siRNA sense strand
cagugaagcccguggaggu

SEQ ID NO: 2227138 - RNA, 19 nt, Homo sapiens
  misc_RNA (1)...(19): siRNA sense strand
ccgacaaccacucagacua

SEQ ID NO: 2227139 - RNA, 19 nt, Homo sapiens
  misc_RNA (1)...(19): siRNA sense strand
cccaaguggccaaaggaga

SEQ ID NO: 2227140 - RNA, 19 nt, Homo sapiens
  misc_RNA (1)...(19): siRNA sense strand
ucuacuggaugaacagcaa

SEQ ID NO: 2227141 - RNA, 19 nt, Homo sapiens
  misc_RNA (1)...(19): siRNA sense strand
cuguggaggagcuggccaa

SEQ ID NO: 2227142 - RNA, 19 nt, Homo sapiens
  misc_RNA (1)...(19): siRNA sense strand
cagcacaaucgagaagaaa

SEQ ID NO: 2227143 - RNA, 19 nt, Homo sapiens
  misc_RNA (1)...(19): siRNA sense strand
ccauugagaaauaugacau

SEQ ID NO: 2227144 - RNA, 19 nt, Homo sapiens
  misc_RNA (1)...(19): siRNA sense strand
acaaggaaauggcgccuga

SEQ ID NO: 2227145 - RNA, 19 nt, Homo sapiens
  misc_RNA (1)...(19): siRNA sense strand
cuauaugggccaggagaga

SEQ ID NO: 2227146 - RNA, 19 nt, Homo sapiens
  misc_RNA (1)...(19): siRNA sense strand
gugacaaguacuucauaga

SEQ ID NO: 2227147 - RNA, 19 nt, Homo sapiens
  misc_RNA (1)...(19): siRNA sense strand
aagcaggacgagcggguga

SEQ ID NO: 2227148 - RNA, 19 nt, Homo sapiens
  misc_RNA (1)...(19): siRNA sense strand
ggacaacagugcuucagga

SEQ ID NO: 2227149 - RNA, 19 nt, Homo sapiens
  misc_RNA (1)...(19): siRNA sense strand
aggaaauggcgccugaaaa

SEQ ID NO: 2227150 - RNA, 19 nt, Homo sapiens
  misc_RNA (1)...(19): siRNA sense strand
ccuaugagaucaaagucca

SEQ ID NO: 2227151 - RNA, 19 nt, Homo sapiens
  misc_RNA (1)...(19): siRNA sense strand
acgagauccacuuguuuaa

SEQ ID NO: 2227152 - RNA, 19 nt, Homo sapiens
  misc_RNA (1)...(19): siRNA sense strand
aaauacucagugaaggaua

SEQ ID NO: 2227153 - RNA, 19 nt, Homo sapiens
  misc_RNA (1)...(19): siRNA sense strand
cugccguggcccuagaaua

SEQ ID NO: 2227154 - RNA, 19 nt, Homo sapiens
  misc_RNA (1)...(19): siRNA sense strand
aaggaaauggcgccugaaa

SEQ ID NO: 2227155 - RNA, 19 nt, Homo sapiens
  misc_RNA (1)...(19): siRNA sense strand
agaucaaaguccaggccgu

SEQ ID NO: 2227156 - RNA, 19 nt, Homo sapiens
  misc_RNA (1)...(19): siRNA sense strand
ccacaguaugucagcuaca

SEQ ID NO: 2227157 - RNA, 19 nt, Homo sapiens
  misc_RNA (1)...(19): siRNA sense strand
acaacgaggagaaggccuu

SEQ ID NO: 2227158 - RNA, 19 nt, Homo sapiens
  misc_RNA (1)...(19): siRNA sense strand
ggaugggacaacagugcuu

SEQ ID NO: 2227159 - RNA, 19 nt, Homo sapiens
  misc_RNA (1)...(19): siRNA sense strand
gggaaggaaaugagaccac

SEQ ID NO: 2227160 - RNA, 19 nt, Homo sapiens
  misc_RNA (1)...(19): siRNA sense strand
cgccacaguaugucagcua

SEQ ID NO: 2227161 - RNA, 19 nt, Homo sapiens
  misc_RNA (1)...(19): siRNA sense strand
aagaaagguuccaggguga

SEQ ID NO: 2227162 - RNA, 19 nt, Homo sapiens
  misc_RNA (1)...(19): siRNA sense strand
caacagugcuucaggacga

SEQ ID NO: 2227163 - RNA, 19 nt, Homo sapiens
  misc_RNA (1)...(19): siRNA sense strand
cgaugaaagaugagaccuu

SEQ ID NO: 2227164 - RNA, 19 nt, Homo sapiens
  misc_RNA (1)...(19): siRNA sense strand
uggccaaagaccagaagua

SEQ ID NO: 2227165 - RNA, 19 nt, Homo sapiens
  misc_RNA (1)...(19): siRNA sense strand
uguucaaagccuugggaga

SEQ ID NO: 2227166 - RNA, 19 nt, Homo sapiens
  misc_RNA (1)...(19): siRNA sense strand
gguuacugccauaaacaaa

SEQ ID NO: 2227167 - RNA, 19 nt, Homo sapiens
  misc_RNA (1)...(19): siRNA sense strand
ccgaggaauaugaaggaca

SEQ ID NO: 2227168 - RNA, 19 nt, Homo sapiens
  misc_RNA (1)...(19): siRNA sense strand
cagaggaagcacagcaaga

SEQ ID NO: 2227169 - RNA, 19 nt, Homo sapiens
  misc_RNA (1)...(19): siRNA sense strand
cuuuaggguuacugccaua

SEQ ID NO: 2227170 - RNA, 19 nt, Homo sapiens
  misc_RNA (1)...(19): siRNA sense strand
cagugaaggauaaggagga

SEQ ID NO: 2227171 - RNA, 19 nt, Homo sapiens
  misc_RNA (1)...(19): siRNA sense strand
ugaaagugggcgaggagga

SEQ ID NO: 2227172 - RNA, 19 nt, Homo sapiens
  misc_RNA (1)...(19): siRNA sense strand
ccgucaacagccagggcaa

SEQ ID NO: 2227173 - RNA, 19 nt, Homo sapiens
  misc_RNA (1)...(19): siRNA sense strand
gcucagagguuccagggca

SEQ ID NO: 2227174 - RNA, 19 nt, Homo sapiens
  misc_RNA (1)...(19): siRNA sense strand
gcgaggaggaugauggcga

SEQ ID NO: 2227175 - RNA, 19 nt, Homo sapiens
  misc_RNA (1)...(19): siRNA sense strand
ccaaggaagagcugggugu

SEQ ID NO: 2227176 - RNA, 19 nt, Homo sapiens
  misc_RNA (1)...(19): siRNA sense strand
acagcaugauugacaggaa

SEQ ID NO: 2227177 - RNA, 19 nt, Homo sapiens
  misc_RNA (1)...(19): siRNA sense strand
gcgcccugauccugagcaa

SEQ ID NO: 2227178 - RNA, 19 nt, Homo sapiens
  misc_RNA (1)...(19): siRNA sense strand
gggcacagcucuugguggu

SEQ ID NO: 2227179 - RNA, 19 nt, Homo sapiens
  misc_RNA (1)...(19): siRNA sense strand
ccaaagagggcccugguga

SEQ ID NO: 2227180 - RNA, 19 nt, Homo sapiens
  misc_RNA (1)...(19): siRNA sense strand
cggcaaauacucagugaag

SEQ ID NO: 2227181 - RNA, 19 nt, Homo sapiens
  misc_RNA (1)...(19): siRNA sense strand
ccugaagguuaaagaugca

SEQ ID NO: 2227182 - RNA, 19 nt, Homo sapiens
  misc_RNA (1)...(19): siRNA sense strand
ggaauaugaaggacaccau

SEQ ID NO: 2227183 - RNA, 19 nt, Homo sapiens
  misc_RNA (1)...(19): siRNA sense strand
gggagggcagucagaggaa

SEQ ID NO: 2227184 - RNA, 19 nt, Homo sapiens
  misc_RNA (1)...(19): siRNA sense strand
uggccaaaggagacaguga

SEQ ID NO: 2227185 - RNA, 19 nt, Homo sapiens
  misc_RNA (1)...(19): siRNA sense strand
cggaucuacuggaugaaca

SEQ ID NO: 2227186 - RNA, 19 nt, Homo sapiens
  misc_RNA (1)...(19): siRNA sense strand
acuacagcgaccagggcaa

SEQ ID NO: 2227187 - RNA, 19 nt, Homo sapiens
  misc_RNA (1)...(19): siRNA sense strand
guggcaagaaggagaagga

SEQ ID NO: 2227188 - RNA, 19 nt, Homo sapiens
  misc_RNA (1)...(19): siRNA sense strand
ccaaugggacccugggcau

SEQ ID NO: 2227189 - RNA, 19 nt, Homo sapiens
  misc_RNA (1)...(19): siRNA sense strand
uggaugugguggagaguag

SEQ ID NO: 2227190 - RNA, 19 nt, Homo sapiens
  misc_RNA (1)...(19): siRNA sense strand
cagugaagcccguggaggu

SEQ ID NO: 2227191 - RNA, 19 nt, Homo sapiens
  misc_RNA (1)...(19): siRNA sense strand
ccgacaaccacucagacua

SEQ ID NO: 2227192 - RNA, 19 nt, Homo sapiens
  misc_RNA (1)...(19): siRNA sense strand
cccaaguggccaaaggaga

SEQ ID NO: 2227193 - RNA, 19 nt, Homo sapiens
  misc_RNA (1)...(19): siRNA sense strand
ucuacuggaugaacagcaa

SEQ ID NO: 2227194 - RNA, 19 nt, Homo sapiens
  misc_RNA (1)...(19): siRNA sense strand
cuguggaggagcuggccaa

SEQ ID NO: 2227195 - RNA, 19 nt, Homo sapiens
  misc_RNA (1)...(19): siRNA sense strand
cagcacaaucgagaagaaa

SEQ ID NO: 2227196 - RNA, 19 nt, Homo sapiens
  misc_RNA (1)...(19): siRNA sense strand
ccauugagaaauaugacau

SEQ ID NO: 2227197 - RNA, 19 nt, Homo sapiens
  misc_RNA (1)...(19): siRNA sense strand
acaaggaaauggcgccuga

SEQ ID NO: 2227198 - RNA, 19 nt, Homo sapiens
  misc_RNA (1)...(19): siRNA sense strand
cuauaugggccaggagaga

SEQ ID NO: 2227199 - RNA, 19 nt, Homo sapiens
  misc_RNA (1)...(19): siRNA sense strand
gugacaaguacuucauaga

SEQ ID NO: 2227200 - RNA, 19 nt, Homo sapiens
  misc_RNA (1)...(19): siRNA sense strand
aagcaggacgagcggguga

SEQ ID NO: 2227201 - RNA, 19 nt, Homo sapiens
  misc_RNA (1)...(19): siRNA sense strand
ggacaacagugcuucagga

SEQ ID NO: 2227202 - RNA, 19 nt, Homo sapiens
  misc_RNA (1)...(19): siRNA sense strand
aggaaauggcgccugaaaa

SEQ ID NO: 2227203 - RNA, 19 nt, Homo sapiens
  misc_RNA (1)...(19): siRNA sense strand
ccuaugagaucaaagucca

SEQ ID NO: 2227204 - RNA, 19 nt, Homo sapiens
  misc_RNA (1)...(19): siRNA sense strand
acgagauccacuuguuuaa

SEQ ID NO: 2227205 - RNA, 19 nt, Homo sapiens
  misc_RNA (1)...(19): siRNA sense strand
aaauacucagugaaggaua

SEQ ID NO: 2227206 - RNA, 19 nt, Homo sapiens
  misc_RNA (1)...(19): siRNA sense strand
cugccguggcccuagaaua

SEQ ID NO: 2227207 - RNA, 19 nt, Homo sapiens
  misc_RNA (1)...(19): siRNA sense strand
aaggaaauggcgccugaaa

SEQ ID NO: 2227208 - RNA, 19 nt, Homo sapiens
  misc_RNA (1)...(19): siRNA sense strand
agaucaaaguccaggccgu

SEQ ID NO: 2227209 - RNA, 19 nt, Homo sapiens
  misc_RNA (1)...(19): siRNA sense strand
ccacaguaugucagcuaca

SEQ ID NO: 2227210 - RNA, 19 nt, Homo sapiens
  misc_RNA (1)...(19): siRNA sense strand
acaacgaggagaaggccuu

SEQ ID NO: 2227211 - RNA, 19 nt, Homo sapiens
  misc_RNA (1)...(19): siRNA sense strand
ggaugggacaacagugcuu

SEQ ID NO: 2227212 - RNA, 19 nt, Homo sapiens
  misc_RNA (1)...(19): siRNA sense strand
gggaaggaaaugagaccac

SEQ ID NO: 2227213 - RNA, 19 nt, Homo sapiens
  misc_RNA (1)...(19): siRNA sense strand
cgccacaguaugucagcua

SEQ ID NO: 2227214 - RNA, 19 nt, Homo sapiens
  misc_RNA (1)...(19): siRNA sense strand
cagaacaauuugaaggaaa

SEQ ID NO: 2227215 - RNA, 19 nt, Homo sapiens
  misc_RNA (1)...(19): siRNA sense strand
agaaaugcguaaaggcaaa

SEQ ID NO: 2227216 - RNA, 19 nt, Homo sapiens
  misc_RNA (1)...(19): siRNA sense strand
cacaaagacccaagagaaa

SEQ ID NO: 2227217 - RNA, 19 nt, Homo sapiens
  misc_RNA (1)...(19): siRNA sense strand
gaaagaaguugauggccua

SEQ ID NO: 2227218 - RNA, 19 nt, Homo sapiens
  misc_RNA (1)...(19): siRNA sense strand
gcuguauguugguggguua

SEQ ID NO: 2227219 - RNA, 19 nt, Homo sapiens
  misc_RNA (1)...(19): siRNA sense strand
ggacaauggcauaaaguca

SEQ ID NO: 2227220 - RNA, 19 nt, Homo sapiens
  misc_RNA (1)...(19): siRNA sense strand
ugauuaucuuagaggguaa

SEQ ID NO: 2227221 - RNA, 19 nt, Homo sapiens
  misc_RNA (1)...(19): siRNA sense strand
ccuauagguuuguggaauu

SEQ ID NO: 2227222 - RNA, 19 nt, Homo sapiens
  misc_RNA (1)...(19): siRNA sense strand
cuugaaagcagaugacaaa

SEQ ID NO: 2227223 - RNA, 19 nt, Homo sapiens
  misc_RNA (1)...(19): siRNA sense strand
gcacgaacaaugaggaaaa

SEQ ID NO: 2227224 - RNA, 19 nt, Homo sapiens
  misc_RNA (1)...(19): siRNA sense strand
ucaauuugcaagaggauaa

SEQ ID NO: 2227225 - RNA, 19 nt, Homo sapiens
  misc_RNA (1)...(19): siRNA sense strand
caacaguucagcugagaaa

SEQ ID NO: 2227226 - RNA, 19 nt, Homo sapiens
  misc_RNA (1)...(19): siRNA sense strand
gauaaugagaaguaagcaa

SEQ ID NO: 2227227 - RNA, 19 nt, Homo sapiens
  misc_RNA (1)...(19): siRNA sense strand
ccagaaaucaagaaaggaa

SEQ ID NO: 2227228 - RNA, 19 nt, Homo sapiens
  misc_RNA (1)...(19): siRNA sense strand
aagcaaggccagaaguaaa

SEQ ID NO: 2227229 - RNA, 19 nt, Homo sapiens
  misc_RNA (1)...(19): siRNA sense strand
gaaguaagcaagaaggaau

SEQ ID NO: 2227230 - RNA, 19 nt, Homo sapiens
  misc_RNA (1)...(19): siRNA sense strand
ggaaagaaguugauggccu

SEQ ID NO: 2227231 - RNA, 19 nt, Homo sapiens
  misc_RNA (1)...(19): siRNA sense strand
ugaaugacacuuugggaaa

SEQ ID NO: 2227232 - RNA, 19 nt, Homo sapiens
  misc_RNA (1)...(19): siRNA sense strand
uggcagagucccaguauua

SEQ ID NO: 2227233 - RNA, 19 nt, Homo sapiens
  misc_RNA (1)...(19): siRNA sense strand
acacgagaccugagagauu

SEQ ID NO: 2227234 - RNA, 19 nt, Homo sapiens
  misc_RNA (1)...(19): siRNA sense strand
gugucaaggaugagaaaca

SEQ ID NO: 2227235 - RNA, 19 nt, Homo sapiens
  misc_RNA (1)...(19): siRNA sense strand
gagccaacguucaggguca

SEQ ID NO: 2227236 - RNA, 19 nt, Homo sapiens
  misc_RNA (1)...(19): siRNA sense strand
caucaagaacugggagaaa

SEQ ID NO: 2227237 - RNA, 19 nt, Homo sapiens
  misc_RNA (1)...(19): siRNA sense strand
cuuagaaaauggagagauu

SEQ ID NO: 2227238 - RNA, 19 nt, Homo sapiens
  misc_RNA (1)...(19): siRNA sense strand
ucacaaagacccaagagaa

SEQ ID NO: 2227239 - RNA, 19 nt, Homo sapiens
  misc_RNA (1)...(19): siRNA sense strand
ugaacaaggacguggaaca

SEQ ID NO: 2227240 - RNA, 19 nt, Homo sapiens
  misc_RNA (1)...(19): siRNA sense strand
augaagaaauggagaagga

SEQ ID NO: 2227241 - RNA, 19 nt, Homo sapiens
  misc_RNA (1)...(19): siRNA sense strand
ccugaaauguacugcaaau

SEQ ID NO: 2227242 - RNA, 19 nt, Homo sapiens
  misc_RNA (1)...(19): siRNA sense strand
ugaagaagcuguuuggaga

SEQ ID NO: 2227243 - RNA, 19 nt, Homo sapiens
  misc_RNA (1)...(19): siRNA sense strand
gccaauugauguaggaaca

SEQ ID NO: 2227244 - RNA, 19 nt, Homo sapiens
  misc_RNA (1)...(19): siRNA sense strand
ggaaauuaaagaaggcuga

SEQ ID NO: 2227245 - RNA, 19 nt, Homo sapiens
  misc_RNA (1)...(19): siRNA sense strand
cagagaaagaauggaaaua

SEQ ID NO: 2227246 - RNA, 19 nt, Homo sapiens
  misc_RNA (1)...(19): siRNA sense strand
gaggauaaccuaaagaaaa

SEQ ID NO: 2227247 - RNA, 19 nt, Homo sapiens
  misc_RNA (1)...(19): siRNA sense strand
ccaaaacacugcugguaua

SEQ ID NO: 2227248 - RNA, 19 nt, Homo sapiens
  misc_RNA (1)...(19): siRNA sense strand
aaaugaaacucuaggaacu

SEQ ID NO: 2227249 - RNA, 19 nt, Homo sapiens
  misc_RNA (1)...(19): siRNA sense strand
uugaaaugacagagaaaga

SEQ ID NO: 2227250 - RNA, 19 nt, Homo sapiens
  misc_RNA (1)...(19): siRNA sense strand
cauacaaaccagaaaucaa

SEQ ID NO: 2227251 - RNA, 19 nt, Homo sapiens
  misc_RNA (1)...(19): siRNA sense strand
caagaaaggaaguuacaau

SEQ ID NO: 2227252 - RNA, 19 nt, Homo sapiens
  misc_RNA (1)...(19): siRNA sense strand
aguaagaaccgaagcugaa

SEQ ID NO: 2227253 - RNA, 19 nt, Homo sapiens
  misc_RNA (1)...(19): siRNA sense strand
aaacaaacucccagcagua

SEQ ID NO: 2227254 - RNA, 19 nt, Homo sapiens
  misc_RNA (1)...(19): siRNA sense strand
gaucauucgaggugggaca

SEQ ID NO: 2227255 - RNA, 19 nt, Homo sapiens
  misc_RNA (1)...(19): siRNA sense strand
gcaugaaauugaaaugaca

SEQ ID NO: 2227256 - RNA, 19 nt, Homo sapiens
  misc_RNA (1)...(19): siRNA sense strand
cuaaagauguacuggcaca

SEQ ID NO: 2227257 - RNA, 19 nt, Homo sapiens
  misc_RNA (1)...(19): siRNA sense strand
uggcacaagauuaagauaa

SEQ ID NO: 2227258 - RNA, 19 nt, Homo sapiens
  misc_RNA (1)...(19): siRNA sense strand
ugguauaaacugcgagaca

SEQ ID NO: 2227259 - RNA, 19 nt, Homo sapiens
  misc_RNA (1)...(19): siRNA sense strand
ggaaaauguugaaggagga

SEQ ID NO: 2227260 - RNA, 19 nt, Homo sapiens
  misc_RNA (1)...(19): siRNA sense strand
auacuaaucaggaggagaa

SEQ ID NO: 2227261 - RNA, 19 nt, Homo sapiens
  misc_RNA (1)...(19): siRNA sense strand
ugacagagaaagaauggaa

SEQ ID NO: 2227262 - RNA, 19 nt, Homo sapiens
  misc_RNA (1)...(19): siRNA sense strand
ccuucaaagcuuacagcaa

SEQ ID NO: 2227263 - RNA, 19 nt, Homo sapiens
  misc_RNA (1)...(19): siRNA sense strand
gcaaaugcucagaggggaa

SEQ ID NO: 2227264 - RNA, 19 nt, Homo sapiens
  misc_RNA (1)...(19): siRNA sense strand
gcugugagugugagcauaa

SEQ ID NO: 2227265 - RNA, 19 nt, Homo sapiens
  misc_RNA (1)...(19): siRNA sense strand
agacgaggccuuugagaga

SEQ ID NO: 2227266 - RNA, 19 nt, Homo sapiens
  misc_RNA (1)...(19): siRNA sense strand
aagaaauaaaggacaggaa

SEQ ID NO: 2227267 - RNA, 19 nt, Homo sapiens
  misc_RNA (1)...(19): siRNA sense strand
cuaaucaggaggagaauau

SEQ ID NO: 2227268 - RNA, 19 nt, Homo sapiens
  misc_RNA (1)...(19): siRNA sense strand
agaauuaucgucaggcaua

SEQ ID NO: 2227269 - RNA, 19 nt, Homo sapiens
  misc_RNA (1)...(19): siRNA sense strand
cuucaaagcuuacagcaau

SEQ ID NO: 2227270 - RNA, 19 nt, Homo sapiens
  misc_RNA (1)...(19): siRNA sense strand
uccaauaacuuuagcccaa

SEQ ID NO: 2227271 - RNA, 19 nt, Homo sapiens
  misc_RNA (1)...(19): siRNA sense strand
cugugaagagaguggacaa

SEQ ID NO: 2227272 - RNA, 19 nt, Homo sapiens
  misc_RNA (1)...(19): siRNA sense strand
gaaaugacagagaaagaau

SEQ ID NO: 2227273 - RNA, 19 nt, Homo sapiens
  misc_RNA (1)...(19): siRNA sense strand
ccagcugacuugauugaaa

SEQ ID NO: 2227274 - RNA, 19 nt, Homo sapiens
  misc_RNA (1)...(19): siRNA sense strand
acgaggccuuugagagaaa

SEQ ID NO: 2227275 - RNA, 19 nt, Homo sapiens
  misc_RNA (1)...(19): siRNA sense strand
cagagaagcuaaucgccua

SEQ ID NO: 2227276 - RNA, 19 nt, Homo sapiens
  misc_RNA (1)...(19): siRNA sense strand
agauaugaguggcugguau

SEQ ID NO: 2227277 - RNA, 19 nt, Homo sapiens
  misc_RNA (1)...(19): siRNA sense strand
uugaagaagaggaagaaga

SEQ ID NO: 2227278 - RNA, 19 nt, Homo sapiens
  misc_RNA (1)...(19): siRNA sense strand
uuaaagaacugaggaggaa

SEQ ID NO: 2227279 - RNA, 19 nt, Homo sapiens
  misc_RNA (1)...(19): siRNA sense strand
agaagaaaucugaguuuga

SEQ ID NO: 2227280 - RNA, 19 nt, Homo sapiens
  misc_RNA (1)...(19): siRNA sense strand
gcacaucagcaaagagguu

SEQ ID NO: 2227281 - RNA, 19 nt, Homo sapiens
  misc_RNA (1)...(19): siRNA sense strand
acauggaccugaugagaga

SEQ ID NO: 2227282 - RNA, 19 nt, Homo sapiens
  misc_RNA (1)...(19): siRNA sense strand
acagcaauauuaaggacua

SEQ ID NO: 2227283 - RNA, 19 nt, Homo sapiens
  misc_RNA (1)...(19): siRNA sense strand
cugagaaaguugccaaaga

SEQ ID NO: 2227284 - RNA, 19 nt, Homo sapiens
  misc_RNA (1)...(19): siRNA sense strand
cagaaaagcuucaggauuc

SEQ ID NO: 2227285 - RNA, 19 nt, Homo sapiens
  misc_RNA (1)...(19): siRNA sense strand
cuacaucagcugacacaaa

SEQ ID NO: 2227286 - RNA, 19 nt, Homo sapiens
  misc_RNA (1)...(19): siRNA sense strand
acuugaaagcagaugacaa

SEQ ID NO: 2227287 - RNA, 19 nt, Homo sapiens
  misc_RNA (1)...(19): siRNA sense strand
auggaauugucaagggauu

SEQ ID NO: 2227288 - RNA, 19 nt, Homo sapiens
  misc_RNA (1)...(19): siRNA sense strand
ugagagaagccacagauaa

SEQ ID NO: 2227289 - RNA, 19 nt, Homo sapiens
  misc_RNA (1)...(19): siRNA sense strand
ggacagauggagagggaaa

SEQ ID NO: 2227290 - RNA, 19 nt, Homo sapiens
  misc_RNA (1)...(19): siRNA sense strand
gagaaaagccagaaggaau

SEQ ID NO: 2227291 - RNA, 19 nt, Homo sapiens
  misc_RNA (1)...(19): siRNA sense strand
aggcccaacucaagagaaa

SEQ ID NO: 2227292 - RNA, 19 nt, Homo sapiens
  misc_RNA (1)...(19): siRNA sense strand
agacagugauaaaggaaga

SEQ ID NO: 2227293 - RNA, 19 nt, Homo sapiens
  misc_RNA (1)...(19): siRNA sense strand
uggcaaagcagcuggaaga

SEQ ID NO: 2227294 - RNA, 19 nt, Homo sapiens
  misc_RNA (1)...(19): siRNA sense strand
ggaacaggaacuuuggaaa

SEQ ID NO: 2227295 - RNA, 19 nt, Homo sapiens
  misc_RNA (1)...(19): siRNA sense strand
acaagaacuaagugacaaa

SEQ ID NO: 2227296 - RNA, 19 nt, Homo sapiens
  misc_RNA (1)...(19): siRNA sense strand
ugguaaaucuggagucgaa

SEQ ID NO: 2227297 - RNA, 19 nt, Homo sapiens
  misc_RNA (1)...(19): siRNA sense strand
ugaccaagagugagacuaa

SEQ ID NO: 2227298 - RNA, 19 nt, Homo sapiens
  misc_RNA (1)...(19): siRNA sense strand
ccaauugcaaucagggaaa

SEQ ID NO: 2227299 - RNA, 19 nt, Homo sapiens
  misc_RNA (1)...(19): siRNA sense strand
gcauaaaccaagaacccaa

SEQ ID NO: 2227300 - RNA, 19 nt, Homo sapiens
  misc_RNA (1)...(19): siRNA sense strand
agaaaaggcucaaguaaau

SEQ ID NO: 2227301 - RNA, 19 nt, Homo sapiens
  misc_RNA (1)...(19): siRNA sense strand
agaaaagccagaaggaaua

SEQ ID NO: 2227302 - RNA, 19 nt, Homo sapiens
  misc_RNA (1)...(19): siRNA sense strand
caguuuaaaugaagcaaga

SEQ ID NO: 2227303 - RNA, 19 nt, Homo sapiens
  misc_RNA (1)...(19): siRNA sense strand
gaucaaaagcaaggagaaa

SEQ ID NO: 2227304 - RNA, 19 nt, Homo sapiens
  misc_RNA (1)...(19): siRNA sense strand
cugacaacauggacagaau

SEQ ID NO: 2227305 - RNA, 19 nt, Homo sapiens
  misc_RNA (1)...(19): siRNA sense strand
aggccaaggaccugaggaa

SEQ ID NO: 2227306 - RNA, 19 nt, Homo sapiens
  misc_RNA (1)...(19): siRNA sense strand
guggaaagaauuaaggaca

SEQ ID NO: 2227307 - RNA, 19 nt, Homo sapiens
  misc_RNA (1)...(19): siRNA sense strand
aagaaaaggcucaaguaaa

SEQ ID NO: 2227308 - RNA, 19 nt, Homo sapiens
  misc_RNA (1)...(19): siRNA sense strand
cggauaaggaccuggcaga

SEQ ID NO: 2227309 - RNA, 19 nt, Homo sapiens
  misc_RNA (1)...(19): siRNA sense strand
agacaagaacuaagugaca

SEQ ID NO: 2227310 - RNA, 19 nt, Homo sapiens
  misc_RNA (1)...(19): siRNA sense strand
ccuuacaagagcuggcaaa

SEQ ID NO: 2227311 - RNA, 19 nt, Homo sapiens
  misc_RNA (1)...(19): siRNA sense strand
agagacaagugaaagaaau

SEQ ID NO: 2227312 - RNA, 19 nt, Homo sapiens
  misc_RNA (1)...(19): siRNA sense strand
aaaugaagcaagacaagaa

SEQ ID NO: 2227313 - RNA, 19 nt, Homo sapiens
  misc_RNA (1)...(19): siRNA sense strand
agauggucuucaugggaua

SEQ ID NO: 2227314 - RNA, 19 nt, Homo sapiens
  misc_RNA (1)...(19): siRNA sense strand
ggaggaaggaagagucaga

SEQ ID NO: 2227315 - RNA, 19 nt, Homo sapiens
  misc_RNA (1)...(19): siRNA sense strand
ggaaggaagagucagacaa

SEQ ID NO: 2227316 - RNA, 19 nt, Homo sapiens
  misc_RNA (1)...(19): siRNA sense strand
gaggaggacaauugaguuu

SEQ ID NO: 2227317 - RNA, 19 nt, Homo sapiens
  misc_RNA (1)...(19): siRNA sense strand
gaucaucagacauggacaa

SEQ ID NO: 2227318 - RNA, 19 nt, Homo sapiens
  misc_RNA (1)...(19): siRNA sense strand
ccaggauggcucaggcaua

SEQ ID NO: 2227319 - RNA, 19 nt, Homo sapiens
  misc_RNA (1)...(19): siRNA sense strand
gcuaugaucaguagugcaa

SEQ ID NO: 2227320 - RNA, 19 nt, Homo sapiens
  misc_RNA (1)...(19): siRNA sense strand
gauacagagaggugauauu

SEQ ID NO: 2227321 - RNA, 19 nt, Homo sapiens
  misc_RNA (1)...(19): siRNA sense strand
cuuucaacccaguggcaua

SEQ ID NO: 2227322 - RNA, 19 nt, Homo sapiens
  misc_RNA (1)...(19): siRNA sense strand
cagaaagaagugauagaca

SEQ ID NO: 2227323 - RNA, 19 nt, Homo sapiens
  misc_RNA (1)...(19): siRNA sense strand
aguuauggaucgggugaaa

SEQ ID NO: 2227324 - RNA, 19 nt, Homo sapiens
  misc_RNA (1)...(19): siRNA sense strand
caagaaaacgagagagcuu

SEQ ID NO: 2227325 - RNA, 19 nt, Homo sapiens
  misc_RNA (1)...(19): siRNA sense strand
aagaagugauagacaccaa

SEQ ID NO: 2227326 - RNA, 19 nt, Homo sapiens
  misc_RNA (1)...(19): siRNA sense strand
ggcgcaagauugaaaguau

SEQ ID NO: 2227327 - RNA, 19 nt, Homo sapiens
  misc_RNA (1)...(19): siRNA sense strand
guagaaggaggaaggaaga

SEQ ID NO: 2227328 - RNA, 19 nt, Homo sapiens
  misc_RNA (1)...(19): siRNA sense strand
cggcagagaccauucgauu

SEQ ID NO: 2227329 - RNA, 19 nt, Homo sapiens
  misc_RNA (1)...(19): siRNA sense strand
gaggaauauucaugucaau

SEQ ID NO: 2227330 - RNA, 19 nt, Homo sapiens
  misc_RNA (1)...(19): siRNA sense strand
caacaaacuaccugaucuu

SEQ ID NO: 2227331 - RNA, 19 nt, Homo sapiens
  misc_RNA (1)...(19): siRNA sense strand
agaaaugcaaugaugggaa

SEQ ID NO: 2227332 - RNA, 19 nt, Homo sapiens
  misc_RNA (1)...(19): siRNA sense strand
aaaagaagcuaaagcaaga

SEQ ID NO: 2227333 - RNA, 19 nt, Homo sapiens
  misc_RNA (1)...(19): siRNA sense strand
acagauguggaaagaauua

SEQ ID NO: 2227334 - RNA, 19 nt, Homo sapiens
  misc_RNA (1)...(19): siRNA sense strand
cagagacaagugaaagaaa

SEQ ID NO: 2227335 - RNA, 19 nt, Homo sapiens
  misc_RNA (1)...(19): siRNA sense strand
ugaagcaagacaagaacua

SEQ ID NO: 2227336 - RNA, 19 nt, Homo sapiens
  misc_RNA (1)...(19): siRNA sense strand
caaaagcguauguggauaa

SEQ ID NO: 2227337 - RNA, 19 nt, Homo sapiens
  misc_RNA (1)...(19): siRNA sense strand
ggaagauuugaaaggauau

SEQ ID NO: 2227338 - RNA, 19 nt, Homo sapiens
  misc_RNA (1)...(19): siRNA sense strand
gggcuaugcucgaguucca

SEQ ID NO: 2227339 - RNA, 19 nt, Homo sapiens
  misc_RNA (1)...(19): siRNA sense strand
ccacagacguauauggaug

SEQ ID NO: 2227340 - RNA, 19 nt, Homo sapiens
  misc_RNA (1)...(19): siRNA sense strand
gggugguccuuuggagaaa

SEQ ID NO: 2227341 - RNA, 19 nt, Homo sapiens
  misc_RNA (1)...(19): siRNA sense strand
agaagcagaagcugauaaa

SEQ ID NO: 2227342 - RNA, 19 nt, Homo sapiens
  misc_RNA (1)...(19): siRNA sense strand
cuggaagauuugaaaggau

SEQ ID NO: 2227343 - RNA, 19 nt, Homo sapiens
  misc_RNA (1)...(19): siRNA sense strand
ccaaaugaccuggaagauu

SEQ ID NO: 2227344 - RNA, 19 nt, Homo sapiens
  misc_RNA (1)...(19): siRNA sense strand
aaaugaauacgaagccaaa

SEQ ID NO: 2227345 - RNA, 19 nt, Homo sapiens
  misc_RNA (1)...(19): siRNA sense strand
ggaucaaaagcaaggagaa

SEQ ID NO: 2227346 - RNA, 19 nt, Homo sapiens
  misc_RNA (1)...(19): siRNA sense strand
aaccaagaacccaaagaua

SEQ ID NO: 2227347 - RNA, 19 nt, Homo sapiens
  misc_RNA (1)...(19): siRNA sense strand
cagaugaggcacauggaga

SEQ ID NO: 2227348 - RNA, 19 nt, Homo sapiens
  misc_RNA (1)...(19): siRNA sense strand
uuugagacuuugcaagaaa

SEQ ID NO: 2227349 - RNA, 19 nt, Homo sapiens
  misc_RNA (1)...(19): siRNA sense strand
caagaaaaggcucaaguaa

SEQ ID NO: 2227350 - RNA, 19 nt, Homo sapiens
  misc_RNA (1)...(19): siRNA sense strand
gagaagcagaagcugauaa

SEQ ID NO: 2227351 - RNA, 19 nt, Homo sapiens
  misc_RNA (1)...(19): siRNA sense strand
ggauaaggaccuggcagaa

SEQ ID NO: 2227352 - RNA, 19 nt, Homo sapiens
  misc_RNA (1)...(19): siRNA sense strand
ggacagauggagagggaaa

SEQ ID NO: 2227353 - RNA, 19 nt, Homo sapiens
  misc_RNA (1)...(19): siRNA sense strand
gagaaaagccagaaggaau

SEQ ID NO: 2227354 - RNA, 19 nt, Homo sapiens
  misc_RNA (1)...(19): siRNA sense strand
aggcccaacucaagagaaa

SEQ ID NO: 2227355 - RNA, 19 nt, Homo sapiens
  misc_RNA (1)...(19): siRNA sense strand
agacagugauaaaggaaga

SEQ ID NO: 2227356 - RNA, 19 nt, Homo sapiens
  misc_RNA (1)...(19): siRNA sense strand
uggcaaagcagcuggaaga

SEQ ID NO: 2227357 - RNA, 19 nt, Homo sapiens
  misc_RNA (1)...(19): siRNA sense strand
ggaacaggaacuuuggaaa

SEQ ID NO: 2227358 - RNA, 19 nt, Homo sapiens
  misc_RNA (1)...(19): siRNA sense strand
acaagaacuaagugacaaa

SEQ ID NO: 2227359 - RNA, 19 nt, Homo sapiens
  misc_RNA (1)...(19): siRNA sense strand
ugguaaaucuggagucgaa

SEQ ID NO: 2227360 - RNA, 19 nt, Homo sapiens
  misc_RNA (1)...(19): siRNA sense strand
ugaccaagagugagacuaa

SEQ ID NO: 2227361 - RNA, 19 nt, Homo sapiens
  misc_RNA (1)...(19): siRNA sense strand
ccaauugcaaucagggaaa

SEQ ID NO: 2227362 - RNA, 19 nt, Homo sapiens
  misc_RNA (1)...(19): siRNA sense strand
gcauaaaccaagaacccaa

SEQ ID NO: 2227363 - RNA, 19 nt, Homo sapiens
  misc_RNA (1)...(19): siRNA sense strand
agaaaaggcucaaguaaau

SEQ ID NO: 2227364 - RNA, 19 nt, Homo sapiens
  misc_RNA (1)...(19): siRNA sense strand
agaaaagccagaaggaaua

SEQ ID NO: 2227365 - RNA, 19 nt, Homo sapiens
  misc_RNA (1)...(19): siRNA sense strand
caguuuaaaugaagcaaga

SEQ ID NO: 2227366 - RNA, 19 nt, Homo sapiens
  misc_RNA (1)...(19): siRNA sense strand
gaucaaaagcaaggagaaa

SEQ ID NO: 2227367 - RNA, 19 nt, Homo sapiens
  misc_RNA (1)...(19): siRNA sense strand
cugacaacauggacagaau

SEQ ID NO: 2227368 - RNA, 19 nt, Homo sapiens
  misc_RNA (1)...(19): siRNA sense strand
aggccaaggaccugaggaa

SEQ ID NO: 2227369 - RNA, 19 nt, Homo sapiens
  misc_RNA (1)...(19): siRNA sense strand
guggaaagaauuaaggaca

SEQ ID NO: 2227370 - RNA, 19 nt, Homo sapiens
  misc_RNA (1)...(19): siRNA sense strand
aagaaaaggcucaaguaaa

SEQ ID NO: 2227371 - RNA, 19 nt, Homo sapiens
  misc_RNA (1)...(19): siRNA sense strand
cggauaaggaccuggcaga

SEQ ID NO: 2227372 - RNA, 19 nt, Homo sapiens
  misc_RNA (1)...(19): siRNA sense strand
agacaagaacuaagugaca

SEQ ID NO: 2227373 - RNA, 19 nt, Homo sapiens
  misc_RNA (1)...(19): siRNA sense strand
ccuuacaagagcuggcaaa

SEQ ID NO: 2227374 - RNA, 19 nt, Homo sapiens
  misc_RNA (1)...(19): siRNA sense strand
agagacaagugaaagaaau

SEQ ID NO: 2227375 - RNA, 19 nt, Homo sapiens
  misc_RNA (1)...(19): siRNA sense strand
aaaugaagcaagacaagaa

SEQ ID NO: 2227376 - RNA, 19 nt, Homo sapiens
  misc_RNA (1)...(19): siRNA sense strand
agauggucuucaugggaua

SEQ ID NO: 2227377 - RNA, 19 nt, Homo sapiens
  misc_RNA (1)...(19): siRNA sense strand
ggaggaaggaagagucaga

SEQ ID NO: 2227378 - RNA, 19 nt, Homo sapiens
  misc_RNA (1)...(19): siRNA sense strand
ggaaggaagagucagacaa

SEQ ID NO: 2227379 - RNA, 19 nt, Homo sapiens
  misc_RNA (1)...(19): siRNA sense strand
gaggaggacaauugaguuu

SEQ ID NO: 2227380 - RNA, 19 nt, Homo sapiens
  misc_RNA (1)...(19): siRNA sense strand
gaucaucagacauggacaa

SEQ ID NO: 2227381 - RNA, 19 nt, Homo sapiens
  misc_RNA (1)...(19): siRNA sense strand
ccaggauggcucaggcaua

SEQ ID NO: 2227382 - RNA, 19 nt, Homo sapiens
  misc_RNA (1)...(19): siRNA sense strand
gcuaugaucaguagugcaa

SEQ ID NO: 2227383 - RNA, 19 nt, Homo sapiens
  misc_RNA (1)...(19): siRNA sense strand
gauacagagaggugauauu

SEQ ID NO: 2227384 - RNA, 19 nt, Homo sapiens
  misc_RNA (1)...(19): siRNA sense strand
cuuucaacccaguggcaua

SEQ ID NO: 2227385 - RNA, 19 nt, Homo sapiens
  misc_RNA (1)...(19): siRNA sense strand
cagaaagaagugauagaca

SEQ ID NO: 2227386 - RNA, 19 nt, Homo sapiens
  misc_RNA (1)...(19): siRNA sense strand
aguuauggaucgggugaaa

SEQ ID NO: 2227387 - RNA, 19 nt, Homo sapiens
  misc_RNA (1)...(19): siRNA sense strand
caagaaaacgagagagcuu

SEQ ID NO: 2227388 - RNA, 19 nt, Homo sapiens
  misc_RNA (1)...(19): siRNA sense strand
aagaagugauagacaccaa

SEQ ID NO: 2227389 - RNA, 19 nt, Homo sapiens
  misc_RNA (1)...(19): siRNA sense strand
ggcgcaagauugaaaguau

SEQ ID NO: 2227390 - RNA, 19 nt, Homo sapiens
  misc_RNA (1)...(19): siRNA sense strand
guagaaggaggaaggaaga

SEQ ID NO: 2227391 - RNA, 19 nt, Homo sapiens
  misc_RNA (1)...(19): siRNA sense strand
cggcagagaccauucgauu

SEQ ID NO: 2227392 - RNA, 19 nt, Homo sapiens
  misc_RNA (1)...(19): siRNA sense strand
gaggaauauucaugucaau

SEQ ID NO: 2227393 - RNA, 19 nt, Homo sapiens
  misc_RNA (1)...(19): siRNA sense strand
caacaaacuaccugaucuu

SEQ ID NO: 2227394 - RNA, 19 nt, Homo sapiens
  misc_RNA (1)...(19): siRNA sense strand
agaaaugcaaugaugggaa

SEQ ID NO: 2227395 - RNA, 19 nt, Homo sapiens
  misc_RNA (1)...(19): siRNA sense strand
aaaagaagcuaaagcaaga

SEQ ID NO: 2227396 - RNA, 19 nt, Homo sapiens
  misc_RNA (1)...(19): siRNA sense strand
acagauguggaaagaauua

SEQ ID NO: 2227397 - RNA, 19 nt, Homo sapiens
  misc_RNA (1)...(19): siRNA sense strand
cagagacaagugaaagaaa

SEQ ID NO: 2227398 - RNA, 19 nt, Homo sapiens
  misc_RNA (1)...(19): siRNA sense strand
ugaagcaagacaagaacua

SEQ ID NO: 2227399 - RNA, 19 nt, Homo sapiens
  misc_RNA (1)...(19): siRNA sense strand
caaaagcguauguggauaa

SEQ ID NO: 2227400 - RNA, 19 nt, Homo sapiens
  misc_RNA (1)...(19): siRNA sense strand
ggaagauuugaaaggauau

SEQ ID NO: 2227401 - RNA, 19 nt, Homo sapiens
  misc_RNA (1)...(19): siRNA sense strand
gggcuaugcucgaguucca

SEQ ID NO: 2227402 - RNA, 19 nt, Homo sapiens
  misc_RNA (1)...(19): siRNA sense strand
ccacagacguauauggaug

SEQ ID NO: 2227403 - RNA, 19 nt, Homo sapiens
  misc_RNA (1)...(19): siRNA sense strand
gggugguccuuuggagaaa

SEQ ID NO: 2227404 - RNA, 19 nt, Homo sapiens
  misc_RNA (1)...(19): siRNA sense strand
agaagcagaagcugauaaa

SEQ ID NO: 2227405 - RNA, 19 nt, Homo sapiens
  misc_RNA (1)...(19): siRNA sense strand
cuggaagauuugaaaggau

SEQ ID NO: 2227406 - RNA, 19 nt, Homo sapiens
  misc_RNA (1)...(19): siRNA sense strand
ccaaaugaccuggaagauu

SEQ ID NO: 2227407 - RNA, 19 nt, Homo sapiens
  misc_RNA (1)...(19): siRNA sense strand
aaaugaauacgaagccaaa

SEQ ID NO: 2227408 - RNA, 19 nt, Homo sapiens
  misc_RNA (1)...(19): siRNA sense strand
ggaucaaaagcaaggagaa

SEQ ID NO: 2227409 - RNA, 19 nt, Homo sapiens
  misc_RNA (1)...(19): siRNA sense strand
aaccaagaacccaaagaua

SEQ ID NO: 2227410 - RNA, 19 nt, Homo sapiens
  misc_RNA (1)...(19): siRNA sense strand
cagaugaggcacauggaga

SEQ ID NO: 2227411 - RNA, 19 nt, Homo sapiens
  misc_RNA (1)...(19): siRNA sense strand
uuugagacuuugcaagaaa

SEQ ID NO: 2227412 - RNA, 19 nt, Homo sapiens
  misc_RNA (1)...(19): siRNA sense strand
caagaaaaggcucaaguaa

SEQ ID NO: 2227413 - RNA, 19 nt, Homo sapiens
  misc_RNA (1)...(19): siRNA sense strand
gagaagcagaagcugauaa

SEQ ID NO: 2227414 - RNA, 19 nt, Homo sapiens
  misc_RNA (1)...(19): siRNA sense strand
ggauaaggaccuggcagaa

SEQ ID NO: 2227415 - RNA, 19 nt, Homo sapiens
  misc_RNA (1)...(19): siRNA sense strand
uggaagaugugguugggaa

SEQ ID NO: 2227416 - RNA, 19 nt, Homo sapiens
  misc_RNA (1)...(19): siRNA sense strand
ggagagaggcagagaggcu

SEQ ID NO: 2227417 - RNA, 19 nt, Homo sapiens
  misc_RNA (1)...(19): siRNA sense strand
gugugaagacagaggcaga

SEQ ID NO: 2227418 - RNA, 19 nt, Homo sapiens
  misc_RNA (1)...(19): siRNA sense strand
cugcagaagaugaaugaga

SEQ ID NO: 2227419 - RNA, 19 nt, Homo sapiens
  misc_RNA (1)...(19): siRNA sense strand
agacagaggcagaggagcu

SEQ ID NO: 2227420 - RNA, 19 nt, Homo sapiens
  misc_RNA (1)...(19): siRNA sense strand
aucacaaacuugagaguca

SEQ ID NO: 2227421 - RNA, 19 nt, Homo sapiens
  misc_RNA (1)...(19): siRNA sense strand
uccuagaugcaaagaguaa

SEQ ID NO: 2227422 - RNA, 19 nt, Homo sapiens
  misc_RNA (1)...(19): siRNA sense strand
ugaccaagcagcuggguga

SEQ ID NO: 2227423 - RNA, 19 nt, Homo sapiens
  misc_RNA (1)...(19): siRNA sense strand
gagggauuugagagaauaa

SEQ ID NO: 2227424 - RNA, 19 nt, Homo sapiens
  misc_RNA (1)...(19): siRNA sense strand
ugaaugagauccaggccau

SEQ ID NO: 2227425 - RNA, 19 nt, Homo sapiens
  misc_RNA (1)...(19): siRNA sense strand
caguauggcgaguggcaga

SEQ ID NO: 2227426 - RNA, 19 nt, Homo sapiens
  misc_RNA (1)...(19): siRNA sense strand
ccucagagcuggcaggaug

SEQ ID NO: 2227427 - RNA, 19 nt, Homo sapiens
  misc_RNA (1)...(19): siRNA sense strand
ccagcaacucaaagucaaa

SEQ ID NO: 2227428 - RNA, 19 nt, Homo sapiens
  misc_RNA (1)...(19): siRNA sense strand
ggaagaugucagacgcaca

SEQ ID NO: 2227429 - RNA, 19 nt, Homo sapiens
  misc_RNA (1)...(19): siRNA sense strand
aggagcaugugcagggaga

SEQ ID NO: 2227430 - RNA, 19 nt, Homo sapiens
  misc_RNA (1)...(19): siRNA sense strand
acuauguaucagaggaaga

SEQ ID NO: 2227431 - RNA, 19 nt, Homo sapiens
  misc_RNA (1)...(19): siRNA sense strand
ggacacggauggaggagcu

SEQ ID NO: 2227432 - RNA, 19 nt, Homo sapiens
  misc_RNA (1)...(19): siRNA sense strand
gggaccacaccgaaggcaa

SEQ ID NO: 2227433 - RNA, 19 nt, Homo sapiens
  misc_RNA (1)...(19): siRNA sense strand
gguugcaggcugaggcuga

SEQ ID NO: 2227434 - RNA, 19 nt, Homo sapiens
  misc_RNA (1)...(19): siRNA sense strand
gaguagagaauguggcuuc

SEQ ID NO: 2227435 - RNA, 19 nt, Homo sapiens
  misc_RNA (1)...(19): siRNA sense strand
uuacuauguaucagaggaa

SEQ ID NO: 2227436 - RNA, 19 nt, Homo sapiens
  misc_RNA (1)...(19): siRNA sense strand
uggagaagcguguggagca

SEQ ID NO: 2227437 - RNA, 19 nt, Homo sapiens
  misc_RNA (1)...(19): siRNA sense strand
uggagaugauggacaggau

SEQ ID NO: 2227438 - RNA, 19 nt, Homo sapiens
  misc_RNA (1)...(19): siRNA sense strand
ucaacaagcucuguggcaa

SEQ ID NO: 2227439 - RNA, 19 nt, Homo sapiens
  misc_RNA (1)...(19): siRNA sense strand
ggaagaugugguugggaac

SEQ ID NO: 2227440 - RNA, 19 nt, Homo sapiens
  misc_RNA (1)...(19): siRNA sense strand
ggcgaguggcagaugaaau

SEQ ID NO: 2227441 - RNA, 19 nt, Homo sapiens
  misc_RNA (1)...(19): siRNA sense strand
agaagaugaaugagaucca

SEQ ID NO: 2227442 - RNA, 19 nt, Homo sapiens
  misc_RNA (1)...(19): siRNA sense strand
aagagggagcaguuugaaa

SEQ ID NO: 2227443 - RNA, 19 nt, Homo sapiens
  misc_RNA (1)...(19): siRNA sense strand
gccaaaggugcgacugcaa

SEQ ID NO: 2227444 - RNA, 19 nt, Homo sapiens
  misc_RNA (1)...(19): siRNA sense strand
cuagaugcaaagaguaaga

SEQ ID NO: 2227445 - RNA, 19 nt, Homo sapiens
  misc_RNA (1)...(19): siRNA sense strand
gcagaagaugaaugagauc

SEQ ID NO: 2227446 - RNA, 19 nt, Homo sapiens
  misc_RNA (1)...(19): siRNA sense strand
gcuccucagacuucgguaa

SEQ ID NO: 2227447 - RNA, 19 nt, Homo sapiens
  misc_RNA (1)...(19): siRNA sense strand
caacaagcucuguggcaac

SEQ ID NO: 2227448 - RNA, 19 nt, Homo sapiens
  misc_RNA (1)...(19): siRNA sense strand
cagucaccgaguagagaau

SEQ ID NO: 2227449 - RNA, 19 nt, Homo sapiens
  misc_RNA (1)...(19): siRNA sense strand
gggauuugagagaauaaaa

SEQ ID NO: 2227450 - RNA, 19 nt, Homo sapiens
  misc_RNA (1)...(19): siRNA sense strand
ggaaucagcuagaagccaa

SEQ ID NO: 2227451 - RNA, 19 nt, Homo sapiens
  misc_RNA (1)...(19): siRNA sense strand
ugaaagaggagcagcgcau

SEQ ID NO: 2227452 - RNA, 19 nt, Homo sapiens
  misc_RNA (1)...(19): siRNA sense strand
gcaucaagcugaaagagga

SEQ ID NO: 2227453 - RNA, 19 nt, Homo sapiens
  misc_RNA (1)...(19): siRNA sense strand
gcaccuacaucuacgacca

SEQ ID NO: 2227454 - RNA, 19 nt, Homo sapiens
  misc_RNA (1)...(19): siRNA sense strand
agaccugcacuuugaggaa

SEQ ID NO: 2227455 - RNA, 19 nt, Homo sapiens
  misc_RNA (1)...(19): siRNA sense strand
aggaggaguacuaccgcaa

SEQ ID NO: 2227456 - RNA, 19 nt, Homo sapiens
  misc_RNA (1)...(19): siRNA sense strand
gaauaugacugcaaggaca

SEQ ID NO: 2227457 - RNA, 19 nt, Homo sapiens
  misc_RNA (1)...(19): siRNA sense strand
ccacagaggaugaggucca

SEQ ID NO: 2227458 - RNA, 19 nt, Homo sapiens
  misc_RNA (1)...(19): siRNA sense strand
gaaacgaguuccagugcca

SEQ ID NO: 2227459 - RNA, 19 nt, Homo sapiens
  misc_RNA (1)...(19): siRNA sense strand
ggaaaugagaagaagccca

SEQ ID NO: 2227460 - RNA, 19 nt, Homo sapiens
  misc_RNA (1)...(19): siRNA sense strand
acaaaucugacgaggaaaa

SEQ ID NO: 2227461 - RNA, 19 nt, Homo sapiens
  misc_RNA (1)...(19): siRNA sense strand
uggccgucuuugaggacaa

SEQ ID NO: 2227462 - RNA, 19 nt, Homo sapiens
  misc_RNA (1)...(19): siRNA sense strand
uggucagucuggaggauga

SEQ ID NO: 2227463 - RNA, 19 nt, Homo sapiens
  misc_RNA (1)...(19): siRNA sense strand
ccgccagcuuccagugcaa

SEQ ID NO: 2227464 - RNA, 19 nt, Homo sapiens
  misc_RNA (1)...(19): siRNA sense strand
cguugcuggcagaggaaau

SEQ ID NO: 2227465 - RNA, 19 nt, Homo sapiens
  misc_RNA (1)...(19): siRNA sense strand
uggcagaggaaaugagaag

SEQ ID NO: 2227466 - RNA, 19 nt, Homo sapiens
  misc_RNA (1)...(19): siRNA sense strand
cggcagugugaccgggaau

SEQ ID NO: 2227467 - RNA, 19 nt, Homo sapiens
  misc_RNA (1)...(19): siRNA sense strand
cgaagauaucgaugagugu

SEQ ID NO: 2227468 - RNA, 19 nt, Homo sapiens
  misc_RNA (1)...(19): siRNA sense strand
cggcacgaggucaggaaga

SEQ ID NO: 2227469 - RNA, 19 nt, Homo sapiens
  misc_RNA (1)...(19): siRNA sense strand
gcuagagacugccgggacu

SEQ ID NO: 2227470 - RNA, 19 nt, Homo sapiens
  misc_RNA (1)...(19): siRNA sense strand
gccacaaccaggacggcua

SEQ ID NO: 2227471 - RNA, 19 nt, Homo sapiens
  misc_RNA (1)...(19): siRNA sense strand
caacauggcuagagacugc

SEQ ID NO: 2227472 - RNA, 19 nt, Homo sapiens
  misc_RNA (1)...(19): siRNA sense strand
ucaaagagugcgggaccaa

SEQ ID NO: 2227473 - RNA, 19 nt, Homo sapiens
  misc_RNA (1)...(19): siRNA sense strand
aggacaaaucugacgagga

SEQ ID NO: 2227474 - RNA, 19 nt, Homo sapiens
  misc_RNA (1)...(19): siRNA sense strand
cgaugaaguuggcugcguu

SEQ ID NO: 2227475 - RNA, 19 nt, Homo sapiens
  misc_RNA (1)...(19): siRNA sense strand
gcgaagauaucgaugagug

SEQ ID NO: 2227476 - RNA, 19 nt, Homo sapiens
  misc_RNA (1)...(19): siRNA sense strand
ccaagauggaccagacacu

SEQ ID NO: 2227477 - RNA, 19 nt, Homo sapiens
  misc_RNA (1)...(19): siRNA sense strand
cauagagaggccagagaau

SEQ ID NO: 2227478 - RNA, 19 nt, Homo sapiens
  misc_RNA (1)...(19): siRNA sense strand
guuaaaagucggucccaaa

SEQ ID NO: 2227479 - RNA, 19 nt, Homo sapiens
  misc_RNA (1)...(19): siRNA sense strand
ccauuguaugccaaagaaa

SEQ ID NO: 2227480 - RNA, 19 nt, Homo sapiens
  misc_RNA (1)...(19): siRNA sense strand
gcgcuuucucaaauggaua

SEQ ID NO: 2227481 - RNA, 19 nt, Homo sapiens
  misc_RNA (1)...(19): siRNA sense strand
ccaaaaugguagaagucca

SEQ ID NO: 2227482 - RNA, 19 nt, Homo sapiens
  misc_RNA (1)...(19): siRNA sense strand
ccagaaugugacuguaaau

SEQ ID NO: 2227483 - RNA, 19 nt, Homo sapiens
  misc_RNA (1)...(19): siRNA sense strand
ggaaguugugguugguaca

SEQ ID NO: 2227484 - RNA, 19 nt, Homo sapiens
  misc_RNA (1)...(19): siRNA sense strand
cuguagaugagaaggaagu

SEQ ID NO: 2227485 - RNA, 19 nt, Homo sapiens
  misc_RNA (1)...(19): siRNA sense strand
gagcaguacacuacagcca

SEQ ID NO: 2227486 - RNA, 19 nt, Homo sapiens
  misc_RNA (1)...(19): siRNA sense strand
acccagaaugugacuguaa

SEQ ID NO: 2227487 - RNA, 19 nt, Homo sapiens
  misc_RNA (1)...(19): siRNA sense strand
aucaacaguuucagaucaa

SEQ ID NO: 2227488 - RNA, 19 nt, Homo sapiens
  misc_RNA (1)...(19): siRNA sense strand
cguugugaauuuagcucuu

SEQ ID NO: 2227489 - RNA, 19 nt, Homo sapiens
  misc_RNA (1)...(19): siRNA sense strand
gugcgugagcaguacacua

SEQ ID NO: 2227490 - RNA, 19 nt, Homo sapiens
  misc_RNA (1)...(19): siRNA sense strand
gugaagacauuaugggcua

SEQ ID NO: 2227491 - RNA, 19 nt, Homo sapiens
  misc_RNA (1)...(19): siRNA sense strand
cacucaaacuauauggaaa

SEQ ID NO: 2227492 - RNA, 19 nt, Homo sapiens
  misc_RNA (1)...(19): siRNA sense strand
aguucgaaacccagaauua

SEQ ID NO: 2227493 - RNA, 19 nt, Homo sapiens
  misc_RNA (1)...(19): siRNA sense strand
gugaaagcacaguaaggaa

SEQ ID NO: 2227494 - RNA, 19 nt, Homo sapiens
  misc_RNA (1)...(19): siRNA sense strand
ggauagaagcuaaugccuu

SEQ ID NO: 2227495 - RNA, 19 nt, Homo sapiens
  misc_RNA (1)...(19): siRNA sense strand
ucacuggagcuaaaggaaa

SEQ ID NO: 2227496 - RNA, 19 nt, Homo sapiens
  misc_RNA (1)...(19): siRNA sense strand
cacuggagcuaaaggaaaa

SEQ ID NO: 2227497 - RNA, 19 nt, Homo sapiens
  misc_RNA (1)...(19): siRNA sense strand
gggacuaugaauaugguuu

SEQ ID NO: 2227498 - RNA, 19 nt, Homo sapiens
  misc_RNA (1)...(19): siRNA sense strand
cuguaaacgucgggcugaa

SEQ ID NO: 2227499 - RNA, 19 nt, Homo sapiens
  misc_RNA (1)...(19): siRNA sense strand
gauuaauauucuagccauc

SEQ ID NO: 2227500 - RNA, 19 nt, Homo sapiens
  misc_RNA (1)...(19): siRNA sense strand
ccgaugugcuccugaacca

SEQ ID NO: 2227501 - RNA, 19 nt, Homo sapiens
  misc_RNA (1)...(19): siRNA sense strand
aagacauuccaaagagauu

SEQ ID NO: 2227502 - RNA, 19 nt, Homo sapiens
  misc_RNA (1)...(19): siRNA sense strand
gaguccauucagaggcuaa

SEQ ID NO: 2227503 - RNA, 19 nt, Homo sapiens
  misc_RNA (1)...(19): siRNA sense strand
gcaauauucacuaagacau

SEQ ID NO: 2227504 - RNA, 19 nt, Homo sapiens
  misc_RNA (1)...(19): siRNA sense strand
aagcuaaugccuuugacaa

SEQ ID NO: 2227505 - RNA, 19 nt, Homo sapiens
  misc_RNA (1)...(19): siRNA sense strand
cauugagcccggagcauuu

SEQ ID NO: 2227506 - RNA, 19 nt, Homo sapiens
  misc_RNA (1)...(19): siRNA sense strand
guaacacaggcaucagaaa

SEQ ID NO: 2227507 - RNA, 19 nt, Homo sapiens
  misc_RNA (1)...(19): siRNA sense strand
guggcugggacuaugaaua

SEQ ID NO: 2227508 - RNA, 19 nt, Homo sapiens
  misc_RNA (1)...(19): siRNA sense strand
aguacaaagucaugcauuc

SEQ ID NO: 2227509 - RNA, 19 nt, Homo sapiens
  misc_RNA (1)...(19): siRNA sense strand
cuagaaagauggcacacca

SEQ ID NO: 2227510 - RNA, 19 nt, Homo sapiens
  misc_RNA (1)...(19): siRNA sense strand
agggaugaauaaugaaucu

SEQ ID NO: 2227511 - RNA, 19 nt, Homo sapiens
  misc_RNA (1)...(19): siRNA sense strand
uggauuugaagaaguacaa

SEQ ID NO: 2227512 - RNA, 19 nt, Homo sapiens
  misc_RNA (1)...(19): siRNA sense strand
gaacugaguggcugggacu

SEQ ID NO: 2227513 - RNA, 19 nt, Homo sapiens
  misc_RNA (1)...(19): siRNA sense strand
agcaauuacaugaagguca

SEQ ID NO: 2227514 - RNA, 19 nt, Homo sapiens
  misc_RNA (1)...(19): siRNA sense strand
auggcuaccaauaaagaua

SEQ ID NO: 2227515 - RNA, 19 nt, Homo sapiens
  misc_RNA (1)...(19): siRNA sense strand
gggccgaaaaccuuggaua

SEQ ID NO: 2227516 - RNA, 19 nt, Homo sapiens
  misc_RNA (1)...(19): siRNA sense strand
ugaagaaguacaaagucau

SEQ ID NO: 2227517 - RNA, 19 nt, Homo sapiens
  misc_RNA (1)...(19): siRNA sense strand
ggccgaaaaccuuggauau

SEQ ID NO: 2227518 - RNA, 19 nt, Homo sapiens
  misc_RNA (1)...(19): siRNA sense strand
ccaccaaauugcaggcccu

SEQ ID NO: 2227519 - RNA, 19 nt, Homo sapiens
  misc_RNA (1)...(19): siRNA sense strand
uggcugggacuaugaauau

SEQ ID NO: 2227520 - RNA, 19 nt, Homo sapiens
  misc_RNA (1)...(19): siRNA sense strand
aagaaagaggguaaagcaa

SEQ ID NO: 2227521 - RNA, 19 nt, Homo sapiens
  misc_RNA (1)...(19): siRNA sense strand
agagaagccaagaggaaga

SEQ ID NO: 2227522 - RNA, 19 nt, Homo sapiens
  misc_RNA (1)...(19): siRNA sense strand
gugaggagcugcaggccau

SEQ ID NO: 2227523 - RNA, 19 nt, Homo sapiens
  misc_RNA (1)...(19): siRNA sense strand
aggaggaagagcagaccaa

SEQ ID NO: 2227524 - RNA, 19 nt, Homo sapiens
  misc_RNA (1)...(19): siRNA sense strand
agacguggcuggaggagca

SEQ ID NO: 2227525 - RNA, 19 nt, Homo sapiens
  misc_RNA (1)...(19): siRNA sense strand
gagugguguccgagaguga

SEQ ID NO: 2227526 - RNA, 19 nt, Homo sapiens
  misc_RNA (1)...(19): siRNA sense strand
ugguggagacgcugagcaa

SEQ ID NO: 2227527 - RNA, 19 nt, Homo sapiens
  misc_RNA (1)...(19): siRNA sense strand
gggaaaagaagcagaucca

SEQ ID NO: 2227528 - RNA, 19 nt, Homo sapiens
  misc_RNA (1)...(19): siRNA sense strand
gggagaacuuuguggagac

SEQ ID NO: 2227529 - RNA, 19 nt, Homo sapiens
  misc_RNA (1)...(19): siRNA sense strand
agaggaagaaggaggagga

SEQ ID NO: 2227530 - RNA, 19 nt, Homo sapiens
  misc_RNA (1)...(19): siRNA sense strand
ggaauggagugguguccga

SEQ ID NO: 2227531 - RNA, 19 nt, Homo sapiens
  misc_RNA (1)...(19): siRNA sense strand
gugaggacgaggacagaga

SEQ ID NO: 2227532 - RNA, 19 nt, Homo sapiens
  misc_RNA (1)...(19): siRNA sense strand
cgucugagauccaggugca

SEQ ID NO: 2227533 - RNA, 19 nt, Homo sapiens
  misc_RNA (1)...(19): siRNA sense strand
gagcaaggcaugauccuga

SEQ ID NO: 2227534 - RNA, 19 nt, Homo sapiens
  misc_RNA (1)...(19): siRNA sense strand
gcgcugugugggaggugaa

SEQ ID NO: 2227535 - RNA, 19 nt, Homo sapiens
  misc_RNA (1)...(19): siRNA sense strand
ccaagaggaagaaggagga

SEQ ID NO: 2227536 - RNA, 19 nt, Homo sapiens
  misc_RNA (1)...(19): siRNA sense strand
cgggagaacuuuguggaga

SEQ ID NO: 2227537 - RNA, 19 nt, Homo sapiens
  misc_RNA (1)...(19): siRNA sense strand
gagcaucaccagagccuca

SEQ ID NO: 2227538 - RNA, 19 nt, Homo sapiens
  misc_RNA (1)...(19): siRNA sense strand
ucaucuaccucaauggaga

SEQ ID NO: 2227539 - RNA, 19 nt, Homo sapiens
  misc_RNA (1)...(19): siRNA sense strand
uggagcagucagugaaaga

SEQ ID NO: 2227540 - RNA, 19 nt, Homo sapiens
  misc_RNA (1)...(19): siRNA sense strand
uugagaagaucgaggaggu

SEQ ID NO: 2227541 - RNA, 19 nt, Homo sapiens
  misc_RNA (1)...(19): siRNA sense strand
guggagacgcugagcaacu

SEQ ID NO: 2227542 - RNA, 19 nt, Homo sapiens
  misc_RNA (1)...(19): siRNA sense strand
ccuacgacgaggacaguga

SEQ ID NO: 2227543 - RNA, 19 nt, Homo sapiens
  misc_RNA (1)...(19): siRNA sense strand
aggaggaggaagaagagga

SEQ ID NO: 2227544 - RNA, 19 nt, Homo sapiens
  misc_RNA (1)...(19): siRNA sense strand
aggaacugcaggaggagga

SEQ ID NO: 2227545 - RNA, 19 nt, Homo sapiens
  misc_RNA (1)...(19): siRNA sense strand
agaagauagacaucaucaa

SEQ ID NO: 2227546 - RNA, 19 nt, Homo sapiens
  misc_RNA (1)...(19): siRNA sense strand
cagagaaggaaggagaaga

SEQ ID NO: 2227547 - RNA, 19 nt, Homo sapiens
  misc_RNA (1)...(19): siRNA sense strand
cuaaagaccuccaaagcag

SEQ ID NO: 2227548 - RNA, 19 nt, Homo sapiens
  misc_RNA (1)...(19): siRNA sense strand
guggauuuaaugagagaaa

SEQ ID NO: 2227549 - RNA, 19 nt, Homo sapiens
  misc_RNA (1)...(19): siRNA sense strand
caugaaugugagugaaauu

SEQ ID NO: 2227550 - RNA, 19 nt, Homo sapiens
  misc_RNA (1)...(19): siRNA sense strand
ggaaauaccuggucucgga

SEQ ID NO: 2227551 - RNA, 19 nt, Homo sapiens
  misc_RNA (1)...(19): siRNA sense strand
caggaugaauucugggcuu

SEQ ID NO: 2227552 - RNA, 19 nt, Homo sapiens
  misc_RNA (1)...(19): siRNA sense strand
cugaaggagcucuguggaa

SEQ ID NO: 2227553 - RNA, 19 nt, Homo sapiens
  misc_RNA (1)...(19): siRNA sense strand
cuguggauccugaaacaaa

SEQ ID NO: 2227554 - RNA, 19 nt, Homo sapiens
  misc_RNA (1)...(19): siRNA sense strand
uggccaagaacaaguguau

SEQ ID NO: 2227555 - RNA, 19 nt, Homo sapiens
  misc_RNA (1)...(19): siRNA sense strand
aguuaugaugagauggcaa

SEQ ID NO: 2227556 - RNA, 19 nt, Homo sapiens
  misc_RNA (1)...(19): siRNA sense strand
gauucuaguaacuggguca

SEQ ID NO: 2227557 - RNA, 19 nt, Homo sapiens
  misc_RNA (1)...(19): siRNA sense strand
ugaggggucuggagggaaa

SEQ ID NO: 2227558 - RNA, 19 nt, Homo sapiens
  misc_RNA (1)...(19): siRNA sense strand
guacuagcccuauggccaa

SEQ ID NO: 2227559 - RNA, 19 nt, Homo sapiens
  misc_RNA (1)...(19): siRNA sense strand
uugagacagaagauggaua

SEQ ID NO: 2227560 - RNA, 19 nt, Homo sapiens
  misc_RNA (1)...(19): siRNA sense strand
ccaugagagcauuccggaa

SEQ ID NO: 2227561 - RNA, 19 nt, Homo sapiens
  misc_RNA (1)...(19): siRNA sense strand
aaguguauuauguggguca

SEQ ID NO: 2227562 - RNA, 19 nt, Homo sapiens
  misc_RNA (1)...(19): siRNA sense strand
uuaaauaugucuagagugg

SEQ ID NO: 2227563 - RNA, 19 nt, Homo sapiens
  misc_RNA (1)...(19): siRNA sense strand
ggacaaagccugaaaccag

SEQ ID NO: 2227564 - RNA, 19 nt, Homo sapiens
  misc_RNA (1)...(19): siRNA sense strand
acucggaacaaaagagaaa

SEQ ID NO: 2227565 - RNA, 19 nt, Homo sapiens
  misc_RNA (1)...(19): siRNA sense strand
gaucagagucaaagcagga

SEQ ID NO: 2227566 - RNA, 19 nt, Homo sapiens
  misc_RNA (1)...(19): siRNA sense strand
cuaaaacaucaaagcgaaa

SEQ ID NO: 2227567 - RNA, 19 nt, Homo sapiens
  misc_RNA (1)...(19): siRNA sense strand
cgcacaagauugggagaau

SEQ ID NO: 2227568 - RNA, 19 nt, Homo sapiens
  misc_RNA (1)...(19): siRNA sense strand
agucaaagcaggagaaacc

SEQ ID NO: 2227569 - RNA, 19 nt, Homo sapiens
  misc_RNA (1)...(19): siRNA sense strand
gcugcaacacgcugggcua

SEQ ID NO: 2227570 - RNA, 19 nt, Homo sapiens
  misc_RNA (1)...(19): siRNA sense strand
gccugaaaccagagccauu

SEQ ID NO: 2227571 - RNA, 19 nt, Homo sapiens
  misc_RNA (1)...(19): siRNA sense strand
aucaaguucaagugggaaa

SEQ ID NO: 2227572 - RNA, 19 nt, Homo sapiens
  misc_RNA (1)...(19): siRNA sense strand
ucaaacagcccauaggaca

SEQ ID NO: 2227573 - RNA, 19 nt, Homo sapiens
  misc_RNA (1)...(19): siRNA sense strand
ugaucaaguucaaguggga

SEQ ID NO: 2227574 - RNA, 19 nt, Homo sapiens
  misc_RNA (1)...(19): siRNA sense strand
acaucaaagcgaaagauca

SEQ ID NO: 2227575 - RNA, 19 nt, Homo sapiens
  misc_RNA (1)...(19): siRNA sense strand
cugcaugagaugaagacca

SEQ ID NO: 2227576 - RNA, 19 nt, Homo sapiens
  misc_RNA (1)...(19): siRNA sense strand
acacccgccuugugggcaa

SEQ ID NO: 2227577 - RNA, 19 nt, Homo sapiens
  misc_RNA (1)...(19): siRNA sense strand
auuuggaagaagagcucaa

SEQ ID NO: 2227578 - RNA, 19 nt, Homo sapiens
  misc_RNA (1)...(19): siRNA sense strand
cagagucaaagcaggagaa

SEQ ID NO: 2227579 - RNA, 19 nt, Homo sapiens
  misc_RNA (1)...(19): siRNA sense strand
ucuaaaacaucaaagcgaa

SEQ ID NO: 2227580 - RNA, 19 nt, Homo sapiens
  misc_RNA (1)...(19): siRNA sense strand
cgguccagugccagagcua

SEQ ID NO: 2227581 - RNA, 19 nt, Homo sapiens
  misc_RNA (1)...(19): siRNA sense strand
auucagaagaucagaguaa

SEQ ID NO: 2227582 - RNA, 19 nt, Homo sapiens
  misc_RNA (1)...(19): siRNA sense strand
ccagaaaccaguugggcau

SEQ ID NO: 2227583 - RNA, 19 nt, Homo sapiens
  misc_RNA (1)...(19): siRNA sense strand
augacaagucucugaauaa

SEQ ID NO: 2227584 - RNA, 19 nt, Homo sapiens
  misc_RNA (1)...(19): siRNA sense strand
ccgcgugauugcagagaga

SEQ ID NO: 2227585 - RNA, 19 nt, Homo sapiens
  misc_RNA (1)...(19): siRNA sense strand
gccaaaagaagcagcaaaa

SEQ ID NO: 2227586 - RNA, 19 nt, Homo sapiens
  misc_RNA (1)...(19): siRNA sense strand
ccuaauuuacacagaggua

SEQ ID NO: 2227587 - RNA, 19 nt, Homo sapiens
  misc_RNA (1)...(19): siRNA sense strand
aggaaaggcaccugcggua

SEQ ID NO: 2227588 - RNA, 19 nt, Homo sapiens
  misc_RNA (1)...(19): siRNA sense strand
aguaaaagcaggagagacu

SEQ ID NO: 2227589 - RNA, 19 nt, Homo sapiens
  misc_RNA (1)...(19): siRNA sense strand
agagagaggacuuggagau

SEQ ID NO: 2227590 - RNA, 19 nt, Homo sapiens
  misc_RNA (1)...(19): siRNA sense strand
cgaccaaagaagagauuuu

SEQ ID NO: 2227591 - RNA, 19 nt, Homo sapiens
  misc_RNA (1)...(19): siRNA sense strand
cgaaaguaaauuugcccua

SEQ ID NO: 2227592 - RNA, 19 nt, Homo sapiens
  misc_RNA (1)...(19): siRNA sense strand
cucaaauggaagagugauu

SEQ ID NO: 2227593 - RNA, 19 nt, Homo sapiens
  misc_RNA (1)...(19): siRNA sense strand
ucagaagaucagaguaaaa

SEQ ID NO: 2227594 - RNA, 19 nt, Homo sapiens
  misc_RNA (1)...(19): siRNA sense strand
ucucauuugcagaaaggaa

SEQ ID NO: 2227595 - RNA, 19 nt, Homo sapiens
  misc_RNA (1)...(19): siRNA sense strand
auguccaucucuugggaua

SEQ ID NO: 2227596 - RNA, 19 nt, Homo sapiens
  misc_RNA (1)...(19): siRNA sense strand
ugcuugaguuguagaaaga

SEQ ID NO: 2227597 - RNA, 19 nt, Homo sapiens
  misc_RNA (1)...(19): siRNA sense strand
gcugcaacaaucugggcua

SEQ ID NO: 2227598 - RNA, 19 nt, Homo sapiens
  misc_RNA (1)...(19): siRNA sense strand
ucaacuggauggaggagga

SEQ ID NO: 2227599 - RNA, 19 nt, Homo sapiens
  misc_RNA (1)...(19): siRNA sense strand
uuaacuacccucuggacaa

SEQ ID NO: 2227600 - RNA, 19 nt, Homo sapiens
  misc_RNA (1)...(19): siRNA sense strand
uaauuuacacagagguaga

SEQ ID NO: 2227601 - RNA, 19 nt, Homo sapiens
  misc_RNA (1)...(19): siRNA sense strand
aagucugaccaauaagaaa

SEQ ID NO: 2227602 - RNA, 19 nt, Homo sapiens
  misc_RNA (1)...(19): siRNA sense strand
ccguguggcuccagagucu

SEQ ID NO: 2227603 - RNA, 19 nt, Homo sapiens
  misc_RNA (1)...(19): siRNA sense strand
caggaauguaugagaguug

SEQ ID NO: 2227604 - RNA, 19 nt, Homo sapiens
  misc_RNA (1)...(19): siRNA sense strand
uggccgagagugagaacau

SEQ ID NO: 2227605 - RNA, 19 nt, Homo sapiens
  misc_RNA (1)...(19): siRNA sense strand
caacagaauuacuggccuc

SEQ ID NO: 2227606 - RNA, 19 nt, Homo sapiens
  misc_RNA (1)...(19): siRNA sense strand
uggucagacugguggagca

SEQ ID NO: 2227607 - RNA, 19 nt, Homo sapiens
  misc_RNA (1)...(19): siRNA sense strand
cucauuugcagaaaggaaa

SEQ ID NO: 2227608 - RNA, 19 nt, Homo sapiens
  misc_RNA (1)...(19): siRNA sense strand
ccucauucccggaguagca

SEQ ID NO: 2227609 - RNA, 19 nt, Homo sapiens
  misc_RNA (1)...(19): siRNA sense strand
cugaaguuuccacaaauaa

SEQ ID NO: 2227610 - RNA, 19 nt, Homo sapiens
  misc_RNA (1)...(19): siRNA sense strand
ccaccuacgucaaugccaa

SEQ ID NO: 2227611 - RNA, 19 nt, Homo sapiens
  misc_RNA (1)...(19): siRNA sense strand
acaccaacucagagaagau

SEQ ID NO: 2227612 - RNA, 19 nt, Homo sapiens
  misc_RNA (1)...(19): siRNA sense strand
cgcggaagcuggaucgcua

SEQ ID NO: 2227613 - RNA, 19 nt, Homo sapiens
  misc_RNA (1)...(19): siRNA sense strand
acaugaacgcggugcugaa

SEQ ID NO: 2227614 - RNA, 19 nt, Homo sapiens
  misc_RNA (1)...(19): siRNA sense strand
acgcggugcugaagggcuu

SEQ ID NO: 2227615 - RNA, 19 nt, Homo sapiens
  misc_RNA (1)...(19): siRNA sense strand
acgaggagguggucagcca

SEQ ID NO: 2227616 - RNA, 19 nt, Homo sapiens
  misc_RNA (1)...(19): siRNA sense strand
gggcgaccagauaggcaaa

SEQ ID NO: 2227617 - RNA, 19 nt, Homo sapiens
  misc_RNA (1)...(19): siRNA sense strand
gcaacauggagcagccaca

SEQ ID NO: 2227618 - RNA, 19 nt, Homo sapiens
  misc_RNA (1)...(19): siRNA sense strand
ccaccuacgucaaugccaa

SEQ ID NO: 2227619 - RNA, 19 nt, Homo sapiens
  misc_RNA (1)...(19): siRNA sense strand
acaccaacucagagaagau

SEQ ID NO: 2227620 - RNA, 19 nt, Homo sapiens
  misc_RNA (1)...(19): siRNA sense strand
cgcggaagcuggaucgcua

SEQ ID NO: 2227621 - RNA, 19 nt, Homo sapiens
  misc_RNA (1)...(19): siRNA sense strand
acaugaacgcggugcugaa

SEQ ID NO: 2227622 - RNA, 19 nt, Homo sapiens
  misc_RNA (1)...(19): siRNA sense strand
acgcggugcugaagggcuu

SEQ ID NO: 2227623 - RNA, 19 nt, Homo sapiens
  misc_RNA (1)...(19): siRNA sense strand
acgaggagguggucagcca

SEQ ID NO: 2227624 - RNA, 19 nt, Homo sapiens
  misc_RNA (1)...(19): siRNA sense strand
gggcgaccagauaggcaaa

SEQ ID NO: 2227625 - RNA, 19 nt, Homo sapiens
  misc_RNA (1)...(19): siRNA sense strand
gcaacauggagcagccaca

SEQ ID NO: 2227626 - RNA, 19 nt, Homo sapiens
  misc_RNA (1)...(19): siRNA sense strand
ccaccuacgucaaugccaa

SEQ ID NO: 2227627 - RNA, 19 nt, Homo sapiens
  misc_RNA (1)...(19): siRNA sense strand
acaccaacucagagaagau

SEQ ID NO: 2227628 - RNA, 19 nt, Homo sapiens
  misc_RNA (1)...(19): siRNA sense strand
cgcggaagcuggaucgcua

SEQ ID NO: 2227629 - RNA, 19 nt, Homo sapiens
  misc_RNA (1)...(19): siRNA sense strand
acaugaacgcggugcugaa

SEQ ID NO: 2227630 - RNA, 19 nt, Homo sapiens
  misc_RNA (1)...(19): siRNA sense strand
acgcggugcugaagggcuu

SEQ ID NO: 2227631 - RNA, 19 nt, Homo sapiens
  misc_RNA (1)...(19): siRNA sense strand
acgaggagguggucagcca

SEQ ID NO: 2227632 - RNA, 19 nt, Homo sapiens
  misc_RNA (1)...(19): siRNA sense strand
gggcgaccagauaggcaaa

SEQ ID NO: 2227633 - RNA, 19 nt, Homo sapiens
  misc_RNA (1)...(19): siRNA sense strand
gcaacauggagcagccaca

SEQ ID NO: 2227634 - RNA, 19 nt, Homo sapiens
  misc_RNA (1)...(19): siRNA sense strand
gagcaagggcagaggagca

SEQ ID NO: 2227635 - RNA, 19 nt, Homo sapiens
  misc_RNA (1)...(19): siRNA sense strand
ccugaacggcugugagaau

SEQ ID NO: 2227636 - RNA, 19 nt, Homo sapiens
  misc_RNA (1)...(19): siRNA sense strand
gagaacggguacuggguga

SEQ ID NO: 2227637 - RNA, 19 nt, Homo sapiens
  misc_RNA (1)...(19): siRNA sense strand
gagaauggcgagugcguca

SEQ ID NO: 2227638 - RNA, 19 nt, Homo sapiens
  misc_RNA (1)...(19): siRNA sense strand
cggagaaaaucaagaagau

SEQ ID NO: 2227639 - RNA, 19 nt, Homo sapiens
  misc_RNA (1)...(19): siRNA sense strand
gggcugaaccucacggaga

SEQ ID NO: 2227640 - RNA, 19 nt, Homo sapiens
  misc_RNA (1)...(19): siRNA sense strand
gcauugaggcagagcggga

SEQ ID NO: 2227641 - RNA, 19 nt, Homo sapiens
  misc_RNA (1)...(19): siRNA sense strand
gcagagagauggcacccaa

SEQ ID NO: 2227642 - RNA, 19 nt, Homo sapiens
  misc_RNA (1)...(19): siRNA sense strand
gggcuggaggucagaguau

SEQ ID NO: 2227643 - RNA, 19 nt, Homo sapiens
  misc_RNA (1)...(19): siRNA sense strand
gcgagugugaucagggcua

SEQ ID NO: 2227644 - RNA, 19 nt, Homo sapiens
  misc_RNA (1)...(19): siRNA sense strand
cagagauacaggaagaaca

SEQ ID NO: 2227645 - RNA, 19 nt, Homo sapiens
  misc_RNA (1)...(19): siRNA sense strand
ugaggaaagccgaggagga

SEQ ID NO: 2227646 - RNA, 19 nt, Homo sapiens
  misc_RNA (1)...(19): siRNA sense strand
ccugugaagauguggauga

SEQ ID NO: 2227647 - RNA, 19 nt, Homo sapiens
  misc_RNA (1)...(19): siRNA sense strand
gugagaacguggagggcuc

SEQ ID NO: 2227648 - RNA, 19 nt, Homo sapiens
  misc_RNA (1)...(19): siRNA sense strand
ggaaagccgaggaggagga

SEQ ID NO: 2227649 - RNA, 19 nt, Homo sapiens
  misc_RNA (1)...(19): siRNA sense strand
cggagacugcauugacaua

SEQ ID NO: 2227650 - RNA, 19 nt, Homo sapiens
  misc_RNA (1)...(19): siRNA sense strand
gggucugugcccauggaaa

SEQ ID NO: 2227651 - RNA, 19 nt, Homo sapiens
  misc_RNA (1)...(19): siRNA sense strand
cgaggagcucugaggucua

SEQ ID NO: 2227652 - RNA, 19 nt, Homo sapiens
  misc_RNA (1)...(19): siRNA sense strand
cccagagaguggagagugu

SEQ ID NO: 2227653 - RNA, 19 nt, Homo sapiens
  misc_RNA (1)...(19): siRNA sense strand
uugacgagugugaggacua

SEQ ID NO: 2227654 - RNA, 19 nt, Homo sapiens
  misc_RNA (1)...(19): siRNA sense strand
ccaggauggacaacagcaa

SEQ ID NO: 2227655 - RNA, 19 nt, Homo sapiens
  misc_RNA (1)...(19): siRNA sense strand
gcaccaaccuagaaggcuc

SEQ ID NO: 2227656 - RNA, 19 nt, Homo sapiens
  misc_RNA (1)...(19): siRNA sense strand
aggaggcccuaguggagaa

SEQ ID NO: 2227657 - RNA, 19 nt, Homo sapiens
  misc_RNA (1)...(19): siRNA sense strand
gcuguguagaugugaauga

SEQ ID NO: 2227658 - RNA, 19 nt, Homo sapiens
  misc_RNA (1)...(19): siRNA sense strand
gcaagaacacugugggcuc

SEQ ID NO: 2227659 - RNA, 19 nt, Homo sapiens
  misc_RNA (1)...(19): siRNA sense strand
uggccugugaggagggcua

SEQ ID NO: 2227660 - RNA, 19 nt, Homo sapiens
  misc_RNA (1)...(19): siRNA sense strand
acaggggauugcagagaua

SEQ ID NO: 2227661 - RNA, 19 nt, Homo sapiens
  misc_RNA (1)...(19): siRNA sense strand
guccaugguuacugcgaga

SEQ ID NO: 2227662 - RNA, 19 nt, Homo sapiens
  misc_RNA (1)...(19): siRNA sense strand
gcgagaacacagagggcuc

SEQ ID NO: 2227663 - RNA, 19 nt, Homo sapiens
  misc_RNA (1)...(19): siRNA sense strand
ugaacgagugugagcuuau

SEQ ID NO: 2227664 - RNA, 19 nt, Homo sapiens
  misc_RNA (1)...(19): siRNA sense strand
gagaauggccagcuggagu

SEQ ID NO: 2227665 - RNA, 19 nt, Homo sapiens
  misc_RNA (1)...(19): siRNA sense strand
aagccgaggaggaggaacu

SEQ ID NO: 2227666 - RNA, 19 nt, Homo sapiens
  misc_RNA (1)...(19): siRNA sense strand
caggaaaggacacugccaa

SEQ ID NO: 2227667 - RNA, 19 nt, Homo sapiens
  misc_RNA (1)...(19): siRNA sense strand
cugugaagauguggaugaa

SEQ ID NO: 2227668 - RNA, 19 nt, Homo sapiens
  misc_RNA (1)...(19): siRNA sense strand
cuacaucauggucaggaaa

SEQ ID NO: 2227669 - RNA, 19 nt, Homo sapiens
  misc_RNA (1)...(19): siRNA sense strand
gagcuguguagaugugaau

SEQ ID NO: 2227670 - RNA, 19 nt, Homo sapiens
  misc_RNA (1)...(19): siRNA sense strand
ccugaugggagaugcguca

SEQ ID NO: 2227671 - RNA, 19 nt, Homo sapiens
  misc_RNA (1)...(19): siRNA sense strand
gagcagggcuaugagguca

SEQ ID NO: 2227672 - RNA, 19 nt, Homo sapiens
  misc_RNA (1)...(19): siRNA sense strand
ggucacagggaaugccaca

SEQ ID NO: 2227673 - RNA, 19 nt, Homo sapiens
  misc_RNA (1)...(19): siRNA sense strand
uggauauugacgaguguga

SEQ ID NO: 2227674 - RNA, 19 nt, Homo sapiens
  misc_RNA (1)...(19): siRNA sense strand
cuguuacgguccagggcaa

SEQ ID NO: 2227675 - RNA, 19 nt, Homo sapiens
  misc_RNA (1)...(19): siRNA sense strand
gauugggaauggauggcua

SEQ ID NO: 2227676 - RNA, 19 nt, Homo sapiens
  misc_RNA (1)...(19): siRNA sense strand
caaagaggguuguccguga

SEQ ID NO: 2227677 - RNA, 19 nt, Homo sapiens
  misc_RNA (1)...(19): siRNA sense strand
auggagaaaucguugucaa

SEQ ID NO: 2227678 - RNA, 19 nt, Homo sapiens
  misc_RNA (1)...(19): siRNA sense strand
cagagauguccgucaguau

SEQ ID NO: 2227679 - RNA, 19 nt, Homo sapiens
  misc_RNA (1)...(19): siRNA sense strand
cugguguaaugauggcaaa

SEQ ID NO: 2227680 - RNA, 19 nt, Homo sapiens
  misc_RNA (1)...(19): siRNA sense strand
gccaaaugggagagugguu

SEQ ID NO: 2227681 - RNA, 19 nt, Homo sapiens
  misc_RNA (1)...(19): siRNA sense strand
auggauggcuacaggggaa

SEQ ID NO: 2227682 - RNA, 19 nt, Homo sapiens
  misc_RNA (1)...(19): siRNA sense strand
augggauauuucagaucaa

SEQ ID NO: 2227683 - RNA, 19 nt, Homo sapiens
  misc_RNA (1)...(19): siRNA sense strand
ccgugauccacaaggcauu

SEQ ID NO: 2227684 - RNA, 19 nt, Homo sapiens
  misc_RNA (1)...(19): siRNA sense strand
cgagaaagauaucugggua

SEQ ID NO: 2227685 - RNA, 19 nt, Homo sapiens
  misc_RNA (1)...(19): siRNA sense strand
aggaaauaaggaagaagaa

SEQ ID NO: 2227686 - RNA, 19 nt, Homo sapiens
  misc_RNA (1)...(19): siRNA sense strand
aauaaucuguggaggacaa

SEQ ID NO: 2227687 - RNA, 19 nt, Homo sapiens
  misc_RNA (1)...(19): siRNA sense strand
cgggaaggugaccgagaaa

SEQ ID NO: 2227688 - RNA, 19 nt, Homo sapiens
  misc_RNA (1)...(19): siRNA sense strand
cuguggaggacaauagaua

SEQ ID NO: 2227689 - RNA, 19 nt, Homo sapiens
  misc_RNA (1)...(19): siRNA sense strand
ggcucaacaugcugacaaa

SEQ ID NO: 2227690 - RNA, 19 nt, Homo sapiens
  misc_RNA (1)...(19): siRNA sense strand
aguugaggcuggagaacga

SEQ ID NO: 2227691 - RNA, 19 nt, Homo sapiens
  misc_RNA (1)...(19): siRNA sense strand
agauguugguggagcuuau

SEQ ID NO: 2227692 - RNA, 19 nt, Homo sapiens
  misc_RNA (1)...(19): siRNA sense strand
gguuggaggaagaacauau

SEQ ID NO: 2227693 - RNA, 19 nt, Homo sapiens
  misc_RNA (1)...(19): siRNA sense strand
cuuuacauccagugcauua

SEQ ID NO: 2227694 - RNA, 19 nt, Homo sapiens
  misc_RNA (1)...(19): siRNA sense strand
gagaagaacuggugugagg

SEQ ID NO: 2227695 - RNA, 19 nt, Homo sapiens
  misc_RNA (1)...(19): siRNA sense strand
ggacaaaaugaccaugaaa

SEQ ID NO: 2227696 - RNA, 19 nt, Homo sapiens
  misc_RNA (1)...(19): siRNA sense strand
ggauauucucugucaccaa

SEQ ID NO: 2227697 - RNA, 19 nt, Homo sapiens
  misc_RNA (1)...(19): siRNA sense strand
acucaauauggaaggguga

SEQ ID NO: 2227698 - RNA, 19 nt, Homo sapiens
  misc_RNA (1)...(19): siRNA sense strand
cuuaaauggucucgggaag

SEQ ID NO: 2227699 - RNA, 19 nt, Homo sapiens
  misc_RNA (1)...(19): siRNA sense strand
ugucuaaggagcugggcau

SEQ ID NO: 2227700 - RNA, 19 nt, Homo sapiens
  misc_RNA (1)...(19): siRNA sense strand
acaaaaugaccaugaaaga

SEQ ID NO: 2227701 - RNA, 19 nt, Homo sapiens
  misc_RNA (1)...(19): siRNA sense strand
aaggaaauaaggaagaaga

SEQ ID NO: 2227702 - RNA, 19 nt, Homo sapiens
  misc_RNA (1)...(19): siRNA sense strand
gagaaagauaucuggguac

SEQ ID NO: 2227703 - RNA, 19 nt, Homo sapiens
  misc_RNA (1)...(19): siRNA sense strand
cugcaugaucauugaagau

SEQ ID NO: 2227704 - RNA, 19 nt, Homo sapiens
  misc_RNA (1)...(19): siRNA sense strand
uuucaauaaccuuggauga

SEQ ID NO: 2227705 - RNA, 19 nt, Homo sapiens
  misc_RNA (1)...(19): siRNA sense strand
cuauaaggaaugagcaugu

SEQ ID NO: 2227706 - RNA, 19 nt, Homo sapiens
  misc_RNA (1)...(19): siRNA sense strand
ucauagagacgcugaacca

SEQ ID NO: 2227707 - RNA, 19 nt, Homo sapiens
  misc_RNA (1)...(19): siRNA sense strand
cuucauucuugcccggaaa

SEQ ID NO: 2227708 - RNA, 19 nt, Homo sapiens
  misc_RNA (1)...(19): siRNA sense strand
caauagauaacauggggaa

SEQ ID NO: 2227709 - RNA, 19 nt, Homo sapiens
  misc_RNA (1)...(19): siRNA sense strand
agaaagauaucuggguaca

SEQ ID NO: 2227710 - RNA, 19 nt, Homo sapiens
  misc_RNA (1)...(19): siRNA sense strand
cgcugaaccaugaacauua

SEQ ID NO: 2227711 - RNA, 19 nt, Homo sapiens
  misc_RNA (1)...(19): siRNA sense strand
ugcauuaugaagagaagaa

SEQ ID NO: 2227712 - RNA, 19 nt, Homo sapiens
  misc_RNA (1)...(19): siRNA sense strand
aaggugaccgagaaagaua

SEQ ID NO: 2227713 - RNA, 19 nt, Homo sapiens
  misc_RNA (1)...(19): siRNA sense strand
ggagcugggcauagagacu

SEQ ID NO: 2227714 - RNA, 19 nt, Homo sapiens
  misc_RNA (1)...(19): siRNA sense strand
cgugaucggagguggcauu

SEQ ID NO: 2227715 - RNA, 19 nt, Homo sapiens
  misc_RNA (1)...(19): siRNA sense strand
augaacauuaugagugcaa

SEQ ID NO: 2227716 - RNA, 19 nt, Homo sapiens
  misc_RNA (1)...(19): siRNA sense strand
cguagauguugguggagcu

SEQ ID NO: 2227717 - RNA, 19 nt, Homo sapiens
  misc_RNA (1)...(19): siRNA sense strand
ggaggacaauagauaacau

SEQ ID NO: 2227718 - RNA, 19 nt, Homo sapiens
  misc_RNA (1)...(19): siRNA sense strand
cagagagaaaccaguuaau

SEQ ID NO: 2227719 - RNA, 19 nt, Homo sapiens
  misc_RNA (1)...(19): siRNA sense strand
ugaucgacuugcuaagcua

SEQ ID NO: 2227720 - RNA, 19 nt, Homo sapiens
  misc_RNA (1)...(19): siRNA sense strand
cuaagcuacauaaggaaau

SEQ ID NO: 2227721 - RNA, 19 nt, Homo sapiens
  misc_RNA (1)...(19): siRNA sense strand
aucaagagaaggcgaguau

SEQ ID NO: 2227722 - RNA, 19 nt, Homo sapiens
  misc_RNA (1)...(19): siRNA sense strand
gaaagauaucuggguacaa

SEQ ID NO: 2227723 - RNA, 19 nt, Homo sapiens
  misc_RNA (1)...(19): siRNA sense strand
augccaaagugcugggauc

SEQ ID NO: 2227724 - RNA, 19 nt, Homo sapiens
  misc_RNA (1)...(19): siRNA sense strand
uacaauaaucuguggagga

SEQ ID NO: 2227725 - RNA, 19 nt, Homo sapiens
  misc_RNA (1)...(19): siRNA sense strand
agguggcauuucaggacua

SEQ ID NO: 2227726 - RNA, 19 nt, Homo sapiens
  misc_RNA (1)...(19): siRNA sense strand
gggcaguugaggcuggaga

SEQ ID NO: 2227727 - RNA, 19 nt, Homo sapiens
  misc_RNA (1)...(19): siRNA sense strand
caucggagucugugggaga

SEQ ID NO: 2227728 - RNA, 19 nt, Homo sapiens
  misc_RNA (1)...(19): siRNA sense strand
ccaucaagcacaucggcua

SEQ ID NO: 2227729 - RNA, 19 nt, Homo sapiens
  misc_RNA (1)...(19): siRNA sense strand
cggccaaguaccuggacga

SEQ ID NO: 2227730 - RNA, 19 nt, Homo sapiens
  misc_RNA (1)...(19): siRNA sense strand
cucagaagacagagcgaga

SEQ ID NO: 2227731 - RNA, 19 nt, Homo sapiens
  misc_RNA (1)...(19): siRNA sense strand
ccucaauggccauggugga

SEQ ID NO: 2227732 - RNA, 19 nt, Homo sapiens
  misc_RNA (1)...(19): siRNA sense strand
uggccaagucucuggugaa

SEQ ID NO: 2227733 - RNA, 19 nt, Homo sapiens
  misc_RNA (1)...(19): siRNA sense strand
agucugugggagagggaca

SEQ ID NO: 2227734 - RNA, 19 nt, Homo sapiens
  misc_RNA (1)...(19): siRNA sense strand
guucaguacaugcaggaca

SEQ ID NO: 2227735 - RNA, 19 nt, Homo sapiens
  misc_RNA (1)...(19): siRNA sense strand
ggauaagaucugugaccag

SEQ ID NO: 2227736 - RNA, 19 nt, Homo sapiens
  misc_RNA (1)...(19): siRNA sense strand
ugucacuggccguaagauu

SEQ ID NO: 2227737 - RNA, 19 nt, Homo sapiens
  misc_RNA (1)...(19): siRNA sense strand
cugggaaggacuacaccaa

SEQ ID NO: 2227738 - RNA, 19 nt, Homo sapiens
  misc_RNA (1)...(19): siRNA sense strand
gggcaaacaaguugggaac

SEQ ID NO: 2227739 - RNA, 19 nt, Homo sapiens
  misc_RNA (1)...(19): siRNA sense strand
caaacuggaacgaggguga

SEQ ID NO: 2227740 - RNA, 19 nt, Homo sapiens
  misc_RNA (1)...(19): siRNA sense strand
acaaguucuuccugaccaa

SEQ ID NO: 2227741 - RNA, 19 nt, Homo sapiens
  misc_RNA (1)...(19): siRNA sense strand
ugggcaaacaaguugggaa

SEQ ID NO: 2227742 - RNA, 19 nt, Homo sapiens
  misc_RNA (1)...(19): siRNA sense strand
gaauaagaaucuccaggca

SEQ ID NO: 2227743 - RNA, 19 nt, Homo sapiens
  misc_RNA (1)...(19): siRNA sense strand
uccugaucauauugagaaa

SEQ ID NO: 2227744 - RNA, 19 nt, Homo sapiens
  misc_RNA (1)...(19): siRNA sense strand
uggaaaauauccugaucau

SEQ ID NO: 2227745 - RNA, 19 nt, Homo sapiens
  misc_RNA (1)...(19): siRNA sense strand
gcaagaaauaauuccgacu

SEQ ID NO: 2227746 - RNA, 19 nt, Homo sapiens
  misc_RNA (1)...(19): siRNA sense strand
uauugagaaacaugggcua

SEQ ID NO: 2227747 - RNA, 19 nt, Homo sapiens
  misc_RNA (1)...(19): siRNA sense strand
cugaauuagaugugaauga

SEQ ID NO: 2227748 - RNA, 19 nt, Homo sapiens
  misc_RNA (1)...(19): siRNA sense strand
caaaagaagguuauggaau

SEQ ID NO: 2227749 - RNA, 19 nt, Homo sapiens
  misc_RNA (1)...(19): siRNA sense strand
ugacaagacccuacgcgua

SEQ ID NO: 2227750 - RNA, 19 nt, Homo sapiens
  misc_RNA (1)...(19): siRNA sense strand
gggaagugcaaacuggcua

SEQ ID NO: 2227751 - RNA, 19 nt, Homo sapiens
  misc_RNA (1)...(19): siRNA sense strand
gauuaugagacuggagauu

SEQ ID NO: 2227752 - RNA, 19 nt, Homo sapiens
  misc_RNA (1)...(19): siRNA sense strand
gcuaaaugaagcaaaagaa

SEQ ID NO: 2227753 - RNA, 19 nt, Homo sapiens
  misc_RNA (1)...(19): siRNA sense strand
caaaggaaugcaaggcuga

SEQ ID NO: 2227754 - RNA, 19 nt, Homo sapiens
  misc_RNA (1)...(19): siRNA sense strand
acuauuaagaugugggaug

SEQ ID NO: 2227755 - RNA, 19 nt, Homo sapiens
  misc_RNA (1)...(19): siRNA sense strand
ggucaugauaacuggguac

SEQ ID NO: 2227756 - RNA, 19 nt, Homo sapiens
  misc_RNA (1)...(19): siRNA sense strand
ggacacagagaauggguac

SEQ ID NO: 2227757 - RNA, 19 nt, Homo sapiens
  misc_RNA (1)...(19): siRNA sense strand
ggauuaugagacuggagau

SEQ ID NO: 2227758 - RNA, 19 nt, Homo sapiens
  misc_RNA (1)...(19): siRNA sense strand
guaugggauuacaagaaca

SEQ ID NO: 2227759 - RNA, 19 nt, Homo sapiens
  misc_RNA (1)...(19): siRNA sense strand
cuuaaaggacauacagacu

SEQ ID NO: 2227760 - RNA, 19 nt, Homo sapiens
  misc_RNA (1)...(19): siRNA sense strand
acagagaauggguacguau

SEQ ID NO: 2227761 - RNA, 19 nt, Homo sapiens
  misc_RNA (1)...(19): siRNA sense strand
gggucaugauaacugggua

SEQ ID NO: 2227762 - RNA, 19 nt, Homo sapiens
  misc_RNA (1)...(19): siRNA sense strand
guguaugggucguagcaac

SEQ ID NO: 2227763 - RNA, 19 nt, Homo sapiens
  misc_RNA (1)...(19): siRNA sense strand
gucagaaacgagacccaaa

SEQ ID NO: 2227764 - RNA, 19 nt, Homo sapiens
  misc_RNA (1)...(19): siRNA sense strand
cugaagaagcugagaaaau

SEQ ID NO: 2227765 - RNA, 19 nt, Homo sapiens
  misc_RNA (1)...(19): siRNA sense strand
aggagaaggcagugagcuu

SEQ ID NO: 2227766 - RNA, 19 nt, Homo sapiens
  misc_RNA (1)...(19): siRNA sense strand
gggcagaucaggaaggcau

SEQ ID NO: 2227767 - RNA, 19 nt, Homo sapiens
  misc_RNA (1)...(19): siRNA sense strand
cagaaauggaaauguucaa

SEQ ID NO: 2227768 - RNA, 19 nt, Homo sapiens
  misc_RNA (1)...(19): siRNA sense strand
uggaggagcuggugcccua

SEQ ID NO: 2227769 - RNA, 19 nt, Homo sapiens
  misc_RNA (1)...(19): siRNA sense strand
cgaggaagccccugagcaa

SEQ ID NO: 2227770 - RNA, 19 nt, Homo sapiens
  misc_RNA (1)...(19): siRNA sense strand
ccucaagagauaaaacaaa

SEQ ID NO: 2227771 - RNA, 19 nt, Homo sapiens
  misc_RNA (1)...(19): siRNA sense strand
cuacagaguuggaagcauc

SEQ ID NO: 2227772 - RNA, 19 nt, Homo sapiens
  misc_RNA (1)...(19): siRNA sense strand
gaaacaaacugaagcgcug

SEQ ID NO: 2227773 - RNA, 19 nt, Homo sapiens
  misc_RNA (1)...(19): siRNA sense strand
gggaaagaugcgaccuaga

SEQ ID NO: 2227774 - RNA, 19 nt, Homo sapiens
  misc_RNA (1)...(19): siRNA sense strand
ccauaagcaggaaagggaa

SEQ ID NO: 2227775 - RNA, 19 nt, Homo sapiens
  misc_RNA (1)...(19): siRNA sense strand
gaaacaagugggagaggcu

SEQ ID NO: 2227776 - RNA, 19 nt, Homo sapiens
  misc_RNA (1)...(19): siRNA sense strand
gggagguggagguuggaga

SEQ ID NO: 2227777 - RNA, 19 nt, Homo sapiens
  misc_RNA (1)...(19): siRNA sense strand
cccuggaacacaagaagaa

SEQ ID NO: 2227778 - RNA, 19 nt, Homo sapiens
  misc_RNA (1)...(19): siRNA sense strand
aucugaagaagcugagaaa

SEQ ID NO: 2227779 - RNA, 19 nt, Homo sapiens
  misc_RNA (1)...(19): siRNA sense strand
guucaauguuccagagcug

SEQ ID NO: 2227780 - RNA, 19 nt, Homo sapiens
  misc_RNA (1)...(19): siRNA sense strand
cgugauggagggaagaaca

SEQ ID NO: 2227781 - RNA, 19 nt, Homo sapiens
  misc_RNA (1)...(19): siRNA sense strand
agaggaagcuggagcaggu

SEQ ID NO: 2227782 - RNA, 19 nt, Homo sapiens
  misc_RNA (1)...(19): siRNA sense strand
cugagcaaacgcagagaga

SEQ ID NO: 2227783 - RNA, 19 nt, Homo sapiens
  misc_RNA (1)...(19): siRNA sense strand
aaggagugccagucagaau

SEQ ID NO: 2227784 - RNA, 19 nt, Homo sapiens
  misc_RNA (1)...(19): siRNA sense strand
ugggcaucuucguggacua

SEQ ID NO: 2227785 - RNA, 19 nt, Homo sapiens
  misc_RNA (1)...(19): siRNA sense strand
agccagauccagagagcca

SEQ ID NO: 2227786 - RNA, 19 nt, Homo sapiens
  misc_RNA (1)...(19): siRNA sense strand
caucugaagaagcugagaa

SEQ ID NO: 2227787 - RNA, 19 nt, Homo sapiens
  misc_RNA (1)...(19): siRNA sense strand
agguggagguuggagacaa

SEQ ID NO: 2227788 - RNA, 19 nt, Homo sapiens
  misc_RNA (1)...(19): siRNA sense strand
gagaauggcuacugggugg

SEQ ID NO: 2227789 - RNA, 19 nt, Homo sapiens
  misc_RNA (1)...(19): siRNA sense strand
cagaaggagugcaggcccu

SEQ ID NO: 2227790 - RNA, 19 nt, Homo sapiens
  misc_RNA (1)...(19): siRNA sense strand
cuggaacacaagaagaaaa

SEQ ID NO: 2227791 - RNA, 19 nt, Homo sapiens
  misc_RNA (1)...(19): siRNA sense strand
gugagaagaugaagggcau

SEQ ID NO: 2227792 - RNA, 19 nt, Homo sapiens
  misc_RNA (1)...(19): siRNA sense strand
gcaaaugggaggagggcag

SEQ ID NO: 2227793 - RNA, 19 nt, Homo sapiens
  misc_RNA (1)...(19): siRNA sense strand
gugcagaugaagaagcaga

SEQ ID NO: 2227794 - RNA, 19 nt, Homo sapiens
  misc_RNA (1)...(19): siRNA sense strand
gcaagauggagguggcguu

SEQ ID NO: 2227795 - RNA, 19 nt, Homo sapiens
  misc_RNA (1)...(19): siRNA sense strand
agaugaagaagcagaaagu

SEQ ID NO: 2227796 - RNA, 19 nt, Homo sapiens
  misc_RNA (1)...(19): siRNA sense strand
augaagaagcagaaagugu

SEQ ID NO: 2227797 - RNA, 19 nt, Homo sapiens
  misc_RNA (1)...(19): siRNA sense strand
uggcagaucuagaggagcu

SEQ ID NO: 2227798 - RNA, 19 nt, Homo sapiens
  misc_RNA (1)...(19): siRNA sense strand
gaggagaucuacaaggagu

SEQ ID NO: 2227799 - RNA, 19 nt, Homo sapiens
  misc_RNA (1)...(19): siRNA sense strand
acauguaccuggcuggcua

SEQ ID NO: 2227800 - RNA, 19 nt, Homo sapiens
  misc_RNA (1)...(19): siRNA sense strand
ucgcaagugcagaugaaga

SEQ ID NO: 2227801 - RNA, 19 nt, Homo sapiens
  misc_RNA (1)...(19): siRNA sense strand
agaugaagggcaugaagga

SEQ ID NO: 2227802 - RNA, 19 nt, Homo sapiens
  misc_RNA (1)...(19): siRNA sense strand
agugagaagaugaagggca

SEQ ID NO: 2227803 - RNA, 19 nt, Homo sapiens
  misc_RNA (1)...(19): siRNA sense strand
aagaucaacucgagcgcca

SEQ ID NO: 2227804 - RNA, 19 nt, Homo sapiens
  misc_RNA (1)...(19): siRNA sense strand
ccuuagggaaccuggcaga

SEQ ID NO: 2227805 - RNA, 19 nt, Homo sapiens
  misc_RNA (1)...(19): siRNA sense strand
gugagaagaugaagggcau

SEQ ID NO: 2227806 - RNA, 19 nt, Homo sapiens
  misc_RNA (1)...(19): siRNA sense strand
gcaaaugggaggagggcag

SEQ ID NO: 2227807 - RNA, 19 nt, Homo sapiens
  misc_RNA (1)...(19): siRNA sense strand
gugcagaugaagaagcaga

SEQ ID NO: 2227808 - RNA, 19 nt, Homo sapiens
  misc_RNA (1)...(19): siRNA sense strand
gcaagauggagguggcguu

SEQ ID NO: 2227809 - RNA, 19 nt, Homo sapiens
  misc_RNA (1)...(19): siRNA sense strand
agaugaagaagcagaaagu

SEQ ID NO: 2227810 - RNA, 19 nt, Homo sapiens
  misc_RNA (1)...(19): siRNA sense strand
augaagaagcagaaagugu

SEQ ID NO: 2227811 - RNA, 19 nt, Homo sapiens
  misc_RNA (1)...(19): siRNA sense strand
uggcagaucuagaggagcu

SEQ ID NO: 2227812 - RNA, 19 nt, Homo sapiens
  misc_RNA (1)...(19): siRNA sense strand
gaggagaucuacaaggagu

SEQ ID NO: 2227813 - RNA, 19 nt, Homo sapiens
  misc_RNA (1)...(19): siRNA sense strand
acauguaccuggcuggcua

SEQ ID NO: 2227814 - RNA, 19 nt, Homo sapiens
  misc_RNA (1)...(19): siRNA sense strand
ucgcaagugcagaugaaga

SEQ ID NO: 2227815 - RNA, 19 nt, Homo sapiens
  misc_RNA (1)...(19): siRNA sense strand
agaugaagggcaugaagga

SEQ ID NO: 2227816 - RNA, 19 nt, Homo sapiens
  misc_RNA (1)...(19): siRNA sense strand
agugagaagaugaagggca

SEQ ID NO: 2227817 - RNA, 19 nt, Homo sapiens
  misc_RNA (1)...(19): siRNA sense strand
aagaucaacucgagcgcca

SEQ ID NO: 2227818 - RNA, 19 nt, Homo sapiens
  misc_RNA (1)...(19): siRNA sense strand
ccuuagggaaccuggcaga

SEQ ID NO: 2227819 - RNA, 19 nt, Homo sapiens
  misc_RNA (1)...(19): siRNA sense strand
gugagaagaugaagggcau

SEQ ID NO: 2227820 - RNA, 19 nt, Homo sapiens
  misc_RNA (1)...(19): siRNA sense strand
gcaaaugggaggagggcag

SEQ ID NO: 2227821 - RNA, 19 nt, Homo sapiens
  misc_RNA (1)...(19): siRNA sense strand
gugcagaugaagaagcaga

SEQ ID NO: 2227822 - RNA, 19 nt, Homo sapiens
  misc_RNA (1)...(19): siRNA sense strand
gcaagauggagguggcguu

SEQ ID NO: 2227823 - RNA, 19 nt, Homo sapiens
  misc_RNA (1)...(19): siRNA sense strand
agaugaagaagcagaaagu

SEQ ID NO: 2227824 - RNA, 19 nt, Homo sapiens
  misc_RNA (1)...(19): siRNA sense strand
augaagaagcagaaagugu

SEQ ID NO: 2227825 - RNA, 19 nt, Homo sapiens
  misc_RNA (1)...(19): siRNA sense strand
uggcagaucuagaggagcu

SEQ ID NO: 2227826 - RNA, 19 nt, Homo sapiens
  misc_RNA (1)...(19): siRNA sense strand
gaggagaucuacaaggagu

SEQ ID NO: 2227827 - RNA, 19 nt, Homo sapiens
  misc_RNA (1)...(19): siRNA sense strand
acauguaccuggcuggcua

SEQ ID NO: 2227828 - RNA, 19 nt, Homo sapiens
  misc_RNA (1)...(19): siRNA sense strand
ucgcaagugcagaugaaga

SEQ ID NO: 2227829 - RNA, 19 nt, Homo sapiens
  misc_RNA (1)...(19): siRNA sense strand
agaugaagggcaugaagga

SEQ ID NO: 2227830 - RNA, 19 nt, Homo sapiens
  misc_RNA (1)...(19): siRNA sense strand
agugagaagaugaagggca

SEQ ID NO: 2227831 - RNA, 19 nt, Homo sapiens
  misc_RNA (1)...(19): siRNA sense strand
aagaucaacucgagcgcca

SEQ ID NO: 2227832 - RNA, 19 nt, Homo sapiens
  misc_RNA (1)...(19): siRNA sense strand
ccuuagggaaccuggcaga

SEQ ID NO: 2227833 - RNA, 19 nt, Homo sapiens
  misc_RNA (1)...(19): siRNA sense strand
gugagaagaugaagggcau

SEQ ID NO: 2227834 - RNA, 19 nt, Homo sapiens
  misc_RNA (1)...(19): siRNA sense strand
gcaaaugggaggagggcag

SEQ ID NO: 2227835 - RNA, 19 nt, Homo sapiens
  misc_RNA (1)...(19): siRNA sense strand
gugcagaugaagaagcaga

SEQ ID NO: 2227836 - RNA, 19 nt, Homo sapiens
  misc_RNA (1)...(19): siRNA sense strand
gcaagauggagguggcguu

SEQ ID NO: 2227837 - RNA, 19 nt, Homo sapiens
  misc_RNA (1)...(19): siRNA sense strand
agaugaagaagcagaaagu

SEQ ID NO: 2227838 - RNA, 19 nt, Homo sapiens
  misc_RNA (1)...(19): siRNA sense strand
augaagaagcagaaagugu

SEQ ID NO: 2227839 - RNA, 19 nt, Homo sapiens
  misc_RNA (1)...(19): siRNA sense strand
uggcagaucuagaggagcu

SEQ ID NO: 2227840 - RNA, 19 nt, Homo sapiens
  misc_RNA (1)...(19): siRNA sense strand
gaggagaucuacaaggagu

SEQ ID NO: 2227841 - RNA, 19 nt, Homo sapiens
  misc_RNA (1)...(19): siRNA sense strand
acauguaccuggcuggcua

SEQ ID NO: 2227842 - RNA, 19 nt, Homo sapiens
  misc_RNA (1)...(19): siRNA sense strand
ucgcaagugcagaugaaga

SEQ ID NO: 2227843 - RNA, 19 nt, Homo sapiens
  misc_RNA (1)...(19): siRNA sense strand
agaugaagggcaugaagga

SEQ ID NO: 2227844 - RNA, 19 nt, Homo sapiens
  misc_RNA (1)...(19): siRNA sense strand
agugagaagaugaagggca

SEQ ID NO: 2227845 - RNA, 19 nt, Homo sapiens
  misc_RNA (1)...(19): siRNA sense strand
aagaucaacucgagcgcca

SEQ ID NO: 2227846 - RNA, 19 nt, Homo sapiens
  misc_RNA (1)...(19): siRNA sense strand
ccuuagggaaccuggcaga

SEQ ID NO: 2227847 - RNA, 19 nt, Homo sapiens
  misc_RNA (1)...(19): siRNA sense strand
gugagaagaugaagggcau

SEQ ID NO: 2227848 - RNA, 19 nt, Homo sapiens
  misc_RNA (1)...(19): siRNA sense strand
gcaaaugggaggagggcag

SEQ ID NO: 2227849 - RNA, 19 nt, Homo sapiens
  misc_RNA (1)...(19): siRNA sense strand
gugcagaugaagaagcaga

SEQ ID NO: 2227850 - RNA, 19 nt, Homo sapiens
  misc_RNA (1)...(19): siRNA sense strand
gcaagauggagguggcguu

SEQ ID NO: 2227851 - RNA, 19 nt, Homo sapiens
  misc_RNA (1)...(19): siRNA sense strand
agaugaagaagcagaaagu

SEQ ID NO: 2227852 - RNA, 19 nt, Homo sapiens
  misc_RNA (1)...(19): siRNA sense strand
augaagaagcagaaagugu

SEQ ID NO: 2227853 - RNA, 19 nt, Homo sapiens
  misc_RNA (1)...(19): siRNA sense strand
uggcagaucuagaggagcu

SEQ ID NO: 2227854 - RNA, 19 nt, Homo sapiens
  misc_RNA (1)...(19): siRNA sense strand
gaggagaucuacaaggagu

SEQ ID NO: 2227855 - RNA, 19 nt, Homo sapiens
  misc_RNA (1)...(19): siRNA sense strand
acauguaccuggcuggcua

SEQ ID NO: 2227856 - RNA, 19 nt, Homo sapiens
  misc_RNA (1)...(19): siRNA sense strand
ucgcaagugcagaugaaga

SEQ ID NO: 2227857 - RNA, 19 nt, Homo sapiens
  misc_RNA (1)...(19): siRNA sense strand
agaugaagggcaugaagga

SEQ ID NO: 2227858 - RNA, 19 nt, Homo sapiens
  misc_RNA (1)...(19): siRNA sense strand
agugagaagaugaagggca

SEQ ID NO: 2227859 - RNA, 19 nt, Homo sapiens
  misc_RNA (1)...(19): siRNA sense strand
aagaucaacucgagcgcca

SEQ ID NO: 2227860 - RNA, 19 nt, Homo sapiens
  misc_RNA (1)...(19): siRNA sense strand
ccuuagggaaccuggcaga

SEQ ID NO: 2227861 - RNA, 19 nt, Homo sapiens
  misc_RNA (1)...(19): siRNA sense strand
gugagaagaugaagggcau

SEQ ID NO: 2227862 - RNA, 19 nt, Homo sapiens
  misc_RNA (1)...(19): siRNA sense strand
gcaaaugggaggagggcag

SEQ ID NO: 2227863 - RNA, 19 nt, Homo sapiens
  misc_RNA (1)...(19): siRNA sense strand
gugcagaugaagaagcaga

SEQ ID NO: 2227864 - RNA, 19 nt, Homo sapiens
  misc_RNA (1)...(19): siRNA sense strand
gcaagauggagguggcguu

SEQ ID NO: 2227865 - RNA, 19 nt, Homo sapiens
  misc_RNA (1)...(19): siRNA sense strand
agaugaagaagcagaaagu

SEQ ID NO: 2227866 - RNA, 19 nt, Homo sapiens
  misc_RNA (1)...(19): siRNA sense strand
augaagaagcagaaagugu

SEQ ID NO: 2227867 - RNA, 19 nt, Homo sapiens
  misc_RNA (1)...(19): siRNA sense strand
uggcagaucuagaggagcu

SEQ ID NO: 2227868 - RNA, 19 nt, Homo sapiens
  misc_RNA (1)...(19): siRNA sense strand
gaggagaucuacaaggagu

SEQ ID NO: 2227869 - RNA, 19 nt, Homo sapiens
  misc_RNA (1)...(19): siRNA sense strand
acauguaccuggcuggcua

SEQ ID NO: 2227870 - RNA, 19 nt, Homo sapiens
  misc_RNA (1)...(19): siRNA sense strand
ucgcaagugcagaugaaga

SEQ ID NO: 2227871 - RNA, 19 nt, Homo sapiens
  misc_RNA (1)...(19): siRNA sense strand
agaugaagggcaugaagga

SEQ ID NO: 2227872 - RNA, 19 nt, Homo sapiens
  misc_RNA (1)...(19): siRNA sense strand
agugagaagaugaagggca

SEQ ID NO: 2227873 - RNA, 19 nt, Homo sapiens
  misc_RNA (1)...(19): siRNA sense strand
aagaucaacucgagcgcca

SEQ ID NO: 2227874 - RNA, 19 nt, Homo sapiens
  misc_RNA (1)...(19): siRNA sense strand
ccuuagggaaccuggcaga

SEQ ID NO: 2227875 - RNA, 19 nt, Homo sapiens
  misc_RNA (1)...(19): siRNA sense strand
gugagaagaugaagggcau

SEQ ID NO: 2227876 - RNA, 19 nt, Homo sapiens
  misc_RNA (1)...(19): siRNA sense strand
gcaaaugggaggagggcag

SEQ ID NO: 2227877 - RNA, 19 nt, Homo sapiens
  misc_RNA (1)...(19): siRNA sense strand
gugcagaugaagaagcaga

SEQ ID NO: 2227878 - RNA, 19 nt, Homo sapiens
  misc_RNA (1)...(19): siRNA sense strand
gcaagauggagguggcguu

SEQ ID NO: 2227879 - RNA, 19 nt, Homo sapiens
  misc_RNA (1)...(19): siRNA sense strand
agaugaagaagcagaaagu

SEQ ID NO: 2227880 - RNA, 19 nt, Homo sapiens
  misc_RNA (1)...(19): siRNA sense strand
augaagaagcagaaagugu

SEQ ID NO: 2227881 - RNA, 19 nt, Homo sapiens
  misc_RNA (1)...(19): siRNA sense strand
uggcagaucuagaggagcu

SEQ ID NO: 2227882 - RNA, 19 nt, Homo sapiens
  misc_RNA (1)...(19): siRNA sense strand
gaggagaucuacaaggagu

SEQ ID NO: 2227883 - RNA, 19 nt, Homo sapiens
  misc_RNA (1)...(19): siRNA sense strand
acauguaccuggcuggcua

SEQ ID NO: 2227884 - RNA, 19 nt, Homo sapiens
  misc_RNA (1)...(19): siRNA sense strand
ucgcaagugcagaugaaga

SEQ ID NO: 2227885 - RNA, 19 nt, Homo sapiens
  misc_RNA (1)...(19): siRNA sense strand
agaugaagggcaugaagga

SEQ ID NO: 2227886 - RNA, 19 nt, Homo sapiens
  misc_RNA (1)...(19): siRNA sense strand
agugagaagaugaagggca

SEQ ID NO: 2227887 - RNA, 19 nt, Homo sapiens
  misc_RNA (1)...(19): siRNA sense strand
aagaucaacucgagcgcca

SEQ ID NO: 2227888 - RNA, 19 nt, Homo sapiens
  misc_RNA (1)...(19): siRNA sense strand
ccuuagggaaccuggcaga

SEQ ID NO: 2227889 - RNA, 19 nt, Homo sapiens
  misc_RNA (1)...(19): siRNA sense strand
gugagaaggcuaaaggaaa

SEQ ID NO: 2227890 - RNA, 19 nt, Homo sapiens
  misc_RNA (1)...(19): siRNA sense strand
aaauaagagcugugagaau

SEQ ID NO: 2227891 - RNA, 19 nt, Homo sapiens
  misc_RNA (1)...(19): siRNA sense strand
uagcaaaguccgagaugaa

SEQ ID NO: 2227892 - RNA, 19 nt, Homo sapiens
  misc_RNA (1)...(19): siRNA sense strand
agucauaggaagagggcau

SEQ ID NO: 2227893 - RNA, 19 nt, Homo sapiens
  misc_RNA (1)...(19): siRNA sense strand
gggaagaagaucacgaaga

SEQ ID NO: 2227894 - RNA, 19 nt, Homo sapiens
  misc_RNA (1)...(19): siRNA sense strand
agugagagcacgaugaaua

SEQ ID NO: 2227895 - RNA, 19 nt, Homo sapiens
  misc_RNA (1)...(19): siRNA sense strand
agaucugggcagugaauua

SEQ ID NO: 2227896 - RNA, 19 nt, Homo sapiens
  misc_RNA (1)...(19): siRNA sense strand
gggacaaggcugaccauau

SEQ ID NO: 2227897 - RNA, 19 nt, Homo sapiens
  misc_RNA (1)...(19): siRNA sense strand
uagccaaaggcaugaaaua

SEQ ID NO: 2227898 - RNA, 19 nt, Homo sapiens
  misc_RNA (1)...(19): siRNA sense strand
ccacaaagaaggaaguguu

SEQ ID NO: 2227899 - RNA, 19 nt, Homo sapiens
  misc_RNA (1)...(19): siRNA sense strand
ccgagaugaaugugaauau

SEQ ID NO: 2227900 - RNA, 19 nt, Homo sapiens
  misc_RNA (1)...(19): siRNA sense strand
acucauaauccaacuguaa

SEQ ID NO: 2227901 - RNA, 19 nt, Homo sapiens
  misc_RNA (1)...(19): siRNA sense strand
cagaagugauuguggagca

SEQ ID NO: 2227902 - RNA, 19 nt, Homo sapiens
  misc_RNA (1)...(19): siRNA sense strand
agcuaaauauagaguggaa

SEQ ID NO: 2227903 - RNA, 19 nt, Homo sapiens
  misc_RNA (1)...(19): siRNA sense strand
ggcuaaaggaaacgaaaga

SEQ ID NO: 2227904 - RNA, 19 nt, Homo sapiens
  misc_RNA (1)...(19): siRNA sense strand
uacuggaaauuaagggaaa

SEQ ID NO: 2227905 - RNA, 19 nt, Homo sapiens
  misc_RNA (1)...(19): siRNA sense strand
uuaccuaaacagugggaau

SEQ ID NO: 2227906 - RNA, 19 nt, Homo sapiens
  misc_RNA (1)...(19): siRNA sense strand
gcaugaagcaggaaggaac

SEQ ID NO: 2227907 - RNA, 19 nt, Homo sapiens
  misc_RNA (1)...(19): siRNA sense strand
gcagugaauuaguucgcua

SEQ ID NO: 2227908 - RNA, 19 nt, Homo sapiens
  misc_RNA (1)...(19): siRNA sense strand
ugagaaggcuaaaggaaac

SEQ ID NO: 2227909 - RNA, 19 nt, Homo sapiens
  misc_RNA (1)...(19): siRNA sense strand
cuucaaccguccuuggaaa

SEQ ID NO: 2227910 - RNA, 19 nt, Homo sapiens
  misc_RNA (1)...(19): siRNA sense strand
ccagugaaguggauggcuu

SEQ ID NO: 2227911 - RNA, 19 nt, Homo sapiens
  misc_RNA (1)...(19): siRNA sense strand
agugagaaggcuaaaggaa

SEQ ID NO: 2227912 - RNA, 19 nt, Homo sapiens
  misc_RNA (1)...(19): siRNA sense strand
cuagaguucuccuuggaaa

SEQ ID NO: 2227913 - RNA, 19 nt, Homo sapiens
  misc_RNA (1)...(19): siRNA sense strand
guuauuacuacuuggguuu

SEQ ID NO: 2227914 - RNA, 19 nt, Homo sapiens
  misc_RNA (1)...(19): siRNA sense strand
acauggagaucuucgaaau

SEQ ID NO: 2227915 - RNA, 19 nt, Homo sapiens
  misc_RNA (1)...(19): siRNA sense strand
gaggaaugccugagcggga

SEQ ID NO: 2227916 - RNA, 19 nt, Homo sapiens
  misc_RNA (1)...(19): siRNA sense strand
gggaaaugauauugacccu

SEQ ID NO: 2227917 - RNA, 19 nt, Homo sapiens
  misc_RNA (1)...(19): siRNA sense strand
aguaauaguucaaccagau

SEQ ID NO: 2227918 - RNA, 19 nt, Homo sapiens
  misc_RNA (1)...(19): siRNA sense strand
ggaaauuaagggaaaugau

SEQ ID NO: 2227919 - RNA, 19 nt, Homo sapiens
  misc_RNA (1)...(19): siRNA sense strand
ugaagcaguuaaaggugaa

SEQ ID NO: 2227920 - RNA, 19 nt, Homo sapiens
  misc_RNA (1)...(19): siRNA sense strand
ugaauaucgaacagaguuu

SEQ ID NO: 2227921 - RNA, 19 nt, Homo sapiens
  misc_RNA (1)...(19): siRNA sense strand
uguaagugcccgaagugua

SEQ ID NO: 2227922 - RNA, 19 nt, Homo sapiens
  misc_RNA (1)...(19): siRNA sense strand
acguaaacaccuuugauau

SEQ ID NO: 2227923 - RNA, 19 nt, Homo sapiens
  misc_RNA (1)...(19): siRNA sense strand
acauacagucggagguuca

SEQ ID NO: 2227924 - RNA, 19 nt, Homo sapiens
  misc_RNA (1)...(19): siRNA sense strand
gggaaacucuagaugcuca

SEQ ID NO: 2227925 - RNA, 19 nt, Homo sapiens
  misc_RNA (1)...(19): siRNA sense strand
acacaagaauaaucagguu

SEQ ID NO: 2227926 - RNA, 19 nt, Homo sapiens
  misc_RNA (1)...(19): siRNA sense strand
cugugagaauauacacuua

SEQ ID NO: 2227927 - RNA, 19 nt, Homo sapiens
  misc_RNA (1)...(19): siRNA sense strand
aauugaacagcgagcuaaa

SEQ ID NO: 2227928 - RNA, 19 nt, Homo sapiens
  misc_RNA (1)...(19): siRNA sense strand
gcauuuugguuguguauau

SEQ ID NO: 2227929 - RNA, 19 nt, Homo sapiens
  misc_RNA (1)...(19): siRNA sense strand
gagacauguaugauaaaga

SEQ ID NO: 2227930 - RNA, 19 nt, Homo sapiens
  misc_RNA (1)...(19): siRNA sense strand
gcuacuuaugugaacguaa

SEQ ID NO: 2227931 - RNA, 19 nt, Homo sapiens
  misc_RNA (1)...(19): siRNA sense strand
aucaggagguguuuggaaa

SEQ ID NO: 2227932 - RNA, 19 nt, Homo sapiens
  misc_RNA (1)...(19): siRNA sense strand
ggagcaauggggaguguaa

SEQ ID NO: 2227933 - RNA, 19 nt, Homo sapiens
  misc_RNA (1)...(19): siRNA sense strand
caguuagugucccgagaau

SEQ ID NO: 2227934 - RNA, 19 nt, Homo sapiens
  misc_RNA (1)...(19): siRNA sense strand
cugaagcaguuaaagguga

SEQ ID NO: 2227935 - RNA, 19 nt, Homo sapiens
  misc_RNA (1)...(19): siRNA sense strand
gugaagaucccauugucua

SEQ ID NO: 2227936 - RNA, 19 nt, Homo sapiens
  misc_RNA (1)...(19): siRNA sense strand
aagauaacgcugaugauga

SEQ ID NO: 2227937 - RNA, 19 nt, Homo sapiens
  misc_RNA (1)...(19): siRNA sense strand
agaagguugcugaguacaa

SEQ ID NO: 2227938 - RNA, 19 nt, Homo sapiens
  misc_RNA (1)...(19): siRNA sense strand
agugggaauucuagacaca

SEQ ID NO: 2227939 - RNA, 19 nt, Homo sapiens
  misc_RNA (1)...(19): siRNA sense strand
ccugcaaucuacaagguuu

SEQ ID NO: 2227940 - RNA, 19 nt, Homo sapiens
  misc_RNA (1)...(19): siRNA sense strand
ccucagugcucuaaaucca

SEQ ID NO: 2227941 - RNA, 19 nt, Homo sapiens
  misc_RNA (1)...(19): siRNA sense strand
gccagagacauguaugaua

SEQ ID NO: 2227942 - RNA, 19 nt, Homo sapiens
  misc_RNA (1)...(19): siRNA sense strand
caauuuaucaggagguguu

SEQ ID NO: 2227943 - RNA, 19 nt, Homo sapiens
  misc_RNA (1)...(19): siRNA sense strand
caaacaugacagagcacaa

SEQ ID NO: 2227944 - RNA, 19 nt, Homo sapiens
  misc_RNA (1)...(19): siRNA sense strand
cuggagaagaagagauuga

SEQ ID NO: 2227945 - RNA, 19 nt, Homo sapiens
  misc_RNA (1)...(19): siRNA sense strand
auguggaagaccugggaaa

SEQ ID NO: 2227946 - RNA, 19 nt, Homo sapiens
  misc_RNA (1)...(19): siRNA sense strand
gugcagacucagaggacga

SEQ ID NO: 2227947 - RNA, 19 nt, Homo sapiens
  misc_RNA (1)...(19): siRNA sense strand
cagaugaagugaucgguga

SEQ ID NO: 2227948 - RNA, 19 nt, Homo sapiens
  misc_RNA (1)...(19): siRNA sense strand
gcaaagcuggucagggcaa

SEQ ID NO: 2227949 - RNA, 19 nt, Homo sapiens
  misc_RNA (1)...(19): siRNA sense strand
augcacauguacugggcaa

SEQ ID NO: 2227950 - RNA, 19 nt, Homo sapiens
  misc_RNA (1)...(19): siRNA sense strand
cccugaaggauguggaaga

SEQ ID NO: 2227951 - RNA, 19 nt, Homo sapiens
  misc_RNA (1)...(19): siRNA sense strand
cagaggagcuuccggcaga

SEQ ID NO: 2227952 - RNA, 19 nt, Homo sapiens
  misc_RNA (1)...(19): siRNA sense strand
ggcaagagcuauugggcug

SEQ ID NO: 2227953 - RNA, 19 nt, Homo sapiens
  misc_RNA (1)...(19): siRNA sense strand
cauucaguguccaggaaca

SEQ ID NO: 2227954 - RNA, 19 nt, Homo sapiens
  misc_RNA (1)...(19): siRNA sense strand
gggcgauggccaaaggcuu

SEQ ID NO: 2227955 - RNA, 19 nt, Homo sapiens
  misc_RNA (1)...(19): siRNA sense strand
gagcaaacaugacagagca

SEQ ID NO: 2227956 - RNA, 19 nt, Homo sapiens
  misc_RNA (1)...(19): siRNA sense strand
uguucgggaccuaaagaaa

SEQ ID NO: 2227957 - RNA, 19 nt, Homo sapiens
  misc_RNA (1)...(19): siRNA sense strand
acaacuggcuggagggcgu

SEQ ID NO: 2227958 - RNA, 19 nt, Homo sapiens
  misc_RNA (1)...(19): siRNA sense strand
aggcagcagaggagaaguu

SEQ ID NO: 2227959 - RNA, 19 nt, Homo sapiens
  misc_RNA (1)...(19): siRNA sense strand
cuggaugcgcugagugaga

SEQ ID NO: 2227960 - RNA, 19 nt, Homo sapiens
  misc_RNA (1)...(19): siRNA sense strand
agcagaaguugggcagaaa

SEQ ID NO: 2227961 - RNA, 19 nt, Homo sapiens
  misc_RNA (1)...(19): siRNA sense strand
agucacagccacagcccua

SEQ ID NO: 2227962 - RNA, 19 nt, Homo sapiens
  misc_RNA (1)...(19): siRNA sense strand
acauggaaggugaugaaga

SEQ ID NO: 2227963 - RNA, 19 nt, Homo sapiens
  misc_RNA (1)...(19): siRNA sense strand
ccagggaggcuuaugccaa

SEQ ID NO: 2227964 - RNA, 19 nt, Homo sapiens
  misc_RNA (1)...(19): siRNA sense strand
aagugaucggugagaguau

SEQ ID NO: 2227965 - RNA, 19 nt, Homo sapiens
  misc_RNA (1)...(19): siRNA sense strand
ugggaaagcuugugcagac

SEQ ID NO: 2227966 - RNA, 19 nt, Homo sapiens
  misc_RNA (1)...(19): siRNA sense strand
agauggaccuggcuggaga

SEQ ID NO: 2227967 - RNA, 19 nt, Homo sapiens
  misc_RNA (1)...(19): siRNA sense strand
ugaagugaucggugagagu

SEQ ID NO: 2227968 - RNA, 19 nt, Homo sapiens
  misc_RNA (1)...(19): siRNA sense strand
cggcagaccugaagcacug

SEQ ID NO: 2227969 - RNA, 19 nt, Homo sapiens
  misc_RNA (1)...(19): siRNA sense strand
acgugggagccgagagcuu

SEQ ID NO: 2227970 - RNA, 19 nt, Homo sapiens
  misc_RNA (1)...(19): siRNA sense strand
cugccucgguggacaggaa

SEQ ID NO: 2227971 - RNA, 19 nt, Homo sapiens
  misc_RNA (1)...(19): siRNA sense strand
acauaggaccagaugaagu

SEQ ID NO: 2227972 - RNA, 19 nt, Homo sapiens
  misc_RNA (1)...(19): siRNA sense strand
ggaaauaagacaugggaca

SEQ ID NO: 2227973 - RNA, 19 nt, Homo sapiens
  misc_RNA (1)...(19): siRNA sense strand
aggcagaaaugcagggcaa

SEQ ID NO: 2227974 - RNA, 19 nt, Homo sapiens
  misc_RNA (1)...(19): siRNA sense strand
cuucagagucauuggcaga

SEQ ID NO: 2227975 - RNA, 19 nt, Homo sapiens
  misc_RNA (1)...(19): siRNA sense strand
auaucaaggaccagaaaga

SEQ ID NO: 2227976 - RNA, 19 nt, Homo sapiens
  misc_RNA (1)...(19): siRNA sense strand
gugagauccaugaagacaa

SEQ ID NO: 2227977 - RNA, 19 nt, Homo sapiens
  misc_RNA (1)...(19): siRNA sense strand
aggaauuucuugaaggaag

SEQ ID NO: 2227978 - RNA, 19 nt, Homo sapiens
  misc_RNA (1)...(19): siRNA sense strand
cauggaacacagcgggaau

SEQ ID NO: 2227979 - RNA, 19 nt, Homo sapiens
  misc_RNA (1)...(19): siRNA sense strand
uguccugccugaugggaau

SEQ ID NO: 2227980 - RNA, 19 nt, Homo sapiens
  misc_RNA (1)...(19): siRNA sense strand
aagacaugggacagagaga

SEQ ID NO: 2227981 - RNA, 19 nt, Homo sapiens
  misc_RNA (1)...(19): siRNA sense strand
cguuguuguaagaagaaaa

SEQ ID NO: 2227982 - RNA, 19 nt, Homo sapiens
  misc_RNA (1)...(19): siRNA sense strand
acggaaaggaccucaggau

SEQ ID NO: 2227983 - RNA, 19 nt, Homo sapiens
  misc_RNA (1)...(19): siRNA sense strand
gaagaugccaugaagacca

SEQ ID NO: 2227984 - RNA, 19 nt, Homo sapiens
  misc_RNA (1)...(19): siRNA sense strand
ggccaugaacgucaggaau

SEQ ID NO: 2227985 - RNA, 19 nt, Homo sapiens
  misc_RNA (1)...(19): siRNA sense strand
gggaauggaaccuaccaga

SEQ ID NO: 2227986 - RNA, 19 nt, Homo sapiens
  misc_RNA (1)...(19): siRNA sense strand
ggucauaaguggaagcaca

SEQ ID NO: 2227987 - RNA, 19 nt, Homo sapiens
  misc_RNA (1)...(19): siRNA sense strand
agcaaaacuuagagaguaa

SEQ ID NO: 2227988 - RNA, 19 nt, Homo sapiens
  misc_RNA (1)...(19): siRNA sense strand
agacacaauagcaaggaaa

SEQ ID NO: 2227989 - RNA, 19 nt, Homo sapiens
  misc_RNA (1)...(19): siRNA sense strand
cauuuaaacuggaucccaa

SEQ ID NO: 2227990 - RNA, 19 nt, Homo sapiens
  misc_RNA (1)...(19): siRNA sense strand
acacagaacuggagacccu

SEQ ID NO: 2227991 - RNA, 19 nt, Homo sapiens
  misc_RNA (1)...(19): siRNA sense strand
gcuaagaauaucaccgaga

SEQ ID NO: 2227992 - RNA, 19 nt, Homo sapiens
  misc_RNA (1)...(19): siRNA sense strand
gggaaguugaagacaaaca

SEQ ID NO: 2227993 - RNA, 19 nt, Homo sapiens
  misc_RNA (1)...(19): siRNA sense strand
ccaagaucaaagaagggaa

SEQ ID NO: 2227994 - RNA, 19 nt, Homo sapiens
  misc_RNA (1)...(19): siRNA sense strand
cuauggaguagcuggaaau

SEQ ID NO: 2227995 - RNA, 19 nt, Homo sapiens
  misc_RNA (1)...(19): siRNA sense strand
ucaaagaagggaaggugau

SEQ ID NO: 2227996 - RNA, 19 nt, Homo sapiens
  misc_RNA (1)...(19): siRNA sense strand
ggugaugaggcuucgcaaa

SEQ ID NO: 2227997 - RNA, 19 nt, Homo sapiens
  misc_RNA (1)...(19): siRNA sense strand
cuacagaacaucaucgaca

SEQ ID NO: 2227998 - RNA, 19 nt, Homo sapiens
  misc_RNA (1)...(19): siRNA sense strand
ucagcaaagacgacagauu

SEQ ID NO: 2227999 - RNA, 19 nt, Homo sapiens
  misc_RNA (1)...(19): siRNA sense strand
uagacgggcucaagcgcaa

SEQ ID NO: 2228000 - RNA, 19 nt, Homo sapiens
  misc_RNA (1)...(19): siRNA sense strand
cagcuuugagugagcgcua

SEQ ID NO: 2228001 - RNA, 19 nt, Homo sapiens
  misc_RNA (1)...(19): siRNA sense strand
cauccaaaccugucaacau

SEQ ID NO: 2228002 - RNA, 19 nt, Homo sapiens
  misc_RNA (1)...(19): siRNA sense strand
agucaaugcaucacgucaa

SEQ ID NO: 2228003 - RNA, 19 nt, Homo sapiens
  misc_RNA (1)...(19): siRNA sense strand
ggagaaugaucaugcgcgu

SEQ ID NO: 2228004 - RNA, 19 nt, Homo sapiens
  misc_RNA (1)...(19): siRNA sense strand
agaauaucaccgagagagu

SEQ ID NO: 2228005 - RNA, 19 nt, Homo sapiens
  misc_RNA (1)...(19): siRNA sense strand
ugcuagaaugucuggauua

SEQ ID NO: 2228006 - RNA, 19 nt, Homo sapiens
  misc_RNA (1)...(19): siRNA sense strand
aacaagugucugacgauua

SEQ ID NO: 2228007 - RNA, 19 nt, Homo sapiens
  misc_RNA (1)...(19): siRNA sense strand
ccaaauugacagaggagug

SEQ ID NO: 2228008 - RNA, 19 nt, Homo sapiens
  misc_RNA (1)...(19): siRNA sense strand
aguacaucuucauggucaa

SEQ ID NO: 2228009 - RNA, 19 nt, Homo sapiens
  misc_RNA (1)...(19): siRNA sense strand
gaggaugagaaggugaaua

SEQ ID NO: 2228010 - RNA, 19 nt, Homo sapiens
  misc_RNA (1)...(19): siRNA sense strand
acaucaagcagaaccacua

SEQ ID NO: 2228011 - RNA, 19 nt, Homo sapiens
  misc_RNA (1)...(19): siRNA sense strand
ccgagaagguccucugcca

SEQ ID NO: 2228012 - RNA, 19 nt, Homo sapiens
  misc_RNA (1)...(19): siRNA sense strand
gagucaucauccaagaaga

SEQ ID NO: 2228013 - RNA, 19 nt, Homo sapiens
  misc_RNA (1)...(19): siRNA sense strand
gacacaauagcaaggaaau

SEQ ID NO: 2228014 - RNA, 19 nt, Homo sapiens
  misc_RNA (1)...(19): siRNA sense strand
cauugagaucauucagcaa

SEQ ID NO: 2228015 - RNA, 19 nt, Homo sapiens
  misc_RNA (1)...(19): siRNA sense strand
agcaaagacgacagauuau

SEQ ID NO: 2228016 - RNA, 19 nt, Homo sapiens
  misc_RNA (1)...(19): siRNA sense strand
ggaugauaguacccaacau

SEQ ID NO: 2228017 - RNA, 19 nt, Homo sapiens
  misc_RNA (1)...(19): siRNA sense strand
agaacaucaucgacagguu

SEQ ID NO: 2228018 - RNA, 19 nt, Homo sapiens
  misc_RNA (1)...(19): siRNA sense strand
uaagaauaucaccgagaga

SEQ ID NO: 2228019 - RNA, 19 nt, Homo sapiens
  misc_RNA (1)...(19): siRNA sense strand
gagccugggaaguugaaga

SEQ ID NO: 2228020 - RNA, 19 nt, Homo sapiens
  misc_RNA (1)...(19): siRNA sense strand
uggugagacacaauagcaa

SEQ ID NO: 2228021 - RNA, 19 nt, Homo sapiens
  misc_RNA (1)...(19): siRNA sense strand
gcuaugacaaauugaagca

SEQ ID NO: 2228022 - RNA, 19 nt, Homo sapiens
  misc_RNA (1)...(19): siRNA sense strand
caccauauucaccggacaa

SEQ ID NO: 2228023 - RNA, 19 nt, Homo sapiens
  misc_RNA (1)...(19): siRNA sense strand
ggucauaaguggaagcaca

SEQ ID NO: 2228024 - RNA, 19 nt, Homo sapiens
  misc_RNA (1)...(19): siRNA sense strand
agcaaaacuuagagaguaa

SEQ ID NO: 2228025 - RNA, 19 nt, Homo sapiens
  misc_RNA (1)...(19): siRNA sense strand
agacacaauagcaaggaaa

SEQ ID NO: 2228026 - RNA, 19 nt, Homo sapiens
  misc_RNA (1)...(19): siRNA sense strand
cauuuaaacuggaucccaa

SEQ ID NO: 2228027 - RNA, 19 nt, Homo sapiens
  misc_RNA (1)...(19): siRNA sense strand
acacagaacuggagacccu

SEQ ID NO: 2228028 - RNA, 19 nt, Homo sapiens
  misc_RNA (1)...(19): siRNA sense strand
gcuaagaauaucaccgaga

SEQ ID NO: 2228029 - RNA, 19 nt, Homo sapiens
  misc_RNA (1)...(19): siRNA sense strand
gggaaguugaagacaaaca

SEQ ID NO: 2228030 - RNA, 19 nt, Homo sapiens
  misc_RNA (1)...(19): siRNA sense strand
ccaagaucaaagaagggaa

SEQ ID NO: 2228031 - RNA, 19 nt, Homo sapiens
  misc_RNA (1)...(19): siRNA sense strand
cuauggaguagcuggaaau

SEQ ID NO: 2228032 - RNA, 19 nt, Homo sapiens
  misc_RNA (1)...(19): siRNA sense strand
ucaaagaagggaaggugau

SEQ ID NO: 2228033 - RNA, 19 nt, Homo sapiens
  misc_RNA (1)...(19): siRNA sense strand
ggugaugaggcuucgcaaa

SEQ ID NO: 2228034 - RNA, 19 nt, Homo sapiens
  misc_RNA (1)...(19): siRNA sense strand
cuacagaacaucaucgaca

SEQ ID NO: 2228035 - RNA, 19 nt, Homo sapiens
  misc_RNA (1)...(19): siRNA sense strand
ucagcaaagacgacagauu

SEQ ID NO: 2228036 - RNA, 19 nt, Homo sapiens
  misc_RNA (1)...(19): siRNA sense strand
uagacgggcucaagcgcaa

SEQ ID NO: 2228037 - RNA, 19 nt, Homo sapiens
  misc_RNA (1)...(19): siRNA sense strand
cagcuuugagugagcgcua

SEQ ID NO: 2228038 - RNA, 19 nt, Homo sapiens
  misc_RNA (1)...(19): siRNA sense strand
cauccaaaccugucaacau

SEQ ID NO: 2228039 - RNA, 19 nt, Homo sapiens
  misc_RNA (1)...(19): siRNA sense strand
agucaaugcaucacgucaa

SEQ ID NO: 2228040 - RNA, 19 nt, Homo sapiens
  misc_RNA (1)...(19): siRNA sense strand
ggagaaugaucaugcgcgu

SEQ ID NO: 2228041 - RNA, 19 nt, Homo sapiens
  misc_RNA (1)...(19): siRNA sense strand
agaauaucaccgagagagu

SEQ ID NO: 2228042 - RNA, 19 nt, Homo sapiens
  misc_RNA (1)...(19): siRNA sense strand
ugcuagaaugucuggauua

SEQ ID NO: 2228043 - RNA, 19 nt, Homo sapiens
  misc_RNA (1)...(19): siRNA sense strand
aacaagugucugacgauua

SEQ ID NO: 2228044 - RNA, 19 nt, Homo sapiens
  misc_RNA (1)...(19): siRNA sense strand
ccaaauugacagaggagug

SEQ ID NO: 2228045 - RNA, 19 nt, Homo sapiens
  misc_RNA (1)...(19): siRNA sense strand
aguacaucuucauggucaa

SEQ ID NO: 2228046 - RNA, 19 nt, Homo sapiens
  misc_RNA (1)...(19): siRNA sense strand
gaggaugagaaggugaaua

SEQ ID NO: 2228047 - RNA, 19 nt, Homo sapiens
  misc_RNA (1)...(19): siRNA sense strand
acaucaagcagaaccacua

SEQ ID NO: 2228048 - RNA, 19 nt, Homo sapiens
  misc_RNA (1)...(19): siRNA sense strand
ccgagaagguccucugcca

SEQ ID NO: 2228049 - RNA, 19 nt, Homo sapiens
  misc_RNA (1)...(19): siRNA sense strand
gagucaucauccaagaaga

SEQ ID NO: 2228050 - RNA, 19 nt, Homo sapiens
  misc_RNA (1)...(19): siRNA sense strand
gacacaauagcaaggaaau

SEQ ID NO: 2228051 - RNA, 19 nt, Homo sapiens
  misc_RNA (1)...(19): siRNA sense strand
cauugagaucauucagcaa

SEQ ID NO: 2228052 - RNA, 19 nt, Homo sapiens
  misc_RNA (1)...(19): siRNA sense strand
agcaaagacgacagauuau

SEQ ID NO: 2228053 - RNA, 19 nt, Homo sapiens
  misc_RNA (1)...(19): siRNA sense strand
ggaugauaguacccaacau

SEQ ID NO: 2228054 - RNA, 19 nt, Homo sapiens
  misc_RNA (1)...(19): siRNA sense strand
agaacaucaucgacagguu

SEQ ID NO: 2228055 - RNA, 19 nt, Homo sapiens
  misc_RNA (1)...(19): siRNA sense strand
uaagaauaucaccgagaga

SEQ ID NO: 2228056 - RNA, 19 nt, Homo sapiens
  misc_RNA (1)...(19): siRNA sense strand
gagccugggaaguugaaga

SEQ ID NO: 2228057 - RNA, 19 nt, Homo sapiens
  misc_RNA (1)...(19): siRNA sense strand
uggugagacacaauagcaa

SEQ ID NO: 2228058 - RNA, 19 nt, Homo sapiens
  misc_RNA (1)...(19): siRNA sense strand
gcuaugacaaauugaagca

SEQ ID NO: 2228059 - RNA, 19 nt, Homo sapiens
  misc_RNA (1)...(19): siRNA sense strand
caccauauucaccggacaa

SEQ ID NO: 2228060 - RNA, 19 nt, Homo sapiens
  misc_RNA (1)...(19): siRNA sense strand
ggucauaaguggaagcaca

SEQ ID NO: 2228061 - RNA, 19 nt, Homo sapiens
  misc_RNA (1)...(19): siRNA sense strand
agcaaaacuuagagaguaa

SEQ ID NO: 2228062 - RNA, 19 nt, Homo sapiens
  misc_RNA (1)...(19): siRNA sense strand
cauuuaaacuggaucccaa

SEQ ID NO: 2228063 - RNA, 19 nt, Homo sapiens
  misc_RNA (1)...(19): siRNA sense strand
acacagaacuggagacccu

SEQ ID NO: 2228064 - RNA, 19 nt, Homo sapiens
  misc_RNA (1)...(19): siRNA sense strand
gcuaagaauaucaccgaga

SEQ ID NO: 2228065 - RNA, 19 nt, Homo sapiens
  misc_RNA (1)...(19): siRNA sense strand
gggaaguugaagacaaaca

SEQ ID NO: 2228066 - RNA, 19 nt, Homo sapiens
  misc_RNA (1)...(19): siRNA sense strand
ccaagaucaaagaagggaa

SEQ ID NO: 2228067 - RNA, 19 nt, Homo sapiens
  misc_RNA (1)...(19): siRNA sense strand
cuauggaguagcuggaaau

SEQ ID NO: 2228068 - RNA, 19 nt, Homo sapiens
  misc_RNA (1)...(19): siRNA sense strand
ucaaagaagggaaggugau

SEQ ID NO: 2228069 - RNA, 19 nt, Homo sapiens
  misc_RNA (1)...(19): siRNA sense strand
ggugaugaggcuucgcaaa

SEQ ID NO: 2228070 - RNA, 19 nt, Homo sapiens
  misc_RNA (1)...(19): siRNA sense strand
cuacagaacaucaucgaca

SEQ ID NO: 2228071 - RNA, 19 nt, Homo sapiens
  misc_RNA (1)...(19): siRNA sense strand
ucagcaaagacgacagauu

SEQ ID NO: 2228072 - RNA, 19 nt, Homo sapiens
  misc_RNA (1)...(19): siRNA sense strand
uagacgggcucaagcgcaa

SEQ ID NO: 2228073 - RNA, 19 nt, Homo sapiens
  misc_RNA (1)...(19): siRNA sense strand
cagcuuugagugagcgcua

SEQ ID NO: 2228074 - RNA, 19 nt, Homo sapiens
  misc_RNA (1)...(19): siRNA sense strand
cauccaaaccugucaacau

SEQ ID NO: 2228075 - RNA, 19 nt, Homo sapiens
  misc_RNA (1)...(19): siRNA sense strand
agucaaugcaucacgucaa

SEQ ID NO: 2228076 - RNA, 19 nt, Homo sapiens
  misc_RNA (1)...(19): siRNA sense strand
ggagaaugaucaugcgcgu

SEQ ID NO: 2228077 - RNA, 19 nt, Homo sapiens
  misc_RNA (1)...(19): siRNA sense strand
agaauaucaccgagagagu

SEQ ID NO: 2228078 - RNA, 19 nt, Homo sapiens
  misc_RNA (1)...(19): siRNA sense strand
ugcuagaaugucuggauua

SEQ ID NO: 2228079 - RNA, 19 nt, Homo sapiens
  misc_RNA (1)...(19): siRNA sense strand
ccaaauugacagaggagug

SEQ ID NO: 2228080 - RNA, 19 nt, Homo sapiens
  misc_RNA (1)...(19): siRNA sense strand
aguacaucuucauggucaa

SEQ ID NO: 2228081 - RNA, 19 nt, Homo sapiens
  misc_RNA (1)...(19): siRNA sense strand
gaggaugagaaggugaaua

SEQ ID NO: 2228082 - RNA, 19 nt, Homo sapiens
  misc_RNA (1)...(19): siRNA sense strand
acaucaagcagaaccacua

SEQ ID NO: 2228083 - RNA, 19 nt, Homo sapiens
  misc_RNA (1)...(19): siRNA sense strand
ccgagaagguccucugcca

SEQ ID NO: 2228084 - RNA, 19 nt, Homo sapiens
  misc_RNA (1)...(19): siRNA sense strand
gagucaucauccaagaaga

SEQ ID NO: 2228085 - RNA, 19 nt, Homo sapiens
  misc_RNA (1)...(19): siRNA sense strand
cauugagaucauucagcaa

SEQ ID NO: 2228086 - RNA, 19 nt, Homo sapiens
  misc_RNA (1)...(19): siRNA sense strand
agcaaagacgacagauuau

SEQ ID NO: 2228087 - RNA, 19 nt, Homo sapiens
  misc_RNA (1)...(19): siRNA sense strand
ggaugauaguacccaacau

SEQ ID NO: 2228088 - RNA, 19 nt, Homo sapiens
  misc_RNA (1)...(19): siRNA sense strand
agaacaucaucgacagguu

SEQ ID NO: 2228089 - RNA, 19 nt, Homo sapiens
  misc_RNA (1)...(19): siRNA sense strand
uaagaauaucaccgagaga

SEQ ID NO: 2228090 - RNA, 19 nt, Homo sapiens
  misc_RNA (1)...(19): siRNA sense strand
gagccugggaaguugaaga

SEQ ID NO: 2228091 - RNA, 19 nt, Homo sapiens
  misc_RNA (1)...(19): siRNA sense strand
gcuaugacaaauugaagca

SEQ ID NO: 2228092 - RNA, 19 nt, Homo sapiens
  misc_RNA (1)...(19): siRNA sense strand
caccauauucaccggacaa

SEQ ID NO: 2228093 - RNA, 19 nt, Homo sapiens
  misc_RNA (1)...(19): siRNA sense strand
aagugaagaauaugggaaa

SEQ ID NO: 2228094 - RNA, 19 nt, Homo sapiens
  misc_RNA (1)...(19): siRNA sense strand
agaaauuggaugugaggau

SEQ ID NO: 2228095 - RNA, 19 nt, Homo sapiens
  misc_RNA (1)...(19): siRNA sense strand
cgaaaacagcugauggaaa

SEQ ID NO: 2228096 - RNA, 19 nt, Homo sapiens
  misc_RNA (1)...(19): siRNA sense strand
ccauugucacagaggauaa

SEQ ID NO: 2228097 - RNA, 19 nt, Homo sapiens
  misc_RNA (1)...(19): siRNA sense strand
agucgagaacugauagaaa

SEQ ID NO: 2228098 - RNA, 19 nt, Homo sapiens
  misc_RNA (1)...(19): siRNA sense strand
caaguuacucagauggaaa

SEQ ID NO: 2228099 - RNA, 19 nt, Homo sapiens
  misc_RNA (1)...(19): siRNA sense strand
cagaaagagacaucgggaa

SEQ ID NO: 2228100 - RNA, 19 nt, Homo sapiens
  misc_RNA (1)...(19): siRNA sense strand
caccaagcuuagugaagaa

SEQ ID NO: 2228101 - RNA, 19 nt, Homo sapiens
  misc_RNA (1)...(19): siRNA sense strand
acagaggauaagacagaua

SEQ ID NO: 2228102 - RNA, 19 nt, Homo sapiens
  misc_RNA (1)...(19): siRNA sense strand
ggaagaaauuaaugagcag

SEQ ID NO: 2228103 - RNA, 19 nt, Homo sapiens
  misc_RNA (1)...(19): siRNA sense strand
aaauuggaugugaggauaa

SEQ ID NO: 2228104 - RNA, 19 nt, Homo sapiens
  misc_RNA (1)...(19): siRNA sense strand
auguggaaaugguggaaga

SEQ ID NO: 2228105 - RNA, 19 nt, Homo sapiens
  misc_RNA (1)...(19): siRNA sense strand
cacaaguauucaagugauu

SEQ ID NO: 2228106 - RNA, 19 nt, Homo sapiens
  misc_RNA (1)...(19): siRNA sense strand
aggaaagaagaucuggaua

SEQ ID NO: 2228107 - RNA, 19 nt, Homo sapiens
  misc_RNA (1)...(19): siRNA sense strand
aggaagaaauuaaugagca

SEQ ID NO: 2228108 - RNA, 19 nt, Homo sapiens
  misc_RNA (1)...(19): siRNA sense strand
aaauuaaugagcagggaca

SEQ ID NO: 2228109 - RNA, 19 nt, Homo sapiens
  misc_RNA (1)...(19): siRNA sense strand
cuuagauaguccagagagu

SEQ ID NO: 2228110 - RNA, 19 nt, Homo sapiens
  misc_RNA (1)...(19): siRNA sense strand
cuggauauuguaugugaaa

SEQ ID NO: 2228111 - RNA, 19 nt, Homo sapiens
  misc_RNA (1)...(19): siRNA sense strand
ucgagaacugauagaaauu

SEQ ID NO: 2228112 - RNA, 19 nt, Homo sapiens
  misc_RNA (1)...(19): siRNA sense strand
uuuggaaauugaugaggaa

SEQ ID NO: 2228113 - RNA, 19 nt, Homo sapiens
  misc_RNA (1)...(19): siRNA sense strand
agaacuguuuagaugcaaa

SEQ ID NO: 2228114 - RNA, 19 nt, Homo sapiens
  misc_RNA (1)...(19): siRNA sense strand
acaaaggggacuucagaaa

SEQ ID NO: 2228115 - RNA, 19 nt, Homo sapiens
  misc_RNA (1)...(19): siRNA sense strand
caagugaagaauaugggaa

SEQ ID NO: 2228116 - RNA, 19 nt, Homo sapiens
  misc_RNA (1)...(19): siRNA sense strand
ugaauugggacgaagaaaa

SEQ ID NO: 2228117 - RNA, 19 nt, Homo sapiens
  misc_RNA (1)...(19): siRNA sense strand
gugauaaggucuaugccca

SEQ ID NO: 2228118 - RNA, 19 nt, Homo sapiens
  misc_RNA (1)...(19): siRNA sense strand
agaaagagacaucgggaag

SEQ ID NO: 2228119 - RNA, 19 nt, Homo sapiens
  misc_RNA (1)...(19): siRNA sense strand
agugauuguuaaagaggga

SEQ ID NO: 2228120 - RNA, 19 nt, Homo sapiens
  misc_RNA (1)...(19): siRNA sense strand
gauucagauccaagacaau

SEQ ID NO: 2228121 - RNA, 19 nt, Homo sapiens
  misc_RNA (1)...(19): siRNA sense strand
uggaaaugcuguuagucga

SEQ ID NO: 2228122 - RNA, 19 nt, Homo sapiens
  misc_RNA (1)...(19): siRNA sense strand
agccauagaaacaguguau

SEQ ID NO: 2228123 - RNA, 19 nt, Homo sapiens
  misc_RNA (1)...(19): siRNA sense strand
aaauugaugaggaagggaa

SEQ ID NO: 2228124 - RNA, 19 nt, Homo sapiens
  misc_RNA (1)...(19): siRNA sense strand
gguuaaauccacaacaagu

SEQ ID NO: 2228125 - RNA, 19 nt, Homo sapiens
  misc_RNA (1)...(19): siRNA sense strand
cuucgugggcugugugaau

SEQ ID NO: 2228126 - RNA, 19 nt, Homo sapiens
  misc_RNA (1)...(19): siRNA sense strand
agaagaaggcugagaugcu

SEQ ID NO: 2228127 - RNA, 19 nt, Homo sapiens
  misc_RNA (1)...(19): siRNA sense strand
ggaaguagugauaaggucu

SEQ ID NO: 2228128 - RNA, 19 nt, Homo sapiens
  misc_RNA (1)...(19): siRNA sense strand
ggccauugucacagaggau

SEQ ID NO: 2228129 - RNA, 19 nt, Homo sapiens
  misc_RNA (1)...(19): siRNA sense strand
acagauauuucuaguggca

SEQ ID NO: 2228130 - RNA, 19 nt, Homo sapiens
  misc_RNA (1)...(19): siRNA sense strand
cagaaaugucagagaagag

SEQ ID NO: 2228131 - RNA, 19 nt, Homo sapiens
  misc_RNA (1)...(19): siRNA sense strand
gggaagauucugaugugga

SEQ ID NO: 2228132 - RNA, 19 nt, Homo sapiens
  misc_RNA (1)...(19): siRNA sense strand
gggagauguugcauaacca

SEQ ID NO: 2228133 - RNA, 19 nt, Homo sapiens
  misc_RNA (1)...(19): siRNA sense strand
ccaaagaaggacuugcuga

SEQ ID NO: 2228134 - RNA, 19 nt, Homo sapiens
  misc_RNA (1)...(19): siRNA sense strand
guuacauauccaaugcaaa

SEQ ID NO: 2228135 - RNA, 19 nt, Homo sapiens
  misc_RNA (1)...(19): siRNA sense strand
agcagcacaucgagagcaa

SEQ ID NO: 2228136 - RNA, 19 nt, Homo sapiens
  misc_RNA (1)...(19): siRNA sense strand
ggagaugguuaaauccaca

SEQ ID NO: 2228137 - RNA, 19 nt, Homo sapiens
  misc_RNA (1)...(19): siRNA sense strand
gggccuuggcacagcauca

SEQ ID NO: 2228138 - RNA, 19 nt, Homo sapiens
  misc_RNA (1)...(19): siRNA sense strand
ggugaauugggacgaagaa

SEQ ID NO: 2228139 - RNA, 19 nt, Homo sapiens
  misc_RNA (1)...(19): siRNA sense strand
gugaauugggacgaagaaa

SEQ ID NO: 2228140 - RNA, 19 nt, Homo sapiens
  misc_RNA (1)...(19): siRNA sense strand
augguuaaauccacaacaa

SEQ ID NO: 2228141 - RNA, 19 nt, Homo sapiens
  misc_RNA (1)...(19): siRNA sense strand
guggcuggacagaggaaga

SEQ ID NO: 2228142 - RNA, 19 nt, Homo sapiens
  misc_RNA (1)...(19): siRNA sense strand
ggauaaaacccuagccuuc

SEQ ID NO: 2228143 - RNA, 19 nt, Homo sapiens
  misc_RNA (1)...(19): siRNA sense strand
ccacugaggugaauuggga

SEQ ID NO: 2228144 - RNA, 19 nt, Homo sapiens
  misc_RNA (1)...(19): siRNA sense strand
gcucauguuacuauuacaa

SEQ ID NO: 2228145 - RNA, 19 nt, Homo sapiens
  misc_RNA (1)...(19): siRNA sense strand
gugaagaauaugggaaaau

SEQ ID NO: 2228146 - RNA, 19 nt, Homo sapiens
  misc_RNA (1)...(19): siRNA sense strand
gcagguauucaguacacaa

SEQ ID NO: 2228147 - RNA, 19 nt, Homo sapiens
  misc_RNA (1)...(19): siRNA sense strand
acugauagaaauuggaugu

SEQ ID NO: 2228148 - RNA, 19 nt, Homo sapiens
  misc_RNA (1)...(19): siRNA sense strand
ccagaauguggauguuaau

SEQ ID NO: 2228149 - RNA, 19 nt, Homo sapiens
  misc_RNA (1)...(19): siRNA sense strand
uggcagggcuaggcagcaa

SEQ ID NO: 2228150 - RNA, 19 nt, Homo sapiens
  misc_RNA (1)...(19): siRNA sense strand
agacaauggcaccgggauc

SEQ ID NO: 2228151 - RNA, 19 nt, Homo sapiens
  misc_RNA (1)...(19): siRNA sense strand
agugaagaauaugggaaaa

SEQ ID NO: 2228152 - RNA, 19 nt, Homo sapiens
  misc_RNA (1)...(19): siRNA sense strand
ucucaggccagcagaguga

SEQ ID NO: 2228153 - RNA, 19 nt, Homo sapiens
  misc_RNA (1)...(19): siRNA sense strand
uggcacagcaucaaaccaa

SEQ ID NO: 2228154 - RNA, 19 nt, Homo sapiens
  misc_RNA (1)...(19): siRNA sense strand
aggacuugcugaauacauu

SEQ ID NO: 2228155 - RNA, 19 nt, Homo sapiens
  misc_RNA (1)...(19): siRNA sense strand
ggauauuguaugugaaagg

SEQ ID NO: 2228156 - RNA, 19 nt, Homo sapiens
  misc_RNA (1)...(19): siRNA sense strand
cgaggaaacugauggagca

SEQ ID NO: 2228157 - RNA, 19 nt, Homo sapiens
  misc_RNA (1)...(19): siRNA sense strand
gggccaugguccagaucau

SEQ ID NO: 2228158 - RNA, 19 nt, Homo sapiens
  misc_RNA (1)...(19): siRNA sense strand
ccaccgugucuaagaacaa

SEQ ID NO: 2228159 - RNA, 19 nt, Homo sapiens
  misc_RNA (1)...(19): siRNA sense strand
accugaaauuggcgaggaa

SEQ ID NO: 2228160 - RNA, 19 nt, Homo sapiens
  misc_RNA (1)...(19): siRNA sense strand
ggugggagaacgagggugu

SEQ ID NO: 2228161 - RNA, 19 nt, Homo sapiens
  misc_RNA (1)...(19): siRNA sense strand
cggaguaugaggacggcuu

SEQ ID NO: 2228162 - RNA, 19 nt, Homo sapiens
  misc_RNA (1)...(19): siRNA sense strand
cugccaagcugaaucguca

SEQ ID NO: 2228163 - RNA, 19 nt, Homo sapiens
  misc_RNA (1)...(19): siRNA sense strand
cugaaauuggcgaggaaac

SEQ ID NO: 2228164 - RNA, 19 nt, Homo sapiens
  misc_RNA (1)...(19): siRNA sense strand
gcucuagaccugcuggaga

SEQ ID NO: 2228165 - RNA, 19 nt, Homo sapiens
  misc_RNA (1)...(19): siRNA sense strand
accaaauugcaguggauga

SEQ ID NO: 2228166 - RNA, 19 nt, Homo sapiens
  misc_RNA (1)...(19): siRNA sense strand
cucaagagccugaacccua

SEQ ID NO: 2228167 - RNA, 19 nt, Homo sapiens
  misc_RNA (1)...(19): siRNA sense strand
acagaauagaggagagauu

SEQ ID NO: 2228168 - RNA, 19 nt, Homo sapiens
  misc_RNA (1)...(19): siRNA sense strand
uguaauagagugugcuaaa

SEQ ID NO: 2228169 - RNA, 19 nt, Homo sapiens
  misc_RNA (1)...(19): siRNA sense strand
cuguagauauccagaagaa

SEQ ID NO: 2228170 - RNA, 19 nt, Homo sapiens
  misc_RNA (1)...(19): siRNA sense strand
cuacgauggauuuggguua

SEQ ID NO: 2228171 - RNA, 19 nt, Homo sapiens
  misc_RNA (1)...(19): siRNA sense strand
cuuguuaaccaguggauua

SEQ ID NO: 2228172 - RNA, 19 nt, Homo sapiens
  misc_RNA (1)...(19): siRNA sense strand
cucagugaauuaagagaaa

SEQ ID NO: 2228173 - RNA, 19 nt, Homo sapiens
  misc_RNA (1)...(19): siRNA sense strand
auuaauaagugcagccaga

SEQ ID NO: 2228174 - RNA, 19 nt, Homo sapiens
  misc_RNA (1)...(19): siRNA sense strand
aggacaaggaagaauuaua

SEQ ID NO: 2228175 - RNA, 19 nt, Homo sapiens
  misc_RNA (1)...(19): siRNA sense strand
gaaaggugucugugaucaa

SEQ ID NO: 2228176 - RNA, 19 nt, Homo sapiens
  misc_RNA (1)...(19): siRNA sense strand
aagcugaaguaauagcaaa

SEQ ID NO: 2228177 - RNA, 19 nt, Homo sapiens
  misc_RNA (1)...(19): siRNA sense strand
gauccuaaucucagugaau

SEQ ID NO: 2228178 - RNA, 19 nt, Homo sapiens
  misc_RNA (1)...(19): siRNA sense strand
ggggaaacugagacagaua

SEQ ID NO: 2228179 - RNA, 19 nt, Homo sapiens
  misc_RNA (1)...(19): siRNA sense strand
ggauauugcagcagucaga

SEQ ID NO: 2228180 - RNA, 19 nt, Homo sapiens
  misc_RNA (1)...(19): siRNA sense strand
cuaucuggaaagagagcaa

SEQ ID NO: 2228181 - RNA, 19 nt, Homo sapiens
  misc_RNA (1)...(19): siRNA sense strand
uguccaaggugaaacaaau

SEQ ID NO: 2228182 - RNA, 19 nt, Homo sapiens
  misc_RNA (1)...(19): siRNA sense strand
uaagaauagagcuggaaau

SEQ ID NO: 2228183 - RNA, 19 nt, Homo sapiens
  misc_RNA (1)...(19): siRNA sense strand
agaaauuauuguuggcagu

SEQ ID NO: 2228184 - RNA, 19 nt, Homo sapiens
  misc_RNA (1)...(19): siRNA sense strand
gaugaauugggaagaggaa

SEQ ID NO: 2228185 - RNA, 19 nt, Homo sapiens
  misc_RNA (1)...(19): siRNA sense strand
cugaaguaauagcaaagaa

SEQ ID NO: 2228186 - RNA, 19 nt, Homo sapiens
  misc_RNA (1)...(19): siRNA sense strand
ccaggaugccauuguuaaa

SEQ ID NO: 2228187 - RNA, 19 nt, Homo sapiens
  misc_RNA (1)...(19): siRNA sense strand
ggaaacugagacagauaau

SEQ ID NO: 2228188 - RNA, 19 nt, Homo sapiens
  misc_RNA (1)...(19): siRNA sense strand
agaauagaggagagauuga

SEQ ID NO: 2228189 - RNA, 19 nt, Homo sapiens
  misc_RNA (1)...(19): siRNA sense strand
cuaucaggguauaaaucaa

SEQ ID NO: 2228190 - RNA, 19 nt, Homo sapiens
  misc_RNA (1)...(19): siRNA sense strand
cugaagagaccuuaacuau

SEQ ID NO: 2228191 - RNA, 19 nt, Homo sapiens
  misc_RNA (1)...(19): siRNA sense strand
gauucauguugcagagcuu

SEQ ID NO: 2228192 - RNA, 19 nt, Homo sapiens
  misc_RNA (1)...(19): siRNA sense strand
uuggagaaucgcaaggaua

SEQ ID NO: 2228193 - RNA, 19 nt, Homo sapiens
  misc_RNA (1)...(19): siRNA sense strand
aaacuaggacugugugaau

SEQ ID NO: 2228194 - RNA, 19 nt, Homo sapiens
  misc_RNA (1)...(19): siRNA sense strand
gauaauucaaagaggagga

SEQ ID NO: 2228195 - RNA, 19 nt, Homo sapiens
  misc_RNA (1)...(19): siRNA sense strand
gaugcagaauugaggcaga

SEQ ID NO: 2228196 - RNA, 19 nt, Homo sapiens
  misc_RNA (1)...(19): siRNA sense strand
aaggaaaacaccagaaauu

SEQ ID NO: 2228197 - RNA, 19 nt, Homo sapiens
  misc_RNA (1)...(19): siRNA sense strand
uggaaagagagcaagguga

SEQ ID NO: 2228198 - RNA, 19 nt, Homo sapiens
  misc_RNA (1)...(19): siRNA sense strand
guauauuggagaaucgcaa

SEQ ID NO: 2228199 - RNA, 19 nt, Homo sapiens
  misc_RNA (1)...(19): siRNA sense strand
uggagaaucgcaaggauau

SEQ ID NO: 2228200 - RNA, 19 nt, Homo sapiens
  misc_RNA (1)...(19): siRNA sense strand
acagauaauucaaagagga

SEQ ID NO: 2228201 - RNA, 19 nt, Homo sapiens
  misc_RNA (1)...(19): siRNA sense strand
ucguguaaccuguaaggaa

SEQ ID NO: 2228202 - RNA, 19 nt, Homo sapiens
  misc_RNA (1)...(19): siRNA sense strand
cagaauugaggcagacuuu

SEQ ID NO: 2228203 - RNA, 19 nt, Homo sapiens
  misc_RNA (1)...(19): siRNA sense strand
ggaaaacaccagaaauuau

SEQ ID NO: 2228204 - RNA, 19 nt, Homo sapiens
  misc_RNA (1)...(19): siRNA sense strand
gaaaagaagaugcagucaa

SEQ ID NO: 2228205 - RNA, 19 nt, Homo sapiens
  misc_RNA (1)...(19): siRNA sense strand
aagggagagcagaugaaua

SEQ ID NO: 2228206 - RNA, 19 nt, Homo sapiens
  misc_RNA (1)...(19): siRNA sense strand
gaggagagacugcuggaga

SEQ ID NO: 2228207 - RNA, 19 nt, Homo sapiens
  misc_RNA (1)...(19): siRNA sense strand
aggaaaugauagaaacaac

SEQ ID NO: 2228208 - RNA, 19 nt, Homo sapiens
  misc_RNA (1)...(19): siRNA sense strand
caacuuuagauauggauca

SEQ ID NO: 2228209 - RNA, 19 nt, Homo sapiens
  misc_RNA (1)...(19): siRNA sense strand
ccaugaauuccuuguaaaa

SEQ ID NO: 2228210 - RNA, 19 nt, Homo sapiens
  misc_RNA (1)...(19): siRNA sense strand
agaauagagcuggaaauaa

SEQ ID NO: 2228211 - RNA, 19 nt, Homo sapiens
  misc_RNA (1)...(19): siRNA sense strand
guuucaguauauuggagaa

SEQ ID NO: 2228212 - RNA, 19 nt, Homo sapiens
  misc_RNA (1)...(19): siRNA sense strand
gaaauuggauauugcagca

SEQ ID NO: 2228213 - RNA, 19 nt, Homo sapiens
  misc_RNA (1)...(19): siRNA sense strand
agugcuaucuggaaagaga

SEQ ID NO: 2228214 - RNA, 19 nt, Homo sapiens
  misc_RNA (1)...(19): siRNA sense strand
guuuauaagaauagagcug

SEQ ID NO: 2228215 - RNA, 19 nt, Homo sapiens
  misc_RNA (1)...(19): siRNA sense strand
ucaggaaaugauagaaaca

SEQ ID NO: 2228216 - RNA, 19 nt, Homo sapiens
  misc_RNA (1)...(19): siRNA sense strand
cuugaggaguuucaguaua

SEQ ID NO: 2228217 - RNA, 19 nt, Homo sapiens
  misc_RNA (1)...(19): siRNA sense strand
aauaaggcauccaaggaga

SEQ ID NO: 2228218 - RNA, 19 nt, Homo sapiens
  misc_RNA (1)...(19): siRNA sense strand
uggcuuggacccuggcaaa

SEQ ID NO: 2228219 - RNA, 19 nt, Homo sapiens
  misc_RNA (1)...(19): siRNA sense strand
gugugaauucccugauaau

SEQ ID NO: 2228220 - RNA, 19 nt, Homo sapiens
  misc_RNA (1)...(19): siRNA sense strand
ugaauugggaagaggaacu

SEQ ID NO: 2228221 - RNA, 19 nt, Homo sapiens
  misc_RNA (1)...(19): siRNA sense strand
aagaagaugcagucaacau

SEQ ID NO: 2228222 - RNA, 19 nt, Homo sapiens
  misc_RNA (1)...(19): siRNA sense strand
uggcugaaauguuggaaac

SEQ ID NO: 2228223 - RNA, 19 nt, Homo sapiens
  misc_RNA (1)...(19): siRNA sense strand
aaggagaaugauugguauu

SEQ ID NO: 2228224 - RNA, 19 nt, Homo sapiens
  misc_RNA (1)...(19): siRNA sense strand
augauugguauuuggcaua

SEQ ID NO: 2228225 - RNA, 19 nt, Homo sapiens
  misc_RNA (1)...(19): siRNA sense strand
uuauacaggcucuggaaaa

SEQ ID NO: 2228226 - RNA, 19 nt, Homo sapiens
  misc_RNA (1)...(19): siRNA sense strand
ggaaaugauagaaacaacu

SEQ ID NO: 2228227 - RNA, 19 nt, Homo sapiens
  misc_RNA (1)...(19): siRNA sense strand
gcguaaaugcaguggccaa

SEQ ID NO: 2228228 - RNA, 19 nt, Homo sapiens
  misc_RNA (1)...(19): siRNA sense strand
cuuguaaagacaugagaaa

SEQ ID NO: 2228229 - RNA, 19 nt, Homo sapiens
  misc_RNA (1)...(19): siRNA sense strand
ggcaacaggaggaggauau

SEQ ID NO: 2228230 - RNA, 19 nt, Homo sapiens
  misc_RNA (1)...(19): siRNA sense strand
cauucaaguagcagacaaa

SEQ ID NO: 2228231 - RNA, 19 nt, Homo sapiens
  misc_RNA (1)...(19): siRNA sense strand
gcgacaaguagaggagaaa

SEQ ID NO: 2228232 - RNA, 19 nt, Homo sapiens
  misc_RNA (1)...(19): siRNA sense strand
cgcgacaaguagaggagaa

SEQ ID NO: 2228233 - RNA, 19 nt, Homo sapiens
  misc_RNA (1)...(19): siRNA sense strand
caacaaggcaacaggagga

SEQ ID NO: 2228234 - RNA, 19 nt, Homo sapiens
  misc_RNA (1)...(19): siRNA sense strand
ucgaaauacugguacaaaa

SEQ ID NO: 2228235 - RNA, 19 nt, Homo sapiens
  misc_RNA (1)...(19): siRNA sense strand
caggaaggccacagcagaa

SEQ ID NO: 2228236 - RNA, 19 nt, Homo sapiens
  misc_RNA (1)...(19): siRNA sense strand
gguucgaaauacugguaca

SEQ ID NO: 2228237 - RNA, 19 nt, Homo sapiens
  misc_RNA (1)...(19): siRNA sense strand
gagugggaaacgaaauaaa

SEQ ID NO: 2228238 - RNA, 19 nt, Homo sapiens
  misc_RNA (1)...(19): siRNA sense strand
cuaaagaaaucaaucgagu

SEQ ID NO: 2228239 - RNA, 19 nt, Homo sapiens
  misc_RNA (1)...(19): siRNA sense strand
agggaagaguucagugcuu

SEQ ID NO: 2228240 - RNA, 19 nt, Homo sapiens
  misc_RNA (1)...(19): siRNA sense strand
ugucgguaugagugggaaa

SEQ ID NO: 2228241 - RNA, 19 nt, Homo sapiens
  misc_RNA (1)...(19): siRNA sense strand
agggagacuaauaaacaaa

SEQ ID NO: 2228242 - RNA, 19 nt, Homo sapiens
  misc_RNA (1)...(19): siRNA sense strand
augaaagugaugaugcaua

SEQ ID NO: 2228243 - RNA, 19 nt, Homo sapiens
  misc_RNA (1)...(19): siRNA sense strand
ccauucaaguagcagacaa

SEQ ID NO: 2228244 - RNA, 19 nt, Homo sapiens
  misc_RNA (1)...(19): siRNA sense strand
cgaauaggucauggugaua

SEQ ID NO: 2228245 - RNA, 19 nt, Homo sapiens
  misc_RNA (1)...(19): siRNA sense strand
cccauuaagggaagaguuu

SEQ ID NO: 2228246 - RNA, 19 nt, Homo sapiens
  misc_RNA (1)...(19): siRNA sense strand
gagauggagucaaucgaga

SEQ ID NO: 2228247 - RNA, 19 nt, Homo sapiens
  misc_RNA (1)...(19): siRNA sense strand
gacaaguagaggagaaaau

SEQ ID NO: 2228248 - RNA, 19 nt, Homo sapiens
  misc_RNA (1)...(19): siRNA sense strand
gagauauguuugagauccu

SEQ ID NO: 2228249 - RNA, 19 nt, Homo sapiens
  misc_RNA (1)...(19): siRNA sense strand
aagugaaggacauuguuua

SEQ ID NO: 2228250 - RNA, 19 nt, Homo sapiens
  misc_RNA (1)...(19): siRNA sense strand
uaacguggauggauggaca

SEQ ID NO: 2228251 - RNA, 19 nt, Homo sapiens
  misc_RNA (1)...(19): siRNA sense strand
ccagaaaauaagacgguca

SEQ ID NO: 2228252 - RNA, 19 nt, Homo sapiens
  misc_RNA (1)...(19): siRNA sense strand
augagugggaaacgaaaua

SEQ ID NO: 2228253 - RNA, 19 nt, Homo sapiens
  misc_RNA (1)...(19): siRNA sense strand
cugugaaucugcucgagaa

SEQ ID NO: 2228254 - RNA, 19 nt, Homo sapiens
  misc_RNA (1)...(19): siRNA sense strand
ugugaaucugcucgagaaa

SEQ ID NO: 2228255 - RNA, 19 nt, Homo sapiens
  misc_RNA (1)...(19): siRNA sense strand
aggaggaggauaugaaagu

SEQ ID NO: 2228256 - RNA, 19 nt, Homo sapiens
  misc_RNA (1)...(19): siRNA sense strand
auugauuguguguggcaaa

SEQ ID NO: 2228257 - RNA, 19 nt, Homo sapiens
  misc_RNA (1)...(19): siRNA sense strand
uggaacucugggugaauua

SEQ ID NO: 2228258 - RNA, 19 nt, Homo sapiens
  misc_RNA (1)...(19): siRNA sense strand
ccuuggagaaugagucuau

SEQ ID NO: 2228259 - RNA, 19 nt, Homo sapiens
  misc_RNA (1)...(19): siRNA sense strand
auaugaaagugaugaugca

SEQ ID NO: 2228260 - RNA, 19 nt, Homo sapiens
  misc_RNA (1)...(19): siRNA sense strand
auggauaaguuuuggacau

SEQ ID NO: 2228261 - RNA, 19 nt, Homo sapiens
  misc_RNA (1)...(19): siRNA sense strand
agaaaauuccuauggucua

SEQ ID NO: 2228262 - RNA, 19 nt, Homo sapiens
  misc_RNA (1)...(19): siRNA sense strand
cuuugaaacaggaaggcca

SEQ ID NO: 2228263 - RNA, 19 nt, Homo sapiens
  misc_RNA (1)...(19): siRNA sense strand
guguguggcaaaugucaaa

SEQ ID NO: 2228264 - RNA, 19 nt, Homo sapiens
  misc_RNA (1)...(19): siRNA sense strand
guaugagugggaaacgaaa

SEQ ID NO: 2228265 - RNA, 19 nt, Homo sapiens
  misc_RNA (1)...(19): siRNA sense strand
uagccuuacgcgacgaaua

SEQ ID NO: 2228266 - RNA, 19 nt, Homo sapiens
  misc_RNA (1)...(19): siRNA sense strand
uggauaaguuuuggacaua

SEQ ID NO: 2228267 - RNA, 19 nt, Homo sapiens
  misc_RNA (1)...(19): siRNA sense strand
aacacuaaucacugacaaa

SEQ ID NO: 2228268 - RNA, 19 nt, Homo sapiens
  misc_RNA (1)...(19): siRNA sense strand
acgaauacauaaagcggcu

SEQ ID NO: 2228269 - RNA, 19 nt, Homo sapiens
  misc_RNA (1)...(19): siRNA sense strand
ggaaauaccugcagccuga

SEQ ID NO: 2228270 - RNA, 19 nt, Homo sapiens
  misc_RNA (1)...(19): siRNA sense strand
acucaaagcaguaguggaa

SEQ ID NO: 2228271 - RNA, 19 nt, Homo sapiens
  misc_RNA (1)...(19): siRNA sense strand
aagcaguaguggaagcuaa

SEQ ID NO: 2228272 - RNA, 19 nt, Homo sapiens
  misc_RNA (1)...(19): siRNA sense strand
gucuaaaacccgagugaaa

SEQ ID NO: 2228273 - RNA, 19 nt, Homo sapiens
  misc_RNA (1)...(19): siRNA sense strand
ggacaaggaugaagcucca

SEQ ID NO: 2228274 - RNA, 19 nt, Homo sapiens
  misc_RNA (1)...(19): siRNA sense strand
agguagauaucucuggaaa

SEQ ID NO: 2228275 - RNA, 19 nt, Homo sapiens
  misc_RNA (1)...(19): siRNA sense strand
gguagauaucucuggaaau

SEQ ID NO: 2228276 - RNA, 19 nt, Homo sapiens
  misc_RNA (1)...(19): siRNA sense strand
cgucgaguucugaaggaaa

SEQ ID NO: 2228277 - RNA, 19 nt, Homo sapiens
  misc_RNA (1)...(19): siRNA sense strand
uggucuagcuauugauauu

SEQ ID NO: 2228278 - RNA, 19 nt, Homo sapiens
  misc_RNA (1)...(19): siRNA sense strand
uggaaaugccugcaagcaa

SEQ ID NO: 2228279 - RNA, 19 nt, Homo sapiens
  misc_RNA (1)...(19): siRNA sense strand
aggaaauggucgcucacaa

SEQ ID NO: 2228280 - RNA, 19 nt, Homo sapiens
  misc_RNA (1)...(19): siRNA sense strand
cguauuagcaggaugugaa

SEQ ID NO: 2228281 - RNA, 19 nt, Homo sapiens
  misc_RNA (1)...(19): siRNA sense strand
gugaagaagaccuuaaaca

SEQ ID NO: 2228282 - RNA, 19 nt, Homo sapiens
  misc_RNA (1)...(19): siRNA sense strand
gggcaaaggaaaacugcaa

SEQ ID NO: 2228283 - RNA, 19 nt, Homo sapiens
  misc_RNA (1)...(19): siRNA sense strand
auucaggcaauuugagaaa

SEQ ID NO: 2228284 - RNA, 19 nt, Homo sapiens
  misc_RNA (1)...(19): siRNA sense strand
aaauuagagcugaagacaa

SEQ ID NO: 2228285 - RNA, 19 nt, Homo sapiens
  misc_RNA (1)...(19): siRNA sense strand
ggaaaauaguaucgaagca

SEQ ID NO: 2228286 - RNA, 19 nt, Homo sapiens
  misc_RNA (1)...(19): siRNA sense strand
acauggacgucaagaacau

SEQ ID NO: 2228287 - RNA, 19 nt, Homo sapiens
  misc_RNA (1)...(19): siRNA sense strand
cgaagaaagaagagauccu

SEQ ID NO: 2228288 - RNA, 19 nt, Homo sapiens
  misc_RNA (1)...(19): siRNA sense strand
caaaucaggucuugggugu

SEQ ID NO: 2228289 - RNA, 19 nt, Homo sapiens
  misc_RNA (1)...(19): siRNA sense strand
agcagaaauuagagcugaa

SEQ ID NO: 2228290 - RNA, 19 nt, Homo sapiens
  misc_RNA (1)...(19): siRNA sense strand
agagcaucuucaaaggaaa

SEQ ID NO: 2228291 - RNA, 19 nt, Homo sapiens
  misc_RNA (1)...(19): siRNA sense strand
auggaaaggucaaagaguu

SEQ ID NO: 2228292 - RNA, 19 nt, Homo sapiens
  misc_RNA (1)...(19): siRNA sense strand
agcagugacaucagagaaa

SEQ ID NO: 2228293 - RNA, 19 nt, Homo sapiens
  misc_RNA (1)...(19): siRNA sense strand
cgaugaaggauguaaaugu

SEQ ID NO: 2228294 - RNA, 19 nt, Homo sapiens
  misc_RNA (1)...(19): siRNA sense strand
gauaguacuuccagcggau

SEQ ID NO: 2228295 - RNA, 19 nt, Homo sapiens
  misc_RNA (1)...(19): siRNA sense strand
ucucuaugccuguggauuu

SEQ ID NO: 2228296 - RNA, 19 nt, Homo sapiens
  misc_RNA (1)...(19): siRNA sense strand
gguuaugucucucagaaaa

SEQ ID NO: 2228297 - RNA, 19 nt, Homo sapiens
  misc_RNA (1)...(19): siRNA sense strand
caucaagagaacucagaga

SEQ ID NO: 2228298 - RNA, 19 nt, Homo sapiens
  misc_RNA (1)...(19): siRNA sense strand
aaauaguaucgaagcagaa

SEQ ID NO: 2228299 - RNA, 19 nt, Homo sapiens
  misc_RNA (1)...(19): siRNA sense strand
guggaagcuaagaaguuaa

SEQ ID NO: 2228300 - RNA, 19 nt, Homo sapiens
  misc_RNA (1)...(19): siRNA sense strand
agagaggagagaagagcau

SEQ ID NO: 2228301 - RNA, 19 nt, Homo sapiens
  misc_RNA (1)...(19): siRNA sense strand
cagaaaguugugucagaau

SEQ ID NO: 2228302 - RNA, 19 nt, Homo sapiens
  misc_RNA (1)...(19): siRNA sense strand
cauccuacauggacgucaa

SEQ ID NO: 2228303 - RNA, 19 nt, Homo sapiens
  misc_RNA (1)...(19): siRNA sense strand
ccguaaaguucaugaaaag

SEQ ID NO: 2228304 - RNA, 19 nt, Homo sapiens
  misc_RNA (1)...(19): siRNA sense strand
ggagaaguaaccugaacau

SEQ ID NO: 2228305 - RNA, 19 nt, Homo sapiens
  misc_RNA (1)...(19): siRNA sense strand
uaacgaugaaggauguaaa

SEQ ID NO: 2228306 - RNA, 19 nt, Homo sapiens
  misc_RNA (1)...(19): siRNA sense strand
gauucaaaguacacggcca

SEQ ID NO: 2228307 - RNA, 19 nt, Homo sapiens
  misc_RNA (1)...(19): siRNA sense strand
agguuaugucucucagaaa

SEQ ID NO: 2228308 - RNA, 19 nt, Homo sapiens
  misc_RNA (1)...(19): siRNA sense strand
ccuacauggacgucaagaa

SEQ ID NO: 2228309 - RNA, 19 nt, Homo sapiens
  misc_RNA (1)...(19): siRNA sense strand
gugcaauggaguuuagcuu

SEQ ID NO: 2228310 - RNA, 19 nt, Homo sapiens
  misc_RNA (1)...(19): siRNA sense strand
guccacaggcagagguuau

SEQ ID NO: 2228311 - RNA, 19 nt, Homo sapiens
  misc_RNA (1)...(19): siRNA sense strand
gaaaagaaaagaaagcgua

SEQ ID NO: 2228312 - RNA, 19 nt, Homo sapiens
  misc_RNA (1)...(19): siRNA sense strand
gagcaucuucaaaggaaaa

SEQ ID NO: 2228313 - RNA, 19 nt, Homo sapiens
  misc_RNA (1)...(19): siRNA sense strand
ugcaagacagcgugggcua

SEQ ID NO: 2228314 - RNA, 19 nt, Homo sapiens
  misc_RNA (1)...(19): siRNA sense strand
caaauaacgaugaaggaug

SEQ ID NO: 2228315 - RNA, 19 nt, Homo sapiens
  misc_RNA (1)...(19): siRNA sense strand
uggaaaggucaaagaguuc

SEQ ID NO: 2228316 - RNA, 19 nt, Homo sapiens
  misc_RNA (1)...(19): siRNA sense strand
aggcaguggccauagaaaa

SEQ ID NO: 2228317 - RNA, 19 nt, Homo sapiens
  misc_RNA (1)...(19): siRNA sense strand
guaugcagaagcaggagaa

SEQ ID NO: 2228318 - RNA, 19 nt, Homo sapiens
  misc_RNA (1)...(19): siRNA sense strand
ucagaaacuuccuggccuu

SEQ ID NO: 2228319 - RNA, 19 nt, Homo sapiens
  misc_RNA (1)...(19): siRNA sense strand
cugcgaagaaagaagagau

SEQ ID NO: 2228320 - RNA, 19 nt, Homo sapiens
  misc_RNA (1)...(19): siRNA sense strand
aaauuaaggccuuggauuc

SEQ ID NO: 2228321 - RNA, 19 nt, Homo sapiens
  misc_RNA (1)...(19): siRNA sense strand
ggugguuauugaagcccaa

SEQ ID NO: 2228322 - RNA, 19 nt, Homo sapiens
  misc_RNA (1)...(19): siRNA sense strand
caguuaagcucuggaacca

SEQ ID NO: 2228323 - RNA, 19 nt, Homo sapiens
  misc_RNA (1)...(19): siRNA sense strand
ugaaggaaauggucgcuca

SEQ ID NO: 2228324 - RNA, 19 nt, Homo sapiens
  misc_RNA (1)...(19): siRNA sense strand
ugugcuugcugaagaaaca

SEQ ID NO: 2228325 - RNA, 19 nt, Homo sapiens
  misc_RNA (1)...(19): siRNA sense strand
caguaguggaagcuaagaa

SEQ ID NO: 2228326 - RNA, 19 nt, Homo sapiens
  misc_RNA (1)...(19): siRNA sense strand
gucgaguucugaaggaaau

SEQ ID NO: 2228327 - RNA, 19 nt, Homo sapiens
  misc_RNA (1)...(19): siRNA sense strand
gugaaagcuggccuggaaa

SEQ ID NO: 2228328 - RNA, 19 nt, Homo sapiens
  misc_RNA (1)...(19): siRNA sense strand
gaaaggucaaagaguucua

SEQ ID NO: 2228329 - RNA, 19 nt, Homo sapiens
  misc_RNA (1)...(19): siRNA sense strand
gagaagggcccaucagcca

SEQ ID NO: 2228330 - RNA, 19 nt, Homo sapiens
  misc_RNA (1)...(19): siRNA sense strand
aagccaauauagaggucca

SEQ ID NO: 2228331 - RNA, 19 nt, Homo sapiens
  misc_RNA (1)...(19): siRNA sense strand
ugaucggggcaaaggaaaa

SEQ ID NO: 2228332 - RNA, 19 nt, Homo sapiens
  misc_RNA (1)...(19): siRNA sense strand
uaguaucgaagcagaaauu

SEQ ID NO: 2228333 - RNA, 19 nt, Homo sapiens
  misc_RNA (1)...(19): siRNA sense strand
agagaaacuguuaugauca

SEQ ID NO: 2228334 - RNA, 19 nt, Homo sapiens
  misc_RNA (1)...(19): siRNA sense strand
cugaugaggugaagaagac

SEQ ID NO: 2228335 - RNA, 19 nt, Homo sapiens
  misc_RNA (1)...(19): siRNA sense strand
agaaguaaccugaacaucu

SEQ ID NO: 2228336 - RNA, 19 nt, Homo sapiens
  misc_RNA (1)...(19): siRNA sense strand
ccaaauaacgaugaaggau

SEQ ID NO: 2228337 - RNA, 19 nt, Homo sapiens
  misc_RNA (1)...(19): siRNA sense strand
ccaggcucaucaagacaaa

SEQ ID NO: 2228338 - RNA, 19 nt, Homo sapiens
  misc_RNA (1)...(19): siRNA sense strand
ggguagaagagcugagcaa

SEQ ID NO: 2228339 - RNA, 19 nt, Homo sapiens
  misc_RNA (1)...(19): siRNA sense strand
ccaaagugcagguggaaau

SEQ ID NO: 2228340 - RNA, 19 nt, Homo sapiens
  misc_RNA (1)...(19): siRNA sense strand
cugcaggaguggccagaaa

SEQ ID NO: 2228341 - RNA, 19 nt, Homo sapiens
  misc_RNA (1)...(19): siRNA sense strand
ggauagugaaugcuggaaa

SEQ ID NO: 2228342 - RNA, 19 nt, Homo sapiens
  misc_RNA (1)...(19): siRNA sense strand
ccagaucauaucagggaaa

SEQ ID NO: 2228343 - RNA, 19 nt, Homo sapiens
  misc_RNA (1)...(19): siRNA sense strand
agaagaaaccagagugcuu

SEQ ID NO: 2228344 - RNA, 19 nt, Homo sapiens
  misc_RNA (1)...(19): siRNA sense strand
cuguaauguugcaggauca

SEQ ID NO: 2228345 - RNA, 19 nt, Homo sapiens
  misc_RNA (1)...(19): siRNA sense strand
ccaagauauuuaacgacaa

SEQ ID NO: 2228346 - RNA, 19 nt, Homo sapiens
  misc_RNA (1)...(19): siRNA sense strand
aggauuaugcauugaggaa

SEQ ID NO: 2228347 - RNA, 19 nt, Homo sapiens
  misc_RNA (1)...(19): siRNA sense strand
gguuaaggcaacaggcuga

SEQ ID NO: 2228348 - RNA, 19 nt, Homo sapiens
  misc_RNA (1)...(19): siRNA sense strand
ggaucaaggaaguuugcua

SEQ ID NO: 2228349 - RNA, 19 nt, Homo sapiens
  misc_RNA (1)...(19): siRNA sense strand
accaaauccauaaggaaua

SEQ ID NO: 2228350 - RNA, 19 nt, Homo sapiens
  misc_RNA (1)...(19): siRNA sense strand
caauauaguuggaggaugc

SEQ ID NO: 2228351 - RNA, 19 nt, Homo sapiens
  misc_RNA (1)...(19): siRNA sense strand
gagaaauggcccugucgaa

SEQ ID NO: 2228352 - RNA, 19 nt, Homo sapiens
  misc_RNA (1)...(19): siRNA sense strand
gcauugaggaagaacauau

SEQ ID NO: 2228353 - RNA, 19 nt, Homo sapiens
  misc_RNA (1)...(19): siRNA sense strand
ggucaauauaguuggagga

SEQ ID NO: 2228354 - RNA, 19 nt, Homo sapiens
  misc_RNA (1)...(19): siRNA sense strand
gcaagaacauaguuggagu

SEQ ID NO: 2228355 - RNA, 19 nt, Homo sapiens
  misc_RNA (1)...(19): siRNA sense strand
gaaaauuguuggugaucuu

SEQ ID NO: 2228356 - RNA, 19 nt, Homo sapiens
  misc_RNA (1)...(19): siRNA sense strand
ccuuaagucaagccagaaa

SEQ ID NO: 2228357 - RNA, 19 nt, Homo sapiens
  misc_RNA (1)...(19): siRNA sense strand
ggacauggggauagugaau

SEQ ID NO: 2228358 - RNA, 19 nt, Homo sapiens
  misc_RNA (1)...(19): siRNA sense strand
gcacaggagggaagaaagu

SEQ ID NO: 2228359 - RNA, 19 nt, Homo sapiens
  misc_RNA (1)...(19): siRNA sense strand
ucuacaggcauuagguuaa

SEQ ID NO: 2228360 - RNA, 19 nt, Homo sapiens
  misc_RNA (1)...(19): siRNA sense strand
cgacaaaacaguaggugga

SEQ ID NO: 2228361 - RNA, 19 nt, Homo sapiens
  misc_RNA (1)...(19): siRNA sense strand
ccuaugaggaugaugguga

SEQ ID NO: 2228362 - RNA, 19 nt, Homo sapiens
  misc_RNA (1)...(19): siRNA sense strand
ugugauugaagcuggguua

SEQ ID NO: 2228363 - RNA, 19 nt, Homo sapiens
  misc_RNA (1)...(19): siRNA sense strand
gcuuaacggcacaguagaa

SEQ ID NO: 2228364 - RNA, 19 nt, Homo sapiens
  misc_RNA (1)...(19): siRNA sense strand
cggacagacaggagaggga

SEQ ID NO: 2228365 - RNA, 19 nt, Homo sapiens
  misc_RNA (1)...(19): siRNA sense strand
gcacaguagaagaagagga

SEQ ID NO: 2228366 - RNA, 19 nt, Homo sapiens
  misc_RNA (1)...(19): siRNA sense strand
ggcaggaaacuaugaagaa

SEQ ID NO: 2228367 - RNA, 19 nt, Homo sapiens
  misc_RNA (1)...(19): siRNA sense strand
cuagaugguccaagugcaa

SEQ ID NO: 2228368 - RNA, 19 nt, Homo sapiens
  misc_RNA (1)...(19): siRNA sense strand
uugaggaaaucauggaaga

SEQ ID NO: 2228369 - RNA, 19 nt, Homo sapiens
  misc_RNA (1)...(19): siRNA sense strand
ggagaagcuaaacgaagaa

SEQ ID NO: 2228370 - RNA, 19 nt, Homo sapiens
  misc_RNA (1)...(19): siRNA sense strand
gaaugaaaauuguugguga

SEQ ID NO: 2228371 - RNA, 19 nt, Homo sapiens
  misc_RNA (1)...(19): siRNA sense strand
ggcaacaggcugagaagga

SEQ ID NO: 2228372 - RNA, 19 nt, Homo sapiens
  misc_RNA (1)...(19): siRNA sense strand
ggaccaugauccagcggga

SEQ ID NO: 2228373 - RNA, 19 nt, Homo sapiens
  misc_RNA (1)...(19): siRNA sense strand
caagaacauaguuggagua

SEQ ID NO: 2228374 - RNA, 19 nt, Homo sapiens
  misc_RNA (1)...(19): siRNA sense strand
agauauaauuggccuguca

SEQ ID NO: 2228375 - RNA, 19 nt, Homo sapiens
  misc_RNA (1)...(19): siRNA sense strand
ugaaggaaggagaggacga

SEQ ID NO: 2228376 - RNA, 19 nt, Homo sapiens
  misc_RNA (1)...(19): siRNA sense strand
aggccggauuauaggaaca

SEQ ID NO: 2228377 - RNA, 19 nt, Homo sapiens
  misc_RNA (1)...(19): siRNA sense strand
gggaugagaucaaugccau

SEQ ID NO: 2228378 - RNA, 19 nt, Homo sapiens
  misc_RNA (1)...(19): siRNA sense strand
uuaaaauagcuccgagaua

SEQ ID NO: 2228379 - RNA, 19 nt, Homo sapiens
  misc_RNA (1)...(19): siRNA sense strand
aggacaggcaacagaaaca

SEQ ID NO: 2228380 - RNA, 19 nt, Homo sapiens
  misc_RNA (1)...(19): siRNA sense strand
cuggaauggaggaacacaa

SEQ ID NO: 2228381 - RNA, 19 nt, Homo sapiens
  misc_RNA (1)...(19): siRNA sense strand
agacugaugaguggagaaa

SEQ ID NO: 2228382 - RNA, 19 nt, Homo sapiens
  misc_RNA (1)...(19): siRNA sense strand
uauugaggauacugaggaa

SEQ ID NO: 2228383 - RNA, 19 nt, Homo sapiens
  misc_RNA (1)...(19): siRNA sense strand
acugaugaguggagaaaug

SEQ ID NO: 2228384 - RNA, 19 nt, Homo sapiens
  misc_RNA (1)...(19): siRNA sense strand
cagcacuaguauugcccaa

SEQ ID NO: 2228385 - RNA, 19 nt, Homo sapiens
  misc_RNA (1)...(19): siRNA sense strand
gauuauaggaacaucacau

SEQ ID NO: 2228386 - RNA, 19 nt, Homo sapiens
  misc_RNA (1)...(19): siRNA sense strand
uggaggaugcuguggguca

SEQ ID NO: 2228387 - RNA, 19 nt, Homo sapiens
  misc_RNA (1)...(19): siRNA sense strand
cuuaauugcuuccgagcca

SEQ ID NO: 2228388 - RNA, 19 nt, Homo sapiens
  misc_RNA (1)...(19): siRNA sense strand
aggcacaggagggaagaaa

SEQ ID NO: 2228389 - RNA, 19 nt, Homo sapiens
  misc_RNA (1)...(19): siRNA sense strand
agaaagagaagaaaccaga

SEQ ID NO: 2228390 - RNA, 19 nt, Homo sapiens
  misc_RNA (1)...(19): siRNA sense strand
cagacugaugaguggagaa

SEQ ID NO: 2228391 - RNA, 19 nt, Homo sapiens
  misc_RNA (1)...(19): siRNA sense strand
ugaagaaggcuguuggcca

SEQ ID NO: 2228392 - RNA, 19 nt, Homo sapiens
  misc_RNA (1)...(19): siRNA sense strand
uaccaaauccauaaggaau

SEQ ID NO: 2228393 - RNA, 19 nt, Homo sapiens
  misc_RNA (1)...(19): siRNA sense strand
agaagagcuccaugaaaga

SEQ ID NO: 2228394 - RNA, 19 nt, Homo sapiens
  misc_RNA (1)...(19): siRNA sense strand
aguuauugcuacaggauuu

SEQ ID NO: 2228395 - RNA, 19 nt, Homo sapiens
  misc_RNA (1)...(19): siRNA sense strand
auugagaaguguuuggaaa

SEQ ID NO: 2228396 - RNA, 19 nt, Homo sapiens
  misc_RNA (1)...(19): siRNA sense strand
aauaaguaccaguuggaaa

SEQ ID NO: 2228397 - RNA, 19 nt, Homo sapiens
  misc_RNA (1)...(19): siRNA sense strand
uuguauuccaagagagaua

SEQ ID NO: 2228398 - RNA, 19 nt, Homo sapiens
  misc_RNA (1)...(19): siRNA sense strand
aggaauuuaugguucgaaa

SEQ ID NO: 2228399 - RNA, 19 nt, Homo sapiens
  misc_RNA (1)...(19): siRNA sense strand
aggaauuuggagaaaguaa

SEQ ID NO: 2228400 - RNA, 19 nt, Homo sapiens
  misc_RNA (1)...(19): siRNA sense strand
ugauaauacuucagugcga

SEQ ID NO: 2228401 - RNA, 19 nt, Homo sapiens
  misc_RNA (1)...(19): siRNA sense strand
uggugaacauaaagcgaau

SEQ ID NO: 2228402 - RNA, 19 nt, Homo sapiens
  misc_RNA (1)...(19): siRNA sense strand
guacuguggaagaaagcaa

SEQ ID NO: 2228403 - RNA, 19 nt, Homo sapiens
  misc_RNA (1)...(19): siRNA sense strand
uggagaagaacaaggugua

SEQ ID NO: 2228404 - RNA, 19 nt, Homo sapiens
  misc_RNA (1)...(19): siRNA sense strand
gcgaaugaucgaaugguga

SEQ ID NO: 2228405 - RNA, 19 nt, Homo sapiens
  misc_RNA (1)...(19): siRNA sense strand
cgccaggaauuuggagaaa

SEQ ID NO: 2228406 - RNA, 19 nt, Homo sapiens
  misc_RNA (1)...(19): siRNA sense strand
aguaacuggagaagaacaa

SEQ ID NO: 2228407 - RNA, 19 nt, Homo sapiens
  misc_RNA (1)...(19): siRNA sense strand
caagauguacagugggaga

SEQ ID NO: 2228408 - RNA, 19 nt, Homo sapiens
  misc_RNA (1)...(19): siRNA sense strand
ggguuugccaacugugaaa

SEQ ID NO: 2228409 - RNA, 19 nt, Homo sapiens
  misc_RNA (1)...(19): siRNA sense strand
guggaugcaucucgggcaa

SEQ ID NO: 2228410 - RNA, 19 nt, Homo sapiens
  misc_RNA (1)...(19): siRNA sense strand
uugaugaagcuuuggguuu

SEQ ID NO: 2228411 - RNA, 19 nt, Homo sapiens
  misc_RNA (1)...(19): siRNA sense strand
cuauugacacuguggaaga

SEQ ID NO: 2228412 - RNA, 19 nt, Homo sapiens
  misc_RNA (1)...(19): siRNA sense strand
gguucuuacaugauggaau

SEQ ID NO: 2228413 - RNA, 19 nt, Homo sapiens
  misc_RNA (1)...(19): siRNA sense strand
uggaauggccaaagcugua

SEQ ID NO: 2228414 - RNA, 19 nt, Homo sapiens
  misc_RNA (1)...(19): siRNA sense strand
acauaaagcgaaugaucga

SEQ ID NO: 2228415 - RNA, 19 nt, Homo sapiens
  misc_RNA (1)...(19): siRNA sense strand
uagcagauggauuggagua

SEQ ID NO: 2228416 - RNA, 19 nt, Homo sapiens
  misc_RNA (1)...(19): siRNA sense strand
agacaagcuagaauagauu

SEQ ID NO: 2228417 - RNA, 19 nt, Homo sapiens
  misc_RNA (1)...(19): siRNA sense strand
gcucgaauugccaggaaca

SEQ ID NO: 2228418 - RNA, 19 nt, Homo sapiens
  misc_RNA (1)...(19): siRNA sense strand
uaucaagaggguucauaaa

SEQ ID NO: 2228419 - RNA, 19 nt, Homo sapiens
  misc_RNA (1)...(19): siRNA sense strand
auaaguaccaguuggaaaa

SEQ ID NO: 2228420 - RNA, 19 nt, Homo sapiens
  misc_RNA (1)...(19): siRNA sense strand
cugcuagcggagauggaaa

SEQ ID NO: 2228421 - RNA, 19 nt, Homo sapiens
  misc_RNA (1)...(19): siRNA sense strand
agguauuuggugaacauaa

SEQ ID NO: 2228422 - RNA, 19 nt, Homo sapiens
  misc_RNA (1)...(19): siRNA sense strand
gagaaaguaaagagauaac

SEQ ID NO: 2228423 - RNA, 19 nt, Homo sapiens
  misc_RNA (1)...(19): siRNA sense strand
gggaucaagcuuuggcuga

SEQ ID NO: 2228424 - RNA, 19 nt, Homo sapiens
  misc_RNA (1)...(19): siRNA sense strand
ggcaagauguacaguggga

SEQ ID NO: 2228425 - RNA, 19 nt, Homo sapiens
  misc_RNA (1)...(19): siRNA sense strand
cuaucaagaggguucauaa

SEQ ID NO: 2228426 - RNA, 19 nt, Homo sapiens
  misc_RNA (1)...(19): siRNA sense strand
auaaauucauggaacguga

SEQ ID NO: 2228427 - RNA, 19 nt, Homo sapiens
  misc_RNA (1)...(19): siRNA sense strand
uguuuaugaugcugcuuua

SEQ ID NO: 2228428 - RNA, 19 nt, Homo sapiens
  misc_RNA (1)...(19): siRNA sense strand
gcuugaugauauugagaag

SEQ ID NO: 2228429 - RNA, 19 nt, Homo sapiens
  misc_RNA (1)...(19): siRNA sense strand
gaauauacagcaaagcaca

SEQ ID NO: 2228430 - RNA, 19 nt, Homo sapiens
  misc_RNA (1)...(19): siRNA sense strand
aauggugaguggagcauau

SEQ ID NO: 2228431 - RNA, 19 nt, Homo sapiens
  misc_RNA (1)...(19): siRNA sense strand
acaagauggccaugacaga

SEQ ID NO: 2228432 - RNA, 19 nt, Homo sapiens
  misc_RNA (1)...(19): siRNA sense strand
agauguacagugggagaaa

SEQ ID NO: 2228433 - RNA, 19 nt, Homo sapiens
  misc_RNA (1)...(19): siRNA sense strand
ccaugacagaggagcaaaa

SEQ ID NO: 2228434 - RNA, 19 nt, Homo sapiens
  misc_RNA (1)...(19): siRNA sense strand
uugagaaguguuuggaaaa

SEQ ID NO: 2228435 - RNA, 19 nt, Homo sapiens
  misc_RNA (1)...(19): siRNA sense strand
agagagauacuauggacuu

SEQ ID NO: 2228436 - RNA, 19 nt, Homo sapiens
  misc_RNA (1)...(19): siRNA sense strand
ccuuugaucuggcgacaca

SEQ ID NO: 2228437 - RNA, 19 nt, Homo sapiens
  misc_RNA (1)...(19): siRNA sense strand
gggcucacuuaauagagaa

SEQ ID NO: 2228438 - RNA, 19 nt, Homo sapiens
  misc_RNA (1)...(19): siRNA sense strand
aagcaauggcagcaguauu

SEQ ID NO: 2228439 - RNA, 19 nt, Homo sapiens
  misc_RNA (1)...(19): siRNA sense strand
ugugaaaagugcucgaauu

SEQ ID NO: 2228440 - RNA, 19 nt, Homo sapiens
  misc_RNA (1)...(19): siRNA sense strand
cagaagaccuaauauggca

SEQ ID NO: 2228441 - RNA, 19 nt, Homo sapiens
  misc_RNA (1)...(19): siRNA sense strand
uugaagaaauggguggaau

SEQ ID NO: 2228442 - RNA, 19 nt, Homo sapiens
  misc_RNA (1)...(19): siRNA sense strand
gcucauacagcaacgacuu

SEQ ID NO: 2228443 - RNA, 19 nt, Homo sapiens
  misc_RNA (1)...(19): siRNA sense strand
ucaucaggcuccaggcuca

SEQ ID NO: 2228444 - RNA, 19 nt, Homo sapiens
  misc_RNA (1)...(19): siRNA sense strand
aaagaugagagcugguaga

SEQ ID NO: 2228445 - RNA, 19 nt, Homo sapiens
  misc_RNA (1)...(19): siRNA sense strand
gguagaagacucugggcuc

SEQ ID NO: 2228446 - RNA, 19 nt, Homo sapiens
  misc_RNA (1)...(19): siRNA sense strand
ugaagaaauggguggaaug

SEQ ID NO: 2228447 - RNA, 19 nt, Homo sapiens
  misc_RNA (1)...(19): siRNA sense strand
auaauacuucagugcgaaa

SEQ ID NO: 2228448 - RNA, 19 nt, Homo sapiens
  misc_RNA (1)...(19): siRNA sense strand
gugaacauaaagcgaauga

SEQ ID NO: 2228449 - RNA, 19 nt, Homo sapiens
  misc_RNA (1)...(19): siRNA sense strand
ucgccaggaauuuggagaa

SEQ ID NO: 2228450 - RNA, 19 nt, Homo sapiens
  misc_RNA (1)...(19): siRNA sense strand
guagaagacucugggcuca

SEQ ID NO: 2228451 - RNA, 19 nt, Homo sapiens
  misc_RNA (1)...(19): siRNA sense strand
aggaggauuuggagcuaau

SEQ ID NO: 2228452 - RNA, 19 nt, Homo sapiens
  misc_RNA (1)...(19): siRNA sense strand
uggagaagcuaaaggaggu

SEQ ID NO: 2228453 - RNA, 19 nt, Homo sapiens
  misc_RNA (1)...(19): siRNA sense strand
cauccuucauggagaacau

SEQ ID NO: 2228454 - RNA, 19 nt, Homo sapiens
  misc_RNA (1)...(19): siRNA sense strand
agcaaguggagaagcuaaa

SEQ ID NO: 2228455 - RNA, 19 nt, Homo sapiens
  misc_RNA (1)...(19): siRNA sense strand
acacaagcuuucuggagca

SEQ ID NO: 2228456 - RNA, 19 nt, Homo sapiens
  misc_RNA (1)...(19): siRNA sense strand
uccuugaacuugagaacau

SEQ ID NO: 2228457 - RNA, 19 nt, Homo sapiens
  misc_RNA (1)...(19): siRNA sense strand
uaaaggagguugcaggcuu

SEQ ID NO: 2228458 - RNA, 19 nt, Homo sapiens
  misc_RNA (1)...(19): siRNA sense strand
cuaauuaacaagugggccu

SEQ ID NO: 2228459 - RNA, 19 nt, Homo sapiens
  misc_RNA (1)...(19): siRNA sense strand
acaccaaagucccucgcaa

SEQ ID NO: 2228460 - RNA, 19 nt, Homo sapiens
  misc_RNA (1)...(19): siRNA sense strand
aggauuuggagcuaauuaa

SEQ ID NO: 2228461 - RNA, 19 nt, Homo sapiens
  misc_RNA (1)...(19): siRNA sense strand
gcuacauccuggagcgcaa

SEQ ID NO: 2228462 - RNA, 19 nt, Homo sapiens
  misc_RNA (1)...(19): siRNA sense strand
cggccuaccaggugagcaa

SEQ ID NO: 2228463 - RNA, 19 nt, Homo sapiens
  misc_RNA (1)...(19): siRNA sense strand
ucaagugguucaagggcaa

SEQ ID NO: 2228464 - RNA, 19 nt, Homo sapiens
  misc_RNA (1)...(19): siRNA sense strand
uaaagaggcucaagggcau

SEQ ID NO: 2228465 - RNA, 19 nt, Homo sapiens
  misc_RNA (1)...(19): siRNA sense strand
ccaccaacuuacagggcga

SEQ ID NO: 2228466 - RNA, 19 nt, Homo sapiens
  misc_RNA (1)...(19): siRNA sense strand
gaggaggacgugugggaga

SEQ ID NO: 2228467 - RNA, 19 nt, Homo sapiens
  misc_RNA (1)...(19): siRNA sense strand
ccaugaggacacugggauu

SEQ ID NO: 2228468 - RNA, 19 nt, Homo sapiens
  misc_RNA (1)...(19): siRNA sense strand
cagagaaggcagagcccau

SEQ ID NO: 2228469 - RNA, 19 nt, Homo sapiens
  misc_RNA (1)...(19): siRNA sense strand
ugaagaacccugugggcga

SEQ ID NO: 2228470 - RNA, 19 nt, Homo sapiens
  misc_RNA (1)...(19): siRNA sense strand
cuaaagaggcucaagggca

SEQ ID NO: 2228471 - RNA, 19 nt, Homo sapiens
  misc_RNA (1)...(19): siRNA sense strand
acuauaaggcccuggacuu

SEQ ID NO: 2228472 - RNA, 19 nt, Homo sapiens
  misc_RNA (1)...(19): siRNA sense strand
caucugaguacgagcgcau

SEQ ID NO: 2228473 - RNA, 19 nt, Homo sapiens
  misc_RNA (1)...(19): siRNA sense strand
agaaggacgggcagagaca

SEQ ID NO: 2228474 - RNA, 19 nt, Homo sapiens
  misc_RNA (1)...(19): siRNA sense strand
gcgcaagucaaauggcuga

SEQ ID NO: 2228475 - RNA, 19 nt, Homo sapiens
  misc_RNA (1)...(19): siRNA sense strand
agaaggaagaugagggcgu

SEQ ID NO: 2228476 - RNA, 19 nt, Homo sapiens
  misc_RNA (1)...(19): siRNA sense strand
uguucgaggccgagacaga

SEQ ID NO: 2228477 - RNA, 19 nt, Homo sapiens
  misc_RNA (1)...(19): siRNA sense strand
gagcgcaagaagaagaaga

SEQ ID NO: 2228478 - RNA, 19 nt, Homo sapiens
  misc_RNA (1)...(19): siRNA sense strand
gcauugagaacauggagga

SEQ ID NO: 2228479 - RNA, 19 nt, Homo sapiens
  misc_RNA (1)...(19): siRNA sense strand
ccagaauaugguuggcuuu

SEQ ID NO: 2228480 - RNA, 19 nt, Homo sapiens
  misc_RNA (1)...(19): siRNA sense strand
ugcagaaagccgacaagaa

SEQ ID NO: 2228481 - RNA, 19 nt, Homo sapiens
  misc_RNA (1)...(19): siRNA sense strand
aagaagagcuaccggugga

SEQ ID NO: 2228482 - RNA, 19 nt, Homo sapiens
  misc_RNA (1)...(19): siRNA sense strand
cggugacagugcaggagau

SEQ ID NO: 2228483 - RNA, 19 nt, Homo sapiens
  misc_RNA (1)...(19): siRNA sense strand
caggcgaggaggugagcau

SEQ ID NO: 2228484 - RNA, 19 nt, Homo sapiens
  misc_RNA (1)...(19): siRNA sense strand
ugaucgagggcguggugua

SEQ ID NO: 2228485 - RNA, 19 nt, Homo sapiens
  misc_RNA (1)...(19): siRNA sense strand
cagaggaggacguguggga

SEQ ID NO: 2228486 - RNA, 19 nt, Homo sapiens
  misc_RNA (1)...(19): siRNA sense strand
augaguggguguuugacaa

SEQ ID NO: 2228487 - RNA, 19 nt, Homo sapiens
  misc_RNA (1)...(19): siRNA sense strand
agaucagcaacgugggaga

SEQ ID NO: 2228488 - RNA, 19 nt, Homo sapiens
  misc_RNA (1)...(19): siRNA sense strand
ucaaggucauagaggcaga

SEQ ID NO: 2228489 - RNA, 19 nt, Homo sapiens
  misc_RNA (1)...(19): siRNA sense strand
gguucaagaaggacgggca

SEQ ID NO: 2228490 - RNA, 19 nt, Homo sapiens
  misc_RNA (1)...(19): siRNA sense strand
ggacacaggugacagcgau

SEQ ID NO: 2228491 - RNA, 19 nt, Homo sapiens
  misc_RNA (1)...(19): siRNA sense strand
gagaagaagagcacagccu

SEQ ID NO: 2228492 - RNA, 19 nt, Homo sapiens
  misc_RNA (1)...(19): siRNA sense strand
agacagagcgggcaggagu

SEQ ID NO: 2228493 - RNA, 19 nt, Homo sapiens
  misc_RNA (1)...(19): siRNA sense strand
cgauacuggugaaggaccu

SEQ ID NO: 2228494 - RNA, 19 nt, Homo sapiens
  misc_RNA (1)...(19): siRNA sense strand
ucaagaauggccaggagau

SEQ ID NO: 2228495 - RNA, 19 nt, Homo sapiens
  misc_RNA (1)...(19): siRNA sense strand
aggcagagaucgagcggaa

SEQ ID NO: 2228496 - RNA, 19 nt, Homo sapiens
  misc_RNA (1)...(19): siRNA sense strand
agaagaagauggaaggaga

SEQ ID NO: 2228497 - RNA, 19 nt, Homo sapiens
  misc_RNA (1)...(19): siRNA sense strand
ccaaaguggagaaggagaa

SEQ ID NO: 2228498 - RNA, 19 nt, Homo sapiens
  misc_RNA (1)...(19): siRNA sense strand
cugcagacauagagaccua

SEQ ID NO: 2228499 - RNA, 19 nt, Homo sapiens
  misc_RNA (1)...(19): siRNA sense strand
gcagaaagagagaaggaga

SEQ ID NO: 2228500 - RNA, 19 nt, Homo sapiens
  misc_RNA (1)...(19): siRNA sense strand
ccuucaagcgggagaacaa

SEQ ID NO: 2228501 - RNA, 19 nt, Homo sapiens
  misc_RNA (1)...(19): siRNA sense strand
cagagaaggacgaggagau

SEQ ID NO: 2228502 - RNA, 19 nt, Homo sapiens
  misc_RNA (1)...(19): siRNA sense strand
agcuaaaggucaaggccua

SEQ ID NO: 2228503 - RNA, 19 nt, Homo sapiens
  misc_RNA (1)...(19): siRNA sense strand
uggcagaggagcugaagaa

SEQ ID NO: 2228504 - RNA, 19 nt, Homo sapiens
  misc_RNA (1)...(19): siRNA sense strand
aggaggagguuaaggcgaa

SEQ ID NO: 2228505 - RNA, 19 nt, Homo sapiens
  misc_RNA (1)...(19): siRNA sense strand
cggugaagggcaugaggaa

SEQ ID NO: 2228506 - RNA, 19 nt, Homo sapiens
  misc_RNA (1)...(19): siRNA sense strand
ucaucaaggccaaggcuaa

SEQ ID NO: 2228507 - RNA, 19 nt, Homo sapiens
  misc_RNA (1)...(19): siRNA sense strand
aggaugaggaggagaugaa

SEQ ID NO: 2228508 - RNA, 19 nt, Homo sapiens
  misc_RNA (1)...(19): siRNA sense strand
cagaaagagagaaggagau

SEQ ID NO: 2228509 - RNA, 19 nt, Homo sapiens
  misc_RNA (1)...(19): siRNA sense strand
uggccaaaguggagaagga

SEQ ID NO: 2228510 - RNA, 19 nt, Homo sapiens
  misc_RNA (1)...(19): siRNA sense strand
cugaaagcagagagagauu

SEQ ID NO: 2228511 - RNA, 19 nt, Homo sapiens
  misc_RNA (1)...(19): siRNA sense strand
aggccaagcuguuugacaa

SEQ ID NO: 2228512 - RNA, 19 nt, Homo sapiens
  misc_RNA (1)...(19): siRNA sense strand
ccgaggaggacaaggucaa

SEQ ID NO: 2228513 - RNA, 19 nt, Homo sapiens
  misc_RNA (1)...(19): siRNA sense strand
agaaugagcuggaggccga

SEQ ID NO: 2228514 - RNA, 19 nt, Homo sapiens
  misc_RNA (1)...(19): siRNA sense strand
uggacaagaagcagaggaa

SEQ ID NO: 2228515 - RNA, 19 nt, Homo sapiens
  misc_RNA (1)...(19): siRNA sense strand
ggccaagagccgugacauu

SEQ ID NO: 2228516 - RNA, 19 nt, Homo sapiens
  misc_RNA (1)...(19): siRNA sense strand
agaagaaagcucugcaaga

SEQ ID NO: 2228517 - RNA, 19 nt, Homo sapiens
  misc_RNA (1)...(19): siRNA sense strand
aggaggagacggaggccaa

SEQ ID NO: 2228518 - RNA, 19 nt, Homo sapiens
  misc_RNA (1)...(19): siRNA sense strand
ucgaggaggccaagaagaa

SEQ ID NO: 2228519 - RNA, 19 nt, Homo sapiens
  misc_RNA (1)...(19): siRNA sense strand
acgacgaccugaaggagaa

SEQ ID NO: 2228520 - RNA, 19 nt, Homo sapiens
  misc_RNA (1)...(19): siRNA sense strand
agaagaagauggaugcuga

SEQ ID NO: 2228521 - RNA, 19 nt, Homo sapiens
  misc_RNA (1)...(19): siRNA sense strand
ugaagaagaacauggaaca

SEQ ID NO: 2228522 - RNA, 19 nt, Homo sapiens
  misc_RNA (1)...(19): siRNA sense strand
gacaagaagcagaggaacu

SEQ ID NO: 2228523 - RNA, 19 nt, Homo sapiens
  misc_RNA (1)...(19): siRNA sense strand
uggaacaggccaagcgcaa

SEQ ID NO: 2228524 - RNA, 19 nt, Homo sapiens
  misc_RNA (1)...(19): siRNA sense strand
ccaucaugcacuuuggaaa

SEQ ID NO: 2228525 - RNA, 19 nt, Homo sapiens
  misc_RNA (1)...(19): siRNA sense strand
agacggaggaggacaggaa

SEQ ID NO: 2228526 - RNA, 19 nt, Homo sapiens
  misc_RNA (1)...(19): siRNA sense strand
agaccuaucuucuggaaaa

SEQ ID NO: 2228527 - RNA, 19 nt, Homo sapiens
  misc_RNA (1)...(19): siRNA sense strand
gugcagaaagagagaagga

SEQ ID NO: 2228528 - RNA, 19 nt, Homo sapiens
  misc_RNA (1)...(19): siRNA sense strand
ucgaggagcuggaggagga

SEQ ID NO: 2228529 - RNA, 19 nt, Homo sapiens
  misc_RNA (1)...(19): siRNA sense strand
ccgugcagaucgagaugaa

SEQ ID NO: 2228530 - RNA, 19 nt, Homo sapiens
  misc_RNA (1)...(19): siRNA sense strand
ggaccaaguaugagacgga

SEQ ID NO: 2228531 - RNA, 19 nt, Homo sapiens
  misc_RNA (1)...(19): siRNA sense strand
gcaucauggaccuggagaa

SEQ ID NO: 2228532 - RNA, 19 nt, Homo sapiens
  misc_RNA (1)...(19): siRNA sense strand
gagaaggagaagagcgagu

SEQ ID NO: 2228533 - RNA, 19 nt, Homo sapiens
  misc_RNA (1)...(19): siRNA sense strand
agcugaaagcagagagaga

SEQ ID NO: 2228534 - RNA, 19 nt, Homo sapiens
  misc_RNA (1)...(19): siRNA sense strand
gaaagcagcuggaggccga

SEQ ID NO: 2228535 - RNA, 19 nt, Homo sapiens
  misc_RNA (1)...(19): siRNA sense strand
aagaauuggcccuggauga

SEQ ID NO: 2228536 - RNA, 19 nt, Homo sapiens
  misc_RNA (1)...(19): siRNA sense strand
ccgagaagauggagcugca

SEQ ID NO: 2228537 - RNA, 19 nt, Homo sapiens
  misc_RNA (1)...(19): siRNA sense strand
aggcaguguaugagaggau

SEQ ID NO: 2228538 - RNA, 19 nt, Homo sapiens
  misc_RNA (1)...(19): siRNA sense strand
uggagaaggagaagagcga

SEQ ID NO: 2228539 - RNA, 19 nt, Homo sapiens
  misc_RNA (1)...(19): siRNA sense strand
aggagaagagcgaguucaa

SEQ ID NO: 2228540 - RNA, 19 nt, Homo sapiens
  misc_RNA (1)...(19): siRNA sense strand
gugaaggagaugaacgaga

SEQ ID NO: 2228541 - RNA, 19 nt, Homo sapiens
  misc_RNA (1)...(19): siRNA sense strand
ucaucaaccagaagaagaa

SEQ ID NO: 2228542 - RNA, 19 nt, Homo sapiens
  misc_RNA (1)...(19): siRNA sense strand
aaguggagaaggagaaaca

SEQ ID NO: 2228543 - RNA, 19 nt, Homo sapiens
  misc_RNA (1)...(19): siRNA sense strand
ccuuggaagaccagaugaa

SEQ ID NO: 2228544 - RNA, 19 nt, Homo sapiens
  misc_RNA (1)...(19): siRNA sense strand
cccuggagcaagagaagaa

SEQ ID NO: 2228545 - RNA, 19 nt, Homo sapiens
  misc_RNA (1)...(19): siRNA sense strand
ccgaguggaagcagaagua

SEQ ID NO: 2228546 - RNA, 19 nt, Homo sapiens
  misc_RNA (1)...(19): siRNA sense strand
aggccgagcagaagcgcaa

SEQ ID NO: 2228547 - RNA, 19 nt, Homo sapiens
  misc_RNA (1)...(19): siRNA sense strand
agacagugaccgugaagga

SEQ ID NO: 2228548 - RNA, 19 nt, Homo sapiens
  misc_RNA (1)...(19): siRNA sense strand
aggccgaguuccagaagau

SEQ ID NO: 2228549 - RNA, 19 nt, Homo sapiens
  misc_RNA (1)...(19): siRNA sense strand
agcuggaggaggagguuaa

SEQ ID NO: 2228550 - RNA, 19 nt, Homo sapiens
  misc_RNA (1)...(19): siRNA sense strand
gugaagaagaagauggaag

SEQ ID NO: 2228551 - RNA, 19 nt, Homo sapiens
  misc_RNA (1)...(19): siRNA sense strand
cagaagaagaagauggaug

SEQ ID NO: 2228552 - RNA, 19 nt, Homo sapiens
  misc_RNA (1)...(19): siRNA sense strand
uggccaaggcaguguauga

SEQ ID NO: 2228553 - RNA, 19 nt, Homo sapiens
  misc_RNA (1)...(19): siRNA sense strand
gcaacagagaacaagguga

SEQ ID NO: 2228554 - RNA, 19 nt, Homo sapiens
  misc_RNA (1)...(19): siRNA sense strand
aggacgaggagauggaaca

SEQ ID NO: 2228555 - RNA, 19 nt, Homo sapiens
  misc_RNA (1)...(19): siRNA sense strand
augcugacagacagagaaa

SEQ ID NO: 2228556 - RNA, 19 nt, Homo sapiens
  misc_RNA (1)...(19): siRNA sense strand
gugcagaucgagaugaaca

SEQ ID NO: 2228557 - RNA, 19 nt, Homo sapiens
  misc_RNA (1)...(19): siRNA sense strand
acggagaagagaaggacua

SEQ ID NO: 2228558 - RNA, 19 nt, Homo sapiens
  misc_RNA (1)...(19): siRNA sense strand
gggagaaacuuaagggagc

SEQ ID NO: 2228559 - RNA, 19 nt, Homo sapiens
  misc_RNA (1)...(19): siRNA sense strand
aagaacgaucugagagaca

SEQ ID NO: 2228560 - RNA, 19 nt, Homo sapiens
  misc_RNA (1)...(19): siRNA sense strand
uguuugacccugaaggcaa

SEQ ID NO: 2228561 - RNA, 19 nt, Homo sapiens
  misc_RNA (1)...(19): siRNA sense strand
uuuccaaggaggagguuga

SEQ ID NO: 2228562 - RNA, 19 nt, Homo sapiens
  misc_RNA (1)...(19): siRNA sense strand
ccaaggaggagguugacca

SEQ ID NO: 2228563 - RNA, 19 nt, Homo sapiens
  misc_RNA (1)...(19): siRNA sense strand
gggaaaugcugaccacgca

SEQ ID NO: 2228564 - RNA, 19 nt, Homo sapiens
  misc_RNA (1)...(19): siRNA sense strand
ccaagaaggaugaugccaa

SEQ ID NO: 2228565 - RNA, 19 nt, Homo sapiens
  misc_RNA (1)...(19): siRNA sense strand
ugacagaagacgaagugga

SEQ ID NO: 2228566 - RNA, 19 nt, Homo sapiens
  misc_RNA (1)...(19): siRNA sense strand
ucuucgacaaggagggcaa

SEQ ID NO: 2228567 - RNA, 19 nt, Homo sapiens
  misc_RNA (1)...(19): siRNA sense strand
gaaguugauggcugggcaa

SEQ ID NO: 2228568 - RNA, 19 nt, Homo sapiens
  misc_RNA (1)...(19): siRNA sense strand
cacccaagugugagaugaa

SEQ ID NO: 2228569 - RNA, 19 nt, Homo sapiens
  misc_RNA (1)...(19): siRNA sense strand
aggcagaagugcuccgugu

SEQ ID NO: 2228570 - RNA, 19 nt, Homo sapiens
  misc_RNA (1)...(19): siRNA sense strand
ggggaagccaagacaggaa

SEQ ID NO: 2228571 - RNA, 19 nt, Homo sapiens
  misc_RNA (1)...(19): siRNA sense strand
gaagaagcgacuaaggcaa

SEQ ID NO: 2228572 - RNA, 19 nt, Homo sapiens
  misc_RNA (1)...(19): siRNA sense strand
gugaaggcugagaaggaaa

SEQ ID NO: 2228573 - RNA, 19 nt, Homo sapiens
  misc_RNA (1)...(19): siRNA sense strand
gcgacuaaggcaagaaaau

SEQ ID NO: 2228574 - RNA, 19 nt, Homo sapiens
  misc_RNA (1)...(19): siRNA sense strand
aggaagagaagaagcgacu

SEQ ID NO: 2228575 - RNA, 19 nt, Homo sapiens
  misc_RNA (1)...(19): siRNA sense strand
cagaaacaauuacuggcaa

SEQ ID NO: 2228576 - RNA, 19 nt, Homo sapiens
  misc_RNA (1)...(19): siRNA sense strand
cgcuauaaguacagcagca

SEQ ID NO: 2228577 - RNA, 19 nt, Homo sapiens
  misc_RNA (1)...(19): siRNA sense strand
gcuuagaccuggaggccac

SEQ ID NO: 2228578 - RNA, 19 nt, Homo sapiens
  misc_RNA (1)...(19): siRNA sense strand
cugccuaggccacuggaaa

SEQ ID NO: 2228579 - RNA, 19 nt, Homo sapiens
  misc_RNA (1)...(19): siRNA sense strand
ccgagacagugaaggcuga

SEQ ID NO: 2228580 - RNA, 19 nt, Homo sapiens
  misc_RNA (1)...(19): siRNA sense strand
agacaccggauguggagaa

SEQ ID NO: 2228581 - RNA, 19 nt, Homo sapiens
  misc_RNA (1)...(19): siRNA sense strand
gaagcaggccucuggguca

SEQ ID NO: 2228582 - RNA, 19 nt, Homo sapiens
  misc_RNA (1)...(19): siRNA sense strand
gccaguuuaugcagggcua

SEQ ID NO: 2228583 - RNA, 19 nt, Homo sapiens
  misc_RNA (1)...(19): siRNA sense strand
gauaugagcugaauaccga

SEQ ID NO: 2228584 - RNA, 19 nt, Homo sapiens
  misc_RNA (1)...(19): siRNA sense strand
cgacacaguuggcacggau

SEQ ID NO: 2228585 - RNA, 19 nt, Homo sapiens
  misc_RNA (1)...(19): siRNA sense strand
cagaacugucauaagauau

SEQ ID NO: 2228586 - RNA, 19 nt, Homo sapiens
  misc_RNA (1)...(19): siRNA sense strand
agacagugaaggcugagaa

SEQ ID NO: 2228587 - RNA, 19 nt, Homo sapiens
  misc_RNA (1)...(19): siRNA sense strand
gggaccagcuggaaaccca

SEQ ID NO: 2228588 - RNA, 19 nt, Homo sapiens
  misc_RNA (1)...(19): siRNA sense strand
ccagagaguuggagacugc

SEQ ID NO: 2228589 - RNA, 19 nt, Homo sapiens
  misc_RNA (1)...(19): siRNA sense strand
caggauggauggcgggaca

SEQ ID NO: 2228590 - RNA, 19 nt, Homo sapiens
  misc_RNA (1)...(19): siRNA sense strand
ggaagguagacaugcucaa

SEQ ID NO: 2228591 - RNA, 19 nt, Homo sapiens
  misc_RNA (1)...(19): siRNA sense strand
ccaucaagaaccuggagau

SEQ ID NO: 2228592 - RNA, 19 nt, Homo sapiens
  misc_RNA (1)...(19): siRNA sense strand
gaacagcucuucauggaga

SEQ ID NO: 2228593 - RNA, 19 nt, Homo sapiens
  misc_RNA (1)...(19): siRNA sense strand
ugaauugguucguggagca

SEQ ID NO: 2228594 - RNA, 19 nt, Homo sapiens
  misc_RNA (1)...(19): siRNA sense strand
gcaggauucacaaggaaaa

SEQ ID NO: 2228595 - RNA, 19 nt, Homo sapiens
  misc_RNA (1)...(19): siRNA sense strand
agaccuucgccgaguggaa

SEQ ID NO: 2228596 - RNA, 19 nt, Homo sapiens
  misc_RNA (1)...(19): siRNA sense strand
cgcaggauucacaaggaaa

SEQ ID NO: 2228597 - RNA, 19 nt, Homo sapiens
  misc_RNA (1)...(19): siRNA sense strand
cugcauaagugaacagcuc

SEQ ID NO: 2228598 - RNA, 19 nt, Homo sapiens
  misc_RNA (1)...(19): siRNA sense strand
gcauaagugaacagcucuu

SEQ ID NO: 2228599 - RNA, 19 nt, Homo sapiens
  misc_RNA (1)...(19): siRNA sense strand
uggucucagcuuagagcaa

SEQ ID NO: 2228600 - RNA, 19 nt, Homo sapiens
  misc_RNA (1)...(19): siRNA sense strand
ucguggagcaccaggacau

SEQ ID NO: 2228601 - RNA, 19 nt, Homo sapiens
  misc_RNA (1)...(19): siRNA sense strand
gguggaaguuggaggacga

SEQ ID NO: 2228602 - RNA, 19 nt, Homo sapiens
  misc_RNA (1)...(19): siRNA sense strand
cgguaguagugguguucaa

SEQ ID NO: 2228603 - RNA, 19 nt, Homo sapiens
  misc_RNA (1)...(19): siRNA sense strand
ggacauauguggagguggu

SEQ ID NO: 2228604 - RNA, 19 nt, Homo sapiens
  misc_RNA (1)...(19): siRNA sense strand
cagugaaacaggacagaau

SEQ ID NO: 2228605 - RNA, 19 nt, Homo sapiens
  misc_RNA (1)...(19): siRNA sense strand
cggugugagaggagggauu

SEQ ID NO: 2228606 - RNA, 19 nt, Homo sapiens
  misc_RNA (1)...(19): siRNA sense strand
uuacaaaucaggagagcuu

SEQ ID NO: 2228607 - RNA, 19 nt, Homo sapiens
  misc_RNA (1)...(19): siRNA sense strand
ccuggaagaguuaaagaaa

SEQ ID NO: 2228608 - RNA, 19 nt, Homo sapiens
  misc_RNA (1)...(19): siRNA sense strand
ucgggaaaccagagaauau

SEQ ID NO: 2228609 - RNA, 19 nt, Homo sapiens
  misc_RNA (1)...(19): siRNA sense strand
ggacauuguaccucgggaa

SEQ ID NO: 2228610 - RNA, 19 nt, Homo sapiens
  misc_RNA (1)...(19): siRNA sense strand
cauucuggcccuagcaaua

SEQ ID NO: 2228611 - RNA, 19 nt, Homo sapiens
  misc_RNA (1)...(19): siRNA sense strand
cuggaagaguuaaagaaaa

SEQ ID NO: 2228612 - RNA, 19 nt, Homo sapiens
  misc_RNA (1)...(19): siRNA sense strand
ccaagguaguggugaucuu

SEQ ID NO: 2228613 - RNA, 19 nt, Homo sapiens
  misc_RNA (1)...(19): siRNA sense strand
ucaacuggaacgaggacaa

SEQ ID NO: 2228614 - RNA, 19 nt, Homo sapiens
  misc_RNA (1)...(19): siRNA sense strand
aagccaagguaguggugau

SEQ ID NO: 2228615 - RNA, 19 nt, Homo sapiens
  misc_RNA (1)...(19): siRNA sense strand
cagacuuuguggaggcaau

SEQ ID NO: 2228616 - RNA, 19 nt, Homo sapiens
  misc_RNA (1)...(19): siRNA sense strand
gaaauuacagucugggaca

SEQ ID NO: 2228617 - RNA, 19 nt, Homo sapiens
  misc_RNA (1)...(19): siRNA sense strand
ggacaaagcggcagccauc

SEQ ID NO: 2228618 - RNA, 19 nt, Homo sapiens
  misc_RNA (1)...(19): siRNA sense strand
gagacuggcuucagggacu

SEQ ID NO: 2228619 - RNA, 19 nt, Homo sapiens
  misc_RNA (1)...(19): siRNA sense strand
guuacauggaucagauaau

SEQ ID NO: 2228620 - RNA, 19 nt, Homo sapiens
  misc_RNA (1)...(19): siRNA sense strand
uggcuuauccagaaaguau

SEQ ID NO: 2228621 - RNA, 19 nt, Homo sapiens
  misc_RNA (1)...(19): siRNA sense strand
ccuacaaacuccuggugca

SEQ ID NO: 2228622 - RNA, 19 nt, Homo sapiens
  misc_RNA (1)...(19): siRNA sense strand
gaguauaguucccagacga

SEQ ID NO: 2228623 - RNA, 19 nt, Homo sapiens
  misc_RNA (1)...(19): siRNA sense strand
caagaacagcacuggaaaa

SEQ ID NO: 2228624 - RNA, 19 nt, Homo sapiens
  misc_RNA (1)...(19): siRNA sense strand
ugacuuuauugcugcacaa

SEQ ID NO: 2228625 - RNA, 19 nt, Homo sapiens
  misc_RNA (1)...(19): siRNA sense strand
ccucgggaaaccagagaau

SEQ ID NO: 2228626 - RNA, 19 nt, Homo sapiens
  misc_RNA (1)...(19): siRNA sense strand
ccagaagauuggagaagag

SEQ ID NO: 2228627 - RNA, 19 nt, Homo sapiens
  misc_RNA (1)...(19): siRNA sense strand
agaccauguuccaguuaau

SEQ ID NO: 2228628 - RNA, 19 nt, Homo sapiens
  misc_RNA (1)...(19): siRNA sense strand
cugaaacaaggcugagaau

SEQ ID NO: 2228629 - RNA, 19 nt, Homo sapiens
  misc_RNA (1)...(19): siRNA sense strand
cggucgagcuguucggcau

SEQ ID NO: 2228630 - RNA, 19 nt, Homo sapiens
  misc_RNA (1)...(19): siRNA sense strand
cuaaagaagaaggugcuaa

SEQ ID NO: 2228631 - RNA, 19 nt, Homo sapiens
  misc_RNA (1)...(19): siRNA sense strand
agaccaacguggaggagcu

SEQ ID NO: 2228632 - RNA, 19 nt, Homo sapiens
  misc_RNA (1)...(19): siRNA sense strand
ccuccuuugcgguggacaa

SEQ ID NO: 2228633 - RNA, 19 nt, Homo sapiens
  misc_RNA (1)...(19): siRNA sense strand
auucgaagguggaagucau

SEQ ID NO: 2228634 - RNA, 19 nt, Homo sapiens
  misc_RNA (1)...(19): siRNA sense strand
uacaacaggcaguggaaau

SEQ ID NO: 2228635 - RNA, 19 nt, Homo sapiens
  misc_RNA (1)...(19): siRNA sense strand
gggcuggaccuuacggaca

SEQ ID NO: 2228636 - RNA, 19 nt, Homo sapiens
  misc_RNA (1)...(19): siRNA sense strand
caagaauggaucagacgau

SEQ ID NO: 2228637 - RNA, 19 nt, Homo sapiens
  misc_RNA (1)...(19): siRNA sense strand
agauuggagaagaggcuau

SEQ ID NO: 2228638 - RNA, 19 nt, Homo sapiens
  misc_RNA (1)...(19): siRNA sense strand
ugacugggaaaccgggaaa

SEQ ID NO: 2228639 - RNA, 19 nt, Homo sapiens
  misc_RNA (1)...(19): siRNA sense strand
ccgggaaaaucaugccaaa

SEQ ID NO: 2228640 - RNA, 19 nt, Homo sapiens
  misc_RNA (1)...(19): siRNA sense strand
cuacaaacuccuggugcaa

SEQ ID NO: 2228641 - RNA, 19 nt, Homo sapiens
  misc_RNA (1)...(19): siRNA sense strand
agaauggguccacgacaaa

SEQ ID NO: 2228642 - RNA, 19 nt, Homo sapiens
  misc_RNA (1)...(19): siRNA sense strand
aguaugucauguuggaaga

SEQ ID NO: 2228643 - RNA, 19 nt, Homo sapiens
  misc_RNA (1)...(19): siRNA sense strand
gggaaaaucaugccaaaca

SEQ ID NO: 2228644 - RNA, 19 nt, Homo sapiens
  misc_RNA (1)...(19): siRNA sense strand
acaucagccaguugacuaa

SEQ ID NO: 2228645 - RNA, 19 nt, Homo sapiens
  misc_RNA (1)...(19): siRNA sense strand
acaaaucaggagagcuuau

SEQ ID NO: 2228646 - RNA, 19 nt, Homo sapiens
  misc_RNA (1)...(19): siRNA sense strand
gguuacauggaucagauaa

SEQ ID NO: 2228647 - RNA, 19 nt, Homo sapiens
  misc_RNA (1)...(19): siRNA sense strand
cagcgguaguagugguguu

SEQ ID NO: 2228648 - RNA, 19 nt, Homo sapiens
  misc_RNA (1)...(19): siRNA sense strand
acuucgacccuuuggaauu

SEQ ID NO: 2228649 - RNA, 19 nt, Homo sapiens
  misc_RNA (1)...(19): siRNA sense strand
agugaaacaggacagaaua

SEQ ID NO: 2228650 - RNA, 19 nt, Homo sapiens
  misc_RNA (1)...(19): siRNA sense strand
aagcagacuacccgaauau

SEQ ID NO: 2228651 - RNA, 19 nt, Homo sapiens
  misc_RNA (1)...(19): siRNA sense strand
ggaagaaaacaaacagcuu

SEQ ID NO: 2228652 - RNA, 19 nt, Homo sapiens
  misc_RNA (1)...(19): siRNA sense strand
gcauaggaguggaguucac

SEQ ID NO: 2228653 - RNA, 19 nt, Homo sapiens
  misc_RNA (1)...(19): siRNA sense strand
cugcacuacuucagagacu

SEQ ID NO: 2228654 - RNA, 19 nt, Homo sapiens
  misc_RNA (1)...(19): siRNA sense strand
ccugaaacaaggcugagaa

SEQ ID NO: 2228655 - RNA, 19 nt, Homo sapiens
  misc_RNA (1)...(19): siRNA sense strand
uggacagcugggaggaaau

SEQ ID NO: 2228656 - RNA, 19 nt, Homo sapiens
  misc_RNA (1)...(19): siRNA sense strand
gcugaauaaggcugagguu

SEQ ID NO: 2228657 - RNA, 19 nt, Homo sapiens
  misc_RNA (1)...(19): siRNA sense strand
cagcagagugauucagguu

SEQ ID NO: 2228658 - RNA, 19 nt, Homo sapiens
  misc_RNA (1)...(19): siRNA sense strand
ccaaaauguggcugcacua

SEQ ID NO: 2228659 - RNA, 19 nt, Homo sapiens
  misc_RNA (1)...(19): siRNA sense strand
ccacagacaaccagacaaa

SEQ ID NO: 2228660 - RNA, 19 nt, Homo sapiens
  misc_RNA (1)...(19): siRNA sense strand
cggaagacccugagcccaa

SEQ ID NO: 2228661 - RNA, 19 nt, Homo sapiens
  misc_RNA (1)...(19): siRNA sense strand
gagaagagcgagagcgguu

SEQ ID NO: 2228662 - RNA, 19 nt, Homo sapiens
  misc_RNA (1)...(19): siRNA sense strand
agacauacuugaugcccaa

SEQ ID NO: 2228663 - RNA, 19 nt, Homo sapiens
  misc_RNA (1)...(19): siRNA sense strand
caacuaugcaggugagcca

SEQ ID NO: 2228664 - RNA, 19 nt, Homo sapiens
  misc_RNA (1)...(19): siRNA sense strand
uggcaagaguaccgcgaca

SEQ ID NO: 2228665 - RNA, 19 nt, Homo sapiens
  misc_RNA (1)...(19): siRNA sense strand
gcgagagcaccaagcggaa

SEQ ID NO: 2228666 - RNA, 19 nt, Homo sapiens
  misc_RNA (1)...(19): siRNA sense strand
ugucggagaagguggucua

SEQ ID NO: 2228667 - RNA, 19 nt, Homo sapiens
  misc_RNA (1)...(19): siRNA sense strand
uguacauguuccuggugaa

SEQ ID NO: 2228668 - RNA, 19 nt, Homo sapiens
  misc_RNA (1)...(19): siRNA sense strand
ccaagugguuugacgggca

SEQ ID NO: 2228669 - RNA, 19 nt, Homo sapiens
  misc_RNA (1)...(19): siRNA sense strand
agaucuacgaguuccauaa

SEQ ID NO: 2228670 - RNA, 19 nt, Homo sapiens
  misc_RNA (1)...(19): siRNA sense strand
gagacauacuugaugccca

SEQ ID NO: 2228671 - RNA, 19 nt, Homo sapiens
  misc_RNA (1)...(19): siRNA sense strand
cgaucaauccagagaacag

SEQ ID NO: 2228672 - RNA, 19 nt, Homo sapiens
  misc_RNA (1)...(19): siRNA sense strand
gcaaagggaaggugggcau

SEQ ID NO: 2228673 - RNA, 19 nt, Homo sapiens
  misc_RNA (1)...(19): siRNA sense strand
acuaccagacagagaaaua

SEQ ID NO: 2228674 - RNA, 19 nt, Homo sapiens
  misc_RNA (1)...(19): siRNA sense strand
gugagaacacaguggguga

SEQ ID NO: 2228675 - RNA, 19 nt, Homo sapiens
  misc_RNA (1)...(19): siRNA sense strand
cggacaagaaggacuggaa

SEQ ID NO: 2228676 - RNA, 19 nt, Homo sapiens
  misc_RNA (1)...(19): siRNA sense strand
uggugaucccugugggcaa

SEQ ID NO: 2228677 - RNA, 19 nt, Homo sapiens
  misc_RNA (1)...(19): siRNA sense strand
aagaaggaggaauggaaaa

SEQ ID NO: 2228678 - RNA, 19 nt, Homo sapiens
  misc_RNA (1)...(19): siRNA sense strand
agacaguuucucuggguuu

SEQ ID NO: 2228679 - RNA, 19 nt, Homo sapiens
  misc_RNA (1)...(19): siRNA sense strand
ccagaagcauuaaccgaga

SEQ ID NO: 2228680 - RNA, 19 nt, Homo sapiens
  misc_RNA (1)...(19): siRNA sense strand
gcugaagaacaguuagcau

SEQ ID NO: 2228681 - RNA, 19 nt, Homo sapiens
  misc_RNA (1)...(19): siRNA sense strand
gaacaugacugaagcagag

SEQ ID NO: 2228682 - RNA, 19 nt, Homo sapiens
  misc_RNA (1)...(19): siRNA sense strand
gcuuaagaaaggcagccaa

SEQ ID NO: 2228683 - RNA, 19 nt, Homo sapiens
  misc_RNA (1)...(19): siRNA sense strand
cuacuaccagacagagaaa

SEQ ID NO: 2228684 - RNA, 19 nt, Homo sapiens
  misc_RNA (1)...(19): siRNA sense strand
gauucagcuucgagggaac

SEQ ID NO: 2228685 - RNA, 19 nt, Homo sapiens
  misc_RNA (1)...(19): siRNA sense strand
ccagagaucuucagggcuc

SEQ ID NO: 2228686 - RNA, 19 nt, Homo sapiens
  misc_RNA (1)...(19): siRNA sense strand
agacaaaagaagagcucca

SEQ ID NO: 2228687 - RNA, 19 nt, Homo sapiens
  misc_RNA (1)...(19): siRNA sense strand
cuaucaaagaccuuaaaga

SEQ ID NO: 2228688 - RNA, 19 nt, Homo sapiens
  misc_RNA (1)...(19): siRNA sense strand
gcagaagcuauaugagcca

SEQ ID NO: 2228689 - RNA, 19 nt, Homo sapiens
  misc_RNA (1)...(19): siRNA sense strand
gcaacuaccuugaaccagu

SEQ ID NO: 2228690 - RNA, 19 nt, Homo sapiens
  misc_RNA (1)...(19): siRNA sense strand
gaggaaagcucuccgcagu

SEQ ID NO: 2228691 - RNA, 19 nt, Homo sapiens
  misc_RNA (1)...(19): siRNA sense strand
cgaccaaaugagagacaag

SEQ ID NO: 2228692 - RNA, 19 nt, Homo sapiens
  misc_RNA (1)...(19): siRNA sense strand
guuucgaccaaaugagaga

SEQ ID NO: 2228693 - RNA, 19 nt, Homo sapiens
  misc_RNA (1)...(19): siRNA sense strand
cuacagauuuggaaagcac

SEQ ID NO: 2228694 - RNA, 19 nt, Homo sapiens
  misc_RNA (1)...(19): siRNA sense strand
agaacaugacugaagcaga

SEQ ID NO: 2228695 - RNA, 19 nt, Homo sapiens
  misc_RNA (1)...(19): siRNA sense strand
uguuaucaaaggugaauga

SEQ ID NO: 2228696 - RNA, 19 nt, Homo sapiens
  misc_RNA (1)...(19): siRNA sense strand
cagcuggccaagaaggauu

SEQ ID NO: 2228697 - RNA, 19 nt, Homo sapiens
  misc_RNA (1)...(19): siRNA sense strand
agaaggauuaccuaggcaa

SEQ ID NO: 2228698 - RNA, 19 nt, Homo sapiens
  misc_RNA (1)...(19): siRNA sense strand
cgauggagugugucuggaa

SEQ ID NO: 2228699 - RNA, 19 nt, Homo sapiens
  misc_RNA (1)...(19): siRNA sense strand
uauaugagccaguggugau

SEQ ID NO: 2228700 - RNA, 19 nt, Homo sapiens
  misc_RNA (1)...(19): siRNA sense strand
uagcauuggccacgagcau

SEQ ID NO: 2228701 - RNA, 19 nt, Homo sapiens
  misc_RNA (1)...(19): siRNA sense strand
gcucaaagauggugcuccu

SEQ ID NO: 2228702 - RNA, 19 nt, Homo sapiens
  misc_RNA (1)...(19): siRNA sense strand
ugauaaugggagauacaga

SEQ ID NO: 2228703 - RNA, 19 nt, Homo sapiens
  misc_RNA (1)...(19): siRNA sense strand
cagcauggauggagaggag

SEQ ID NO: 2228704 - RNA, 19 nt, Homo sapiens
  misc_RNA (1)...(19): siRNA sense strand
cuaugaugccugugauaca

SEQ ID NO: 2228705 - RNA, 19 nt, Homo sapiens
  misc_RNA (1)...(19): siRNA sense strand
cgauguugagacaggagua

SEQ ID NO: 2228706 - RNA, 19 nt, Homo sapiens
  misc_RNA (1)...(19): siRNA sense strand
ggagcaaggaugauggugu

SEQ ID NO: 2228707 - RNA, 19 nt, Homo sapiens
  misc_RNA (1)...(19): siRNA sense strand
ugguauggagcaaggauga

SEQ ID NO: 2228708 - RNA, 19 nt, Homo sapiens
  misc_RNA (1)...(19): siRNA sense strand
uguugagacaggaguagua

SEQ ID NO: 2228709 - RNA, 19 nt, Homo sapiens
  misc_RNA (1)...(19): siRNA sense strand
gagaaaggccggaaccacu

SEQ ID NO: 2228710 - RNA, 19 nt, Homo sapiens
  misc_RNA (1)...(19): siRNA sense strand
gcauggauggagaggagca

SEQ ID NO: 2228711 - RNA, 19 nt, Homo sapiens
  misc_RNA (1)...(19): siRNA sense strand
ggaaagagacaguccagcu

SEQ ID NO: 2228712 - RNA, 19 nt, Homo sapiens
  misc_RNA (1)...(19): siRNA sense strand
ugaagaaaccagugaagaa

SEQ ID NO: 2228713 - RNA, 19 nt, Homo sapiens
  misc_RNA (1)...(19): siRNA sense strand
agaacaaaccauagcuaua

SEQ ID NO: 2228714 - RNA, 19 nt, Homo sapiens
  misc_RNA (1)...(19): siRNA sense strand
ggaacaagcaacaaagcua

SEQ ID NO: 2228715 - RNA, 19 nt, Homo sapiens
  misc_RNA (1)...(19): siRNA sense strand
gaggcaugcaugagagaua

SEQ ID NO: 2228716 - RNA, 19 nt, Homo sapiens
  misc_RNA (1)...(19): siRNA sense strand
ccaaagguucugaaggaua

SEQ ID NO: 2228717 - RNA, 19 nt, Homo sapiens
  misc_RNA (1)...(19): siRNA sense strand
aggcaguacagcagaauua

SEQ ID NO: 2228718 - RNA, 19 nt, Homo sapiens
  misc_RNA (1)...(19): siRNA sense strand
gggaacuccucuauggaua

SEQ ID NO: 2228719 - RNA, 19 nt, Homo sapiens
  misc_RNA (1)...(19): siRNA sense strand
cagugaaguugaagaugaa

SEQ ID NO: 2228720 - RNA, 19 nt, Homo sapiens
  misc_RNA (1)...(19): siRNA sense strand
aagaagaauucaaggcuuu

SEQ ID NO: 2228721 - RNA, 19 nt, Homo sapiens
  misc_RNA (1)...(19): siRNA sense strand
aguaauagcacuaaccaaa

SEQ ID NO: 2228722 - RNA, 19 nt, Homo sapiens
  misc_RNA (1)...(19): siRNA sense strand
gcuuaguagcacagaaauu

SEQ ID NO: 2228723 - RNA, 19 nt, Homo sapiens
  misc_RNA (1)...(19): siRNA sense strand
cagcagaugaugauguaaa

SEQ ID NO: 2228724 - RNA, 19 nt, Homo sapiens
  misc_RNA (1)...(19): siRNA sense strand
cagagagccuugaggaaaa

SEQ ID NO: 2228725 - RNA, 19 nt, Homo sapiens
  misc_RNA (1)...(19): siRNA sense strand
cucaagugguugcgggaaa

SEQ ID NO: 2228726 - RNA, 19 nt, Homo sapiens
  misc_RNA (1)...(19): siRNA sense strand
uguuaaaucuggucaggua

SEQ ID NO: 2228727 - RNA, 19 nt, Homo sapiens
  misc_RNA (1)...(19): siRNA sense strand
acaaagaguuacugcuauu

SEQ ID NO: 2228728 - RNA, 19 nt, Homo sapiens
  misc_RNA (1)...(19): siRNA sense strand
gugacaaauuugaagugaa

SEQ ID NO: 2228729 - RNA, 19 nt, Homo sapiens
  misc_RNA (1)...(19): siRNA sense strand
gggaagauacacaugcaaa

SEQ ID NO: 2228730 - RNA, 19 nt, Homo sapiens
  misc_RNA (1)...(19): siRNA sense strand
gggcagauaaagcagauaa

SEQ ID NO: 2228731 - RNA, 19 nt, Homo sapiens
  misc_RNA (1)...(19): siRNA sense strand
cuucauaagugacggcaau

SEQ ID NO: 2228732 - RNA, 19 nt, Homo sapiens
  misc_RNA (1)...(19): siRNA sense strand
ggaacaaucaggagaaaau

SEQ ID NO: 2228733 - RNA, 19 nt, Homo sapiens
  misc_RNA (1)...(19): siRNA sense strand
augcaaagccauaugaaau

SEQ ID NO: 2228734 - RNA, 19 nt, Homo sapiens
  misc_RNA (1)...(19): siRNA sense strand
ucaacaaggcacagaauuu

SEQ ID NO: 2228735 - RNA, 19 nt, Homo sapiens
  misc_RNA (1)...(19): siRNA sense strand
gccaaacgacaaagaguua

SEQ ID NO: 2228736 - RNA, 19 nt, Homo sapiens
  misc_RNA (1)...(19): siRNA sense strand
gagaauauuuggagaagcu

SEQ ID NO: 2228737 - RNA, 19 nt, Homo sapiens
  misc_RNA (1)...(19): siRNA sense strand
gcagaaacugauuaugaaa

SEQ ID NO: 2228738 - RNA, 19 nt, Homo sapiens
  misc_RNA (1)...(19): siRNA sense strand
uggaauugauggaagccaa

SEQ ID NO: 2228739 - RNA, 19 nt, Homo sapiens
  misc_RNA (1)...(19): siRNA sense strand
cuaccagguuacaggaauu

SEQ ID NO: 2228740 - RNA, 19 nt, Homo sapiens
  misc_RNA (1)...(19): siRNA sense strand
cauagacuguccugggaaa

SEQ ID NO: 2228741 - RNA, 19 nt, Homo sapiens
  misc_RNA (1)...(19): siRNA sense strand
gcuuugacauccuuggaaa

SEQ ID NO: 2228742 - RNA, 19 nt, Homo sapiens
  misc_RNA (1)...(19): siRNA sense strand
aggaaguauuuauggcaau

SEQ ID NO: 2228743 - RNA, 19 nt, Homo sapiens
  misc_RNA (1)...(19): siRNA sense strand
gcaaagaagcgcuggcagu

SEQ ID NO: 2228744 - RNA, 19 nt, Homo sapiens
  misc_RNA (1)...(19): siRNA sense strand
gcauuggauugguggccua

SEQ ID NO: 2228745 - RNA, 19 nt, Homo sapiens
  misc_RNA (1)...(19): siRNA sense strand
gcaccgagucuuacauuua

SEQ ID NO: 2228746 - RNA, 19 nt, Homo sapiens
  misc_RNA (1)...(19): siRNA sense strand
gguguguaaccaugagaaa

SEQ ID NO: 2228747 - RNA, 19 nt, Homo sapiens
  misc_RNA (1)...(19): siRNA sense strand
gguccaugcaauucaaaua

SEQ ID NO: 2228748 - RNA, 19 nt, Homo sapiens
  misc_RNA (1)...(19): siRNA sense strand
ccuaaaacauagaaaguca

SEQ ID NO: 2228749 - RNA, 19 nt, Homo sapiens
  misc_RNA (1)...(19): siRNA sense strand
gugcauaauuuguuggacu

SEQ ID NO: 2228750 - RNA, 19 nt, Homo sapiens
  misc_RNA (1)...(19): siRNA sense strand
guagaaacauuuugggaga

SEQ ID NO: 2228751 - RNA, 19 nt, Homo sapiens
  misc_RNA (1)...(19): siRNA sense strand
cagaaacaguauuggcuga

SEQ ID NO: 2228752 - RNA, 19 nt, Homo sapiens
  misc_RNA (1)...(19): siRNA sense strand
gcacuugagaguugcuuaa

SEQ ID NO: 2228753 - RNA, 19 nt, Homo sapiens
  misc_RNA (1)...(19): siRNA sense strand
gaggaaguauuuauggcaa

SEQ ID NO: 2228754 - RNA, 19 nt, Homo sapiens
  misc_RNA (1)...(19): siRNA sense strand
ccgcaagccaagugcagaa

SEQ ID NO: 2228755 - RNA, 19 nt, Homo sapiens
  misc_RNA (1)...(19): siRNA sense strand
caaaggacacaaugagauu

SEQ ID NO: 2228756 - RNA, 19 nt, Homo sapiens
  misc_RNA (1)...(19): siRNA sense strand
augaagugucagugcauaa

SEQ ID NO: 2228757 - RNA, 19 nt, Homo sapiens
  misc_RNA (1)...(19): siRNA sense strand
caauaaaagcugaggugau

SEQ ID NO: 2228758 - RNA, 19 nt, Homo sapiens
  misc_RNA (1)...(19): siRNA sense strand
ggaagauacacaugcaaaa

SEQ ID NO: 2228759 - RNA, 19 nt, Homo sapiens
  misc_RNA (1)...(19): siRNA sense strand
gggcaagcuagcauugaaa

SEQ ID NO: 2228760 - RNA, 19 nt, Homo sapiens
  misc_RNA (1)...(19): siRNA sense strand
ggaaacuggcugagcacau

SEQ ID NO: 2228761 - RNA, 19 nt, Homo sapiens
  misc_RNA (1)...(19): siRNA sense strand
ccaugugaguggaggagga

SEQ ID NO: 2228762 - RNA, 19 nt, Homo sapiens
  misc_RNA (1)...(19): siRNA sense strand
ggaauugauggaagccaaa

SEQ ID NO: 2228763 - RNA, 19 nt, Homo sapiens
  misc_RNA (1)...(19): siRNA sense strand
caucaaaaccagugcaaca

SEQ ID NO: 2228764 - RNA, 19 nt, Homo sapiens
  misc_RNA (1)...(19): siRNA sense strand
uguccuuaaugguguguaa

SEQ ID NO: 2228765 - RNA, 19 nt, Homo sapiens
  misc_RNA (1)...(19): siRNA sense strand
acauagagcaugaacaaca

SEQ ID NO: 2228766 - RNA, 19 nt, Homo sapiens
  misc_RNA (1)...(19): siRNA sense strand
auggaaacucagaggauuu

SEQ ID NO: 2228767 - RNA, 19 nt, Homo sapiens
  misc_RNA (1)...(19): siRNA sense strand
cuacagaccuggagacaag

SEQ ID NO: 2228768 - RNA, 19 nt, Homo sapiens
  misc_RNA (1)...(19): siRNA sense strand
ugacacacuugcagaaaca

SEQ ID NO: 2228769 - RNA, 19 nt, Homo sapiens
  misc_RNA (1)...(19): siRNA sense strand
acuaagaaguugcuuggaa

SEQ ID NO: 2228770 - RNA, 19 nt, Homo sapiens
  misc_RNA (1)...(19): siRNA sense strand
caggaaucgacaaggagaa

SEQ ID NO: 2228771 - RNA, 19 nt, Homo sapiens
  misc_RNA (1)...(19): siRNA sense strand
cagaaaagcuauuugacuu

SEQ ID NO: 2228772 - RNA, 19 nt, Homo sapiens
  misc_RNA (1)...(19): siRNA sense strand
guauaagcccucacaacaa

SEQ ID NO: 2228773 - RNA, 19 nt, Homo sapiens
  misc_RNA (1)...(19): siRNA sense strand
gcagcaggaugcagcggaa

SEQ ID NO: 2228774 - RNA, 19 nt, Homo sapiens
  misc_RNA (1)...(19): siRNA sense strand
gggccuagcaaucgcuuua

SEQ ID NO: 2228775 - RNA, 19 nt, Homo sapiens
  misc_RNA (1)...(19): siRNA sense strand
cugaaagcaccaaacguaa

SEQ ID NO: 2228776 - RNA, 19 nt, Homo sapiens
  misc_RNA (1)...(19): siRNA sense strand
agguaaagaagcagauuuu

SEQ ID NO: 2228777 - RNA, 19 nt, Homo sapiens
  misc_RNA (1)...(19): siRNA sense strand
agguaaagaagcagauuuu

SEQ ID NO: 2228778 - RNA, 19 nt, Homo sapiens
  misc_RNA (1)...(19): siRNA sense strand
agguaaagaagcagauuuu

SEQ ID NO: 2228779 - RNA, 19 nt, Homo sapiens
  misc_RNA (1)...(19): siRNA sense strand
agguaaagaagcagauuuu

SEQ ID NO: 2228780 - RNA, 19 nt, Homo sapiens
  misc_RNA (1)...(19): siRNA sense strand
agguaaagaagcagauuuu

SEQ ID NO: 2228781 - RNA, 19 nt, Homo sapiens
  misc_RNA (1)...(19): siRNA sense strand
agguaaagaagcagauuuu

SEQ ID NO: 2228782 - RNA, 19 nt, Homo sapiens
  misc_RNA (1)...(19): siRNA sense strand
agguaaagaagcagauuuu

SEQ ID NO: 2228783 - RNA, 19 nt, Homo sapiens
  misc_RNA (1)...(19): siRNA sense strand
agguaaagaagcagauuuu

SEQ ID NO: 2228784 - RNA, 19 nt, Homo sapiens
  misc_RNA (1)...(19): siRNA sense strand
agguaaagaagcagauuuu

SEQ ID NO: 2228785 - RNA, 19 nt, Homo sapiens
  misc_RNA (1)...(19): siRNA sense strand
agguaaagaagcagauuuu

SEQ ID NO: 2228786 - RNA, 19 nt, Homo sapiens
  misc_RNA (1)...(19): siRNA sense strand
agguaaagaagcagauuuu

SEQ ID NO: 2228787 - RNA, 19 nt, Homo sapiens
  misc_RNA (1)...(19): siRNA sense strand
gggucuugugggagagauu

SEQ ID NO: 2228788 - RNA, 19 nt, Homo sapiens
  misc_RNA (1)...(19): siRNA sense strand
gaacauuauacauggcagu

SEQ ID NO: 2228789 - RNA, 19 nt, Homo sapiens
  misc_RNA (1)...(19): siRNA sense strand
cagagaaggagaucggcuu

SEQ ID NO: 2228790 - RNA, 19 nt, Homo sapiens
  misc_RNA (1)...(19): siRNA sense strand
cauacaaguuggcaggaac

SEQ ID NO: 2228791 - RNA, 19 nt, Homo sapiens
  misc_RNA (1)...(19): siRNA sense strand
auacaaguuggcaggaaca

SEQ ID NO: 2228792 - RNA, 19 nt, Homo sapiens
  misc_RNA (1)...(19): siRNA sense strand
gggucuugugggagagauu

SEQ ID NO: 2228793 - RNA, 19 nt, Homo sapiens
  misc_RNA (1)...(19): siRNA sense strand
gaacauuauacauggcagu

SEQ ID NO: 2228794 - RNA, 19 nt, Homo sapiens
  misc_RNA (1)...(19): siRNA sense strand
cagagaaggagaucggcuu

SEQ ID NO: 2228795 - RNA, 19 nt, Homo sapiens
  misc_RNA (1)...(19): siRNA sense strand
cauacaaguuggcaggaac

SEQ ID NO: 2228796 - RNA, 19 nt, Homo sapiens
  misc_RNA (1)...(19): siRNA sense strand
auacaaguuggcaggaaca

SEQ ID NO: 2228797 - RNA, 19 nt, Homo sapiens
  misc_RNA (1)...(19): siRNA sense strand
cugaagaggaugaggcaga

SEQ ID NO: 2228798 - RNA, 19 nt, Homo sapiens
  misc_RNA (1)...(19): siRNA sense strand
agaacauggccaaggguga

SEQ ID NO: 2228799 - RNA, 19 nt, Homo sapiens
  misc_RNA (1)...(19): siRNA sense strand
cugcaaggaccgagucaau

SEQ ID NO: 2228800 - RNA, 19 nt, Homo sapiens
  misc_RNA (1)...(19): siRNA sense strand
cgguaguaaugcuggagau

SEQ ID NO: 2228801 - RNA, 19 nt, Homo sapiens
  misc_RNA (1)...(19): siRNA sense strand
gcgagauuaaugaggauga

SEQ ID NO: 2228802 - RNA, 19 nt, Homo sapiens
  misc_RNA (1)...(19): siRNA sense strand
uuuguaacguggagaucaa

SEQ ID NO: 2228803 - RNA, 19 nt, Homo sapiens
  misc_RNA (1)...(19): siRNA sense strand
gugaagugaacguggacga

SEQ ID NO: 2228804 - RNA, 19 nt, Homo sapiens
  misc_RNA (1)...(19): siRNA sense strand
ccaauaaggacaugcagga

SEQ ID NO: 2228805 - RNA, 19 nt, Homo sapiens
  misc_RNA (1)...(19): siRNA sense strand
aggacaugcaggauagcaa

SEQ ID NO: 2228806 - RNA, 19 nt, Homo sapiens
  misc_RNA (1)...(19): siRNA sense strand
ggacaugcguggauggcgu

SEQ ID NO: 2228807 - RNA, 19 nt, Homo sapiens
  misc_RNA (1)...(19): siRNA sense strand
uggaugagugccugagcaa

SEQ ID NO: 2228808 - RNA, 19 nt, Homo sapiens
  misc_RNA (1)...(19): siRNA sense strand
cagagugcccagaggccaa

SEQ ID NO: 2228809 - RNA, 19 nt, Homo sapiens
  misc_RNA (1)...(19): siRNA sense strand
gcgccaaaugcguggacca

SEQ ID NO: 2228810 - RNA, 19 nt, Homo sapiens
  misc_RNA (1)...(19): siRNA sense strand
gugauaacugugaggacga

SEQ ID NO: 2228811 - RNA, 19 nt, Homo sapiens
  misc_RNA (1)...(19): siRNA sense strand
ccgcauggcagauggcuca

SEQ ID NO: 2228812 - RNA, 19 nt, Homo sapiens
  misc_RNA (1)...(19): siRNA sense strand
gggcaugugaccaggaugu

SEQ ID NO: 2228813 - RNA, 19 nt, Homo sapiens
  misc_RNA (1)...(19): siRNA sense strand
uguggaugagcuugggaaa

SEQ ID NO: 2228814 - RNA, 19 nt, Homo sapiens
  misc_RNA (1)...(19): siRNA sense strand
ccgccugccucuacgacaa

SEQ ID NO: 2228815 - RNA, 19 nt, Homo sapiens
  misc_RNA (1)...(19): siRNA sense strand
gguaguaaugcuggagauu

SEQ ID NO: 2228816 - RNA, 19 nt, Homo sapiens
  misc_RNA (1)...(19): siRNA sense strand
gccacagacuggauggaca

SEQ ID NO: 2228817 - RNA, 19 nt, Homo sapiens
  misc_RNA (1)...(19): siRNA sense strand
caggacauggcgaggagua

SEQ ID NO: 2228818 - RNA, 19 nt, Homo sapiens
  misc_RNA (1)...(19): siRNA sense strand
cugcgagauuaaugaggau

SEQ ID NO: 2228819 - RNA, 19 nt, Homo sapiens
  misc_RNA (1)...(19): siRNA sense strand
gugaggacgacguggacga

SEQ ID NO: 2228820 - RNA, 19 nt, Homo sapiens
  misc_RNA (1)...(19): siRNA sense strand
ccacuuuggcccugcucaa

SEQ ID NO: 2228821 - RNA, 19 nt, Homo sapiens
  misc_RNA (1)...(19): siRNA sense strand
cggaagcccgugugcaaau

SEQ ID NO: 2228822 - RNA, 19 nt, Homo sapiens
  misc_RNA (1)...(19): siRNA sense strand
caguagagggcauggugga

SEQ ID NO: 2228823 - RNA, 19 nt, Homo sapiens
  misc_RNA (1)...(19): siRNA sense strand
augucaaugcuguggauga

SEQ ID NO: 2228824 - RNA, 19 nt, Homo sapiens
  misc_RNA (1)...(19): siRNA sense strand
ccuauugcgagguggacau

SEQ ID NO: 2228825 - RNA, 19 nt, Homo sapiens
  misc_RNA (1)...(19): siRNA sense strand
gccgaagcgacguggauga

SEQ ID NO: 2228826 - RNA, 19 nt, Homo sapiens
  misc_RNA (1)...(19): siRNA sense strand
acaccaaugcccaggacca

SEQ ID NO: 2228827 - RNA, 19 nt, Homo sapiens
  misc_RNA (1)...(19): siRNA sense strand
caggauagcaaggaggaga

SEQ ID NO: 2228828 - RNA, 19 nt, Homo sapiens
  misc_RNA (1)...(19): siRNA sense strand
guggaugagcuugggaaau

SEQ ID NO: 2228829 - RNA, 19 nt, Homo sapiens
  misc_RNA (1)...(19): siRNA sense strand
gcuugggaaaucagccuua

SEQ ID NO: 2228830 - RNA, 19 nt, Homo sapiens
  misc_RNA (1)...(19): siRNA sense strand
gagcagacgcuguuggcau

SEQ ID NO: 2228831 - RNA, 19 nt, Homo sapiens
  misc_RNA (1)...(19): siRNA sense strand
gcuuugagacuguggcaga

SEQ ID NO: 2228832 - RNA, 19 nt, Homo sapiens
  misc_RNA (1)...(19): siRNA sense strand
ccacauguaugaaggguac

SEQ ID NO: 2228833 - RNA, 19 nt, Homo sapiens
  misc_RNA (1)...(19): siRNA sense strand
cugcacagaaauuggaaca

SEQ ID NO: 2228834 - RNA, 19 nt, Homo sapiens
  misc_RNA (1)...(19): siRNA sense strand
ugaugaaagguuuggagau

SEQ ID NO: 2228835 - RNA, 19 nt, Homo sapiens
  misc_RNA (1)...(19): siRNA sense strand
uuauaagaacacugcagaa

SEQ ID NO: 2228836 - RNA, 19 nt, Homo sapiens
  misc_RNA (1)...(19): siRNA sense strand
gggagcaacgugagcuaca

SEQ ID NO: 2228837 - RNA, 19 nt, Homo sapiens
  misc_RNA (1)...(19): siRNA sense strand
guuugagguuggagauauc

SEQ ID NO: 2228838 - RNA, 19 nt, Homo sapiens
  misc_RNA (1)...(19): siRNA sense strand
aucuuugacuacagugaaa

SEQ ID NO: 2228839 - RNA, 19 nt, Homo sapiens
  misc_RNA (1)...(19): siRNA sense strand
gggcaggguccuaggagaa

SEQ ID NO: 2228840 - RNA, 19 nt, Homo sapiens
  misc_RNA (1)...(19): siRNA sense strand
uguuaaugcaagugacaaa

SEQ ID NO: 2228841 - RNA, 19 nt, Homo sapiens
  misc_RNA (1)...(19): siRNA sense strand
ccacauaaccagagcguuc

SEQ ID NO: 2228842 - RNA, 19 nt, Homo sapiens
  misc_RNA (1)...(19): siRNA sense strand
acgaaguauugaagaugaa

SEQ ID NO: 2228843 - RNA, 19 nt, Homo sapiens
  misc_RNA (1)...(19): siRNA sense strand
cggcgcagcuggacaacua

SEQ ID NO: 2228844 - RNA, 19 nt, Homo sapiens
  misc_RNA (1)...(19): siRNA sense strand
guuacaaaccagacgaaaa

SEQ ID NO: 2228845 - RNA, 19 nt, Homo sapiens
  misc_RNA (1)...(19): siRNA sense strand
gguuagacauuaaacguca

SEQ ID NO: 2228846 - RNA, 19 nt, Homo sapiens
  misc_RNA (1)...(19): siRNA sense strand
ggggagacuucaugagauu

SEQ ID NO: 2228847 - RNA, 19 nt, Homo sapiens
  misc_RNA (1)...(19): siRNA sense strand
gguucuugacuuacaaaua

SEQ ID NO: 2228848 - RNA, 19 nt, Homo sapiens
  misc_RNA (1)...(19): siRNA sense strand
cuauaaugauacagagaag

SEQ ID NO: 2228849 - RNA, 19 nt, Homo sapiens
  misc_RNA (1)...(19): siRNA sense strand
gugacgagucuguggauga

SEQ ID NO: 2228850 - RNA, 19 nt, Homo sapiens
  misc_RNA (1)...(19): siRNA sense strand
uagcaauauuugugggugu

SEQ ID NO: 2228851 - RNA, 19 nt, Homo sapiens
  misc_RNA (1)...(19): siRNA sense strand
ggacaacuauacccgaaua

SEQ ID NO: 2228852 - RNA, 19 nt, Homo sapiens
  misc_RNA (1)...(19): siRNA sense strand
gcaucgcaguccugaacaa

SEQ ID NO: 2228853 - RNA, 19 nt, Homo sapiens
  misc_RNA (1)...(19): siRNA sense strand
cgaaaacaaaugugaaaga

SEQ ID NO: 2228854 - RNA, 19 nt, Homo sapiens
  misc_RNA (1)...(19): siRNA sense strand
ucaauaaggacaauggaca

SEQ ID NO: 2228855 - RNA, 19 nt, Homo sapiens
  misc_RNA (1)...(19): siRNA sense strand
ucgccauggucuuggucaa

SEQ ID NO: 2228856 - RNA, 19 nt, Homo sapiens
  misc_RNA (1)...(19): siRNA sense strand
acauuaaacgucaagagaa

SEQ ID NO: 2228857 - RNA, 19 nt, Homo sapiens
  misc_RNA (1)...(19): siRNA sense strand
cggcaugggcugcaacaau

SEQ ID NO: 2228858 - RNA, 19 nt, Homo sapiens
  misc_RNA (1)...(19): siRNA sense strand
ccaccaacuggauugaaua

SEQ ID NO: 2228859 - RNA, 19 nt, Homo sapiens
  misc_RNA (1)...(19): siRNA sense strand
acaaaggaacagagcgcga

SEQ ID NO: 2228860 - RNA, 19 nt, Homo sapiens
  misc_RNA (1)...(19): siRNA sense strand
uguuacagcuacugaagau

SEQ ID NO: 2228861 - RNA, 19 nt, Homo sapiens
  misc_RNA (1)...(19): siRNA sense strand
cugcuaaaggacuggauga

SEQ ID NO: 2228862 - RNA, 19 nt, Homo sapiens
  misc_RNA (1)...(19): siRNA sense strand
caccaaaaccauugccaaa

SEQ ID NO: 2228863 - RNA, 19 nt, Homo sapiens
  misc_RNA (1)...(19): siRNA sense strand
gacgaaaacaaaugugaaa

SEQ ID NO: 2228864 - RNA, 19 nt, Homo sapiens
  misc_RNA (1)...(19): siRNA sense strand
uuacaaauagccaucgaaa

SEQ ID NO: 2228865 - RNA, 19 nt, Homo sapiens
  misc_RNA (1)...(19): siRNA sense strand
acauagggccaucaguaaa

SEQ ID NO: 2228866 - RNA, 19 nt, Homo sapiens
  misc_RNA (1)...(19): siRNA sense strand
caggauucuucuuuggcaa

SEQ ID NO: 2228867 - RNA, 19 nt, Homo sapiens
  misc_RNA (1)...(19): siRNA sense strand
caguguggugcuacagaaa

SEQ ID NO: 2228868 - RNA, 19 nt, Homo sapiens
  misc_RNA (1)...(19): siRNA sense strand
agaccaauugugauagcaa

SEQ ID NO: 2228869 - RNA, 19 nt, Homo sapiens
  misc_RNA (1)...(19): siRNA sense strand
gauaugacuuagugcagga

SEQ ID NO: 2228870 - RNA, 19 nt, Homo sapiens
  misc_RNA (1)...(19): siRNA sense strand
guacaaugccugccgggau

SEQ ID NO: 2228871 - RNA, 19 nt, Homo sapiens
  misc_RNA (1)...(19): siRNA sense strand
cagauuaccuguuucguga

SEQ ID NO: 2228872 - RNA, 19 nt, Homo sapiens
  misc_RNA (1)...(19): siRNA sense strand
gugccacugaagagcgaua

SEQ ID NO: 2228873 - RNA, 19 nt, Homo sapiens
  misc_RNA (1)...(19): siRNA sense strand
ugguauggagaguguggaa

SEQ ID NO: 2228874 - RNA, 19 nt, Homo sapiens
  misc_RNA (1)...(19): siRNA sense strand
aagaugaacuaaaucguga

SEQ ID NO: 2228875 - RNA, 19 nt, Homo sapiens
  misc_RNA (1)...(19): siRNA sense strand
ggucaacauguuuggaguu

SEQ ID NO: 2228876 - RNA, 19 nt, Homo sapiens
  misc_RNA (1)...(19): siRNA sense strand
ugacaaugagacugugaca

SEQ ID NO: 2228877 - RNA, 19 nt, Homo sapiens
  misc_RNA (1)...(19): siRNA sense strand
gauuauuucgacuggguga

SEQ ID NO: 2228878 - RNA, 19 nt, Homo sapiens
  misc_RNA (1)...(19): siRNA sense strand
caucaguaaauaaagccaa

SEQ ID NO: 2228879 - RNA, 19 nt, Homo sapiens
  misc_RNA (1)...(19): siRNA sense strand
acauguagcccucgacaga

SEQ ID NO: 2228880 - RNA, 19 nt, Homo sapiens
  misc_RNA (1)...(19): siRNA sense strand
ccguauaacacgaacugca

SEQ ID NO: 2228881 - RNA, 19 nt, Homo sapiens
  misc_RNA (1)...(19): siRNA sense strand
gaacaagcguccaggccuc

SEQ ID NO: 2228882 - RNA, 19 nt, Homo sapiens
  misc_RNA (1)...(19): siRNA sense strand
ugucuuacucaguuacaua

SEQ ID NO: 2228883 - RNA, 19 nt, Homo sapiens
  misc_RNA (1)...(19): siRNA sense strand
caaaugugaaagaguuaca

SEQ ID NO: 2228884 - RNA, 19 nt, Homo sapiens
  misc_RNA (1)...(19): siRNA sense strand
gggaaacccuggaucagca

SEQ ID NO: 2228885 - RNA, 19 nt, Homo sapiens
  misc_RNA (1)...(19): siRNA sense strand
cacugaagagcgauacaaa

SEQ ID NO: 2228886 - RNA, 19 nt, Homo sapiens
  misc_RNA (1)...(19): siRNA sense strand
cggcagcuucagacacuaa

SEQ ID NO: 2228887 - RNA, 19 nt, Homo sapiens
  misc_RNA (1)...(19): siRNA sense strand
acauguucaauaaggacaa

SEQ ID NO: 2228888 - RNA, 19 nt, Homo sapiens
  misc_RNA (1)...(19): siRNA sense strand
acaaugagacugugacacu

SEQ ID NO: 2228889 - RNA, 19 nt, Homo sapiens
  misc_RNA (1)...(19): siRNA sense strand
ucaccgaaaccaugggcau

SEQ ID NO: 2228890 - RNA, 19 nt, Homo sapiens
  misc_RNA (1)...(19): siRNA sense strand
aagagguacaauugcgaau

SEQ ID NO: 2228891 - RNA, 19 nt, Homo sapiens
  misc_RNA (1)...(19): siRNA sense strand
uuauugacgcucugaagaa

SEQ ID NO: 2228892 - RNA, 19 nt, Homo sapiens
  misc_RNA (1)...(19): siRNA sense strand
gccaguaaugucaccgaaa

SEQ ID NO: 2228893 - RNA, 19 nt, Homo sapiens
  misc_RNA (1)...(19): siRNA sense strand
cuacugaagauuauguuga

SEQ ID NO: 2228894 - RNA, 19 nt, Homo sapiens
  misc_RNA (1)...(19): siRNA sense strand
gugaaagaguuacaauacu

SEQ ID NO: 2228895 - RNA, 19 nt, Homo sapiens
  misc_RNA (1)...(19): siRNA sense strand
cggacagaguuuugccaau

SEQ ID NO: 2228896 - RNA, 19 nt, Homo sapiens
  misc_RNA (1)...(19): siRNA sense strand
ggaugaggucacagcacca

SEQ ID NO: 2228897 - RNA, 19 nt, Homo sapiens
  misc_RNA (1)...(19): siRNA sense strand
ggacuggaugagaccaauu

SEQ ID NO: 2228898 - RNA, 19 nt, Homo sapiens
  misc_RNA (1)...(19): siRNA sense strand
gaacagagcgcgaacggcu

SEQ ID NO: 2228899 - RNA, 19 nt, Homo sapiens
  misc_RNA (1)...(19): siRNA sense strand
gcgcgaacggcuucuaaau

SEQ ID NO: 2228900 - RNA, 19 nt, Homo sapiens
  misc_RNA (1)...(19): siRNA sense strand
uggugaaagaggagaguua

SEQ ID NO: 2228901 - RNA, 19 nt, Homo sapiens
  misc_RNA (1)...(19): siRNA sense strand
gggcagaagaagagacuga

SEQ ID NO: 2228902 - RNA, 19 nt, Homo sapiens
  misc_RNA (1)...(19): siRNA sense strand
aggaagagaaagaggaaaa

SEQ ID NO: 2228903 - RNA, 19 nt, Homo sapiens
  misc_RNA (1)...(19): siRNA sense strand
gugacaauaagcagagaaa

SEQ ID NO: 2228904 - RNA, 19 nt, Homo sapiens
  misc_RNA (1)...(19): siRNA sense strand
gaaacaggguucagggcau

SEQ ID NO: 2228905 - RNA, 19 nt, Homo sapiens
  misc_RNA (1)...(19): siRNA sense strand
cuacugaagaagaggaaga

SEQ ID NO: 2228906 - RNA, 19 nt, Homo sapiens
  misc_RNA (1)...(19): siRNA sense strand
gggugaaaugagaaagaau

SEQ ID NO: 2228907 - RNA, 19 nt, Homo sapiens
  misc_RNA (1)...(19): siRNA sense strand
aagaagaggaagaaaguga

SEQ ID NO: 2228908 - RNA, 19 nt, Homo sapiens
  misc_RNA (1)...(19): siRNA sense strand
gacaauaagcagagaaaau

SEQ ID NO: 2228909 - RNA, 19 nt, Homo sapiens
  misc_RNA (1)...(19): siRNA sense strand
ugaagagggcagugaagaa

SEQ ID NO: 2228910 - RNA, 19 nt, Homo sapiens
  misc_RNA (1)...(19): siRNA sense strand
cuaaggaugccaaaggaaa

SEQ ID NO: 2228911 - RNA, 19 nt, Homo sapiens
  misc_RNA (1)...(19): siRNA sense strand
gccucaacuucuagugaaa

SEQ ID NO: 2228912 - RNA, 19 nt, Homo sapiens
  misc_RNA (1)...(19): siRNA sense strand
gggcagugaagaagaugua

SEQ ID NO: 2228913 - RNA, 19 nt, Homo sapiens
  misc_RNA (1)...(19): siRNA sense strand
aggaagaaagugaaaguga

SEQ ID NO: 2228914 - RNA, 19 nt, Homo sapiens
  misc_RNA (1)...(19): siRNA sense strand
ugaagaagaagaaggccaa

SEQ ID NO: 2228915 - RNA, 19 nt, Homo sapiens
  misc_RNA (1)...(19): siRNA sense strand
auguagaggcgguggauga

SEQ ID NO: 2228916 - RNA, 19 nt, Homo sapiens
  misc_RNA (1)...(19): siRNA sense strand
ccuaugacuucuuggguga

SEQ ID NO: 2228917 - RNA, 19 nt, Homo sapiens
  misc_RNA (1)...(19): siRNA sense strand
gugaagaagaagaaggcca

SEQ ID NO: 2228918 - RNA, 19 nt, Homo sapiens
  misc_RNA (1)...(19): siRNA sense strand
ggaagaagaugcagaggag

SEQ ID NO: 2228919 - RNA, 19 nt, Homo sapiens
  misc_RNA (1)...(19): siRNA sense strand
aggaggaagaggaagagaa

SEQ ID NO: 2228920 - RNA, 19 nt, Homo sapiens
  misc_RNA (1)...(19): siRNA sense strand
gccuuauagugaagaagaa

SEQ ID NO: 2228921 - RNA, 19 nt, Homo sapiens
  misc_RNA (1)...(19): siRNA sense strand
agaucagagaagagagaca

SEQ ID NO: 2228922 - RNA, 19 nt, Homo sapiens
  misc_RNA (1)...(19): siRNA sense strand
agaaagugaaagugaagau

SEQ ID NO: 2228923 - RNA, 19 nt, Homo sapiens
  misc_RNA (1)...(19): siRNA sense strand
agaggaagagaaagaggaa

SEQ ID NO: 2228924 - RNA, 19 nt, Homo sapiens
  misc_RNA (1)...(19): siRNA sense strand
cagauggagcagaaguuaa

SEQ ID NO: 2228925 - RNA, 19 nt, Homo sapiens
  misc_RNA (1)...(19): siRNA sense strand
ggaugaaacagcagaugga

SEQ ID NO: 2228926 - RNA, 19 nt, Homo sapiens
  misc_RNA (1)...(19): siRNA sense strand
ucgacaaauucuuggagau

SEQ ID NO: 2228927 - RNA, 19 nt, Homo sapiens
  misc_RNA (1)...(19): siRNA sense strand
aagaagaugcagaggagga

SEQ ID NO: 2228928 - RNA, 19 nt, Homo sapiens
  misc_RNA (1)...(19): siRNA sense strand
cagagaagagagacaaaga

SEQ ID NO: 2228929 - RNA, 19 nt, Homo sapiens
  misc_RNA (1)...(19): siRNA sense strand
gugaaagugaagauaguga

SEQ ID NO: 2228930 - RNA, 19 nt, Homo sapiens
  misc_RNA (1)...(19): siRNA sense strand
gggaggaagaagaugcaga

SEQ ID NO: 2228931 - RNA, 19 nt, Homo sapiens
  misc_RNA (1)...(19): siRNA sense strand
ggaaaaugaaucucacaaa

SEQ ID NO: 2228932 - RNA, 19 nt, Homo sapiens
  misc_RNA (1)...(19): siRNA sense strand
gcuaaggaugccaaaggaa

SEQ ID NO: 2228933 - RNA, 19 nt, Homo sapiens
  misc_RNA (1)...(19): siRNA sense strand
aguuaaagcaggcaauaga

SEQ ID NO: 2228934 - RNA, 19 nt, Homo sapiens
  misc_RNA (1)...(19): siRNA sense strand
aagugaaagugaagauagu

SEQ ID NO: 2228935 - RNA, 19 nt, Homo sapiens
  misc_RNA (1)...(19): siRNA sense strand
ucagcaaguuggagaucuu

SEQ ID NO: 2228936 - RNA, 19 nt, Homo sapiens
  misc_RNA (1)...(19): siRNA sense strand
cugaagaagaggaagaaag

SEQ ID NO: 2228937 - RNA, 19 nt, Homo sapiens
  misc_RNA (1)...(19): siRNA sense strand
ggugguacuccuuaugaaa

SEQ ID NO: 2228938 - RNA, 19 nt, Homo sapiens
  misc_RNA (1)...(19): siRNA sense strand
ugaaagacaggaugagcuu

SEQ ID NO: 2228939 - RNA, 19 nt, Homo sapiens
  misc_RNA (1)...(19): siRNA sense strand
gaaagaagcucuagaaccc

SEQ ID NO: 2228940 - RNA, 19 nt, Homo sapiens
  misc_RNA (1)...(19): siRNA sense strand
gaaaagaagaggagcauac

SEQ ID NO: 2228941 - RNA, 19 nt, Homo sapiens
  misc_RNA (1)...(19): siRNA sense strand
cugagauccuugaacagaa

SEQ ID NO: 2228942 - RNA, 19 nt, Homo sapiens
  misc_RNA (1)...(19): siRNA sense strand
agagaaaagaagaggagca

SEQ ID NO: 2228943 - RNA, 19 nt, Homo sapiens
  misc_RNA (1)...(19): siRNA sense strand
agaggaagaaagugaaagu

SEQ ID NO: 2228944 - RNA, 19 nt, Homo sapiens
  misc_RNA (1)...(19): siRNA sense strand
ugaagauagugaagacagu

SEQ ID NO: 2228945 - RNA, 19 nt, Homo sapiens
  misc_RNA (1)...(19): siRNA sense strand
uaaggaugccaaaggaaau

SEQ ID NO: 2228946 - RNA, 19 nt, Homo sapiens
  misc_RNA (1)...(19): siRNA sense strand
ccaaaggaaaugaaggucu

SEQ ID NO: 2228947 - RNA, 19 nt, Homo sapiens
  misc_RNA (1)...(19): siRNA sense strand
ggagcagaaguuaagcaaa

SEQ ID NO: 2228948 - RNA, 19 nt, Homo sapiens
  misc_RNA (1)...(19): siRNA sense strand
caccaauggaucugaaaca

SEQ ID NO: 2228949 - RNA, 19 nt, Homo sapiens
  misc_RNA (1)...(19): siRNA sense strand
aggaaugagcauacagguu

SEQ ID NO: 2228950 - RNA, 19 nt, Homo sapiens
  misc_RNA (1)...(19): siRNA sense strand
cagauuaugacaaugagaa

SEQ ID NO: 2228951 - RNA, 19 nt, Homo sapiens
  misc_RNA (1)...(19): siRNA sense strand
acugcacgguggaaaguua

SEQ ID NO: 2228952 - RNA, 19 nt, Homo sapiens
  misc_RNA (1)...(19): siRNA sense strand
gaggaagagaaagaggaaa

SEQ ID NO: 2228953 - RNA, 19 nt, Homo sapiens
  misc_RNA (1)...(19): siRNA sense strand
gcagugaagaagauguaga

SEQ ID NO: 2228954 - RNA, 19 nt, Homo sapiens
  misc_RNA (1)...(19): siRNA sense strand
gcagaagaagagacugaga

SEQ ID NO: 2228955 - RNA, 19 nt, Homo sapiens
  misc_RNA (1)...(19): siRNA sense strand
ggaaggagauccaguggga

SEQ ID NO: 2228956 - RNA, 19 nt, Homo sapiens
  misc_RNA (1)...(19): siRNA sense strand
aaggagauccagugggaau

SEQ ID NO: 2228957 - RNA, 19 nt, Homo sapiens
  misc_RNA (1)...(19): siRNA sense strand
auuuguugguugucgaaua

SEQ ID NO: 2228958 - RNA, 19 nt, Homo sapiens
  misc_RNA (1)...(19): siRNA sense strand
ggauaugaaccacacggaa

SEQ ID NO: 2228959 - RNA, 19 nt, Homo sapiens
  misc_RNA (1)...(19): siRNA sense strand
acggagaacgagaggagga

SEQ ID NO: 2228960 - RNA, 19 nt, Homo sapiens
  misc_RNA (1)...(19): siRNA sense strand
cugacgaagcccugagcau

SEQ ID NO: 2228961 - RNA, 19 nt, Homo sapiens
  misc_RNA (1)...(19): siRNA sense strand
auaugaaccacacggaaau

SEQ ID NO: 2228962 - RNA, 19 nt, Homo sapiens
  misc_RNA (1)...(19): siRNA sense strand
ugucagaacugcagccaag

SEQ ID NO: 2228963 - RNA, 19 nt, Homo sapiens
  misc_RNA (1)...(19): siRNA sense strand
ccuguaaacuagcucguaa

SEQ ID NO: 2228964 - RNA, 19 nt, Homo sapiens
  misc_RNA (1)...(19): siRNA sense strand
ggagagaggaaaagguauu

SEQ ID NO: 2228965 - RNA, 19 nt, Homo sapiens
  misc_RNA (1)...(19): siRNA sense strand
ugaagagucaaguggacaa

SEQ ID NO: 2228966 - RNA, 19 nt, Homo sapiens
  misc_RNA (1)...(19): siRNA sense strand
ugggcauuaucuugagaaa

SEQ ID NO: 2228967 - RNA, 19 nt, Homo sapiens
  misc_RNA (1)...(19): siRNA sense strand
ucuacgacuucgagauaau

SEQ ID NO: 2228968 - RNA, 19 nt, Homo sapiens
  misc_RNA (1)...(19): siRNA sense strand
ggauguagaaggcagaaaa

SEQ ID NO: 2228969 - RNA, 19 nt, Homo sapiens
  misc_RNA (1)...(19): siRNA sense strand
cugaaaaugcagacaaauu

SEQ ID NO: 2228970 - RNA, 19 nt, Homo sapiens
  misc_RNA (1)...(19): siRNA sense strand
gguauuuacuuaugggaug

SEQ ID NO: 2228971 - RNA, 19 nt, Homo sapiens
  misc_RNA (1)...(19): siRNA sense strand
gggcauucagaaauacaaa

SEQ ID NO: 2228972 - RNA, 19 nt, Homo sapiens
  misc_RNA (1)...(19): siRNA sense strand
ccuugagguuuuagaagaa

SEQ ID NO: 2228973 - RNA, 19 nt, Homo sapiens
  misc_RNA (1)...(19): siRNA sense strand
gcuauaccgugaagggcau

SEQ ID NO: 2228974 - RNA, 19 nt, Homo sapiens
  misc_RNA (1)...(19): siRNA sense strand
aguggaggcuggagagacu

SEQ ID NO: 2228975 - RNA, 19 nt, Homo sapiens
  misc_RNA (1)...(19): siRNA sense strand
gcugggaacuucuggggua

SEQ ID NO: 2228976 - RNA, 19 nt, Homo sapiens
  misc_RNA (1)...(19): siRNA sense strand
auaauggacuucuggccaa

SEQ ID NO: 2228977 - RNA, 19 nt, Homo sapiens
  misc_RNA (1)...(19): siRNA sense strand
uguagaaggcagaaaauau

SEQ ID NO: 2228978 - RNA, 19 nt, Homo sapiens
  misc_RNA (1)...(19): siRNA sense strand
auaauaacguacuugguga

SEQ ID NO: 2228979 - RNA, 19 nt, Homo sapiens
  misc_RNA (1)...(19): siRNA sense strand
gggauguagaaggcagaaa

SEQ ID NO: 2228980 - RNA, 19 nt, Homo sapiens
  misc_RNA (1)...(19): siRNA sense strand
agaaaaccuugcugaaaau

SEQ ID NO: 2228981 - RNA, 19 nt, Homo sapiens
  misc_RNA (1)...(19): siRNA sense strand
gcucguaaguggggcuaua

SEQ ID NO: 2228982 - RNA, 19 nt, Homo sapiens
  misc_RNA (1)...(19): siRNA sense strand
gggcauuaucuugagaaau

SEQ ID NO: 2228983 - RNA, 19 nt, Homo sapiens
  misc_RNA (1)...(19): siRNA sense strand
acuucgagauaauggacuu

SEQ ID NO: 2228984 - RNA, 19 nt, Homo sapiens
  misc_RNA (1)...(19): siRNA sense strand
uaauaacguacuuggugaa

SEQ ID NO: 2228985 - RNA, 19 nt, Homo sapiens
  misc_RNA (1)...(19): siRNA sense strand
uuggugaauaugaggagua

SEQ ID NO: 2228986 - RNA, 19 nt, Homo sapiens
  misc_RNA (1)...(19): siRNA sense strand
accuuaacaucuagagcuu

SEQ ID NO: 2228987 - RNA, 19 nt, Homo sapiens
  misc_RNA (1)...(19): siRNA sense strand
augaaauacagacaggauu

SEQ ID NO: 2228988 - RNA, 19 nt, Homo sapiens
  misc_RNA (1)...(19): siRNA sense strand
ucucuuuauugcugaugaa

SEQ ID NO: 2228989 - RNA, 19 nt, Homo sapiens
  misc_RNA (1)...(19): siRNA sense strand
cgcuauugucauuaaagaa

SEQ ID NO: 2228990 - RNA, 19 nt, Homo sapiens
  misc_RNA (1)...(19): siRNA sense strand
agaagaaaaccuugcugaa

SEQ ID NO: 2228991 - RNA, 19 nt, Homo sapiens
  misc_RNA (1)...(19): siRNA sense strand
ugcugaaaaugcagacaaa

SEQ ID NO: 2228992 - RNA, 19 nt, Homo sapiens
  misc_RNA (1)...(19): siRNA sense strand
uauuuaaauccgaggagaa

SEQ ID NO: 2228993 - RNA, 19 nt, Homo sapiens
  misc_RNA (1)...(19): siRNA sense strand
gugcaguggcugaaaguca

SEQ ID NO: 2228994 - RNA, 19 nt, Homo sapiens
  misc_RNA (1)...(19): siRNA sense strand
acacauguucauugggauu

SEQ ID NO: 2228995 - RNA, 19 nt, Homo sapiens
  misc_RNA (1)...(19): siRNA sense strand
aaccaagagcugaggaaga

SEQ ID NO: 2228996 - RNA, 19 nt, Homo sapiens
  misc_RNA (1)...(19): siRNA sense strand
uaauaaagauggucccaga

SEQ ID NO: 2228997 - RNA, 19 nt, Homo sapiens
  misc_RNA (1)...(19): siRNA sense strand
gagaaagggucacggugca

SEQ ID NO: 2228998 - RNA, 19 nt, Homo sapiens
  misc_RNA (1)...(19): siRNA sense strand
ccaaccaagagcugaggaa

SEQ ID NO: 2228999 - RNA, 19 nt, Homo sapiens
  misc_RNA (1)...(19): siRNA sense strand
ccuuaucaccgcuggagaa

SEQ ID NO: 2229000 - RNA, 19 nt, Homo sapiens
  misc_RNA (1)...(19): siRNA sense strand
cggcaaacgucgugugugc

SEQ ID NO: 2229001 - RNA, 19 nt, Homo sapiens
  misc_RNA (1)...(19): siRNA sense strand
agaucucacaggaggacaa

SEQ ID NO: 2229002 - RNA, 19 nt, Homo sapiens
  misc_RNA (1)...(19): siRNA sense strand
agauaauucuacacagagu

SEQ ID NO: 2229003 - RNA, 19 nt, Homo sapiens
  misc_RNA (1)...(19): siRNA sense strand
ugauggaggcauuggcaca

SEQ ID NO: 2229004 - RNA, 19 nt, Homo sapiens
  misc_RNA (1)...(19): siRNA sense strand
caucaguaccuccgcggaa

SEQ ID NO: 2229005 - RNA, 19 nt, Homo sapiens
  misc_RNA (1)...(19): siRNA sense strand
acucacaacuggacggugu

SEQ ID NO: 2229006 - RNA, 19 nt, Homo sapiens
  misc_RNA (1)...(19): siRNA sense strand
gcggaaguguagaaaccca

SEQ ID NO: 2229007 - RNA, 19 nt, Homo sapiens
  misc_RNA (1)...(19): siRNA sense strand
gggugugggccaugaucau

SEQ ID NO: 2229008 - RNA, 19 nt, Homo sapiens
  misc_RNA (1)...(19): siRNA sense strand
aauucuacacagaguggaa

SEQ ID NO: 2229009 - RNA, 19 nt, Homo sapiens
  misc_RNA (1)...(19): siRNA sense strand
ccgcggaaguguagaaacc

SEQ ID NO: 2229010 - RNA, 19 nt, Homo sapiens
  misc_RNA (1)...(19): siRNA sense strand
ggcugaaagucaugggccu

SEQ ID NO: 2229011 - RNA, 19 nt, Homo sapiens
  misc_RNA (1)...(19): siRNA sense strand
cugauuggcgcgucggcaa

SEQ ID NO: 2229012 - RNA, 19 nt, Homo sapiens
  misc_RNA (1)...(19): siRNA sense strand
uggcaaagcgagagaaaga

SEQ ID NO: 2229013 - RNA, 19 nt, Homo sapiens
  misc_RNA (1)...(19): siRNA sense strand
gggcaauaugaguuaauaa

SEQ ID NO: 2229014 - RNA, 19 nt, Homo sapiens
  misc_RNA (1)...(19): siRNA sense strand
gcuucuuguuccagagcaa

SEQ ID NO: 2229015 - RNA, 19 nt, Homo sapiens
  misc_RNA (1)...(19): siRNA sense strand
gagagaaagaauaugucaa

SEQ ID NO: 2229016 - RNA, 19 nt, Homo sapiens
  misc_RNA (1)...(19): siRNA sense strand
cgugauauugcuacagaaa

SEQ ID NO: 2229017 - RNA, 19 nt, Homo sapiens
  misc_RNA (1)...(19): siRNA sense strand
cgggagaagauaagauuga

SEQ ID NO: 2229018 - RNA, 19 nt, Homo sapiens
  misc_RNA (1)...(19): siRNA sense strand
ugaaauucgaccagcuaaa

SEQ ID NO: 2229019 - RNA, 19 nt, Homo sapiens
  misc_RNA (1)...(19): siRNA sense strand
auuccaaagccaaguauaa

SEQ ID NO: 2229020 - RNA, 19 nt, Homo sapiens
  misc_RNA (1)...(19): siRNA sense strand
ggggaaaaugggaaacaaa

SEQ ID NO: 2229021 - RNA, 19 nt, Homo sapiens
  misc_RNA (1)...(19): siRNA sense strand
cugcacacguggaggacuu

SEQ ID NO: 2229022 - RNA, 19 nt, Homo sapiens
  misc_RNA (1)...(19): siRNA sense strand
ggacuuugagagaaggaau

SEQ ID NO: 2229023 - RNA, 19 nt, Homo sapiens
  misc_RNA (1)...(19): siRNA sense strand
aguugaacaucaugaaaca

SEQ ID NO: 2229024 - RNA, 19 nt, Homo sapiens
  misc_RNA (1)...(19): siRNA sense strand
ccuggcaaagcgagagaaa

SEQ ID NO: 2229025 - RNA, 19 nt, Homo sapiens
  misc_RNA (1)...(19): siRNA sense strand
ugaaggugccagugagaga

SEQ ID NO: 2229026 - RNA, 19 nt, Homo sapiens
  misc_RNA (1)...(19): siRNA sense strand
caucauggacagaauggaa

SEQ ID NO: 2229027 - RNA, 19 nt, Homo sapiens
  misc_RNA (1)...(19): siRNA sense strand
uguucaagaagcagaagaa

SEQ ID NO: 2229028 - RNA, 19 nt, Homo sapiens
  misc_RNA (1)...(19): siRNA sense strand
cuaacaaggagcagcccaa

SEQ ID NO: 2229029 - RNA, 19 nt, Homo sapiens
  misc_RNA (1)...(19): siRNA sense strand
gggaaacaaagguggggua

SEQ ID NO: 2229030 - RNA, 19 nt, Homo sapiens
  misc_RNA (1)...(19): siRNA sense strand
uguccuugcugcucagaaa

SEQ ID NO: 2229031 - RNA, 19 nt, Homo sapiens
  misc_RNA (1)...(19): siRNA sense strand
cuucuaugaauuuggacaa

SEQ ID NO: 2229032 - RNA, 19 nt, Homo sapiens
  misc_RNA (1)...(19): siRNA sense strand
ugaccgaauucuuuggaga

SEQ ID NO: 2229033 - RNA, 19 nt, Homo sapiens
  misc_RNA (1)...(19): siRNA sense strand
gaacuggaaucauggggaa

SEQ ID NO: 2229034 - RNA, 19 nt, Homo sapiens
  misc_RNA (1)...(19): siRNA sense strand
cguggaggacuuugagaga

SEQ ID NO: 2229035 - RNA, 19 nt, Homo sapiens
  misc_RNA (1)...(19): siRNA sense strand
gggaguuuguguuugaaaa

SEQ ID NO: 2229036 - RNA, 19 nt, Homo sapiens
  misc_RNA (1)...(19): siRNA sense strand
ucgauacauucgugauauu

SEQ ID NO: 2229037 - RNA, 19 nt, Homo sapiens
  misc_RNA (1)...(19): siRNA sense strand
ccacccaaccuuauggcaa

SEQ ID NO: 2229038 - RNA, 19 nt, Homo sapiens
  misc_RNA (1)...(19): siRNA sense strand
uggaggacuuugagagaag

SEQ ID NO: 2229039 - RNA, 19 nt, Homo sapiens
  misc_RNA (1)...(19): siRNA sense strand
cuuaauuaucggagucaca

SEQ ID NO: 2229040 - RNA, 19 nt, Homo sapiens
  misc_RNA (1)...(19): siRNA sense strand
ugaccaacaccaugcggaa

SEQ ID NO: 2229041 - RNA, 19 nt, Homo sapiens
  misc_RNA (1)...(19): siRNA sense strand
ugucgauacauucgugaua

SEQ ID NO: 2229042 - RNA, 19 nt, Homo sapiens
  misc_RNA (1)...(19): siRNA sense strand
gaugaaggugccagugaga

SEQ ID NO: 2229043 - RNA, 19 nt, Homo sapiens
  misc_RNA (1)...(19): siRNA sense strand
cagauguguucaagaagca

SEQ ID NO: 2229044 - RNA, 19 nt, Homo sapiens
  misc_RNA (1)...(19): siRNA sense strand
cuacagaaacaguuggaac

SEQ ID NO: 2229045 - RNA, 19 nt, Homo sapiens
  misc_RNA (1)...(19): siRNA sense strand
ccagcauuccugagacaau

SEQ ID NO: 2229046 - RNA, 19 nt, Homo sapiens
  misc_RNA (1)...(19): siRNA sense strand
ccgagaugccauagaaaug

SEQ ID NO: 2229047 - RNA, 19 nt, Homo sapiens
  misc_RNA (1)...(19): siRNA sense strand
aaaacagaccggugggauu

SEQ ID NO: 2229048 - RNA, 19 nt, Homo sapiens
  misc_RNA (1)...(19): siRNA sense strand
ugaacgaagguaccggaaa

SEQ ID NO: 2229049 - RNA, 19 nt, Homo sapiens
  misc_RNA (1)...(19): siRNA sense strand
ucgaggguauggagaugaa

SEQ ID NO: 2229050 - RNA, 19 nt, Homo sapiens
  misc_RNA (1)...(19): siRNA sense strand
ccagauagcggguuagaac

SEQ ID NO: 2229051 - RNA, 19 nt, Homo sapiens
  misc_RNA (1)...(19): siRNA sense strand
ggaucgaggcaaagauuac

SEQ ID NO: 2229052 - RNA, 19 nt, Homo sapiens
  misc_RNA (1)...(19): siRNA sense strand
acaauagcgucaaugccaa

SEQ ID NO: 2229053 - RNA, 19 nt, Homo sapiens
  misc_RNA (1)...(19): siRNA sense strand
ccuuauggcaagacagacu

SEQ ID NO: 2229054 - RNA, 19 nt, Homo sapiens
  misc_RNA (1)...(19): siRNA sense strand
uugaaucugugaaggaaca

SEQ ID NO: 2229055 - RNA, 19 nt, Homo sapiens
  misc_RNA (1)...(19): siRNA sense strand
aagccaaguauaagaaagu

SEQ ID NO: 2229056 - RNA, 19 nt, Homo sapiens
  misc_RNA (1)...(19): siRNA sense strand
ugaacucgggagaagauaa

SEQ ID NO: 2229057 - RNA, 19 nt, Homo sapiens
  misc_RNA (1)...(19): siRNA sense strand
guucaagaagcagaagaaa

SEQ ID NO: 2229058 - RNA, 19 nt, Homo sapiens
  misc_RNA (1)...(19): siRNA sense strand
uaauaauccaguugcauga

SEQ ID NO: 2229059 - RNA, 19 nt, Homo sapiens
  misc_RNA (1)...(19): siRNA sense strand
gcucugugccguaugaaaa

SEQ ID NO: 2229060 - RNA, 19 nt, Homo sapiens
  misc_RNA (1)...(19): siRNA sense strand
ucugaauacaauagcguca

SEQ ID NO: 2229061 - RNA, 19 nt, Homo sapiens
  misc_RNA (1)...(19): siRNA sense strand
gagcaaaaggacucaucua

SEQ ID NO: 2229062 - RNA, 19 nt, Homo sapiens
  misc_RNA (1)...(19): siRNA sense strand
cgaagguaccggaaagucu

SEQ ID NO: 2229063 - RNA, 19 nt, Homo sapiens
  misc_RNA (1)...(19): siRNA sense strand
ccaaagugaccaacaccau

SEQ ID NO: 2229064 - RNA, 19 nt, Homo sapiens
  misc_RNA (1)...(19): siRNA sense strand
aaagcgagagaaagaauau

SEQ ID NO: 2229065 - RNA, 19 nt, Homo sapiens
  misc_RNA (1)...(19): siRNA sense strand
uggcaaagcgagagaaaga

SEQ ID NO: 2229066 - RNA, 19 nt, Homo sapiens
  misc_RNA (1)...(19): siRNA sense strand
gggcaauaugaguuaauaa

SEQ ID NO: 2229067 - RNA, 19 nt, Homo sapiens
  misc_RNA (1)...(19): siRNA sense strand
gcuucuuguuccagagcaa

SEQ ID NO: 2229068 - RNA, 19 nt, Homo sapiens
  misc_RNA (1)...(19): siRNA sense strand
gagagaaagaauaugucaa

SEQ ID NO: 2229069 - RNA, 19 nt, Homo sapiens
  misc_RNA (1)...(19): siRNA sense strand
cgugauauugcuacagaaa

SEQ ID NO: 2229070 - RNA, 19 nt, Homo sapiens
  misc_RNA (1)...(19): siRNA sense strand
cgggagaagauaagauuga

SEQ ID NO: 2229071 - RNA, 19 nt, Homo sapiens
  misc_RNA (1)...(19): siRNA sense strand
ugaaauucgaccagcuaaa

SEQ ID NO: 2229072 - RNA, 19 nt, Homo sapiens
  misc_RNA (1)...(19): siRNA sense strand
auuccaaagccaaguauaa

SEQ ID NO: 2229073 - RNA, 19 nt, Homo sapiens
  misc_RNA (1)...(19): siRNA sense strand
ggggaaaaugggaaacaaa

SEQ ID NO: 2229074 - RNA, 19 nt, Homo sapiens
  misc_RNA (1)...(19): siRNA sense strand
cugcacacguggaggacuu

SEQ ID NO: 2229075 - RNA, 19 nt, Homo sapiens
  misc_RNA (1)...(19): siRNA sense strand
ggacuuugagagaaggaau

SEQ ID NO: 2229076 - RNA, 19 nt, Homo sapiens
  misc_RNA (1)...(19): siRNA sense strand
aguugaacaucaugaaaca

SEQ ID NO: 2229077 - RNA, 19 nt, Homo sapiens
  misc_RNA (1)...(19): siRNA sense strand
ccuggcaaagcgagagaaa

SEQ ID NO: 2229078 - RNA, 19 nt, Homo sapiens
  misc_RNA (1)...(19): siRNA sense strand
ugaaggugccagugagaga

SEQ ID NO: 2229079 - RNA, 19 nt, Homo sapiens
  misc_RNA (1)...(19): siRNA sense strand
caucauggacagaauggaa

SEQ ID NO: 2229080 - RNA, 19 nt, Homo sapiens
  misc_RNA (1)...(19): siRNA sense strand
uguucaagaagcagaagaa

SEQ ID NO: 2229081 - RNA, 19 nt, Homo sapiens
  misc_RNA (1)...(19): siRNA sense strand
cuaacaaggagcagcccaa

SEQ ID NO: 2229082 - RNA, 19 nt, Homo sapiens
  misc_RNA (1)...(19): siRNA sense strand
gggaaacaaagguggggua

SEQ ID NO: 2229083 - RNA, 19 nt, Homo sapiens
  misc_RNA (1)...(19): siRNA sense strand
uguccuugcugcucagaaa

SEQ ID NO: 2229084 - RNA, 19 nt, Homo sapiens
  misc_RNA (1)...(19): siRNA sense strand
cuucuaugaauuuggacaa

SEQ ID NO: 2229085 - RNA, 19 nt, Homo sapiens
  misc_RNA (1)...(19): siRNA sense strand
ugaccgaauucuuuggaga

SEQ ID NO: 2229086 - RNA, 19 nt, Homo sapiens
  misc_RNA (1)...(19): siRNA sense strand
gaacuggaaucauggggaa

SEQ ID NO: 2229087 - RNA, 19 nt, Homo sapiens
  misc_RNA (1)...(19): siRNA sense strand
cguggaggacuuugagaga

SEQ ID NO: 2229088 - RNA, 19 nt, Homo sapiens
  misc_RNA (1)...(19): siRNA sense strand
gggaguuuguguuugaaaa

SEQ ID NO: 2229089 - RNA, 19 nt, Homo sapiens
  misc_RNA (1)...(19): siRNA sense strand
ucgauacauucgugauauu

SEQ ID NO: 2229090 - RNA, 19 nt, Homo sapiens
  misc_RNA (1)...(19): siRNA sense strand
ccacccaaccuuauggcaa

SEQ ID NO: 2229091 - RNA, 19 nt, Homo sapiens
  misc_RNA (1)...(19): siRNA sense strand
uggaggacuuugagagaag

SEQ ID NO: 2229092 - RNA, 19 nt, Homo sapiens
  misc_RNA (1)...(19): siRNA sense strand
cuuaauuaucggagucaca

SEQ ID NO: 2229093 - RNA, 19 nt, Homo sapiens
  misc_RNA (1)...(19): siRNA sense strand
ugaccaacaccaugcggaa

SEQ ID NO: 2229094 - RNA, 19 nt, Homo sapiens
  misc_RNA (1)...(19): siRNA sense strand
ugucgauacauucgugaua

SEQ ID NO: 2229095 - RNA, 19 nt, Homo sapiens
  misc_RNA (1)...(19): siRNA sense strand
gaugaaggugccagugaga

SEQ ID NO: 2229096 - RNA, 19 nt, Homo sapiens
  misc_RNA (1)...(19): siRNA sense strand
cagauguguucaagaagca

SEQ ID NO: 2229097 - RNA, 19 nt, Homo sapiens
  misc_RNA (1)...(19): siRNA sense strand
cuacagaaacaguuggaac

SEQ ID NO: 2229098 - RNA, 19 nt, Homo sapiens
  misc_RNA (1)...(19): siRNA sense strand
ccagcauuccugagacaau

SEQ ID NO: 2229099 - RNA, 19 nt, Homo sapiens
  misc_RNA (1)...(19): siRNA sense strand
ccgagaugccauagaaaug

SEQ ID NO: 2229100 - RNA, 19 nt, Homo sapiens
  misc_RNA (1)...(19): siRNA sense strand
aaaacagaccggugggauu

SEQ ID NO: 2229101 - RNA, 19 nt, Homo sapiens
  misc_RNA (1)...(19): siRNA sense strand
ugaacgaagguaccggaaa

SEQ ID NO: 2229102 - RNA, 19 nt, Homo sapiens
  misc_RNA (1)...(19): siRNA sense strand
ucgaggguauggagaugaa

SEQ ID NO: 2229103 - RNA, 19 nt, Homo sapiens
  misc_RNA (1)...(19): siRNA sense strand
ccagauagcggguuagaac

SEQ ID NO: 2229104 - RNA, 19 nt, Homo sapiens
  misc_RNA (1)...(19): siRNA sense strand
ggaucgaggcaaagauuac

SEQ ID NO: 2229105 - RNA, 19 nt, Homo sapiens
  misc_RNA (1)...(19): siRNA sense strand
acaauagcgucaaugccaa

SEQ ID NO: 2229106 - RNA, 19 nt, Homo sapiens
  misc_RNA (1)...(19): siRNA sense strand
ccuuauggcaagacagacu

SEQ ID NO: 2229107 - RNA, 19 nt, Homo sapiens
  misc_RNA (1)...(19): siRNA sense strand
uugaaucugugaaggaaca

SEQ ID NO: 2229108 - RNA, 19 nt, Homo sapiens
  misc_RNA (1)...(19): siRNA sense strand
aagccaaguauaagaaagu

SEQ ID NO: 2229109 - RNA, 19 nt, Homo sapiens
  misc_RNA (1)...(19): siRNA sense strand
ugaacucgggagaagauaa

SEQ ID NO: 2229110 - RNA, 19 nt, Homo sapiens
  misc_RNA (1)...(19): siRNA sense strand
guucaagaagcagaagaaa

SEQ ID NO: 2229111 - RNA, 19 nt, Homo sapiens
  misc_RNA (1)...(19): siRNA sense strand
uaauaauccaguugcauga

SEQ ID NO: 2229112 - RNA, 19 nt, Homo sapiens
  misc_RNA (1)...(19): siRNA sense strand
gcucugugccguaugaaaa

SEQ ID NO: 2229113 - RNA, 19 nt, Homo sapiens
  misc_RNA (1)...(19): siRNA sense strand
ucugaauacaauagcguca

SEQ ID NO: 2229114 - RNA, 19 nt, Homo sapiens
  misc_RNA (1)...(19): siRNA sense strand
gagcaaaaggacucaucua

SEQ ID NO: 2229115 - RNA, 19 nt, Homo sapiens
  misc_RNA (1)...(19): siRNA sense strand
cgaagguaccggaaagucu

SEQ ID NO: 2229116 - RNA, 19 nt, Homo sapiens
  misc_RNA (1)...(19): siRNA sense strand
ccaaagugaccaacaccau

SEQ ID NO: 2229117 - RNA, 19 nt, Homo sapiens
  misc_RNA (1)...(19): siRNA sense strand
aaagcgagagaaagaauau

SEQ ID NO: 2229118 - RNA, 19 nt, Homo sapiens
  misc_RNA (1)...(19): siRNA sense strand
caggaaaagugcaaggaau

SEQ ID NO: 2229119 - RNA, 19 nt, Homo sapiens
  misc_RNA (1)...(19): siRNA sense strand
aggaaaagugcaaggaauu

SEQ ID NO: 2229120 - RNA, 19 nt, Homo sapiens
  misc_RNA (1)...(19): siRNA sense strand
augcagaauuugaacgaca

SEQ ID NO: 2229121 - RNA, 19 nt, Homo sapiens
  misc_RNA (1)...(19): siRNA sense strand
ccaagagaggugagggagu

SEQ ID NO: 2229122 - RNA, 19 nt, Homo sapiens
  misc_RNA (1)...(19): siRNA sense strand
gcacauaaaaucauggaga

SEQ ID NO: 2229123 - RNA, 19 nt, Homo sapiens
  misc_RNA (1)...(19): siRNA sense strand
ggacaagaagaaaggguug

SEQ ID NO: 2229124 - RNA, 19 nt, Homo sapiens
  misc_RNA (1)...(19): siRNA sense strand
ccaucaaauacaacaaaga

SEQ ID NO: 2229125 - RNA, 19 nt, Homo sapiens
  misc_RNA (1)...(19): siRNA sense strand
gcguuuaucaauccggaaa

SEQ ID NO: 2229126 - RNA, 19 nt, Homo sapiens
  misc_RNA (1)...(19): siRNA sense strand
gguuggugguuuugggcua

SEQ ID NO: 2229127 - RNA, 19 nt, Homo sapiens
  misc_RNA (1)...(19): siRNA sense strand
gcacacuugcagagaggau

SEQ ID NO: 2229128 - RNA, 19 nt, Homo sapiens
  misc_RNA (1)...(19): siRNA sense strand
caguagaagcuguaaaaga

SEQ ID NO: 2229129 - RNA, 19 nt, Homo sapiens
  misc_RNA (1)...(19): siRNA sense strand
gguugaagaaauuguggau

SEQ ID NO: 2229130 - RNA, 19 nt, Homo sapiens
  misc_RNA (1)...(19): siRNA sense strand
gaaagagggagauggggaa

SEQ ID NO: 2229131 - RNA, 19 nt, Homo sapiens
  misc_RNA (1)...(19): siRNA sense strand
ggagaugacguaagggaac

SEQ ID NO: 2229132 - RNA, 19 nt, Homo sapiens
  misc_RNA (1)...(19): siRNA sense strand
cugaaaaggcuguguuuga

SEQ ID NO: 2229133 - RNA, 19 nt, Homo sapiens
  misc_RNA (1)...(19): siRNA sense strand
accauugacuggaaagcaa

SEQ ID NO: 2229134 - RNA, 19 nt, Homo sapiens
  misc_RNA (1)...(19): siRNA sense strand
gcuaauuugggcauaggaa

SEQ ID NO: 2229135 - RNA, 19 nt, Homo sapiens
  misc_RNA (1)...(19): siRNA sense strand
ggaaagagggagaugggga

SEQ ID NO: 2229136 - RNA, 19 nt, Homo sapiens
  misc_RNA (1)...(19): siRNA sense strand
uggagaugacguaagggaa

SEQ ID NO: 2229137 - RNA, 19 nt, Homo sapiens
  misc_RNA (1)...(19): siRNA sense strand
gagcauucugcaaagggaa

SEQ ID NO: 2229138 - RNA, 19 nt, Homo sapiens
  misc_RNA (1)...(19): siRNA sense strand
uguggauauuggagcauuu

SEQ ID NO: 2229139 - RNA, 19 nt, Homo sapiens
  misc_RNA (1)...(19): siRNA sense strand
cauccauauuccucagauu

SEQ ID NO: 2229140 - RNA, 19 nt, Homo sapiens
  misc_RNA (1)...(19): siRNA sense strand
cacauaaaaucauggagaa

SEQ ID NO: 2229141 - RNA, 19 nt, Homo sapiens
  misc_RNA (1)...(19): siRNA sense strand
acaaaagaguacugggugu

SEQ ID NO: 2229142 - RNA, 19 nt, Homo sapiens
  misc_RNA (1)...(19): siRNA sense strand
ugacaguggaugacguaca

SEQ ID NO: 2229143 - RNA, 19 nt, Homo sapiens
  misc_RNA (1)...(19): siRNA sense strand
agugguagagguugaagaa

SEQ ID NO: 2229144 - RNA, 19 nt, Homo sapiens
  misc_RNA (1)...(19): siRNA sense strand
cuucauaugugggagaaaa

SEQ ID NO: 2229145 - RNA, 19 nt, Homo sapiens
  misc_RNA (1)...(19): siRNA sense strand
aggcggaccgagcaggaaa

SEQ ID NO: 2229146 - RNA, 19 nt, Homo sapiens
  misc_RNA (1)...(19): siRNA sense strand
gagcaggaaacgugauuuu

SEQ ID NO: 2229147 - RNA, 19 nt, Homo sapiens
  misc_RNA (1)...(19): siRNA sense strand
ggaauuucaacuugccaau

SEQ ID NO: 2229148 - RNA, 19 nt, Homo sapiens
  misc_RNA (1)...(19): siRNA sense strand
gggagauggggaagccaaa

SEQ ID NO: 2229149 - RNA, 19 nt, Homo sapiens
  misc_RNA (1)...(19): siRNA sense strand
uuuaguguccagugcgaaa

SEQ ID NO: 2229150 - RNA, 19 nt, Homo sapiens
  misc_RNA (1)...(19): siRNA sense strand
gguuuugguuggugguuuu

SEQ ID NO: 2229151 - RNA, 19 nt, Homo sapiens
  misc_RNA (1)...(19): siRNA sense strand
gguaugggacccugguaca

SEQ ID NO: 2229152 - RNA, 19 nt, Homo sapiens
  misc_RNA (1)...(19): siRNA sense strand
ggaagcaauuacaggggau

SEQ ID NO: 2229153 - RNA, 19 nt, Homo sapiens
  misc_RNA (1)...(19): siRNA sense strand
cuguguuugauguggacaa

SEQ ID NO: 2229154 - RNA, 19 nt, Homo sapiens
  misc_RNA (1)...(19): siRNA sense strand
gugaauuagaaguggagcu

SEQ ID NO: 2229155 - RNA, 19 nt, Homo sapiens
  misc_RNA (1)...(19): siRNA sense strand
cuaauuugggcauaggaau

SEQ ID NO: 2229156 - RNA, 19 nt, Homo sapiens
  misc_RNA (1)...(19): siRNA sense strand
uugauguggacaagaagaa

SEQ ID NO: 2229157 - RNA, 19 nt, Homo sapiens
  misc_RNA (1)...(19): siRNA sense strand
agccaagagaggugaggga

SEQ ID NO: 2229158 - RNA, 19 nt, Homo sapiens
  misc_RNA (1)...(19): siRNA sense strand
ugagggaguucaaugguca

SEQ ID NO: 2229159 - RNA, 19 nt, Homo sapiens
  misc_RNA (1)...(19): siRNA sense strand
ggaugauaccugggaagau

SEQ ID NO: 2229160 - RNA, 19 nt, Homo sapiens
  misc_RNA (1)...(19): siRNA sense strand
agaagaaaggguugacucu

SEQ ID NO: 2229161 - RNA, 19 nt, Homo sapiens
  misc_RNA (1)...(19): siRNA sense strand
aagaguacugggugugauu

SEQ ID NO: 2229162 - RNA, 19 nt, Homo sapiens
  misc_RNA (1)...(19): siRNA sense strand
gccaugagcuguugggaca

SEQ ID NO: 2229163 - RNA, 19 nt, Homo sapiens
  misc_RNA (1)...(19): siRNA sense strand
gagcggaacuggaugcuga

SEQ ID NO: 2229164 - RNA, 19 nt, Homo sapiens
  misc_RNA (1)...(19): siRNA sense strand
agauaagaagaaagacaca

SEQ ID NO: 2229165 - RNA, 19 nt, Homo sapiens
  misc_RNA (1)...(19): siRNA sense strand
ggaaauuggccuugccucu

SEQ ID NO: 2229166 - RNA, 19 nt, Homo sapiens
  misc_RNA (1)...(19): siRNA sense strand
caaagaagaaguuggugca

SEQ ID NO: 2229167 - RNA, 19 nt, Homo sapiens
  misc_RNA (1)...(19): siRNA sense strand
uugaggagaaugauguaaa

SEQ ID NO: 2229168 - RNA, 19 nt, Homo sapiens
  misc_RNA (1)...(19): siRNA sense strand
gaaaagaaaacauggggca

SEQ ID NO: 2229169 - RNA, 19 nt, Homo sapiens
  misc_RNA (1)...(19): siRNA sense strand
uaaugaugccaaggagaaa

SEQ ID NO: 2229170 - RNA, 19 nt, Homo sapiens
  misc_RNA (1)...(19): siRNA sense strand
aauacauggaggaagaaaa

SEQ ID NO: 2229171 - RNA, 19 nt, Homo sapiens
  misc_RNA (1)...(19): siRNA sense strand
ggauaaacguagccugccu

SEQ ID NO: 2229172 - RNA, 19 nt, Homo sapiens
  misc_RNA (1)...(19): siRNA sense strand
agacauggauccaagccca

SEQ ID NO: 2229173 - RNA, 19 nt, Homo sapiens
  misc_RNA (1)...(19): siRNA sense strand
gugaauuacaguacugcuu

SEQ ID NO: 2229174 - RNA, 19 nt, Homo sapiens
  misc_RNA (1)...(19): siRNA sense strand
gaguggaauacauggagga

SEQ ID NO: 2229175 - RNA, 19 nt, Homo sapiens
  misc_RNA (1)...(19): siRNA sense strand
cugcaaagaaauagaacau

SEQ ID NO: 2229176 - RNA, 19 nt, Homo sapiens
  misc_RNA (1)...(19): siRNA sense strand
gagaaagacuagcagccaa

SEQ ID NO: 2229177 - RNA, 19 nt, Homo sapiens
  misc_RNA (1)...(19): siRNA sense strand
agagaagacaggccagcaa

SEQ ID NO: 2229178 - RNA, 19 nt, Homo sapiens
  misc_RNA (1)...(19): siRNA sense strand
gggcaaucggugguaguaa

SEQ ID NO: 2229179 - RNA, 19 nt, Homo sapiens
  misc_RNA (1)...(19): siRNA sense strand
uguguuugcccgagaaaga

SEQ ID NO: 2229180 - RNA, 19 nt, Homo sapiens
  misc_RNA (1)...(19): siRNA sense strand
gcaaagaaauagaacaucc

SEQ ID NO: 2229181 - RNA, 19 nt, Homo sapiens
  misc_RNA (1)...(19): siRNA sense strand
ucgaagggccaaauggaga

SEQ ID NO: 2229182 - RNA, 19 nt, Homo sapiens
  misc_RNA (1)...(19): siRNA sense strand
gccaaauggagaagagaag

SEQ ID NO: 2229183 - RNA, 19 nt, Homo sapiens
  misc_RNA (1)...(19): siRNA sense strand
aauugaggcccuggagaaa

SEQ ID NO: 2229184 - RNA, 19 nt, Homo sapiens
  misc_RNA (1)...(19): siRNA sense strand
gggucuguaccaacgauaa

SEQ ID NO: 2229185 - RNA, 19 nt, Homo sapiens
  misc_RNA (1)...(19): siRNA sense strand
gcggaagcugcaaagaaau

SEQ ID NO: 2229186 - RNA, 19 nt, Homo sapiens
  misc_RNA (1)...(19): siRNA sense strand
gcugcaaagaaauagaaca

SEQ ID NO: 2229187 - RNA, 19 nt, Homo sapiens
  misc_RNA (1)...(19): siRNA sense strand
cggugaaugggcggaguua

SEQ ID NO: 2229188 - RNA, 19 nt, Homo sapiens
  misc_RNA (1)...(19): siRNA sense strand
uaaacagaguucuucgcaa

SEQ ID NO: 2229189 - RNA, 19 nt, Homo sapiens
  misc_RNA (1)...(19): siRNA sense strand
ccagaaguuguaagcaaaa

SEQ ID NO: 2229190 - RNA, 19 nt, Homo sapiens
  misc_RNA (1)...(19): siRNA sense strand
uugggaaauccgagacaga

SEQ ID NO: 2229191 - RNA, 19 nt, Homo sapiens
  misc_RNA (1)...(19): siRNA sense strand
auaccaagcgugucaucaa

SEQ ID NO: 2229192 - RNA, 19 nt, Homo sapiens
  misc_RNA (1)...(19): siRNA sense strand
cugcaaagaaauagaacau

SEQ ID NO: 2229193 - RNA, 19 nt, Homo sapiens
  misc_RNA (1)...(19): siRNA sense strand
gagaaagacuagcagccaa

SEQ ID NO: 2229194 - RNA, 19 nt, Homo sapiens
  misc_RNA (1)...(19): siRNA sense strand
agagaagacaggccagcaa

SEQ ID NO: 2229195 - RNA, 19 nt, Homo sapiens
  misc_RNA (1)...(19): siRNA sense strand
gggcaaucggugguaguaa

SEQ ID NO: 2229196 - RNA, 19 nt, Homo sapiens
  misc_RNA (1)...(19): siRNA sense strand
uguguuugcccgagaaaga

SEQ ID NO: 2229197 - RNA, 19 nt, Homo sapiens
  misc_RNA (1)...(19): siRNA sense strand
gcaaagaaauagaacaucc

SEQ ID NO: 2229198 - RNA, 19 nt, Homo sapiens
  misc_RNA (1)...(19): siRNA sense strand
ucgaagggccaaauggaga

SEQ ID NO: 2229199 - RNA, 19 nt, Homo sapiens
  misc_RNA (1)...(19): siRNA sense strand
gccaaauggagaagagaag

SEQ ID NO: 2229200 - RNA, 19 nt, Homo sapiens
  misc_RNA (1)...(19): siRNA sense strand
aauugaggcccuggagaaa

SEQ ID NO: 2229201 - RNA, 19 nt, Homo sapiens
  misc_RNA (1)...(19): siRNA sense strand
gggucuguaccaacgauaa

SEQ ID NO: 2229202 - RNA, 19 nt, Homo sapiens
  misc_RNA (1)...(19): siRNA sense strand
gcggaagcugcaaagaaau

SEQ ID NO: 2229203 - RNA, 19 nt, Homo sapiens
  misc_RNA (1)...(19): siRNA sense strand
gcugcaaagaaauagaaca

SEQ ID NO: 2229204 - RNA, 19 nt, Homo sapiens
  misc_RNA (1)...(19): siRNA sense strand
cggugaaugggcggaguua

SEQ ID NO: 2229205 - RNA, 19 nt, Homo sapiens
  misc_RNA (1)...(19): siRNA sense strand
uaaacagaguucuucgcaa

SEQ ID NO: 2229206 - RNA, 19 nt, Homo sapiens
  misc_RNA (1)...(19): siRNA sense strand
ccagaaguuguaagcaaaa

SEQ ID NO: 2229207 - RNA, 19 nt, Homo sapiens
  misc_RNA (1)...(19): siRNA sense strand
uugggaaauccgagacaga

SEQ ID NO: 2229208 - RNA, 19 nt, Homo sapiens
  misc_RNA (1)...(19): siRNA sense strand
auaccaagcgugucaucaa

SEQ ID NO: 2229209 - RNA, 19 nt, Homo sapiens
  misc_RNA (1)...(19): siRNA sense strand
caacagggccuuuggguuc

SEQ ID NO: 2229210 - RNA, 19 nt, Homo sapiens
  misc_RNA (1)...(19): siRNA sense strand
cugagaaacuggaccacca

SEQ ID NO: 2229211 - RNA, 19 nt, Homo sapiens
  misc_RNA (1)...(19): siRNA sense strand
ccugaaugguuuaacgugu

SEQ ID NO: 2229212 - RNA, 19 nt, Homo sapiens
  misc_RNA (1)...(19): siRNA sense strand
ggcaaagcacacaggcuga

SEQ ID NO: 2229213 - RNA, 19 nt, Homo sapiens
  misc_RNA (1)...(19): siRNA sense strand
cuaagaaagcagagguuaa

SEQ ID NO: 2229214 - RNA, 19 nt, Homo sapiens
  misc_RNA (1)...(19): siRNA sense strand
uggcagaugcacuggauaa

SEQ ID NO: 2229215 - RNA, 19 nt, Homo sapiens
  misc_RNA (1)...(19): siRNA sense strand
ugucagaauugcaagggaa

SEQ ID NO: 2229216 - RNA, 19 nt, Homo sapiens
  misc_RNA (1)...(19): siRNA sense strand
uaguaugacagcugggaaa

SEQ ID NO: 2229217 - RNA, 19 nt, Homo sapiens
  misc_RNA (1)...(19): siRNA sense strand
agcaggugguggugggaaa

SEQ ID NO: 2229218 - RNA, 19 nt, Homo sapiens
  misc_RNA (1)...(19): siRNA sense strand
gcuuuauggcuuaaugaaa

SEQ ID NO: 2229219 - RNA, 19 nt, Homo sapiens
  misc_RNA (1)...(19): siRNA sense strand
cgaugauagacuacuaaua

SEQ ID NO: 2229220 - RNA, 19 nt, Homo sapiens
  misc_RNA (1)...(19): siRNA sense strand
ugauaaaguucauaccgua

SEQ ID NO: 2229221 - RNA, 19 nt, Homo sapiens
  misc_RNA (1)...(19): siRNA sense strand
ugcuaauagaggagaaauu

SEQ ID NO: 2229222 - RNA, 19 nt, Homo sapiens
  misc_RNA (1)...(19): siRNA sense strand
gguucuaggugauaaacau

SEQ ID NO: 2229223 - RNA, 19 nt, Homo sapiens
  misc_RNA (1)...(19): siRNA sense strand
caguguacaaggugaauau

SEQ ID NO: 2229224 - RNA, 19 nt, Homo sapiens
  misc_RNA (1)...(19): siRNA sense strand
gucagaauugcaagggaaa

SEQ ID NO: 2229225 - RNA, 19 nt, Homo sapiens
  misc_RNA (1)...(19): siRNA sense strand
cugaggcacugaagagaau

SEQ ID NO: 2229226 - RNA, 19 nt, Homo sapiens
  misc_RNA (1)...(19): siRNA sense strand
ccaaccaggaagugauauu

SEQ ID NO: 2229227 - RNA, 19 nt, Homo sapiens
  misc_RNA (1)...(19): siRNA sense strand
aggaagugauauuagcauu

SEQ ID NO: 2229228 - RNA, 19 nt, Homo sapiens
  misc_RNA (1)...(19): siRNA sense strand
uagcagaaggucaagaaau

SEQ ID NO: 2229229 - RNA, 19 nt, Homo sapiens
  misc_RNA (1)...(19): siRNA sense strand
uauucaagacagugcuuaa

SEQ ID NO: 2229230 - RNA, 19 nt, Homo sapiens
  misc_RNA (1)...(19): siRNA sense strand
gcggagacucgaagagcga

SEQ ID NO: 2229231 - RNA, 19 nt, Homo sapiens
  misc_RNA (1)...(19): siRNA sense strand
agaaauugcaugucggguu

SEQ ID NO: 2229232 - RNA, 19 nt, Homo sapiens
  misc_RNA (1)...(19): siRNA sense strand
aaugaaagagagugcucaa

SEQ ID NO: 2229233 - RNA, 19 nt, Homo sapiens
  misc_RNA (1)...(19): siRNA sense strand
ccagguucuaggugauaaa

SEQ ID NO: 2229234 - RNA, 19 nt, Homo sapiens
  misc_RNA (1)...(19): siRNA sense strand
ugggaaugcuuuauggcuu

SEQ ID NO: 2229235 - RNA, 19 nt, Homo sapiens
  misc_RNA (1)...(19): siRNA sense strand
cuucaaaggacacaugcua

SEQ ID NO: 2229236 - RNA, 19 nt, Homo sapiens
  misc_RNA (1)...(19): siRNA sense strand
aggugauaaacaugggaau

SEQ ID NO: 2229237 - RNA, 19 nt, Homo sapiens
  misc_RNA (1)...(19): siRNA sense strand
ggaaaugaauacaagacuc

SEQ ID NO: 2229238 - RNA, 19 nt, Homo sapiens
  misc_RNA (1)...(19): siRNA sense strand
ccguaguagcaucaaacaa

SEQ ID NO: 2229239 - RNA, 19 nt, Homo sapiens
  misc_RNA (1)...(19): siRNA sense strand
agacagugcuuaauggugu

SEQ ID NO: 2229240 - RNA, 19 nt, Homo sapiens
  misc_RNA (1)...(19): siRNA sense strand
gcucaauucagagaagaaa

SEQ ID NO: 2229241 - RNA, 19 nt, Homo sapiens
  misc_RNA (1)...(19): siRNA sense strand
augcuaaccaagagugaga

SEQ ID NO: 2229242 - RNA, 19 nt, Homo sapiens
  misc_RNA (1)...(19): siRNA sense strand
ucgagaagcagguggaaac

SEQ ID NO: 2229243 - RNA, 19 nt, Homo sapiens
  misc_RNA (1)...(19): siRNA sense strand
gcauuaagacaguugccau

SEQ ID NO: 2229244 - RNA, 19 nt, Homo sapiens
  misc_RNA (1)...(19): siRNA sense strand
cuauguuauucgagguguu

SEQ ID NO: 2229245 - RNA, 19 nt, Homo sapiens
  misc_RNA (1)...(19): siRNA sense strand
aguuaagagcacaacauuu

SEQ ID NO: 2229246 - RNA, 19 nt, Homo sapiens
  misc_RNA (1)...(19): siRNA sense strand
ggucaguguucucggugga

SEQ ID NO: 2229247 - RNA, 19 nt, Homo sapiens
  misc_RNA (1)...(19): siRNA sense strand
uggcgaugauagacuacua

SEQ ID NO: 2229248 - RNA, 19 nt, Homo sapiens
  misc_RNA (1)...(19): siRNA sense strand
auuagaacuugcaagaaga

SEQ ID NO: 2229249 - RNA, 19 nt, Homo sapiens
  misc_RNA (1)...(19): siRNA sense strand
gaugaagagaccagggaug

SEQ ID NO: 2229250 - RNA, 19 nt, Homo sapiens
  misc_RNA (1)...(19): siRNA sense strand
gguggaaacaugagcauuc

SEQ ID NO: 2229251 - RNA, 19 nt, Homo sapiens
  misc_RNA (1)...(19): siRNA sense strand
gacaagauugaaagcaaau

SEQ ID NO: 2229252 - RNA, 19 nt, Homo sapiens
  misc_RNA (1)...(19): siRNA sense strand
ugauugaagccaugaaaau

SEQ ID NO: 2229253 - RNA, 19 nt, Homo sapiens
  misc_RNA (1)...(19): siRNA sense strand
ucgaagagcgaugggagaa

SEQ ID NO: 2229254 - RNA, 19 nt, Homo sapiens
  misc_RNA (1)...(19): siRNA sense strand
uguugcuaauagaggagaa

SEQ ID NO: 2229255 - RNA, 19 nt, Homo sapiens
  misc_RNA (1)...(19): siRNA sense strand
uggagacacaguuggagaa

SEQ ID NO: 2229256 - RNA, 19 nt, Homo sapiens
  misc_RNA (1)...(19): siRNA sense strand
uugcaagggaaauuggcua

SEQ ID NO: 2229257 - RNA, 19 nt, Homo sapiens
  misc_RNA (1)...(19): siRNA sense strand
aucagaaggugguggagga

SEQ ID NO: 2229258 - RNA, 19 nt, Homo sapiens
  misc_RNA (1)...(19): siRNA sense strand
gaagagaauggcagaugca

SEQ ID NO: 2229259 - RNA, 19 nt, Homo sapiens
  misc_RNA (1)...(19): siRNA sense strand
ccaagagugagaagaacca

SEQ ID NO: 2229260 - RNA, 19 nt, Homo sapiens
  misc_RNA (1)...(19): siRNA sense strand
ugcaagaagaugggcauua

SEQ ID NO: 2229261 - RNA, 19 nt, Homo sapiens
  misc_RNA (1)...(19): siRNA sense strand
auugauaauccucgucaua

SEQ ID NO: 2229262 - RNA, 19 nt, Homo sapiens
  misc_RNA (1)...(19): siRNA sense strand
ggugaauaucuuaaccaga

SEQ ID NO: 2229263 - RNA, 19 nt, Homo sapiens
  misc_RNA (1)...(19): siRNA sense strand
ugaacaaauuuaugcugga

SEQ ID NO: 2229264 - RNA, 19 nt, Homo sapiens
  misc_RNA (1)...(19): siRNA sense strand
ccacagugauguugaugcu

SEQ ID NO: 2229265 - RNA, 19 nt, Homo sapiens
  misc_RNA (1)...(19): siRNA sense strand
cagaauaguaugacagcug

SEQ ID NO: 2229266 - RNA, 19 nt, Homo sapiens
  misc_RNA (1)...(19): siRNA sense strand
gcuuaaugaaagagagugc

SEQ ID NO: 2229267 - RNA, 19 nt, Homo sapiens
  misc_RNA (1)...(19): siRNA sense strand
gggucgaaacuaaauguga

SEQ ID NO: 2229268 - RNA, 19 nt, Homo sapiens
  misc_RNA (1)...(19): siRNA sense strand
cgcgguagcagaaggucaa

SEQ ID NO: 2229269 - RNA, 19 nt, Homo sapiens
  misc_RNA (1)...(19): siRNA sense strand
gggaaaacuggcacgguga

SEQ ID NO: 2229270 - RNA, 19 nt, Homo sapiens
  misc_RNA (1)...(19): siRNA sense strand
cuggagacacaguuggaga

SEQ ID NO: 2229271 - RNA, 19 nt, Homo sapiens
  misc_RNA (1)...(19): siRNA sense strand
cgggaaagcugaagcgcua

SEQ ID NO: 2229272 - RNA, 19 nt, Homo sapiens
  misc_RNA (1)...(19): siRNA sense strand
ccagagagguguaugggaa

SEQ ID NO: 2229273 - RNA, 19 nt, Homo sapiens
  misc_RNA (1)...(19): siRNA sense strand
agcucaaagugguggauaa

SEQ ID NO: 2229274 - RNA, 19 nt, Homo sapiens
  misc_RNA (1)...(19): siRNA sense strand
uaaucauggcugugaauaa

SEQ ID NO: 2229275 - RNA, 19 nt, Homo sapiens
  misc_RNA (1)...(19): siRNA sense strand
ucacagaguacaagaccaa

SEQ ID NO: 2229276 - RNA, 19 nt, Homo sapiens
  misc_RNA (1)...(19): siRNA sense strand
ggaaggaugugguggccau

SEQ ID NO: 2229277 - RNA, 19 nt, Homo sapiens
  misc_RNA (1)...(19): siRNA sense strand
ugaacaagaaggaagaaau

SEQ ID NO: 2229278 - RNA, 19 nt, Homo sapiens
  misc_RNA (1)...(19): siRNA sense strand
agaugaaggugcaggagga

SEQ ID NO: 2229279 - RNA, 19 nt, Homo sapiens
  misc_RNA (1)...(19): siRNA sense strand
ccucaaucgucgacagcau

SEQ ID NO: 2229280 - RNA, 19 nt, Homo sapiens
  misc_RNA (1)...(19): siRNA sense strand
aggagaagaagcagaaaca

SEQ ID NO: 2229281 - RNA, 19 nt, Homo sapiens
  misc_RNA (1)...(19): siRNA sense strand
aggaagaaauuguuggagu

SEQ ID NO: 2229282 - RNA, 19 nt, Homo sapiens
  misc_RNA (1)...(19): siRNA sense strand
gggaaggagccaugggagu

SEQ ID NO: 2229283 - RNA, 19 nt, Homo sapiens
  misc_RNA (1)...(19): siRNA sense strand
cuugaaaauaggaaggaua

SEQ ID NO: 2229284 - RNA, 19 nt, Homo sapiens
  misc_RNA (1)...(19): siRNA sense strand
ugaaggugcaggaggagaa

SEQ ID NO: 2229285 - RNA, 19 nt, Homo sapiens
  misc_RNA (1)...(19): siRNA sense strand
gggacuuucaggagaauuu

SEQ ID NO: 2229286 - RNA, 19 nt, Homo sapiens
  misc_RNA (1)...(19): siRNA sense strand
ugaauaaaguggauggauc

SEQ ID NO: 2229287 - RNA, 19 nt, Homo sapiens
  misc_RNA (1)...(19): siRNA sense strand
gagaauuuacagacagaga

SEQ ID NO: 2229288 - RNA, 19 nt, Homo sapiens
  misc_RNA (1)...(19): siRNA sense strand
cagaacuggagcugguaaa

SEQ ID NO: 2229289 - RNA, 19 nt, Homo sapiens
  misc_RNA (1)...(19): siRNA sense strand
aguacaagaccaagaacau

SEQ ID NO: 2229290 - RNA, 19 nt, Homo sapiens
  misc_RNA (1)...(19): siRNA sense strand
aggaagaggagcuggcuga

SEQ ID NO: 2229291 - RNA, 19 nt, Homo sapiens
  misc_RNA (1)...(19): siRNA sense strand
gcugguaaaauguggaaua

SEQ ID NO: 2229292 - RNA, 19 nt, Homo sapiens
  misc_RNA (1)...(19): siRNA sense strand
aggagaauuuacagacaga

SEQ ID NO: 2229293 - RNA, 19 nt, Homo sapiens
  misc_RNA (1)...(19): siRNA sense strand
ggaagaaauuguuggagug

SEQ ID NO: 2229294 - RNA, 19 nt, Homo sapiens
  misc_RNA (1)...(19): siRNA sense strand
accuaugagucaaugaaua

SEQ ID NO: 2229295 - RNA, 19 nt, Homo sapiens
  misc_RNA (1)...(19): siRNA sense strand
cagaaacaaagcagaugaa

SEQ ID NO: 2229296 - RNA, 19 nt, Homo sapiens
  misc_RNA (1)...(19): siRNA sense strand
gugaacaagaaggaagaaa

SEQ ID NO: 2229297 - RNA, 19 nt, Homo sapiens
  misc_RNA (1)...(19): siRNA sense strand
aggaaaucguuauggccau

SEQ ID NO: 2229298 - RNA, 19 nt, Homo sapiens
  misc_RNA (1)...(19): siRNA sense strand
caucaaagucaucccgaau

SEQ ID NO: 2229299 - RNA, 19 nt, Homo sapiens
  misc_RNA (1)...(19): siRNA sense strand
aggugcaggaggagaagaa

SEQ ID NO: 2229300 - RNA, 19 nt, Homo sapiens
  misc_RNA (1)...(19): siRNA sense strand
aggaggagaagaagcagaa

SEQ ID NO: 2229301 - RNA, 19 nt, Homo sapiens
  misc_RNA (1)...(19): siRNA sense strand
agaaacagcagucggccaa

SEQ ID NO: 2229302 - RNA, 19 nt, Homo sapiens
  misc_RNA (1)...(19): siRNA sense strand
ccaagagagaugaagagau

SEQ ID NO: 2229303 - RNA, 19 nt, Homo sapiens
  misc_RNA (1)...(19): siRNA sense strand
cggauggaagagaaauuaa

SEQ ID NO: 2229304 - RNA, 19 nt, Homo sapiens
  misc_RNA (1)...(19): siRNA sense strand
ucuuaaauccugacaccua

SEQ ID NO: 2229305 - RNA, 19 nt, Homo sapiens
  misc_RNA (1)...(19): siRNA sense strand
gcagcauggaggagagcga

SEQ ID NO: 2229306 - RNA, 19 nt, Homo sapiens
  misc_RNA (1)...(19): siRNA sense strand
gaguacaagaccaagaaca

SEQ ID NO: 2229307 - RNA, 19 nt, Homo sapiens
  misc_RNA (1)...(19): siRNA sense strand
agucagcagccgcaggaaa

SEQ ID NO: 2229308 - RNA, 19 nt, Homo sapiens
  misc_RNA (1)...(19): siRNA sense strand
cuaagacauaugagaguga

SEQ ID NO: 2229309 - RNA, 19 nt, Homo sapiens
  misc_RNA (1)...(19): siRNA sense strand
caugggagugugaggaaga

SEQ ID NO: 2229310 - RNA, 19 nt, Homo sapiens
  misc_RNA (1)...(19): siRNA sense strand
ucacggaccuagaggccuu

SEQ ID NO: 2229311 - RNA, 19 nt, Homo sapiens
  misc_RNA (1)...(19): siRNA sense strand
acuccggauggaagagaaa

SEQ ID NO: 2229312 - RNA, 19 nt, Homo sapiens
  misc_RNA (1)...(19): siRNA sense strand
uaacagaacuggagcuggu

SEQ ID NO: 2229313 - RNA, 19 nt, Homo sapiens
  misc_RNA (1)...(19): siRNA sense strand
agauguauuaugagcucaa

SEQ ID NO: 2229314 - RNA, 19 nt, Homo sapiens
  misc_RNA (1)...(19): siRNA sense strand
aguacgaugccaagaugaa

SEQ ID NO: 2229315 - RNA, 19 nt, Homo sapiens
  misc_RNA (1)...(19): siRNA sense strand
ugggaagcccuuugaugaa

SEQ ID NO: 2229316 - RNA, 19 nt, Homo sapiens
  misc_RNA (1)...(19): siRNA sense strand
gcaagaucaccuaccacaa

SEQ ID NO: 2229317 - RNA, 19 nt, Homo sapiens
  misc_RNA (1)...(19): siRNA sense strand
acucuaagaagauugcuaa

SEQ ID NO: 2229318 - RNA, 19 nt, Homo sapiens
  misc_RNA (1)...(19): siRNA sense strand
agcauggaggagagcgaaa

SEQ ID NO: 2229319 - RNA, 19 nt, Homo sapiens
  misc_RNA (1)...(19): siRNA sense strand
ucaccaagagagaugaaga

SEQ ID NO: 2229320 - RNA, 19 nt, Homo sapiens
  misc_RNA (1)...(19): siRNA sense strand
cugaugaguacgaugccaa

SEQ ID NO: 2229321 - RNA, 19 nt, Homo sapiens
  misc_RNA (1)...(19): siRNA sense strand
acuacauccugcauggcaa

SEQ ID NO: 2229322 - RNA, 19 nt, Homo sapiens
  misc_RNA (1)...(19): siRNA sense strand
ccuuugaugaaauggauga

SEQ ID NO: 2229323 - RNA, 19 nt, Homo sapiens
  misc_RNA (1)...(19): siRNA sense strand
agagagaugaagagauucu

SEQ ID NO: 2229324 - RNA, 19 nt, Homo sapiens
  misc_RNA (1)...(19): siRNA sense strand
ccuccugaccauugggcuu

SEQ ID NO: 2229325 - RNA, 19 nt, Homo sapiens
  misc_RNA (1)...(19): siRNA sense strand
ggaugagucuggauggaug

SEQ ID NO: 2229326 - RNA, 19 nt, Homo sapiens
  misc_RNA (1)...(19): siRNA sense strand
guaaagaugggaagcccuu

SEQ ID NO: 2229327 - RNA, 19 nt, Homo sapiens
  misc_RNA (1)...(19): siRNA sense strand
ugaguaagggcuaccgcaa

SEQ ID NO: 2229328 - RNA, 19 nt, Homo sapiens
  misc_RNA (1)...(19): siRNA sense strand
cuacauccugcauggcaaa

SEQ ID NO: 2229329 - RNA, 19 nt, Homo sapiens
  misc_RNA (1)...(19): siRNA sense strand
acaucaaagucaucccgaa

SEQ ID NO: 2229330 - RNA, 19 nt, Homo sapiens
  misc_RNA (1)...(19): siRNA sense strand
ccaagaugaaggugcagga

SEQ ID NO: 2229331 - RNA, 19 nt, Homo sapiens
  misc_RNA (1)...(19): siRNA sense strand
caggaggagaagaagcaga

SEQ ID NO: 2229332 - RNA, 19 nt, Homo sapiens
  misc_RNA (1)...(19): siRNA sense strand
gggaguuaguacugggcua

SEQ ID NO: 2229333 - RNA, 19 nt, Homo sapiens
  misc_RNA (1)...(19): siRNA sense strand
guauauaauaagaggcuga

SEQ ID NO: 2229334 - RNA, 19 nt, Homo sapiens
  misc_RNA (1)...(19): siRNA sense strand
cugaaagcgcugaggaaaa

SEQ ID NO: 2229335 - RNA, 19 nt, Homo sapiens
  misc_RNA (1)...(19): siRNA sense strand
ggcugaaagcgcugaggaa

SEQ ID NO: 2229336 - RNA, 19 nt, Homo sapiens
  misc_RNA (1)...(19): siRNA sense strand
cuacaaaaguaccaagaau

SEQ ID NO: 2229337 - RNA, 19 nt, Homo sapiens
  misc_RNA (1)...(19): siRNA sense strand
uugaagaucuggaggaacu

SEQ ID NO: 2229338 - RNA, 19 nt, Homo sapiens
  misc_RNA (1)...(19): siRNA sense strand
gggugauugucaaagaauu

SEQ ID NO: 2229339 - RNA, 19 nt, Homo sapiens
  misc_RNA (1)...(19): siRNA sense strand
cugcaguuccugucggaua

SEQ ID NO: 2229340 - RNA, 19 nt, Homo sapiens
  misc_RNA (1)...(19): siRNA sense strand
uugcagugucaguaggaaa

SEQ ID NO: 2229341 - RNA, 19 nt, Homo sapiens
  misc_RNA (1)...(19): siRNA sense strand
aagaagaacuugaugucca

SEQ ID NO: 2229342 - RNA, 19 nt, Homo sapiens
  misc_RNA (1)...(19): siRNA sense strand
ucuacagaaccaagugaaa

SEQ ID NO: 2229343 - RNA, 19 nt, Homo sapiens
  misc_RNA (1)...(19): siRNA sense strand
cuguauggcaguuaaggaa

SEQ ID NO: 2229344 - RNA, 19 nt, Homo sapiens
  misc_RNA (1)...(19): siRNA sense strand
aaccaaggaaauagagauu

SEQ ID NO: 2229345 - RNA, 19 nt, Homo sapiens
  misc_RNA (1)...(19): siRNA sense strand
gagcacuggaggaaagaca

SEQ ID NO: 2229346 - RNA, 19 nt, Homo sapiens
  misc_RNA (1)...(19): siRNA sense strand
ugaugaggauauugaagau

SEQ ID NO: 2229347 - RNA, 19 nt, Homo sapiens
  misc_RNA (1)...(19): siRNA sense strand
agaauaagauugaugcugu

SEQ ID NO: 2229348 - RNA, 19 nt, Homo sapiens
  misc_RNA (1)...(19): siRNA sense strand
ugaaaucucaagaggguca

SEQ ID NO: 2229349 - RNA, 19 nt, Homo sapiens
  misc_RNA (1)...(19): siRNA sense strand
uagaaguaauugugacgau

SEQ ID NO: 2229350 - RNA, 19 nt, Homo sapiens
  misc_RNA (1)...(19): siRNA sense strand
caggagagcacuggaggaa

SEQ ID NO: 2229351 - RNA, 19 nt, Homo sapiens
  misc_RNA (1)...(19): siRNA sense strand
uuggauucauagugaggua

SEQ ID NO: 2229352 - RNA, 19 nt, Homo sapiens
  misc_RNA (1)...(19): siRNA sense strand
agacacagguugcuggcau

SEQ ID NO: 2229353 - RNA, 19 nt, Homo sapiens
  misc_RNA (1)...(19): siRNA sense strand
agcuaaagauuguccucaa

SEQ ID NO: 2229354 - RNA, 19 nt, Homo sapiens
  misc_RNA (1)...(19): siRNA sense strand
agugaaaucucaagagggu

SEQ ID NO: 2229355 - RNA, 19 nt, Homo sapiens
  misc_RNA (1)...(19): siRNA sense strand
aguggacaauuaagagcaa

SEQ ID NO: 2229356 - RNA, 19 nt, Homo sapiens
  misc_RNA (1)...(19): siRNA sense strand
agauucaaguggauuggaa

SEQ ID NO: 2229357 - RNA, 19 nt, Homo sapiens
  misc_RNA (1)...(19): siRNA sense strand
ggauuggaacucugagcuu

SEQ ID NO: 2229358 - RNA, 19 nt, Homo sapiens
  misc_RNA (1)...(19): siRNA sense strand
cggaagaagaacuugaugu

SEQ ID NO: 2229359 - RNA, 19 nt, Homo sapiens
  misc_RNA (1)...(19): siRNA sense strand
uauugaagaucuggaggaa

SEQ ID NO: 2229360 - RNA, 19 nt, Homo sapiens
  misc_RNA (1)...(19): siRNA sense strand
caaccaaggaaauagagau

SEQ ID NO: 2229361 - RNA, 19 nt, Homo sapiens
  misc_RNA (1)...(19): siRNA sense strand
aaauagagauucaagugga

SEQ ID NO: 2229362 - RNA, 19 nt, Homo sapiens
  misc_RNA (1)...(19): siRNA sense strand
uguaauugccaaccugaaa

SEQ ID NO: 2229363 - RNA, 19 nt, Homo sapiens
  misc_RNA (1)...(19): siRNA sense strand
uggacaauuaagagcaaca

SEQ ID NO: 2229364 - RNA, 19 nt, Homo sapiens
  misc_RNA (1)...(19): siRNA sense strand
gcggguucuuugacgacaa

SEQ ID NO: 2229365 - RNA, 19 nt, Homo sapiens
  misc_RNA (1)...(19): siRNA sense strand
gaucuguuguucugagcau

SEQ ID NO: 2229366 - RNA, 19 nt, Homo sapiens
  misc_RNA (1)...(19): siRNA sense strand
gcugaggaaaauacagaaa

SEQ ID NO: 2229367 - RNA, 19 nt, Homo sapiens
  misc_RNA (1)...(19): siRNA sense strand
uccaaagaauugaugugaa

SEQ ID NO: 2229368 - RNA, 19 nt, Homo sapiens
  misc_RNA (1)...(19): siRNA sense strand
gacacugcagcuagagaua

SEQ ID NO: 2229369 - RNA, 19 nt, Homo sapiens
  misc_RNA (1)...(19): siRNA sense strand
ugacugugguccugagagu

SEQ ID NO: 2229370 - RNA, 19 nt, Homo sapiens
  misc_RNA (1)...(19): siRNA sense strand
gcacuggaggaaagacaca

SEQ ID NO: 2229371 - RNA, 19 nt, Homo sapiens
  misc_RNA (1)...(19): siRNA sense strand
gagccuuuggugugcuaaa

SEQ ID NO: 2229372 - RNA, 19 nt, Homo sapiens
  misc_RNA (1)...(19): siRNA sense strand
cgacaacauuagaaaggac

SEQ ID NO: 2229373 - RNA, 19 nt, Homo sapiens
  misc_RNA (1)...(19): siRNA sense strand
gaguauauaauaagaggcu

SEQ ID NO: 2229374 - RNA, 19 nt, Homo sapiens
  misc_RNA (1)...(19): siRNA sense strand
gcaacaaagaauggcauca

SEQ ID NO: 2229375 - RNA, 19 nt, Homo sapiens
  misc_RNA (1)...(19): siRNA sense strand
ggugauugucaaagaauuc

SEQ ID NO: 2229376 - RNA, 19 nt, Homo sapiens
  misc_RNA (1)...(19): siRNA sense strand
ucgaugggaaccaggaauu

SEQ ID NO: 2229377 - RNA, 19 nt, Homo sapiens
  misc_RNA (1)...(19): siRNA sense strand
cugaugaggauauugaaga

SEQ ID NO: 2229378 - RNA, 19 nt, Homo sapiens
  misc_RNA (1)...(19): siRNA sense strand
aauagagauucaaguggau

SEQ ID NO: 2229379 - RNA, 19 nt, Homo sapiens
  misc_RNA (1)...(19): siRNA sense strand
cauucaggauuguaaagau

SEQ ID NO: 2229380 - RNA, 19 nt, Homo sapiens
  misc_RNA (1)...(19): siRNA sense strand
gaaacagagcugacggaag

SEQ ID NO: 2229381 - RNA, 19 nt, Homo sapiens
  misc_RNA (1)...(19): siRNA sense strand
ugcaguuguucaagaaaga

SEQ ID NO: 2229382 - RNA, 19 nt, Homo sapiens
  misc_RNA (1)...(19): siRNA sense strand
guguuuacguguauagugu

SEQ ID NO: 2229383 - RNA, 19 nt, Homo sapiens
  misc_RNA (1)...(19): siRNA sense strand
auggcaaugucgaugguuu

SEQ ID NO: 2229384 - RNA, 19 nt, Homo sapiens
  misc_RNA (1)...(19): siRNA sense strand
cuacagaaccaagugaaau

SEQ ID NO: 2229385 - RNA, 19 nt, Homo sapiens
  misc_RNA (1)...(19): siRNA sense strand
gaaccaagugaaaucucaa

SEQ ID NO: 2229386 - RNA, 19 nt, Homo sapiens
  misc_RNA (1)...(19): siRNA sense strand
ugacucugcugguuggaau

SEQ ID NO: 2229387 - RNA, 19 nt, Homo sapiens
  misc_RNA (1)...(19): siRNA sense strand
gguuggaauuauacaguug

SEQ ID NO: 2229388 - RNA, 19 nt, Homo sapiens
  misc_RNA (1)...(19): siRNA sense strand
ugaucgguuuagacacaaa

SEQ ID NO: 2229389 - RNA, 19 nt, Homo sapiens
  misc_RNA (1)...(19): siRNA sense strand
uuugaugccauuagaguau

SEQ ID NO: 2229390 - RNA, 19 nt, Homo sapiens
  misc_RNA (1)...(19): siRNA sense strand
gggaggagacucagcgcua

SEQ ID NO: 2229391 - RNA, 19 nt, Homo sapiens
  misc_RNA (1)...(19): siRNA sense strand
uguaaaagugggaaugaaa

SEQ ID NO: 2229392 - RNA, 19 nt, Homo sapiens
  misc_RNA (1)...(19): siRNA sense strand
aaagaauauggguuggaaa

SEQ ID NO: 2229393 - RNA, 19 nt, Homo sapiens
  misc_RNA (1)...(19): siRNA sense strand
gaaugaaagaauauggguu

SEQ ID NO: 2229394 - RNA, 19 nt, Homo sapiens
  misc_RNA (1)...(19): siRNA sense strand
agaaguaugccguggacga

SEQ ID NO: 2229395 - RNA, 19 nt, Homo sapiens
  misc_RNA (1)...(19): siRNA sense strand
aggagcacuucaaggagaa

SEQ ID NO: 2229396 - RNA, 19 nt, Homo sapiens
  misc_RNA (1)...(19): siRNA sense strand
agguaaugaaggcuguaaa

SEQ ID NO: 2229397 - RNA, 19 nt, Homo sapiens
  misc_RNA (1)...(19): siRNA sense strand
aggaggacgucguggugau

SEQ ID NO: 2229398 - RNA, 19 nt, Homo sapiens
  misc_RNA (1)...(19): siRNA sense strand
gcauagagcugcugaccug

SEQ ID NO: 2229399 - RNA, 19 nt, Homo sapiens
  misc_RNA (1)...(19): siRNA sense strand
ccgcacuguggaagagauu

SEQ ID NO: 2229400 - RNA, 19 nt, Homo sapiens
  misc_RNA (1)...(19): siRNA sense strand
uggaagagauugaagcaug

SEQ ID NO: 2229401 - RNA, 19 nt, Homo sapiens
  misc_RNA (1)...(19): siRNA sense strand
guuuaugccucacgggcuu

SEQ ID NO: 2229402 - RNA, 19 nt, Homo sapiens
  misc_RNA (1)...(19): siRNA sense strand
cgaguguuuaagacggaua

SEQ ID NO: 2229403 - RNA, 19 nt, Homo sapiens
  misc_RNA (1)...(19): siRNA sense strand
acgccaugguccaggcuca

SEQ ID NO: 2229404 - RNA, 19 nt, Homo sapiens
  misc_RNA (1)...(19): siRNA sense strand
agcuggagguucugcgcua

SEQ ID NO: 2229405 - RNA, 19 nt, Homo sapiens
  misc_RNA (1)...(19): siRNA sense strand
agugggaaugaaagaauau

SEQ ID NO: 2229406 - RNA, 19 nt, Homo sapiens
  misc_RNA (1)...(19): siRNA sense strand
guaaacuaucugagggaaa

SEQ ID NO: 2229407 - RNA, 19 nt, Homo sapiens
  misc_RNA (1)...(19): siRNA sense strand
uaaccauggaugagauaaa

SEQ ID NO: 2229408 - RNA, 19 nt, Homo sapiens
  misc_RNA (1)...(19): siRNA sense strand
gcaacagaggcaauagaaa

SEQ ID NO: 2229409 - RNA, 19 nt, Homo sapiens
  misc_RNA (1)...(19): siRNA sense strand
caggauucauagugggauu

SEQ ID NO: 2229410 - RNA, 19 nt, Homo sapiens
  misc_RNA (1)...(19): siRNA sense strand
agaaaaugccaaagagauu

SEQ ID NO: 2229411 - RNA, 19 nt, Homo sapiens
  misc_RNA (1)...(19): siRNA sense strand
caugaaauuaccacagaaa

SEQ ID NO: 2229412 - RNA, 19 nt, Homo sapiens
  misc_RNA (1)...(19): siRNA sense strand
cgauggacuugaagcaaau

SEQ ID NO: 2229413 - RNA, 19 nt, Homo sapiens
  misc_RNA (1)...(19): siRNA sense strand
agaaagugaagcugaggua

SEQ ID NO: 2229414 - RNA, 19 nt, Homo sapiens
  misc_RNA (1)...(19): siRNA sense strand
uggaaagguaucagaaaca

SEQ ID NO: 2229415 - RNA, 19 nt, Homo sapiens
  misc_RNA (1)...(19): siRNA sense strand
gcaaacauuuccaugggua

SEQ ID NO: 2229416 - RNA, 19 nt, Homo sapiens
  misc_RNA (1)...(19): siRNA sense strand
uggucaagaagcaaagaaa

SEQ ID NO: 2229417 - RNA, 19 nt, Homo sapiens
  misc_RNA (1)...(19): siRNA sense strand
gugaaaagguuguccaaga

SEQ ID NO: 2229418 - RNA, 19 nt, Homo sapiens
  misc_RNA (1)...(19): siRNA sense strand
gcuggaaagguaucagaaa

SEQ ID NO: 2229419 - RNA, 19 nt, Homo sapiens
  misc_RNA (1)...(19): siRNA sense strand
gggaacaguaugugccauu

SEQ ID NO: 2229420 - RNA, 19 nt, Homo sapiens
  misc_RNA (1)...(19): siRNA sense strand
caggaauuguugaaaugaa

SEQ ID NO: 2229421 - RNA, 19 nt, Homo sapiens
  misc_RNA (1)...(19): siRNA sense strand
ugucaggaauuguugaaau

SEQ ID NO: 2229422 - RNA, 19 nt, Homo sapiens
  misc_RNA (1)...(19): siRNA sense strand
ggacaaagccagagaaggc

SEQ ID NO: 2229423 - RNA, 19 nt, Homo sapiens
  misc_RNA (1)...(19): siRNA sense strand
agacagcaucaaagggaau

SEQ ID NO: 2229424 - RNA, 19 nt, Homo sapiens
  misc_RNA (1)...(19): siRNA sense strand
cuggauacugaaagugaaa

SEQ ID NO: 2229425 - RNA, 19 nt, Homo sapiens
  misc_RNA (1)...(19): siRNA sense strand
gggcaggauauuaggaacu

SEQ ID NO: 2229426 - RNA, 19 nt, Homo sapiens
  misc_RNA (1)...(19): siRNA sense strand
gcagcauugccgagaauau

SEQ ID NO: 2229427 - RNA, 19 nt, Homo sapiens
  misc_RNA (1)...(19): siRNA sense strand
agauaaagaaagcugucaa

SEQ ID NO: 2229428 - RNA, 19 nt, Homo sapiens
  misc_RNA (1)...(19): siRNA sense strand
gucagaagaauuugaacua

SEQ ID NO: 2229429 - RNA, 19 nt, Homo sapiens
  misc_RNA (1)...(19): siRNA sense strand
aaacgaagacagugaaaau

SEQ ID NO: 2229430 - RNA, 19 nt, Homo sapiens
  misc_RNA (1)...(19): siRNA sense strand
gguuggaaguaguggcugu

SEQ ID NO: 2229431 - RNA, 19 nt, Homo sapiens
  misc_RNA (1)...(19): siRNA sense strand
acuuaauagugguguuuca

SEQ ID NO: 2229432 - RNA, 19 nt, Homo sapiens
  misc_RNA (1)...(19): siRNA sense strand
gggcaucagcagcaaacaa

SEQ ID NO: 2229433 - RNA, 19 nt, Homo sapiens
  misc_RNA (1)...(19): siRNA sense strand
cagaacaaagagcuggaaa

SEQ ID NO: 2229434 - RNA, 19 nt, Homo sapiens
  misc_RNA (1)...(19): siRNA sense strand
caaagaaacucaaugucca

SEQ ID NO: 2229435 - RNA, 19 nt, Homo sapiens
  misc_RNA (1)...(19): siRNA sense strand
uggaguaauuguggagcaa

SEQ ID NO: 2229436 - RNA, 19 nt, Homo sapiens
  misc_RNA (1)...(19): siRNA sense strand
ggcuuuaauugcacagaau

SEQ ID NO: 2229437 - RNA, 19 nt, Homo sapiens
  misc_RNA (1)...(19): siRNA sense strand
cagacuaugcuaaagcuaa

SEQ ID NO: 2229438 - RNA, 19 nt, Homo sapiens
  misc_RNA (1)...(19): siRNA sense strand
aauugugagugcagccaaa

SEQ ID NO: 2229439 - RNA, 19 nt, Homo sapiens
  misc_RNA (1)...(19): siRNA sense strand
caggauauuaggaacuuua

SEQ ID NO: 2229440 - RNA, 19 nt, Homo sapiens
  misc_RNA (1)...(19): siRNA sense strand
gggcagaagcagaggaucg

SEQ ID NO: 2229441 - RNA, 19 nt, Homo sapiens
  misc_RNA (1)...(19): siRNA sense strand
aaagugaagcugagguaca

SEQ ID NO: 2229442 - RNA, 19 nt, Homo sapiens
  misc_RNA (1)...(19): siRNA sense strand
cagacagcaucaaagggaa

SEQ ID NO: 2229443 - RNA, 19 nt, Homo sapiens
  misc_RNA (1)...(19): siRNA sense strand
ccugaugagggcacaauua

SEQ ID NO: 2229444 - RNA, 19 nt, Homo sapiens
  misc_RNA (1)...(19): siRNA sense strand
ccacaauugcugaaaauau

SEQ ID NO: 2229445 - RNA, 19 nt, Homo sapiens
  misc_RNA (1)...(19): siRNA sense strand
acuucaaacuugucaacau

SEQ ID NO: 2229446 - RNA, 19 nt, Homo sapiens
  misc_RNA (1)...(19): siRNA sense strand
ccugauaaauuugaaggaa

SEQ ID NO: 2229447 - RNA, 19 nt, Homo sapiens
  misc_RNA (1)...(19): siRNA sense strand
ugaugauaguauuuggaga

SEQ ID NO: 2229448 - RNA, 19 nt, Homo sapiens
  misc_RNA (1)...(19): siRNA sense strand
ggucgacagaucaggaaaa

SEQ ID NO: 2229449 - RNA, 19 nt, Homo sapiens
  misc_RNA (1)...(19): siRNA sense strand
gcgaugaugcagugaagca

SEQ ID NO: 2229450 - RNA, 19 nt, Homo sapiens
  misc_RNA (1)...(19): siRNA sense strand
gucaagaagcaaagaaacu

SEQ ID NO: 2229451 - RNA, 19 nt, Homo sapiens
  misc_RNA (1)...(19): siRNA sense strand
gaaagguaucagaaacauu

SEQ ID NO: 2229452 - RNA, 19 nt, Homo sapiens
  misc_RNA (1)...(19): siRNA sense strand
uuguuauggccguggaaau

SEQ ID NO: 2229453 - RNA, 19 nt, Homo sapiens
  misc_RNA (1)...(19): siRNA sense strand
cauggaugagauaaagaaa

SEQ ID NO: 2229454 - RNA, 19 nt, Homo sapiens
  misc_RNA (1)...(19): siRNA sense strand
acacagaaagugaagcuga

SEQ ID NO: 2229455 - RNA, 19 nt, Homo sapiens
  misc_RNA (1)...(19): siRNA sense strand
caaacauuuccauggguau

SEQ ID NO: 2229456 - RNA, 19 nt, Homo sapiens
  misc_RNA (1)...(19): siRNA sense strand
aggauugggugcuggaguu

SEQ ID NO: 2229457 - RNA, 19 nt, Homo sapiens
  misc_RNA (1)...(19): siRNA sense strand
acaggaaauaggaugguuu

SEQ ID NO: 2229458 - RNA, 19 nt, Homo sapiens
  misc_RNA (1)...(19): siRNA sense strand
ugcaagaggagcagcauau

SEQ ID NO: 2229459 - RNA, 19 nt, Homo sapiens
  misc_RNA (1)...(19): siRNA sense strand
ggguuguaucacaggauga

SEQ ID NO: 2229460 - RNA, 19 nt, Homo sapiens
  misc_RNA (1)...(19): siRNA sense strand
ccaaaaucagugaaggaau

SEQ ID NO: 2229461 - RNA, 19 nt, Homo sapiens
  misc_RNA (1)...(19): siRNA sense strand
guaaacuaucugagggaaa

SEQ ID NO: 2229462 - RNA, 19 nt, Homo sapiens
  misc_RNA (1)...(19): siRNA sense strand
uaaccauggaugagauaaa

SEQ ID NO: 2229463 - RNA, 19 nt, Homo sapiens
  misc_RNA (1)...(19): siRNA sense strand
gcaacagaggcaauagaaa

SEQ ID NO: 2229464 - RNA, 19 nt, Homo sapiens
  misc_RNA (1)...(19): siRNA sense strand
caggauucauagugggauu

SEQ ID NO: 2229465 - RNA, 19 nt, Homo sapiens
  misc_RNA (1)...(19): siRNA sense strand
agaaaaugccaaagagauu

SEQ ID NO: 2229466 - RNA, 19 nt, Homo sapiens
  misc_RNA (1)...(19): siRNA sense strand
caugaaauuaccacagaaa

SEQ ID NO: 2229467 - RNA, 19 nt, Homo sapiens
  misc_RNA (1)...(19): siRNA sense strand
cgauggacuugaagcaaau

SEQ ID NO: 2229468 - RNA, 19 nt, Homo sapiens
  misc_RNA (1)...(19): siRNA sense strand
agaaagugaagcugaggua

SEQ ID NO: 2229469 - RNA, 19 nt, Homo sapiens
  misc_RNA (1)...(19): siRNA sense strand
uggaaagguaucagaaaca

SEQ ID NO: 2229470 - RNA, 19 nt, Homo sapiens
  misc_RNA (1)...(19): siRNA sense strand
gcaaacauuuccaugggua

SEQ ID NO: 2229471 - RNA, 19 nt, Homo sapiens
  misc_RNA (1)...(19): siRNA sense strand
uggucaagaagcaaagaaa

SEQ ID NO: 2229472 - RNA, 19 nt, Homo sapiens
  misc_RNA (1)...(19): siRNA sense strand
gugaaaagguuguccaaga

SEQ ID NO: 2229473 - RNA, 19 nt, Homo sapiens
  misc_RNA (1)...(19): siRNA sense strand
gcuggaaagguaucagaaa

SEQ ID NO: 2229474 - RNA, 19 nt, Homo sapiens
  misc_RNA (1)...(19): siRNA sense strand
gggaacaguaugugccauu

SEQ ID NO: 2229475 - RNA, 19 nt, Homo sapiens
  misc_RNA (1)...(19): siRNA sense strand
caggaauuguugaaaugaa

SEQ ID NO: 2229476 - RNA, 19 nt, Homo sapiens
  misc_RNA (1)...(19): siRNA sense strand
ugucaggaauuguugaaau

SEQ ID NO: 2229477 - RNA, 19 nt, Homo sapiens
  misc_RNA (1)...(19): siRNA sense strand
ggacaaagccagagaaggc

SEQ ID NO: 2229478 - RNA, 19 nt, Homo sapiens
  misc_RNA (1)...(19): siRNA sense strand
agacagcaucaaagggaau

SEQ ID NO: 2229479 - RNA, 19 nt, Homo sapiens
  misc_RNA (1)...(19): siRNA sense strand
cuggauacugaaagugaaa

SEQ ID NO: 2229480 - RNA, 19 nt, Homo sapiens
  misc_RNA (1)...(19): siRNA sense strand
gggcaggauauuaggaacu

SEQ ID NO: 2229481 - RNA, 19 nt, Homo sapiens
  misc_RNA (1)...(19): siRNA sense strand
gcagcauugccgagaauau

SEQ ID NO: 2229482 - RNA, 19 nt, Homo sapiens
  misc_RNA (1)...(19): siRNA sense strand
agauaaagaaagcugucaa

SEQ ID NO: 2229483 - RNA, 19 nt, Homo sapiens
  misc_RNA (1)...(19): siRNA sense strand
gucagaagaauuugaacua

SEQ ID NO: 2229484 - RNA, 19 nt, Homo sapiens
  misc_RNA (1)...(19): siRNA sense strand
aaacgaagacagugaaaau

SEQ ID NO: 2229485 - RNA, 19 nt, Homo sapiens
  misc_RNA (1)...(19): siRNA sense strand
gguuggaaguaguggcugu

SEQ ID NO: 2229486 - RNA, 19 nt, Homo sapiens
  misc_RNA (1)...(19): siRNA sense strand
acuuaauagugguguuuca

SEQ ID NO: 2229487 - RNA, 19 nt, Homo sapiens
  misc_RNA (1)...(19): siRNA sense strand
gggcaucagcagcaaacaa

SEQ ID NO: 2229488 - RNA, 19 nt, Homo sapiens
  misc_RNA (1)...(19): siRNA sense strand
cagaacaaagagcuggaaa

SEQ ID NO: 2229489 - RNA, 19 nt, Homo sapiens
  misc_RNA (1)...(19): siRNA sense strand
caaagaaacucaaugucca

SEQ ID NO: 2229490 - RNA, 19 nt, Homo sapiens
  misc_RNA (1)...(19): siRNA sense strand
uggaguaauuguggagcaa

SEQ ID NO: 2229491 - RNA, 19 nt, Homo sapiens
  misc_RNA (1)...(19): siRNA sense strand
ggcuuuaauugcacagaau

SEQ ID NO: 2229492 - RNA, 19 nt, Homo sapiens
  misc_RNA (1)...(19): siRNA sense strand
cagacuaugcuaaagcuaa

SEQ ID NO: 2229493 - RNA, 19 nt, Homo sapiens
  misc_RNA (1)...(19): siRNA sense strand
aauugugagugcagccaaa

SEQ ID NO: 2229494 - RNA, 19 nt, Homo sapiens
  misc_RNA (1)...(19): siRNA sense strand
caggauauuaggaacuuua

SEQ ID NO: 2229495 - RNA, 19 nt, Homo sapiens
  misc_RNA (1)...(19): siRNA sense strand
gggcagaagcagaggaucg

SEQ ID NO: 2229496 - RNA, 19 nt, Homo sapiens
  misc_RNA (1)...(19): siRNA sense strand
aaagugaagcugagguaca

SEQ ID NO: 2229497 - RNA, 19 nt, Homo sapiens
  misc_RNA (1)...(19): siRNA sense strand
cagacagcaucaaagggaa

SEQ ID NO: 2229498 - RNA, 19 nt, Homo sapiens
  misc_RNA (1)...(19): siRNA sense strand
ccugaugagggcacaauua

SEQ ID NO: 2229499 - RNA, 19 nt, Homo sapiens
  misc_RNA (1)...(19): siRNA sense strand
ccacaauugcugaaaauau

SEQ ID NO: 2229500 - RNA, 19 nt, Homo sapiens
  misc_RNA (1)...(19): siRNA sense strand
acuucaaacuugucaacau

SEQ ID NO: 2229501 - RNA, 19 nt, Homo sapiens
  misc_RNA (1)...(19): siRNA sense strand
ccugauaaauuugaaggaa

SEQ ID NO: 2229502 - RNA, 19 nt, Homo sapiens
  misc_RNA (1)...(19): siRNA sense strand
ugaugauaguauuuggaga

SEQ ID NO: 2229503 - RNA, 19 nt, Homo sapiens
  misc_RNA (1)...(19): siRNA sense strand
ggucgacagaucaggaaaa

SEQ ID NO: 2229504 - RNA, 19 nt, Homo sapiens
  misc_RNA (1)...(19): siRNA sense strand
gcgaugaugcagugaagca

SEQ ID NO: 2229505 - RNA, 19 nt, Homo sapiens
  misc_RNA (1)...(19): siRNA sense strand
gucaagaagcaaagaaacu

SEQ ID NO: 2229506 - RNA, 19 nt, Homo sapiens
  misc_RNA (1)...(19): siRNA sense strand
gaaagguaucagaaacauu

SEQ ID NO: 2229507 - RNA, 19 nt, Homo sapiens
  misc_RNA (1)...(19): siRNA sense strand
uuguuauggccguggaaau

SEQ ID NO: 2229508 - RNA, 19 nt, Homo sapiens
  misc_RNA (1)...(19): siRNA sense strand
cauggaugagauaaagaaa

SEQ ID NO: 2229509 - RNA, 19 nt, Homo sapiens
  misc_RNA (1)...(19): siRNA sense strand
acacagaaagugaagcuga

SEQ ID NO: 2229510 - RNA, 19 nt, Homo sapiens
  misc_RNA (1)...(19): siRNA sense strand
caaacauuuccauggguau

SEQ ID NO: 2229511 - RNA, 19 nt, Homo sapiens
  misc_RNA (1)...(19): siRNA sense strand
aggauugggugcuggaguu

SEQ ID NO: 2229512 - RNA, 19 nt, Homo sapiens
  misc_RNA (1)...(19): siRNA sense strand
acaggaaauaggaugguuu

SEQ ID NO: 2229513 - RNA, 19 nt, Homo sapiens
  misc_RNA (1)...(19): siRNA sense strand
ugcaagaggagcagcauau

SEQ ID NO: 2229514 - RNA, 19 nt, Homo sapiens
  misc_RNA (1)...(19): siRNA sense strand
ggguuguaucacaggauga

SEQ ID NO: 2229515 - RNA, 19 nt, Homo sapiens
  misc_RNA (1)...(19): siRNA sense strand
ccaaaaucagugaaggaau

SEQ ID NO: 2229516 - RNA, 19 nt, Homo sapiens
  misc_RNA (1)...(19): siRNA sense strand
guaaacuaucugagggaaa

SEQ ID NO: 2229517 - RNA, 19 nt, Homo sapiens
  misc_RNA (1)...(19): siRNA sense strand
uaaccauggaugagauaaa

SEQ ID NO: 2229518 - RNA, 19 nt, Homo sapiens
  misc_RNA (1)...(19): siRNA sense strand
gcaacagaggcaauagaaa

SEQ ID NO: 2229519 - RNA, 19 nt, Homo sapiens
  misc_RNA (1)...(19): siRNA sense strand
caggauucauagugggauu

SEQ ID NO: 2229520 - RNA, 19 nt, Homo sapiens
  misc_RNA (1)...(19): siRNA sense strand
agaaaaugccaaagagauu

SEQ ID NO: 2229521 - RNA, 19 nt, Homo sapiens
  misc_RNA (1)...(19): siRNA sense strand
caugaaauuaccacagaaa

SEQ ID NO: 2229522 - RNA, 19 nt, Homo sapiens
  misc_RNA (1)...(19): siRNA sense strand
cgauggacuugaagcaaau

SEQ ID NO: 2229523 - RNA, 19 nt, Homo sapiens
  misc_RNA (1)...(19): siRNA sense strand
agaaagugaagcugaggua

SEQ ID NO: 2229524 - RNA, 19 nt, Homo sapiens
  misc_RNA (1)...(19): siRNA sense strand
uggaaagguaucagaaaca

SEQ ID NO: 2229525 - RNA, 19 nt, Homo sapiens
  misc_RNA (1)...(19): siRNA sense strand
gcaaacauuuccaugggua

SEQ ID NO: 2229526 - RNA, 19 nt, Homo sapiens
  misc_RNA (1)...(19): siRNA sense strand
uggucaagaagcaaagaaa

SEQ ID NO: 2229527 - RNA, 19 nt, Homo sapiens
  misc_RNA (1)...(19): siRNA sense strand
gugaaaagguuguccaaga

SEQ ID NO: 2229528 - RNA, 19 nt, Homo sapiens
  misc_RNA (1)...(19): siRNA sense strand
gcuggaaagguaucagaaa

SEQ ID NO: 2229529 - RNA, 19 nt, Homo sapiens
  misc_RNA (1)...(19): siRNA sense strand
gggaacaguaugugccauu

SEQ ID NO: 2229530 - RNA, 19 nt, Homo sapiens
  misc_RNA (1)...(19): siRNA sense strand
caggaauuguugaaaugaa

SEQ ID NO: 2229531 - RNA, 19 nt, Homo sapiens
  misc_RNA (1)...(19): siRNA sense strand
ugucaggaauuguugaaau

SEQ ID NO: 2229532 - RNA, 19 nt, Homo sapiens
  misc_RNA (1)...(19): siRNA sense strand
ggacaaagccagagaaggc

SEQ ID NO: 2229533 - RNA, 19 nt, Homo sapiens
  misc_RNA (1)...(19): siRNA sense strand
agacagcaucaaagggaau

SEQ ID NO: 2229534 - RNA, 19 nt, Homo sapiens
  misc_RNA (1)...(19): siRNA sense strand
cuggauacugaaagugaaa

SEQ ID NO: 2229535 - RNA, 19 nt, Homo sapiens
  misc_RNA (1)...(19): siRNA sense strand
gggcaggauauuaggaacu

SEQ ID NO: 2229536 - RNA, 19 nt, Homo sapiens
  misc_RNA (1)...(19): siRNA sense strand
gcagcauugccgagaauau

SEQ ID NO: 2229537 - RNA, 19 nt, Homo sapiens
  misc_RNA (1)...(19): siRNA sense strand
agauaaagaaagcugucaa

SEQ ID NO: 2229538 - RNA, 19 nt, Homo sapiens
  misc_RNA (1)...(19): siRNA sense strand
gucagaagaauuugaacua

SEQ ID NO: 2229539 - RNA, 19 nt, Homo sapiens
  misc_RNA (1)...(19): siRNA sense strand
aaacgaagacagugaaaau

SEQ ID NO: 2229540 - RNA, 19 nt, Homo sapiens
  misc_RNA (1)...(19): siRNA sense strand
gguuggaaguaguggcugu

SEQ ID NO: 2229541 - RNA, 19 nt, Homo sapiens
  misc_RNA (1)...(19): siRNA sense strand
acuuaauagugguguuuca

SEQ ID NO: 2229542 - RNA, 19 nt, Homo sapiens
  misc_RNA (1)...(19): siRNA sense strand
gggcaucagcagcaaacaa

SEQ ID NO: 2229543 - RNA, 19 nt, Homo sapiens
  misc_RNA (1)...(19): siRNA sense strand
cagaacaaagagcuggaaa

SEQ ID NO: 2229544 - RNA, 19 nt, Homo sapiens
  misc_RNA (1)...(19): siRNA sense strand
caaagaaacucaaugucca

SEQ ID NO: 2229545 - RNA, 19 nt, Homo sapiens
  misc_RNA (1)...(19): siRNA sense strand
uggaguaauuguggagcaa

SEQ ID NO: 2229546 - RNA, 19 nt, Homo sapiens
  misc_RNA (1)...(19): siRNA sense strand
ggcuuuaauugcacagaau

SEQ ID NO: 2229547 - RNA, 19 nt, Homo sapiens
  misc_RNA (1)...(19): siRNA sense strand
cagacuaugcuaaagcuaa

SEQ ID NO: 2229548 - RNA, 19 nt, Homo sapiens
  misc_RNA (1)...(19): siRNA sense strand
aauugugagugcagccaaa

SEQ ID NO: 2229549 - RNA, 19 nt, Homo sapiens
  misc_RNA (1)...(19): siRNA sense strand
caggauauuaggaacuuua

SEQ ID NO: 2229550 - RNA, 19 nt, Homo sapiens
  misc_RNA (1)...(19): siRNA sense strand
gggcagaagcagaggaucg

SEQ ID NO: 2229551 - RNA, 19 nt, Homo sapiens
  misc_RNA (1)...(19): siRNA sense strand
aaagugaagcugagguaca

SEQ ID NO: 2229552 - RNA, 19 nt, Homo sapiens
  misc_RNA (1)...(19): siRNA sense strand
cagacagcaucaaagggaa

SEQ ID NO: 2229553 - RNA, 19 nt, Homo sapiens
  misc_RNA (1)...(19): siRNA sense strand
ccugaugagggcacaauua

SEQ ID NO: 2229554 - RNA, 19 nt, Homo sapiens
  misc_RNA (1)...(19): siRNA sense strand
ccacaauugcugaaaauau

SEQ ID NO: 2229555 - RNA, 19 nt, Homo sapiens
  misc_RNA (1)...(19): siRNA sense strand
acuucaaacuugucaacau

SEQ ID NO: 2229556 - RNA, 19 nt, Homo sapiens
  misc_RNA (1)...(19): siRNA sense strand
ccugauaaauuugaaggaa

SEQ ID NO: 2229557 - RNA, 19 nt, Homo sapiens
  misc_RNA (1)...(19): siRNA sense strand
ugaugauaguauuuggaga

SEQ ID NO: 2229558 - RNA, 19 nt, Homo sapiens
  misc_RNA (1)...(19): siRNA sense strand
ggucgacagaucaggaaaa

SEQ ID NO: 2229559 - RNA, 19 nt, Homo sapiens
  misc_RNA (1)...(19): siRNA sense strand
gcgaugaugcagugaagca

SEQ ID NO: 2229560 - RNA, 19 nt, Homo sapiens
  misc_RNA (1)...(19): siRNA sense strand
gucaagaagcaaagaaacu

SEQ ID NO: 2229561 - RNA, 19 nt, Homo sapiens
  misc_RNA (1)...(19): siRNA sense strand
gaaagguaucagaaacauu

SEQ ID NO: 2229562 - RNA, 19 nt, Homo sapiens
  misc_RNA (1)...(19): siRNA sense strand
uuguuauggccguggaaau

SEQ ID NO: 2229563 - RNA, 19 nt, Homo sapiens
  misc_RNA (1)...(19): siRNA sense strand
cauggaugagauaaagaaa

SEQ ID NO: 2229564 - RNA, 19 nt, Homo sapiens
  misc_RNA (1)...(19): siRNA sense strand
acacagaaagugaagcuga

SEQ ID NO: 2229565 - RNA, 19 nt, Homo sapiens
  misc_RNA (1)...(19): siRNA sense strand
caaacauuuccauggguau

SEQ ID NO: 2229566 - RNA, 19 nt, Homo sapiens
  misc_RNA (1)...(19): siRNA sense strand
aggauugggugcuggaguu

SEQ ID NO: 2229567 - RNA, 19 nt, Homo sapiens
  misc_RNA (1)...(19): siRNA sense strand
acaggaaauaggaugguuu

SEQ ID NO: 2229568 - RNA, 19 nt, Homo sapiens
  misc_RNA (1)...(19): siRNA sense strand
ugcaagaggagcagcauau

SEQ ID NO: 2229569 - RNA, 19 nt, Homo sapiens
  misc_RNA (1)...(19): siRNA sense strand
ggguuguaucacaggauga

SEQ ID NO: 2229570 - RNA, 19 nt, Homo sapiens
  misc_RNA (1)...(19): siRNA sense strand
ccaaaaucagugaaggaau

SEQ ID NO: 2229571 - RNA, 19 nt, Homo sapiens
  misc_RNA (1)...(19): siRNA sense strand
gaaauaaaccugaguggga

SEQ ID NO: 2229572 - RNA, 19 nt, Homo sapiens
  misc_RNA (1)...(19): siRNA sense strand
ggacagacgugcaggugga

SEQ ID NO: 2229573 - RNA, 19 nt, Homo sapiens
  misc_RNA (1)...(19): siRNA sense strand
ccuccaaccacgugagcaa

SEQ ID NO: 2229574 - RNA, 19 nt, Homo sapiens
  misc_RNA (1)...(19): siRNA sense strand
gggcauguguccaggcuga

SEQ ID NO: 2229575 - RNA, 19 nt, Homo sapiens
  misc_RNA (1)...(19): siRNA sense strand
ggacagaugaagagugacu

SEQ ID NO: 2229576 - RNA, 19 nt, Homo sapiens
  misc_RNA (1)...(19): siRNA sense strand
ggacaaggugugagccuga

SEQ ID NO: 2229577 - RNA, 19 nt, Homo sapiens
  misc_RNA (1)...(19): siRNA sense strand
gcaacuacuuggaggccca

SEQ ID NO: 2229578 - RNA, 19 nt, Homo sapiens
  misc_RNA (1)...(19): siRNA sense strand
ccacgggcacugagaggaa

SEQ ID NO: 2229579 - RNA, 19 nt, Homo sapiens
  misc_RNA (1)...(19): siRNA sense strand
uggacugccuggagggaca

SEQ ID NO: 2229580 - RNA, 19 nt, Homo sapiens
  misc_RNA (1)...(19): siRNA sense strand
cugaggaaccugagcccua

SEQ ID NO: 2229581 - RNA, 19 nt, Homo sapiens
  misc_RNA (1)...(19): siRNA sense strand
cuacguuagaagaaggaau

SEQ ID NO: 2229582 - RNA, 19 nt, Homo sapiens
  misc_RNA (1)...(19): siRNA sense strand
gaguguggcacgacaacaa

SEQ ID NO: 2229583 - RNA, 19 nt, Homo sapiens
  misc_RNA (1)...(19): siRNA sense strand
cuggaugggcugagcguga

SEQ ID NO: 2229584 - RNA, 19 nt, Homo sapiens
  misc_RNA (1)...(19): siRNA sense strand
aggcaacaguggagcaugu

SEQ ID NO: 2229585 - RNA, 19 nt, Homo sapiens
  misc_RNA (1)...(19): siRNA sense strand
cgcaagaacaucacggaga

SEQ ID NO: 2229586 - RNA, 19 nt, Homo sapiens
  misc_RNA (1)...(19): siRNA sense strand
gugacuuguuucuggauga

SEQ ID NO: 2229587 - RNA, 19 nt, Homo sapiens
  misc_RNA (1)...(19): siRNA sense strand
gggccaagaacaaggucca

SEQ ID NO: 2229588 - RNA, 19 nt, Homo sapiens
  misc_RNA (1)...(19): siRNA sense strand
ugcagaagguccagggcga

SEQ ID NO: 2229589 - RNA, 19 nt, Homo sapiens
  misc_RNA (1)...(19): siRNA sense strand
gaagaagcccgcaagguca

SEQ ID NO: 2229590 - RNA, 19 nt, Homo sapiens
  misc_RNA (1)...(19): siRNA sense strand
cuggguagcguguggaaga

SEQ ID NO: 2229591 - RNA, 19 nt, Homo sapiens
  misc_RNA (1)...(19): siRNA sense strand
ucaccagcaucaaggucaa

SEQ ID NO: 2229592 - RNA, 19 nt, Homo sapiens
  misc_RNA (1)...(19): siRNA sense strand
ugcacaagcuggaggccau

SEQ ID NO: 2229593 - RNA, 19 nt, Homo sapiens
  misc_RNA (1)...(19): siRNA sense strand
gggagaagacagagacgcu

SEQ ID NO: 2229594 - RNA, 19 nt, Homo sapiens
  misc_RNA (1)...(19): siRNA sense strand
cugcacaacuggcuggaca

SEQ ID NO: 2229595 - RNA, 19 nt, Homo sapiens
  misc_RNA (1)...(19): siRNA sense strand
ccaaggaagaagcccgcaa

SEQ ID NO: 2229596 - RNA, 19 nt, Homo sapiens
  misc_RNA (1)...(19): siRNA sense strand
aaauaaaccugagugggaa

SEQ ID NO: 2229597 - RNA, 19 nt, Homo sapiens
  misc_RNA (1)...(19): siRNA sense strand
cugugugccuggugaccua

SEQ ID NO: 2229598 - RNA, 19 nt, Homo sapiens
  misc_RNA (1)...(19): siRNA sense strand
gcgccuucuuccuggucaa

SEQ ID NO: 2229599 - RNA, 19 nt, Homo sapiens
  misc_RNA (1)...(19): siRNA sense strand
gcaggaggcuucagcacca

SEQ ID NO: 2229600 - RNA, 19 nt, Homo sapiens
  misc_RNA (1)...(19): siRNA sense strand
gcgcauuacuucaccagca

SEQ ID NO: 2229601 - RNA, 19 nt, Homo sapiens
  misc_RNA (1)...(19): siRNA sense strand
ucaagaggcuacauggcau

SEQ ID NO: 2229602 - RNA, 19 nt, Homo sapiens
  misc_RNA (1)...(19): siRNA sense strand
acgagaugguggaguuguu

SEQ ID NO: 2229603 - RNA, 19 nt, Homo sapiens
  misc_RNA (1)...(19): siRNA sense strand
gcuaugagguccgggcaga

SEQ ID NO: 2229604 - RNA, 19 nt, Homo sapiens
  misc_RNA (1)...(19): siRNA sense strand
caggacugguggagggucu

SEQ ID NO: 2229605 - RNA, 19 nt, Homo sapiens
  misc_RNA (1)...(19): siRNA sense strand
ggcaaaggcuucucgcuca

SEQ ID NO: 2229606 - RNA, 19 nt, Homo sapiens
  misc_RNA (1)...(19): siRNA sense strand
aggcacaggccguguacga

SEQ ID NO: 2229607 - RNA, 19 nt, Homo sapiens
  misc_RNA (1)...(19): siRNA sense strand
cguuagaagaaggaauauu

SEQ ID NO: 2229608 - RNA, 19 nt, Homo sapiens
  misc_RNA (1)...(19): siRNA sense strand
ccucggacacggagaucuu

SEQ ID NO: 2229609 - RNA, 19 nt, Homo sapiens
  misc_RNA (1)...(19): siRNA sense strand
gcaucaaggucaauggcuc

SEQ ID NO: 2229610 - RNA, 19 nt, Homo sapiens
  misc_RNA (1)...(19): siRNA sense strand
guucuuuacacgugggacu

SEQ ID NO: 2229611 - RNA, 19 nt, Homo sapiens
  misc_RNA (1)...(19): siRNA sense strand
gagcuggauauaagcaaca

SEQ ID NO: 2229612 - RNA, 19 nt, Homo sapiens
  misc_RNA (1)...(19): siRNA sense strand
ccaccaaccacacgguaca

SEQ ID NO: 2229613 - RNA, 19 nt, Homo sapiens
  misc_RNA (1)...(19): siRNA sense strand
gaggauccgcccagaguca

SEQ ID NO: 2229614 - RNA, 19 nt, Homo sapiens
  misc_RNA (1)...(19): siRNA sense strand
acguugggcuccuggcgaa

SEQ ID NO: 2229615 - RNA, 19 nt, Homo sapiens
  misc_RNA (1)...(19): siRNA sense strand
cagcacuaaccgagagaaa

SEQ ID NO: 2229616 - RNA, 19 nt, Homo sapiens
  misc_RNA (1)...(19): siRNA sense strand
gaacaagacucauggagga

SEQ ID NO: 2229617 - RNA, 19 nt, Homo sapiens
  misc_RNA (1)...(19): siRNA sense strand
gucaagaacaagagaggaa

SEQ ID NO: 2229618 - RNA, 19 nt, Homo sapiens
  misc_RNA (1)...(19): siRNA sense strand
gcggaauggugguggagau

SEQ ID NO: 2229619 - RNA, 19 nt, Homo sapiens
  misc_RNA (1)...(19): siRNA sense strand
cgaugaagauagcggacau

SEQ ID NO: 2229620 - RNA, 19 nt, Homo sapiens
  misc_RNA (1)...(19): siRNA sense strand
gauuauggagcgagccaaa

SEQ ID NO: 2229621 - RNA, 19 nt, Homo sapiens
  misc_RNA (1)...(19): siRNA sense strand
gacaagaucucaaagggaa

SEQ ID NO: 2229622 - RNA, 19 nt, Homo sapiens
  misc_RNA (1)...(19): siRNA sense strand
guggaagagauauuggaaa

SEQ ID NO: 2229623 - RNA, 19 nt, Homo sapiens
  misc_RNA (1)...(19): siRNA sense strand
ugagagacgacuuggagaa

SEQ ID NO: 2229624 - RNA, 19 nt, Homo sapiens
  misc_RNA (1)...(19): siRNA sense strand
cuaugugguggaagagaua

SEQ ID NO: 2229625 - RNA, 19 nt, Homo sapiens
  misc_RNA (1)...(19): siRNA sense strand
gguaguagccacuggggaa

SEQ ID NO: 2229626 - RNA, 19 nt, Homo sapiens
  misc_RNA (1)...(19): siRNA sense strand
caucaaauguggaggugcu

SEQ ID NO: 2229627 - RNA, 19 nt, Homo sapiens
  misc_RNA (1)...(19): siRNA sense strand
ggucaaacuaaaacugaaa

SEQ ID NO: 2229628 - RNA, 19 nt, Homo sapiens
  misc_RNA (1)...(19): siRNA sense strand
aggcaauauucacaaagua

SEQ ID NO: 2229629 - RNA, 19 nt, Homo sapiens
  misc_RNA (1)...(19): siRNA sense strand
cagugaaauccauagggaa

SEQ ID NO: 2229630 - RNA, 19 nt, Homo sapiens
  misc_RNA (1)...(19): siRNA sense strand
acuuugagcaucuggcaua

SEQ ID NO: 2229631 - RNA, 19 nt, Homo sapiens
  misc_RNA (1)...(19): siRNA sense strand
cgacaagaucucaaaggga

SEQ ID NO: 2229632 - RNA, 19 nt, Homo sapiens
  misc_RNA (1)...(19): siRNA sense strand
agaggaaacagcugcacaa

SEQ ID NO: 2229633 - RNA, 19 nt, Homo sapiens
  misc_RNA (1)...(19): siRNA sense strand
uuuacuaugugguggaaga

SEQ ID NO: 2229634 - RNA, 19 nt, Homo sapiens
  misc_RNA (1)...(19): siRNA sense strand
ggaugacauuucagagagu

SEQ ID NO: 2229635 - RNA, 19 nt, Homo sapiens
  misc_RNA (1)...(19): siRNA sense strand
agaaagagagggaggaccu

SEQ ID NO: 2229636 - RNA, 19 nt, Homo sapiens
  misc_RNA (1)...(19): siRNA sense strand
gguggaaaugggaguucua

SEQ ID NO: 2229637 - RNA, 19 nt, Homo sapiens
  misc_RNA (1)...(19): siRNA sense strand
gagccaaacugaagaggag

SEQ ID NO: 2229638 - RNA, 19 nt, Homo sapiens
  misc_RNA (1)...(19): siRNA sense strand
cagagauugaggaagcuaa

SEQ ID NO: 2229639 - RNA, 19 nt, Homo sapiens
  misc_RNA (1)...(19): siRNA sense strand
ggaacagauggaacggcua

SEQ ID NO: 2229640 - RNA, 19 nt, Homo sapiens
  misc_RNA (1)...(19): siRNA sense strand
ggaagaugcagcccagcaa

SEQ ID NO: 2229641 - RNA, 19 nt, Homo sapiens
  misc_RNA (1)...(19): siRNA sense strand
agugaaauccauagggaac

SEQ ID NO: 2229642 - RNA, 19 nt, Homo sapiens
  misc_RNA (1)...(19): siRNA sense strand
gaguuggaacgcugggaau

SEQ ID NO: 2229643 - RNA, 19 nt, Homo sapiens
  misc_RNA (1)...(19): siRNA sense strand
uguacaacgccaacauuaa

SEQ ID NO: 2229644 - RNA, 19 nt, Homo sapiens
  misc_RNA (1)...(19): siRNA sense strand
ccuggcagccugugagauu

SEQ ID NO: 2229645 - RNA, 19 nt, Homo sapiens
  misc_RNA (1)...(19): siRNA sense strand
guacuuuccaagaguguau

SEQ ID NO: 2229646 - RNA, 19 nt, Homo sapiens
  misc_RNA (1)...(19): siRNA sense strand
agagggaggaccuggauuu

SEQ ID NO: 2229647 - RNA, 19 nt, Homo sapiens
  misc_RNA (1)...(19): siRNA sense strand
cugaggaggaugacgauga

SEQ ID NO: 2229648 - RNA, 19 nt, Homo sapiens
  misc_RNA (1)...(19): siRNA sense strand
gcauauuggcagauacagu

SEQ ID NO: 2229649 - RNA, 19 nt, Homo sapiens
  misc_RNA (1)...(19): siRNA sense strand
cauggaaggugcaggugga

SEQ ID NO: 2229650 - RNA, 19 nt, Homo sapiens
  misc_RNA (1)...(19): siRNA sense strand
gaggaagcuaaucgaguuu

SEQ ID NO: 2229651 - RNA, 19 nt, Homo sapiens
  misc_RNA (1)...(19): siRNA sense strand
ccaaaacggagaaaacuaa

SEQ ID NO: 2229652 - RNA, 19 nt, Homo sapiens
  misc_RNA (1)...(19): siRNA sense strand
ugguggagauggacguaga

SEQ ID NO: 2229653 - RNA, 19 nt, Homo sapiens
  misc_RNA (1)...(19): siRNA sense strand
gaccgaggaaccagggcaa

SEQ ID NO: 2229654 - RNA, 19 nt, Homo sapiens
  misc_RNA (1)...(19): siRNA sense strand
cuacacuauuucaggaguu

SEQ ID NO: 2229655 - RNA, 19 nt, Homo sapiens
  misc_RNA (1)...(19): siRNA sense strand
ggaggaugacgaugaagau

SEQ ID NO: 2229656 - RNA, 19 nt, Homo sapiens
  misc_RNA (1)...(19): siRNA sense strand
aggaggaggaggaggugga

SEQ ID NO: 2229657 - RNA, 19 nt, Homo sapiens
  misc_RNA (1)...(19): siRNA sense strand
uggcauauuggcagauaca

SEQ ID NO: 2229658 - RNA, 19 nt, Homo sapiens
  misc_RNA (1)...(19): siRNA sense strand
guggaugacauuucagaga

SEQ ID NO: 2229659 - RNA, 19 nt, Homo sapiens
  misc_RNA (1)...(19): siRNA sense strand
auacugaugcagagauuga

SEQ ID NO: 2229660 - RNA, 19 nt, Homo sapiens
  misc_RNA (1)...(19): siRNA sense strand
aagcauuucuaguggcguu

SEQ ID NO: 2229661 - RNA, 19 nt, Homo sapiens
  misc_RNA (1)...(19): siRNA sense strand
aaggaggaggcaaguuaaa

SEQ ID NO: 2229662 - RNA, 19 nt, Homo sapiens
  misc_RNA (1)...(19): siRNA sense strand
aggaggaugacgaugaaga

SEQ ID NO: 2229663 - RNA, 19 nt, Homo sapiens
  misc_RNA (1)...(19): siRNA sense strand
gggacuaaauggucaaccu

SEQ ID NO: 2229664 - RNA, 19 nt, Homo sapiens
  misc_RNA (1)...(19): siRNA sense strand
uggaucuacacaagugaaa

SEQ ID NO: 2229665 - RNA, 19 nt, Homo sapiens
  misc_RNA (1)...(19): siRNA sense strand
gcacaaguugcuagccuca

SEQ ID NO: 2229666 - RNA, 19 nt, Homo sapiens
  misc_RNA (1)...(19): siRNA sense strand
acuaugugguggaagagau

SEQ ID NO: 2229667 - RNA, 19 nt, Homo sapiens
  misc_RNA (1)...(19): siRNA sense strand
gaacaugaacaucagcaga

SEQ ID NO: 2229668 - RNA, 19 nt, Homo sapiens
  misc_RNA (1)...(19): siRNA sense strand
ccgugaucgugaagcuaga

SEQ ID NO: 2229669 - RNA, 19 nt, Homo sapiens
  misc_RNA (1)...(19): siRNA sense strand
gggaacagauggaacggcu

SEQ ID NO: 2229670 - RNA, 19 nt, Homo sapiens
  misc_RNA (1)...(19): siRNA sense strand
gugaagaguuggaacgcug

SEQ ID NO: 2229671 - RNA, 19 nt, Homo sapiens
  misc_RNA (1)...(19): siRNA sense strand
uugcagagauugaggaagc

SEQ ID NO: 2229672 - RNA, 19 nt, Homo sapiens
  misc_RNA (1)...(19): siRNA sense strand
cugacuuggcacagcagaa

SEQ ID NO: 2229673 - RNA, 19 nt, Homo sapiens
  misc_RNA (1)...(19): siRNA sense strand
acuuggagaaagagaggga

SEQ ID NO: 2229674 - RNA, 19 nt, Homo sapiens
  misc_RNA (1)...(19): siRNA sense strand
gguggaagagauauuggaa

SEQ ID NO: 2229675 - RNA, 19 nt, Homo sapiens
  misc_RNA (1)...(19): siRNA sense strand
ggcagauacaguucaacaa

SEQ ID NO: 2229676 - RNA, 19 nt, Homo sapiens
  misc_RNA (1)...(19): siRNA sense strand
acgccaagccggaggacaa

SEQ ID NO: 2229677 - RNA, 19 nt, Homo sapiens
  misc_RNA (1)...(19): siRNA sense strand
gugaugagcugguggagga

SEQ ID NO: 2229678 - RNA, 19 nt, Homo sapiens
  misc_RNA (1)...(19): siRNA sense strand
agaagagggagcagaucaa

SEQ ID NO: 2229679 - RNA, 19 nt, Homo sapiens
  misc_RNA (1)...(19): siRNA sense strand
cggagaagagggagcagau

SEQ ID NO: 2229680 - RNA, 19 nt, Homo sapiens
  misc_RNA (1)...(19): siRNA sense strand
aggacuggaaggagaagua

SEQ ID NO: 2229681 - RNA, 19 nt, Homo sapiens
  misc_RNA (1)...(19): siRNA sense strand
ccgaggacuggaaggagaa

SEQ ID NO: 2229682 - RNA, 19 nt, Homo sapiens
  misc_RNA (1)...(19): siRNA sense strand
ccgaggacuacguggacau

SEQ ID NO: 2229683 - RNA, 19 nt, Homo sapiens
  misc_RNA (1)...(19): siRNA sense strand
gcguguuggugucuggaau

SEQ ID NO: 2229684 - RNA, 19 nt, Homo sapiens
  misc_RNA (1)...(19): siRNA sense strand
caaacaucuacuugaucaa

SEQ ID NO: 2229685 - RNA, 19 nt, Homo sapiens
  misc_RNA (1)...(19): siRNA sense strand
cccgaggacuggaaggaga

SEQ ID NO: 2229686 - RNA, 19 nt, Homo sapiens
  misc_RNA (1)...(19): siRNA sense strand
aguacauccaccagaacua

SEQ ID NO: 2229687 - RNA, 19 nt, Homo sapiens
  misc_RNA (1)...(19): siRNA sense strand
cggugguguccgauggcaa

SEQ ID NO: 2229688 - RNA, 19 nt, Homo sapiens
  misc_RNA (1)...(19): siRNA sense strand
gagcgaggaaccuggccua

SEQ ID NO: 2229689 - RNA, 19 nt, Homo sapiens
  misc_RNA (1)...(19): siRNA sense strand
ucagcaaacugguggccga

SEQ ID NO: 2229690 - RNA, 19 nt, Homo sapiens
  misc_RNA (1)...(19): siRNA sense strand
ccucaagggcauuggggau

SEQ ID NO: 2229691 - RNA, 19 nt, Homo sapiens
  misc_RNA (1)...(19): siRNA sense strand
uggauggagccuuggauga

SEQ ID NO: 2229692 - RNA, 19 nt, Homo sapiens
  misc_RNA (1)...(19): siRNA sense strand
ugggcaacaacaaggacaa

SEQ ID NO: 2229693 - RNA, 19 nt, Homo sapiens
  misc_RNA (1)...(19): siRNA sense strand
cagggaagcugguggagac

SEQ ID NO: 2229694 - RNA, 19 nt, Homo sapiens
  misc_RNA (1)...(19): siRNA sense strand
acaaggaggaucuggucau

SEQ ID NO: 2229695 - RNA, 19 nt, Homo sapiens
  misc_RNA (1)...(19): siRNA sense strand
gcaagagguuccugggcuc

SEQ ID NO: 2229696 - RNA, 19 nt, Homo sapiens
  misc_RNA (1)...(19): siRNA sense strand
uguucauguuccugaccaa

SEQ ID NO: 2229697 - RNA, 19 nt, Homo sapiens
  misc_RNA (1)...(19): siRNA sense strand
cugaagaaagcucuggaga

SEQ ID NO: 2229698 - RNA, 19 nt, Homo sapiens
  misc_RNA (1)...(19): siRNA sense strand
ccucagaucucuuccacca

SEQ ID NO: 2229699 - RNA, 19 nt, Homo sapiens
  misc_RNA (1)...(19): siRNA sense strand
gcuuugagcgggaguggca

SEQ ID NO: 2229700 - RNA, 19 nt, Homo sapiens
  misc_RNA (1)...(19): siRNA sense strand
auggaugggacaagagaua

SEQ ID NO: 2229701 - RNA, 19 nt, Homo sapiens
  misc_RNA (1)...(19): siRNA sense strand
ggaagaagcugcagccaag

SEQ ID NO: 2229702 - RNA, 19 nt, Homo sapiens
  misc_RNA (1)...(19): siRNA sense strand
uagcauacaaagaugggaa

SEQ ID NO: 2229703 - RNA, 19 nt, Homo sapiens
  misc_RNA (1)...(19): siRNA sense strand
ugcaggagcaacugggaaa

SEQ ID NO: 2229704 - RNA, 19 nt, Homo sapiens
  misc_RNA (1)...(19): siRNA sense strand
ccauuuauuucuuuggaga

SEQ ID NO: 2229705 - RNA, 19 nt, Homo sapiens
  misc_RNA (1)...(19): siRNA sense strand
uggaagaagcugcagccaa

SEQ ID NO: 2229706 - RNA, 19 nt, Homo sapiens
  misc_RNA (1)...(19): siRNA sense strand
agaaagugcaggagcaacu

SEQ ID NO: 2229707 - RNA, 19 nt, Homo sapiens
  misc_RNA (1)...(19): siRNA sense strand
ugggaaaugaugugguuga

SEQ ID NO: 2229708 - RNA, 19 nt, Homo sapiens
  misc_RNA (1)...(19): siRNA sense strand
uugagaaagugcaggagca

SEQ ID NO: 2229709 - RNA, 19 nt, Homo sapiens
  misc_RNA (1)...(19): siRNA sense strand
agaucuacggaaagaguuu

SEQ ID NO: 2229710 - RNA, 19 nt, Homo sapiens
  misc_RNA (1)...(19): siRNA sense strand
uuaccaaagaaauggauga

SEQ ID NO: 2229711 - RNA, 19 nt, Homo sapiens
  misc_RNA (1)...(19): siRNA sense strand
acucuuguguagacagaau

SEQ ID NO: 2229712 - RNA, 19 nt, Homo sapiens
  misc_RNA (1)...(19): siRNA sense strand
ugagaaagugcaggagcaa

SEQ ID NO: 2229713 - RNA, 19 nt, Homo sapiens
  misc_RNA (1)...(19): siRNA sense strand
ggaugggacaagagauacu

SEQ ID NO: 2229714 - RNA, 19 nt, Homo sapiens
  misc_RNA (1)...(19): siRNA sense strand
uggcaaugaccaugagauc

SEQ ID NO: 2229715 - RNA, 19 nt, Homo sapiens
  misc_RNA (1)...(19): siRNA sense strand
gcuugguagcauacaaaga

SEQ ID NO: 2229716 - RNA, 19 nt, Homo sapiens
  misc_RNA (1)...(19): siRNA sense strand
gccaauggaucgugggcaa

SEQ ID NO: 2229717 - RNA, 19 nt, Homo sapiens
  misc_RNA (1)...(19): siRNA sense strand
uggcagaacuguagcaccu

SEQ ID NO: 2229718 - RNA, 19 nt, Homo sapiens
  misc_RNA (1)...(19): siRNA sense strand
ucuaugugaucuugcggaa

SEQ ID NO: 2229719 - RNA, 19 nt, Homo sapiens
  misc_RNA (1)...(19): siRNA sense strand
gggcaauggacacgcaacu

SEQ ID NO: 2229720 - RNA, 19 nt, Homo sapiens
  misc_RNA (1)...(19): siRNA sense strand
ccaucuacacggugaggca

SEQ ID NO: 2229721 - RNA, 19 nt, Homo sapiens
  misc_RNA (1)...(19): siRNA sense strand
gccaauggaucgugggcaa

SEQ ID NO: 2229722 - RNA, 19 nt, Homo sapiens
  misc_RNA (1)...(19): siRNA sense strand
uggcagaacuguagcaccu

SEQ ID NO: 2229723 - RNA, 19 nt, Homo sapiens
  misc_RNA (1)...(19): siRNA sense strand
ucuaugugaucuugcggaa

SEQ ID NO: 2229724 - RNA, 19 nt, Homo sapiens
  misc_RNA (1)...(19): siRNA sense strand
gggcaauggacacgcaacu

SEQ ID NO: 2229725 - RNA, 19 nt, Homo sapiens
  misc_RNA (1)...(19): siRNA sense strand
ccaucuacacggugaggca

SEQ ID NO: 2229726 - RNA, 19 nt, Homo sapiens
  misc_RNA (1)...(19): siRNA sense strand
gccaauggaucgugggcaa

SEQ ID NO: 2229727 - RNA, 19 nt, Homo sapiens
  misc_RNA (1)...(19): siRNA sense strand
uggcagaacuguagcaccu

SEQ ID NO: 2229728 - RNA, 19 nt, Homo sapiens
  misc_RNA (1)...(19): siRNA sense strand
ucuaugugaucuugcggaa

SEQ ID NO: 2229729 - RNA, 19 nt, Homo sapiens
  misc_RNA (1)...(19): siRNA sense strand
gggcaauggacacgcaacu

SEQ ID NO: 2229730 - RNA, 19 nt, Homo sapiens
  misc_RNA (1)...(19): siRNA sense strand
ccaucuacacggugaggca

SEQ ID NO: 2229731 - RNA, 19 nt, Homo sapiens
  misc_RNA (1)...(19): siRNA sense strand
ggucauuguaguagugaaa

SEQ ID NO: 2229732 - RNA, 19 nt, Homo sapiens
  misc_RNA (1)...(19): siRNA sense strand
auguuaaacuggagaacua

SEQ ID NO: 2229733 - RNA, 19 nt, Homo sapiens
  misc_RNA (1)...(19): siRNA sense strand
acuaaaagauggcagaaaa

SEQ ID NO: 2229734 - RNA, 19 nt, Homo sapiens
  misc_RNA (1)...(19): siRNA sense strand
cugaaaugccuaaaggaau

SEQ ID NO: 2229735 - RNA, 19 nt, Homo sapiens
  misc_RNA (1)...(19): siRNA sense strand
aaauagaaggaauggcuaa

SEQ ID NO: 2229736 - RNA, 19 nt, Homo sapiens
  misc_RNA (1)...(19): siRNA sense strand
cuugaaaacucuucggaaa

SEQ ID NO: 2229737 - RNA, 19 nt, Homo sapiens
  misc_RNA (1)...(19): siRNA sense strand
cugcagagccacuggaaaa

SEQ ID NO: 2229738 - RNA, 19 nt, Homo sapiens
  misc_RNA (1)...(19): siRNA sense strand
agucaaaugaagagagcca

SEQ ID NO: 2229739 - RNA, 19 nt, Homo sapiens
  misc_RNA (1)...(19): siRNA sense strand
cuguaauggcaaugaagua

SEQ ID NO: 2229740 - RNA, 19 nt, Homo sapiens
  misc_RNA (1)...(19): siRNA sense strand
aguaauguaucaugggaga

SEQ ID NO: 2229741 - RNA, 19 nt, Homo sapiens
  misc_RNA (1)...(19): siRNA sense strand
acuuggaaauagaaggaau

SEQ ID NO: 2229742 - RNA, 19 nt, Homo sapiens
  misc_RNA (1)...(19): siRNA sense strand
gguuauggucauuguagua

SEQ ID NO: 2229743 - RNA, 19 nt, Homo sapiens
  misc_RNA (1)...(19): siRNA sense strand
gcccagaagcacaaguuaa

SEQ ID NO: 2229744 - RNA, 19 nt, Homo sapiens
  misc_RNA (1)...(19): siRNA sense strand
cuauggaguagcagauuua

SEQ ID NO: 2229745 - RNA, 19 nt, Homo sapiens
  misc_RNA (1)...(19): siRNA sense strand
cccagaagcacaaguuaaa

SEQ ID NO: 2229746 - RNA, 19 nt, Homo sapiens
  misc_RNA (1)...(19): siRNA sense strand
uaaguuauuuagagggaga

SEQ ID NO: 2229747 - RNA, 19 nt, Homo sapiens
  misc_RNA (1)...(19): siRNA sense strand
aagcacacccagucagaaa

SEQ ID NO: 2229748 - RNA, 19 nt, Homo sapiens
  misc_RNA (1)...(19): siRNA sense strand
gagauaacggggaggguau

SEQ ID NO: 2229749 - RNA, 19 nt, Homo sapiens
  misc_RNA (1)...(19): siRNA sense strand
uggaaaaguuacagcuuau

SEQ ID NO: 2229750 - RNA, 19 nt, Homo sapiens
  misc_RNA (1)...(19): siRNA sense strand
agaaucuaccuguaagaaa

SEQ ID NO: 2229751 - RNA, 19 nt, Homo sapiens
  misc_RNA (1)...(19): siRNA sense strand
ucugaaaugccuaaaggaa

SEQ ID NO: 2229752 - RNA, 19 nt, Homo sapiens
  misc_RNA (1)...(19): siRNA sense strand
ggaccauuaccuaguacaa

SEQ ID NO: 2229753 - RNA, 19 nt, Homo sapiens
  misc_RNA (1)...(19): siRNA sense strand
caaucgaguaaucaagaaa

SEQ ID NO: 2229754 - RNA, 19 nt, Homo sapiens
  misc_RNA (1)...(19): siRNA sense strand
aaauaugaagagaaggcua

SEQ ID NO: 2229755 - RNA, 19 nt, Homo sapiens
  misc_RNA (1)...(19): siRNA sense strand
ggaauuuggcccagaagca

SEQ ID NO: 2229756 - RNA, 19 nt, Homo sapiens
  misc_RNA (1)...(19): siRNA sense strand
uagaagaagcccugcuauu

SEQ ID NO: 2229757 - RNA, 19 nt, Homo sapiens
  misc_RNA (1)...(19): siRNA sense strand
uggaagacauugagugaag

SEQ ID NO: 2229758 - RNA, 19 nt, Homo sapiens
  misc_RNA (1)...(19): siRNA sense strand
acagaaaugcaaaggaagu

SEQ ID NO: 2229759 - RNA, 19 nt, Homo sapiens
  misc_RNA (1)...(19): siRNA sense strand
cugacaucguucuuaguaa

SEQ ID NO: 2229760 - RNA, 19 nt, Homo sapiens
  misc_RNA (1)...(19): siRNA sense strand
ccauugaacaggagucaca

SEQ ID NO: 2229761 - RNA, 19 nt, Homo sapiens
  misc_RNA (1)...(19): siRNA sense strand
agcgaaugguuucaagaua

SEQ ID NO: 2229762 - RNA, 19 nt, Homo sapiens
  misc_RNA (1)...(19): siRNA sense strand
gaaauagaaggaauggcua

SEQ ID NO: 2229763 - RNA, 19 nt, Homo sapiens
  misc_RNA (1)...(19): siRNA sense strand
uaguaaaacagcagaaaca

SEQ ID NO: 2229764 - RNA, 19 nt, Homo sapiens
  misc_RNA (1)...(19): siRNA sense strand
ggaaauagaaggaauggcu

SEQ ID NO: 2229765 - RNA, 19 nt, Homo sapiens
  misc_RNA (1)...(19): siRNA sense strand
gauuuaucucaguggauuu

SEQ ID NO: 2229766 - RNA, 19 nt, Homo sapiens
  misc_RNA (1)...(19): siRNA sense strand
cagacggaauauaguaaaa

SEQ ID NO: 2229767 - RNA, 19 nt, Homo sapiens
  misc_RNA (1)...(19): siRNA sense strand
ccaguuuggaaaugaaauu

SEQ ID NO: 2229768 - RNA, 19 nt, Homo sapiens
  misc_RNA (1)...(19): siRNA sense strand
auugaagaacuguggaaga

SEQ ID NO: 2229769 - RNA, 19 nt, Homo sapiens
  misc_RNA (1)...(19): siRNA sense strand
gggagagaauauugaaccu

SEQ ID NO: 2229770 - RNA, 19 nt, Homo sapiens
  misc_RNA (1)...(19): siRNA sense strand
cauugagugaagaggaaaa

SEQ ID NO: 2229771 - RNA, 19 nt, Homo sapiens
  misc_RNA (1)...(19): siRNA sense strand
acugaaauaugaagagaag

SEQ ID NO: 2229772 - RNA, 19 nt, Homo sapiens
  misc_RNA (1)...(19): siRNA sense strand
cauccaaaacagagguaau

SEQ ID NO: 2229773 - RNA, 19 nt, Homo sapiens
  misc_RNA (1)...(19): siRNA sense strand
ccagauaaguauuggugac

SEQ ID NO: 2229774 - RNA, 19 nt, Homo sapiens
  misc_RNA (1)...(19): siRNA sense strand
uguggaagacauugaguga

SEQ ID NO: 2229775 - RNA, 19 nt, Homo sapiens
  misc_RNA (1)...(19): siRNA sense strand
augaagagaaggcuacuaa

SEQ ID NO: 2229776 - RNA, 19 nt, Homo sapiens
  misc_RNA (1)...(19): siRNA sense strand
agucacaaaugucacuaaa

SEQ ID NO: 2229777 - RNA, 19 nt, Homo sapiens
  misc_RNA (1)...(19): siRNA sense strand
augcaaaggaaguuuauga

SEQ ID NO: 2229778 - RNA, 19 nt, Homo sapiens
  misc_RNA (1)...(19): siRNA sense strand
cucgcaaagugauaaguua

SEQ ID NO: 2229779 - RNA, 19 nt, Homo sapiens
  misc_RNA (1)...(19): siRNA sense strand
aaauugaagaacuguggaa

SEQ ID NO: 2229780 - RNA, 19 nt, Homo sapiens
  misc_RNA (1)...(19): siRNA sense strand
cuucauaaacagucgacca

SEQ ID NO: 2229781 - RNA, 19 nt, Homo sapiens
  misc_RNA (1)...(19): siRNA sense strand
cggaaauuucugcagauga

SEQ ID NO: 2229782 - RNA, 19 nt, Homo sapiens
  misc_RNA (1)...(19): siRNA sense strand
ggaaaaugaggaagaagca

SEQ ID NO: 2229783 - RNA, 19 nt, Homo sapiens
  misc_RNA (1)...(19): siRNA sense strand
uaagacuaguuuagaggau

SEQ ID NO: 2229784 - RNA, 19 nt, Homo sapiens
  misc_RNA (1)...(19): siRNA sense strand
gcgcauggaauuuggccca

SEQ ID NO: 2229785 - RNA, 19 nt, Homo sapiens
  misc_RNA (1)...(19): siRNA sense strand
aagaaacccaugucagcaa

SEQ ID NO: 2229786 - RNA, 19 nt, Homo sapiens
  misc_RNA (1)...(19): siRNA sense strand
gaaccuugcuugauccaca

SEQ ID NO: 2229787 - RNA, 19 nt, Homo sapiens
  misc_RNA (1)...(19): siRNA sense strand
agggagaagcagugcgucu

SEQ ID NO: 2229788 - RNA, 19 nt, Homo sapiens
  misc_RNA (1)...(19): siRNA sense strand
ugaagcaccaguuuggaaa

SEQ ID NO: 2229789 - RNA, 19 nt, Homo sapiens
  misc_RNA (1)...(19): siRNA sense strand
gcauaaugaugaaucugga

SEQ ID NO: 2229790 - RNA, 19 nt, Homo sapiens
  misc_RNA (1)...(19): siRNA sense strand
guuuaaaucaccagauaag

SEQ ID NO: 2229791 - RNA, 19 nt, Homo sapiens
  misc_RNA (1)...(19): siRNA sense strand
uggcaauaaagaccauaua

SEQ ID NO: 2229792 - RNA, 19 nt, Homo sapiens
  misc_RNA (1)...(19): siRNA sense strand
cuggaaaaguuacagcuua

SEQ ID NO: 2229793 - RNA, 19 nt, Homo sapiens
  misc_RNA (1)...(19): siRNA sense strand
ccgaagaugaacuaagaaa

SEQ ID NO: 2229794 - RNA, 19 nt, Homo sapiens
  misc_RNA (1)...(19): siRNA sense strand
gguaaaggaguuaguagaa

SEQ ID NO: 2229795 - RNA, 19 nt, Homo sapiens
  misc_RNA (1)...(19): siRNA sense strand
cgguaaaggaguuaguaga

SEQ ID NO: 2229796 - RNA, 19 nt, Homo sapiens
  misc_RNA (1)...(19): siRNA sense strand
ccaaacugaaugaggauau

SEQ ID NO: 2229797 - RNA, 19 nt, Homo sapiens
  misc_RNA (1)...(19): siRNA sense strand
ggagaaagcgccugaaacu

SEQ ID NO: 2229798 - RNA, 19 nt, Homo sapiens
  misc_RNA (1)...(19): siRNA sense strand
gcucuuaacacaagcgaga

SEQ ID NO: 2229799 - RNA, 19 nt, Homo sapiens
  misc_RNA (1)...(19): siRNA sense strand
guaaaggaguuaguagaaa

SEQ ID NO: 2229800 - RNA, 19 nt, Homo sapiens
  misc_RNA (1)...(19): siRNA sense strand
agacaauggauguggggua

SEQ ID NO: 2229801 - RNA, 19 nt, Homo sapiens
  misc_RNA (1)...(19): siRNA sense strand
gcauggaguuggaaggagu

SEQ ID NO: 2229802 - RNA, 19 nt, Homo sapiens
  misc_RNA (1)...(19): siRNA sense strand
gguugauguagcugugaaa

SEQ ID NO: 2229803 - RNA, 19 nt, Homo sapiens
  misc_RNA (1)...(19): siRNA sense strand
gugaaggggaacagaauua

SEQ ID NO: 2229804 - RNA, 19 nt, Homo sapiens
  misc_RNA (1)...(19): siRNA sense strand
uacaggaaguuuagggcaa

SEQ ID NO: 2229805 - RNA, 19 nt, Homo sapiens
  misc_RNA (1)...(19): siRNA sense strand
ccaaaaugguccaggucuu

SEQ ID NO: 2229806 - RNA, 19 nt, Homo sapiens
  misc_RNA (1)...(19): siRNA sense strand
cccaaagacuccagaacca

SEQ ID NO: 2229807 - RNA, 19 nt, Homo sapiens
  misc_RNA (1)...(19): siRNA sense strand
cgaagaugaacuaagaaaa

SEQ ID NO: 2229808 - RNA, 19 nt, Homo sapiens
  misc_RNA (1)...(19): siRNA sense strand
guuugaucacaaugggaaa

SEQ ID NO: 2229809 - RNA, 19 nt, Homo sapiens
  misc_RNA (1)...(19): siRNA sense strand
caacagagaacaagccuca

SEQ ID NO: 2229810 - RNA, 19 nt, Homo sapiens
  misc_RNA (1)...(19): siRNA sense strand
gagucuaagcacugcggua

SEQ ID NO: 2229811 - RNA, 19 nt, Homo sapiens
  misc_RNA (1)...(19): siRNA sense strand
gaucuaaagcuuaaggacu

SEQ ID NO: 2229812 - RNA, 19 nt, Homo sapiens
  misc_RNA (1)...(19): siRNA sense strand
gggaaaauuauccagaaaa

SEQ ID NO: 2229813 - RNA, 19 nt, Homo sapiens
  misc_RNA (1)...(19): siRNA sense strand
ucuaugaguucuuuagcua

SEQ ID NO: 2229814 - RNA, 19 nt, Homo sapiens
  misc_RNA (1)...(19): siRNA sense strand
uggaaaagcccaugguaga

SEQ ID NO: 2229815 - RNA, 19 nt, Homo sapiens
  misc_RNA (1)...(19): siRNA sense strand
acagcaaagugaaggggaa

SEQ ID NO: 2229816 - RNA, 19 nt, Homo sapiens
  misc_RNA (1)...(19): siRNA sense strand
ugggaaaauuauccagaaa

SEQ ID NO: 2229817 - RNA, 19 nt, Homo sapiens
  misc_RNA (1)...(19): siRNA sense strand
ggguagaagaagaaaacuu

SEQ ID NO: 2229818 - RNA, 19 nt, Homo sapiens
  misc_RNA (1)...(19): siRNA sense strand
cauucaaaccaggaagaua

SEQ ID NO: 2229819 - RNA, 19 nt, Homo sapiens
  misc_RNA (1)...(19): siRNA sense strand
uugcagaaauggaaaucau

SEQ ID NO: 2229820 - RNA, 19 nt, Homo sapiens
  misc_RNA (1)...(19): siRNA sense strand
ugacaaaggcguccugaga

SEQ ID NO: 2229821 - RNA, 19 nt, Homo sapiens
  misc_RNA (1)...(19): siRNA sense strand
aggccaaccaugagacaca

SEQ ID NO: 2229822 - RNA, 19 nt, Homo sapiens
  misc_RNA (1)...(19): siRNA sense strand
aagaaaacuucgaaggcuu

SEQ ID NO: 2229823 - RNA, 19 nt, Homo sapiens
  misc_RNA (1)...(19): siRNA sense strand
aggaauauuaagaaggagu

SEQ ID NO: 2229824 - RNA, 19 nt, Homo sapiens
  misc_RNA (1)...(19): siRNA sense strand
ugcuggauguugaagguaa

SEQ ID NO: 2229825 - RNA, 19 nt, Homo sapiens
  misc_RNA (1)...(19): siRNA sense strand
gcacugcgguaaaggaguu

SEQ ID NO: 2229826 - RNA, 19 nt, Homo sapiens
  misc_RNA (1)...(19): siRNA sense strand
aggucuaccacauguauaa

SEQ ID NO: 2229827 - RNA, 19 nt, Homo sapiens
  misc_RNA (1)...(19): siRNA sense strand
acagagcggagguggagaa

SEQ ID NO: 2229828 - RNA, 19 nt, Homo sapiens
  misc_RNA (1)...(19): siRNA sense strand
uuaagaaggaguaugccaa

SEQ ID NO: 2229829 - RNA, 19 nt, Homo sapiens
  misc_RNA (1)...(19): siRNA sense strand
gaacugaucuucaugcuga

SEQ ID NO: 2229830 - RNA, 19 nt, Homo sapiens
  misc_RNA (1)...(19): siRNA sense strand
ccguguaaguugcaccaau

SEQ ID NO: 2229831 - RNA, 19 nt, Homo sapiens
  misc_RNA (1)...(19): siRNA sense strand
uaacucagguugaaacuuu

SEQ ID NO: 2229832 - RNA, 19 nt, Homo sapiens
  misc_RNA (1)...(19): siRNA sense strand
gucuaagcacugcgguaaa

SEQ ID NO: 2229833 - RNA, 19 nt, Homo sapiens
  misc_RNA (1)...(19): siRNA sense strand
gguuugagcuguucggaug

SEQ ID NO: 2229834 - RNA, 19 nt, Homo sapiens
  misc_RNA (1)...(19): siRNA sense strand
agucuaagcacugcgguaa

SEQ ID NO: 2229835 - RNA, 19 nt, Homo sapiens
  misc_RNA (1)...(19): siRNA sense strand
aagauuuguccuggagaaa

SEQ ID NO: 2229836 - RNA, 19 nt, Homo sapiens
  misc_RNA (1)...(19): siRNA sense strand
uaaccaaacugaaugagga

SEQ ID NO: 2229837 - RNA, 19 nt, Homo sapiens
  misc_RNA (1)...(19): siRNA sense strand
gggcagaggcucauagcac

SEQ ID NO: 2229838 - RNA, 19 nt, Homo sapiens
  misc_RNA (1)...(19): siRNA sense strand
agaaagcgccugaaacuga

SEQ ID NO: 2229839 - RNA, 19 nt, Homo sapiens
  misc_RNA (1)...(19): siRNA sense strand
acugaaagggcuaaacuga

SEQ ID NO: 2229840 - RNA, 19 nt, Homo sapiens
  misc_RNA (1)...(19): siRNA sense strand
gugaugucaacaagcuaaa

SEQ ID NO: 2229841 - RNA, 19 nt, Homo sapiens
  misc_RNA (1)...(19): siRNA sense strand
cgccauaaggaauuucaaa

SEQ ID NO: 2229842 - RNA, 19 nt, Homo sapiens
  misc_RNA (1)...(19): siRNA sense strand
aaguuuagggcaaagauuu

SEQ ID NO: 2229843 - RNA, 19 nt, Homo sapiens
  misc_RNA (1)...(19): siRNA sense strand
ugaagaaacugaucaccca

SEQ ID NO: 2229844 - RNA, 19 nt, Homo sapiens
  misc_RNA (1)...(19): siRNA sense strand
gccccagcauaaaggaaaa

SEQ ID NO: 2229845 - RNA, 19 nt, Homo sapiens
  misc_RNA (1)...(19): siRNA sense strand
cuguugugguccaggauuu

SEQ ID NO: 2229846 - RNA, 19 nt, Homo sapiens
  misc_RNA (1)...(19): siRNA sense strand
gcugcuuagcucacagaaa

SEQ ID NO: 2229847 - RNA, 19 nt, Homo sapiens
  misc_RNA (1)...(19): siRNA sense strand
cugaggucgcccagagcaa

SEQ ID NO: 2229848 - RNA, 19 nt, Homo sapiens
  misc_RNA (1)...(19): siRNA sense strand
acaaagaccuggaaugcgu

SEQ ID NO: 2229849 - RNA, 19 nt, Homo sapiens
  misc_RNA (1)...(19): siRNA sense strand
guaacuucuaugacaacaa

SEQ ID NO: 2229850 - RNA, 19 nt, Homo sapiens
  misc_RNA (1)...(19): siRNA sense strand
ugguccaggauuugggcaa

SEQ ID NO: 2229851 - RNA, 19 nt, Homo sapiens
  misc_RNA (1)...(19): siRNA sense strand
ccggaguacaagaacaaca

SEQ ID NO: 2229852 - RNA, 19 nt, Homo sapiens
  misc_RNA (1)...(19): siRNA sense strand
acaacaaagaccuggaaug

SEQ ID NO: 2229853 - RNA, 19 nt, Homo sapiens
  misc_RNA (1)...(19): siRNA sense strand
ggggagaacuucaccgaga

SEQ ID NO: 2229854 - RNA, 19 nt, Homo sapiens
  misc_RNA (1)...(19): siRNA sense strand
aguacagcaaccagaacaa

SEQ ID NO: 2229855 - RNA, 19 nt, Homo sapiens
  misc_RNA (1)...(19): siRNA sense strand
aguggaacaagccgaguaa

SEQ ID NO: 2229856 - RNA, 19 nt, Homo sapiens
  misc_RNA (1)...(19): siRNA sense strand
ggggagaacuucaccgaga

SEQ ID NO: 2229857 - RNA, 19 nt, Homo sapiens
  misc_RNA (1)...(19): siRNA sense strand
aguacagcaaccagaacaa

SEQ ID NO: 2229858 - RNA, 19 nt, Homo sapiens
  misc_RNA (1)...(19): siRNA sense strand
aguggaacaagccgaguaa

SEQ ID NO: 2229859 - RNA, 19 nt, Homo sapiens
  misc_RNA (1)...(19): siRNA sense strand
ggagagaaaugaaacgcuu

SEQ ID NO: 2229860 - RNA, 19 nt, Homo sapiens
  misc_RNA (1)...(19): siRNA sense strand
uggugaagacccagaggaa

SEQ ID NO: 2229861 - RNA, 19 nt, Homo sapiens
  misc_RNA (1)...(19): siRNA sense strand
aggacaaccaccugagcaa

SEQ ID NO: 2229862 - RNA, 19 nt, Homo sapiens
  misc_RNA (1)...(19): siRNA sense strand
ugaauauggcagaaggaga

SEQ ID NO: 2229863 - RNA, 19 nt, Homo sapiens
  misc_RNA (1)...(19): siRNA sense strand
ggacagucaucuagggccu

SEQ ID NO: 2229864 - RNA, 19 nt, Homo sapiens
  misc_RNA (1)...(19): siRNA sense strand
aggaagaagaugaggagcu

SEQ ID NO: 2229865 - RNA, 19 nt, Homo sapiens
  misc_RNA (1)...(19): siRNA sense strand
ccauuaagucagucagcuu

SEQ ID NO: 2229866 - RNA, 19 nt, Homo sapiens
  misc_RNA (1)...(19): siRNA sense strand
agaggaaaggggaguaaaa

SEQ ID NO: 2229867 - RNA, 19 nt, Homo sapiens
  misc_RNA (1)...(19): siRNA sense strand
uggagcaagaugaggaaga

SEQ ID NO: 2229868 - RNA, 19 nt, Homo sapiens
  misc_RNA (1)...(19): siRNA sense strand
aggagcugacauugaaaua

SEQ ID NO: 2229869 - RNA, 19 nt, Homo sapiens
  misc_RNA (1)...(19): siRNA sense strand
cggcaggagcacaacgaca

SEQ ID NO: 2229870 - RNA, 19 nt, Homo sapiens
  misc_RNA (1)...(19): siRNA sense strand
aguggagacuggaacacaa

SEQ ID NO: 2229871 - RNA, 19 nt, Homo sapiens
  misc_RNA (1)...(19): siRNA sense strand
cggaaggaugggcagcuaa

SEQ ID NO: 2229872 - RNA, 19 nt, Homo sapiens
  misc_RNA (1)...(19): siRNA sense strand
cccggaagcucaaaggaga

SEQ ID NO: 2229873 - RNA, 19 nt, Homo sapiens
  misc_RNA (1)...(19): siRNA sense strand
agcaagaugaggaagaaga

SEQ ID NO: 2229874 - RNA, 19 nt, Homo sapiens
  misc_RNA (1)...(19): siRNA sense strand
acacuguugcagagaauga

SEQ ID NO: 2229875 - RNA, 19 nt, Homo sapiens
  misc_RNA (1)...(19): siRNA sense strand
ggugaauauggcagaagga

SEQ ID NO: 2229876 - RNA, 19 nt, Homo sapiens
  misc_RNA (1)...(19): siRNA sense strand
gaaugaugauggcggguuc

SEQ ID NO: 2229877 - RNA, 19 nt, Homo sapiens
  misc_RNA (1)...(19): siRNA sense strand
gaacacaaccauagccugu

SEQ ID NO: 2229878 - RNA, 19 nt, Homo sapiens
  misc_RNA (1)...(19): siRNA sense strand
gguggagcaagaugaggaa

SEQ ID NO: 2229879 - RNA, 19 nt, Homo sapiens
  misc_RNA (1)...(19): siRNA sense strand
gaauauggcagaaggagac

SEQ ID NO: 2229880 - RNA, 19 nt, Homo sapiens
  misc_RNA (1)...(19): siRNA sense strand
guucagugaggaaugggaa

SEQ ID NO: 2229881 - RNA, 19 nt, Homo sapiens
  misc_RNA (1)...(19): siRNA sense strand
caguguucugguugguaaa

SEQ ID NO: 2229882 - RNA, 19 nt, Homo sapiens
  misc_RNA (1)...(19): siRNA sense strand
ggagagaaaugaaacgcuu

SEQ ID NO: 2229883 - RNA, 19 nt, Homo sapiens
  misc_RNA (1)...(19): siRNA sense strand
uggugaagacccagaggaa

SEQ ID NO: 2229884 - RNA, 19 nt, Homo sapiens
  misc_RNA (1)...(19): siRNA sense strand
aggacaaccaccugagcaa

SEQ ID NO: 2229885 - RNA, 19 nt, Homo sapiens
  misc_RNA (1)...(19): siRNA sense strand
ugaauauggcagaaggaga

SEQ ID NO: 2229886 - RNA, 19 nt, Homo sapiens
  misc_RNA (1)...(19): siRNA sense strand
ggacagucaucuagggccu

SEQ ID NO: 2229887 - RNA, 19 nt, Homo sapiens
  misc_RNA (1)...(19): siRNA sense strand
aggaagaagaugaggagcu

SEQ ID NO: 2229888 - RNA, 19 nt, Homo sapiens
  misc_RNA (1)...(19): siRNA sense strand
ccauuaagucagucagcuu

SEQ ID NO: 2229889 - RNA, 19 nt, Homo sapiens
  misc_RNA (1)...(19): siRNA sense strand
agaggaaaggggaguaaaa

SEQ ID NO: 2229890 - RNA, 19 nt, Homo sapiens
  misc_RNA (1)...(19): siRNA sense strand
uggagcaagaugaggaaga

SEQ ID NO: 2229891 - RNA, 19 nt, Homo sapiens
  misc_RNA (1)...(19): siRNA sense strand
aggagcugacauugaaaua

SEQ ID NO: 2229892 - RNA, 19 nt, Homo sapiens
  misc_RNA (1)...(19): siRNA sense strand
cggcaggagcacaacgaca

SEQ ID NO: 2229893 - RNA, 19 nt, Homo sapiens
  misc_RNA (1)...(19): siRNA sense strand
aguggagacuggaacacaa

SEQ ID NO: 2229894 - RNA, 19 nt, Homo sapiens
  misc_RNA (1)...(19): siRNA sense strand
cggaaggaugggcagcuaa

SEQ ID NO: 2229895 - RNA, 19 nt, Homo sapiens
  misc_RNA (1)...(19): siRNA sense strand
cccggaagcucaaaggaga

SEQ ID NO: 2229896 - RNA, 19 nt, Homo sapiens
  misc_RNA (1)...(19): siRNA sense strand
agcaagaugaggaagaaga

SEQ ID NO: 2229897 - RNA, 19 nt, Homo sapiens
  misc_RNA (1)...(19): siRNA sense strand
acacuguugcagagaauga

SEQ ID NO: 2229898 - RNA, 19 nt, Homo sapiens
  misc_RNA (1)...(19): siRNA sense strand
ggugaauauggcagaagga

SEQ ID NO: 2229899 - RNA, 19 nt, Homo sapiens
  misc_RNA (1)...(19): siRNA sense strand
gaaugaugauggcggguuc

SEQ ID NO: 2229900 - RNA, 19 nt, Homo sapiens
  misc_RNA (1)...(19): siRNA sense strand
gaacacaaccauagccugu

SEQ ID NO: 2229901 - RNA, 19 nt, Homo sapiens
  misc_RNA (1)...(19): siRNA sense strand
gguggagcaagaugaggaa

SEQ ID NO: 2229902 - RNA, 19 nt, Homo sapiens
  misc_RNA (1)...(19): siRNA sense strand
gaauauggcagaaggagac

SEQ ID NO: 2229903 - RNA, 19 nt, Homo sapiens
  misc_RNA (1)...(19): siRNA sense strand
guucagugaggaaugggaa

SEQ ID NO: 2229904 - RNA, 19 nt, Homo sapiens
  misc_RNA (1)...(19): siRNA sense strand
caguguucugguugguaaa

SEQ ID NO: 2229905 - RNA, 19 nt, Homo sapiens
  misc_RNA (1)...(19): siRNA sense strand
ggagagaaaugaaacgcuu

SEQ ID NO: 2229906 - RNA, 19 nt, Homo sapiens
  misc_RNA (1)...(19): siRNA sense strand
aggacaaccaccugagcaa

SEQ ID NO: 2229907 - RNA, 19 nt, Homo sapiens
  misc_RNA (1)...(19): siRNA sense strand
ugaauauggcagaaggaga

SEQ ID NO: 2229908 - RNA, 19 nt, Homo sapiens
  misc_RNA (1)...(19): siRNA sense strand
aggaagaagaugaggagcu

SEQ ID NO: 2229909 - RNA, 19 nt, Homo sapiens
  misc_RNA (1)...(19): siRNA sense strand
ccauuaagucagucagcuu

SEQ ID NO: 2229910 - RNA, 19 nt, Homo sapiens
  misc_RNA (1)...(19): siRNA sense strand
uggagcaagaugaggaaga

SEQ ID NO: 2229911 - RNA, 19 nt, Homo sapiens
  misc_RNA (1)...(19): siRNA sense strand
aggagcugacauugaaaua

SEQ ID NO: 2229912 - RNA, 19 nt, Homo sapiens
  misc_RNA (1)...(19): siRNA sense strand
cggcaggagcacaacgaca

SEQ ID NO: 2229913 - RNA, 19 nt, Homo sapiens
  misc_RNA (1)...(19): siRNA sense strand
cggaaggaugggcagcuaa

SEQ ID NO: 2229914 - RNA, 19 nt, Homo sapiens
  misc_RNA (1)...(19): siRNA sense strand
cccggaagcucaaaggaga

SEQ ID NO: 2229915 - RNA, 19 nt, Homo sapiens
  misc_RNA (1)...(19): siRNA sense strand
agcaagaugaggaagaaga

SEQ ID NO: 2229916 - RNA, 19 nt, Homo sapiens
  misc_RNA (1)...(19): siRNA sense strand
acacuguugcagagaauga

SEQ ID NO: 2229917 - RNA, 19 nt, Homo sapiens
  misc_RNA (1)...(19): siRNA sense strand
ggugaauauggcagaagga

SEQ ID NO: 2229918 - RNA, 19 nt, Homo sapiens
  misc_RNA (1)...(19): siRNA sense strand
gaaugaugauggcggguuc

SEQ ID NO: 2229919 - RNA, 19 nt, Homo sapiens
  misc_RNA (1)...(19): siRNA sense strand
gguggagcaagaugaggaa

SEQ ID NO: 2229920 - RNA, 19 nt, Homo sapiens
  misc_RNA (1)...(19): siRNA sense strand
gaauauggcagaaggagac

SEQ ID NO: 2229921 - RNA, 19 nt, Homo sapiens
  misc_RNA (1)...(19): siRNA sense strand
guucagugaggaaugggaa

SEQ ID NO: 2229922 - RNA, 19 nt, Homo sapiens
  misc_RNA (1)...(19): siRNA sense strand
acagugugcuggugggcaa

SEQ ID NO: 2229923 - RNA, 19 nt, Homo sapiens
  misc_RNA (1)...(19): siRNA sense strand
acacagagaagaauggaca

SEQ ID NO: 2229924 - RNA, 19 nt, Homo sapiens
  misc_RNA (1)...(19): siRNA sense strand
ccaucaagucugugcgcuu

SEQ ID NO: 2229925 - RNA, 19 nt, Homo sapiens
  misc_RNA (1)...(19): siRNA sense strand
agaacgaggaggacgguga

SEQ ID NO: 2229926 - RNA, 19 nt, Homo sapiens
  misc_RNA (1)...(19): siRNA sense strand
ccucaaauacggagcgaag

SEQ ID NO: 2229927 - RNA, 19 nt, Homo sapiens
  misc_RNA (1)...(19): siRNA sense strand
cugagaaugcugguagaaa

SEQ ID NO: 2229928 - RNA, 19 nt, Homo sapiens
  misc_RNA (1)...(19): siRNA sense strand
uggaggaagaggaggaaag

SEQ ID NO: 2229929 - RNA, 19 nt, Homo sapiens
  misc_RNA (1)...(19): siRNA sense strand
aggaggacccugaccgcua

SEQ ID NO: 2229930 - RNA, 19 nt, Homo sapiens
  misc_RNA (1)...(19): siRNA sense strand
cgacauucacugaggacac

SEQ ID NO: 2229931 - RNA, 19 nt, Homo sapiens
  misc_RNA (1)...(19): siRNA sense strand
gccaggagaacgaggagga

SEQ ID NO: 2229932 - RNA, 19 nt, Homo sapiens
  misc_RNA (1)...(19): siRNA sense strand
acagugugcuggugggcaa

SEQ ID NO: 2229933 - RNA, 19 nt, Homo sapiens
  misc_RNA (1)...(19): siRNA sense strand
acacagagaagaauggaca

SEQ ID NO: 2229934 - RNA, 19 nt, Homo sapiens
  misc_RNA (1)...(19): siRNA sense strand
ccaucaagucugugcgcuu

SEQ ID NO: 2229935 - RNA, 19 nt, Homo sapiens
  misc_RNA (1)...(19): siRNA sense strand
agaacgaggaggacgguga

SEQ ID NO: 2229936 - RNA, 19 nt, Homo sapiens
  misc_RNA (1)...(19): siRNA sense strand
ccucaaauacggagcgaag

SEQ ID NO: 2229937 - RNA, 19 nt, Homo sapiens
  misc_RNA (1)...(19): siRNA sense strand
cugagaaugcugguagaaa

SEQ ID NO: 2229938 - RNA, 19 nt, Homo sapiens
  misc_RNA (1)...(19): siRNA sense strand
uggaggaagaggaggaaag

SEQ ID NO: 2229939 - RNA, 19 nt, Homo sapiens
  misc_RNA (1)...(19): siRNA sense strand
aggaggacccugaccgcua

SEQ ID NO: 2229940 - RNA, 19 nt, Homo sapiens
  misc_RNA (1)...(19): siRNA sense strand
cgacauucacugaggacac

SEQ ID NO: 2229941 - RNA, 19 nt, Homo sapiens
  misc_RNA (1)...(19): siRNA sense strand
gccaggagaacgaggagga

SEQ ID NO: 2229942 - RNA, 19 nt, Homo sapiens
  misc_RNA (1)...(19): siRNA sense strand
uuggaaagcucuuggguga

SEQ ID NO: 2229943 - RNA, 19 nt, Homo sapiens
  misc_RNA (1)...(19): siRNA sense strand
ugacuggaucacagggaaa

SEQ ID NO: 2229944 - RNA, 19 nt, Homo sapiens
  misc_RNA (1)...(19): siRNA sense strand
auguggaagcagagcauau

SEQ ID NO: 2229945 - RNA, 19 nt, Homo sapiens
  misc_RNA (1)...(19): siRNA sense strand
aaugaagaggccagcgcua

SEQ ID NO: 2229946 - RNA, 19 nt, Homo sapiens
  misc_RNA (1)...(19): siRNA sense strand
cuuagaauuccuaguugaa

SEQ ID NO: 2229947 - RNA, 19 nt, Homo sapiens
  misc_RNA (1)...(19): siRNA sense strand
gaagcagagcauauggaca

SEQ ID NO: 2229948 - RNA, 19 nt, Homo sapiens
  misc_RNA (1)...(19): siRNA sense strand
aguauagguaugagggaaa

SEQ ID NO: 2229949 - RNA, 19 nt, Homo sapiens
  misc_RNA (1)...(19): siRNA sense strand
aggccaucaugcagggaaa

SEQ ID NO: 2229950 - RNA, 19 nt, Homo sapiens
  misc_RNA (1)...(19): siRNA sense strand
cugaaauuauugagaggga

SEQ ID NO: 2229951 - RNA, 19 nt, Homo sapiens
  misc_RNA (1)...(19): siRNA sense strand
cugaugagcuggaggccau

SEQ ID NO: 2229952 - RNA, 19 nt, Homo sapiens
  misc_RNA (1)...(19): siRNA sense strand
ggaucgaugugaaggcaga

SEQ ID NO: 2229953 - RNA, 19 nt, Homo sapiens
  misc_RNA (1)...(19): siRNA sense strand
gcucaugaccaaagagacu

SEQ ID NO: 2229954 - RNA, 19 nt, Homo sapiens
  misc_RNA (1)...(19): siRNA sense strand
gaaugggagacgugaguga

SEQ ID NO: 2229955 - RNA, 19 nt, Homo sapiens
  misc_RNA (1)...(19): siRNA sense strand
ugacaaagaagaaggugga

SEQ ID NO: 2229956 - RNA, 19 nt, Homo sapiens
  misc_RNA (1)...(19): siRNA sense strand
cggaagaagaugaaccuca

SEQ ID NO: 2229957 - RNA, 19 nt, Homo sapiens
  misc_RNA (1)...(19): siRNA sense strand
gcucaagcugcaagucaaa

SEQ ID NO: 2229958 - RNA, 19 nt, Homo sapiens
  misc_RNA (1)...(19): siRNA sense strand
ucucagaaugugaaaguau

SEQ ID NO: 2229959 - RNA, 19 nt, Homo sapiens
  misc_RNA (1)...(19): siRNA sense strand
caucacagggagacagauu

SEQ ID NO: 2229960 - RNA, 19 nt, Homo sapiens
  misc_RNA (1)...(19): siRNA sense strand
ugaaaagacaccugaagaa

SEQ ID NO: 2229961 - RNA, 19 nt, Homo sapiens
  misc_RNA (1)...(19): siRNA sense strand
uggacaaggcugaugguca

SEQ ID NO: 2229962 - RNA, 19 nt, Homo sapiens
  misc_RNA (1)...(19): siRNA sense strand
ucaaagaaauuucacgaca

SEQ ID NO: 2229963 - RNA, 19 nt, Homo sapiens
  misc_RNA (1)...(19): siRNA sense strand
cagaaaaggcaguccguuu

SEQ ID NO: 2229964 - RNA, 19 nt, Homo sapiens
  misc_RNA (1)...(19): siRNA sense strand
uugaagaagccaaaccuaa

SEQ ID NO: 2229965 - RNA, 19 nt, Homo sapiens
  misc_RNA (1)...(19): siRNA sense strand
aaguauagguaugagggaa

SEQ ID NO: 2229966 - RNA, 19 nt, Homo sapiens
  misc_RNA (1)...(19): siRNA sense strand
agggaaaugagucugguaa

SEQ ID NO: 2229967 - RNA, 19 nt, Homo sapiens
  misc_RNA (1)...(19): siRNA sense strand
cgacaacgagaaagcaaga

SEQ ID NO: 2229968 - RNA, 19 nt, Homo sapiens
  misc_RNA (1)...(19): siRNA sense strand
cagcacugauguuggcauu

SEQ ID NO: 2229969 - RNA, 19 nt, Homo sapiens
  misc_RNA (1)...(19): siRNA sense strand
ggcccauguuccugaaauu

SEQ ID NO: 2229970 - RNA, 19 nt, Homo sapiens
  misc_RNA (1)...(19): siRNA sense strand
aagaaggaaaagagagcua

SEQ ID NO: 2229971 - RNA, 19 nt, Homo sapiens
  misc_RNA (1)...(19): siRNA sense strand
gaagaagcucaaaaggaaa

SEQ ID NO: 2229972 - RNA, 19 nt, Homo sapiens
  misc_RNA (1)...(19): siRNA sense strand
caaaaggaaaagaaggauu

SEQ ID NO: 2229973 - RNA, 19 nt, Homo sapiens
  misc_RNA (1)...(19): siRNA sense strand
cuacaagaucuuccagcua

SEQ ID NO: 2229974 - RNA, 19 nt, Homo sapiens
  misc_RNA (1)...(19): siRNA sense strand
ccaaaugcuaugagaugga

SEQ ID NO: 2229975 - RNA, 19 nt, Homo sapiens
  misc_RNA (1)...(19): siRNA sense strand
cgccaacugcaguaagaua

SEQ ID NO: 2229976 - RNA, 19 nt, Homo sapiens
  misc_RNA (1)...(19): siRNA sense strand
gccaugaagagcagugaau

SEQ ID NO: 2229977 - RNA, 19 nt, Homo sapiens
  misc_RNA (1)...(19): siRNA sense strand
ccaaagagacuguggaugc

SEQ ID NO: 2229978 - RNA, 19 nt, Homo sapiens
  misc_RNA (1)...(19): siRNA sense strand
ccucgaggcuucuggcuca

SEQ ID NO: 2229979 - RNA, 19 nt, Homo sapiens
  misc_RNA (1)...(19): siRNA sense strand
gcucugagggcgaggaaug

SEQ ID NO: 2229980 - RNA, 19 nt, Homo sapiens
  misc_RNA (1)...(19): siRNA sense strand
gaugaaaccaguauggcga

SEQ ID NO: 2229981 - RNA, 19 nt, Homo sapiens
  misc_RNA (1)...(19): siRNA sense strand
gugaacacauucuggcuga

SEQ ID NO: 2229982 - RNA, 19 nt, Homo sapiens
  misc_RNA (1)...(19): siRNA sense strand
cagccaaacuugcagcuca

SEQ ID NO: 2229983 - RNA, 19 nt, Homo sapiens
  misc_RNA (1)...(19): siRNA sense strand
gaaauuauugagagggaug

SEQ ID NO: 2229984 - RNA, 19 nt, Homo sapiens
  misc_RNA (1)...(19): siRNA sense strand
guuuaggcgcuuccggaaa

SEQ ID NO: 2229985 - RNA, 19 nt, Homo sapiens
  misc_RNA (1)...(19): siRNA sense strand
aagaugaaccucaaaccaa

SEQ ID NO: 2229986 - RNA, 19 nt, Homo sapiens
  misc_RNA (1)...(19): siRNA sense strand
ugguaaaacccuaggccuu

SEQ ID NO: 2229987 - RNA, 19 nt, Homo sapiens
  misc_RNA (1)...(19): siRNA sense strand
cuguggagaccaacuguaa

SEQ ID NO: 2229988 - RNA, 19 nt, Homo sapiens
  misc_RNA (1)...(19): siRNA sense strand
acaaagaagaagguggaga

SEQ ID NO: 2229989 - RNA, 19 nt, Homo sapiens
  misc_RNA (1)...(19): siRNA sense strand
cgaaguucaaguauaggua

SEQ ID NO: 2229990 - RNA, 19 nt, Homo sapiens
  misc_RNA (1)...(19): siRNA sense strand
agaaauuucacgacaacga

SEQ ID NO: 2229991 - RNA, 19 nt, Homo sapiens
  misc_RNA (1)...(19): siRNA sense strand
aggcaaggaucagcagcaa

SEQ ID NO: 2229992 - RNA, 19 nt, Homo sapiens
  misc_RNA (1)...(19): siRNA sense strand
gugaaguccgugugcauga

SEQ ID NO: 2229993 - RNA, 19 nt, Homo sapiens
  misc_RNA (1)...(19): siRNA sense strand
cuuugauggacauggaaga

SEQ ID NO: 2229994 - RNA, 19 nt, Homo sapiens
  misc_RNA (1)...(19): siRNA sense strand
gaauggaaauuuaagcugu

SEQ ID NO: 2229995 - RNA, 19 nt, Homo sapiens
  misc_RNA (1)...(19): siRNA sense strand
gggaaaugagucugguaac

SEQ ID NO: 2229996 - RNA, 19 nt, Homo sapiens
  misc_RNA (1)...(19): siRNA sense strand
gggugagauccuuugaaaa

SEQ ID NO: 2229997 - RNA, 19 nt, Homo sapiens
  misc_RNA (1)...(19): siRNA sense strand
accaugagucuguggaaga

SEQ ID NO: 2229998 - RNA, 19 nt, Homo sapiens
  misc_RNA (1)...(19): siRNA sense strand
agagauaggggaaguguau

SEQ ID NO: 2229999 - RNA, 19 nt, Homo sapiens
  misc_RNA (1)...(19): siRNA sense strand
cccagagcacuuugugaaa

SEQ ID NO: 2230000 - RNA, 19 nt, Homo sapiens
  misc_RNA (1)...(19): siRNA sense strand
caugagaucccaagaccuu

SEQ ID NO: 2230001 - RNA, 19 nt, Homo sapiens
  misc_RNA (1)...(19): siRNA sense strand
gggcaccggcuaugaugaa

SEQ ID NO: 2230002 - RNA, 19 nt, Homo sapiens
  misc_RNA (1)...(19): siRNA sense strand
uccaaagaggaaaggaaaa

SEQ ID NO: 2230003 - RNA, 19 nt, Homo sapiens
  misc_RNA (1)...(19): siRNA sense strand
gugugaagaagcugggcaa

SEQ ID NO: 2230004 - RNA, 19 nt, Homo sapiens
  misc_RNA (1)...(19): siRNA sense strand
ccgaggaaucugagagcga

SEQ ID NO: 2230005 - RNA, 19 nt, Homo sapiens
  misc_RNA (1)...(19): siRNA sense strand
gagaagagcgugccggaga

SEQ ID NO: 2230006 - RNA, 19 nt, Homo sapiens
  misc_RNA (1)...(19): siRNA sense strand
ccuccaaagaagucaaaga

SEQ ID NO: 2230007 - RNA, 19 nt, Homo sapiens
  misc_RNA (1)...(19): siRNA sense strand
augaaguacuaccgggaca

SEQ ID NO: 2230008 - RNA, 19 nt, Homo sapiens
  misc_RNA (1)...(19): siRNA sense strand
gaggaaucugagagcgaga

SEQ ID NO: 2230009 - RNA, 19 nt, Homo sapiens
  misc_RNA (1)...(19): siRNA sense strand
agggcuggcugcuggagaa

SEQ ID NO: 2230010 - RNA, 19 nt, Homo sapiens
  misc_RNA (1)...(19): siRNA sense strand
ccaaagaagucaaagaucg

SEQ ID NO: 2230011 - RNA, 19 nt, Homo sapiens
  misc_RNA (1)...(19): siRNA sense strand
gcaaccagguggaagccga

SEQ ID NO: 2230012 - RNA, 19 nt, Homo sapiens
  misc_RNA (1)...(19): siRNA sense strand
augaagaagaccaucgaca

SEQ ID NO: 2230013 - RNA, 19 nt, Homo sapiens
  misc_RNA (1)...(19): siRNA sense strand
aaucugagagcgagagcga

SEQ ID NO: 2230014 - RNA, 19 nt, Homo sapiens
  misc_RNA (1)...(19): siRNA sense strand
aggccuuucuggagagugu

SEQ ID NO: 2230015 - RNA, 19 nt, Homo sapiens
  misc_RNA (1)...(19): siRNA sense strand
agaagcugggcaagggcaa

SEQ ID NO: 2230016 - RNA, 19 nt, Homo sapiens
  misc_RNA (1)...(19): siRNA sense strand
cugcagaucgaguucaaau

SEQ ID NO: 2230017 - RNA, 19 nt, Homo sapiens
  misc_RNA (1)...(19): siRNA sense strand
guucaaaugcugcggcaac

SEQ ID NO: 2230018 - RNA, 19 nt, Homo sapiens
  misc_RNA (1)...(19): siRNA sense strand
cgagaaagccugaaggaac

SEQ ID NO: 2230019 - RNA, 19 nt, Homo sapiens
  misc_RNA (1)...(19): siRNA sense strand
ugacacagauguuuggaga

SEQ ID NO: 2230020 - RNA, 19 nt, Homo sapiens
  misc_RNA (1)...(19): siRNA sense strand
cuacaagcacaauggaaca

SEQ ID NO: 2230021 - RNA, 19 nt, Homo sapiens
  misc_RNA (1)...(19): siRNA sense strand
ccgagaaagccugaaggaa

SEQ ID NO: 2230022 - RNA, 19 nt, Homo sapiens
  misc_RNA (1)...(19): siRNA sense strand
ccgcuauucaacagggaca

SEQ ID NO: 2230023 - RNA, 19 nt, Homo sapiens
  misc_RNA (1)...(19): siRNA sense strand
ccagcauuacgaagggaau

SEQ ID NO: 2230024 - RNA, 19 nt, Homo sapiens
  misc_RNA (1)...(19): siRNA sense strand
gagaaagccugaaggaacg

SEQ ID NO: 2230025 - RNA, 19 nt, Homo sapiens
  misc_RNA (1)...(19): siRNA sense strand
gcuacaagcacaauggaac

SEQ ID NO: 2230026 - RNA, 19 nt, Homo sapiens
  misc_RNA (1)...(19): siRNA sense strand
ggcaaagaauacacgcuca

SEQ ID NO: 2230027 - RNA, 19 nt, Homo sapiens
  misc_RNA (1)...(19): siRNA sense strand
agggacagucaguggcuuu

SEQ ID NO: 2230028 - RNA, 19 nt, Homo sapiens
  misc_RNA (1)...(19): siRNA sense strand
ccaguuaaauggauggcaa

SEQ ID NO: 2230029 - RNA, 19 nt, Homo sapiens
  misc_RNA (1)...(19): siRNA sense strand
ggaaagucuguguggaaaa

SEQ ID NO: 2230030 - RNA, 19 nt, Homo sapiens
  misc_RNA (1)...(19): siRNA sense strand
gggagaagcuguaugugga

SEQ ID NO: 2230031 - RNA, 19 nt, Homo sapiens
  misc_RNA (1)...(19): siRNA sense strand
gggucggauuccaguuaaa

SEQ ID NO: 2230032 - RNA, 19 nt, Homo sapiens
  misc_RNA (1)...(19): siRNA sense strand
ugguggaguucaagcggaa

SEQ ID NO: 2230033 - RNA, 19 nt, Homo sapiens
  misc_RNA (1)...(19): siRNA sense strand
gcaaagugauguauggucu

SEQ ID NO: 2230034 - RNA, 19 nt, Homo sapiens
  misc_RNA (1)...(19): siRNA sense strand
ggucauauguggccgagga

SEQ ID NO: 2230035 - RNA, 19 nt, Homo sapiens
  misc_RNA (1)...(19): siRNA sense strand
gcaaaguggcauugggccu

SEQ ID NO: 2230036 - RNA, 19 nt, Homo sapiens
  misc_RNA (1)...(19): siRNA sense strand
ccguguacgacgaggacga

SEQ ID NO: 2230037 - RNA, 19 nt, Homo sapiens
  misc_RNA (1)...(19): siRNA sense strand
ucagcaaagaccuggagaa

SEQ ID NO: 2230038 - RNA, 19 nt, Homo sapiens
  misc_RNA (1)...(19): siRNA sense strand
agggaugcuuacugggaga

SEQ ID NO: 2230039 - RNA, 19 nt, Homo sapiens
  misc_RNA (1)...(19): siRNA sense strand
caguuaaauggauggcaau

SEQ ID NO: 2230040 - RNA, 19 nt, Homo sapiens
  misc_RNA (1)...(19): siRNA sense strand
ggaaaaguggucaaggcaa

SEQ ID NO: 2230041 - RNA, 19 nt, Homo sapiens
  misc_RNA (1)...(19): siRNA sense strand
gguuaagaggagagacuac

SEQ ID NO: 2230042 - RNA, 19 nt, Homo sapiens
  misc_RNA (1)...(19): siRNA sense strand
gaaacauccugguagcuga

SEQ ID NO: 2230043 - RNA, 19 nt, Homo sapiens
  misc_RNA (1)...(19): siRNA sense strand
gaggauccaaagugggaau

SEQ ID NO: 2230044 - RNA, 19 nt, Homo sapiens
  misc_RNA (1)...(19): siRNA sense strand
ggaggcaaggagauggcaa

SEQ ID NO: 2230045 - RNA, 19 nt, Homo sapiens
  misc_RNA (1)...(19): siRNA sense strand
gcgauguuguggagaccca

SEQ ID NO: 2230046 - RNA, 19 nt, Homo sapiens
  misc_RNA (1)...(19): siRNA sense strand
ccaacaggcaggugugagu

SEQ ID NO: 2230047 - RNA, 19 nt, Homo sapiens
  misc_RNA (1)...(19): siRNA sense strand
gaaaaguggucaaggcaac

SEQ ID NO: 2230048 - RNA, 19 nt, Homo sapiens
  misc_RNA (1)...(19): siRNA sense strand
gagaacaacuggaucugca

SEQ ID NO: 2230049 - RNA, 19 nt, Homo sapiens
  misc_RNA (1)...(19): siRNA sense strand
caugagaacaacuggaucu

SEQ ID NO: 2230050 - RNA, 19 nt, Homo sapiens
  misc_RNA (1)...(19): siRNA sense strand
gaacacuggcccaacgaga

SEQ ID NO: 2230051 - RNA, 19 nt, Homo sapiens
  misc_RNA (1)...(19): siRNA sense strand
cugaggaggagaagugcuu

SEQ ID NO: 2230052 - RNA, 19 nt, Homo sapiens
  misc_RNA (1)...(19): siRNA sense strand
agauguuuaugaagaggau

SEQ ID NO: 2230053 - RNA, 19 nt, Homo sapiens
  misc_RNA (1)...(19): siRNA sense strand
ccaacaucagcguggccua

SEQ ID NO: 2230054 - RNA, 19 nt, Homo sapiens
  misc_RNA (1)...(19): siRNA sense strand
ucguggaguacgccaaaua

SEQ ID NO: 2230055 - RNA, 19 nt, Homo sapiens
  misc_RNA (1)...(19): siRNA sense strand
gggagaaguacgagcuggu

SEQ ID NO: 2230056 - RNA, 19 nt, Homo sapiens
  misc_RNA (1)...(19): siRNA sense strand
aggagauggcaaagggauc

SEQ ID NO: 2230057 - RNA, 19 nt, Homo sapiens
  misc_RNA (1)...(19): siRNA sense strand
ccaguuaaauggauggcaa

SEQ ID NO: 2230058 - RNA, 19 nt, Homo sapiens
  misc_RNA (1)...(19): siRNA sense strand
ggaaagucuguguggaaaa

SEQ ID NO: 2230059 - RNA, 19 nt, Homo sapiens
  misc_RNA (1)...(19): siRNA sense strand
gggagaagcuguaugugga

SEQ ID NO: 2230060 - RNA, 19 nt, Homo sapiens
  misc_RNA (1)...(19): siRNA sense strand
gggucggauuccaguuaaa

SEQ ID NO: 2230061 - RNA, 19 nt, Homo sapiens
  misc_RNA (1)...(19): siRNA sense strand
ugguggaguucaagcggaa

SEQ ID NO: 2230062 - RNA, 19 nt, Homo sapiens
  misc_RNA (1)...(19): siRNA sense strand
gcaaagugauguauggucu

SEQ ID NO: 2230063 - RNA, 19 nt, Homo sapiens
  misc_RNA (1)...(19): siRNA sense strand
ggucauauguggccgagga

SEQ ID NO: 2230064 - RNA, 19 nt, Homo sapiens
  misc_RNA (1)...(19): siRNA sense strand
gcaaaguggcauugggccu

SEQ ID NO: 2230065 - RNA, 19 nt, Homo sapiens
  misc_RNA (1)...(19): siRNA sense strand
ccguguacgacgaggacga

SEQ ID NO: 2230066 - RNA, 19 nt, Homo sapiens
  misc_RNA (1)...(19): siRNA sense strand
ucagcaaagaccuggagaa

SEQ ID NO: 2230067 - RNA, 19 nt, Homo sapiens
  misc_RNA (1)...(19): siRNA sense strand
agggaugcuuacugggaga

SEQ ID NO: 2230068 - RNA, 19 nt, Homo sapiens
  misc_RNA (1)...(19): siRNA sense strand
caguuaaauggauggcaau

SEQ ID NO: 2230069 - RNA, 19 nt, Homo sapiens
  misc_RNA (1)...(19): siRNA sense strand
ggaaaaguggucaaggcaa

SEQ ID NO: 2230070 - RNA, 19 nt, Homo sapiens
  misc_RNA (1)...(19): siRNA sense strand
gguuaagaggagagacuac

SEQ ID NO: 2230071 - RNA, 19 nt, Homo sapiens
  misc_RNA (1)...(19): siRNA sense strand
gaaacauccugguagcuga

SEQ ID NO: 2230072 - RNA, 19 nt, Homo sapiens
  misc_RNA (1)...(19): siRNA sense strand
gaggauccaaagugggaau

SEQ ID NO: 2230073 - RNA, 19 nt, Homo sapiens
  misc_RNA (1)...(19): siRNA sense strand
ggaggcaaggagauggcaa

SEQ ID NO: 2230074 - RNA, 19 nt, Homo sapiens
  misc_RNA (1)...(19): siRNA sense strand
gcgauguuguggagaccca

SEQ ID NO: 2230075 - RNA, 19 nt, Homo sapiens
  misc_RNA (1)...(19): siRNA sense strand
ccaacaggcaggugugagu

SEQ ID NO: 2230076 - RNA, 19 nt, Homo sapiens
  misc_RNA (1)...(19): siRNA sense strand
gaaaaguggucaaggcaac

SEQ ID NO: 2230077 - RNA, 19 nt, Homo sapiens
  misc_RNA (1)...(19): siRNA sense strand
gagaacaacuggaucugca

SEQ ID NO: 2230078 - RNA, 19 nt, Homo sapiens
  misc_RNA (1)...(19): siRNA sense strand
caugagaacaacuggaucu

SEQ ID NO: 2230079 - RNA, 19 nt, Homo sapiens
  misc_RNA (1)...(19): siRNA sense strand
gaacacuggcccaacgaga

SEQ ID NO: 2230080 - RNA, 19 nt, Homo sapiens
  misc_RNA (1)...(19): siRNA sense strand
cugaggaggagaagugcuu

SEQ ID NO: 2230081 - RNA, 19 nt, Homo sapiens
  misc_RNA (1)...(19): siRNA sense strand
agauguuuaugaagaggau

SEQ ID NO: 2230082 - RNA, 19 nt, Homo sapiens
  misc_RNA (1)...(19): siRNA sense strand
ccaacaucagcguggccua

SEQ ID NO: 2230083 - RNA, 19 nt, Homo sapiens
  misc_RNA (1)...(19): siRNA sense strand
ucguggaguacgccaaaua

SEQ ID NO: 2230084 - RNA, 19 nt, Homo sapiens
  misc_RNA (1)...(19): siRNA sense strand
gggagaaguacgagcuggu

SEQ ID NO: 2230085 - RNA, 19 nt, Homo sapiens
  misc_RNA (1)...(19): siRNA sense strand
aggagauggcaaagggauc

SEQ ID NO: 2230086 - RNA, 19 nt, Homo sapiens
  misc_RNA (1)...(19): siRNA sense strand
ccaguuaaauggauggcaa

SEQ ID NO: 2230087 - RNA, 19 nt, Homo sapiens
  misc_RNA (1)...(19): siRNA sense strand
ggaaagucuguguggaaaa

SEQ ID NO: 2230088 - RNA, 19 nt, Homo sapiens
  misc_RNA (1)...(19): siRNA sense strand
gggagaagcuguaugugga

SEQ ID NO: 2230089 - RNA, 19 nt, Homo sapiens
  misc_RNA (1)...(19): siRNA sense strand
gggucggauuccaguuaaa

SEQ ID NO: 2230090 - RNA, 19 nt, Homo sapiens
  misc_RNA (1)...(19): siRNA sense strand
ugguggaguucaagcggaa

SEQ ID NO: 2230091 - RNA, 19 nt, Homo sapiens
  misc_RNA (1)...(19): siRNA sense strand
gcaaagugauguauggucu

SEQ ID NO: 2230092 - RNA, 19 nt, Homo sapiens
  misc_RNA (1)...(19): siRNA sense strand
ggucauauguggccgagga

SEQ ID NO: 2230093 - RNA, 19 nt, Homo sapiens
  misc_RNA (1)...(19): siRNA sense strand
gcaaaguggcauugggccu

SEQ ID NO: 2230094 - RNA, 19 nt, Homo sapiens
  misc_RNA (1)...(19): siRNA sense strand
ccguguacgacgaggacga

SEQ ID NO: 2230095 - RNA, 19 nt, Homo sapiens
  misc_RNA (1)...(19): siRNA sense strand
ucagcaaagaccuggagaa

SEQ ID NO: 2230096 - RNA, 19 nt, Homo sapiens
  misc_RNA (1)...(19): siRNA sense strand
agggaugcuuacugggaga

SEQ ID NO: 2230097 - RNA, 19 nt, Homo sapiens
  misc_RNA (1)...(19): siRNA sense strand
caguuaaauggauggcaau

SEQ ID NO: 2230098 - RNA, 19 nt, Homo sapiens
  misc_RNA (1)...(19): siRNA sense strand
ggaaaaguggucaaggcaa

SEQ ID NO: 2230099 - RNA, 19 nt, Homo sapiens
  misc_RNA (1)...(19): siRNA sense strand
gguuaagaggagagacuac

SEQ ID NO: 2230100 - RNA, 19 nt, Homo sapiens
  misc_RNA (1)...(19): siRNA sense strand
gaaacauccugguagcuga

SEQ ID NO: 2230101 - RNA, 19 nt, Homo sapiens
  misc_RNA (1)...(19): siRNA sense strand
gaggauccaaagugggaau

SEQ ID NO: 2230102 - RNA, 19 nt, Homo sapiens
  misc_RNA (1)...(19): siRNA sense strand
ggaggcaaggagauggcaa

SEQ ID NO: 2230103 - RNA, 19 nt, Homo sapiens
  misc_RNA (1)...(19): siRNA sense strand
gcgauguuguggagaccca

SEQ ID NO: 2230104 - RNA, 19 nt, Homo sapiens
  misc_RNA (1)...(19): siRNA sense strand
ccaacaggcaggugugagu

SEQ ID NO: 2230105 - RNA, 19 nt, Homo sapiens
  misc_RNA (1)...(19): siRNA sense strand
gaaaaguggucaaggcaac

SEQ ID NO: 2230106 - RNA, 19 nt, Homo sapiens
  misc_RNA (1)...(19): siRNA sense strand
gagaacaacuggaucugca

SEQ ID NO: 2230107 - RNA, 19 nt, Homo sapiens
  misc_RNA (1)...(19): siRNA sense strand
caugagaacaacuggaucu

SEQ ID NO: 2230108 - RNA, 19 nt, Homo sapiens
  misc_RNA (1)...(19): siRNA sense strand
gaacacuggcccaacgaga

SEQ ID NO: 2230109 - RNA, 19 nt, Homo sapiens
  misc_RNA (1)...(19): siRNA sense strand
cugaggaggagaagugcuu

SEQ ID NO: 2230110 - RNA, 19 nt, Homo sapiens
  misc_RNA (1)...(19): siRNA sense strand
agauguuuaugaagaggau

SEQ ID NO: 2230111 - RNA, 19 nt, Homo sapiens
  misc_RNA (1)...(19): siRNA sense strand
ccaacaucagcguggccua

SEQ ID NO: 2230112 - RNA, 19 nt, Homo sapiens
  misc_RNA (1)...(19): siRNA sense strand
ucguggaguacgccaaaua

SEQ ID NO: 2230113 - RNA, 19 nt, Homo sapiens
  misc_RNA (1)...(19): siRNA sense strand
gggagaaguacgagcuggu

SEQ ID NO: 2230114 - RNA, 19 nt, Homo sapiens
  misc_RNA (1)...(19): siRNA sense strand
aggagauggcaaagggauc

SEQ ID NO: 2230115 - RNA, 19 nt, Homo sapiens
  misc_RNA (1)...(19): siRNA sense strand
ccaguuaaauggauggcaa

SEQ ID NO: 2230116 - RNA, 19 nt, Homo sapiens
  misc_RNA (1)...(19): siRNA sense strand
ggaaagucuguguggaaaa

SEQ ID NO: 2230117 - RNA, 19 nt, Homo sapiens
  misc_RNA (1)...(19): siRNA sense strand
gggagaagcuguaugugga

SEQ ID NO: 2230118 - RNA, 19 nt, Homo sapiens
  misc_RNA (1)...(19): siRNA sense strand
gggucggauuccaguuaaa

SEQ ID NO: 2230119 - RNA, 19 nt, Homo sapiens
  misc_RNA (1)...(19): siRNA sense strand
ugguggaguucaagcggaa

SEQ ID NO: 2230120 - RNA, 19 nt, Homo sapiens
  misc_RNA (1)...(19): siRNA sense strand
gcaaagugauguauggucu

SEQ ID NO: 2230121 - RNA, 19 nt, Homo sapiens
  misc_RNA (1)...(19): siRNA sense strand
ggucauauguggccgagga

SEQ ID NO: 2230122 - RNA, 19 nt, Homo sapiens
  misc_RNA (1)...(19): siRNA sense strand
gcaaaguggcauugggccu

SEQ ID NO: 2230123 - RNA, 19 nt, Homo sapiens
  misc_RNA (1)...(19): siRNA sense strand
ccguguacgacgaggacga

SEQ ID NO: 2230124 - RNA, 19 nt, Homo sapiens
  misc_RNA (1)...(19): siRNA sense strand
ucagcaaagaccuggagaa

SEQ ID NO: 2230125 - RNA, 19 nt, Homo sapiens
  misc_RNA (1)...(19): siRNA sense strand
agggaugcuuacugggaga

SEQ ID NO: 2230126 - RNA, 19 nt, Homo sapiens
  misc_RNA (1)...(19): siRNA sense strand
caguuaaauggauggcaau

SEQ ID NO: 2230127 - RNA, 19 nt, Homo sapiens
  misc_RNA (1)...(19): siRNA sense strand
ggaaaaguggucaaggcaa

SEQ ID NO: 2230128 - RNA, 19 nt, Homo sapiens
  misc_RNA (1)...(19): siRNA sense strand
gguuaagaggagagacuac

SEQ ID NO: 2230129 - RNA, 19 nt, Homo sapiens
  misc_RNA (1)...(19): siRNA sense strand
gaaacauccugguagcuga

SEQ ID NO: 2230130 - RNA, 19 nt, Homo sapiens
  misc_RNA (1)...(19): siRNA sense strand
gaggauccaaagugggaau

SEQ ID NO: 2230131 - RNA, 19 nt, Homo sapiens
  misc_RNA (1)...(19): siRNA sense strand
ggaggcaaggagauggcaa

SEQ ID NO: 2230132 - RNA, 19 nt, Homo sapiens
  misc_RNA (1)...(19): siRNA sense strand
gcgauguuguggagaccca

SEQ ID NO: 2230133 - RNA, 19 nt, Homo sapiens
  misc_RNA (1)...(19): siRNA sense strand
ccaacaggcaggugugagu

SEQ ID NO: 2230134 - RNA, 19 nt, Homo sapiens
  misc_RNA (1)...(19): siRNA sense strand
gaaaaguggucaaggcaac

SEQ ID NO: 2230135 - RNA, 19 nt, Homo sapiens
  misc_RNA (1)...(19): siRNA sense strand
gagaacaacuggaucugca

SEQ ID NO: 2230136 - RNA, 19 nt, Homo sapiens
  misc_RNA (1)...(19): siRNA sense strand
caugagaacaacuggaucu

SEQ ID NO: 2230137 - RNA, 19 nt, Homo sapiens
  misc_RNA (1)...(19): siRNA sense strand
gaacacuggcccaacgaga

SEQ ID NO: 2230138 - RNA, 19 nt, Homo sapiens
  misc_RNA (1)...(19): siRNA sense strand
cugaggaggagaagugcuu

SEQ ID NO: 2230139 - RNA, 19 nt, Homo sapiens
  misc_RNA (1)...(19): siRNA sense strand
agauguuuaugaagaggau

SEQ ID NO: 2230140 - RNA, 19 nt, Homo sapiens
  misc_RNA (1)...(19): siRNA sense strand
ccaacaucagcguggccua

SEQ ID NO: 2230141 - RNA, 19 nt, Homo sapiens
  misc_RNA (1)...(19): siRNA sense strand
ucguggaguacgccaaaua

SEQ ID NO: 2230142 - RNA, 19 nt, Homo sapiens
  misc_RNA (1)...(19): siRNA sense strand
gggagaaguacgagcuggu

SEQ ID NO: 2230143 - RNA, 19 nt, Homo sapiens
  misc_RNA (1)...(19): siRNA sense strand
aggagauggcaaagggauc

SEQ ID NO: 2230144 - RNA, 19 nt, Homo sapiens
  misc_RNA (1)...(19): siRNA sense strand
uggcaaagggagagguaga

SEQ ID NO: 2230145 - RNA, 19 nt, Homo sapiens
  misc_RNA (1)...(19): siRNA sense strand
acaagaagccagagagacu

SEQ ID NO: 2230146 - RNA, 19 nt, Homo sapiens
  misc_RNA (1)...(19): siRNA sense strand
cugaaguaccugugaguga

SEQ ID NO: 2230147 - RNA, 19 nt, Homo sapiens
  misc_RNA (1)...(19): siRNA sense strand
agaacaaaguagaggggau

SEQ ID NO: 2230148 - RNA, 19 nt, Homo sapiens
  misc_RNA (1)...(19): siRNA sense strand
cugccaaagcaaaguguuu

SEQ ID NO: 2230149 - RNA, 19 nt, Homo sapiens
  misc_RNA (1)...(19): siRNA sense strand
gauauagaggauacagcaa

SEQ ID NO: 2230150 - RNA, 19 nt, Homo sapiens
  misc_RNA (1)...(19): siRNA sense strand
auaaagacuuaaaggagca

SEQ ID NO: 2230151 - RNA, 19 nt, Homo sapiens
  misc_RNA (1)...(19): siRNA sense strand
cauaaagacccaaaagcaa

SEQ ID NO: 2230152 - RNA, 19 nt, Homo sapiens
  misc_RNA (1)...(19): siRNA sense strand
cacagagaacagagaggua

SEQ ID NO: 2230153 - RNA, 19 nt, Homo sapiens
  misc_RNA (1)...(19): siRNA sense strand
ggccaaugggagaggcuga

SEQ ID NO: 2230154 - RNA, 19 nt, Homo sapiens
  misc_RNA (1)...(19): siRNA sense strand
uuuccaaggccgugcagaa

SEQ ID NO: 2230155 - RNA, 19 nt, Homo sapiens
  misc_RNA (1)...(19): siRNA sense strand
cgaacaugcaccucgggaa

SEQ ID NO: 2230156 - RNA, 19 nt, Homo sapiens
  misc_RNA (1)...(19): siRNA sense strand
aaauauugcuacaguggca

SEQ ID NO: 2230157 - RNA, 19 nt, Homo sapiens
  misc_RNA (1)...(19): siRNA sense strand
ggacuugaccuaaaggguu

SEQ ID NO: 2230158 - RNA, 19 nt, Homo sapiens
  misc_RNA (1)...(19): siRNA sense strand
ggaaguggggaaaggaauu

SEQ ID NO: 2230159 - RNA, 19 nt, Homo sapiens
  misc_RNA (1)...(19): siRNA sense strand
aggaguacauguaugccua

SEQ ID NO: 2230160 - RNA, 19 nt, Homo sapiens
  misc_RNA (1)...(19): siRNA sense strand
cguggagagcggaagaaga

SEQ ID NO: 2230161 - RNA, 19 nt, Homo sapiens
  misc_RNA (1)...(19): siRNA sense strand
gcucaggaggggaaggcaa

SEQ ID NO: 2230162 - RNA, 19 nt, Homo sapiens
  misc_RNA (1)...(19): siRNA sense strand
ccacaggguaauaaagacu

SEQ ID NO: 2230163 - RNA, 19 nt, Homo sapiens
  misc_RNA (1)...(19): siRNA sense strand
gguuaaugcccuaguggcu

SEQ ID NO: 2230164 - RNA, 19 nt, Homo sapiens
  misc_RNA (1)...(19): siRNA sense strand
gugacugggcagagcggau

SEQ ID NO: 2230165 - RNA, 19 nt, Homo sapiens
  misc_RNA (1)...(19): siRNA sense strand
agaacagagagguaggcau

SEQ ID NO: 2230166 - RNA, 19 nt, Homo sapiens
  misc_RNA (1)...(19): siRNA sense strand
ggauauagaggauacagca

SEQ ID NO: 2230167 - RNA, 19 nt, Homo sapiens
  misc_RNA (1)...(19): siRNA sense strand
cugacaaugacaagcugua

SEQ ID NO: 2230168 - RNA, 19 nt, Homo sapiens
  misc_RNA (1)...(19): siRNA sense strand
agccaaguacacugagcaa

SEQ ID NO: 2230169 - RNA, 19 nt, Homo sapiens
  misc_RNA (1)...(19): siRNA sense strand
aagcagcaaagcaggauau

SEQ ID NO: 2230170 - RNA, 19 nt, Homo sapiens
  misc_RNA (1)...(19): siRNA sense strand
gcaaccaccuggaagagca

SEQ ID NO: 2230171 - RNA, 19 nt, Homo sapiens
  misc_RNA (1)...(19): siRNA sense strand
gcggaagaagaguguaguu

SEQ ID NO: 2230172 - RNA, 19 nt, Homo sapiens
  misc_RNA (1)...(19): siRNA sense strand
acaagauguacaaggacaa

SEQ ID NO: 2230173 - RNA, 19 nt, Homo sapiens
  misc_RNA (1)...(19): siRNA sense strand
acgucaaacucgaggaaag

SEQ ID NO: 2230174 - RNA, 19 nt, Homo sapiens
  misc_RNA (1)...(19): siRNA sense strand
uggaggaucuagaggacga

SEQ ID NO: 2230175 - RNA, 19 nt, Homo sapiens
  misc_RNA (1)...(19): siRNA sense strand
aggaaagugcagauaacau

SEQ ID NO: 2230176 - RNA, 19 nt, Homo sapiens
  misc_RNA (1)...(19): siRNA sense strand
cggcuaguuuggaggaucu

SEQ ID NO: 2230177 - RNA, 19 nt, Homo sapiens
  misc_RNA (1)...(19): siRNA sense strand
guuacuaagaaguccagaa

SEQ ID NO: 2230178 - RNA, 19 nt, Homo sapiens
  misc_RNA (1)...(19): siRNA sense strand
cgggaaacgucaaacucga

SEQ ID NO: 2230179 - RNA, 19 nt, Homo sapiens
  misc_RNA (1)...(19): siRNA sense strand
aacaagauguacaaggaca

SEQ ID NO: 2230180 - RNA, 19 nt, Homo sapiens
  misc_RNA (1)...(19): siRNA sense strand
uaaacaaagaacaggaucu

SEQ ID NO: 2230181 - RNA, 19 nt, Homo sapiens
  misc_RNA (1)...(19): siRNA sense strand
gaugcaauuuggagggcuu

SEQ ID NO: 2230182 - RNA, 19 nt, Homo sapiens
  misc_RNA (1)...(19): siRNA sense strand
cgcucaagccggaggucaa

SEQ ID NO: 2230183 - RNA, 19 nt, Homo sapiens
  misc_RNA (1)...(19): siRNA sense strand
gggacaaaucggugaccau

SEQ ID NO: 2230184 - RNA, 19 nt, Homo sapiens
  misc_RNA (1)...(19): siRNA sense strand
ggucaaagcauucgccaca

SEQ ID NO: 2230185 - RNA, 19 nt, Homo sapiens
  misc_RNA (1)...(19): siRNA sense strand
aagaagaucucccgggaca

SEQ ID NO: 2230186 - RNA, 19 nt, Homo sapiens
  misc_RNA (1)...(19): siRNA sense strand
ucgagaaaggagaggcauu

SEQ ID NO: 2230187 - RNA, 19 nt, Homo sapiens
  misc_RNA (1)...(19): siRNA sense strand
cuggcuaacaaucgagaaa

SEQ ID NO: 2230188 - RNA, 19 nt, Homo sapiens
  misc_RNA (1)...(19): siRNA sense strand
cugaucuugugaagggaaa

SEQ ID NO: 2230189 - RNA, 19 nt, Homo sapiens
  misc_RNA (1)...(19): siRNA sense strand
ugucaggcuuucugggaga

SEQ ID NO: 2230190 - RNA, 19 nt, Homo sapiens
  misc_RNA (1)...(19): siRNA sense strand
agaagagcuccgugcgauu

SEQ ID NO: 2230191 - RNA, 19 nt, Homo sapiens
  misc_RNA (1)...(19): siRNA sense strand
uaacaaucgagaaaggaga

SEQ ID NO: 2230192 - RNA, 19 nt, Homo sapiens
  misc_RNA (1)...(19): siRNA sense strand
gaggaggggaagagagaca

SEQ ID NO: 2230193 - RNA, 19 nt, Homo sapiens
  misc_RNA (1)...(19): siRNA sense strand
ucguggaacagguggccaa

SEQ ID NO: 2230194 - RNA, 19 nt, Homo sapiens
  misc_RNA (1)...(19): siRNA sense strand
uggaggaagcgcaagaaaa

SEQ ID NO: 2230195 - RNA, 19 nt, Homo sapiens
  misc_RNA (1)...(19): siRNA sense strand
agggaaagaaaguguaugu

SEQ ID NO: 2230196 - RNA, 19 nt, Homo sapiens
  misc_RNA (1)...(19): siRNA sense strand
gaaagaaaguguaugucac

SEQ ID NO: 2230197 - RNA, 19 nt, Homo sapiens
  misc_RNA (1)...(19): siRNA sense strand
ccgaugccgaagaggacaa

SEQ ID NO: 2230198 - RNA, 19 nt, Homo sapiens
  misc_RNA (1)...(19): siRNA sense strand
ggcuauggaggaagcgcaa

SEQ ID NO: 2230199 - RNA, 19 nt, Homo sapiens
  misc_RNA (1)...(19): siRNA sense strand
gcauugcccuggaugggaa

SEQ ID NO: 2230200 - RNA, 19 nt, Homo sapiens
  misc_RNA (1)...(19): siRNA sense strand
ccaucauuaaggagggcau

SEQ ID NO: 2230201 - RNA, 19 nt, Homo sapiens
  misc_RNA (1)...(19): siRNA sense strand
cuauggaggaagcgcaaga

SEQ ID NO: 2230202 - RNA, 19 nt, Homo sapiens
  misc_RNA (1)...(19): siRNA sense strand
gagaagcugaggaggggaa

SEQ ID NO: 2230203 - RNA, 19 nt, Homo sapiens
  misc_RNA (1)...(19): siRNA sense strand
gcaccgaugccgaagagga

SEQ ID NO: 2230204 - RNA, 19 nt, Homo sapiens
  misc_RNA (1)...(19): siRNA sense strand
ccagcaaguccgaaccgaa

SEQ ID NO: 2230205 - RNA, 19 nt, Homo sapiens
  misc_RNA (1)...(19): siRNA sense strand
acacagugcuucagagcca

SEQ ID NO: 2230206 - RNA, 19 nt, Homo sapiens
  misc_RNA (1)...(19): siRNA sense strand
agcuaaagaagguggaaga

SEQ ID NO: 2230207 - RNA, 19 nt, Homo sapiens
  misc_RNA (1)...(19): siRNA sense strand
ccaagaaagcugagagcag

SEQ ID NO: 2230208 - RNA, 19 nt, Homo sapiens
  misc_RNA (1)...(19): siRNA sense strand
gcguugaaguuuugguaga

SEQ ID NO: 2230209 - RNA, 19 nt, Homo sapiens
  misc_RNA (1)...(19): siRNA sense strand
gcaacgaggaagaggaggu

SEQ ID NO: 2230210 - RNA, 19 nt, Homo sapiens
  misc_RNA (1)...(19): siRNA sense strand
agguaugccgagcaggaaa

SEQ ID NO: 2230211 - RNA, 19 nt, Homo sapiens
  misc_RNA (1)...(19): siRNA sense strand
uggagaagucagaagacga

SEQ ID NO: 2230212 - RNA, 19 nt, Homo sapiens
  misc_RNA (1)...(19): siRNA sense strand
agaagguggaagacuuaaa

SEQ ID NO: 2230213 - RNA, 19 nt, Homo sapiens
  misc_RNA (1)...(19): siRNA sense strand
cugugaugguccugcccaa

SEQ ID NO: 2230214 - RNA, 19 nt, Homo sapiens
  misc_RNA (1)...(19): siRNA sense strand
ccaucauccaguuggccaa

SEQ ID NO: 2230215 - RNA, 19 nt, Homo sapiens
  misc_RNA (1)...(19): siRNA sense strand
cccucaagaaccugaagaa

SEQ ID NO: 2230216 - RNA, 19 nt, Homo sapiens
  misc_RNA (1)...(19): siRNA sense strand
gcgagaacuucaacccuga

SEQ ID NO: 2230217 - RNA, 19 nt, Homo sapiens
  misc_RNA (1)...(19): siRNA sense strand
ccagcaccguagagaggau

SEQ ID NO: 2230218 - RNA, 19 nt, Homo sapiens
  misc_RNA (1)...(19): siRNA sense strand
aggauugaagacagccaua

SEQ ID NO: 2230219 - RNA, 19 nt, Homo sapiens
  misc_RNA (1)...(19): siRNA sense strand
uguuauuagccgagcacaa

SEQ ID NO: 2230220 - RNA, 19 nt, Homo sapiens
  misc_RNA (1)...(19): siRNA sense strand
cugaagugaugcugggaca

SEQ ID NO: 2230221 - RNA, 19 nt, Homo sapiens
  misc_RNA (1)...(19): siRNA sense strand
agacaaacucauaggaaag

SEQ ID NO: 2230222 - RNA, 19 nt, Homo sapiens
  misc_RNA (1)...(19): siRNA sense strand
aagaagagucuguugaaaa

SEQ ID NO: 2230223 - RNA, 19 nt, Homo sapiens
  misc_RNA (1)...(19): siRNA sense strand
gggcacaaggacugaugaa

SEQ ID NO: 2230224 - RNA, 19 nt, Homo sapiens
  misc_RNA (1)...(19): siRNA sense strand
aaaagaaaccugaagacaa

SEQ ID NO: 2230225 - RNA, 19 nt, Homo sapiens
  misc_RNA (1)...(19): siRNA sense strand
agagauuaucagaaagaga

SEQ ID NO: 2230226 - RNA, 19 nt, Homo sapiens
  misc_RNA (1)...(19): siRNA sense strand
gggacagaauuggacgaaa

SEQ ID NO: 2230227 - RNA, 19 nt, Homo sapiens
  misc_RNA (1)...(19): siRNA sense strand
uguccaggguagaagaaaa

SEQ ID NO: 2230228 - RNA, 19 nt, Homo sapiens
  misc_RNA (1)...(19): siRNA sense strand
gcucaggaaagaaacgcaa

SEQ ID NO: 2230229 - RNA, 19 nt, Homo sapiens
  misc_RNA (1)...(19): siRNA sense strand
agacauagcucauccagca

SEQ ID NO: 2230230 - RNA, 19 nt, Homo sapiens
  misc_RNA (1)...(19): siRNA sense strand
ccaaauagcaaaucgguac

SEQ ID NO: 2230231 - RNA, 19 nt, Homo sapiens
  misc_RNA (1)...(19): siRNA sense strand
agaaauugaaauccagcaa

SEQ ID NO: 2230232 - RNA, 19 nt, Homo sapiens
  misc_RNA (1)...(19): siRNA sense strand
guuucaaggaguuugggaa

SEQ ID NO: 2230233 - RNA, 19 nt, Homo sapiens
  misc_RNA (1)...(19): siRNA sense strand
ggguagaagaaaacgauuu

SEQ ID NO: 2230234 - RNA, 19 nt, Homo sapiens
  misc_RNA (1)...(19): siRNA sense strand
ggaagaggcuauuacgugu

SEQ ID NO: 2230235 - RNA, 19 nt, Homo sapiens
  misc_RNA (1)...(19): siRNA sense strand
ugaaagaagacauagcuca

SEQ ID NO: 2230236 - RNA, 19 nt, Homo sapiens
  misc_RNA (1)...(19): siRNA sense strand
cgggaagacaugccaauau

SEQ ID NO: 2230237 - RNA, 19 nt, Homo sapiens
  misc_RNA (1)...(19): siRNA sense strand
aagcaaaugcggugaacgu

SEQ ID NO: 2230238 - RNA, 19 nt, Homo sapiens
  misc_RNA (1)...(19): siRNA sense strand
ccucugugaaaguggaaaa

SEQ ID NO: 2230239 - RNA, 19 nt, Homo sapiens
  misc_RNA (1)...(19): siRNA sense strand
ucugaauggcaaagggcuu

SEQ ID NO: 2230240 - RNA, 19 nt, Homo sapiens
  misc_RNA (1)...(19): siRNA sense strand
aucaagaggaugaguguga

SEQ ID NO: 2230241 - RNA, 19 nt, Homo sapiens
  misc_RNA (1)...(19): siRNA sense strand
aaagagaguuugauccuga

SEQ ID NO: 2230242 - RNA, 19 nt, Homo sapiens
  misc_RNA (1)...(19): siRNA sense strand
gaauaaagcaaaugcggug

SEQ ID NO: 2230243 - RNA, 19 nt, Homo sapiens
  misc_RNA (1)...(19): siRNA sense strand
cuguaaucagguugucaaa

SEQ ID NO: 2230244 - RNA, 19 nt, Homo sapiens
  misc_RNA (1)...(19): siRNA sense strand
aguuccaaguuguugaaau

SEQ ID NO: 2230245 - RNA, 19 nt, Homo sapiens
  misc_RNA (1)...(19): siRNA sense strand
augcacagcuauggaagaa

SEQ ID NO: 2230246 - RNA, 19 nt, Homo sapiens
  misc_RNA (1)...(19): siRNA sense strand
aggaugagugugaugguga

SEQ ID NO: 2230247 - RNA, 19 nt, Homo sapiens
  misc_RNA (1)...(19): siRNA sense strand
cugugaaaguggaaaagau

SEQ ID NO: 2230248 - RNA, 19 nt, Homo sapiens
  misc_RNA (1)...(19): siRNA sense strand
uugucaaaccgcaggcauu

SEQ ID NO: 2230249 - RNA, 19 nt, Homo sapiens
  misc_RNA (1)...(19): siRNA sense strand
guccaggaaaccucagaaa

SEQ ID NO: 2230250 - RNA, 19 nt, Homo sapiens
  misc_RNA (1)...(19): siRNA sense strand
agcaaaggaggcagugcaa

SEQ ID NO: 2230251 - RNA, 19 nt, Homo sapiens
  misc_RNA (1)...(19): siRNA sense strand
cccaaauagcaaaucggua

SEQ ID NO: 2230252 - RNA, 19 nt, Homo sapiens
  misc_RNA (1)...(19): siRNA sense strand
ucggaaaugcuuacggaaa

SEQ ID NO: 2230253 - RNA, 19 nt, Homo sapiens
  misc_RNA (1)...(19): siRNA sense strand
gugaauguguagagaccau

SEQ ID NO: 2230254 - RNA, 19 nt, Homo sapiens
  misc_RNA (1)...(19): siRNA sense strand
aguuauuacuggauuggaa

SEQ ID NO: 2230255 - RNA, 19 nt, Homo sapiens
  misc_RNA (1)...(19): siRNA sense strand
cugccaaagccuugaauca

SEQ ID NO: 2230256 - RNA, 19 nt, Homo sapiens
  misc_RNA (1)...(19): siRNA sense strand
aggacugcguggagaucua

SEQ ID NO: 2230257 - RNA, 19 nt, Homo sapiens
  misc_RNA (1)...(19): siRNA sense strand
gggcaguggacacagcaaa

SEQ ID NO: 2230258 - RNA, 19 nt, Homo sapiens
  misc_RNA (1)...(19): siRNA sense strand
guguauguccucuggagaa

SEQ ID NO: 2230259 - RNA, 19 nt, Homo sapiens
  misc_RNA (1)...(19): siRNA sense strand
agugugaugcugugacaaa

SEQ ID NO: 2230260 - RNA, 19 nt, Homo sapiens
  misc_RNA (1)...(19): siRNA sense strand
cugggaaacuucagcuaca

SEQ ID NO: 2230261 - RNA, 19 nt, Homo sapiens
  misc_RNA (1)...(19): siRNA sense strand
aucuacaucaagagagaaa

SEQ ID NO: 2230262 - RNA, 19 nt, Homo sapiens
  misc_RNA (1)...(19): siRNA sense strand
ccugaaggauggacgcuca

SEQ ID NO: 2230263 - RNA, 19 nt, Homo sapiens
  misc_RNA (1)...(19): siRNA sense strand
cuuccugccaagugguaaa

SEQ ID NO: 2230264 - RNA, 19 nt, Homo sapiens
  misc_RNA (1)...(19): siRNA sense strand
cuuacggaaagcaaagaaa

SEQ ID NO: 2230265 - RNA, 19 nt, Homo sapiens
  misc_RNA (1)...(19): siRNA sense strand
ugaugaggccagugcuuau

SEQ ID NO: 2230266 - RNA, 19 nt, Homo sapiens
  misc_RNA (1)...(19): siRNA sense strand
gugaagaaggauuugaacu

SEQ ID NO: 2230267 - RNA, 19 nt, Homo sapiens
  misc_RNA (1)...(19): siRNA sense strand
cggugaauguguagagacc

SEQ ID NO: 2230268 - RNA, 19 nt, Homo sapiens
  misc_RNA (1)...(19): siRNA sense strand
cugcaaugugguugagugu

SEQ ID NO: 2230269 - RNA, 19 nt, Homo sapiens
  misc_RNA (1)...(19): siRNA sense strand
gguugcaauucaaaacaaa

SEQ ID NO: 2230270 - RNA, 19 nt, Homo sapiens
  misc_RNA (1)...(19): siRNA sense strand
agacaaugacaaggagaaa

SEQ ID NO: 2230271 - RNA, 19 nt, Homo sapiens
  misc_RNA (1)...(19): siRNA sense strand
ugaacgagcucgagcgacu

SEQ ID NO: 2230272 - RNA, 19 nt, Homo sapiens
  misc_RNA (1)...(19): siRNA sense strand
agaaaagcaaggacgguaa

SEQ ID NO: 2230273 - RNA, 19 nt, Homo sapiens
  misc_RNA (1)...(19): siRNA sense strand
uagacaaugacaaggagaa

SEQ ID NO: 2230274 - RNA, 19 nt, Homo sapiens
  misc_RNA (1)...(19): siRNA sense strand
cgagaguggcagaagggau

SEQ ID NO: 2230275 - RNA, 19 nt, Homo sapiens
  misc_RNA (1)...(19): siRNA sense strand
acgugaagucggaggacga

SEQ ID NO: 2230276 - RNA, 19 nt, Homo sapiens
  misc_RNA (1)...(19): siRNA sense strand
gccgcaaacaagagaauca

SEQ ID NO: 2230277 - RNA, 19 nt, Homo sapiens
  misc_RNA (1)...(19): siRNA sense strand
acaaugacaaggagaaacu

SEQ ID NO: 2230278 - RNA, 19 nt, Homo sapiens
  misc_RNA (1)...(19): siRNA sense strand
aagagaagcgcgaggacgu

SEQ ID NO: 2230279 - RNA, 19 nt, Homo sapiens
  misc_RNA (1)...(19): siRNA sense strand
uuccagaaccggagagcca

SEQ ID NO: 2230280 - RNA, 19 nt, Homo sapiens
  misc_RNA (1)...(19): siRNA sense strand
agacaaugacaaggagaaa

SEQ ID NO: 2230281 - RNA, 19 nt, Homo sapiens
  misc_RNA (1)...(19): siRNA sense strand
ugaacgagcucgagcgacu

SEQ ID NO: 2230282 - RNA, 19 nt, Homo sapiens
  misc_RNA (1)...(19): siRNA sense strand
agaaaagcaaggacgguaa

SEQ ID NO: 2230283 - RNA, 19 nt, Homo sapiens
  misc_RNA (1)...(19): siRNA sense strand
uagacaaugacaaggagaa

SEQ ID NO: 2230284 - RNA, 19 nt, Homo sapiens
  misc_RNA (1)...(19): siRNA sense strand
cgagaguggcagaagggau

SEQ ID NO: 2230285 - RNA, 19 nt, Homo sapiens
  misc_RNA (1)...(19): siRNA sense strand
acgugaagucggaggacga

SEQ ID NO: 2230286 - RNA, 19 nt, Homo sapiens
  misc_RNA (1)...(19): siRNA sense strand
gccgcaaacaagagaauca

SEQ ID NO: 2230287 - RNA, 19 nt, Homo sapiens
  misc_RNA (1)...(19): siRNA sense strand
acaaugacaaggagaaacu

SEQ ID NO: 2230288 - RNA, 19 nt, Homo sapiens
  misc_RNA (1)...(19): siRNA sense strand
aagagaagcgcgaggacgu

SEQ ID NO: 2230289 - RNA, 19 nt, Homo sapiens
  misc_RNA (1)...(19): siRNA sense strand
uuccagaaccggagagcca

SEQ ID NO: 2230290 - RNA, 19 nt, Homo sapiens
  misc_RNA (1)...(19): siRNA sense strand
guuugaugauggaggguua

SEQ ID NO: 2230291 - RNA, 19 nt, Homo sapiens
  misc_RNA (1)...(19): siRNA sense strand
aagaggaauuagagagauu

SEQ ID NO: 2230292 - RNA, 19 nt, Homo sapiens
  misc_RNA (1)...(19): siRNA sense strand
cuuacuaguuagaggaaau

SEQ ID NO: 2230293 - RNA, 19 nt, Homo sapiens
  misc_RNA (1)...(19): siRNA sense strand
gaauggaaugggaggcaaa

SEQ ID NO: 2230294 - RNA, 19 nt, Homo sapiens
  misc_RNA (1)...(19): siRNA sense strand
gauuagaacaggagagacu

SEQ ID NO: 2230295 - RNA, 19 nt, Homo sapiens
  misc_RNA (1)...(19): siRNA sense strand
ggugauuggauauaagaaa

SEQ ID NO: 2230296 - RNA, 19 nt, Homo sapiens
  misc_RNA (1)...(19): siRNA sense strand
cgugagugcuuuagacaau

SEQ ID NO: 2230297 - RNA, 19 nt, Homo sapiens
  misc_RNA (1)...(19): siRNA sense strand
aggcuuaggaagaaugaaa

SEQ ID NO: 2230298 - RNA, 19 nt, Homo sapiens
  misc_RNA (1)...(19): siRNA sense strand
agagaaacuccguggaaaa

SEQ ID NO: 2230299 - RNA, 19 nt, Homo sapiens
  misc_RNA (1)...(19): siRNA sense strand
cuuucaaguuagugucaua

SEQ ID NO: 2230300 - RNA, 19 nt, Homo sapiens
  misc_RNA (1)...(19): siRNA sense strand
uggaauuggucuuggaguu

SEQ ID NO: 2230301 - RNA, 19 nt, Homo sapiens
  misc_RNA (1)...(19): siRNA sense strand
ccgccaaguucgacugaau

SEQ ID NO: 2230302 - RNA, 19 nt, Homo sapiens
  misc_RNA (1)...(19): siRNA sense strand
caacauuaggccaaacaaa

SEQ ID NO: 2230303 - RNA, 19 nt, Homo sapiens
  misc_RNA (1)...(19): siRNA sense strand
cagaaaagacucagaauca

SEQ ID NO: 2230304 - RNA, 19 nt, Homo sapiens
  misc_RNA (1)...(19): siRNA sense strand
cuacuuaaggagagugauu

SEQ ID NO: 2230305 - RNA, 19 nt, Homo sapiens
  misc_RNA (1)...(19): siRNA sense strand
gaacaguggcauggcgaaa

SEQ ID NO: 2230306 - RNA, 19 nt, Homo sapiens
  misc_RNA (1)...(19): siRNA sense strand
cagucaaggaaaagaguua

SEQ ID NO: 2230307 - RNA, 19 nt, Homo sapiens
  misc_RNA (1)...(19): siRNA sense strand
uggaagcagucaaggaaaa

SEQ ID NO: 2230308 - RNA, 19 nt, Homo sapiens
  misc_RNA (1)...(19): siRNA sense strand
gcuugagauucacgagcaa

SEQ ID NO: 2230309 - RNA, 19 nt, Homo sapiens
  misc_RNA (1)...(19): siRNA sense strand
ugcuaacggugaugggaua

SEQ ID NO: 2230310 - RNA, 19 nt, Homo sapiens
  misc_RNA (1)...(19): siRNA sense strand
ggauaaaauuugcagacau

SEQ ID NO: 2230311 - RNA, 19 nt, Homo sapiens
  misc_RNA (1)...(19): siRNA sense strand
aguuagaggaaaucacaaa

SEQ ID NO: 2230312 - RNA, 19 nt, Homo sapiens
  misc_RNA (1)...(19): siRNA sense strand
gugaaaggugugcugguaa

SEQ ID NO: 2230313 - RNA, 19 nt, Homo sapiens
  misc_RNA (1)...(19): siRNA sense strand
aguacgggcugaugaacaa

SEQ ID NO: 2230314 - RNA, 19 nt, Homo sapiens
  misc_RNA (1)...(19): siRNA sense strand
cugcaaagauuuaacaacu

SEQ ID NO: 2230315 - RNA, 19 nt, Homo sapiens
  misc_RNA (1)...(19): siRNA sense strand
cagcauguggguugggcua

SEQ ID NO: 2230316 - RNA, 19 nt, Homo sapiens
  misc_RNA (1)...(19): siRNA sense strand
uaaugagugugaagaggaa

SEQ ID NO: 2230317 - RNA, 19 nt, Homo sapiens
  misc_RNA (1)...(19): siRNA sense strand
aggcaaaggcccaagucau

SEQ ID NO: 2230318 - RNA, 19 nt, Homo sapiens
  misc_RNA (1)...(19): siRNA sense strand
agucgaugcaugugggaga

SEQ ID NO: 2230319 - RNA, 19 nt, Homo sapiens
  misc_RNA (1)...(19): siRNA sense strand
ccgcgcaaacuguguguua

SEQ ID NO: 2230320 - RNA, 19 nt, Homo sapiens
  misc_RNA (1)...(19): siRNA sense strand
ccaccauaguaacgacaau

SEQ ID NO: 2230321 - RNA, 19 nt, Homo sapiens
  misc_RNA (1)...(19): siRNA sense strand
aagagaaacuccguggaaa

SEQ ID NO: 2230322 - RNA, 19 nt, Homo sapiens
  misc_RNA (1)...(19): siRNA sense strand
gcuuaugauucucacacaa

SEQ ID NO: 2230323 - RNA, 19 nt, Homo sapiens
  misc_RNA (1)...(19): siRNA sense strand
ggucaauaggccugaucuu

SEQ ID NO: 2230324 - RNA, 19 nt, Homo sapiens
  misc_RNA (1)...(19): siRNA sense strand
auuuacaacauguggguau

SEQ ID NO: 2230325 - RNA, 19 nt, Homo sapiens
  misc_RNA (1)...(19): siRNA sense strand
uugagaacuacgugggaau

SEQ ID NO: 2230326 - RNA, 19 nt, Homo sapiens
  misc_RNA (1)...(19): siRNA sense strand
gauucagugcccaguaaua

SEQ ID NO: 2230327 - RNA, 19 nt, Homo sapiens
  misc_RNA (1)...(19): siRNA sense strand
agaacaaaaucaaggcuuu

SEQ ID NO: 2230328 - RNA, 19 nt, Homo sapiens
  misc_RNA (1)...(19): siRNA sense strand
agaggaaaguggaggcauc

SEQ ID NO: 2230329 - RNA, 19 nt, Homo sapiens
  misc_RNA (1)...(19): siRNA sense strand
gaaaauuacagaugcagaa

SEQ ID NO: 2230330 - RNA, 19 nt, Homo sapiens
  misc_RNA (1)...(19): siRNA sense strand
ggcaagaaagggauccaua

SEQ ID NO: 2230331 - RNA, 19 nt, Homo sapiens
  misc_RNA (1)...(19): siRNA sense strand
ucgcaaagaauguggcagu

SEQ ID NO: 2230332 - RNA, 19 nt, Homo sapiens
  misc_RNA (1)...(19): siRNA sense strand
gaacggaguuguuagagga

SEQ ID NO: 2230333 - RNA, 19 nt, Homo sapiens
  misc_RNA (1)...(19): siRNA sense strand
gauucuugcuggugccaau

SEQ ID NO: 2230334 - RNA, 19 nt, Homo sapiens
  misc_RNA (1)...(19): siRNA sense strand
ccaaaguguuccaggcucu

SEQ ID NO: 2230335 - RNA, 19 nt, Homo sapiens
  misc_RNA (1)...(19): siRNA sense strand
cgcugaaacuguaguagau

SEQ ID NO: 2230336 - RNA, 19 nt, Homo sapiens
  misc_RNA (1)...(19): siRNA sense strand
ggaauggaaugggaggcaa

SEQ ID NO: 2230337 - RNA, 19 nt, Homo sapiens
  misc_RNA (1)...(19): siRNA sense strand
ugaacaauuuccaggucau

SEQ ID NO: 2230338 - RNA, 19 nt, Homo sapiens
  misc_RNA (1)...(19): siRNA sense strand
ugggagaguucaaccagaa

SEQ ID NO: 2230339 - RNA, 19 nt, Homo sapiens
  misc_RNA (1)...(19): siRNA sense strand
uagacaaugcucuggaauu

SEQ ID NO: 2230340 - RNA, 19 nt, Homo sapiens
  misc_RNA (1)...(19): siRNA sense strand
ggaaaagaguuaccgccaa

SEQ ID NO: 2230341 - RNA, 19 nt, Homo sapiens
  misc_RNA (1)...(19): siRNA sense strand
cagcuuuaggccugggaau

SEQ ID NO: 2230342 - RNA, 19 nt, Homo sapiens
  misc_RNA (1)...(19): siRNA sense strand
ugaaacuguaguagaucua

SEQ ID NO: 2230343 - RNA, 19 nt, Homo sapiens
  misc_RNA (1)...(19): siRNA sense strand
gugcaagaggaauuagaga

SEQ ID NO: 2230344 - RNA, 19 nt, Homo sapiens
  misc_RNA (1)...(19): siRNA sense strand
cugggaaucaggagugcua

SEQ ID NO: 2230345 - RNA, 19 nt, Homo sapiens
  misc_RNA (1)...(19): siRNA sense strand
ccaugaaagcugcaaagau

SEQ ID NO: 2230346 - RNA, 19 nt, Homo sapiens
  misc_RNA (1)...(19): siRNA sense strand
gagaugaacaagcugaaaa

SEQ ID NO: 2230347 - RNA, 19 nt, Homo sapiens
  misc_RNA (1)...(19): siRNA sense strand
aggccuggcuuauaaagaa

SEQ ID NO: 2230348 - RNA, 19 nt, Homo sapiens
  misc_RNA (1)...(19): siRNA sense strand
uauauggcuugguuggaaa

SEQ ID NO: 2230349 - RNA, 19 nt, Homo sapiens
  misc_RNA (1)...(19): siRNA sense strand
cguauggaauuuacaacau

SEQ ID NO: 2230350 - RNA, 19 nt, Homo sapiens
  misc_RNA (1)...(19): siRNA sense strand
cagucauguuugucaucaa

SEQ ID NO: 2230351 - RNA, 19 nt, Homo sapiens
  misc_RNA (1)...(19): siRNA sense strand
gggagaguucaaccagaaa

SEQ ID NO: 2230352 - RNA, 19 nt, Homo sapiens
  misc_RNA (1)...(19): siRNA sense strand
agagaugauugaaccauau

SEQ ID NO: 2230353 - RNA, 19 nt, Homo sapiens
  misc_RNA (1)...(19): siRNA sense strand
cggaguuguuagaggaggu

SEQ ID NO: 2230354 - RNA, 19 nt, Homo sapiens
  misc_RNA (1)...(19): siRNA sense strand
gagcaugguaucaggguuc

SEQ ID NO: 2230355 - RNA, 19 nt, Homo sapiens
  misc_RNA (1)...(19): siRNA sense strand
acuuauaauugcuggaaga

SEQ ID NO: 2230356 - RNA, 19 nt, Homo sapiens
  misc_RNA (1)...(19): siRNA sense strand
aggacuauauugugggcua

SEQ ID NO: 2230357 - RNA, 19 nt, Homo sapiens
  misc_RNA (1)...(19): siRNA sense strand
uugaauuuaucuugggcaa

SEQ ID NO: 2230358 - RNA, 19 nt, Homo sapiens
  misc_RNA (1)...(19): siRNA sense strand
aagccauguuaguagcaaa

SEQ ID NO: 2230359 - RNA, 19 nt, Homo sapiens
  misc_RNA (1)...(19): siRNA sense strand
aguuagaugaggaagucaa

SEQ ID NO: 2230360 - RNA, 19 nt, Homo sapiens
  misc_RNA (1)...(19): siRNA sense strand
gggcugaggaagagacugu

SEQ ID NO: 2230361 - RNA, 19 nt, Homo sapiens
  misc_RNA (1)...(19): siRNA sense strand
cugcagaauuccaaaagaa

SEQ ID NO: 2230362 - RNA, 19 nt, Homo sapiens
  misc_RNA (1)...(19): siRNA sense strand
ggaugaguuaugugagcau

SEQ ID NO: 2230363 - RNA, 19 nt, Homo sapiens
  misc_RNA (1)...(19): siRNA sense strand
acucagaggauaugaugau

SEQ ID NO: 2230364 - RNA, 19 nt, Homo sapiens
  misc_RNA (1)...(19): siRNA sense strand
ugaggaagucaaagcaaaa

SEQ ID NO: 2230365 - RNA, 19 nt, Homo sapiens
  misc_RNA (1)...(19): siRNA sense strand
aagaagcauaucaggacua

SEQ ID NO: 2230366 - RNA, 19 nt, Homo sapiens
  misc_RNA (1)...(19): siRNA sense strand
guuagaugaggaagucaaa

SEQ ID NO: 2230367 - RNA, 19 nt, Homo sapiens
  misc_RNA (1)...(19): siRNA sense strand
ucaaguuagaugaggaagu

SEQ ID NO: 2230368 - RNA, 19 nt, Homo sapiens
  misc_RNA (1)...(19): siRNA sense strand
cugcuguagaaaugaaauu

SEQ ID NO: 2230369 - RNA, 19 nt, Homo sapiens
  misc_RNA (1)...(19): siRNA sense strand
uugaaaagacucagaggau

SEQ ID NO: 2230370 - RNA, 19 nt, Homo sapiens
  misc_RNA (1)...(19): siRNA sense strand
aagcaucgagugagcagaa

SEQ ID NO: 2230371 - RNA, 19 nt, Homo sapiens
  misc_RNA (1)...(19): siRNA sense strand
ccaguuuggauaugacauu

SEQ ID NO: 2230372 - RNA, 19 nt, Homo sapiens
  misc_RNA (1)...(19): siRNA sense strand
ccacaaucucauacucaau

SEQ ID NO: 2230373 - RNA, 19 nt, Homo sapiens
  misc_RNA (1)...(19): siRNA sense strand
uggaagaagcauaucagga

SEQ ID NO: 2230374 - RNA, 19 nt, Homo sapiens
  misc_RNA (1)...(19): siRNA sense strand
uuaaaguuccagaaaccaa

SEQ ID NO: 2230375 - RNA, 19 nt, Homo sapiens
  misc_RNA (1)...(19): siRNA sense strand
cagauaacaucaagcccaa

SEQ ID NO: 2230376 - RNA, 19 nt, Homo sapiens
  misc_RNA (1)...(19): siRNA sense strand
ccuggaaauaaaucagaua

SEQ ID NO: 2230377 - RNA, 19 nt, Homo sapiens
  misc_RNA (1)...(19): siRNA sense strand
guggaaaguuggggacaaa

SEQ ID NO: 2230378 - RNA, 19 nt, Homo sapiens
  misc_RNA (1)...(19): siRNA sense strand
gaaugaaaaugaaagccaa

SEQ ID NO: 2230379 - RNA, 19 nt, Homo sapiens
  misc_RNA (1)...(19): siRNA sense strand
uggaaauagagaggagcaa

SEQ ID NO: 2230380 - RNA, 19 nt, Homo sapiens
  misc_RNA (1)...(19): siRNA sense strand
uugugaaacuucggguaaa

SEQ ID NO: 2230381 - RNA, 19 nt, Homo sapiens
  misc_RNA (1)...(19): siRNA sense strand
augauacagcacugauaaa

SEQ ID NO: 2230382 - RNA, 19 nt, Homo sapiens
  misc_RNA (1)...(19): siRNA sense strand
ggauauggaaauagagagg

SEQ ID NO: 2230383 - RNA, 19 nt, Homo sapiens
  misc_RNA (1)...(19): siRNA sense strand
gcucuaaagaauggugaca

SEQ ID NO: 2230384 - RNA, 19 nt, Homo sapiens
  misc_RNA (1)...(19): siRNA sense strand
uuacacuggauauggaaau

SEQ ID NO: 2230385 - RNA, 19 nt, Homo sapiens
  misc_RNA (1)...(19): siRNA sense strand
cagauaacaucaagcccaa

SEQ ID NO: 2230386 - RNA, 19 nt, Homo sapiens
  misc_RNA (1)...(19): siRNA sense strand
ccuggaaauaaaucagaua

SEQ ID NO: 2230387 - RNA, 19 nt, Homo sapiens
  misc_RNA (1)...(19): siRNA sense strand
guggaaaguuggggacaaa

SEQ ID NO: 2230388 - RNA, 19 nt, Homo sapiens
  misc_RNA (1)...(19): siRNA sense strand
gaaugaaaaugaaagccaa

SEQ ID NO: 2230389 - RNA, 19 nt, Homo sapiens
  misc_RNA (1)...(19): siRNA sense strand
uggaaauagagaggagcaa

SEQ ID NO: 2230390 - RNA, 19 nt, Homo sapiens
  misc_RNA (1)...(19): siRNA sense strand
uugugaaacuucggguaaa

SEQ ID NO: 2230391 - RNA, 19 nt, Homo sapiens
  misc_RNA (1)...(19): siRNA sense strand
augauacagcacugauaaa

SEQ ID NO: 2230392 - RNA, 19 nt, Homo sapiens
  misc_RNA (1)...(19): siRNA sense strand
ggauauggaaauagagagg

SEQ ID NO: 2230393 - RNA, 19 nt, Homo sapiens
  misc_RNA (1)...(19): siRNA sense strand
gcucuaaagaauggugaca

SEQ ID NO: 2230394 - RNA, 19 nt, Homo sapiens
  misc_RNA (1)...(19): siRNA sense strand
uuacacuggauauggaaau

SEQ ID NO: 2230395 - RNA, 19 nt, Homo sapiens
  misc_RNA (1)...(19): siRNA sense strand
uggcagaagcagcaggaaa

SEQ ID NO: 2230396 - RNA, 19 nt, Homo sapiens
  misc_RNA (1)...(19): siRNA sense strand
gacaaauguuggaggagca

SEQ ID NO: 2230397 - RNA, 19 nt, Homo sapiens
  misc_RNA (1)...(19): siRNA sense strand
ccaaacaggguguggcaga

SEQ ID NO: 2230398 - RNA, 19 nt, Homo sapiens
  misc_RNA (1)...(19): siRNA sense strand
gagcaguggugacgggugu

SEQ ID NO: 2230399 - RNA, 19 nt, Homo sapiens
  misc_RNA (1)...(19): siRNA sense strand
aggaaggguaucaagacua

SEQ ID NO: 2230400 - RNA, 19 nt, Homo sapiens
  misc_RNA (1)...(19): siRNA sense strand
aagcagcaggaaagacaaa

SEQ ID NO: 2230401 - RNA, 19 nt, Homo sapiens
  misc_RNA (1)...(19): siRNA sense strand
acuacgaaccugaagccua

SEQ ID NO: 2230402 - RNA, 19 nt, Homo sapiens
  misc_RNA (1)...(19): siRNA sense strand
ccaaggagggaguggugca

SEQ ID NO: 2230403 - RNA, 19 nt, Homo sapiens
  misc_RNA (1)...(19): siRNA sense strand
agugacaaauguuggagga

SEQ ID NO: 2230404 - RNA, 19 nt, Homo sapiens
  misc_RNA (1)...(19): siRNA sense strand
aaaaggaccaguugggcaa

SEQ ID NO: 2230405 - RNA, 19 nt, Homo sapiens
  misc_RNA (1)...(19): siRNA sense strand
uggcagaagcagcaggaaa

SEQ ID NO: 2230406 - RNA, 19 nt, Homo sapiens
  misc_RNA (1)...(19): siRNA sense strand
gacaaauguuggaggagca

SEQ ID NO: 2230407 - RNA, 19 nt, Homo sapiens
  misc_RNA (1)...(19): siRNA sense strand
ccaaacaggguguggcaga

SEQ ID NO: 2230408 - RNA, 19 nt, Homo sapiens
  misc_RNA (1)...(19): siRNA sense strand
gagcaguggugacgggugu

SEQ ID NO: 2230409 - RNA, 19 nt, Homo sapiens
  misc_RNA (1)...(19): siRNA sense strand
aggaaggguaucaagacua

SEQ ID NO: 2230410 - RNA, 19 nt, Homo sapiens
  misc_RNA (1)...(19): siRNA sense strand
aagcagcaggaaagacaaa

SEQ ID NO: 2230411 - RNA, 19 nt, Homo sapiens
  misc_RNA (1)...(19): siRNA sense strand
acuacgaaccugaagccua

SEQ ID NO: 2230412 - RNA, 19 nt, Homo sapiens
  misc_RNA (1)...(19): siRNA sense strand
ccaaggagggaguggugca

SEQ ID NO: 2230413 - RNA, 19 nt, Homo sapiens
  misc_RNA (1)...(19): siRNA sense strand
agugacaaauguuggagga

SEQ ID NO: 2230414 - RNA, 19 nt, Homo sapiens
  misc_RNA (1)...(19): siRNA sense strand
aaaaggaccaguugggcaa

SEQ ID NO: 2230415 - RNA, 19 nt, Homo sapiens
  misc_RNA (1)...(19): siRNA sense strand
gagccaauuuccucgguga

SEQ ID NO: 2230416 - RNA, 19 nt, Homo sapiens
  misc_RNA (1)...(19): siRNA sense strand
ggacgguacuucugggccu

SEQ ID NO: 2230417 - RNA, 19 nt, Homo sapiens
  misc_RNA (1)...(19): siRNA sense strand
gugacuauauauugcgcca

SEQ ID NO: 2230418 - RNA, 19 nt, Homo sapiens
  misc_RNA (1)...(19): siRNA sense strand
uggcuaagcuggauggaga

SEQ ID NO: 2230419 - RNA, 19 nt, Homo sapiens
  misc_RNA (1)...(19): siRNA sense strand
gaggaaaguuacagccacu

SEQ ID NO: 2230420 - RNA, 19 nt, Homo sapiens
  misc_RNA (1)...(19): siRNA sense strand
aggcuguggaugaugguua

SEQ ID NO: 2230421 - RNA, 19 nt, Homo sapiens
  misc_RNA (1)...(19): siRNA sense strand
acauauacacuaaggagga

SEQ ID NO: 2230422 - RNA, 19 nt, Homo sapiens
  misc_RNA (1)...(19): siRNA sense strand
ccaccaacucugugaaacu

SEQ ID NO: 2230423 - RNA, 19 nt, Homo sapiens
  misc_RNA (1)...(19): siRNA sense strand
guuacaaugugcagccaga

SEQ ID NO: 2230424 - RNA, 19 nt, Homo sapiens
  misc_RNA (1)...(19): siRNA sense strand
gagacugggaucuggguga

SEQ ID NO: 2230425 - RNA, 19 nt, Homo sapiens
  misc_RNA (1)...(19): siRNA sense strand
cuuugaugucacagaauuu

SEQ ID NO: 2230426 - RNA, 19 nt, Homo sapiens
  misc_RNA (1)...(19): siRNA sense strand
aggugaccaucaagggcua

SEQ ID NO: 2230427 - RNA, 19 nt, Homo sapiens
  misc_RNA (1)...(19): siRNA sense strand
gucccaugugcgugaguua

SEQ ID NO: 2230428 - RNA, 19 nt, Homo sapiens
  misc_RNA (1)...(19): siRNA sense strand
gacaaaaggaacugaacau

SEQ ID NO: 2230429 - RNA, 19 nt, Homo sapiens
  misc_RNA (1)...(19): siRNA sense strand
cauaugagaugaaugggca

SEQ ID NO: 2230430 - RNA, 19 nt, Homo sapiens
  misc_RNA (1)...(19): siRNA sense strand
ggacaaaaggaacugaaca

SEQ ID NO: 2230431 - RNA, 19 nt, Homo sapiens
  misc_RNA (1)...(19): siRNA sense strand
ucaaagaaguaaaaggucu

SEQ ID NO: 2230432 - RNA, 19 nt, Homo sapiens
  misc_RNA (1)...(19): siRNA sense strand
ccauggacccugaagcuga

SEQ ID NO: 2230433 - RNA, 19 nt, Homo sapiens
  misc_RNA (1)...(19): siRNA sense strand
gagugagugugcagccaga

SEQ ID NO: 2230434 - RNA, 19 nt, Homo sapiens
  misc_RNA (1)...(19): siRNA sense strand
gagugugcagccagaggaa

SEQ ID NO: 2230435 - RNA, 19 nt, Homo sapiens
  misc_RNA (1)...(19): siRNA sense strand
ugucaacguuggugggaga

SEQ ID NO: 2230436 - RNA, 19 nt, Homo sapiens
  misc_RNA (1)...(19): siRNA sense strand
cugaugagaucuauggaga

SEQ ID NO: 2230437 - RNA, 19 nt, Homo sapiens
  misc_RNA (1)...(19): siRNA sense strand
uggcugagucuaugggaau

SEQ ID NO: 2230438 - RNA, 19 nt, Homo sapiens
  misc_RNA (1)...(19): siRNA sense strand
auucaugaccgaagagaca

SEQ ID NO: 2230439 - RNA, 19 nt, Homo sapiens
  misc_RNA (1)...(19): siRNA sense strand
accugaaacaacuggaaua

SEQ ID NO: 2230440 - RNA, 19 nt, Homo sapiens
  misc_RNA (1)...(19): siRNA sense strand
cagagaaaucuugggaaau

SEQ ID NO: 2230441 - RNA, 19 nt, Homo sapiens
  misc_RNA (1)...(19): siRNA sense strand
aggugaaaccaaauccaaa

SEQ ID NO: 2230442 - RNA, 19 nt, Homo sapiens
  misc_RNA (1)...(19): siRNA sense strand
agccaggaggagugugaua

SEQ ID NO: 2230443 - RNA, 19 nt, Homo sapiens
  misc_RNA (1)...(19): siRNA sense strand
cgggcaaauauaauggcua

SEQ ID NO: 2230444 - RNA, 19 nt, Homo sapiens
  misc_RNA (1)...(19): siRNA sense strand
guggacaacaugaagguga

SEQ ID NO: 2230445 - RNA, 19 nt, Homo sapiens
  misc_RNA (1)...(19): siRNA sense strand
cgggagaguuuuaccacaa

SEQ ID NO: 2230446 - RNA, 19 nt, Homo sapiens
  misc_RNA (1)...(19): siRNA sense strand
guuuagcuguguuggccaa

SEQ ID NO: 2230447 - RNA, 19 nt, Homo sapiens
  misc_RNA (1)...(19): siRNA sense strand
cugaaguuacccaggcaau

SEQ ID NO: 2230448 - RNA, 19 nt, Homo sapiens
  misc_RNA (1)...(19): siRNA sense strand
ccucaauucuggacgugca

SEQ ID NO: 2230449 - RNA, 19 nt, Homo sapiens
  misc_RNA (1)...(19): siRNA sense strand
ccagcaaggaagagagaga

SEQ ID NO: 2230450 - RNA, 19 nt, Homo sapiens
  misc_RNA (1)...(19): siRNA sense strand
uggaaauaugacagacaaa

SEQ ID NO: 2230451 - RNA, 19 nt, Homo sapiens
  misc_RNA (1)...(19): siRNA sense strand
gggugaagcuggagacgcu

SEQ ID NO: 2230452 - RNA, 19 nt, Homo sapiens
  misc_RNA (1)...(19): siRNA sense strand
aggaagagagagaggccuu

SEQ ID NO: 2230453 - RNA, 19 nt, Homo sapiens
  misc_RNA (1)...(19): siRNA sense strand
ccuuaguggaggaaugcaa

SEQ ID NO: 2230454 - RNA, 19 nt, Homo sapiens
  misc_RNA (1)...(19): siRNA sense strand
acaccugguacgucagaaa

SEQ ID NO: 2230455 - RNA, 19 nt, Homo sapiens
  misc_RNA (1)...(19): siRNA sense strand
agacaaaagcagucaggau

SEQ ID NO: 2230456 - RNA, 19 nt, Homo sapiens
  misc_RNA (1)...(19): siRNA sense strand
gccuauagcuccaaccaga

SEQ ID NO: 2230457 - RNA, 19 nt, Homo sapiens
  misc_RNA (1)...(19): siRNA sense strand
aggccuuaguggaggaaug

SEQ ID NO: 2230458 - RNA, 19 nt, Homo sapiens
  misc_RNA (1)...(19): siRNA sense strand
aggguuacaugcagcaaca

SEQ ID NO: 2230459 - RNA, 19 nt, Homo sapiens
  misc_RNA (1)...(19): siRNA sense strand
ggaggaggcauuccggcaa

SEQ ID NO: 2230460 - RNA, 19 nt, Homo sapiens
  misc_RNA (1)...(19): siRNA sense strand
gcuaaaaugaucaaggguu

SEQ ID NO: 2230461 - RNA, 19 nt, Homo sapiens
  misc_RNA (1)...(19): siRNA sense strand
ccagcaaggaagagagaga

SEQ ID NO: 2230462 - RNA, 19 nt, Homo sapiens
  misc_RNA (1)...(19): siRNA sense strand
uggaaauaugacagacaaa

SEQ ID NO: 2230463 - RNA, 19 nt, Homo sapiens
  misc_RNA (1)...(19): siRNA sense strand
gggugaagcuggagacgcu

SEQ ID NO: 2230464 - RNA, 19 nt, Homo sapiens
  misc_RNA (1)...(19): siRNA sense strand
aggaagagagagaggccuu

SEQ ID NO: 2230465 - RNA, 19 nt, Homo sapiens
  misc_RNA (1)...(19): siRNA sense strand
ccuuaguggaggaaugcaa

SEQ ID NO: 2230466 - RNA, 19 nt, Homo sapiens
  misc_RNA (1)...(19): siRNA sense strand
acaccugguacgucagaaa

SEQ ID NO: 2230467 - RNA, 19 nt, Homo sapiens
  misc_RNA (1)...(19): siRNA sense strand
agacaaaagcagucaggau

SEQ ID NO: 2230468 - RNA, 19 nt, Homo sapiens
  misc_RNA (1)...(19): siRNA sense strand
gccuauagcuccaaccaga

SEQ ID NO: 2230469 - RNA, 19 nt, Homo sapiens
  misc_RNA (1)...(19): siRNA sense strand
aggccuuaguggaggaaug

SEQ ID NO: 2230470 - RNA, 19 nt, Homo sapiens
  misc_RNA (1)...(19): siRNA sense strand
aggguuacaugcagcaaca

SEQ ID NO: 2230471 - RNA, 19 nt, Homo sapiens
  misc_RNA (1)...(19): siRNA sense strand
ggaggaggcauuccggcaa

SEQ ID NO: 2230472 - RNA, 19 nt, Homo sapiens
  misc_RNA (1)...(19): siRNA sense strand
gcuaaaaugaucaaggguu

SEQ ID NO: 2230473 - RNA, 19 nt, Homo sapiens
  misc_RNA (1)...(19): siRNA sense strand
gaagagagccauugggcau

SEQ ID NO: 2230474 - RNA, 19 nt, Homo sapiens
  misc_RNA (1)...(19): siRNA sense strand
gaggaugagaagagagcca

SEQ ID NO: 2230475 - RNA, 19 nt, Homo sapiens
  misc_RNA (1)...(19): siRNA sense strand
augacagcgugguggacaa

SEQ ID NO: 2230476 - RNA, 19 nt, Homo sapiens
  misc_RNA (1)...(19): siRNA sense strand
ggaugagaagagagccauu

SEQ ID NO: 2230477 - RNA, 19 nt, Homo sapiens
  misc_RNA (1)...(19): siRNA sense strand
ccaucagaacagugcgaga

SEQ ID NO: 2230478 - RNA, 19 nt, Homo sapiens
  misc_RNA (1)...(19): siRNA sense strand
ugguagagaaguugggcca

SEQ ID NO: 2230479 - RNA, 19 nt, Homo sapiens
  misc_RNA (1)...(19): siRNA sense strand
cuucaacccuggucggaga

SEQ ID NO: 2230480 - RNA, 19 nt, Homo sapiens
  misc_RNA (1)...(19): siRNA sense strand
aggcugggaccaaggaaga

SEQ ID NO: 2230481 - RNA, 19 nt, Homo sapiens
  misc_RNA (1)...(19): siRNA sense strand
aguuaggaggauucacaua

SEQ ID NO: 2230482 - RNA, 19 nt, Homo sapiens
  misc_RNA (1)...(19): siRNA sense strand
ggauaaaagcaucaucaau

SEQ ID NO: 2230483 - RNA, 19 nt, Homo sapiens
  misc_RNA (1)...(19): siRNA sense strand
guuguaacugcaagaucaa

SEQ ID NO: 2230484 - RNA, 19 nt, Homo sapiens
  misc_RNA (1)...(19): siRNA sense strand
aguauuuggaugacagaaa

SEQ ID NO: 2230485 - RNA, 19 nt, Homo sapiens
  misc_RNA (1)...(19): siRNA sense strand
gcaucuuauccgaguggaa

SEQ ID NO: 2230486 - RNA, 19 nt, Homo sapiens
  misc_RNA (1)...(19): siRNA sense strand
guguggaguauuuggauga

SEQ ID NO: 2230487 - RNA, 19 nt, Homo sapiens
  misc_RNA (1)...(19): siRNA sense strand
agaaaccacuggauggaga

SEQ ID NO: 2230488 - RNA, 19 nt, Homo sapiens
  misc_RNA (1)...(19): siRNA sense strand
uuauccgaguggaaggaaa

SEQ ID NO: 2230489 - RNA, 19 nt, Homo sapiens
  misc_RNA (1)...(19): siRNA sense strand
gcuucgagauguuccgaga

SEQ ID NO: 2230490 - RNA, 19 nt, Homo sapiens
  misc_RNA (1)...(19): siRNA sense strand
guucaagacagaagggccu

SEQ ID NO: 2230491 - RNA, 19 nt, Homo sapiens
  misc_RNA (1)...(19): siRNA sense strand
gcaagaaaggggagccuca

SEQ ID NO: 2230492 - RNA, 19 nt, Homo sapiens
  misc_RNA (1)...(19): siRNA sense strand
uauccgaguggaaggaaau

SEQ ID NO: 2230493 - RNA, 19 nt, Homo sapiens
  misc_RNA (1)...(19): siRNA sense strand
cuucuugcauucugggaca

SEQ ID NO: 2230494 - RNA, 19 nt, Homo sapiens
  misc_RNA (1)...(19): siRNA sense strand
aaguagaaacagagaacaa

SEQ ID NO: 2230495 - RNA, 19 nt, Homo sapiens
  misc_RNA (1)...(19): siRNA sense strand
aggcauugguacagagcuu

SEQ ID NO: 2230496 - RNA, 19 nt, Homo sapiens
  misc_RNA (1)...(19): siRNA sense strand
agcaaaagaugaagacaaa

SEQ ID NO: 2230497 - RNA, 19 nt, Homo sapiens
  misc_RNA (1)...(19): siRNA sense strand
cagucgaaaucuagugaau

SEQ ID NO: 2230498 - RNA, 19 nt, Homo sapiens
  misc_RNA (1)...(19): siRNA sense strand
agaugaagacaaagaugaa

SEQ ID NO: 2230499 - RNA, 19 nt, Homo sapiens
  misc_RNA (1)...(19): siRNA sense strand
auuagggaguucugggaaa

SEQ ID NO: 2230500 - RNA, 19 nt, Homo sapiens
  misc_RNA (1)...(19): siRNA sense strand
aagcaaaagaugaagacaa

SEQ ID NO: 2230501 - RNA, 19 nt, Homo sapiens
  misc_RNA (1)...(19): siRNA sense strand
caaugaagaagaugaugaa

SEQ ID NO: 2230502 - RNA, 19 nt, Homo sapiens
  misc_RNA (1)...(19): siRNA sense strand
gcucacagggagacaacaa

SEQ ID NO: 2230503 - RNA, 19 nt, Homo sapiens
  misc_RNA (1)...(19): siRNA sense strand
augaagaagaugaugaaga

SEQ ID NO: 2230504 - RNA, 19 nt, Homo sapiens
  misc_RNA (1)...(19): siRNA sense strand
gguacagagcuuccggaaa

SEQ ID NO: 2230505 - RNA, 19 nt, Homo sapiens
  misc_RNA (1)...(19): siRNA sense strand
auucagaccagaagaaauu

SEQ ID NO: 2230506 - RNA, 19 nt, Homo sapiens
  misc_RNA (1)...(19): siRNA sense strand
auguagagaaagagaggau

SEQ ID NO: 2230507 - RNA, 19 nt, Homo sapiens
  misc_RNA (1)...(19): siRNA sense strand
uuuccaagcacuagaagaa

SEQ ID NO: 2230508 - RNA, 19 nt, Homo sapiens
  misc_RNA (1)...(19): siRNA sense strand
guaugaagggaauguggaa

SEQ ID NO: 2230509 - RNA, 19 nt, Homo sapiens
  misc_RNA (1)...(19): siRNA sense strand
aagacaaagaugaagauga

SEQ ID NO: 2230510 - RNA, 19 nt, Homo sapiens
  misc_RNA (1)...(19): siRNA sense strand
gggagaagaaagaagaaac

SEQ ID NO: 2230511 - RNA, 19 nt, Homo sapiens
  misc_RNA (1)...(19): siRNA sense strand
cugcagacuugaagaagca

SEQ ID NO: 2230512 - RNA, 19 nt, Homo sapiens
  misc_RNA (1)...(19): siRNA sense strand
cugaaugagguucuagaaa

SEQ ID NO: 2230513 - RNA, 19 nt, Homo sapiens
  misc_RNA (1)...(19): siRNA sense strand
cuagaagaaacuacagaau

SEQ ID NO: 2230514 - RNA, 19 nt, Homo sapiens
  misc_RNA (1)...(19): siRNA sense strand
agaauaugacgguggcuau

SEQ ID NO: 2230515 - RNA, 19 nt, Homo sapiens
  misc_RNA (1)...(19): siRNA sense strand
guagaaacagagaacaaau

SEQ ID NO: 2230516 - RNA, 19 nt, Homo sapiens
  misc_RNA (1)...(19): siRNA sense strand
acaaggaguugaugaggga

SEQ ID NO: 2230517 - RNA, 19 nt, Homo sapiens
  misc_RNA (1)...(19): siRNA sense strand
uguggaauuugaaggagaa

SEQ ID NO: 2230518 - RNA, 19 nt, Homo sapiens
  misc_RNA (1)...(19): siRNA sense strand
augaagggaauguggaaga

SEQ ID NO: 2230519 - RNA, 19 nt, Homo sapiens
  misc_RNA (1)...(19): siRNA sense strand
gugcugaggcauugguaca

SEQ ID NO: 2230520 - RNA, 19 nt, Homo sapiens
  misc_RNA (1)...(19): siRNA sense strand
agaugaagaugaaaaggaa

SEQ ID NO: 2230521 - RNA, 19 nt, Homo sapiens
  misc_RNA (1)...(19): siRNA sense strand
ucucaaugcacuuguauau

SEQ ID NO: 2230522 - RNA, 19 nt, Homo sapiens
  misc_RNA (1)...(19): siRNA sense strand
acaaugaagaagaugauga

SEQ ID NO: 2230523 - RNA, 19 nt, Homo sapiens
  misc_RNA (1)...(19): siRNA sense strand
caaaguagaaacagagaac

SEQ ID NO: 2230524 - RNA, 19 nt, Homo sapiens
  misc_RNA (1)...(19): siRNA sense strand
gagacaacaauuugcaaaa

SEQ ID NO: 2230525 - RNA, 19 nt, Homo sapiens
  misc_RNA (1)...(19): siRNA sense strand
acaggaagcuaauggggaa

SEQ ID NO: 2230526 - RNA, 19 nt, Homo sapiens
  misc_RNA (1)...(19): siRNA sense strand
gaauacucaagcaaagaaa

SEQ ID NO: 2230527 - RNA, 19 nt, Homo sapiens
  misc_RNA (1)...(19): siRNA sense strand
ggauaauaaugcagcagcu

SEQ ID NO: 2230528 - RNA, 19 nt, Homo sapiens
  misc_RNA (1)...(19): siRNA sense strand
gaggggaaguggacacaaa

SEQ ID NO: 2230529 - RNA, 19 nt, Homo sapiens
  misc_RNA (1)...(19): siRNA sense strand
cggcuagagaugaucgcua

SEQ ID NO: 2230530 - RNA, 19 nt, Homo sapiens
  misc_RNA (1)...(19): siRNA sense strand
auguggaauuugaaggaga

SEQ ID NO: 2230531 - RNA, 19 nt, Homo sapiens
  misc_RNA (1)...(19): siRNA sense strand
acaagaaaggcgcuagaau

SEQ ID NO: 2230532 - RNA, 19 nt, Homo sapiens
  misc_RNA (1)...(19): siRNA sense strand
gcuucgaagugcuugaaaa

SEQ ID NO: 2230533 - RNA, 19 nt, Homo sapiens
  misc_RNA (1)...(19): siRNA sense strand
gguucuagaaauggauaaa

SEQ ID NO: 2230534 - RNA, 19 nt, Homo sapiens
  misc_RNA (1)...(19): siRNA sense strand
aaugaaaacaggaaggaau

SEQ ID NO: 2230535 - RNA, 19 nt, Homo sapiens
  misc_RNA (1)...(19): siRNA sense strand
agagauuguugaaggccau

SEQ ID NO: 2230536 - RNA, 19 nt, Homo sapiens
  misc_RNA (1)...(19): siRNA sense strand
caaaagaugaagacaaaga

SEQ ID NO: 2230537 - RNA, 19 nt, Homo sapiens
  misc_RNA (1)...(19): siRNA sense strand
gagaacaaggaguugauga

SEQ ID NO: 2230538 - RNA, 19 nt, Homo sapiens
  misc_RNA (1)...(19): siRNA sense strand
gagagauuguugaaggcca

SEQ ID NO: 2230539 - RNA, 19 nt, Homo sapiens
  misc_RNA (1)...(19): siRNA sense strand
acuccugcucugagauaaa

SEQ ID NO: 2230540 - RNA, 19 nt, Homo sapiens
  misc_RNA (1)...(19): siRNA sense strand
ggucuaaauacaaugcaga

SEQ ID NO: 2230541 - RNA, 19 nt, Homo sapiens
  misc_RNA (1)...(19): siRNA sense strand
guucaaggcuuuucggaga

SEQ ID NO: 2230542 - RNA, 19 nt, Homo sapiens
  misc_RNA (1)...(19): siRNA sense strand
ugaaggagaacaaggaguu

SEQ ID NO: 2230543 - RNA, 19 nt, Homo sapiens
  misc_RNA (1)...(19): siRNA sense strand
ggaaaugaagccugcacga

SEQ ID NO: 2230544 - RNA, 19 nt, Homo sapiens
  misc_RNA (1)...(19): siRNA sense strand
ccaugguugucuacaggaa

SEQ ID NO: 2230545 - RNA, 19 nt, Homo sapiens
  misc_RNA (1)...(19): siRNA sense strand
ccggaauacucaagcaaag

SEQ ID NO: 2230546 - RNA, 19 nt, Homo sapiens
  misc_RNA (1)...(19): siRNA sense strand
acaccaaggaagaacugaa

SEQ ID NO: 2230547 - RNA, 19 nt, Homo sapiens
  misc_RNA (1)...(19): siRNA sense strand
cacaaaucacaaugaagaa

SEQ ID NO: 2230548 - RNA, 19 nt, Homo sapiens
  misc_RNA (1)...(19): siRNA sense strand
ucacaaugaagaagaugau

SEQ ID NO: 2230549 - RNA, 19 nt, Homo sapiens
  misc_RNA (1)...(19): siRNA sense strand
caaaguuagacgugaccau

SEQ ID NO: 2230550 - RNA, 19 nt, Homo sapiens
  misc_RNA (1)...(19): siRNA sense strand
gggucuggcuauuuacaau

SEQ ID NO: 2230551 - RNA, 19 nt, Homo sapiens
  misc_RNA (1)...(19): siRNA sense strand
ugugggaggacuaggaaaa

SEQ ID NO: 2230552 - RNA, 19 nt, Homo sapiens
  misc_RNA (1)...(19): siRNA sense strand
ccucgagcuuuauaagauu

SEQ ID NO: 2230553 - RNA, 19 nt, Homo sapiens
  misc_RNA (1)...(19): siRNA sense strand
aaaugaagccugcacgaau

SEQ ID NO: 2230554 - RNA, 19 nt, Homo sapiens
  misc_RNA (1)...(19): siRNA sense strand
ccaaggaagaacugaaauc

SEQ ID NO: 2230555 - RNA, 19 nt, Homo sapiens
  misc_RNA (1)...(19): siRNA sense strand
augaagacaaagaugaaga

SEQ ID NO: 2230556 - RNA, 19 nt, Homo sapiens
  misc_RNA (1)...(19): siRNA sense strand
uggaaugugacuugacgua

SEQ ID NO: 2230557 - RNA, 19 nt, Homo sapiens
  misc_RNA (1)...(19): siRNA sense strand
gggaaguggacacaaauca

SEQ ID NO: 2230558 - RNA, 19 nt, Homo sapiens
  misc_RNA (1)...(19): siRNA sense strand
ucacguaugccaaaggauu

SEQ ID NO: 2230559 - RNA, 19 nt, Homo sapiens
  misc_RNA (1)...(19): siRNA sense strand
caccaaggaagaacugaaa

SEQ ID NO: 2230560 - RNA, 19 nt, Homo sapiens
  misc_RNA (1)...(19): siRNA sense strand
aaguagaaacagagaacaa

SEQ ID NO: 2230561 - RNA, 19 nt, Homo sapiens
  misc_RNA (1)...(19): siRNA sense strand
aggcauugguacagagcuu

SEQ ID NO: 2230562 - RNA, 19 nt, Homo sapiens
  misc_RNA (1)...(19): siRNA sense strand
agcaaaagaugaagacaaa

SEQ ID NO: 2230563 - RNA, 19 nt, Homo sapiens
  misc_RNA (1)...(19): siRNA sense strand
cagucgaaaucuagugaau

SEQ ID NO: 2230564 - RNA, 19 nt, Homo sapiens
  misc_RNA (1)...(19): siRNA sense strand
agaugaagacaaagaugaa

SEQ ID NO: 2230565 - RNA, 19 nt, Homo sapiens
  misc_RNA (1)...(19): siRNA sense strand
auuagggaguucugggaaa

SEQ ID NO: 2230566 - RNA, 19 nt, Homo sapiens
  misc_RNA (1)...(19): siRNA sense strand
aagcaaaagaugaagacaa

SEQ ID NO: 2230567 - RNA, 19 nt, Homo sapiens
  misc_RNA (1)...(19): siRNA sense strand
caaugaagaagaugaugaa

SEQ ID NO: 2230568 - RNA, 19 nt, Homo sapiens
  misc_RNA (1)...(19): siRNA sense strand
gcucacagggagacaacaa

SEQ ID NO: 2230569 - RNA, 19 nt, Homo sapiens
  misc_RNA (1)...(19): siRNA sense strand
augaagaagaugaugaaga

SEQ ID NO: 2230570 - RNA, 19 nt, Homo sapiens
  misc_RNA (1)...(19): siRNA sense strand
gguacagagcuuccggaaa

SEQ ID NO: 2230571 - RNA, 19 nt, Homo sapiens
  misc_RNA (1)...(19): siRNA sense strand
auucagaccagaagaaauu

SEQ ID NO: 2230572 - RNA, 19 nt, Homo sapiens
  misc_RNA (1)...(19): siRNA sense strand
auguagagaaagagaggau

SEQ ID NO: 2230573 - RNA, 19 nt, Homo sapiens
  misc_RNA (1)...(19): siRNA sense strand
uuuccaagcacuagaagaa

SEQ ID NO: 2230574 - RNA, 19 nt, Homo sapiens
  misc_RNA (1)...(19): siRNA sense strand
guaugaagggaauguggaa

SEQ ID NO: 2230575 - RNA, 19 nt, Homo sapiens
  misc_RNA (1)...(19): siRNA sense strand
aagacaaagaugaagauga

SEQ ID NO: 2230576 - RNA, 19 nt, Homo sapiens
  misc_RNA (1)...(19): siRNA sense strand
gggagaagaaagaagaaac

SEQ ID NO: 2230577 - RNA, 19 nt, Homo sapiens
  misc_RNA (1)...(19): siRNA sense strand
cugcagacuugaagaagca

SEQ ID NO: 2230578 - RNA, 19 nt, Homo sapiens
  misc_RNA (1)...(19): siRNA sense strand
cugaaugagguucuagaaa

SEQ ID NO: 2230579 - RNA, 19 nt, Homo sapiens
  misc_RNA (1)...(19): siRNA sense strand
cuagaagaaacuacagaau

SEQ ID NO: 2230580 - RNA, 19 nt, Homo sapiens
  misc_RNA (1)...(19): siRNA sense strand
agaauaugacgguggcuau

SEQ ID NO: 2230581 - RNA, 19 nt, Homo sapiens
  misc_RNA (1)...(19): siRNA sense strand
guagaaacagagaacaaau

SEQ ID NO: 2230582 - RNA, 19 nt, Homo sapiens
  misc_RNA (1)...(19): siRNA sense strand
acaaggaguugaugaggga

SEQ ID NO: 2230583 - RNA, 19 nt, Homo sapiens
  misc_RNA (1)...(19): siRNA sense strand
uguggaauuugaaggagaa

SEQ ID NO: 2230584 - RNA, 19 nt, Homo sapiens
  misc_RNA (1)...(19): siRNA sense strand
augaagggaauguggaaga

SEQ ID NO: 2230585 - RNA, 19 nt, Homo sapiens
  misc_RNA (1)...(19): siRNA sense strand
gugcugaggcauugguaca

SEQ ID NO: 2230586 - RNA, 19 nt, Homo sapiens
  misc_RNA (1)...(19): siRNA sense strand
agaugaagaugaaaaggaa

SEQ ID NO: 2230587 - RNA, 19 nt, Homo sapiens
  misc_RNA (1)...(19): siRNA sense strand
ucucaaugcacuuguauau

SEQ ID NO: 2230588 - RNA, 19 nt, Homo sapiens
  misc_RNA (1)...(19): siRNA sense strand
acaaugaagaagaugauga

SEQ ID NO: 2230589 - RNA, 19 nt, Homo sapiens
  misc_RNA (1)...(19): siRNA sense strand
caaaguagaaacagagaac

SEQ ID NO: 2230590 - RNA, 19 nt, Homo sapiens
  misc_RNA (1)...(19): siRNA sense strand
gagacaacaauuugcaaaa

SEQ ID NO: 2230591 - RNA, 19 nt, Homo sapiens
  misc_RNA (1)...(19): siRNA sense strand
acaggaagcuaauggggaa

SEQ ID NO: 2230592 - RNA, 19 nt, Homo sapiens
  misc_RNA (1)...(19): siRNA sense strand
gaauacucaagcaaagaaa

SEQ ID NO: 2230593 - RNA, 19 nt, Homo sapiens
  misc_RNA (1)...(19): siRNA sense strand
ggauaauaaugcagcagcu

SEQ ID NO: 2230594 - RNA, 19 nt, Homo sapiens
  misc_RNA (1)...(19): siRNA sense strand
gaggggaaguggacacaaa

SEQ ID NO: 2230595 - RNA, 19 nt, Homo sapiens
  misc_RNA (1)...(19): siRNA sense strand
cggcuagagaugaucgcua

SEQ ID NO: 2230596 - RNA, 19 nt, Homo sapiens
  misc_RNA (1)...(19): siRNA sense strand
auguggaauuugaaggaga

SEQ ID NO: 2230597 - RNA, 19 nt, Homo sapiens
  misc_RNA (1)...(19): siRNA sense strand
acaagaaaggcgcuagaau

SEQ ID NO: 2230598 - RNA, 19 nt, Homo sapiens
  misc_RNA (1)...(19): siRNA sense strand
gcuucgaagugcuugaaaa

SEQ ID NO: 2230599 - RNA, 19 nt, Homo sapiens
  misc_RNA (1)...(19): siRNA sense strand
gguucuagaaauggauaaa

SEQ ID NO: 2230600 - RNA, 19 nt, Homo sapiens
  misc_RNA (1)...(19): siRNA sense strand
aaugaaaacaggaaggaau

SEQ ID NO: 2230601 - RNA, 19 nt, Homo sapiens
  misc_RNA (1)...(19): siRNA sense strand
agagauuguugaaggccau

SEQ ID NO: 2230602 - RNA, 19 nt, Homo sapiens
  misc_RNA (1)...(19): siRNA sense strand
caaaagaugaagacaaaga

SEQ ID NO: 2230603 - RNA, 19 nt, Homo sapiens
  misc_RNA (1)...(19): siRNA sense strand
gagaacaaggaguugauga

SEQ ID NO: 2230604 - RNA, 19 nt, Homo sapiens
  misc_RNA (1)...(19): siRNA sense strand
gagagauuguugaaggcca

SEQ ID NO: 2230605 - RNA, 19 nt, Homo sapiens
  misc_RNA (1)...(19): siRNA sense strand
acuccugcucugagauaaa

SEQ ID NO: 2230606 - RNA, 19 nt, Homo sapiens
  misc_RNA (1)...(19): siRNA sense strand
ggucuaaauacaaugcaga

SEQ ID NO: 2230607 - RNA, 19 nt, Homo sapiens
  misc_RNA (1)...(19): siRNA sense strand
guucaaggcuuuucggaga

SEQ ID NO: 2230608 - RNA, 19 nt, Homo sapiens
  misc_RNA (1)...(19): siRNA sense strand
ggaaaugaagccugcacga

SEQ ID NO: 2230609 - RNA, 19 nt, Homo sapiens
  misc_RNA (1)...(19): siRNA sense strand
ugaaggagaacaaggaguu

SEQ ID NO: 2230610 - RNA, 19 nt, Homo sapiens
  misc_RNA (1)...(19): siRNA sense strand
ccaugguugucuacaggaa

SEQ ID NO: 2230611 - RNA, 19 nt, Homo sapiens
  misc_RNA (1)...(19): siRNA sense strand
ccggaauacucaagcaaag

SEQ ID NO: 2230612 - RNA, 19 nt, Homo sapiens
  misc_RNA (1)...(19): siRNA sense strand
acaccaaggaagaacugaa

SEQ ID NO: 2230613 - RNA, 19 nt, Homo sapiens
  misc_RNA (1)...(19): siRNA sense strand
cacaaaucacaaugaagaa

SEQ ID NO: 2230614 - RNA, 19 nt, Homo sapiens
  misc_RNA (1)...(19): siRNA sense strand
ucacaaugaagaagaugau

SEQ ID NO: 2230615 - RNA, 19 nt, Homo sapiens
  misc_RNA (1)...(19): siRNA sense strand
caaaguuagacgugaccau

SEQ ID NO: 2230616 - RNA, 19 nt, Homo sapiens
  misc_RNA (1)...(19): siRNA sense strand
gggucuggcuauuuacaau

SEQ ID NO: 2230617 - RNA, 19 nt, Homo sapiens
  misc_RNA (1)...(19): siRNA sense strand
ugugggaggacuaggaaaa

SEQ ID NO: 2230618 - RNA, 19 nt, Homo sapiens
  misc_RNA (1)...(19): siRNA sense strand
ccucgagcuuuauaagauu

SEQ ID NO: 2230619 - RNA, 19 nt, Homo sapiens
  misc_RNA (1)...(19): siRNA sense strand
ccaaggaagaacugaaauc

SEQ ID NO: 2230620 - RNA, 19 nt, Homo sapiens
  misc_RNA (1)...(19): siRNA sense strand
augaagacaaagaugaaga

SEQ ID NO: 2230621 - RNA, 19 nt, Homo sapiens
  misc_RNA (1)...(19): siRNA sense strand
uggaaugugacuugacgua

SEQ ID NO: 2230622 - RNA, 19 nt, Homo sapiens
  misc_RNA (1)...(19): siRNA sense strand
gggaaguggacacaaauca

SEQ ID NO: 2230623 - RNA, 19 nt, Homo sapiens
  misc_RNA (1)...(19): siRNA sense strand
aaaugaagccugcacgaau

SEQ ID NO: 2230624 - RNA, 19 nt, Homo sapiens
  misc_RNA (1)...(19): siRNA sense strand
ucacguaugccaaaggauu

SEQ ID NO: 2230625 - RNA, 19 nt, Homo sapiens
  misc_RNA (1)...(19): siRNA sense strand
caccaaggaagaacugaaa

SEQ ID NO: 2230626 - RNA, 19 nt, Homo sapiens
  misc_RNA (1)...(19): siRNA sense strand
aaguagaaacagagaacaa

SEQ ID NO: 2230627 - RNA, 19 nt, Homo sapiens
  misc_RNA (1)...(19): siRNA sense strand
aggcauugguacagagcuu

SEQ ID NO: 2230628 - RNA, 19 nt, Homo sapiens
  misc_RNA (1)...(19): siRNA sense strand
agcaaaagaugaagacaaa

SEQ ID NO: 2230629 - RNA, 19 nt, Homo sapiens
  misc_RNA (1)...(19): siRNA sense strand
cagucgaaaucuagugaau

SEQ ID NO: 2230630 - RNA, 19 nt, Homo sapiens
  misc_RNA (1)...(19): siRNA sense strand
agaugaagacaaagaugaa

SEQ ID NO: 2230631 - RNA, 19 nt, Homo sapiens
  misc_RNA (1)...(19): siRNA sense strand
auuagggaguucugggaaa

SEQ ID NO: 2230632 - RNA, 19 nt, Homo sapiens
  misc_RNA (1)...(19): siRNA sense strand
aagcaaaagaugaagacaa

SEQ ID NO: 2230633 - RNA, 19 nt, Homo sapiens
  misc_RNA (1)...(19): siRNA sense strand
caaugaagaagaugaugaa

SEQ ID NO: 2230634 - RNA, 19 nt, Homo sapiens
  misc_RNA (1)...(19): siRNA sense strand
gcucacagggagacaacaa

SEQ ID NO: 2230635 - RNA, 19 nt, Homo sapiens
  misc_RNA (1)...(19): siRNA sense strand
augaagaagaugaugaaga

SEQ ID NO: 2230636 - RNA, 19 nt, Homo sapiens
  misc_RNA (1)...(19): siRNA sense strand
gguacagagcuuccggaaa

SEQ ID NO: 2230637 - RNA, 19 nt, Homo sapiens
  misc_RNA (1)...(19): siRNA sense strand
auucagaccagaagaaauu

SEQ ID NO: 2230638 - RNA, 19 nt, Homo sapiens
  misc_RNA (1)...(19): siRNA sense strand
auguagagaaagagaggau

SEQ ID NO: 2230639 - RNA, 19 nt, Homo sapiens
  misc_RNA (1)...(19): siRNA sense strand
uuuccaagcacuagaagaa

SEQ ID NO: 2230640 - RNA, 19 nt, Homo sapiens
  misc_RNA (1)...(19): siRNA sense strand
guaugaagggaauguggaa

SEQ ID NO: 2230641 - RNA, 19 nt, Homo sapiens
  misc_RNA (1)...(19): siRNA sense strand
aagacaaagaugaagauga

SEQ ID NO: 2230642 - RNA, 19 nt, Homo sapiens
  misc_RNA (1)...(19): siRNA sense strand
gggagaagaaagaagaaac

SEQ ID NO: 2230643 - RNA, 19 nt, Homo sapiens
  misc_RNA (1)...(19): siRNA sense strand
cugcagacuugaagaagca

SEQ ID NO: 2230644 - RNA, 19 nt, Homo sapiens
  misc_RNA (1)...(19): siRNA sense strand
cugaaugagguucuagaaa

SEQ ID NO: 2230645 - RNA, 19 nt, Homo sapiens
  misc_RNA (1)...(19): siRNA sense strand
cuagaagaaacuacagaau

SEQ ID NO: 2230646 - RNA, 19 nt, Homo sapiens
  misc_RNA (1)...(19): siRNA sense strand
agaauaugacgguggcuau

SEQ ID NO: 2230647 - RNA, 19 nt, Homo sapiens
  misc_RNA (1)...(19): siRNA sense strand
guagaaacagagaacaaau

SEQ ID NO: 2230648 - RNA, 19 nt, Homo sapiens
  misc_RNA (1)...(19): siRNA sense strand
acaaggaguugaugaggga

SEQ ID NO: 2230649 - RNA, 19 nt, Homo sapiens
  misc_RNA (1)...(19): siRNA sense strand
uguggaauuugaaggagaa

SEQ ID NO: 2230650 - RNA, 19 nt, Homo sapiens
  misc_RNA (1)...(19): siRNA sense strand
augaagggaauguggaaga

SEQ ID NO: 2230651 - RNA, 19 nt, Homo sapiens
  misc_RNA (1)...(19): siRNA sense strand
gugcugaggcauugguaca

SEQ ID NO: 2230652 - RNA, 19 nt, Homo sapiens
  misc_RNA (1)...(19): siRNA sense strand
agaugaagaugaaaaggaa

SEQ ID NO: 2230653 - RNA, 19 nt, Homo sapiens
  misc_RNA (1)...(19): siRNA sense strand
ucucaaugcacuuguauau

SEQ ID NO: 2230654 - RNA, 19 nt, Homo sapiens
  misc_RNA (1)...(19): siRNA sense strand
acaaugaagaagaugauga

SEQ ID NO: 2230655 - RNA, 19 nt, Homo sapiens
  misc_RNA (1)...(19): siRNA sense strand
caaaguagaaacagagaac

SEQ ID NO: 2230656 - RNA, 19 nt, Homo sapiens
  misc_RNA (1)...(19): siRNA sense strand
gagacaacaauuugcaaaa

SEQ ID NO: 2230657 - RNA, 19 nt, Homo sapiens
  misc_RNA (1)...(19): siRNA sense strand
acaggaagcuaauggggaa

SEQ ID NO: 2230658 - RNA, 19 nt, Homo sapiens
  misc_RNA (1)...(19): siRNA sense strand
gaauacucaagcaaagaaa

SEQ ID NO: 2230659 - RNA, 19 nt, Homo sapiens
  misc_RNA (1)...(19): siRNA sense strand
ggauaauaaugcagcagcu

SEQ ID NO: 2230660 - RNA, 19 nt, Homo sapiens
  misc_RNA (1)...(19): siRNA sense strand
gaggggaaguggacacaaa

SEQ ID NO: 2230661 - RNA, 19 nt, Homo sapiens
  misc_RNA (1)...(19): siRNA sense strand
cggcuagagaugaucgcua

SEQ ID NO: 2230662 - RNA, 19 nt, Homo sapiens
  misc_RNA (1)...(19): siRNA sense strand
auguggaauuugaaggaga

SEQ ID NO: 2230663 - RNA, 19 nt, Homo sapiens
  misc_RNA (1)...(19): siRNA sense strand
acaagaaaggcgcuagaau

SEQ ID NO: 2230664 - RNA, 19 nt, Homo sapiens
  misc_RNA (1)...(19): siRNA sense strand
gcuucgaagugcuugaaaa

SEQ ID NO: 2230665 - RNA, 19 nt, Homo sapiens
  misc_RNA (1)...(19): siRNA sense strand
gguucuagaaauggauaaa

SEQ ID NO: 2230666 - RNA, 19 nt, Homo sapiens
  misc_RNA (1)...(19): siRNA sense strand
aaugaaaacaggaaggaau

SEQ ID NO: 2230667 - RNA, 19 nt, Homo sapiens
  misc_RNA (1)...(19): siRNA sense strand
agagauuguugaaggccau

SEQ ID NO: 2230668 - RNA, 19 nt, Homo sapiens
  misc_RNA (1)...(19): siRNA sense strand
caaaagaugaagacaaaga

SEQ ID NO: 2230669 - RNA, 19 nt, Homo sapiens
  misc_RNA (1)...(19): siRNA sense strand
gagaacaaggaguugauga

SEQ ID NO: 2230670 - RNA, 19 nt, Homo sapiens
  misc_RNA (1)...(19): siRNA sense strand
gagagauuguugaaggcca

SEQ ID NO: 2230671 - RNA, 19 nt, Homo sapiens
  misc_RNA (1)...(19): siRNA sense strand
acuccugcucugagauaaa

SEQ ID NO: 2230672 - RNA, 19 nt, Homo sapiens
  misc_RNA (1)...(19): siRNA sense strand
ggucuaaauacaaugcaga

SEQ ID NO: 2230673 - RNA, 19 nt, Homo sapiens
  misc_RNA (1)...(19): siRNA sense strand
guucaaggcuuuucggaga

SEQ ID NO: 2230674 - RNA, 19 nt, Homo sapiens
  misc_RNA (1)...(19): siRNA sense strand
ugaaggagaacaaggaguu

SEQ ID NO: 2230675 - RNA, 19 nt, Homo sapiens
  misc_RNA (1)...(19): siRNA sense strand
ggaaaugaagccugcacga

SEQ ID NO: 2230676 - RNA, 19 nt, Homo sapiens
  misc_RNA (1)...(19): siRNA sense strand
ccaugguugucuacaggaa

SEQ ID NO: 2230677 - RNA, 19 nt, Homo sapiens
  misc_RNA (1)...(19): siRNA sense strand
ccggaauacucaagcaaag

SEQ ID NO: 2230678 - RNA, 19 nt, Homo sapiens
  misc_RNA (1)...(19): siRNA sense strand
acaccaaggaagaacugaa

SEQ ID NO: 2230679 - RNA, 19 nt, Homo sapiens
  misc_RNA (1)...(19): siRNA sense strand
cacaaaucacaaugaagaa

SEQ ID NO: 2230680 - RNA, 19 nt, Homo sapiens
  misc_RNA (1)...(19): siRNA sense strand
ucacaaugaagaagaugau

SEQ ID NO: 2230681 - RNA, 19 nt, Homo sapiens
  misc_RNA (1)...(19): siRNA sense strand
caaaguuagacgugaccau

SEQ ID NO: 2230682 - RNA, 19 nt, Homo sapiens
  misc_RNA (1)...(19): siRNA sense strand
gggucuggcuauuuacaau

SEQ ID NO: 2230683 - RNA, 19 nt, Homo sapiens
  misc_RNA (1)...(19): siRNA sense strand
ugugggaggacuaggaaaa

SEQ ID NO: 2230684 - RNA, 19 nt, Homo sapiens
  misc_RNA (1)...(19): siRNA sense strand
ccucgagcuuuauaagauu

SEQ ID NO: 2230685 - RNA, 19 nt, Homo sapiens
  misc_RNA (1)...(19): siRNA sense strand
aaaugaagccugcacgaau

SEQ ID NO: 2230686 - RNA, 19 nt, Homo sapiens
  misc_RNA (1)...(19): siRNA sense strand
ccaaggaagaacugaaauc

SEQ ID NO: 2230687 - RNA, 19 nt, Homo sapiens
  misc_RNA (1)...(19): siRNA sense strand
augaagacaaagaugaaga

SEQ ID NO: 2230688 - RNA, 19 nt, Homo sapiens
  misc_RNA (1)...(19): siRNA sense strand
uggaaugugacuugacgua

SEQ ID NO: 2230689 - RNA, 19 nt, Homo sapiens
  misc_RNA (1)...(19): siRNA sense strand
gggaaguggacacaaauca

SEQ ID NO: 2230690 - RNA, 19 nt, Homo sapiens
  misc_RNA (1)...(19): siRNA sense strand
ucacguaugccaaaggauu

SEQ ID NO: 2230691 - RNA, 19 nt, Homo sapiens
  misc_RNA (1)...(19): siRNA sense strand
caccaaggaagaacugaaa

SEQ ID NO: 2230692 - RNA, 19 nt, Homo sapiens
  misc_RNA (1)...(19): siRNA sense strand
ggacaaagggauugccaug

SEQ ID NO: 2230693 - RNA, 19 nt, Homo sapiens
  misc_RNA (1)...(19): siRNA sense strand
ccuggauacagaaggagaa

SEQ ID NO: 2230694 - RNA, 19 nt, Homo sapiens
  misc_RNA (1)...(19): siRNA sense strand
gauccguauaucagggaau

SEQ ID NO: 2230695 - RNA, 19 nt, Homo sapiens
  misc_RNA (1)...(19): siRNA sense strand
ccaaaagcgcucaaggaca

SEQ ID NO: 2230696 - RNA, 19 nt, Homo sapiens
  misc_RNA (1)...(19): siRNA sense strand
cuggauacagaaggagaaa

SEQ ID NO: 2230697 - RNA, 19 nt, Homo sapiens
  misc_RNA (1)...(19): siRNA sense strand
ggauacagaaggagaaacc

SEQ ID NO: 2230698 - RNA, 19 nt, Homo sapiens
  misc_RNA (1)...(19): siRNA sense strand
acccaggaauccaagggaa

SEQ ID NO: 2230699 - RNA, 19 nt, Homo sapiens
  misc_RNA (1)...(19): siRNA sense strand
ggagaguacuucugggaga

SEQ ID NO: 2230700 - RNA, 19 nt, Homo sapiens
  misc_RNA (1)...(19): siRNA sense strand
ccucaaaggcgguggucau

SEQ ID NO: 2230701 - RNA, 19 nt, Homo sapiens
  misc_RNA (1)...(19): siRNA sense strand
aggugaauguugugggaga

SEQ ID NO: 2230702 - RNA, 19 nt, Homo sapiens
  misc_RNA (1)...(19): siRNA sense strand
gugaggagccugagugcaa

SEQ ID NO: 2230703 - RNA, 19 nt, Homo sapiens
  misc_RNA (1)...(19): siRNA sense strand
uggugaagcuccagcgaau

SEQ ID NO: 2230704 - RNA, 19 nt, Homo sapiens
  misc_RNA (1)...(19): siRNA sense strand
gggcagaauuucaagcuga

SEQ ID NO: 2230705 - RNA, 19 nt, Homo sapiens
  misc_RNA (1)...(19): siRNA sense strand
gguggagggaggagagauu

SEQ ID NO: 2230706 - RNA, 19 nt, Homo sapiens
  misc_RNA (1)...(19): siRNA sense strand
cugaagaagaagaagguca

SEQ ID NO: 2230707 - RNA, 19 nt, Homo sapiens
  misc_RNA (1)...(19): siRNA sense strand
cugaaguagagguggauau

SEQ ID NO: 2230708 - RNA, 19 nt, Homo sapiens
  misc_RNA (1)...(19): siRNA sense strand
aggaagacccuguggacuu

SEQ ID NO: 2230709 - RNA, 19 nt, Homo sapiens
  misc_RNA (1)...(19): siRNA sense strand
gcaaggaguucauggagga

SEQ ID NO: 2230710 - RNA, 19 nt, Homo sapiens
  misc_RNA (1)...(19): siRNA sense strand
gaguauaggcagugugugu

SEQ ID NO: 2230711 - RNA, 19 nt, Homo sapiens
  misc_RNA (1)...(19): siRNA sense strand
gagugaaggaggaggucuu

SEQ ID NO: 2230712 - RNA, 19 nt, Homo sapiens
  misc_RNA (1)...(19): siRNA sense strand
cugcaaggucaaugagaga

SEQ ID NO: 2230713 - RNA, 19 nt, Homo sapiens
  misc_RNA (1)...(19): siRNA sense strand
cgaaacagccaguggaucu

SEQ ID NO: 2230714 - RNA, 19 nt, Homo sapiens
  misc_RNA (1)...(19): siRNA sense strand
agaccuugcugaagaguca

SEQ ID NO: 2230715 - RNA, 19 nt, Homo sapiens
  misc_RNA (1)...(19): siRNA sense strand
uguacagcuuugcgggaua

SEQ ID NO: 2230716 - RNA, 19 nt, Homo sapiens
  misc_RNA (1)...(19): siRNA sense strand
gggaaaugcagaagggccu

SEQ ID NO: 2230717 - RNA, 19 nt, Homo sapiens
  misc_RNA (1)...(19): siRNA sense strand
cugaagagucaucggguca

SEQ ID NO: 2230718 - RNA, 19 nt, Homo sapiens
  misc_RNA (1)...(19): siRNA sense strand
ggguggaggacuucgggaa

SEQ ID NO: 2230719 - RNA, 19 nt, Homo sapiens
  misc_RNA (1)...(19): siRNA sense strand
gcauggaugaggaugggaa

SEQ ID NO: 2230720 - RNA, 19 nt, Homo sapiens
  misc_RNA (1)...(19): siRNA sense strand
agucugaaguagaggugga

SEQ ID NO: 2230721 - RNA, 19 nt, Homo sapiens
  misc_RNA (1)...(19): siRNA sense strand
cuggagaaacagugaagau

SEQ ID NO: 2230722 - RNA, 19 nt, Homo sapiens
  misc_RNA (1)...(19): siRNA sense strand
cuacauggucaccggaaau

SEQ ID NO: 2230723 - RNA, 19 nt, Homo sapiens
  misc_RNA (1)...(19): siRNA sense strand
gugggaacauggaagucaa

SEQ ID NO: 2230724 - RNA, 19 nt, Homo sapiens
  misc_RNA (1)...(19): siRNA sense strand
aagcuggagugcaggaaga

SEQ ID NO: 2230725 - RNA, 19 nt, Homo sapiens
  misc_RNA (1)...(19): siRNA sense strand
gguauggaguauaggcagu

SEQ ID NO: 2230726 - RNA, 19 nt, Homo sapiens
  misc_RNA (1)...(19): siRNA sense strand
ugaagaagaagaaggucau

SEQ ID NO: 2230727 - RNA, 19 nt, Homo sapiens
  misc_RNA (1)...(19): siRNA sense strand
ugcaggagcuggagaggau

SEQ ID NO: 2230728 - RNA, 19 nt, Homo sapiens
  misc_RNA (1)...(19): siRNA sense strand
cggaaggucaacugcacaa

SEQ ID NO: 2230729 - RNA, 19 nt, Homo sapiens
  misc_RNA (1)...(19): siRNA sense strand
cgauacuugacuucagaaa

SEQ ID NO: 2230730 - RNA, 19 nt, Homo sapiens
  misc_RNA (1)...(19): siRNA sense strand
ccgucgagcugcacaguga

SEQ ID NO: 2230731 - RNA, 19 nt, Homo sapiens
  misc_RNA (1)...(19): siRNA sense strand
aggaaggaggagugcaaaa

SEQ ID NO: 2230732 - RNA, 19 nt, Homo sapiens
  misc_RNA (1)...(19): siRNA sense strand
gcuguaagucugaaguaga

SEQ ID NO: 2230733 - RNA, 19 nt, Homo sapiens
  misc_RNA (1)...(19): siRNA sense strand
acguucuggugcaggauua

SEQ ID NO: 2230734 - RNA, 19 nt, Homo sapiens
  misc_RNA (1)...(19): siRNA sense strand
acauggaggugacggugaa

SEQ ID NO: 2230735 - RNA, 19 nt, Homo sapiens
  misc_RNA (1)...(19): siRNA sense strand
aggaggaggucuuuauaca

SEQ ID NO: 2230736 - RNA, 19 nt, Homo sapiens
  misc_RNA (1)...(19): siRNA sense strand
agaaaauaacacaggugaa

SEQ ID NO: 2230737 - RNA, 19 nt, Homo sapiens
  misc_RNA (1)...(19): siRNA sense strand
ucuacauggucaccggaaa

SEQ ID NO: 2230738 - RNA, 19 nt, Homo sapiens
  misc_RNA (1)...(19): siRNA sense strand
ccaucuacccugugggcca

SEQ ID NO: 2230739 - RNA, 19 nt, Homo sapiens
  misc_RNA (1)...(19): siRNA sense strand
caaugagagaggagaguac

SEQ ID NO: 2230740 - RNA, 19 nt, Homo sapiens
  misc_RNA (1)...(19): siRNA sense strand
acauggugaccguggagua

SEQ ID NO: 2230741 - RNA, 19 nt, Homo sapiens
  misc_RNA (1)...(19): siRNA sense strand
ccauggucaccuugggcaa

SEQ ID NO: 2230742 - RNA, 19 nt, Homo sapiens
  misc_RNA (1)...(19): siRNA sense strand
cuacaaccacugugagcau

SEQ ID NO: 2230743 - RNA, 19 nt, Homo sapiens
  misc_RNA (1)...(19): siRNA sense strand
cggugaggccuauggcuuu

SEQ ID NO: 2230744 - RNA, 19 nt, Homo sapiens
  misc_RNA (1)...(19): siRNA sense strand
acuacaagcuguccgguga

SEQ ID NO: 2230745 - RNA, 19 nt, Homo sapiens
  misc_RNA (1)...(19): siRNA sense strand
acaccugauuucugugcua

SEQ ID NO: 2230746 - RNA, 19 nt, Homo sapiens
  misc_RNA (1)...(19): siRNA sense strand
ccgggaagacugugaugau

SEQ ID NO: 2230747 - RNA, 19 nt, Homo sapiens
  misc_RNA (1)...(19): siRNA sense strand
gauucaagcuggagugcag

SEQ ID NO: 2230748 - RNA, 19 nt, Homo sapiens
  misc_RNA (1)...(19): siRNA sense strand
aggagggaauggugcugua

SEQ ID NO: 2230749 - RNA, 19 nt, Homo sapiens
  misc_RNA (1)...(19): siRNA sense strand
ucauggaggaggugauuca

SEQ ID NO: 2230750 - RNA, 19 nt, Homo sapiens
  misc_RNA (1)...(19): siRNA sense strand
gcccgaaaggccaggugua

SEQ ID NO: 2230751 - RNA, 19 nt, Homo sapiens
  misc_RNA (1)...(19): siRNA sense strand
ccaaaacgugccagaacua

SEQ ID NO: 2230752 - RNA, 19 nt, Homo sapiens
  misc_RNA (1)...(19): siRNA sense strand
gcaacaagcugguggaccc

SEQ ID NO: 2230753 - RNA, 19 nt, Homo sapiens
  misc_RNA (1)...(19): siRNA sense strand
agagcugcgaggagaggaa

SEQ ID NO: 2230754 - RNA, 19 nt, Homo sapiens
  misc_RNA (1)...(19): siRNA sense strand
uugaagugcugaaggccuu

SEQ ID NO: 2230755 - RNA, 19 nt, Homo sapiens
  misc_RNA (1)...(19): siRNA sense strand
gaaaauaacacaggugaau

SEQ ID NO: 2230756 - RNA, 19 nt, Homo sapiens
  misc_RNA (1)...(19): siRNA sense strand
ccuuugaugggcagaauuu

SEQ ID NO: 2230757 - RNA, 19 nt, Homo sapiens
  misc_RNA (1)...(19): siRNA sense strand
ugaugagaacggagccaau

SEQ ID NO: 2230758 - RNA, 19 nt, Homo sapiens
  misc_RNA (1)...(19): siRNA sense strand
gagccugagugcaacgaca

SEQ ID NO: 2230759 - RNA, 19 nt, Homo sapiens
  misc_RNA (1)...(19): siRNA sense strand
gggacuuccagaauggcaa

SEQ ID NO: 2230760 - RNA, 19 nt, Homo sapiens
  misc_RNA (1)...(19): siRNA sense strand
cagacagauacuucaacaa

SEQ ID NO: 2230761 - RNA, 19 nt, Homo sapiens
  misc_RNA (1)...(19): siRNA sense strand
aagcagacauaccaggaga

SEQ ID NO: 2230762 - RNA, 19 nt, Homo sapiens
  misc_RNA (1)...(19): siRNA sense strand
gagaaagcccauuugcuga

SEQ ID NO: 2230763 - RNA, 19 nt, Homo sapiens
  misc_RNA (1)...(19): siRNA sense strand
ggugaauguugugggagau

SEQ ID NO: 2230764 - RNA, 19 nt, Homo sapiens
  misc_RNA (1)...(19): siRNA sense strand
gaucugcagcaaugaagaa

SEQ ID NO: 2230765 - RNA, 19 nt, Homo sapiens
  misc_RNA (1)...(19): siRNA sense strand
gugaagauuggcugcaaca

SEQ ID NO: 2230766 - RNA, 19 nt, Homo sapiens
  misc_RNA (1)...(19): siRNA sense strand
aggccuuugugguggacau

SEQ ID NO: 2230767 - RNA, 19 nt, Homo sapiens
  misc_RNA (1)...(19): siRNA sense strand
aguaugaguguguguguga

SEQ ID NO: 2230768 - RNA, 19 nt, Homo sapiens
  misc_RNA (1)...(19): siRNA sense strand
gaggcaaaguggagacaga

SEQ ID NO: 2230769 - RNA, 19 nt, Homo sapiens
  misc_RNA (1)...(19): siRNA sense strand
ggaagaagaagaucagcaa

SEQ ID NO: 2230770 - RNA, 19 nt, Homo sapiens
  misc_RNA (1)...(19): siRNA sense strand
cgaugaagaugaagaugau

SEQ ID NO: 2230771 - RNA, 19 nt, Homo sapiens
  misc_RNA (1)...(19): siRNA sense strand
gaucaaauccggcagggaa

SEQ ID NO: 2230772 - RNA, 19 nt, Homo sapiens
  misc_RNA (1)...(19): siRNA sense strand
gugcaggagaagauacaaa

SEQ ID NO: 2230773 - RNA, 19 nt, Homo sapiens
  misc_RNA (1)...(19): siRNA sense strand
gcgaugaagaugaagauga

SEQ ID NO: 2230774 - RNA, 19 nt, Homo sapiens
  misc_RNA (1)...(19): siRNA sense strand
cagaagagaagcagagcca

SEQ ID NO: 2230775 - RNA, 19 nt, Homo sapiens
  misc_RNA (1)...(19): siRNA sense strand
gccgagaccucuaaacuua

SEQ ID NO: 2230776 - RNA, 19 nt, Homo sapiens
  misc_RNA (1)...(19): siRNA sense strand
aaaaggaaucagaggcaaa

SEQ ID NO: 2230777 - RNA, 19 nt, Homo sapiens
  misc_RNA (1)...(19): siRNA sense strand
gcucagggaagaagaagau

SEQ ID NO: 2230778 - RNA, 19 nt, Homo sapiens
  misc_RNA (1)...(19): siRNA sense strand
gggaagaagaagaucagca

SEQ ID NO: 2230779 - RNA, 19 nt, Homo sapiens
  misc_RNA (1)...(19): siRNA sense strand
uagcccagcugauaagaaa

SEQ ID NO: 2230780 - RNA, 19 nt, Homo sapiens
  misc_RNA (1)...(19): siRNA sense strand
agaauggauuugacgugaa

SEQ ID NO: 2230781 - RNA, 19 nt, Homo sapiens
  misc_RNA (1)...(19): siRNA sense strand
gaagagaagcagagccauc

SEQ ID NO: 2230782 - RNA, 19 nt, Homo sapiens
  misc_RNA (1)...(19): siRNA sense strand
gaagaagaagaucagcaaa

SEQ ID NO: 2230783 - RNA, 19 nt, Homo sapiens
  misc_RNA (1)...(19): siRNA sense strand
gauaagaaacgcucaggga

SEQ ID NO: 2230784 - RNA, 19 nt, Homo sapiens
  misc_RNA (1)...(19): siRNA sense strand
ugagaugcuuggacgaaaa

SEQ ID NO: 2230785 - RNA, 19 nt, Homo sapiens
  misc_RNA (1)...(19): siRNA sense strand
cugcaguuguucagcugua

SEQ ID NO: 2230786 - RNA, 19 nt, Homo sapiens
  misc_RNA (1)...(19): siRNA sense strand
cagccaaugaagagagaag

SEQ ID NO: 2230787 - RNA, 19 nt, Homo sapiens
  misc_RNA (1)...(19): siRNA sense strand
agagagaagaggagggcuc

SEQ ID NO: 2230788 - RNA, 19 nt, Homo sapiens
  misc_RNA (1)...(19): siRNA sense strand
ugaacaaccucgacccaga

SEQ ID NO: 2230789 - RNA, 19 nt, Homo sapiens
  misc_RNA (1)...(19): siRNA sense strand
augaagaugaagaugauga

SEQ ID NO: 2230790 - RNA, 19 nt, Homo sapiens
  misc_RNA (1)...(19): siRNA sense strand
auggauuugacgugaacaa

SEQ ID NO: 2230791 - RNA, 19 nt, Homo sapiens
  misc_RNA (1)...(19): siRNA sense strand
ggaccuagcccagcugaua

SEQ ID NO: 2230792 - RNA, 19 nt, Homo sapiens
  misc_RNA (1)...(19): siRNA sense strand
caaugaagagagaagagga

SEQ ID NO: 2230793 - RNA, 19 nt, Homo sapiens
  misc_RNA (1)...(19): siRNA sense strand
uaagaaacgcucagggaag

SEQ ID NO: 2230794 - RNA, 19 nt, Homo sapiens
  misc_RNA (1)...(19): siRNA sense strand
aagaagaagaucagcaaag

SEQ ID NO: 2230795 - RNA, 19 nt, Homo sapiens
  misc_RNA (1)...(19): siRNA sense strand
gauucaagcaugucagcca

SEQ ID NO: 2230796 - RNA, 19 nt, Homo sapiens
  misc_RNA (1)...(19): siRNA sense strand
ugaagaugaugaaugggau

SEQ ID NO: 2230797 - RNA, 19 nt, Homo sapiens
  misc_RNA (1)...(19): siRNA sense strand
ccucuaaacuuaucuacga

SEQ ID NO: 2230798 - RNA, 19 nt, Homo sapiens
  misc_RNA (1)...(19): siRNA sense strand
auaagaaacgcucagggaa

SEQ ID NO: 2230799 - RNA, 19 nt, Homo sapiens
  misc_RNA (1)...(19): siRNA sense strand
aagaaacgcucagggaaga

SEQ ID NO: 2230800 - RNA, 19 nt, Homo sapiens
  misc_RNA (1)...(19): siRNA sense strand
caccagcgguucagcagaa

SEQ ID NO: 2230801 - RNA, 19 nt, Homo sapiens
  misc_RNA (1)...(19): siRNA sense strand
gagcugagcacuggaccaa

SEQ ID NO: 2230802 - RNA, 19 nt, Homo sapiens
  misc_RNA (1)...(19): siRNA sense strand
cuaaagaagaagaagaaga

SEQ ID NO: 2230803 - RNA, 19 nt, Homo sapiens
  misc_RNA (1)...(19): siRNA sense strand
acaagauacugguggauau

SEQ ID NO: 2230804 - RNA, 19 nt, Homo sapiens
  misc_RNA (1)...(19): siRNA sense strand
gggcaugauuuuagggauu

SEQ ID NO: 2230805 - RNA, 19 nt, Homo sapiens
  misc_RNA (1)...(19): siRNA sense strand
gcaccuucuuacugagaua

SEQ ID NO: 2230806 - RNA, 19 nt, Homo sapiens
  misc_RNA (1)...(19): siRNA sense strand
acaacaaguuacaggugaa

SEQ ID NO: 2230807 - RNA, 19 nt, Homo sapiens
  misc_RNA (1)...(19): siRNA sense strand
cuucaucugcagagagaaa

SEQ ID NO: 2230808 - RNA, 19 nt, Homo sapiens
  misc_RNA (1)...(19): siRNA sense strand
ccuauguaauugagaguga

SEQ ID NO: 2230809 - RNA, 19 nt, Homo sapiens
  misc_RNA (1)...(19): siRNA sense strand
ccuauguaauugagaguga

SEQ ID NO: 2230810 - RNA, 19 nt, Homo sapiens
  misc_RNA (1)...(19): siRNA sense strand
guguaggaauugaaggaga

SEQ ID NO: 2230811 - RNA, 19 nt, Homo sapiens
  misc_RNA (1)...(19): siRNA sense strand
cuacuaaagaagaagaaga

SEQ ID NO: 2230812 - RNA, 19 nt, Homo sapiens
  misc_RNA (1)...(19): siRNA sense strand
aagaagaagaagaagauga

SEQ ID NO: 2230813 - RNA, 19 nt, Homo sapiens
  misc_RNA (1)...(19): siRNA sense strand
gugcuguagaagaaagaaa

SEQ ID NO: 2230814 - RNA, 19 nt, Homo sapiens
  misc_RNA (1)...(19): siRNA sense strand
gaauaaaagaugugcugua

SEQ ID NO: 2230815 - RNA, 19 nt, Homo sapiens
  misc_RNA (1)...(19): siRNA sense strand
agaagaagaagaugaugaa

SEQ ID NO: 2230816 - RNA, 19 nt, Homo sapiens
  misc_RNA (1)...(19): siRNA sense strand
auuugaagauggaguagaa

SEQ ID NO: 2230817 - RNA, 19 nt, Homo sapiens
  misc_RNA (1)...(19): siRNA sense strand
uguuugaugucguuagaua

SEQ ID NO: 2230818 - RNA, 19 nt, Homo sapiens
  misc_RNA (1)...(19): siRNA sense strand
ggaucagcacagucagaaa

SEQ ID NO: 2230819 - RNA, 19 nt, Homo sapiens
  misc_RNA (1)...(19): siRNA sense strand
ccucaugcuuucaguaaau

SEQ ID NO: 2230820 - RNA, 19 nt, Homo sapiens
  misc_RNA (1)...(19): siRNA sense strand
agaagauguacuuggaaau

SEQ ID NO: 2230821 - RNA, 19 nt, Homo sapiens
  misc_RNA (1)...(19): siRNA sense strand
ugaauuaaguacagagaag

SEQ ID NO: 2230822 - RNA, 19 nt, Homo sapiens
  misc_RNA (1)...(19): siRNA sense strand
agcuaaacaugauggagaa

SEQ ID NO: 2230823 - RNA, 19 nt, Homo sapiens
  misc_RNA (1)...(19): siRNA sense strand
ccucaauaguggcacggua

SEQ ID NO: 2230824 - RNA, 19 nt, Homo sapiens
  misc_RNA (1)...(19): siRNA sense strand
gagaguugguggaaggcuu

SEQ ID NO: 2230825 - RNA, 19 nt, Homo sapiens
  misc_RNA (1)...(19): siRNA sense strand
uagaaauggagaugcuuaa

SEQ ID NO: 2230826 - RNA, 19 nt, Homo sapiens
  misc_RNA (1)...(19): siRNA sense strand
uagaaauggagaugcuuaa

SEQ ID NO: 2230827 - RNA, 19 nt, Homo sapiens
  misc_RNA (1)...(19): siRNA sense strand
cagaauacuguucagguaa

SEQ ID NO: 2230828 - RNA, 19 nt, Homo sapiens
  misc_RNA (1)...(19): siRNA sense strand
guacaaaaccucaagaaga

SEQ ID NO: 2230829 - RNA, 19 nt, Homo sapiens
  misc_RNA (1)...(19): siRNA sense strand
gcaaggaagaaguaggcau

SEQ ID NO: 2230830 - RNA, 19 nt, Homo sapiens
  misc_RNA (1)...(19): siRNA sense strand
aagauggaguagaagacaa

SEQ ID NO: 2230831 - RNA, 19 nt, Homo sapiens
  misc_RNA (1)...(19): siRNA sense strand
gcacaaggaaagacauuca

SEQ ID NO: 2230832 - RNA, 19 nt, Homo sapiens
  misc_RNA (1)...(19): siRNA sense strand
gaucaauaucgcaggcaca

SEQ ID NO: 2230833 - RNA, 19 nt, Homo sapiens
  misc_RNA (1)...(19): siRNA sense strand
uaaacaugauggagaagau

SEQ ID NO: 2230834 - RNA, 19 nt, Homo sapiens
  misc_RNA (1)...(19): siRNA sense strand
auuuagaaguuaggcgaaa

SEQ ID NO: 2230835 - RNA, 19 nt, Homo sapiens
  misc_RNA (1)...(19): siRNA sense strand
ccagagguucagaagauua

SEQ ID NO: 2230836 - RNA, 19 nt, Homo sapiens
  misc_RNA (1)...(19): siRNA sense strand
agacauuguacguugcuua

SEQ ID NO: 2230837 - RNA, 19 nt, Homo sapiens
  misc_RNA (1)...(19): siRNA sense strand
cuccagagguucagaagau

SEQ ID NO: 2230838 - RNA, 19 nt, Homo sapiens
  misc_RNA (1)...(19): siRNA sense strand
cacaagagcaggagacuca

SEQ ID NO: 2230839 - RNA, 19 nt, Homo sapiens
  misc_RNA (1)...(19): siRNA sense strand
gcaaauugguagaagcuag

SEQ ID NO: 2230840 - RNA, 19 nt, Homo sapiens
  misc_RNA (1)...(19): siRNA sense strand
ccacauggcaauugagauc

SEQ ID NO: 2230841 - RNA, 19 nt, Homo sapiens
  misc_RNA (1)...(19): siRNA sense strand
acgaaaagaagauggauuu

SEQ ID NO: 2230842 - RNA, 19 nt, Homo sapiens
  misc_RNA (1)...(19): siRNA sense strand
ugucauggcaacuggauau

SEQ ID NO: 2230843 - RNA, 19 nt, Homo sapiens
  misc_RNA (1)...(19): siRNA sense strand
uguaggaauugaaggagau

SEQ ID NO: 2230844 - RNA, 19 nt, Homo sapiens
  misc_RNA (1)...(19): siRNA sense strand
caaacaagauacuggugga

SEQ ID NO: 2230845 - RNA, 19 nt, Homo sapiens
  misc_RNA (1)...(19): siRNA sense strand
ggaagugauaccagcaaga

SEQ ID NO: 2230846 - RNA, 19 nt, Homo sapiens
  misc_RNA (1)...(19): siRNA sense strand
uagcuaaacaugauggaga

SEQ ID NO: 2230847 - RNA, 19 nt, Homo sapiens
  misc_RNA (1)...(19): siRNA sense strand
agaagaagaagaagaugau

SEQ ID NO: 2230848 - RNA, 19 nt, Homo sapiens
  misc_RNA (1)...(19): siRNA sense strand
ggaaauguccugaauggau

SEQ ID NO: 2230849 - RNA, 19 nt, Homo sapiens
  misc_RNA (1)...(19): siRNA sense strand
caucaaacauuucugccaa

SEQ ID NO: 2230850 - RNA, 19 nt, Homo sapiens
  misc_RNA (1)...(19): siRNA sense strand
uguagcaauuggaguaaau

SEQ ID NO: 2230851 - RNA, 19 nt, Homo sapiens
  misc_RNA (1)...(19): siRNA sense strand
cuggauauggaaagaguuu

SEQ ID NO: 2230852 - RNA, 19 nt, Homo sapiens
  misc_RNA (1)...(19): siRNA sense strand
ugguguuucugaaggcaaa

SEQ ID NO: 2230853 - RNA, 19 nt, Homo sapiens
  misc_RNA (1)...(19): siRNA sense strand
uguaauugagagugaugaa

SEQ ID NO: 2230854 - RNA, 19 nt, Homo sapiens
  misc_RNA (1)...(19): siRNA sense strand
uguaauugagagugaugaa

SEQ ID NO: 2230855 - RNA, 19 nt, Homo sapiens
  misc_RNA (1)...(19): siRNA sense strand
accaagugcuacagcuuaa

SEQ ID NO: 2230856 - RNA, 19 nt, Homo sapiens
  misc_RNA (1)...(19): siRNA sense strand
aggaagaaguaggcaucaa

SEQ ID NO: 2230857 - RNA, 19 nt, Homo sapiens
  misc_RNA (1)...(19): siRNA sense strand
agcaagaaauuaauggaca

SEQ ID NO: 2230858 - RNA, 19 nt, Homo sapiens
  misc_RNA (1)...(19): siRNA sense strand
gggaauuaugggaacugaa

SEQ ID NO: 2230859 - RNA, 19 nt, Homo sapiens
  misc_RNA (1)...(19): siRNA sense strand
aaugaagaauuguguccaa

SEQ ID NO: 2230860 - RNA, 19 nt, Homo sapiens
  misc_RNA (1)...(19): siRNA sense strand
ccauuauacaauagaggga

SEQ ID NO: 2230861 - RNA, 19 nt, Homo sapiens
  misc_RNA (1)...(19): siRNA sense strand
agaagauggauuugaagau

SEQ ID NO: 2230862 - RNA, 19 nt, Homo sapiens
  misc_RNA (1)...(19): siRNA sense strand
gcacaggguacgagagcga

SEQ ID NO: 2230863 - RNA, 19 nt, Homo sapiens
  misc_RNA (1)...(19): siRNA sense strand
acaggguacgagagcgaua

SEQ ID NO: 2230864 - RNA, 19 nt, Homo sapiens
  misc_RNA (1)...(19): siRNA sense strand
cuucagaggcauucaggau

SEQ ID NO: 2230865 - RNA, 19 nt, Homo sapiens
  misc_RNA (1)...(19): siRNA sense strand
aucugagaccagugagaaa

SEQ ID NO: 2230866 - RNA, 19 nt, Homo sapiens
  misc_RNA (1)...(19): siRNA sense strand
gcaucugagaccagugaga

SEQ ID NO: 2230867 - RNA, 19 nt, Homo sapiens
  misc_RNA (1)...(19): siRNA sense strand
caaaagacaccaaaggaga

SEQ ID NO: 2230868 - RNA, 19 nt, Homo sapiens
  misc_RNA (1)...(19): siRNA sense strand
uggccaaguugucagaaaa

SEQ ID NO: 2230869 - RNA, 19 nt, Homo sapiens
  misc_RNA (1)...(19): siRNA sense strand
acaccaaaggagacauaca

SEQ ID NO: 2230870 - RNA, 19 nt, Homo sapiens
  misc_RNA (1)...(19): siRNA sense strand
caucagagaaacaugacca

SEQ ID NO: 2230871 - RNA, 19 nt, Homo sapiens
  misc_RNA (1)...(19): siRNA sense strand
cagaugaauuaguccgcca

SEQ ID NO: 2230872 - RNA, 19 nt, Homo sapiens
  misc_RNA (1)...(19): siRNA sense strand
gcacaggguacgagagcga

SEQ ID NO: 2230873 - RNA, 19 nt, Homo sapiens
  misc_RNA (1)...(19): siRNA sense strand
acaggguacgagagcgaua

SEQ ID NO: 2230874 - RNA, 19 nt, Homo sapiens
  misc_RNA (1)...(19): siRNA sense strand
cuucagaggcauucaggau

SEQ ID NO: 2230875 - RNA, 19 nt, Homo sapiens
  misc_RNA (1)...(19): siRNA sense strand
aucugagaccagugagaaa

SEQ ID NO: 2230876 - RNA, 19 nt, Homo sapiens
  misc_RNA (1)...(19): siRNA sense strand
gcaucugagaccagugaga

SEQ ID NO: 2230877 - RNA, 19 nt, Homo sapiens
  misc_RNA (1)...(19): siRNA sense strand
caaaagacaccaaaggaga

SEQ ID NO: 2230878 - RNA, 19 nt, Homo sapiens
  misc_RNA (1)...(19): siRNA sense strand
uggccaaguugucagaaaa

SEQ ID NO: 2230879 - RNA, 19 nt, Homo sapiens
  misc_RNA (1)...(19): siRNA sense strand
acaccaaaggagacauaca

SEQ ID NO: 2230880 - RNA, 19 nt, Homo sapiens
  misc_RNA (1)...(19): siRNA sense strand
caucagagaaacaugacca

SEQ ID NO: 2230881 - RNA, 19 nt, Homo sapiens
  misc_RNA (1)...(19): siRNA sense strand
cagaugaauuaguccgcca

SEQ ID NO: 2230882 - RNA, 19 nt, Homo sapiens
  misc_RNA (1)...(19): siRNA sense strand
gcacaggguacgagagcga

SEQ ID NO: 2230883 - RNA, 19 nt, Homo sapiens
  misc_RNA (1)...(19): siRNA sense strand
acaggguacgagagcgaua

SEQ ID NO: 2230884 - RNA, 19 nt, Homo sapiens
  misc_RNA (1)...(19): siRNA sense strand
cuucagaggcauucaggau

SEQ ID NO: 2230885 - RNA, 19 nt, Homo sapiens
  misc_RNA (1)...(19): siRNA sense strand
aucugagaccagugagaaa

SEQ ID NO: 2230886 - RNA, 19 nt, Homo sapiens
  misc_RNA (1)...(19): siRNA sense strand
gcaucugagaccagugaga

SEQ ID NO: 2230887 - RNA, 19 nt, Homo sapiens
  misc_RNA (1)...(19): siRNA sense strand
caaaagacaccaaaggaga

SEQ ID NO: 2230888 - RNA, 19 nt, Homo sapiens
  misc_RNA (1)...(19): siRNA sense strand
uggccaaguugucagaaaa

SEQ ID NO: 2230889 - RNA, 19 nt, Homo sapiens
  misc_RNA (1)...(19): siRNA sense strand
acaccaaaggagacauaca

SEQ ID NO: 2230890 - RNA, 19 nt, Homo sapiens
  misc_RNA (1)...(19): siRNA sense strand
caucagagaaacaugacca

SEQ ID NO: 2230891 - RNA, 19 nt, Homo sapiens
  misc_RNA (1)...(19): siRNA sense strand
cagaugaauuaguccgcca

SEQ ID NO: 2230892 - RNA, 19 nt, Homo sapiens
  misc_RNA (1)...(19): siRNA sense strand
gcacaggguacgagagcga

SEQ ID NO: 2230893 - RNA, 19 nt, Homo sapiens
  misc_RNA (1)...(19): siRNA sense strand
acaggguacgagagcgaua

SEQ ID NO: 2230894 - RNA, 19 nt, Homo sapiens
  misc_RNA (1)...(19): siRNA sense strand
cuucagaggcauucaggau

SEQ ID NO: 2230895 - RNA, 19 nt, Homo sapiens
  misc_RNA (1)...(19): siRNA sense strand
aucugagaccagugagaaa

SEQ ID NO: 2230896 - RNA, 19 nt, Homo sapiens
  misc_RNA (1)...(19): siRNA sense strand
gcaucugagaccagugaga

SEQ ID NO: 2230897 - RNA, 19 nt, Homo sapiens
  misc_RNA (1)...(19): siRNA sense strand
caaaagacaccaaaggaga

SEQ ID NO: 2230898 - RNA, 19 nt, Homo sapiens
  misc_RNA (1)...(19): siRNA sense strand
uggccaaguugucagaaaa

SEQ ID NO: 2230899 - RNA, 19 nt, Homo sapiens
  misc_RNA (1)...(19): siRNA sense strand
acaccaaaggagacauaca

SEQ ID NO: 2230900 - RNA, 19 nt, Homo sapiens
  misc_RNA (1)...(19): siRNA sense strand
caucagagaaacaugacca

SEQ ID NO: 2230901 - RNA, 19 nt, Homo sapiens
  misc_RNA (1)...(19): siRNA sense strand
cagaugaauuaguccgcca

SEQ ID NO: 2230902 - RNA, 19 nt, Homo sapiens
  misc_RNA (1)...(19): siRNA sense strand
gcugauaacugguggcaga

SEQ ID NO: 2230903 - RNA, 19 nt, Homo sapiens
  misc_RNA (1)...(19): siRNA sense strand
aaggagaauuguuggaaaa

SEQ ID NO: 2230904 - RNA, 19 nt, Homo sapiens
  misc_RNA (1)...(19): siRNA sense strand
gguaauaacgugaaggaac

SEQ ID NO: 2230905 - RNA, 19 nt, Homo sapiens
  misc_RNA (1)...(19): siRNA sense strand
ccacagagguacaggagcu

SEQ ID NO: 2230906 - RNA, 19 nt, Homo sapiens
  misc_RNA (1)...(19): siRNA sense strand
ccaugaagacccagagcuu

SEQ ID NO: 2230907 - RNA, 19 nt, Homo sapiens
  misc_RNA (1)...(19): siRNA sense strand
cagaaaggugguggagaaa

SEQ ID NO: 2230908 - RNA, 19 nt, Homo sapiens
  misc_RNA (1)...(19): siRNA sense strand
gcaccauguugcagugaca

SEQ ID NO: 2230909 - RNA, 19 nt, Homo sapiens
  misc_RNA (1)...(19): siRNA sense strand
caucgaaggcuguuggaga

SEQ ID NO: 2230910 - RNA, 19 nt, Homo sapiens
  misc_RNA (1)...(19): siRNA sense strand
gccaagagaaccuggaaga

SEQ ID NO: 2230911 - RNA, 19 nt, Homo sapiens
  misc_RNA (1)...(19): siRNA sense strand
ccaccauggaggagauuga

SEQ ID NO: 2230912 - RNA, 19 nt, Homo sapiens
  misc_RNA (1)...(19): siRNA sense strand
gccaggaaccacagaggua

SEQ ID NO: 2230913 - RNA, 19 nt, Homo sapiens
  misc_RNA (1)...(19): siRNA sense strand
gcgcugaccucaauggaca

SEQ ID NO: 2230914 - RNA, 19 nt, Homo sapiens
  misc_RNA (1)...(19): siRNA sense strand
gcaggagagaauugccaaa

SEQ ID NO: 2230915 - RNA, 19 nt, Homo sapiens
  misc_RNA (1)...(19): siRNA sense strand
ggaagagugagguugacaa

SEQ ID NO: 2230916 - RNA, 19 nt, Homo sapiens
  misc_RNA (1)...(19): siRNA sense strand
cuguggaggagaugggaau

SEQ ID NO: 2230917 - RNA, 19 nt, Homo sapiens
  misc_RNA (1)...(19): siRNA sense strand
ccggagagaagaugacauu

SEQ ID NO: 2230918 - RNA, 19 nt, Homo sapiens
  misc_RNA (1)...(19): siRNA sense strand
gaguaacauaacuggaauu

SEQ ID NO: 2230919 - RNA, 19 nt, Homo sapiens
  misc_RNA (1)...(19): siRNA sense strand
uauuauggaacgagcuuua

SEQ ID NO: 2230920 - RNA, 19 nt, Homo sapiens
  misc_RNA (1)...(19): siRNA sense strand
gcagaggaggugcggagaa

SEQ ID NO: 2230921 - RNA, 19 nt, Homo sapiens
  misc_RNA (1)...(19): siRNA sense strand
ggagauuggcauugagaug

SEQ ID NO: 2230922 - RNA, 19 nt, Homo sapiens
  misc_RNA (1)...(19): siRNA sense strand
cuggaagacaaguguggua

SEQ ID NO: 2230923 - RNA, 19 nt, Homo sapiens
  misc_RNA (1)...(19): siRNA sense strand
cagucuuugcgaaggauaa

SEQ ID NO: 2230924 - RNA, 19 nt, Homo sapiens
  misc_RNA (1)...(19): siRNA sense strand
gaaucaggcaggagcccua

SEQ ID NO: 2230925 - RNA, 19 nt, Homo sapiens
  misc_RNA (1)...(19): siRNA sense strand
agauuggcauugagaugaa

SEQ ID NO: 2230926 - RNA, 19 nt, Homo sapiens
  misc_RNA (1)...(19): siRNA sense strand
gagaagaugacauugccaa

SEQ ID NO: 2230927 - RNA, 19 nt, Homo sapiens
  misc_RNA (1)...(19): siRNA sense strand
caucagaagcuaagaaggu

SEQ ID NO: 2230928 - RNA, 19 nt, Homo sapiens
  misc_RNA (1)...(19): siRNA sense strand
aaaugcagauccagagaca

SEQ ID NO: 2230929 - RNA, 19 nt, Homo sapiens
  misc_RNA (1)...(19): siRNA sense strand
gggcauuuguccagggccu

SEQ ID NO: 2230930 - RNA, 19 nt, Homo sapiens
  misc_RNA (1)...(19): siRNA sense strand
guggaggagaugggaauaa

SEQ ID NO: 2230931 - RNA, 19 nt, Homo sapiens
  misc_RNA (1)...(19): siRNA sense strand
ggagaugggaauaauccaa

SEQ ID NO: 2230932 - RNA, 19 nt, Homo sapiens
  misc_RNA (1)...(19): siRNA sense strand
uauucaaaccagaggaguu

SEQ ID NO: 2230933 - RNA, 19 nt, Homo sapiens
  misc_RNA (1)...(19): siRNA sense strand
gguuacuuguguugggcau

SEQ ID NO: 2230934 - RNA, 19 nt, Homo sapiens
  misc_RNA (1)...(19): siRNA sense strand
cugccuaacaggagaucau

SEQ ID NO: 2230935 - RNA, 19 nt, Homo sapiens
  misc_RNA (1)...(19): siRNA sense strand
gauuuauaucagcgagaca

SEQ ID NO: 2230936 - RNA, 19 nt, Homo sapiens
  misc_RNA (1)...(19): siRNA sense strand
ugaaaaggcuggaacccua

SEQ ID NO: 2230937 - RNA, 19 nt, Homo sapiens
  misc_RNA (1)...(19): siRNA sense strand
ccauggaggagauugagaa

SEQ ID NO: 2230938 - RNA, 19 nt, Homo sapiens
  misc_RNA (1)...(19): siRNA sense strand
aauccaaauugcugcauga

SEQ ID NO: 2230939 - RNA, 19 nt, Homo sapiens
  misc_RNA (1)...(19): siRNA sense strand
acuucuaccuggagacuca

SEQ ID NO: 2230940 - RNA, 19 nt, Homo sapiens
  misc_RNA (1)...(19): siRNA sense strand
gcugaauucgguagaacau

SEQ ID NO: 2230941 - RNA, 19 nt, Homo sapiens
  misc_RNA (1)...(19): siRNA sense strand
cuaagaagguuccaggguu

SEQ ID NO: 2230942 - RNA, 19 nt, Homo sapiens
  misc_RNA (1)...(19): siRNA sense strand
gauauacaucgguggccaa

SEQ ID NO: 2230943 - RNA, 19 nt, Homo sapiens
  misc_RNA (1)...(19): siRNA sense strand
gacaacuguggaaggaaua

SEQ ID NO: 2230944 - RNA, 19 nt, Homo sapiens
  misc_RNA (1)...(19): siRNA sense strand
gcugcaugaaccagaagaa

SEQ ID NO: 2230945 - RNA, 19 nt, Homo sapiens
  misc_RNA (1)...(19): siRNA sense strand
ccaacaagaaggccaucua

SEQ ID NO: 2230946 - RNA, 19 nt, Homo sapiens
  misc_RNA (1)...(19): siRNA sense strand
ccagaguugcugaggcuga

SEQ ID NO: 2230947 - RNA, 19 nt, Homo sapiens
  misc_RNA (1)...(19): siRNA sense strand
ugguucgagugaagagaau

SEQ ID NO: 2230948 - RNA, 19 nt, Homo sapiens
  misc_RNA (1)...(19): siRNA sense strand
aagaaagaccacucaguca

SEQ ID NO: 2230949 - RNA, 19 nt, Homo sapiens
  misc_RNA (1)...(19): siRNA sense strand
gggcccacgccaagaucaa

SEQ ID NO: 2230950 - RNA, 19 nt, Homo sapiens
  misc_RNA (1)...(19): siRNA sense strand
uugcugaggcugaaagaca

SEQ ID NO: 2230951 - RNA, 19 nt, Homo sapiens
  misc_RNA (1)...(19): siRNA sense strand
guuccugggaguaacauaa

SEQ ID NO: 2230952 - RNA, 19 nt, Homo sapiens
  misc_RNA (1)...(19): siRNA sense strand
ccaagcuggucguggggaa

SEQ ID NO: 2230953 - RNA, 19 nt, Homo sapiens
  misc_RNA (1)...(19): siRNA sense strand
ccagauacaagguuggcuu

SEQ ID NO: 2230954 - RNA, 19 nt, Homo sapiens
  misc_RNA (1)...(19): siRNA sense strand
acaaguucaacaaggagaa

SEQ ID NO: 2230955 - RNA, 19 nt, Homo sapiens
  misc_RNA (1)...(19): siRNA sense strand
ggcuggaacccuacaagaa

SEQ ID NO: 2230956 - RNA, 19 nt, Homo sapiens
  misc_RNA (1)...(19): siRNA sense strand
cauuaucacaauugaggau

SEQ ID NO: 2230957 - RNA, 19 nt, Homo sapiens
  misc_RNA (1)...(19): siRNA sense strand
gcaccauugcuguuccaaa

SEQ ID NO: 2230958 - RNA, 19 nt, Homo sapiens
  misc_RNA (1)...(19): siRNA sense strand
ggccaguagagcucugaaa

SEQ ID NO: 2230959 - RNA, 19 nt, Homo sapiens
  misc_RNA (1)...(19): siRNA sense strand
cagauauugucauggaugu

SEQ ID NO: 2230960 - RNA, 19 nt, Homo sapiens
  misc_RNA (1)...(19): siRNA sense strand
cuggcaucgucaugaguau

SEQ ID NO: 2230961 - RNA, 19 nt, Homo sapiens
  misc_RNA (1)...(19): siRNA sense strand
acguaaaguuggugguaca

SEQ ID NO: 2230962 - RNA, 19 nt, Homo sapiens
  misc_RNA (1)...(19): siRNA sense strand
caaugaagcuguugcccaa

SEQ ID NO: 2230963 - RNA, 19 nt, Homo sapiens
  misc_RNA (1)...(19): siRNA sense strand
guagaaagcccaagccaga

SEQ ID NO: 2230964 - RNA, 19 nt, Homo sapiens
  misc_RNA (1)...(19): siRNA sense strand
agaagauaaaccuaggaaa

SEQ ID NO: 2230965 - RNA, 19 nt, Homo sapiens
  misc_RNA (1)...(19): siRNA sense strand
ccucgaaguaagaaaguca

SEQ ID NO: 2230966 - RNA, 19 nt, Homo sapiens
  misc_RNA (1)...(19): siRNA sense strand
gcaguaauucuuaaggcua

SEQ ID NO: 2230967 - RNA, 19 nt, Homo sapiens
  misc_RNA (1)...(19): siRNA sense strand
cgauuauacagaugaugaa

SEQ ID NO: 2230968 - RNA, 19 nt, Homo sapiens
  misc_RNA (1)...(19): siRNA sense strand
cuucagaacaacagaaaau

SEQ ID NO: 2230969 - RNA, 19 nt, Homo sapiens
  misc_RNA (1)...(19): siRNA sense strand
cagcauaaggcauugguga

SEQ ID NO: 2230970 - RNA, 19 nt, Homo sapiens
  misc_RNA (1)...(19): siRNA sense strand
guaacauguccgaugaauu

SEQ ID NO: 2230971 - RNA, 19 nt, Homo sapiens
  misc_RNA (1)...(19): siRNA sense strand
gcccaauauggcugugaaa

SEQ ID NO: 2230972 - RNA, 19 nt, Homo sapiens
  misc_RNA (1)...(19): siRNA sense strand
augcaggaaacaagaagaa

SEQ ID NO: 2230973 - RNA, 19 nt, Homo sapiens
  misc_RNA (1)...(19): siRNA sense strand
ccaucaauacagucgcaua

SEQ ID NO: 2230974 - RNA, 19 nt, Homo sapiens
  misc_RNA (1)...(19): siRNA sense strand
uguuuaaugaugcaggaaa

SEQ ID NO: 2230975 - RNA, 19 nt, Homo sapiens
  misc_RNA (1)...(19): siRNA sense strand
ggaauuuagaggcagaaaa

SEQ ID NO: 2230976 - RNA, 19 nt, Homo sapiens
  misc_RNA (1)...(19): siRNA sense strand
acuccaaagaggaaucuaa

SEQ ID NO: 2230977 - RNA, 19 nt, Homo sapiens
  misc_RNA (1)...(19): siRNA sense strand
gaaaagaaaucauagagga

SEQ ID NO: 2230978 - RNA, 19 nt, Homo sapiens
  misc_RNA (1)...(19): siRNA sense strand
agcauaaggcauuggugaa

SEQ ID NO: 2230979 - RNA, 19 nt, Homo sapiens
  misc_RNA (1)...(19): siRNA sense strand
agucagauauguugugagu

SEQ ID NO: 2230980 - RNA, 19 nt, Homo sapiens
  misc_RNA (1)...(19): siRNA sense strand
ccucagauaaauggugaaa

SEQ ID NO: 2230981 - RNA, 19 nt, Homo sapiens
  misc_RNA (1)...(19): siRNA sense strand
ccugaagguaguggaauua

SEQ ID NO: 2230982 - RNA, 19 nt, Homo sapiens
  misc_RNA (1)...(19): siRNA sense strand
guuuauagacugugugaug

SEQ ID NO: 2230983 - RNA, 19 nt, Homo sapiens
  misc_RNA (1)...(19): siRNA sense strand
ccugagaaggucugcaaaa

SEQ ID NO: 2230984 - RNA, 19 nt, Homo sapiens
  misc_RNA (1)...(19): siRNA sense strand
ccuucaaacaccauccaaa

SEQ ID NO: 2230985 - RNA, 19 nt, Homo sapiens
  misc_RNA (1)...(19): siRNA sense strand
aauggaauuuagaggcaga

SEQ ID NO: 2230986 - RNA, 19 nt, Homo sapiens
  misc_RNA (1)...(19): siRNA sense strand
aagaggaaucuaagcaaaa

SEQ ID NO: 2230987 - RNA, 19 nt, Homo sapiens
  misc_RNA (1)...(19): siRNA sense strand
uaccauuggcugagcaaau

SEQ ID NO: 2230988 - RNA, 19 nt, Homo sapiens
  misc_RNA (1)...(19): siRNA sense strand
cagugagcuugcaguaauu

SEQ ID NO: 2230989 - RNA, 19 nt, Homo sapiens
  misc_RNA (1)...(19): siRNA sense strand
aaguaugugaacaggaaga

SEQ ID NO: 2230990 - RNA, 19 nt, Homo sapiens
  misc_RNA (1)...(19): siRNA sense strand
cuguaguaauuguguaagu

SEQ ID NO: 2230991 - RNA, 19 nt, Homo sapiens
  misc_RNA (1)...(19): siRNA sense strand
auagacaacuggacagcau

SEQ ID NO: 2230992 - RNA, 19 nt, Homo sapiens
  misc_RNA (1)...(19): siRNA sense strand
cuaccagagaagaaugaau

SEQ ID NO: 2230993 - RNA, 19 nt, Homo sapiens
  misc_RNA (1)...(19): siRNA sense strand
gugaacaggaagaaaagua

SEQ ID NO: 2230994 - RNA, 19 nt, Homo sapiens
  misc_RNA (1)...(19): siRNA sense strand
ucuccaguccucagauaaa

SEQ ID NO: 2230995 - RNA, 19 nt, Homo sapiens
  misc_RNA (1)...(19): siRNA sense strand
ggaaugaaguagugacucc

SEQ ID NO: 2230996 - RNA, 19 nt, Homo sapiens
  misc_RNA (1)...(19): siRNA sense strand
cuccagaaaugcuguuaau

SEQ ID NO: 2230997 - RNA, 19 nt, Homo sapiens
  misc_RNA (1)...(19): siRNA sense strand
auaaauagacaacuggaca

SEQ ID NO: 2230998 - RNA, 19 nt, Homo sapiens
  misc_RNA (1)...(19): siRNA sense strand
cagauauguugugaguaaa

SEQ ID NO: 2230999 - RNA, 19 nt, Homo sapiens
  misc_RNA (1)...(19): siRNA sense strand
gaaguguaugcuugggauu

SEQ ID NO: 2231000 - RNA, 19 nt, Homo sapiens
  misc_RNA (1)...(19): siRNA sense strand
ucucaauggaugcuggauu

SEQ ID NO: 2231001 - RNA, 19 nt, Homo sapiens
  misc_RNA (1)...(19): siRNA sense strand
caggaaacaagaagaauuc

SEQ ID NO: 2231002 - RNA, 19 nt, Homo sapiens
  misc_RNA (1)...(19): siRNA sense strand
aaaucauagaggagagacu

SEQ ID NO: 2231003 - RNA, 19 nt, Homo sapiens
  misc_RNA (1)...(19): siRNA sense strand
gcguagggauggaccucuu

SEQ ID NO: 2231004 - RNA, 19 nt, Homo sapiens
  misc_RNA (1)...(19): siRNA sense strand
gguaaaagcaugucuacga

SEQ ID NO: 2231005 - RNA, 19 nt, Homo sapiens
  misc_RNA (1)...(19): siRNA sense strand
acuuauaggcagugggcug

SEQ ID NO: 2231006 - RNA, 19 nt, Homo sapiens
  misc_RNA (1)...(19): siRNA sense strand
gauguuucugagagggcua

SEQ ID NO: 2231007 - RNA, 19 nt, Homo sapiens
  misc_RNA (1)...(19): siRNA sense strand
ugggcugucuucagaacaa

SEQ ID NO: 2231008 - RNA, 19 nt, Homo sapiens
  misc_RNA (1)...(19): siRNA sense strand
uggauauagucaagcuguu

SEQ ID NO: 2231009 - RNA, 19 nt, Homo sapiens
  misc_RNA (1)...(19): siRNA sense strand
aaaaguaugugaacaggaa

SEQ ID NO: 2231010 - RNA, 19 nt, Homo sapiens
  misc_RNA (1)...(19): siRNA sense strand
guaugugaacaggaagaaa

SEQ ID NO: 2231011 - RNA, 19 nt, Homo sapiens
  misc_RNA (1)...(19): siRNA sense strand
uucaagaaccggagggcua

SEQ ID NO: 2231012 - RNA, 19 nt, Homo sapiens
  misc_RNA (1)...(19): siRNA sense strand
uggaggagcuggaggcacu

SEQ ID NO: 2231013 - RNA, 19 nt, Homo sapiens
  misc_RNA (1)...(19): siRNA sense strand
ccguggauagcuuggaauu

SEQ ID NO: 2231014 - RNA, 19 nt, Homo sapiens
  misc_RNA (1)...(19): siRNA sense strand
ccuugcaggcacugaguaa

SEQ ID NO: 2231015 - RNA, 19 nt, Homo sapiens
  misc_RNA (1)...(19): siRNA sense strand
ccaagaaugucaaucccaa

SEQ ID NO: 2231016 - RNA, 19 nt, Homo sapiens
  misc_RNA (1)...(19): siRNA sense strand
guaaugagaagaaagccaa

SEQ ID NO: 2231017 - RNA, 19 nt, Homo sapiens
  misc_RNA (1)...(19): siRNA sense strand
aguaaugagaagaaagcca

SEQ ID NO: 2231018 - RNA, 19 nt, Homo sapiens
  misc_RNA (1)...(19): siRNA sense strand
acgaaagagauaagacauc

SEQ ID NO: 2231019 - RNA, 19 nt, Homo sapiens
  misc_RNA (1)...(19): siRNA sense strand
cggaugaauggguugccua

SEQ ID NO: 2231020 - RNA, 19 nt, Homo sapiens
  misc_RNA (1)...(19): siRNA sense strand
gggaaacccaucagccaca

SEQ ID NO: 2231021 - RNA, 19 nt, Homo sapiens
  misc_RNA (1)...(19): siRNA sense strand
uggaugaacuggaggaagg

SEQ ID NO: 2231022 - RNA, 19 nt, Homo sapiens
  misc_RNA (1)...(19): siRNA sense strand
gugcacaggccagggagaa

SEQ ID NO: 2231023 - RNA, 19 nt, Homo sapiens
  misc_RNA (1)...(19): siRNA sense strand
ccuugcaggcacugaguaa

SEQ ID NO: 2231024 - RNA, 19 nt, Homo sapiens
  misc_RNA (1)...(19): siRNA sense strand
ccaagaaugucaaucccaa

SEQ ID NO: 2231025 - RNA, 19 nt, Homo sapiens
  misc_RNA (1)...(19): siRNA sense strand
guaaugagaagaaagccaa

SEQ ID NO: 2231026 - RNA, 19 nt, Homo sapiens
  misc_RNA (1)...(19): siRNA sense strand
aguaaugagaagaaagcca

SEQ ID NO: 2231027 - RNA, 19 nt, Homo sapiens
  misc_RNA (1)...(19): siRNA sense strand
cggaugaauggguugccua

SEQ ID NO: 2231028 - RNA, 19 nt, Homo sapiens
  misc_RNA (1)...(19): siRNA sense strand
acgaaagagauaagacauc

SEQ ID NO: 2231029 - RNA, 19 nt, Homo sapiens
  misc_RNA (1)...(19): siRNA sense strand
gggaaacccaucagccaca

SEQ ID NO: 2231030 - RNA, 19 nt, Homo sapiens
  misc_RNA (1)...(19): siRNA sense strand
uggaugaacuggaggaagg

SEQ ID NO: 2231031 - RNA, 19 nt, Homo sapiens
  misc_RNA (1)...(19): siRNA sense strand
gugcacaggccagggagaa

SEQ ID NO: 2231032 - RNA, 19 nt, Homo sapiens
  misc_RNA (1)...(19): siRNA sense strand
ccuugcaggcacugaguaa

SEQ ID NO: 2231033 - RNA, 19 nt, Homo sapiens
  misc_RNA (1)...(19): siRNA sense strand
ccaagaaugucaaucccaa

SEQ ID NO: 2231034 - RNA, 19 nt, Homo sapiens
  misc_RNA (1)...(19): siRNA sense strand
guaaugagaagaaagccaa

SEQ ID NO: 2231035 - RNA, 19 nt, Homo sapiens
  misc_RNA (1)...(19): siRNA sense strand
aguaaugagaagaaagcca

SEQ ID NO: 2231036 - RNA, 19 nt, Homo sapiens
  misc_RNA (1)...(19): siRNA sense strand
cggaugaauggguugccua

SEQ ID NO: 2231037 - RNA, 19 nt, Homo sapiens
  misc_RNA (1)...(19): siRNA sense strand
acgaaagagauaagacauc

SEQ ID NO: 2231038 - RNA, 19 nt, Homo sapiens
  misc_RNA (1)...(19): siRNA sense strand
gggaaacccaucagccaca

SEQ ID NO: 2231039 - RNA, 19 nt, Homo sapiens
  misc_RNA (1)...(19): siRNA sense strand
uggaugaacuggaggaagg

SEQ ID NO: 2231040 - RNA, 19 nt, Homo sapiens
  misc_RNA (1)...(19): siRNA sense strand
gugcacaggccagggagaa

SEQ ID NO: 2231041 - RNA, 19 nt, Homo sapiens
  misc_RNA (1)...(19): siRNA sense strand
ccuugcaggcacugaguaa

SEQ ID NO: 2231042 - RNA, 19 nt, Homo sapiens
  misc_RNA (1)...(19): siRNA sense strand
ccaagaaugucaaucccaa

SEQ ID NO: 2231043 - RNA, 19 nt, Homo sapiens
  misc_RNA (1)...(19): siRNA sense strand
guaaugagaagaaagccaa

SEQ ID NO: 2231044 - RNA, 19 nt, Homo sapiens
  misc_RNA (1)...(19): siRNA sense strand
aguaaugagaagaaagcca

SEQ ID NO: 2231045 - RNA, 19 nt, Homo sapiens
  misc_RNA (1)...(19): siRNA sense strand
cggaugaauggguugccua

SEQ ID NO: 2231046 - RNA, 19 nt, Homo sapiens
  misc_RNA (1)...(19): siRNA sense strand
acgaaagagauaagacauc

SEQ ID NO: 2231047 - RNA, 19 nt, Homo sapiens
  misc_RNA (1)...(19): siRNA sense strand
gggaaacccaucagccaca

SEQ ID NO: 2231048 - RNA, 19 nt, Homo sapiens
  misc_RNA (1)...(19): siRNA sense strand
uggaugaacuggaggaagg

SEQ ID NO: 2231049 - RNA, 19 nt, Homo sapiens
  misc_RNA (1)...(19): siRNA sense strand
gugcacaggccagggagaa

SEQ ID NO: 2231050 - RNA, 19 nt, Homo sapiens
  misc_RNA (1)...(19): siRNA sense strand
agguuaagggccacggcaa

SEQ ID NO: 2231051 - RNA, 19 nt, Homo sapiens
  misc_RNA (1)...(19): siRNA sense strand
aagucaaggcacauggcaa

SEQ ID NO: 2231052 - RNA, 19 nt, Homo sapiens
  misc_RNA (1)...(19): siRNA sense strand
uggcaauccauuucggcaa

SEQ ID NO: 2231053 - RNA, 19 nt, Homo sapiens
  misc_RNA (1)...(19): siRNA sense strand
gaggagaaacccugggaag

SEQ ID NO: 2231054 - RNA, 19 nt, Homo sapiens
  misc_RNA (1)...(19): siRNA sense strand
gaaaugugcuggugaccgu

SEQ ID NO: 2231055 - RNA, 19 nt, Homo sapiens
  misc_RNA (1)...(19): siRNA sense strand
gugacaagcugcaugugga

SEQ ID NO: 2231056 - RNA, 19 nt, Homo sapiens
  misc_RNA (1)...(19): siRNA sense strand
aagucaaggcacauggcaa

SEQ ID NO: 2231057 - RNA, 19 nt, Homo sapiens
  misc_RNA (1)...(19): siRNA sense strand
uggcaauccauuucggcaa

SEQ ID NO: 2231058 - RNA, 19 nt, Homo sapiens
  misc_RNA (1)...(19): siRNA sense strand
gaggagaaacccugggaag

SEQ ID NO: 2231059 - RNA, 19 nt, Homo sapiens
  misc_RNA (1)...(19): siRNA sense strand
gaaaugugcuggugaccgu

SEQ ID NO: 2231060 - RNA, 19 nt, Homo sapiens
  misc_RNA (1)...(19): siRNA sense strand
gugacaagcugcaugugga

SEQ ID NO: 2231061 - RNA, 19 nt, Homo sapiens
  misc_RNA (1)...(19): siRNA sense strand
gggaugugauggaggguca

SEQ ID NO: 2231062 - RNA, 19 nt, Homo sapiens
  misc_RNA (1)...(19): siRNA sense strand
gacuauaaucaauggaaca

SEQ ID NO: 2231063 - RNA, 19 nt, Homo sapiens
  misc_RNA (1)...(19): siRNA sense strand
augaagggcaggagguuau

SEQ ID NO: 2231064 - RNA, 19 nt, Homo sapiens
  misc_RNA (1)...(19): siRNA sense strand
aggaaggggagaaggaauu

SEQ ID NO: 2231065 - RNA, 19 nt, Homo sapiens
  misc_RNA (1)...(19): siRNA sense strand
ugaugacuuugaagggcaa

SEQ ID NO: 2231066 - RNA, 19 nt, Homo sapiens
  misc_RNA (1)...(19): siRNA sense strand
gaggaaggggagaaggaau

SEQ ID NO: 2231067 - RNA, 19 nt, Homo sapiens
  misc_RNA (1)...(19): siRNA sense strand
uggcaacuugauugguaaa

SEQ ID NO: 2231068 - RNA, 19 nt, Homo sapiens
  misc_RNA (1)...(19): siRNA sense strand
cagaggagaccauggagca

SEQ ID NO: 2231069 - RNA, 19 nt, Homo sapiens
  misc_RNA (1)...(19): siRNA sense strand
ccucguaggcuguggggau

SEQ ID NO: 2231070 - RNA, 19 nt, Homo sapiens
  misc_RNA (1)...(19): siRNA sense strand
augaaucgcugcaggagga

SEQ ID NO: 2231071 - RNA, 19 nt, Homo sapiens
  misc_RNA (1)...(19): siRNA sense strand
aggaauuucauguucggaa

SEQ ID NO: 2231072 - RNA, 19 nt, Homo sapiens
  misc_RNA (1)...(19): siRNA sense strand
cugaugacuuugaagggca

SEQ ID NO: 2231073 - RNA, 19 nt, Homo sapiens
  misc_RNA (1)...(19): siRNA sense strand
accugaaagaagacuauaa

SEQ ID NO: 2231074 - RNA, 19 nt, Homo sapiens
  misc_RNA (1)...(19): siRNA sense strand
guauaugaacagaagcuga

SEQ ID NO: 2231075 - RNA, 19 nt, Homo sapiens
  misc_RNA (1)...(19): siRNA sense strand
cugaaugaguauguggcua

SEQ ID NO: 2231076 - RNA, 19 nt, Homo sapiens
  misc_RNA (1)...(19): siRNA sense strand
caucuguguaugugugauu

SEQ ID NO: 2231077 - RNA, 19 nt, Homo sapiens
  misc_RNA (1)...(19): siRNA sense strand
acagaagcugaaugaguau

SEQ ID NO: 2231078 - RNA, 19 nt, Homo sapiens
  misc_RNA (1)...(19): siRNA sense strand
ugauugagguguuggggau

SEQ ID NO: 2231079 - RNA, 19 nt, Homo sapiens
  misc_RNA (1)...(19): siRNA sense strand
ugguauaaauggcacgagu

SEQ ID NO: 2231080 - RNA, 19 nt, Homo sapiens
  misc_RNA (1)...(19): siRNA sense strand
gggagacagaagaggagaa

SEQ ID NO: 2231081 - RNA, 19 nt, Homo sapiens
  misc_RNA (1)...(19): siRNA sense strand
acaagaucacccagagcaa

SEQ ID NO: 2231082 - RNA, 19 nt, Homo sapiens
  misc_RNA (1)...(19): siRNA sense strand
agaaccagaccauggacaa

SEQ ID NO: 2231083 - RNA, 19 nt, Homo sapiens
  misc_RNA (1)...(19): siRNA sense strand
auccagaauuugagaaacu

SEQ ID NO: 2231084 - RNA, 19 nt, Homo sapiens
  misc_RNA (1)...(19): siRNA sense strand
ggagaagauucguguggac

SEQ ID NO: 2231085 - RNA, 19 nt, Homo sapiens
  misc_RNA (1)...(19): siRNA sense strand
gcaacgccaucuugugcua

SEQ ID NO: 2231086 - RNA, 19 nt, Homo sapiens
  misc_RNA (1)...(19): siRNA sense strand
guguggacauuuuggagaa

SEQ ID NO: 2231087 - RNA, 19 nt, Homo sapiens
  misc_RNA (1)...(19): siRNA sense strand
agaagauucguguggacau

SEQ ID NO: 2231088 - RNA, 19 nt, Homo sapiens
  misc_RNA (1)...(19): siRNA sense strand
uuugagaaacugaagccaa

SEQ ID NO: 2231089 - RNA, 19 nt, Homo sapiens
  misc_RNA (1)...(19): siRNA sense strand
gggagacagaagaggagaa

SEQ ID NO: 2231090 - RNA, 19 nt, Homo sapiens
  misc_RNA (1)...(19): siRNA sense strand
acaagaucacccagagcaa

SEQ ID NO: 2231091 - RNA, 19 nt, Homo sapiens
  misc_RNA (1)...(19): siRNA sense strand
agaaccagaccauggacaa

SEQ ID NO: 2231092 - RNA, 19 nt, Homo sapiens
  misc_RNA (1)...(19): siRNA sense strand
auccagaauuugagaaacu

SEQ ID NO: 2231093 - RNA, 19 nt, Homo sapiens
  misc_RNA (1)...(19): siRNA sense strand
ggagaagauucguguggac

SEQ ID NO: 2231094 - RNA, 19 nt, Homo sapiens
  misc_RNA (1)...(19): siRNA sense strand
gcaacgccaucuugugcua

SEQ ID NO: 2231095 - RNA, 19 nt, Homo sapiens
  misc_RNA (1)...(19): siRNA sense strand
guguggacauuuuggagaa

SEQ ID NO: 2231096 - RNA, 19 nt, Homo sapiens
  misc_RNA (1)...(19): siRNA sense strand
agaagauucguguggacau

SEQ ID NO: 2231097 - RNA, 19 nt, Homo sapiens
  misc_RNA (1)...(19): siRNA sense strand
uuugagaaacugaagccaa

SEQ ID NO: 2231098 - RNA, 19 nt, Homo sapiens
  misc_RNA (1)...(19): siRNA sense strand
gcacagaacaggagcacca

SEQ ID NO: 2231099 - RNA, 19 nt, Homo sapiens
  misc_RNA (1)...(19): siRNA sense strand
ggguaacugcacaggagaa

SEQ ID NO: 2231100 - RNA, 19 nt, Homo sapiens
  misc_RNA (1)...(19): siRNA sense strand
caaaauaaauguuggugga

SEQ ID NO: 2231101 - RNA, 19 nt, Homo sapiens
  misc_RNA (1)...(19): siRNA sense strand
acagacagaaggagccaaa

SEQ ID NO: 2231102 - RNA, 19 nt, Homo sapiens
  misc_RNA (1)...(19): siRNA sense strand
uggucagaguggacagauu

SEQ ID NO: 2231103 - RNA, 19 nt, Homo sapiens
  misc_RNA (1)...(19): siRNA sense strand
ggugauugacaaagcaaaa

SEQ ID NO: 2231104 - RNA, 19 nt, Homo sapiens
  misc_RNA (1)...(19): siRNA sense strand
cagcagagauaucacgaca

SEQ ID NO: 2231105 - RNA, 19 nt, Homo sapiens
  misc_RNA (1)...(19): siRNA sense strand
aggccauggcuguggaaga

SEQ ID NO: 2231106 - RNA, 19 nt, Homo sapiens
  misc_RNA (1)...(19): siRNA sense strand
cugcacaggagaaggugaa

SEQ ID NO: 2231107 - RNA, 19 nt, Homo sapiens
  misc_RNA (1)...(19): siRNA sense strand
aggaagaugcucagagugu

SEQ ID NO: 2231108 - RNA, 19 nt, Homo sapiens
  misc_RNA (1)...(19): siRNA sense strand
aggagaagagagugugaca

SEQ ID NO: 2231109 - RNA, 19 nt, Homo sapiens
  misc_RNA (1)...(19): siRNA sense strand
aauaaauguugguggaggu

SEQ ID NO: 2231110 - RNA, 19 nt, Homo sapiens
  misc_RNA (1)...(19): siRNA sense strand
cagaaggagccaaagcaga

SEQ ID NO: 2231111 - RNA, 19 nt, Homo sapiens
  misc_RNA (1)...(19): siRNA sense strand
gaccaguaucugauggaau

SEQ ID NO: 2231112 - RNA, 19 nt, Homo sapiens
  misc_RNA (1)...(19): siRNA sense strand
gguacaauauccugaccca

SEQ ID NO: 2231113 - RNA, 19 nt, Homo sapiens
  misc_RNA (1)...(19): siRNA sense strand
augaauauauccuggugau

SEQ ID NO: 2231114 - RNA, 19 nt, Homo sapiens
  misc_RNA (1)...(19): siRNA sense strand
ugauaaugcaaaugaccuu

SEQ ID NO: 2231115 - RNA, 19 nt, Homo sapiens
  misc_RNA (1)...(19): siRNA sense strand
uggagugaccaucggcaua

SEQ ID NO: 2231116 - RNA, 19 nt, Homo sapiens
  misc_RNA (1)...(19): siRNA sense strand
ccagagaguaagacgggca

SEQ ID NO: 2231117 - RNA, 19 nt, Homo sapiens
  misc_RNA (1)...(19): siRNA sense strand
ggagaagagagugugacaa

SEQ ID NO: 2231118 - RNA, 19 nt, Homo sapiens
  misc_RNA (1)...(19): siRNA sense strand
aguaagacgggcagcuaca

SEQ ID NO: 2231119 - RNA, 19 nt, Homo sapiens
  misc_RNA (1)...(19): siRNA sense strand
cugaugaggacgacuguga

SEQ ID NO: 2231120 - RNA, 19 nt, Homo sapiens
  misc_RNA (1)...(19): siRNA sense strand
agguuuaucaggagaccau

SEQ ID NO: 2231121 - RNA, 19 nt, Homo sapiens
  misc_RNA (1)...(19): siRNA sense strand
caggagaaggugaaccaga

SEQ ID NO: 2231122 - RNA, 19 nt, Homo sapiens
  misc_RNA (1)...(19): siRNA sense strand
acuauggagaugaugagaa

SEQ ID NO: 2231123 - RNA, 19 nt, Homo sapiens
  misc_RNA (1)...(19): siRNA sense strand
cagcagagauugaaggaac

SEQ ID NO: 2231124 - RNA, 19 nt, Homo sapiens
  misc_RNA (1)...(19): siRNA sense strand
ccagaaucacugaaagcaa

SEQ ID NO: 2231125 - RNA, 19 nt, Homo sapiens
  misc_RNA (1)...(19): siRNA sense strand
aggaauggauauuugcaga

SEQ ID NO: 2231126 - RNA, 19 nt, Homo sapiens
  misc_RNA (1)...(19): siRNA sense strand
ugaucaagagcaaaggaau

SEQ ID NO: 2231127 - RNA, 19 nt, Homo sapiens
  misc_RNA (1)...(19): siRNA sense strand
gaauuuaacuugcaccaca

SEQ ID NO: 2231128 - RNA, 19 nt, Homo sapiens
  misc_RNA (1)...(19): siRNA sense strand
aaauccugaucaagagcaa

SEQ ID NO: 2231129 - RNA, 19 nt, Homo sapiens
  misc_RNA (1)...(19): siRNA sense strand
agaauacagcaaagacaca

SEQ ID NO: 2231130 - RNA, 19 nt, Homo sapiens
  misc_RNA (1)...(19): siRNA sense strand
cugagauacugcaagcuga

SEQ ID NO: 2231131 - RNA, 19 nt, Homo sapiens
  misc_RNA (1)...(19): siRNA sense strand
cagcagagauugaaggaac

SEQ ID NO: 2231132 - RNA, 19 nt, Homo sapiens
  misc_RNA (1)...(19): siRNA sense strand
ccagaaucacugaaagcaa

SEQ ID NO: 2231133 - RNA, 19 nt, Homo sapiens
  misc_RNA (1)...(19): siRNA sense strand
aggaauggauauuugcaga

SEQ ID NO: 2231134 - RNA, 19 nt, Homo sapiens
  misc_RNA (1)...(19): siRNA sense strand
ugaucaagagcaaaggaau

SEQ ID NO: 2231135 - RNA, 19 nt, Homo sapiens
  misc_RNA (1)...(19): siRNA sense strand
gaauuuaacuugcaccaca

SEQ ID NO: 2231136 - RNA, 19 nt, Homo sapiens
  misc_RNA (1)...(19): siRNA sense strand
aaauccugaucaagagcaa

SEQ ID NO: 2231137 - RNA, 19 nt, Homo sapiens
  misc_RNA (1)...(19): siRNA sense strand
agaauacagcaaagacaca

SEQ ID NO: 2231138 - RNA, 19 nt, Homo sapiens
  misc_RNA (1)...(19): siRNA sense strand
cugagauacugcaagcuga

SEQ ID NO: 2231139 - RNA, 19 nt, Homo sapiens
  misc_RNA (1)...(19): siRNA sense strand
cagcagagauugaaggaac

SEQ ID NO: 2231140 - RNA, 19 nt, Homo sapiens
  misc_RNA (1)...(19): siRNA sense strand
ccagaaucacugaaagcaa

SEQ ID NO: 2231141 - RNA, 19 nt, Homo sapiens
  misc_RNA (1)...(19): siRNA sense strand
aggaauggauauuugcaga

SEQ ID NO: 2231142 - RNA, 19 nt, Homo sapiens
  misc_RNA (1)...(19): siRNA sense strand
ugaucaagagcaaaggaau

SEQ ID NO: 2231143 - RNA, 19 nt, Homo sapiens
  misc_RNA (1)...(19): siRNA sense strand
gaauuuaacuugcaccaca

SEQ ID NO: 2231144 - RNA, 19 nt, Homo sapiens
  misc_RNA (1)...(19): siRNA sense strand
aaauccugaucaagagcaa

SEQ ID NO: 2231145 - RNA, 19 nt, Homo sapiens
  misc_RNA (1)...(19): siRNA sense strand
agaauacagcaaagacaca

SEQ ID NO: 2231146 - RNA, 19 nt, Homo sapiens
  misc_RNA (1)...(19): siRNA sense strand
cugagauacugcaagcuga

SEQ ID NO: 2231147 - RNA, 19 nt, Homo sapiens
  misc_RNA (1)...(19): siRNA sense strand
cagcagagauugaaggaac

SEQ ID NO: 2231148 - RNA, 19 nt, Homo sapiens
  misc_RNA (1)...(19): siRNA sense strand
ccagaaucacugaaagcaa

SEQ ID NO: 2231149 - RNA, 19 nt, Homo sapiens
  misc_RNA (1)...(19): siRNA sense strand
aggaauggauauuugcaga

SEQ ID NO: 2231150 - RNA, 19 nt, Homo sapiens
  misc_RNA (1)...(19): siRNA sense strand
ugaucaagagcaaaggaau

SEQ ID NO: 2231151 - RNA, 19 nt, Homo sapiens
  misc_RNA (1)...(19): siRNA sense strand
gaauuuaacuugcaccaca

SEQ ID NO: 2231152 - RNA, 19 nt, Homo sapiens
  misc_RNA (1)...(19): siRNA sense strand
aaauccugaucaagagcaa

SEQ ID NO: 2231153 - RNA, 19 nt, Homo sapiens
  misc_RNA (1)...(19): siRNA sense strand
agaauacagcaaagacaca

SEQ ID NO: 2231154 - RNA, 19 nt, Homo sapiens
  misc_RNA (1)...(19): siRNA sense strand
cugagauacugcaagcuga

SEQ ID NO: 2231155 - RNA, 19 nt, Homo sapiens
  misc_RNA (1)...(19): siRNA sense strand
cagcagagauugaaggaac

SEQ ID NO: 2231156 - RNA, 19 nt, Homo sapiens
  misc_RNA (1)...(19): siRNA sense strand
ccagaaucacugaaagcaa

SEQ ID NO: 2231157 - RNA, 19 nt, Homo sapiens
  misc_RNA (1)...(19): siRNA sense strand
aggaauggauauuugcaga

SEQ ID NO: 2231158 - RNA, 19 nt, Homo sapiens
  misc_RNA (1)...(19): siRNA sense strand
ugaucaagagcaaaggaau

SEQ ID NO: 2231159 - RNA, 19 nt, Homo sapiens
  misc_RNA (1)...(19): siRNA sense strand
gaauuuaacuugcaccaca

SEQ ID NO: 2231160 - RNA, 19 nt, Homo sapiens
  misc_RNA (1)...(19): siRNA sense strand
aaauccugaucaagagcaa

SEQ ID NO: 2231161 - RNA, 19 nt, Homo sapiens
  misc_RNA (1)...(19): siRNA sense strand
agaauacagcaaagacaca

SEQ ID NO: 2231162 - RNA, 19 nt, Homo sapiens
  misc_RNA (1)...(19): siRNA sense strand
cugagauacugcaagcuga

SEQ ID NO: 2231163 - RNA, 19 nt, Homo sapiens
  misc_RNA (1)...(19): siRNA sense strand
cagcagagauugaaggaac

SEQ ID NO: 2231164 - RNA, 19 nt, Homo sapiens
  misc_RNA (1)...(19): siRNA sense strand
ccagaaucacugaaagcaa

SEQ ID NO: 2231165 - RNA, 19 nt, Homo sapiens
  misc_RNA (1)...(19): siRNA sense strand
aggaauggauauuugcaga

SEQ ID NO: 2231166 - RNA, 19 nt, Homo sapiens
  misc_RNA (1)...(19): siRNA sense strand
ugaucaagagcaaaggaau

SEQ ID NO: 2231167 - RNA, 19 nt, Homo sapiens
  misc_RNA (1)...(19): siRNA sense strand
gaauuuaacuugcaccaca

SEQ ID NO: 2231168 - RNA, 19 nt, Homo sapiens
  misc_RNA (1)...(19): siRNA sense strand
aaauccugaucaagagcaa

SEQ ID NO: 2231169 - RNA, 19 nt, Homo sapiens
  misc_RNA (1)...(19): siRNA sense strand
agaauacagcaaagacaca

SEQ ID NO: 2231170 - RNA, 19 nt, Homo sapiens
  misc_RNA (1)...(19): siRNA sense strand
cugagauacugcaagcuga

SEQ ID NO: 2231171 - RNA, 19 nt, Homo sapiens
  misc_RNA (1)...(19): siRNA sense strand
gacaauaccucgagccaca

SEQ ID NO: 2231172 - RNA, 19 nt, Homo sapiens
  misc_RNA (1)...(19): siRNA sense strand
gguucaagaagacguggaa

SEQ ID NO: 2231173 - RNA, 19 nt, Homo sapiens
  misc_RNA (1)...(19): siRNA sense strand
cggucaaagacauucacaa

SEQ ID NO: 2231174 - RNA, 19 nt, Homo sapiens
  misc_RNA (1)...(19): siRNA sense strand
cugaaggaaggcaagacaa

SEQ ID NO: 2231175 - RNA, 19 nt, Homo sapiens
  misc_RNA (1)...(19): siRNA sense strand
gggcucugaaggaaggcaa

SEQ ID NO: 2231176 - RNA, 19 nt, Homo sapiens
  misc_RNA (1)...(19): siRNA sense strand
cuuucaggguuguggaauc

SEQ ID NO: 2231177 - RNA, 19 nt, Homo sapiens
  misc_RNA (1)...(19): siRNA sense strand
gcucagugucaccuggcaa

SEQ ID NO: 2231178 - RNA, 19 nt, Homo sapiens
  misc_RNA (1)...(19): siRNA sense strand
cugaacggucaaagacauu

SEQ ID NO: 2231179 - RNA, 19 nt, Homo sapiens
  misc_RNA (1)...(19): siRNA sense strand
gguucaagaagacguggaa

SEQ ID NO: 2231180 - RNA, 19 nt, Homo sapiens
  misc_RNA (1)...(19): siRNA sense strand
cggucaaagacauucacaa

SEQ ID NO: 2231181 - RNA, 19 nt, Homo sapiens
  misc_RNA (1)...(19): siRNA sense strand
cuuucaggguuguggaauc

SEQ ID NO: 2231182 - RNA, 19 nt, Homo sapiens
  misc_RNA (1)...(19): siRNA sense strand
gcucagugucaccuggcaa

SEQ ID NO: 2231183 - RNA, 19 nt, Homo sapiens
  misc_RNA (1)...(19): siRNA sense strand
cugaacggucaaagacauu

SEQ ID NO: 2231184 - RNA, 19 nt, Homo sapiens
  misc_RNA (1)...(19): siRNA sense strand
ucaacuacauagaagccua

SEQ ID NO: 2231185 - RNA, 19 nt, Homo sapiens
  misc_RNA (1)...(19): siRNA sense strand
agagcaaggccguggagca

SEQ ID NO: 2231186 - RNA, 19 nt, Homo sapiens
  misc_RNA (1)...(19): siRNA sense strand
cuggaggacuuuaaggguu

SEQ ID NO: 2231187 - RNA, 19 nt, Homo sapiens
  misc_RNA (1)...(19): siRNA sense strand
ccuacaugacaaugaagau

SEQ ID NO: 2231188 - RNA, 19 nt, Homo sapiens
  misc_RNA (1)...(19): siRNA sense strand
accaagacccagacaucaa

SEQ ID NO: 2231189 - RNA, 19 nt, Homo sapiens
  misc_RNA (1)...(19): siRNA sense strand
cagaauuccuugugggcua

SEQ ID NO: 2231190 - RNA, 19 nt, Homo sapiens
  misc_RNA (1)...(19): siRNA sense strand
augagaagccuuuggaaua

SEQ ID NO: 2231191 - RNA, 19 nt, Homo sapiens
  misc_RNA (1)...(19): siRNA sense strand
gaucauaucuugugagcca

SEQ ID NO: 2231192 - RNA, 19 nt, Homo sapiens
  misc_RNA (1)...(19): siRNA sense strand
acgaauuccuugugggcua

SEQ ID NO: 2231193 - RNA, 19 nt, Homo sapiens
  misc_RNA (1)...(19): siRNA sense strand
acgaauuccuugugggcua

SEQ ID NO: 2231194 - RNA, 19 nt, Homo sapiens
  misc_RNA (1)...(19): siRNA sense strand
gcauauaaacacagauaca

SEQ ID NO: 2231195 - RNA, 19 nt, Homo sapiens
  misc_RNA (1)...(19): siRNA sense strand
ggacaggugcagacguaaa

SEQ ID NO: 2231196 - RNA, 19 nt, Homo sapiens
  misc_RNA (1)...(19): siRNA sense strand
uguuugagcuugugggaga

SEQ ID NO: 2231197 - RNA, 19 nt, Homo sapiens
  misc_RNA (1)...(19): siRNA sense strand
gugcauauaaacacagaua

SEQ ID NO: 2231198 - RNA, 19 nt, Homo sapiens
  misc_RNA (1)...(19): siRNA sense strand
cccuagauguacagugaaa

SEQ ID NO: 2231199 - RNA, 19 nt, Homo sapiens
  misc_RNA (1)...(19): siRNA sense strand
gcuaccuguuagugggaaa

SEQ ID NO: 2231200 - RNA, 19 nt, Homo sapiens
  misc_RNA (1)...(19): siRNA sense strand
uguuugagcuuguggguga

SEQ ID NO: 2231201 - RNA, 19 nt, Homo sapiens
  misc_RNA (1)...(19): siRNA sense strand
uguuugagcuuguggguga

SEQ ID NO: 2231202 - RNA, 19 nt, Homo sapiens
  misc_RNA (1)...(19): siRNA sense strand
uguuugagcuuguggguga

SEQ ID NO: 2231203 - RNA, 19 nt, Homo sapiens
  misc_RNA (1)...(19): siRNA sense strand
cccaaagggacaaggacaa

SEQ ID NO: 2231204 - RNA, 19 nt, Homo sapiens
  misc_RNA (1)...(19): siRNA sense strand
cccaaagggacaaggacaa

SEQ ID NO: 2231205 - RNA, 19 nt, Homo sapiens
  misc_RNA (1)...(19): siRNA sense strand
caauuagaguaccaggaaa

SEQ ID NO: 2231206 - RNA, 19 nt, Homo sapiens
  misc_RNA (1)...(19): siRNA sense strand
gagaaagguguuugagcuu

SEQ ID NO: 2231207 - RNA, 19 nt, Homo sapiens
  misc_RNA (1)...(19): siRNA sense strand
gagaaagguguuugagcuu

SEQ ID NO: 2231208 - RNA, 19 nt, Homo sapiens
  misc_RNA (1)...(19): siRNA sense strand
gagaaagguguuugagcuu

SEQ ID NO: 2231209 - RNA, 19 nt, Homo sapiens
  misc_RNA (1)...(19): siRNA sense strand
gagcguacccaaagggaca

SEQ ID NO: 2231210 - RNA, 19 nt, Homo sapiens
  misc_RNA (1)...(19): siRNA sense strand
gagcguacccaaagggaca

SEQ ID NO: 2231211 - RNA, 19 nt, Homo sapiens
  misc_RNA (1)...(19): siRNA sense strand
cccgagaugugcagugaaa

SEQ ID NO: 2231212 - RNA, 19 nt, Homo sapiens
  misc_RNA (1)...(19): siRNA sense strand
aguuauuccuaaugggaga

SEQ ID NO: 2231213 - RNA, 19 nt, Homo sapiens
  misc_RNA (1)...(19): siRNA sense strand
aguuauuccuaaugggaga

SEQ ID NO: 2231214 - RNA, 19 nt, Homo sapiens
  misc_RNA (1)...(19): siRNA sense strand
cagaaauccugcaugguga

SEQ ID NO: 2231215 - RNA, 19 nt, Homo sapiens
  misc_RNA (1)...(19): siRNA sense strand
cagaaauccugcaugguga

SEQ ID NO: 2231216 - RNA, 19 nt, Homo sapiens
  misc_RNA (1)...(19): siRNA sense strand
ucuuaauggccgugugcua

SEQ ID NO: 2231217 - RNA, 19 nt, Homo sapiens
  misc_RNA (1)...(19): siRNA sense strand
ucuuaauggccgugugcua

SEQ ID NO: 2231218 - RNA, 19 nt, Homo sapiens
  misc_RNA (1)...(19): siRNA sense strand
gcaauaaugcacaugaaaa

SEQ ID NO: 2231219 - RNA, 19 nt, Homo sapiens
  misc_RNA (1)...(19): siRNA sense strand
ucuuggaagcagagggaga

SEQ ID NO: 2231220 - RNA, 19 nt, Homo sapiens
  misc_RNA (1)...(19): siRNA sense strand
auggaauggugcauauaaa

SEQ ID NO: 2231221 - RNA, 19 nt, Homo sapiens
  misc_RNA (1)...(19): siRNA sense strand
aggcaauaaugcacaugaa

SEQ ID NO: 2231222 - RNA, 19 nt, Homo sapiens
  misc_RNA (1)...(19): siRNA sense strand
cagggaaucuggagccaau

SEQ ID NO: 2231223 - RNA, 19 nt, Homo sapiens
  misc_RNA (1)...(19): siRNA sense strand
ggagaaagguguuugagcu

SEQ ID NO: 2231224 - RNA, 19 nt, Homo sapiens
  misc_RNA (1)...(19): siRNA sense strand
ggagaaagguguuugagcu

SEQ ID NO: 2231225 - RNA, 19 nt, Homo sapiens
  misc_RNA (1)...(19): siRNA sense strand
ggagaaagguguuugagcu

SEQ ID NO: 2231226 - RNA, 19 nt, Homo sapiens
  misc_RNA (1)...(19): siRNA sense strand
agacaacuguagacgaaaa

SEQ ID NO: 2231227 - RNA, 19 nt, Homo sapiens
  misc_RNA (1)...(19): siRNA sense strand
gugcauuauaccuaacaaa

SEQ ID NO: 2231228 - RNA, 19 nt, Homo sapiens
  misc_RNA (1)...(19): siRNA sense strand
gugcauuauaccuaacaaa

SEQ ID NO: 2231229 - RNA, 19 nt, Homo sapiens
  misc_RNA (1)...(19): siRNA sense strand
gugcauuauaccuaacaaa

SEQ ID NO: 2231230 - RNA, 19 nt, Homo sapiens
  misc_RNA (1)...(19): siRNA sense strand
ggauuuuguuugugaugaa

SEQ ID NO: 2231231 - RNA, 19 nt, Homo sapiens
  misc_RNA (1)...(19): siRNA sense strand
ggauuuuguuugugaugaa

SEQ ID NO: 2231232 - RNA, 19 nt, Homo sapiens
  misc_RNA (1)...(19): siRNA sense strand
ugucugugaugaaggguuu

SEQ ID NO: 2231233 - RNA, 19 nt, Homo sapiens
  misc_RNA (1)...(19): siRNA sense strand
cugcaaacaaaugaagaaa

SEQ ID NO: 2231234 - RNA, 19 nt, Homo sapiens
  misc_RNA (1)...(19): siRNA sense strand
aaugagaagccuuuggaau

SEQ ID NO: 2231235 - RNA, 19 nt, Homo sapiens
  misc_RNA (1)...(19): siRNA sense strand
augcacagcuccagaaguu

SEQ ID NO: 2231236 - RNA, 19 nt, Homo sapiens
  misc_RNA (1)...(19): siRNA sense strand
auggagacuucuacagcaa

SEQ ID NO: 2231237 - RNA, 19 nt, Homo sapiens
  misc_RNA (1)...(19): siRNA sense strand
ucucgaaggaguuagaaau

SEQ ID NO: 2231238 - RNA, 19 nt, Homo sapiens
  misc_RNA (1)...(19): siRNA sense strand
aaguauaucacuauggaga

SEQ ID NO: 2231239 - RNA, 19 nt, Homo sapiens
  misc_RNA (1)...(19): siRNA sense strand
ggauaaugaaacaccuauu

SEQ ID NO: 2231240 - RNA, 19 nt, Homo sapiens
  misc_RNA (1)...(19): siRNA sense strand
ggcaauaaugcacaugaaa

SEQ ID NO: 2231241 - RNA, 19 nt, Homo sapiens
  misc_RNA (1)...(19): siRNA sense strand
ggaucauuauugcaaagaa

SEQ ID NO: 2231242 - RNA, 19 nt, Homo sapiens
  misc_RNA (1)...(19): siRNA sense strand
cuaaagaaguggcuaucca

SEQ ID NO: 2231243 - RNA, 19 nt, Homo sapiens
  misc_RNA (1)...(19): siRNA sense strand
ccacaugugaagugaaauc

SEQ ID NO: 2231244 - RNA, 19 nt, Homo sapiens
  misc_RNA (1)...(19): siRNA sense strand
ccacaugugaagugaaauc

SEQ ID NO: 2231245 - RNA, 19 nt, Homo sapiens
  misc_RNA (1)...(19): siRNA sense strand
cccuaagccaucaggacaa

SEQ ID NO: 2231246 - RNA, 19 nt, Homo sapiens
  misc_RNA (1)...(19): siRNA sense strand
cagaauuccuugugggcua

SEQ ID NO: 2231247 - RNA, 19 nt, Homo sapiens
  misc_RNA (1)...(19): siRNA sense strand
augagaagccuuuggaaua

SEQ ID NO: 2231248 - RNA, 19 nt, Homo sapiens
  misc_RNA (1)...(19): siRNA sense strand
gaucauaucuugugagcca

SEQ ID NO: 2231249 - RNA, 19 nt, Homo sapiens
  misc_RNA (1)...(19): siRNA sense strand
acgaauuccuugugggcua

SEQ ID NO: 2231250 - RNA, 19 nt, Homo sapiens
  misc_RNA (1)...(19): siRNA sense strand
acgaauuccuugugggcua

SEQ ID NO: 2231251 - RNA, 19 nt, Homo sapiens
  misc_RNA (1)...(19): siRNA sense strand
acgaauuccuugugggcua

SEQ ID NO: 2231252 - RNA, 19 nt, Homo sapiens
  misc_RNA (1)...(19): siRNA sense strand
gcauauaaacacagauaca

SEQ ID NO: 2231253 - RNA, 19 nt, Homo sapiens
  misc_RNA (1)...(19): siRNA sense strand
ggacaggugcagacguaaa

SEQ ID NO: 2231254 - RNA, 19 nt, Homo sapiens
  misc_RNA (1)...(19): siRNA sense strand
uguuugagcuugugggaga

SEQ ID NO: 2231255 - RNA, 19 nt, Homo sapiens
  misc_RNA (1)...(19): siRNA sense strand
gugcauauaaacacagaua

SEQ ID NO: 2231256 - RNA, 19 nt, Homo sapiens
  misc_RNA (1)...(19): siRNA sense strand
cccuagauguacagugaaa

SEQ ID NO: 2231257 - RNA, 19 nt, Homo sapiens
  misc_RNA (1)...(19): siRNA sense strand
gcuaccuguuagugggaaa

SEQ ID NO: 2231258 - RNA, 19 nt, Homo sapiens
  misc_RNA (1)...(19): siRNA sense strand
uguuugagcuuguggguga

SEQ ID NO: 2231259 - RNA, 19 nt, Homo sapiens
  misc_RNA (1)...(19): siRNA sense strand
uguuugagcuuguggguga

SEQ ID NO: 2231260 - RNA, 19 nt, Homo sapiens
  misc_RNA (1)...(19): siRNA sense strand
uguuugagcuuguggguga

SEQ ID NO: 2231261 - RNA, 19 nt, Homo sapiens
  misc_RNA (1)...(19): siRNA sense strand
uguuugagcuuguggguga

SEQ ID NO: 2231262 - RNA, 19 nt, Homo sapiens
  misc_RNA (1)...(19): siRNA sense strand
cccaaagggacaaggacaa

SEQ ID NO: 2231263 - RNA, 19 nt, Homo sapiens
  misc_RNA (1)...(19): siRNA sense strand
cccaaagggacaaggacaa

SEQ ID NO: 2231264 - RNA, 19 nt, Homo sapiens
  misc_RNA (1)...(19): siRNA sense strand
cccaaagggacaaggacaa

SEQ ID NO: 2231265 - RNA, 19 nt, Homo sapiens
  misc_RNA (1)...(19): siRNA sense strand
caauuagaguaccaggaaa

SEQ ID NO: 2231266 - RNA, 19 nt, Homo sapiens
  misc_RNA (1)...(19): siRNA sense strand
gagaaagguguuugagcuu

SEQ ID NO: 2231267 - RNA, 19 nt, Homo sapiens
  misc_RNA (1)...(19): siRNA sense strand
gagaaagguguuugagcuu

SEQ ID NO: 2231268 - RNA, 19 nt, Homo sapiens
  misc_RNA (1)...(19): siRNA sense strand
gagaaagguguuugagcuu

SEQ ID NO: 2231269 - RNA, 19 nt, Homo sapiens
  misc_RNA (1)...(19): siRNA sense strand
gagaaagguguuugagcuu

SEQ ID NO: 2231270 - RNA, 19 nt, Homo sapiens
  misc_RNA (1)...(19): siRNA sense strand
gagcguacccaaagggaca

SEQ ID NO: 2231271 - RNA, 19 nt, Homo sapiens
  misc_RNA (1)...(19): siRNA sense strand
gagcguacccaaagggaca

SEQ ID NO: 2231272 - RNA, 19 nt, Homo sapiens
  misc_RNA (1)...(19): siRNA sense strand
gagcguacccaaagggaca

SEQ ID NO: 2231273 - RNA, 19 nt, Homo sapiens
  misc_RNA (1)...(19): siRNA sense strand
cccgagaugugcagugaaa

SEQ ID NO: 2231274 - RNA, 19 nt, Homo sapiens
  misc_RNA (1)...(19): siRNA sense strand
aguuauuccuaaugggaga

SEQ ID NO: 2231275 - RNA, 19 nt, Homo sapiens
  misc_RNA (1)...(19): siRNA sense strand
aguuauuccuaaugggaga

SEQ ID NO: 2231276 - RNA, 19 nt, Homo sapiens
  misc_RNA (1)...(19): siRNA sense strand
aguuauuccuaaugggaga

SEQ ID NO: 2231277 - RNA, 19 nt, Homo sapiens
  misc_RNA (1)...(19): siRNA sense strand
cagaaauccugcaugguga

SEQ ID NO: 2231278 - RNA, 19 nt, Homo sapiens
  misc_RNA (1)...(19): siRNA sense strand
cagaaauccugcaugguga

SEQ ID NO: 2231279 - RNA, 19 nt, Homo sapiens
  misc_RNA (1)...(19): siRNA sense strand
ucuuaauggccgugugcua

SEQ ID NO: 2231280 - RNA, 19 nt, Homo sapiens
  misc_RNA (1)...(19): siRNA sense strand
ucuuaauggccgugugcua

SEQ ID NO: 2231281 - RNA, 19 nt, Homo sapiens
  misc_RNA (1)...(19): siRNA sense strand
ucuuaauggccgugugcua

SEQ ID NO: 2231282 - RNA, 19 nt, Homo sapiens
  misc_RNA (1)...(19): siRNA sense strand
gcaauaaugcacaugaaaa

SEQ ID NO: 2231283 - RNA, 19 nt, Homo sapiens
  misc_RNA (1)...(19): siRNA sense strand
ucuuggaagcagagggaga

SEQ ID NO: 2231284 - RNA, 19 nt, Homo sapiens
  misc_RNA (1)...(19): siRNA sense strand
auggaauggugcauauaaa

SEQ ID NO: 2231285 - RNA, 19 nt, Homo sapiens
  misc_RNA (1)...(19): siRNA sense strand
aggcaauaaugcacaugaa

SEQ ID NO: 2231286 - RNA, 19 nt, Homo sapiens
  misc_RNA (1)...(19): siRNA sense strand
cagggaaucuggagccaau

SEQ ID NO: 2231287 - RNA, 19 nt, Homo sapiens
  misc_RNA (1)...(19): siRNA sense strand
ggagaaagguguuugagcu

SEQ ID NO: 2231288 - RNA, 19 nt, Homo sapiens
  misc_RNA (1)...(19): siRNA sense strand
ggagaaagguguuugagcu

SEQ ID NO: 2231289 - RNA, 19 nt, Homo sapiens
  misc_RNA (1)...(19): siRNA sense strand
ggagaaagguguuugagcu

SEQ ID NO: 2231290 - RNA, 19 nt, Homo sapiens
  misc_RNA (1)...(19): siRNA sense strand
ggagaaagguguuugagcu

SEQ ID NO: 2231291 - RNA, 19 nt, Homo sapiens
  misc_RNA (1)...(19): siRNA sense strand
agacaacuguagacgaaaa

SEQ ID NO: 2231292 - RNA, 19 nt, Homo sapiens
  misc_RNA (1)...(19): siRNA sense strand
gugcauuauaccuaacaaa

SEQ ID NO: 2231293 - RNA, 19 nt, Homo sapiens
  misc_RNA (1)...(19): siRNA sense strand
gugcauuauaccuaacaaa

SEQ ID NO: 2231294 - RNA, 19 nt, Homo sapiens
  misc_RNA (1)...(19): siRNA sense strand
gugcauuauaccuaacaaa

SEQ ID NO: 2231295 - RNA, 19 nt, Homo sapiens
  misc_RNA (1)...(19): siRNA sense strand
gugcauuauaccuaacaaa

SEQ ID NO: 2231296 - RNA, 19 nt, Homo sapiens
  misc_RNA (1)...(19): siRNA sense strand
ggauuuuguuugugaugaa

SEQ ID NO: 2231297 - RNA, 19 nt, Homo sapiens
  misc_RNA (1)...(19): siRNA sense strand
ggauuuuguuugugaugaa

SEQ ID NO: 2231298 - RNA, 19 nt, Homo sapiens
  misc_RNA (1)...(19): siRNA sense strand
ggauuuuguuugugaugaa

SEQ ID NO: 2231299 - RNA, 19 nt, Homo sapiens
  misc_RNA (1)...(19): siRNA sense strand
ugucugugaugaaggguuu

SEQ ID NO: 2231300 - RNA, 19 nt, Homo sapiens
  misc_RNA (1)...(19): siRNA sense strand
cugcaaacaaaugaagaaa

SEQ ID NO: 2231301 - RNA, 19 nt, Homo sapiens
  misc_RNA (1)...(19): siRNA sense strand
aaugagaagccuuuggaau

SEQ ID NO: 2231302 - RNA, 19 nt, Homo sapiens
  misc_RNA (1)...(19): siRNA sense strand
augcacagcuccagaaguu

SEQ ID NO: 2231303 - RNA, 19 nt, Homo sapiens
  misc_RNA (1)...(19): siRNA sense strand
ccacagaccuuccaggaga

SEQ ID NO: 2231304 - RNA, 19 nt, Homo sapiens
  misc_RNA (1)...(19): siRNA sense strand
gcguguugaaagaugauaa

SEQ ID NO: 2231305 - RNA, 19 nt, Homo sapiens
  misc_RNA (1)...(19): siRNA sense strand
gggacaggauauggagcaa

SEQ ID NO: 2231306 - RNA, 19 nt, Homo sapiens
  misc_RNA (1)...(19): siRNA sense strand
cgucaguuguuguggccau

SEQ ID NO: 2231307 - RNA, 19 nt, Homo sapiens
  misc_RNA (1)...(19): siRNA sense strand
cuuuguacaaggagaagaa

SEQ ID NO: 2231308 - RNA, 19 nt, Homo sapiens
  misc_RNA (1)...(19): siRNA sense strand
ccauggacaagcugaggaa

SEQ ID NO: 2231309 - RNA, 19 nt, Homo sapiens
  misc_RNA (1)...(19): siRNA sense strand
auggacaagcugaggaaga

SEQ ID NO: 2231310 - RNA, 19 nt, Homo sapiens
  misc_RNA (1)...(19): siRNA sense strand
uguacaaggagaagaaagu

SEQ ID NO: 2231311 - RNA, 19 nt, Homo sapiens
  misc_RNA (1)...(19): siRNA sense strand
gagaaugaccugagcaccu

SEQ ID NO: 2231312 - RNA, 19 nt, Homo sapiens
  misc_RNA (1)...(19): siRNA sense strand
agaccuuccaggagaauga

SEQ ID NO: 2231313 - RNA, 19 nt, Homo sapiens
  misc_RNA (1)...(19): siRNA sense strand
uuacaguggcaaugaggau

SEQ ID NO: 2231314 - RNA, 19 nt, Homo sapiens
  misc_RNA (1)...(19): siRNA sense strand
acaaaauaccuguggccuu

SEQ ID NO: 2231315 - RNA, 19 nt, Homo sapiens
  misc_RNA (1)...(19): siRNA sense strand
gagaagaaaucaaggcuca

SEQ ID NO: 2231316 - RNA, 19 nt, Homo sapiens
  misc_RNA (1)...(19): siRNA sense strand
aggaaagauccaaaggaau

SEQ ID NO: 2231317 - RNA, 19 nt, Homo sapiens
  misc_RNA (1)...(19): siRNA sense strand
gaugcugaauugaagaaua

SEQ ID NO: 2231318 - RNA, 19 nt, Homo sapiens
  misc_RNA (1)...(19): siRNA sense strand
ucauaaaguuagcccaaaa

SEQ ID NO: 2231319 - RNA, 19 nt, Homo sapiens
  misc_RNA (1)...(19): siRNA sense strand
aguaaaacucugugacaau

SEQ ID NO: 2231320 - RNA, 19 nt, Homo sapiens
  misc_RNA (1)...(19): siRNA sense strand
ucucauaaaguuagcccaa

SEQ ID NO: 2231321 - RNA, 19 nt, Homo sapiens
  misc_RNA (1)...(19): siRNA sense strand
gaacuaagcagaaggacuc

SEQ ID NO: 2231322 - RNA, 19 nt, Homo sapiens
  misc_RNA (1)...(19): siRNA sense strand
ugugcagauuauucagaaa

SEQ ID NO: 2231323 - RNA, 19 nt, Homo sapiens
  misc_RNA (1)...(19): siRNA sense strand
auccaaaggaauaugcuaa

SEQ ID NO: 2231324 - RNA, 19 nt, Homo sapiens
  misc_RNA (1)...(19): siRNA sense strand
auguagaguugcccacaaa

SEQ ID NO: 2231325 - RNA, 19 nt, Homo sapiens
  misc_RNA (1)...(19): siRNA sense strand
ugaacuaagcagaaggacu

SEQ ID NO: 2231326 - RNA, 19 nt, Homo sapiens
  misc_RNA (1)...(19): siRNA sense strand
cugaagauugcauggccaa

SEQ ID NO: 2231327 - RNA, 19 nt, Homo sapiens
  misc_RNA (1)...(19): siRNA sense strand
aaauagagucugcucacaa

SEQ ID NO: 2231328 - RNA, 19 nt, Homo sapiens
  misc_RNA (1)...(19): siRNA sense strand
gcuuauggggagaagaaau

SEQ ID NO: 2231329 - RNA, 19 nt, Homo sapiens
  misc_RNA (1)...(19): siRNA sense strand
auaaagucugcaaggaauu

SEQ ID NO: 2231330 - RNA, 19 nt, Homo sapiens
  misc_RNA (1)...(19): siRNA sense strand
caguaaaacucugugacaa

SEQ ID NO: 2231331 - RNA, 19 nt, Homo sapiens
  misc_RNA (1)...(19): siRNA sense strand
acauuugaacuaagcagaa

SEQ ID NO: 2231332 - RNA, 19 nt, Homo sapiens
  misc_RNA (1)...(19): siRNA sense strand
cugugauguugaagacuca

SEQ ID NO: 2231333 - RNA, 19 nt, Homo sapiens
  misc_RNA (1)...(19): siRNA sense strand
acaagaacuaugugcagau

SEQ ID NO: 2231334 - RNA, 19 nt, Homo sapiens
  misc_RNA (1)...(19): siRNA sense strand
cugccugaacacacaguaa

SEQ ID NO: 2231335 - RNA, 19 nt, Homo sapiens
  misc_RNA (1)...(19): siRNA sense strand
cguucaggaaagauccaaa

SEQ ID NO: 2231336 - RNA, 19 nt, Homo sapiens
  misc_RNA (1)...(19): siRNA sense strand
cuccaaaugcugugagucu

SEQ ID NO: 2231337 - RNA, 19 nt, Homo sapiens
  misc_RNA (1)...(19): siRNA sense strand
ucugccaaguccugugaaa

SEQ ID NO: 2231338 - RNA, 19 nt, Homo sapiens
  misc_RNA (1)...(19): siRNA sense strand
cugugaggcguucaggaaa

SEQ ID NO: 2231339 - RNA, 19 nt, Homo sapiens
  misc_RNA (1)...(19): siRNA sense strand
cuuagaugucagugcauaa

SEQ ID NO: 2231340 - RNA, 19 nt, Homo sapiens
  misc_RNA (1)...(19): siRNA sense strand
aucaaagaacugagaguga

SEQ ID NO: 2231341 - RNA, 19 nt, Homo sapiens
  misc_RNA (1)...(19): siRNA sense strand
uuugaagagggcugagaau

SEQ ID NO: 2231342 - RNA, 19 nt, Homo sapiens
  misc_RNA (1)...(19): siRNA sense strand
acagaagccaacuggguga

SEQ ID NO: 2231343 - RNA, 19 nt, Homo sapiens
  misc_RNA (1)...(19): siRNA sense strand
ugaucauccuagcaaacaa

SEQ ID NO: 2231344 - RNA, 19 nt, Homo sapiens
  misc_RNA (1)...(19): siRNA sense strand
ucuucuaaugggaauguaa

SEQ ID NO: 2231345 - RNA, 19 nt, Homo sapiens
  misc_RNA (1)...(19): siRNA sense strand
acagaagccaacuggguga

SEQ ID NO: 2231346 - RNA, 19 nt, Homo sapiens
  misc_RNA (1)...(19): siRNA sense strand
ugaucauccuagcaaacaa

SEQ ID NO: 2231347 - RNA, 19 nt, Homo sapiens
  misc_RNA (1)...(19): siRNA sense strand
ucuucuaaugggaauguaa

SEQ ID NO: 2231348 - RNA, 19 nt, Homo sapiens
  misc_RNA (1)...(19): siRNA sense strand
acagaagccaacuggguga

SEQ ID NO: 2231349 - RNA, 19 nt, Homo sapiens
  misc_RNA (1)...(19): siRNA sense strand
ugaucauccuagcaaacaa

SEQ ID NO: 2231350 - RNA, 19 nt, Homo sapiens
  misc_RNA (1)...(19): siRNA sense strand
ucuucuaaugggaauguaa

SEQ ID NO: 2231351 - RNA, 19 nt, Homo sapiens
  misc_RNA (1)...(19): siRNA sense strand
ggucagugcaucagcaaau

SEQ ID NO: 2231352 - RNA, 19 nt, Homo sapiens
  misc_RNA (1)...(19): siRNA sense strand
guguggaagugaacggcaa

SEQ ID NO: 2231353 - RNA, 19 nt, Homo sapiens
  misc_RNA (1)...(19): siRNA sense strand
uggaaaugcuuuugaaaca

SEQ ID NO: 2231354 - RNA, 19 nt, Homo sapiens
  misc_RNA (1)...(19): siRNA sense strand
cuucaggaacccagaacaa

SEQ ID NO: 2231355 - RNA, 19 nt, Homo sapiens
  misc_RNA (1)...(19): siRNA sense strand
agaugaagguacaauguuu

SEQ ID NO: 2231356 - RNA, 19 nt, Homo sapiens
  misc_RNA (1)...(19): siRNA sense strand
caguuuaggaacagaguca

SEQ ID NO: 2231357 - RNA, 19 nt, Homo sapiens
  misc_RNA (1)...(19): siRNA sense strand
caucggagugcgaggaaga

SEQ ID NO: 2231358 - RNA, 19 nt, Homo sapiens
  misc_RNA (1)...(19): siRNA sense strand
uccauaaaggaaagaguua

SEQ ID NO: 2231359 - RNA, 19 nt, Homo sapiens
  misc_RNA (1)...(19): siRNA sense strand
ugagagaagcaaaaggaua

SEQ ID NO: 2231360 - RNA, 19 nt, Homo sapiens
  misc_RNA (1)...(19): siRNA sense strand
aguacuuggucuuauguaa

SEQ ID NO: 2231361 - RNA, 19 nt, Homo sapiens
  misc_RNA (1)...(19): siRNA sense strand
caagaugagagaagcaaaa

SEQ ID NO: 2231362 - RNA, 19 nt, Homo sapiens
  misc_RNA (1)...(19): siRNA sense strand
guuggagaaacgacagaaa

SEQ ID NO: 2231363 - RNA, 19 nt, Homo sapiens
  misc_RNA (1)...(19): siRNA sense strand
augaggagcuggagcacuu

SEQ ID NO: 2231364 - RNA, 19 nt, Homo sapiens
  misc_RNA (1)...(19): siRNA sense strand
gaugcaaggaacuggaaaa

SEQ ID NO: 2231365 - RNA, 19 nt, Homo sapiens
  misc_RNA (1)...(19): siRNA sense strand
acacuugcaaugaaggaua

SEQ ID NO: 2231366 - RNA, 19 nt, Homo sapiens
  misc_RNA (1)...(19): siRNA sense strand
gugcgaggaagaaggguuu

SEQ ID NO: 2231367 - RNA, 19 nt, Homo sapiens
  misc_RNA (1)...(19): siRNA sense strand
guuuagcauuuguguggaa

SEQ ID NO: 2231368 - RNA, 19 nt, Homo sapiens
  misc_RNA (1)...(19): siRNA sense strand
cuacaggcugaguggaaau

SEQ ID NO: 2231369 - RNA, 19 nt, Homo sapiens
  misc_RNA (1)...(19): siRNA sense strand
uggacaauccugcuggaaa

SEQ ID NO: 2231370 - RNA, 19 nt, Homo sapiens
  misc_RNA (1)...(19): siRNA sense strand
ggaaguaccuugugccucu

SEQ ID NO: 2231371 - RNA, 19 nt, Homo sapiens
  misc_RNA (1)...(19): siRNA sense strand
ggagggauguggagagcgu

SEQ ID NO: 2231372 - RNA, 19 nt, Homo sapiens
  misc_RNA (1)...(19): siRNA sense strand
gaaucaagcaggagggguu

SEQ ID NO: 2231373 - RNA, 19 nt, Homo sapiens
  misc_RNA (1)...(19): siRNA sense strand
gcgaagaugaggagcugga

SEQ ID NO: 2231374 - RNA, 19 nt, Homo sapiens
  misc_RNA (1)...(19): siRNA sense strand
ccuauacauuccaggugaa

SEQ ID NO: 2231375 - RNA, 19 nt, Homo sapiens
  misc_RNA (1)...(19): siRNA sense strand
uugaagaguaucuggauga

SEQ ID NO: 2231376 - RNA, 19 nt, Homo sapiens
  misc_RNA (1)...(19): siRNA sense strand
aggaagaaggguuuagcau

SEQ ID NO: 2231377 - RNA, 19 nt, Homo sapiens
  misc_RNA (1)...(19): siRNA sense strand
ucaagaugagagaagcaaa

SEQ ID NO: 2231378 - RNA, 19 nt, Homo sapiens
  misc_RNA (1)...(19): siRNA sense strand
ggucaauguagaaaggugu

SEQ ID NO: 2231379 - RNA, 19 nt, Homo sapiens
  misc_RNA (1)...(19): siRNA sense strand
guuuaguggggauggaaaa

SEQ ID NO: 2231380 - RNA, 19 nt, Homo sapiens
  misc_RNA (1)...(19): siRNA sense strand
gggauuuauaggagaguuc

SEQ ID NO: 2231381 - RNA, 19 nt, Homo sapiens
  misc_RNA (1)...(19): siRNA sense strand
ggaaacaaaaggcgauauu

SEQ ID NO: 2231382 - RNA, 19 nt, Homo sapiens
  misc_RNA (1)...(19): siRNA sense strand
cagaauucaagauguguuu

SEQ ID NO: 2231383 - RNA, 19 nt, Homo sapiens
  misc_RNA (1)...(19): siRNA sense strand
ggauucugacugugaugaa

SEQ ID NO: 2231384 - RNA, 19 nt, Homo sapiens
  misc_RNA (1)...(19): siRNA sense strand
ccagauguggagaagauuu

SEQ ID NO: 2231385 - RNA, 19 nt, Homo sapiens
  misc_RNA (1)...(19): siRNA sense strand
ugggagaaacugcagaauu

SEQ ID NO: 2231386 - RNA, 19 nt, Homo sapiens
  misc_RNA (1)...(19): siRNA sense strand
aaagauuucuacaggcuga

SEQ ID NO: 2231387 - RNA, 19 nt, Homo sapiens
  misc_RNA (1)...(19): siRNA sense strand
gagaagcaucggagugcga

SEQ ID NO: 2231388 - RNA, 19 nt, Homo sapiens
  misc_RNA (1)...(19): siRNA sense strand
ggaugcaaggaacuggaaa

SEQ ID NO: 2231389 - RNA, 19 nt, Homo sapiens
  misc_RNA (1)...(19): siRNA sense strand
agucauggaugcaaggaac

SEQ ID NO: 2231390 - RNA, 19 nt, Homo sapiens
  misc_RNA (1)...(19): siRNA sense strand
ccuacaagaggauguccaa

SEQ ID NO: 2231391 - RNA, 19 nt, Homo sapiens
  misc_RNA (1)...(19): siRNA sense strand
cuggaaaugguuacaauga

SEQ ID NO: 2231392 - RNA, 19 nt, Homo sapiens
  misc_RNA (1)...(19): siRNA sense strand
ccucaagucauaaaacaaa

SEQ ID NO: 2231393 - RNA, 19 nt, Homo sapiens
  misc_RNA (1)...(19): siRNA sense strand
uggauggcauacagaguca

SEQ ID NO: 2231394 - RNA, 19 nt, Homo sapiens
  misc_RNA (1)...(19): siRNA sense strand
auacauuccaggugaaaau

SEQ ID NO: 2231395 - RNA, 19 nt, Homo sapiens
  misc_RNA (1)...(19): siRNA sense strand
aaacaaaagcugacaccuu

SEQ ID NO: 2231396 - RNA, 19 nt, Homo sapiens
  misc_RNA (1)...(19): siRNA sense strand
gcugggagaaacugcagaa

SEQ ID NO: 2231397 - RNA, 19 nt, Homo sapiens
  misc_RNA (1)...(19): siRNA sense strand
ugaugaagacagugcugau

SEQ ID NO: 2231398 - RNA, 19 nt, Homo sapiens
  misc_RNA (1)...(19): siRNA sense strand
cguagggaaucaagcagga

SEQ ID NO: 2231399 - RNA, 19 nt, Homo sapiens
  misc_RNA (1)...(19): siRNA sense strand
agggaugagaggcaagaua

SEQ ID NO: 2231400 - RNA, 19 nt, Homo sapiens
  misc_RNA (1)...(19): siRNA sense strand
aaagaaaagaugagaggga

SEQ ID NO: 2231401 - RNA, 19 nt, Homo sapiens
  misc_RNA (1)...(19): siRNA sense strand
acaucaacuuccucaucaa

SEQ ID NO: 2231402 - RNA, 19 nt, Homo sapiens
  misc_RNA (1)...(19): siRNA sense strand
cugcaguagagguggagau

SEQ ID NO: 2231403 - RNA, 19 nt, Homo sapiens
  misc_RNA (1)...(19): siRNA sense strand
gguacugagcauugcccaa

SEQ ID NO: 2231404 - RNA, 19 nt, Homo sapiens
  misc_RNA (1)...(19): siRNA sense strand
cuaaaggacugccagccaa

SEQ ID NO: 2231405 - RNA, 19 nt, Homo sapiens
  misc_RNA (1)...(19): siRNA sense strand
ccgagaugcauguggucca

SEQ ID NO: 2231406 - RNA, 19 nt, Homo sapiens
  misc_RNA (1)...(19): siRNA sense strand
ucuggaagccacaggacuu

SEQ ID NO: 2231407 - RNA, 19 nt, Homo sapiens
  misc_RNA (1)...(19): siRNA sense strand
ccuaugaccucgagggaca

SEQ ID NO: 2231408 - RNA, 19 nt, Homo sapiens
  misc_RNA (1)...(19): siRNA sense strand
ggaugagggugcagagcca

SEQ ID NO: 2231409 - RNA, 19 nt, Homo sapiens
  misc_RNA (1)...(19): siRNA sense strand
gggagauggaggaggcaga

SEQ ID NO: 2231410 - RNA, 19 nt, Homo sapiens
  misc_RNA (1)...(19): siRNA sense strand
cgcaagaagagcagggaca

SEQ ID NO: 2231411 - RNA, 19 nt, Homo sapiens
  misc_RNA (1)...(19): siRNA sense strand
ccgaggacagguagugaaa

SEQ ID NO: 2231412 - RNA, 19 nt, Homo sapiens
  misc_RNA (1)...(19): siRNA sense strand
aggaggaucgccugagaaa

SEQ ID NO: 2231413 - RNA, 19 nt, Homo sapiens
  misc_RNA (1)...(19): siRNA sense strand
ccaaggugguggaggagca

SEQ ID NO: 2231414 - RNA, 19 nt, Homo sapiens
  misc_RNA (1)...(19): siRNA sense strand
ucuauaacuaccuggauaa

SEQ ID NO: 2231415 - RNA, 19 nt, Homo sapiens
  misc_RNA (1)...(19): siRNA sense strand
uggaagcaaacgaggacua

SEQ ID NO: 2231416 - RNA, 19 nt, Homo sapiens
  misc_RNA (1)...(19): siRNA sense strand
acgaggacuaugaggacua

SEQ ID NO: 2231417 - RNA, 19 nt, Homo sapiens
  misc_RNA (1)...(19): siRNA sense strand
gagaagacaacccggaaaa

SEQ ID NO: 2231418 - RNA, 19 nt, Homo sapiens
  misc_RNA (1)...(19): siRNA sense strand
agaaauauguccuucccaa

SEQ ID NO: 2231419 - RNA, 19 nt, Homo sapiens
  misc_RNA (1)...(19): siRNA sense strand
ccagguacaucuaugggaa

SEQ ID NO: 2231420 - RNA, 19 nt, Homo sapiens
  misc_RNA (1)...(19): siRNA sense strand
gugaauggacagagccaca

SEQ ID NO: 2231421 - RNA, 19 nt, Homo sapiens
  misc_RNA (1)...(19): siRNA sense strand
cucuauaacuaccuggaua

SEQ ID NO: 2231422 - RNA, 19 nt, Homo sapiens
  misc_RNA (1)...(19): siRNA sense strand
augugaaggugggaggaaa

SEQ ID NO: 2231423 - RNA, 19 nt, Homo sapiens
  misc_RNA (1)...(19): siRNA sense strand
cugccaggaccuacagaua

SEQ ID NO: 2231424 - RNA, 19 nt, Homo sapiens
  misc_RNA (1)...(19): siRNA sense strand
ucgcuuggaaccugggaaa

SEQ ID NO: 2231425 - RNA, 19 nt, Homo sapiens
  misc_RNA (1)...(19): siRNA sense strand
aguacacgauggaagcaaa

SEQ ID NO: 2231426 - RNA, 19 nt, Homo sapiens
  misc_RNA (1)...(19): siRNA sense strand
ucucaaaggcagaguucca

SEQ ID NO: 2231427 - RNA, 19 nt, Homo sapiens
  misc_RNA (1)...(19): siRNA sense strand
aggcgauuaaugagaaauu

SEQ ID NO: 2231428 - RNA, 19 nt, Homo sapiens
  misc_RNA (1)...(19): siRNA sense strand
gcaaagcagagauggcaga

SEQ ID NO: 2231429 - RNA, 19 nt, Homo sapiens
  misc_RNA (1)...(19): siRNA sense strand
gugccaagcaguaccggaa

SEQ ID NO: 2231430 - RNA, 19 nt, Homo sapiens
  misc_RNA (1)...(19): siRNA sense strand
cgucaggguuacagccuca

SEQ ID NO: 2231431 - RNA, 19 nt, Homo sapiens
  misc_RNA (1)...(19): siRNA sense strand
cugcuaaucagaugcgcaa

SEQ ID NO: 2231432 - RNA, 19 nt, Homo sapiens
  misc_RNA (1)...(19): siRNA sense strand
aguacggcuuccagguuaa

SEQ ID NO: 2231433 - RNA, 19 nt, Homo sapiens
  misc_RNA (1)...(19): siRNA sense strand
ugucaaggccgcugcuaau

SEQ ID NO: 2231434 - RNA, 19 nt, Homo sapiens
  misc_RNA (1)...(19): siRNA sense strand
gggcaaggucuuugaagcu

SEQ ID NO: 2231435 - RNA, 19 nt, Homo sapiens
  misc_RNA (1)...(19): siRNA sense strand
acuaugaggacuaugagua

SEQ ID NO: 2231436 - RNA, 19 nt, Homo sapiens
  misc_RNA (1)...(19): siRNA sense strand
gguuacagccucagaucca

SEQ ID NO: 2231437 - RNA, 19 nt, Homo sapiens
  misc_RNA (1)...(19): siRNA sense strand
aaaggcgauuaaugagaaa

SEQ ID NO: 2231438 - RNA, 19 nt, Homo sapiens
  misc_RNA (1)...(19): siRNA sense strand
uguccaagguucugcagau

SEQ ID NO: 2231439 - RNA, 19 nt, Homo sapiens
  misc_RNA (1)...(19): siRNA sense strand
caguuugaggugaagaaau

SEQ ID NO: 2231440 - RNA, 19 nt, Homo sapiens
  misc_RNA (1)...(19): siRNA sense strand
uuaaugagaaauuggguca

SEQ ID NO: 2231441 - RNA, 19 nt, Homo sapiens
  misc_RNA (1)...(19): siRNA sense strand
ugagaaauugggucaguau

SEQ ID NO: 2231442 - RNA, 19 nt, Homo sapiens
  misc_RNA (1)...(19): siRNA sense strand
aggaggaggaccugauuga

SEQ ID NO: 2231443 - RNA, 19 nt, Homo sapiens
  misc_RNA (1)...(19): siRNA sense strand
cagaaaggcuacaugcgga

SEQ ID NO: 2231444 - RNA, 19 nt, Homo sapiens
  misc_RNA (1)...(19): siRNA sense strand
gcuuugaggcugugcagga

SEQ ID NO: 2231445 - RNA, 19 nt, Homo sapiens
  misc_RNA (1)...(19): siRNA sense strand
gcuuggaaccugggaaaga

SEQ ID NO: 2231446 - RNA, 19 nt, Homo sapiens
  misc_RNA (1)...(19): siRNA sense strand
gaggaugguaagaagacuu

SEQ ID NO: 2231447 - RNA, 19 nt, Homo sapiens
  misc_RNA (1)...(19): siRNA sense strand
uggaaacaguggaccgcuu

SEQ ID NO: 2231448 - RNA, 19 nt, Homo sapiens
  misc_RNA (1)...(19): siRNA sense strand
cugagaaacugcaggagac

SEQ ID NO: 2231449 - RNA, 19 nt, Homo sapiens
  misc_RNA (1)...(19): siRNA sense strand
aagcagagauggcagacca

SEQ ID NO: 2231450 - RNA, 19 nt, Homo sapiens
  misc_RNA (1)...(19): siRNA sense strand
ggaaccugggaaagaauau

SEQ ID NO: 2231451 - RNA, 19 nt, Homo sapiens
  misc_RNA (1)...(19): siRNA sense strand
guccaaaaccaaaggccua

SEQ ID NO: 2231452 - RNA, 19 nt, Homo sapiens
  misc_RNA (1)...(19): siRNA sense strand
ccuucuacuuuguggccuu

SEQ ID NO: 2231453 - RNA, 19 nt, Homo sapiens
  misc_RNA (1)...(19): siRNA sense strand
gcaucuggcggaacggcaa

SEQ ID NO: 2231454 - RNA, 19 nt, Homo sapiens
  misc_RNA (1)...(19): siRNA sense strand
augaaaugcaguuagacau

SEQ ID NO: 2231455 - RNA, 19 nt, Homo sapiens
  misc_RNA (1)...(19): siRNA sense strand
cugccaauuugcugagagu

SEQ ID NO: 2231456 - RNA, 19 nt, Homo sapiens
  misc_RNA (1)...(19): siRNA sense strand
gccaauuugcugagagucu

SEQ ID NO: 2231457 - RNA, 19 nt, Homo sapiens
  misc_RNA (1)...(19): siRNA sense strand
ccaacuuugaggugaagau

SEQ ID NO: 2231458 - RNA, 19 nt, Homo sapiens
  misc_RNA (1)...(19): siRNA sense strand
cagaaagagacuaagcugu

SEQ ID NO: 2231459 - RNA, 19 nt, Homo sapiens
  misc_RNA (1)...(19): siRNA sense strand
ugggagaugcgguguccaa

SEQ ID NO: 2231460 - RNA, 19 nt, Homo sapiens
  misc_RNA (1)...(19): siRNA sense strand
cacaacaaccucauggcaa

SEQ ID NO: 2231461 - RNA, 19 nt, Homo sapiens
  misc_RNA (1)...(19): siRNA sense strand
ggugggaggaaacagcaaa

SEQ ID NO: 2231462 - RNA, 19 nt, Homo sapiens
  misc_RNA (1)...(19): siRNA sense strand
ccuacagauagaagugaca

SEQ ID NO: 2231463 - RNA, 19 nt, Homo sapiens
  misc_RNA (1)...(19): siRNA sense strand
ucaugaaucgagagcccaa

SEQ ID NO: 2231464 - RNA, 19 nt, Homo sapiens
  misc_RNA (1)...(19): siRNA sense strand
ggauugaaaccacagccua

SEQ ID NO: 2231465 - RNA, 19 nt, Homo sapiens
  misc_RNA (1)...(19): siRNA sense strand
cagccaaggaugacccaga

SEQ ID NO: 2231466 - RNA, 19 nt, Homo sapiens
  misc_RNA (1)...(19): siRNA sense strand
cagucaugguggagaacuc

SEQ ID NO: 2231467 - RNA, 19 nt, Homo sapiens
  misc_RNA (1)...(19): siRNA sense strand
ccaagcuggugaauggaca

SEQ ID NO: 2231468 - RNA, 19 nt, Homo sapiens
  misc_RNA (1)...(19): siRNA sense strand
ugacaagccuguagcccau

SEQ ID NO: 2231469 - RNA, 19 nt, Homo sapiens
  misc_RNA (1)...(19): siRNA sense strand
ccaaugcccuccuggccaa

SEQ ID NO: 2231470 - RNA, 19 nt, Homo sapiens
  misc_RNA (1)...(19): siRNA sense strand
ccacagaauuggaggcuac

SEQ ID NO: 2231471 - RNA, 19 nt, Homo sapiens
  misc_RNA (1)...(19): siRNA sense strand
gcaaagaauucaaaccuga

SEQ ID NO: 2231472 - RNA, 19 nt, Homo sapiens
  misc_RNA (1)...(19): siRNA sense strand
ccccagaaaagauggaaaa

SEQ ID NO: 2231473 - RNA, 19 nt, Homo sapiens
  misc_RNA (1)...(19): siRNA sense strand
cugccaagacagugaaguu

SEQ ID NO: 2231474 - RNA, 19 nt, Homo sapiens
  misc_RNA (1)...(19): siRNA sense strand
agaaagaaacagauaacac

SEQ ID NO: 2231475 - RNA, 19 nt, Homo sapiens
  misc_RNA (1)...(19): siRNA sense strand
cuucagaggagaaagaaac

SEQ ID NO: 2231476 - RNA, 19 nt, Homo sapiens
  misc_RNA (1)...(19): siRNA sense strand
ccacagaauuggaggcuac

SEQ ID NO: 2231477 - RNA, 19 nt, Homo sapiens
  misc_RNA (1)...(19): siRNA sense strand
gcaaagaauucaaaccuga

SEQ ID NO: 2231478 - RNA, 19 nt, Homo sapiens
  misc_RNA (1)...(19): siRNA sense strand
ccccagaaaagauggaaaa

SEQ ID NO: 2231479 - RNA, 19 nt, Homo sapiens
  misc_RNA (1)...(19): siRNA sense strand
cugccaagacagugaaguu

SEQ ID NO: 2231480 - RNA, 19 nt, Homo sapiens
  misc_RNA (1)...(19): siRNA sense strand
agaaagaaacagauaacac

SEQ ID NO: 2231481 - RNA, 19 nt, Homo sapiens
  misc_RNA (1)...(19): siRNA sense strand
cuucagaggagaaagaaac

SEQ ID NO: 2231482 - RNA, 19 nt, Homo sapiens
  misc_RNA (1)...(19): siRNA sense strand
ccacagaauuggaggcuac

SEQ ID NO: 2231483 - RNA, 19 nt, Homo sapiens
  misc_RNA (1)...(19): siRNA sense strand
gcaaagaauucaaaccuga

SEQ ID NO: 2231484 - RNA, 19 nt, Homo sapiens
  misc_RNA (1)...(19): siRNA sense strand
ccccagaaaagauggaaaa

SEQ ID NO: 2231485 - RNA, 19 nt, Homo sapiens
  misc_RNA (1)...(19): siRNA sense strand
cugccaagacagugaaguu

SEQ ID NO: 2231486 - RNA, 19 nt, Homo sapiens
  misc_RNA (1)...(19): siRNA sense strand
agaaagaaacagauaacac

SEQ ID NO: 2231487 - RNA, 19 nt, Homo sapiens
  misc_RNA (1)...(19): siRNA sense strand
cuucagaggagaaagaaac

SEQ ID NO: 2231488 - RNA, 19 nt, Homo sapiens
  misc_RNA (1)...(19): siRNA sense strand
ccacagaauuggaggcuac

SEQ ID NO: 2231489 - RNA, 19 nt, Homo sapiens
  misc_RNA (1)...(19): siRNA sense strand
gcaaagaauucaaaccuga

SEQ ID NO: 2231490 - RNA, 19 nt, Homo sapiens
  misc_RNA (1)...(19): siRNA sense strand
ccccagaaaagauggaaaa

SEQ ID NO: 2231491 - RNA, 19 nt, Homo sapiens
  misc_RNA (1)...(19): siRNA sense strand
cugccaagacagugaaguu

SEQ ID NO: 2231492 - RNA, 19 nt, Homo sapiens
  misc_RNA (1)...(19): siRNA sense strand
agaaagaaacagauaacac

SEQ ID NO: 2231493 - RNA, 19 nt, Homo sapiens
  misc_RNA (1)...(19): siRNA sense strand
cuucagaggagaaagaaac

SEQ ID NO: 2231494 - RNA, 19 nt, Homo sapiens
  misc_RNA (1)...(19): siRNA sense strand
ccacagaauuggaggcuac

SEQ ID NO: 2231495 - RNA, 19 nt, Homo sapiens
  misc_RNA (1)...(19): siRNA sense strand
gcaaagaauucaaaccuga

SEQ ID NO: 2231496 - RNA, 19 nt, Homo sapiens
  misc_RNA (1)...(19): siRNA sense strand
ccccagaaaagauggaaaa

SEQ ID NO: 2231497 - RNA, 19 nt, Homo sapiens
  misc_RNA (1)...(19): siRNA sense strand
cugccaagacagugaaguu

SEQ ID NO: 2231498 - RNA, 19 nt, Homo sapiens
  misc_RNA (1)...(19): siRNA sense strand
agaaagaaacagauaacac

SEQ ID NO: 2231499 - RNA, 19 nt, Homo sapiens
  misc_RNA (1)...(19): siRNA sense strand
cuucagaggagaaagaaac

SEQ ID NO: 2231500 - RNA, 19 nt, Homo sapiens
  misc_RNA (1)...(19): siRNA sense strand
ccacagaauuggaggcuac

SEQ ID NO: 2231501 - RNA, 19 nt, Homo sapiens
  misc_RNA (1)...(19): siRNA sense strand
gcaaagaauucaaaccuga

SEQ ID NO: 2231502 - RNA, 19 nt, Homo sapiens
  misc_RNA (1)...(19): siRNA sense strand
ccccagaaaagauggaaaa

SEQ ID NO: 2231503 - RNA, 19 nt, Homo sapiens
  misc_RNA (1)...(19): siRNA sense strand
cugccaagacagugaaguu

SEQ ID NO: 2231504 - RNA, 19 nt, Homo sapiens
  misc_RNA (1)...(19): siRNA sense strand
agaaagaaacagauaacac

SEQ ID NO: 2231505 - RNA, 19 nt, Homo sapiens
  misc_RNA (1)...(19): siRNA sense strand
cuucagaggagaaagaaac

SEQ ID NO: 2231506 - RNA, 19 nt, Homo sapiens
  misc_RNA (1)...(19): siRNA sense strand
ccacagaauuggaggcuac

SEQ ID NO: 2231507 - RNA, 19 nt, Homo sapiens
  misc_RNA (1)...(19): siRNA sense strand
gcaaagaauucaaaccuga

SEQ ID NO: 2231508 - RNA, 19 nt, Homo sapiens
  misc_RNA (1)...(19): siRNA sense strand
ccccagaaaagauggaaaa

SEQ ID NO: 2231509 - RNA, 19 nt, Homo sapiens
  misc_RNA (1)...(19): siRNA sense strand
cugccaagacagugaaguu

SEQ ID NO: 2231510 - RNA, 19 nt, Homo sapiens
  misc_RNA (1)...(19): siRNA sense strand
agaaagaaacagauaacac

SEQ ID NO: 2231511 - RNA, 19 nt, Homo sapiens
  misc_RNA (1)...(19): siRNA sense strand
cuucagaggagaaagaaac

SEQ ID NO: 2231512 - RNA, 19 nt, Homo sapiens
  misc_RNA (1)...(19): siRNA sense strand
ccacagaauuggaggcuac

SEQ ID NO: 2231513 - RNA, 19 nt, Homo sapiens
  misc_RNA (1)...(19): siRNA sense strand
gcaaagaauucaaaccuga

SEQ ID NO: 2231514 - RNA, 19 nt, Homo sapiens
  misc_RNA (1)...(19): siRNA sense strand
ccccagaaaagauggaaaa

SEQ ID NO: 2231515 - RNA, 19 nt, Homo sapiens
  misc_RNA (1)...(19): siRNA sense strand
cugccaagacagugaaguu

SEQ ID NO: 2231516 - RNA, 19 nt, Homo sapiens
  misc_RNA (1)...(19): siRNA sense strand
agaaagaaacagauaacac

SEQ ID NO: 2231517 - RNA, 19 nt, Homo sapiens
  misc_RNA (1)...(19): siRNA sense strand
cuucagaggagaaagaaac

SEQ ID NO: 2231518 - RNA, 19 nt, Homo sapiens
  misc_RNA (1)...(19): siRNA sense strand
agaccgacuaccagaguuu

SEQ ID NO: 2231519 - RNA, 19 nt, Homo sapiens
  misc_RNA (1)...(19): siRNA sense strand
ccauccagcccaaggccaa

SEQ ID NO: 2231520 - RNA, 19 nt, Homo sapiens
  misc_RNA (1)...(19): siRNA sense strand
uccgaaagcuggaugggau

SEQ ID NO: 2231521 - RNA, 19 nt, Homo sapiens
  misc_RNA (1)...(19): siRNA sense strand
ccaaggagcaacugggaga

SEQ ID NO: 2231522 - RNA, 19 nt, Homo sapiens
  misc_RNA (1)...(19): siRNA sense strand
cgugggaggccaagagcau

SEQ ID NO: 2231523 - RNA, 19 nt, Homo sapiens
  misc_RNA (1)...(19): siRNA sense strand
cgacaggaccagugcaucu

SEQ ID NO: 2231524 - RNA, 19 nt, Homo sapiens
  misc_RNA (1)...(19): siRNA sense strand
ccaacaagacagaggacac

SEQ ID NO: 2231525 - RNA, 19 nt, Homo sapiens
  misc_RNA (1)...(19): siRNA sense strand
agcacgagaaggagaggaa

SEQ ID NO: 2231526 - RNA, 19 nt, Homo sapiens
  misc_RNA (1)...(19): siRNA sense strand
guucaggagauccaagcaa

SEQ ID NO: 2231527 - RNA, 19 nt, Homo sapiens
  misc_RNA (1)...(19): siRNA sense strand
cagauacgugggaggccaa

SEQ ID NO: 2231528 - RNA, 19 nt, Homo sapiens
  misc_RNA (1)...(19): siRNA sense strand
ccaaggagcaacugggaga

SEQ ID NO: 2231529 - RNA, 19 nt, Homo sapiens
  misc_RNA (1)...(19): siRNA sense strand
ccaacaagacagaggacac

SEQ ID NO: 2231530 - RNA, 19 nt, Homo sapiens
  misc_RNA (1)...(19): siRNA sense strand
agcacgagaaggagaggaa

SEQ ID NO: 2231531 - RNA, 19 nt, Homo sapiens
  misc_RNA (1)...(19): siRNA sense strand
guucaggagauccaagcaa

SEQ ID NO: 2231532 - RNA, 19 nt, Homo sapiens
  misc_RNA (1)...(19): siRNA sense strand
gcaaugaggcugaugggau

SEQ ID NO: 2231533 - RNA, 19 nt, Homo sapiens
  misc_RNA (1)...(19): siRNA sense strand
cuuucacaguggacaguaa

SEQ ID NO: 2231534 - RNA, 19 nt, Homo sapiens
  misc_RNA (1)...(19): siRNA sense strand
gccuaaaggugcugcagga

SEQ ID NO: 2231535 - RNA, 19 nt, Homo sapiens
  misc_RNA (1)...(19): siRNA sense strand
gccuauuaauguuggagau

SEQ ID NO: 2231536 - RNA, 19 nt, Homo sapiens
  misc_RNA (1)...(19): siRNA sense strand
caaugaggcugaugggaug

SEQ ID NO: 2231537 - RNA, 19 nt, Homo sapiens
  misc_RNA (1)...(19): siRNA sense strand
ugaccgaggcagagcgacu

SEQ ID NO: 2231538 - RNA, 19 nt, Homo sapiens
  misc_RNA (1)...(19): siRNA sense strand
augcagaaguucaaggaga

SEQ ID NO: 2231539 - RNA, 19 nt, Homo sapiens
  misc_RNA (1)...(19): siRNA sense strand
uguacgugaucgugggcaa

SEQ ID NO: 2231540 - RNA, 19 nt, Homo sapiens
  misc_RNA (1)...(19): siRNA sense strand
ccaugaaggaguacagcga

SEQ ID NO: 2231541 - RNA, 19 nt, Homo sapiens
  misc_RNA (1)...(19): siRNA sense strand
ccuucauggccuacagcaa

SEQ ID NO: 2231542 - RNA, 19 nt, Homo sapiens
  misc_RNA (1)...(19): siRNA sense strand
cggaacaacgagaugcaga

SEQ ID NO: 2231543 - RNA, 19 nt, Homo sapiens
  misc_RNA (1)...(19): siRNA sense strand
aaggagauccagacggaga

SEQ ID NO: 2231544 - RNA, 19 nt, Homo sapiens
  misc_RNA (1)...(19): siRNA sense strand
ucaaggagauccagacgga

SEQ ID NO: 2231545 - RNA, 19 nt, Homo sapiens
  misc_RNA (1)...(19): siRNA sense strand
gggagguguaccagggagu

SEQ ID NO: 2231546 - RNA, 19 nt, Homo sapiens
  misc_RNA (1)...(19): siRNA sense strand
acgagaugcagaaguucaa

SEQ ID NO: 2231547 - RNA, 19 nt, Homo sapiens
  misc_RNA (1)...(19): siRNA sense strand
ccguggaacgccagauuca

SEQ ID NO: 2231548 - RNA, 19 nt, Homo sapiens
  misc_RNA (1)...(19): siRNA sense strand
ugggcaagcgcuuccgaaa

SEQ ID NO: 2231549 - RNA, 19 nt, Homo sapiens
  misc_RNA (1)...(19): siRNA sense strand
cagcugaagcagaggaaca

SEQ ID NO: 2231550 - RNA, 19 nt, Homo sapiens
  misc_RNA (1)...(19): siRNA sense strand
uggacaaggaugacagcaa

SEQ ID NO: 2231551 - RNA, 19 nt, Homo sapiens
  misc_RNA (1)...(19): siRNA sense strand
gcaccuuggcacagcugaa

SEQ ID NO: 2231552 - RNA, 19 nt, Homo sapiens
  misc_RNA (1)...(19): siRNA sense strand
ccuacgagggccuggacau

SEQ ID NO: 2231553 - RNA, 19 nt, Homo sapiens
  misc_RNA (1)...(19): siRNA sense strand
ugaaguggucuguagguga

SEQ ID NO: 2231554 - RNA, 19 nt, Homo sapiens
  misc_RNA (1)...(19): siRNA sense strand
cagcugaagcagaggaaca

SEQ ID NO: 2231555 - RNA, 19 nt, Homo sapiens
  misc_RNA (1)...(19): siRNA sense strand
uggacaaggaugacagcaa

SEQ ID NO: 2231556 - RNA, 19 nt, Homo sapiens
  misc_RNA (1)...(19): siRNA sense strand
gcaccuuggcacagcugaa

SEQ ID NO: 2231557 - RNA, 19 nt, Homo sapiens
  misc_RNA (1)...(19): siRNA sense strand
ccuacgagggccuggacau

SEQ ID NO: 2231558 - RNA, 19 nt, Homo sapiens
  misc_RNA (1)...(19): siRNA sense strand
ugaaguggucuguagguga

SEQ ID NO: 2231559 - RNA, 19 nt, Homo sapiens
  misc_RNA (1)...(19): siRNA sense strand
agauguagauguagaucaa

SEQ ID NO: 2231560 - RNA, 19 nt, Homo sapiens
  misc_RNA (1)...(19): siRNA sense strand
cuguagagauauugaugaa

SEQ ID NO: 2231561 - RNA, 19 nt, Homo sapiens
  misc_RNA (1)...(19): siRNA sense strand
cgccuugaauuuagagaaa

SEQ ID NO: 2231562 - RNA, 19 nt, Homo sapiens
  misc_RNA (1)...(19): siRNA sense strand
ccuugaauuuagagaaaga

SEQ ID NO: 2231563 - RNA, 19 nt, Homo sapiens
  misc_RNA (1)...(19): siRNA sense strand
agucaauauccaugugaaa

SEQ ID NO: 2231564 - RNA, 19 nt, Homo sapiens
  misc_RNA (1)...(19): siRNA sense strand
guucauagacgcaggccaa

SEQ ID NO: 2231565 - RNA, 19 nt, Homo sapiens
  misc_RNA (1)...(19): siRNA sense strand
augaaugcuuggaggacaa

SEQ ID NO: 2231566 - RNA, 19 nt, Homo sapiens
  misc_RNA (1)...(19): siRNA sense strand
guauaugcuacgagggcua

SEQ ID NO: 2231567 - RNA, 19 nt, Homo sapiens
  misc_RNA (1)...(19): siRNA sense strand
ccaaagaagaaaagaaaga

SEQ ID NO: 2231568 - RNA, 19 nt, Homo sapiens
  misc_RNA (1)...(19): siRNA sense strand
ggacaagaaaucugcaaaa

SEQ ID NO: 2231569 - RNA, 19 nt, Homo sapiens
  misc_RNA (1)...(19): siRNA sense strand
ccaacaggccagaagacaa

SEQ ID NO: 2231570 - RNA, 19 nt, Homo sapiens
  misc_RNA (1)...(19): siRNA sense strand
ccuccaaauuucacaggaa

SEQ ID NO: 2231571 - RNA, 19 nt, Homo sapiens
  misc_RNA (1)...(19): siRNA sense strand
gaaccaaacgucugcgcaa

SEQ ID NO: 2231572 - RNA, 19 nt, Homo sapiens
  misc_RNA (1)...(19): siRNA sense strand
ccaggaaaccauuggguca

SEQ ID NO: 2231573 - RNA, 19 nt, Homo sapiens
  misc_RNA (1)...(19): siRNA sense strand
guguaaacgggcagugcaa

SEQ ID NO: 2231574 - RNA, 19 nt, Homo sapiens
  misc_RNA (1)...(19): siRNA sense strand
agaucaacccaaagaagaa

SEQ ID NO: 2231575 - RNA, 19 nt, Homo sapiens
  misc_RNA (1)...(19): siRNA sense strand
ccucaauggaugugaaaau

SEQ ID NO: 2231576 - RNA, 19 nt, Homo sapiens
  misc_RNA (1)...(19): siRNA sense strand
cgaacaaauagaagaaacu

SEQ ID NO: 2231577 - RNA, 19 nt, Homo sapiens
  misc_RNA (1)...(19): siRNA sense strand
gugugaagacauugaugaa

SEQ ID NO: 2231578 - RNA, 19 nt, Homo sapiens
  misc_RNA (1)...(19): siRNA sense strand
ccaucaccauguagguaaa

SEQ ID NO: 2231579 - RNA, 19 nt, Homo sapiens
  misc_RNA (1)...(19): siRNA sense strand
cagcuaaagaccaguguga

SEQ ID NO: 2231580 - RNA, 19 nt, Homo sapiens
  misc_RNA (1)...(19): siRNA sense strand
ccagaugagcaguguguga

SEQ ID NO: 2231581 - RNA, 19 nt, Homo sapiens
  misc_RNA (1)...(19): siRNA sense strand
agaggaaauguguggauau

SEQ ID NO: 2231582 - RNA, 19 nt, Homo sapiens
  misc_RNA (1)...(19): siRNA sense strand
gcgauugcuuugaugggua

SEQ ID NO: 2231583 - RNA, 19 nt, Homo sapiens
  misc_RNA (1)...(19): siRNA sense strand
agugaacaacagaggaaau

SEQ ID NO: 2231584 - RNA, 19 nt, Homo sapiens
  misc_RNA (1)...(19): siRNA sense strand
gcuaaagaccagugugaag

SEQ ID NO: 2231585 - RNA, 19 nt, Homo sapiens
  misc_RNA (1)...(19): siRNA sense strand
cugugaaacugcagugcuu

SEQ ID NO: 2231586 - RNA, 19 nt, Homo sapiens
  misc_RNA (1)...(19): siRNA sense strand
ugauauggaugaaugucaa

SEQ ID NO: 2231587 - RNA, 19 nt, Homo sapiens
  misc_RNA (1)...(19): siRNA sense strand
ugucagaacagcugugaga

SEQ ID NO: 2231588 - RNA, 19 nt, Homo sapiens
  misc_RNA (1)...(19): siRNA sense strand
auugauggccaguguguua

SEQ ID NO: 2231589 - RNA, 19 nt, Homo sapiens
  misc_RNA (1)...(19): siRNA sense strand
cagugcaguucaagggaca

SEQ ID NO: 2231590 - RNA, 19 nt, Homo sapiens
  misc_RNA (1)...(19): siRNA sense strand
uucauuggaucaagagaaa

SEQ ID NO: 2231591 - RNA, 19 nt, Homo sapiens
  misc_RNA (1)...(19): siRNA sense strand
guaaacgggcagugcaaaa

SEQ ID NO: 2231592 - RNA, 19 nt, Homo sapiens
  misc_RNA (1)...(19): siRNA sense strand
gcucaugggcagugcagga

SEQ ID NO: 2231593 - RNA, 19 nt, Homo sapiens
  misc_RNA (1)...(19): siRNA sense strand
ugaccugugucgauguaaa

SEQ ID NO: 2231594 - RNA, 19 nt, Homo sapiens
  misc_RNA (1)...(19): siRNA sense strand
ucagugaacaacagaggaa

SEQ ID NO: 2231595 - RNA, 19 nt, Homo sapiens
  misc_RNA (1)...(19): siRNA sense strand
agaccagugugaagacauu

SEQ ID NO: 2231596 - RNA, 19 nt, Homo sapiens
  misc_RNA (1)...(19): siRNA sense strand
gugugugugaccaggguua

SEQ ID NO: 2231597 - RNA, 19 nt, Homo sapiens
  misc_RNA (1)...(19): siRNA sense strand
gaccaggguuacagagcau

SEQ ID NO: 2231598 - RNA, 19 nt, Homo sapiens
  misc_RNA (1)...(19): siRNA sense strand
agucaaacgaacaaauaga

SEQ ID NO: 2231599 - RNA, 19 nt, Homo sapiens
  misc_RNA (1)...(19): siRNA sense strand
cuucauuggaucaagagaa

SEQ ID NO: 2231600 - RNA, 19 nt, Homo sapiens
  misc_RNA (1)...(19): siRNA sense strand
guucaugccacaaaggcua

SEQ ID NO: 2231601 - RNA, 19 nt, Homo sapiens
  misc_RNA (1)...(19): siRNA sense strand
ggaguuacaggcugaggaa

SEQ ID NO: 2231602 - RNA, 19 nt, Homo sapiens
  misc_RNA (1)...(19): siRNA sense strand
guuuccagguauagugauu

SEQ ID NO: 2231603 - RNA, 19 nt, Homo sapiens
  misc_RNA (1)...(19): siRNA sense strand
cagcaaggagucaaaguga

SEQ ID NO: 2231604 - RNA, 19 nt, Homo sapiens
  misc_RNA (1)...(19): siRNA sense strand
ucaauauccaugugaaaca

SEQ ID NO: 2231605 - RNA, 19 nt, Homo sapiens
  misc_RNA (1)...(19): siRNA sense strand
cagagaggagacugcauua

SEQ ID NO: 2231606 - RNA, 19 nt, Homo sapiens
  misc_RNA (1)...(19): siRNA sense strand
gcugggaacaucugaguga

SEQ ID NO: 2231607 - RNA, 19 nt, Homo sapiens
  misc_RNA (1)...(19): siRNA sense strand
ccacaagcacuguagagau

SEQ ID NO: 2231608 - RNA, 19 nt, Homo sapiens
  misc_RNA (1)...(19): siRNA sense strand
cuaaauagcuuugaggagu

SEQ ID NO: 2231609 - RNA, 19 nt, Homo sapiens
  misc_RNA (1)...(19): siRNA sense strand
acaucagguuucaagaauu

SEQ ID NO: 2231610 - RNA, 19 nt, Homo sapiens
  misc_RNA (1)...(19): siRNA sense strand
ccagaaaugccccaagaaa

SEQ ID NO: 2231611 - RNA, 19 nt, Homo sapiens
  misc_RNA (1)...(19): siRNA sense strand
gcuucuacgucuagugcca

SEQ ID NO: 2231612 - RNA, 19 nt, Homo sapiens
  misc_RNA (1)...(19): siRNA sense strand
ccguacgugugaagauauu

SEQ ID NO: 2231613 - RNA, 19 nt, Homo sapiens
  misc_RNA (1)...(19): siRNA sense strand
gguguguggaugugaauga

SEQ ID NO: 2231614 - RNA, 19 nt, Homo sapiens
  misc_RNA (1)...(19): siRNA sense strand
acgagugccuggaaccaaa

SEQ ID NO: 2231615 - RNA, 19 nt, Homo sapiens
  misc_RNA (1)...(19): siRNA sense strand
cggauggauuucagcuaga

SEQ ID NO: 2231616 - RNA, 19 nt, Homo sapiens
  misc_RNA (1)...(19): siRNA sense strand
ccgcaaggggagugccuaa

SEQ ID NO: 2231617 - RNA, 19 nt, Homo sapiens
  misc_RNA (1)...(19): siRNA sense strand
acccaaagaagaaaagaaa

SEQ ID NO: 2231618 - RNA, 19 nt, Homo sapiens
  misc_RNA (1)...(19): siRNA sense strand
auuuagagaaagacaguga

SEQ ID NO: 2231619 - RNA, 19 nt, Homo sapiens
  misc_RNA (1)...(19): siRNA sense strand
ccugaagcuucuacgucua

SEQ ID NO: 2231620 - RNA, 19 nt, Homo sapiens
  misc_RNA (1)...(19): siRNA sense strand
agaaagaauugcaggcaca

SEQ ID NO: 2231621 - RNA, 19 nt, Homo sapiens
  misc_RNA (1)...(19): siRNA sense strand
ggaaacagauucauggaga

SEQ ID NO: 2231622 - RNA, 19 nt, Homo sapiens
  misc_RNA (1)...(19): siRNA sense strand
cuauugaaguuguaagcaa

SEQ ID NO: 2231623 - RNA, 19 nt, Homo sapiens
  misc_RNA (1)...(19): siRNA sense strand
acagauucauggagaacaa

SEQ ID NO: 2231624 - RNA, 19 nt, Homo sapiens
  misc_RNA (1)...(19): siRNA sense strand
cauuaggaauaaagggaca

SEQ ID NO: 2231625 - RNA, 19 nt, Homo sapiens
  misc_RNA (1)...(19): siRNA sense strand
ccaucaaggugaacgguga

SEQ ID NO: 2231626 - RNA, 19 nt, Homo sapiens
  misc_RNA (1)...(19): siRNA sense strand
cugcauuggagcugggaau

SEQ ID NO: 2231627 - RNA, 19 nt, Homo sapiens
  misc_RNA (1)...(19): siRNA sense strand
gguucagaauguugcaaau

SEQ ID NO: 2231628 - RNA, 19 nt, Homo sapiens
  misc_RNA (1)...(19): siRNA sense strand
ccaaguucccugagccaaa

SEQ ID NO: 2231629 - RNA, 19 nt, Homo sapiens
  misc_RNA (1)...(19): siRNA sense strand
gccagaagggacaaagaua

SEQ ID NO: 2231630 - RNA, 19 nt, Homo sapiens
  misc_RNA (1)...(19): siRNA sense strand
gaucaguaggauugaaaca

SEQ ID NO: 2231631 - RNA, 19 nt, Homo sapiens
  misc_RNA (1)...(19): siRNA sense strand
gaauaaagaguuuggugga

SEQ ID NO: 2231632 - RNA, 19 nt, Homo sapiens
  misc_RNA (1)...(19): siRNA sense strand
agguugaggaagaaagaau

SEQ ID NO: 2231633 - RNA, 19 nt, Homo sapiens
  misc_RNA (1)...(19): siRNA sense strand
gugccuuucauuaggaaua

SEQ ID NO: 2231634 - RNA, 19 nt, Homo sapiens
  misc_RNA (1)...(19): siRNA sense strand
gugcacuccauaaggaaua

SEQ ID NO: 2231635 - RNA, 19 nt, Homo sapiens
  misc_RNA (1)...(19): siRNA sense strand
acuccauggugaaggaaaa

SEQ ID NO: 2231636 - RNA, 19 nt, Homo sapiens
  misc_RNA (1)...(19): siRNA sense strand
uguagaaaaccuagacaaa

SEQ ID NO: 2231637 - RNA, 19 nt, Homo sapiens
  misc_RNA (1)...(19): siRNA sense strand
cagaagggacaaagauaca

SEQ ID NO: 2231638 - RNA, 19 nt, Homo sapiens
  misc_RNA (1)...(19): siRNA sense strand
aggaagucacucacagaaa

SEQ ID NO: 2231639 - RNA, 19 nt, Homo sapiens
  misc_RNA (1)...(19): siRNA sense strand
gagccaaauuucuggagca

SEQ ID NO: 2231640 - RNA, 19 nt, Homo sapiens
  misc_RNA (1)...(19): siRNA sense strand
gagaacaacuugauccaca

SEQ ID NO: 2231641 - RNA, 19 nt, Homo sapiens
  misc_RNA (1)...(19): siRNA sense strand
agauugaacuccaugguga

SEQ ID NO: 2231642 - RNA, 19 nt, Homo sapiens
  misc_RNA (1)...(19): siRNA sense strand
aagcaagccagaagggaca

SEQ ID NO: 2231643 - RNA, 19 nt, Homo sapiens
  misc_RNA (1)...(19): siRNA sense strand
ccuguuauuuggaagggaa

SEQ ID NO: 2231644 - RNA, 19 nt, Homo sapiens
  misc_RNA (1)...(19): siRNA sense strand
ugaggcaagucaaggaaau

SEQ ID NO: 2231645 - RNA, 19 nt, Homo sapiens
  misc_RNA (1)...(19): siRNA sense strand
aaucccagcuggagaaaca

SEQ ID NO: 2231646 - RNA, 19 nt, Homo sapiens
  misc_RNA (1)...(19): siRNA sense strand
cuaccaaaucugcgucaua

SEQ ID NO: 2231647 - RNA, 19 nt, Homo sapiens
  misc_RNA (1)...(19): siRNA sense strand
auggaaagauccuguucua

SEQ ID NO: 2231648 - RNA, 19 nt, Homo sapiens
  misc_RNA (1)...(19): siRNA sense strand
agagugaagucuuggcuga

SEQ ID NO: 2231649 - RNA, 19 nt, Homo sapiens
  misc_RNA (1)...(19): siRNA sense strand
gagcuuggagccaggaaau

SEQ ID NO: 2231650 - RNA, 19 nt, Homo sapiens
  misc_RNA (1)...(19): siRNA sense strand
acagaaaccgaguugacua

SEQ ID NO: 2231651 - RNA, 19 nt, Homo sapiens
  misc_RNA (1)...(19): siRNA sense strand
ccgaguugacuaagccuaa

SEQ ID NO: 2231652 - RNA, 19 nt, Homo sapiens
  misc_RNA (1)...(19): siRNA sense strand
gagaaaucccagcuggaga

SEQ ID NO: 2231653 - RNA, 19 nt, Homo sapiens
  misc_RNA (1)...(19): siRNA sense strand
gauugaacuccauggugaa

SEQ ID NO: 2231654 - RNA, 19 nt, Homo sapiens
  misc_RNA (1)...(19): siRNA sense strand
gcaccagccaacagcacaa

SEQ ID NO: 2231655 - RNA, 19 nt, Homo sapiens
  misc_RNA (1)...(19): siRNA sense strand
cagaucaguaggauugaaa

SEQ ID NO: 2231656 - RNA, 19 nt, Homo sapiens
  misc_RNA (1)...(19): siRNA sense strand
gguugaggaagaaagaauu

SEQ ID NO: 2231657 - RNA, 19 nt, Homo sapiens
  misc_RNA (1)...(19): siRNA sense strand
cuguuauuuggaagggaaa

SEQ ID NO: 2231658 - RNA, 19 nt, Homo sapiens
  misc_RNA (1)...(19): siRNA sense strand
gugaaggcaugaaaggcau

SEQ ID NO: 2231659 - RNA, 19 nt, Homo sapiens
  misc_RNA (1)...(19): siRNA sense strand
uugaaaagucaguggauca

SEQ ID NO: 2231660 - RNA, 19 nt, Homo sapiens
  misc_RNA (1)...(19): siRNA sense strand
agaaaucccagcuggagaa

SEQ ID NO: 2231661 - RNA, 19 nt, Homo sapiens
  misc_RNA (1)...(19): siRNA sense strand
gaaauggagugaauggagu

SEQ ID NO: 2231662 - RNA, 19 nt, Homo sapiens
  misc_RNA (1)...(19): siRNA sense strand
ggugaaggccccagugcua

SEQ ID NO: 2231663 - RNA, 19 nt, Homo sapiens
  misc_RNA (1)...(19): siRNA sense strand
agucaguggaucaaggaga

SEQ ID NO: 2231664 - RNA, 19 nt, Homo sapiens
  misc_RNA (1)...(19): siRNA sense strand
ccuuuuagauccaggugaa

SEQ ID NO: 2231665 - RNA, 19 nt, Homo sapiens
  misc_RNA (1)...(19): siRNA sense strand
agccaaauuucuggagcaa

SEQ ID NO: 2231666 - RNA, 19 nt, Homo sapiens
  misc_RNA (1)...(19): siRNA sense strand
cuuaaaguuuccaccaauu

SEQ ID NO: 2231667 - RNA, 19 nt, Homo sapiens
  misc_RNA (1)...(19): siRNA sense strand
uaucaaaacugcaugccaa

SEQ ID NO: 2231668 - RNA, 19 nt, Homo sapiens
  misc_RNA (1)...(19): siRNA sense strand
guaccaugucuaucugaaa

SEQ ID NO: 2231669 - RNA, 19 nt, Homo sapiens
  misc_RNA (1)...(19): siRNA sense strand
ucagaauguugcaaauaca

SEQ ID NO: 2231670 - RNA, 19 nt, Homo sapiens
  misc_RNA (1)...(19): siRNA sense strand
caggauacucucaggaacu

SEQ ID NO: 2231671 - RNA, 19 nt, Homo sapiens
  misc_RNA (1)...(19): siRNA sense strand
guucagaauguugcaaaua

SEQ ID NO: 2231672 - RNA, 19 nt, Homo sapiens
  misc_RNA (1)...(19): siRNA sense strand
cccagaugcuauugaaguu

SEQ ID NO: 2231673 - RNA, 19 nt, Homo sapiens
  misc_RNA (1)...(19): siRNA sense strand
uggaagggaaacagauuca

SEQ ID NO: 2231674 - RNA, 19 nt, Homo sapiens
  misc_RNA (1)...(19): siRNA sense strand
ugucagugaaggcaugaaa

SEQ ID NO: 2231675 - RNA, 19 nt, Homo sapiens
  misc_RNA (1)...(19): siRNA sense strand
cuugugaaaccgaggacuu

SEQ ID NO: 2231676 - RNA, 19 nt, Homo sapiens
  misc_RNA (1)...(19): siRNA sense strand
aaggaagagaagugucaau

SEQ ID NO: 2231677 - RNA, 19 nt, Homo sapiens
  misc_RNA (1)...(19): siRNA sense strand
gaacacuccucgaugcuga

SEQ ID NO: 2231678 - RNA, 19 nt, Homo sapiens
  misc_RNA (1)...(19): siRNA sense strand
uaaagaguuugguggacga

SEQ ID NO: 2231679 - RNA, 19 nt, Homo sapiens
  misc_RNA (1)...(19): siRNA sense strand
cggaaagucaagagcgugu

SEQ ID NO: 2231680 - RNA, 19 nt, Homo sapiens
  misc_RNA (1)...(19): siRNA sense strand
gcuucgggccagacagcaa

SEQ ID NO: 2231681 - RNA, 19 nt, Homo sapiens
  misc_RNA (1)...(19): siRNA sense strand
acaucgcgguggaggaaga

SEQ ID NO: 2231682 - RNA, 19 nt, Homo sapiens
  misc_RNA (1)...(19): siRNA sense strand
ccaaagucuacgugggugu

SEQ ID NO: 2231683 - RNA, 19 nt, Homo sapiens
  misc_RNA (1)...(19): siRNA sense strand
ugaaagaccugcuggagcu

SEQ ID NO: 2231684 - RNA, 19 nt, Homo sapiens
  misc_RNA (1)...(19): siRNA sense strand
agucuacgugggugugaaa

SEQ ID NO: 2231685 - RNA, 19 nt, Homo sapiens
  misc_RNA (1)...(19): siRNA sense strand
acaucacgcagaaggacaa

SEQ ID NO: 2231686 - RNA, 19 nt, Homo sapiens
  misc_RNA (1)...(19): siRNA sense strand
aaggacaacuacagggucu

SEQ ID NO: 2231687 - RNA, 19 nt, Homo sapiens
  misc_RNA (1)...(19): siRNA sense strand
cggaaagucaagagcgugu

SEQ ID NO: 2231688 - RNA, 19 nt, Homo sapiens
  misc_RNA (1)...(19): siRNA sense strand
gcuucgggccagacagcaa

SEQ ID NO: 2231689 - RNA, 19 nt, Homo sapiens
  misc_RNA (1)...(19): siRNA sense strand
acaucgcgguggaggaaga

SEQ ID NO: 2231690 - RNA, 19 nt, Homo sapiens
  misc_RNA (1)...(19): siRNA sense strand
ccaaagucuacgugggugu

SEQ ID NO: 2231691 - RNA, 19 nt, Homo sapiens
  misc_RNA (1)...(19): siRNA sense strand
agucuacgugggugugaaa

SEQ ID NO: 2231692 - RNA, 19 nt, Homo sapiens
  misc_RNA (1)...(19): siRNA sense strand
cuauauacaucaaaggaga

SEQ ID NO: 2231693 - RNA, 19 nt, Homo sapiens
  misc_RNA (1)...(19): siRNA sense strand
gagaauaccagucggguca

SEQ ID NO: 2231694 - RNA, 19 nt, Homo sapiens
  misc_RNA (1)...(19): siRNA sense strand
aggcaaucauggaguucaa

SEQ ID NO: 2231695 - RNA, 19 nt, Homo sapiens
  misc_RNA (1)...(19): siRNA sense strand
ccguggacguggacagcaa

SEQ ID NO: 2231696 - RNA, 19 nt, Homo sapiens
  misc_RNA (1)...(19): siRNA sense strand
gagaaaugauggugaggac

SEQ ID NO: 2231697 - RNA, 19 nt, Homo sapiens
  misc_RNA (1)...(19): siRNA sense strand
ccguggaggccgugaacau

SEQ ID NO: 2231698 - RNA, 19 nt, Homo sapiens
  misc_RNA (1)...(19): siRNA sense strand
agaccaaaguggagccguu

SEQ ID NO: 2231699 - RNA, 19 nt, Homo sapiens
  misc_RNA (1)...(19): siRNA sense strand
cagagaauccagugugaca

SEQ ID NO: 2231700 - RNA, 19 nt, Homo sapiens
  misc_RNA (1)...(19): siRNA sense strand
acaucaagaccucgcauaa

SEQ ID NO: 2231701 - RNA, 19 nt, Homo sapiens
  misc_RNA (1)...(19): siRNA sense strand
gggagaagaucuuugcgau

SEQ ID NO: 2231702 - RNA, 19 nt, Homo sapiens
  misc_RNA (1)...(19): siRNA sense strand
uggagcugccggugaaaua

SEQ ID NO: 2231703 - RNA, 19 nt, Homo sapiens
  misc_RNA (1)...(19): siRNA sense strand
acguguuccaggugaauaa

SEQ ID NO: 2231704 - RNA, 19 nt, Homo sapiens
  misc_RNA (1)...(19): siRNA sense strand
guacugagagucaaggcaa

SEQ ID NO: 2231705 - RNA, 19 nt, Homo sapiens
  misc_RNA (1)...(19): siRNA sense strand
cuucacggccucagagaau

SEQ ID NO: 2231706 - RNA, 19 nt, Homo sapiens
  misc_RNA (1)...(19): siRNA sense strand
ugaauaacuuugaggcucu

SEQ ID NO: 2231707 - RNA, 19 nt, Homo sapiens
  misc_RNA (1)...(19): siRNA sense strand
ccacaugacuuucggcgga

SEQ ID NO: 2231708 - RNA, 19 nt, Homo sapiens
  misc_RNA (1)...(19): siRNA sense strand
aggcagacagagagggagu

SEQ ID NO: 2231709 - RNA, 19 nt, Homo sapiens
  misc_RNA (1)...(19): siRNA sense strand
gggacaagcugacggacgu

SEQ ID NO: 2231710 - RNA, 19 nt, Homo sapiens
  misc_RNA (1)...(19): siRNA sense strand
cagacaugaaugaugcuua

SEQ ID NO: 2231711 - RNA, 19 nt, Homo sapiens
  misc_RNA (1)...(19): siRNA sense strand
cagaagagcacacgggauc

SEQ ID NO: 2231712 - RNA, 19 nt, Homo sapiens
  misc_RNA (1)...(19): siRNA sense strand
cagcacacgcagacagaca

SEQ ID NO: 2231713 - RNA, 19 nt, Homo sapiens
  misc_RNA (1)...(19): siRNA sense strand
cagaacaacccuaacccaa

SEQ ID NO: 2231714 - RNA, 19 nt, Homo sapiens
  misc_RNA (1)...(19): siRNA sense strand
gagagggagucauucgcua

SEQ ID NO: 2231715 - RNA, 19 nt, Homo sapiens
  misc_RNA (1)...(19): siRNA sense strand
cggcugaaccagacuguca

SEQ ID NO: 2231716 - RNA, 19 nt, Homo sapiens
  misc_RNA (1)...(19): siRNA sense strand
gaggguacucagacaggaa

SEQ ID NO: 2231717 - RNA, 19 nt, Homo sapiens
  misc_RNA (1)...(19): siRNA sense strand
cagccaguacugagaguca

SEQ ID NO: 2231718 - RNA, 19 nt, Homo sapiens
  misc_RNA (1)...(19): siRNA sense strand
cggaggaugcucagagacu

SEQ ID NO: 2231719 - RNA, 19 nt, Homo sapiens
  misc_RNA (1)...(19): siRNA sense strand
gugagaacacguaugugaa

SEQ ID NO: 2231720 - RNA, 19 nt, Homo sapiens
  misc_RNA (1)...(19): siRNA sense strand
ccagaagagcacacgggau

SEQ ID NO: 2231721 - RNA, 19 nt, Homo sapiens
  misc_RNA (1)...(19): siRNA sense strand
gauccagaguguugugacu

SEQ ID NO: 2231722 - RNA, 19 nt, Homo sapiens
  misc_RNA (1)...(19): siRNA sense strand
guagcgauguucaggcaga

SEQ ID NO: 2231723 - RNA, 19 nt, Homo sapiens
  misc_RNA (1)...(19): siRNA sense strand
caaugugaccagugagaac

SEQ ID NO: 2231724 - RNA, 19 nt, Homo sapiens
  misc_RNA (1)...(19): siRNA sense strand
agugagaacacguauguga

SEQ ID NO: 2231725 - RNA, 19 nt, Homo sapiens
  misc_RNA (1)...(19): siRNA sense strand
cagggaaguggcaaggaau

SEQ ID NO: 2231726 - RNA, 19 nt, Homo sapiens
  misc_RNA (1)...(19): siRNA sense strand
ccuucaaagaguuccagaa

SEQ ID NO: 2231727 - RNA, 19 nt, Homo sapiens
  misc_RNA (1)...(19): siRNA sense strand
cggugaaauaugcugucua

SEQ ID NO: 2231728 - RNA, 19 nt, Homo sapiens
  misc_RNA (1)...(19): siRNA sense strand
ccccaggagaggaggacaa

SEQ ID NO: 2231729 - RNA, 19 nt, Homo sapiens
  misc_RNA (1)...(19): siRNA sense strand
caauacaaggacaugauga

SEQ ID NO: 2231730 - RNA, 19 nt, Homo sapiens
  misc_RNA (1)...(19): siRNA sense strand
cauuauaagcugucgcaga

SEQ ID NO: 2231731 - RNA, 19 nt, Homo sapiens
  misc_RNA (1)...(19): siRNA sense strand
acgagugggaugcgggaga

SEQ ID NO: 2231732 - RNA, 19 nt, Homo sapiens
  misc_RNA (1)...(19): siRNA sense strand
uggaggagcucuucaggga

SEQ ID NO: 2231733 - RNA, 19 nt, Homo sapiens
  misc_RNA (1)...(19): siRNA sense strand
cauuauaagcugucgcaga

SEQ ID NO: 2231734 - RNA, 19 nt, Homo sapiens
  misc_RNA (1)...(19): siRNA sense strand
acgagugggaugcgggaga

SEQ ID NO: 2231735 - RNA, 19 nt, Homo sapiens
  misc_RNA (1)...(19): siRNA sense strand
uggaggagcucuucaggga

SEQ ID NO: 2231736 - RNA, 19 nt, Homo sapiens
  misc_RNA (1)...(19): siRNA sense strand
acaaagaugacaugggcga

SEQ ID NO: 2231737 - RNA, 19 nt, Homo sapiens
  misc_RNA (1)...(19): siRNA sense strand
gagcaggauuucaagcuga

SEQ ID NO: 2231738 - RNA, 19 nt, Homo sapiens
  misc_RNA (1)...(19): siRNA sense strand
uggaaggcugguugacaaa

SEQ ID NO: 2231739 - RNA, 19 nt, Homo sapiens
  misc_RNA (1)...(19): siRNA sense strand
acaaaugccaugagugacu

SEQ ID NO: 2231740 - RNA, 19 nt, Homo sapiens
  misc_RNA (1)...(19): siRNA sense strand
cagcggaaggugugagucu

SEQ ID NO: 2231741 - RNA, 19 nt, Homo sapiens
  misc_RNA (1)...(19): siRNA sense strand
guaacuuugccaagagcuu

SEQ ID NO: 2231742 - RNA, 19 nt, Homo sapiens
  misc_RNA (1)...(19): siRNA sense strand
cugcagaacacgucccaga

SEQ ID NO: 2231743 - RNA, 19 nt, Homo sapiens
  misc_RNA (1)...(19): siRNA sense strand
agaacacgucccagaucaa

SEQ ID NO: 2231744 - RNA, 19 nt, Homo sapiens
  misc_RNA (1)...(19): siRNA sense strand
uguucuaccugguggagca

SEQ ID NO: 2231745 - RNA, 19 nt, Homo sapiens
  misc_RNA (1)...(19): siRNA sense strand
uaauuaugaaacagcggaa

SEQ ID NO: 2231746 - RNA, 19 nt, Homo sapiens
  misc_RNA (1)...(19): siRNA sense strand
caacuguagauguggugau

SEQ ID NO: 2231747 - RNA, 19 nt, Homo sapiens
  misc_RNA (1)...(19): siRNA sense strand
acaaagaugacaugggcga

SEQ ID NO: 2231748 - RNA, 19 nt, Homo sapiens
  misc_RNA (1)...(19): siRNA sense strand
gagcaggauuucaagcuga

SEQ ID NO: 2231749 - RNA, 19 nt, Homo sapiens
  misc_RNA (1)...(19): siRNA sense strand
uggaaggcugguugacaaa

SEQ ID NO: 2231750 - RNA, 19 nt, Homo sapiens
  misc_RNA (1)...(19): siRNA sense strand
acaaaugccaugagugacu

SEQ ID NO: 2231751 - RNA, 19 nt, Homo sapiens
  misc_RNA (1)...(19): siRNA sense strand
cagcggaaggugugagucu

SEQ ID NO: 2231752 - RNA, 19 nt, Homo sapiens
  misc_RNA (1)...(19): siRNA sense strand
guaacuuugccaagagcuu

SEQ ID NO: 2231753 - RNA, 19 nt, Homo sapiens
  misc_RNA (1)...(19): siRNA sense strand
cugcagaacacgucccaga

SEQ ID NO: 2231754 - RNA, 19 nt, Homo sapiens
  misc_RNA (1)...(19): siRNA sense strand
agaacacgucccagaucaa

SEQ ID NO: 2231755 - RNA, 19 nt, Homo sapiens
  misc_RNA (1)...(19): siRNA sense strand
uguucuaccugguggagca

SEQ ID NO: 2231756 - RNA, 19 nt, Homo sapiens
  misc_RNA (1)...(19): siRNA sense strand
uaauuaugaaacagcggaa

SEQ ID NO: 2231757 - RNA, 19 nt, Homo sapiens
  misc_RNA (1)...(19): siRNA sense strand
caacuguagauguggugau

SEQ ID NO: 2231758 - RNA, 19 nt, Homo sapiens
  misc_RNA (1)...(19): siRNA sense strand
gggaagaugaugagcuacu

SEQ ID NO: 2231759 - RNA, 19 nt, Homo sapiens
  misc_RNA (1)...(19): siRNA sense strand
uggaaugggaagacaccua

SEQ ID NO: 2231760 - RNA, 19 nt, Homo sapiens
  misc_RNA (1)...(19): siRNA sense strand
aggggaagaugaugagcua

SEQ ID NO: 2231761 - RNA, 19 nt, Homo sapiens
  misc_RNA (1)...(19): siRNA sense strand
uggugaugauggaggggaa

SEQ ID NO: 2231762 - RNA, 19 nt, Homo sapiens
  misc_RNA (1)...(19): siRNA sense strand
ccugaagaagagagggaac

SEQ ID NO: 2231763 - RNA, 19 nt, Homo sapiens
  misc_RNA (1)...(19): siRNA sense strand
aggguggccuugugaucaa

SEQ ID NO: 2231764 - RNA, 19 nt, Homo sapiens
  misc_RNA (1)...(19): siRNA sense strand
aacgagaagaagaggcaua

SEQ ID NO: 2231765 - RNA, 19 nt, Homo sapiens
  misc_RNA (1)...(19): siRNA sense strand
gaaacgagaagaagaggca

SEQ ID NO: 2231766 - RNA, 19 nt, Homo sapiens
  misc_RNA (1)...(19): siRNA sense strand
ugucgaaacgagaagaaga

SEQ ID NO: 2231767 - RNA, 19 nt, Homo sapiens
  misc_RNA (1)...(19): siRNA sense strand
acuaaaugccagaaagaag

SEQ ID NO: 2231768 - RNA, 19 nt, Homo sapiens
  misc_RNA (1)...(19): siRNA sense strand
aagaagaggcauagggcag

SEQ ID NO: 2231769 - RNA, 19 nt, Homo sapiens
  misc_RNA (1)...(19): siRNA sense strand
ggcauagggcagugagagu

SEQ ID NO: 2231770 - RNA, 19 nt, Homo sapiens
  misc_RNA (1)...(19): siRNA sense strand
cacacaauaaugaggaaca

SEQ ID NO: 2231771 - RNA, 19 nt, Homo sapiens
  misc_RNA (1)...(19): siRNA sense strand
augagugggucuuugggaa

SEQ ID NO: 2231772 - RNA, 19 nt, Homo sapiens
  misc_RNA (1)...(19): siRNA sense strand
ugagugggucuuugggaau

SEQ ID NO: 2231773 - RNA, 19 nt, Homo sapiens
  misc_RNA (1)...(19): siRNA sense strand
ggugucgaaacgagaagaa

SEQ ID NO: 2231774 - RNA, 19 nt, Homo sapiens
  misc_RNA (1)...(19): siRNA sense strand
auaaauuugacgugaagca

SEQ ID NO: 2231775 - RNA, 19 nt, Homo sapiens
  misc_RNA (1)...(19): siRNA sense strand
ucaucauccuccugacaau

SEQ ID NO: 2231776 - RNA, 19 nt, Homo sapiens
  misc_RNA (1)...(19): siRNA sense strand
aacgagaagaagaggcaua

SEQ ID NO: 2231777 - RNA, 19 nt, Homo sapiens
  misc_RNA (1)...(19): siRNA sense strand
gaaacgagaagaagaggca

SEQ ID NO: 2231778 - RNA, 19 nt, Homo sapiens
  misc_RNA (1)...(19): siRNA sense strand
ugucgaaacgagaagaaga

SEQ ID NO: 2231779 - RNA, 19 nt, Homo sapiens
  misc_RNA (1)...(19): siRNA sense strand
acuaaaugccagaaagaag

SEQ ID NO: 2231780 - RNA, 19 nt, Homo sapiens
  misc_RNA (1)...(19): siRNA sense strand
aagaagaggcauagggcag

SEQ ID NO: 2231781 - RNA, 19 nt, Homo sapiens
  misc_RNA (1)...(19): siRNA sense strand
ggcauagggcagugagagu

SEQ ID NO: 2231782 - RNA, 19 nt, Homo sapiens
  misc_RNA (1)...(19): siRNA sense strand
cacacaauaaugaggaaca

SEQ ID NO: 2231783 - RNA, 19 nt, Homo sapiens
  misc_RNA (1)...(19): siRNA sense strand
augagugggucuuugggaa

SEQ ID NO: 2231784 - RNA, 19 nt, Homo sapiens
  misc_RNA (1)...(19): siRNA sense strand
ugagugggucuuugggaau

SEQ ID NO: 2231785 - RNA, 19 nt, Homo sapiens
  misc_RNA (1)...(19): siRNA sense strand
ggugucgaaacgagaagaa

SEQ ID NO: 2231786 - RNA, 19 nt, Homo sapiens
  misc_RNA (1)...(19): siRNA sense strand
auaaauuugacgugaagca

SEQ ID NO: 2231787 - RNA, 19 nt, Homo sapiens
  misc_RNA (1)...(19): siRNA sense strand
ucaucauccuccugacaau

SEQ ID NO: 2231788 - RNA, 19 nt, Homo sapiens
  misc_RNA (1)...(19): siRNA sense strand
ccggaagauaggaggaaua

SEQ ID NO: 2231789 - RNA, 19 nt, Homo sapiens
  misc_RNA (1)...(19): siRNA sense strand
ggcaagaaauccaagagaa

SEQ ID NO: 2231790 - RNA, 19 nt, Homo sapiens
  misc_RNA (1)...(19): siRNA sense strand
aagaaauccaagagaagua

SEQ ID NO: 2231791 - RNA, 19 nt, Homo sapiens
  misc_RNA (1)...(19): siRNA sense strand
gaaacaaagaugcaggcaa

SEQ ID NO: 2231792 - RNA, 19 nt, Homo sapiens
  misc_RNA (1)...(19): siRNA sense strand
gcaagaaauccaagagaag

SEQ ID NO: 2231793 - RNA, 19 nt, Homo sapiens
  misc_RNA (1)...(19): siRNA sense strand
ggaacaaacuuaacuggga

SEQ ID NO: 2231794 - RNA, 19 nt, Homo sapiens
  misc_RNA (1)...(19): siRNA sense strand
aggacugcguggagaucua

SEQ ID NO: 2231795 - RNA, 19 nt, Homo sapiens
  misc_RNA (1)...(19): siRNA sense strand
gaacaaacuuaacugggau

SEQ ID NO: 2231796 - RNA, 19 nt, Homo sapiens
  misc_RNA (1)...(19): siRNA sense strand
gaaauugaguaucuggaga

SEQ ID NO: 2231797 - RNA, 19 nt, Homo sapiens
  misc_RNA (1)...(19): siRNA sense strand
aguuaauugggaagaagaa

SEQ ID NO: 2231798 - RNA, 19 nt, Homo sapiens
  misc_RNA (1)...(19): siRNA sense strand
acaagaagaacaaggagga

SEQ ID NO: 2231799 - RNA, 19 nt, Homo sapiens
  misc_RNA (1)...(19): siRNA sense strand
augcaguggccauggagaa

SEQ ID NO: 2231800 - RNA, 19 nt, Homo sapiens
  misc_RNA (1)...(19): siRNA sense strand
aaauugaguaucuggagaa

SEQ ID NO: 2231801 - RNA, 19 nt, Homo sapiens
  misc_RNA (1)...(19): siRNA sense strand
cugaagaagcagagaacug

SEQ ID NO: 2231802 - RNA, 19 nt, Homo sapiens
  misc_RNA (1)...(19): siRNA sense strand
caaugauuaaggaggguga

SEQ ID NO: 2231803 - RNA, 19 nt, Homo sapiens
  misc_RNA (1)...(19): siRNA sense strand
gaguuaauugggaagaaga

SEQ ID NO: 2231804 - RNA, 19 nt, Homo sapiens
  misc_RNA (1)...(19): siRNA sense strand
augaacuggcaaagggcua

SEQ ID NO: 2231805 - RNA, 19 nt, Homo sapiens
  misc_RNA (1)...(19): siRNA sense strand
gggaagaagaaaaccauuu

SEQ ID NO: 2231806 - RNA, 19 nt, Homo sapiens
  misc_RNA (1)...(19): siRNA sense strand
ucuuacuacuggauaggaa

SEQ ID NO: 2231807 - RNA, 19 nt, Homo sapiens
  misc_RNA (1)...(19): siRNA sense strand
uggcuggcaaggagauuaa

SEQ ID NO: 2231808 - RNA, 19 nt, Homo sapiens
  misc_RNA (1)...(19): siRNA sense strand
ccuguggaccauuuggaaa

SEQ ID NO: 2231809 - RNA, 19 nt, Homo sapiens
  misc_RNA (1)...(19): siRNA sense strand
guuaauugggaagaagaaa

SEQ ID NO: 2231810 - RNA, 19 nt, Homo sapiens
  misc_RNA (1)...(19): siRNA sense strand
uggucaaauccuaguccaa

SEQ ID NO: 2231811 - RNA, 19 nt, Homo sapiens
  misc_RNA (1)...(19): siRNA sense strand
cuuaacugggauugaagaa

SEQ ID NO: 2231812 - RNA, 19 nt, Homo sapiens
  misc_RNA (1)...(19): siRNA sense strand
acacagauuuaguugccau

SEQ ID NO: 2231813 - RNA, 19 nt, Homo sapiens
  misc_RNA (1)...(19): siRNA sense strand
cccaacaacaagaagaaca

SEQ ID NO: 2231814 - RNA, 19 nt, Homo sapiens
  misc_RNA (1)...(19): siRNA sense strand
gaucaugaacuguagccau

SEQ ID NO: 2231815 - RNA, 19 nt, Homo sapiens
  misc_RNA (1)...(19): siRNA sense strand
cugaguuaauugggaagaa

SEQ ID NO: 2231816 - RNA, 19 nt, Homo sapiens
  misc_RNA (1)...(19): siRNA sense strand
auacaaaacaaggcggaaa

SEQ ID NO: 2231817 - RNA, 19 nt, Homo sapiens
  misc_RNA (1)...(19): siRNA sense strand
auggagaauguguagaaau

SEQ ID NO: 2231818 - RNA, 19 nt, Homo sapiens
  misc_RNA (1)...(19): siRNA sense strand
aggcaagaaauccaagaga

SEQ ID NO: 2231819 - RNA, 19 nt, Homo sapiens
  misc_RNA (1)...(19): siRNA sense strand
cgugaggucuggaggguca

SEQ ID NO: 2231820 - RNA, 19 nt, Homo sapiens
  misc_RNA (1)...(19): siRNA sense strand
gggugcuggaugagggcaa

SEQ ID NO: 2231821 - RNA, 19 nt, Homo sapiens
  misc_RNA (1)...(19): siRNA sense strand
ucaaauuuacccuggccaa

SEQ ID NO: 2231822 - RNA, 19 nt, Homo sapiens
  misc_RNA (1)...(19): siRNA sense strand
ggaacaaacgugaggucug

SEQ ID NO: 2231823 - RNA, 19 nt, Homo sapiens
  misc_RNA (1)...(19): siRNA sense strand
gggccugaagauagaggau

SEQ ID NO: 2231824 - RNA, 19 nt, Homo sapiens
  misc_RNA (1)...(19): siRNA sense strand
agaggauuucuuagagaga

SEQ ID NO: 2231825 - RNA, 19 nt, Homo sapiens
  misc_RNA (1)...(19): siRNA sense strand
gcauuggggugcuggauga

SEQ ID NO: 2231826 - RNA, 19 nt, Homo sapiens
  misc_RNA (1)...(19): siRNA sense strand
gcaagaagcuccuggcuga

SEQ ID NO: 2231827 - RNA, 19 nt, Homo sapiens
  misc_RNA (1)...(19): siRNA sense strand
aggccaagaaggaggagau

SEQ ID NO: 2231828 - RNA, 19 nt, Homo sapiens
  misc_RNA (1)...(19): siRNA sense strand
cuaagaagaucgaucgcca

SEQ ID NO: 2231829 - RNA, 19 nt, Homo sapiens
  misc_RNA (1)...(19): siRNA sense strand
cccaaugagaccaaugaaa

SEQ ID NO: 2231830 - RNA, 19 nt, Homo sapiens
  misc_RNA (1)...(19): siRNA sense strand
cagcagauccggaagcuca

SEQ ID NO: 2231831 - RNA, 19 nt, Homo sapiens
  misc_RNA (1)...(19): siRNA sense strand
auagguaagcggaagggua

SEQ ID NO: 2231832 - RNA, 19 nt, Homo sapiens
  misc_RNA (1)...(19): siRNA sense strand
gucacauggaugaggagaa

SEQ ID NO: 2231833 - RNA, 19 nt, Homo sapiens
  misc_RNA (1)...(19): siRNA sense strand
agaccaaggaagcacgcaa

SEQ ID NO: 2231834 - RNA, 19 nt, Homo sapiens
  misc_RNA (1)...(19): siRNA sense strand
ggaugaggagaaugaggau

SEQ ID NO: 2231835 - RNA, 19 nt, Homo sapiens
  misc_RNA (1)...(19): siRNA sense strand
uccacaagcugaaggcaga

SEQ ID NO: 2231836 - RNA, 19 nt, Homo sapiens
  misc_RNA (1)...(19): siRNA sense strand
gggcauagguaagcggaag

SEQ ID NO: 2231837 - RNA, 19 nt, Homo sapiens
  misc_RNA (1)...(19): siRNA sense strand
ggaaaaggcuaauggcaca

SEQ ID NO: 2231838 - RNA, 19 nt, Homo sapiens
  misc_RNA (1)...(19): siRNA sense strand
acuauaaaggucagcaaau

SEQ ID NO: 2231839 - RNA, 19 nt, Homo sapiens
  misc_RNA (1)...(19): siRNA sense strand
ccucgaacggaaagccaaa

SEQ ID NO: 2231840 - RNA, 19 nt, Homo sapiens
  misc_RNA (1)...(19): siRNA sense strand
ggcaaauacaaggaagaaa

SEQ ID NO: 2231841 - RNA, 19 nt, Homo sapiens
  misc_RNA (1)...(19): siRNA sense strand
ucgccaaguaggaaaggaa

SEQ ID NO: 2231842 - RNA, 19 nt, Homo sapiens
  misc_RNA (1)...(19): siRNA sense strand
uaggaaaggaaaagggcaa

SEQ ID NO: 2231843 - RNA, 19 nt, Homo sapiens
  misc_RNA (1)...(19): siRNA sense strand
agggcaaauacaaggaaga

SEQ ID NO: 2231844 - RNA, 19 nt, Homo sapiens
  misc_RNA (1)...(19): siRNA sense strand
uccaaagagcugagacaga

SEQ ID NO: 2231845 - RNA, 19 nt, Homo sapiens
  misc_RNA (1)...(19): siRNA sense strand
gccaaguaggaaaggaaaa

SEQ ID NO: 2231846 - RNA, 19 nt, Homo sapiens
  misc_RNA (1)...(19): siRNA sense strand
acacuauaaaggucagcaa

SEQ ID NO: 2231847 - RNA, 19 nt, Homo sapiens
  misc_RNA (1)...(19): siRNA sense strand
cgccaaguaggaaaggaaa

SEQ ID NO: 2231848 - RNA, 19 nt, Homo sapiens
  misc_RNA (1)...(19): siRNA sense strand
aggaaaagggcaaauacaa

SEQ ID NO: 2231849 - RNA, 19 nt, Homo sapiens
  misc_RNA (1)...(19): siRNA sense strand
cagguuuacaggaagaaau

SEQ ID NO: 2231850 - RNA, 19 nt, Homo sapiens
  misc_RNA (1)...(19): siRNA sense strand
uuuccaaagagcugagaca

SEQ ID NO: 2231851 - RNA, 19 nt, Homo sapiens
  misc_RNA (1)...(19): siRNA sense strand
aggucagcaaauuggcaaa

SEQ ID NO: 2231852 - RNA, 19 nt, Homo sapiens
  misc_RNA (1)...(19): siRNA sense strand
auugagaagaugcaggaau

SEQ ID NO: 2231853 - RNA, 19 nt, Homo sapiens
  misc_RNA (1)...(19): siRNA sense strand
aauacaaggaagaaaccau

SEQ ID NO: 2231854 - RNA, 19 nt, Homo sapiens
  misc_RNA (1)...(19): siRNA sense strand
ccgacgaaaggaugccaaa

SEQ ID NO: 2231855 - RNA, 19 nt, Homo sapiens
  misc_RNA (1)...(19): siRNA sense strand
aggcagagaaacugaagca

SEQ ID NO: 2231856 - RNA, 19 nt, Homo sapiens
  misc_RNA (1)...(19): siRNA sense strand
gaagaaggcugcuggcaaa

SEQ ID NO: 2231857 - RNA, 19 nt, Homo sapiens
  misc_RNA (1)...(19): siRNA sense strand
ugaagaagcaggaggcuaa

SEQ ID NO: 2231858 - RNA, 19 nt, Homo sapiens
  misc_RNA (1)...(19): siRNA sense strand
ggaaagaaggccaagggaa

SEQ ID NO: 2231859 - RNA, 19 nt, Homo sapiens
  misc_RNA (1)...(19): siRNA sense strand
aguacagaccagagacaaa

SEQ ID NO: 2231860 - RNA, 19 nt, Homo sapiens
  misc_RNA (1)...(19): siRNA sense strand
cgaaaggaaagaaggccaa

SEQ ID NO: 2231861 - RNA, 19 nt, Homo sapiens
  misc_RNA (1)...(19): siRNA sense strand
ucgaaaaggcaaaggcuaa

SEQ ID NO: 2231862 - RNA, 19 nt, Homo sapiens
  misc_RNA (1)...(19): siRNA sense strand
aggcuaagaaaguggugaa

SEQ ID NO: 2231863 - RNA, 19 nt, Homo sapiens
  misc_RNA (1)...(19): siRNA sense strand
agaagaaggcugcuggcaa

SEQ ID NO: 2231864 - RNA, 19 nt, Homo sapiens
  misc_RNA (1)...(19): siRNA sense strand
aggcaaaggcuaaagaacu

SEQ ID NO: 2231865 - RNA, 19 nt, Homo sapiens
  misc_RNA (1)...(19): siRNA sense strand
gugaagaagcaggaggcua

SEQ ID NO: 2231866 - RNA, 19 nt, Homo sapiens
  misc_RNA (1)...(19): siRNA sense strand
ccgaaaggaaagaaggcca

SEQ ID NO: 2231867 - RNA, 19 nt, Homo sapiens
  misc_RNA (1)...(19): siRNA sense strand
acugcauuaucaagggaaa

SEQ ID NO: 2231868 - RNA, 19 nt, Homo sapiens
  misc_RNA (1)...(19): siRNA sense strand
aggugaacucggaagacaa

SEQ ID NO: 2231869 - RNA, 19 nt, Homo sapiens
  misc_RNA (1)...(19): siRNA sense strand
gggaaaggcaagacuggga

SEQ ID NO: 2231870 - RNA, 19 nt, Homo sapiens
  misc_RNA (1)...(19): siRNA sense strand
aagcaagagaagaagcaga

SEQ ID NO: 2231871 - RNA, 19 nt, Homo sapiens
  misc_RNA (1)...(19): siRNA sense strand
cgucuaguccacaggaaga

SEQ ID NO: 2231872 - RNA, 19 nt, Homo sapiens
  misc_RNA (1)...(19): siRNA sense strand
cuaagaaaguggugaaucc

SEQ ID NO: 2231873 - RNA, 19 nt, Homo sapiens
  misc_RNA (1)...(19): siRNA sense strand
gaagcaggaggcuaagaaa

SEQ ID NO: 2231874 - RNA, 19 nt, Homo sapiens
  misc_RNA (1)...(19): siRNA sense strand
aagagaagaagcagagacu

SEQ ID NO: 2231875 - RNA, 19 nt, Homo sapiens
  misc_RNA (1)...(19): siRNA sense strand
uggcuaagcugguggaagc

SEQ ID NO: 2231876 - RNA, 19 nt, Homo sapiens
  misc_RNA (1)...(19): siRNA sense strand
ugagaaaaggccuaagaau

SEQ ID NO: 2231877 - RNA, 19 nt, Homo sapiens
  misc_RNA (1)...(19): siRNA sense strand
gccuaagaauuuuggcauu

SEQ ID NO: 2231878 - RNA, 19 nt, Homo sapiens
  misc_RNA (1)...(19): siRNA sense strand
cgaaaaggcaaaggcuaaa

SEQ ID NO: 2231879 - RNA, 19 nt, Homo sapiens
  misc_RNA (1)...(19): siRNA sense strand
ucacggaggauaagaucaa

SEQ ID NO: 2231880 - RNA, 19 nt, Homo sapiens
  misc_RNA (1)...(19): siRNA sense strand
aaguggaagcaaagaaaga

SEQ ID NO: 2231881 - RNA, 19 nt, Homo sapiens
  misc_RNA (1)...(19): siRNA sense strand
cagcugaggagaagaaagu

SEQ ID NO: 2231882 - RNA, 19 nt, Homo sapiens
  misc_RNA (1)...(19): siRNA sense strand
cgguguaaauguugagccu

SEQ ID NO: 2231883 - RNA, 19 nt, Homo sapiens
  misc_RNA (1)...(19): siRNA sense strand
aagaagaauccgaggaguc

SEQ ID NO: 2231884 - RNA, 19 nt, Homo sapiens
  misc_RNA (1)...(19): siRNA sense strand
caaagaaagaagaauccga

SEQ ID NO: 2231885 - RNA, 19 nt, Homo sapiens
  misc_RNA (1)...(19): siRNA sense strand
uggccuggcuuguuugcaa

SEQ ID NO: 2231886 - RNA, 19 nt, Homo sapiens
  misc_RNA (1)...(19): siRNA sense strand
agaaagaagaauccgagga

SEQ ID NO: 2231887 - RNA, 19 nt, Homo sapiens
  misc_RNA (1)...(19): siRNA sense strand
cuaaaggucuggaggguga

SEQ ID NO: 2231888 - RNA, 19 nt, Homo sapiens
  misc_RNA (1)...(19): siRNA sense strand
cagacaagaaugugcccaa

SEQ ID NO: 2231889 - RNA, 19 nt, Homo sapiens
  misc_RNA (1)...(19): siRNA sense strand
ggggaagcugacagagaua

SEQ ID NO: 2231890 - RNA, 19 nt, Homo sapiens
  misc_RNA (1)...(19): siRNA sense strand
agagauaccuacagacgga

SEQ ID NO: 2231891 - RNA, 19 nt, Homo sapiens
  misc_RNA (1)...(19): siRNA sense strand
cggauuuggucguggacgu

SEQ ID NO: 2231892 - RNA, 19 nt, Homo sapiens
  misc_RNA (1)...(19): siRNA sense strand
agggagucaugguggccaa

SEQ ID NO: 2231893 - RNA, 19 nt, Homo sapiens
  misc_RNA (1)...(19): siRNA sense strand
aagaagaaccggauugcca

SEQ ID NO: 2231894 - RNA, 19 nt, Homo sapiens
  misc_RNA (1)...(19): siRNA sense strand
ugacagagauaccuacaga

SEQ ID NO: 2231895 - RNA, 19 nt, Homo sapiens
  misc_RNA (1)...(19): siRNA sense strand
ccguagccguccagagacu

SEQ ID NO: 2231896 - RNA, 19 nt, Homo sapiens
  misc_RNA (1)...(19): siRNA sense strand
gcacaguccuucugagauu

SEQ ID NO: 2231897 - RNA, 19 nt, Homo sapiens
  misc_RNA (1)...(19): siRNA sense strand
acguaaaauccuuggaaaa

SEQ ID NO: 2231898 - RNA, 19 nt, Homo sapiens
  misc_RNA (1)...(19): siRNA sense strand
gcgcaaaagaaaagaaucu

SEQ ID NO: 2231899 - RNA, 19 nt, Homo sapiens
  misc_RNA (1)...(19): siRNA sense strand
gguucuaagacgugggauc

SEQ ID NO: 2231900 - RNA, 19 nt, Homo sapiens
  misc_RNA (1)...(19): siRNA sense strand
ucucaaagugaaaggacca

SEQ ID NO: 2231901 - RNA, 19 nt, Homo sapiens
  misc_RNA (1)...(19): siRNA sense strand
cuugauaagaggcgcaaaa

SEQ ID NO: 2231902 - RNA, 19 nt, Homo sapiens
  misc_RNA (1)...(19): siRNA sense strand
caccauugcagaugcuuaa

SEQ ID NO: 2231903 - RNA, 19 nt, Homo sapiens
  misc_RNA (1)...(19): siRNA sense strand
ggugaagguucuaagacgu

SEQ ID NO: 2231904 - RNA, 19 nt, Homo sapiens
  misc_RNA (1)...(19): siRNA sense strand
gaugagaauucacaagcga

SEQ ID NO: 2231905 - RNA, 19 nt, Homo sapiens
  misc_RNA (1)...(19): siRNA sense strand
caguauugagccaggaguu

SEQ ID NO: 2231906 - RNA, 19 nt, Homo sapiens
  misc_RNA (1)...(19): siRNA sense strand
ccuaacaagccgcaacgua

SEQ ID NO: 2231907 - RNA, 19 nt, Homo sapiens
  misc_RNA (1)...(19): siRNA sense strand
agugaaaggaccaguucga

SEQ ID NO: 2231908 - RNA, 19 nt, Homo sapiens
  misc_RNA (1)...(19): siRNA sense strand
agccaggaguugaggugga

SEQ ID NO: 2231909 - RNA, 19 nt, Homo sapiens
  misc_RNA (1)...(19): siRNA sense strand
caccauugcugaagagaga

SEQ ID NO: 2231910 - RNA, 19 nt, Homo sapiens
  misc_RNA (1)...(19): siRNA sense strand
caaacagagcaguggguga

SEQ ID NO: 2231911 - RNA, 19 nt, Homo sapiens
  misc_RNA (1)...(19): siRNA sense strand
aguugugcaaagugagaaa

SEQ ID NO: 2231912 - RNA, 19 nt, Homo sapiens
  misc_RNA (1)...(19): siRNA sense strand
gugcaaagugagaaagauc

SEQ ID NO: 2231913 - RNA, 19 nt, Homo sapiens
  misc_RNA (1)...(19): siRNA sense strand
ucauuaaaaucgauggcaa

SEQ ID NO: 2231914 - RNA, 19 nt, Homo sapiens
  misc_RNA (1)...(19): siRNA sense strand
ccacaaguugagagagugu

SEQ ID NO: 2231915 - RNA, 19 nt, Homo sapiens
  misc_RNA (1)...(19): siRNA sense strand
ugcugaagagagagacaaa

SEQ ID NO: 2231916 - RNA, 19 nt, Homo sapiens
  misc_RNA (1)...(19): siRNA sense strand
gcauugacaagacgggaga

SEQ ID NO: 2231917 - RNA, 19 nt, Homo sapiens
  misc_RNA (1)...(19): siRNA sense strand
gugaucaccaacagagaga

SEQ ID NO: 2231918 - RNA, 19 nt, Homo sapiens
  misc_RNA (1)...(19): siRNA sense strand
ccauugcugaagagagaga

SEQ ID NO: 2231919 - RNA, 19 nt, Homo sapiens
  misc_RNA (1)...(19): siRNA sense strand
cagcaagccacaacaguua

SEQ ID NO: 2231920 - RNA, 19 nt, Homo sapiens
  misc_RNA (1)...(19): siRNA sense strand
agaacaugaucaagggugu

SEQ ID NO: 2231921 - RNA, 19 nt, Homo sapiens
  misc_RNA (1)...(19): siRNA sense strand
guugacaaaugguggggua

SEQ ID NO: 2231922 - RNA, 19 nt, Homo sapiens
  misc_RNA (1)...(19): siRNA sense strand
uccgaaauuucuuggguga

SEQ ID NO: 2231923 - RNA, 19 nt, Homo sapiens
  misc_RNA (1)...(19): siRNA sense strand
gaaugggucucuuguugaa

SEQ ID NO: 2231924 - RNA, 19 nt, Homo sapiens
  misc_RNA (1)...(19): siRNA sense strand
cgacauuacucugaaggga

SEQ ID NO: 2231925 - RNA, 19 nt, Homo sapiens
  misc_RNA (1)...(19): siRNA sense strand
aacaaggauaucaggaaau

SEQ ID NO: 2231926 - RNA, 19 nt, Homo sapiens
  misc_RNA (1)...(19): siRNA sense strand
ccaucaacguuguuaucca

SEQ ID NO: 2231927 - RNA, 19 nt, Homo sapiens
  misc_RNA (1)...(19): siRNA sense strand
acguuguuauccaggagaa

SEQ ID NO: 2231928 - RNA, 19 nt, Homo sapiens
  misc_RNA (1)...(19): siRNA sense strand
cccagaaagaugaauuaau

SEQ ID NO: 2231929 - RNA, 19 nt, Homo sapiens
  misc_RNA (1)...(19): siRNA sense strand
acaucaagcucuuugggaa

SEQ ID NO: 2231930 - RNA, 19 nt, Homo sapiens
  misc_RNA (1)...(19): siRNA sense strand
uugcagugaaggagaagua

SEQ ID NO: 2231931 - RNA, 19 nt, Homo sapiens
  misc_RNA (1)...(19): siRNA sense strand
ugaaggagaaguaugccaa

SEQ ID NO: 2231932 - RNA, 19 nt, Homo sapiens
  misc_RNA (1)...(19): siRNA sense strand
caucaagcucuuugggaag

SEQ ID NO: 2231933 - RNA, 19 nt, Homo sapiens
  misc_RNA (1)...(19): siRNA sense strand
gcaaagaguuggaguucua

SEQ ID NO: 2231934 - RNA, 19 nt, Homo sapiens
  misc_RNA (1)...(19): siRNA sense strand
gcuaugugcuagagggcaa

SEQ ID NO: 2231935 - RNA, 19 nt, Homo sapiens
  misc_RNA (1)...(19): siRNA sense strand
ggaguucuaucuuaggaaa

SEQ ID NO: 2231936 - RNA, 19 nt, Homo sapiens
  misc_RNA (1)...(19): siRNA sense strand
gcuagagggcaaagaguug

SEQ ID NO: 2231937 - RNA, 19 nt, Homo sapiens
  misc_RNA (1)...(19): siRNA sense strand
cugaggaagaagagauuuu

SEQ ID NO: 2231938 - RNA, 19 nt, Homo sapiens
  misc_RNA (1)...(19): siRNA sense strand
gaguuggaguucuaucuua

SEQ ID NO: 2231939 - RNA, 19 nt, Homo sapiens
  misc_RNA (1)...(19): siRNA sense strand
agggcaaagaguuggaguu

SEQ ID NO: 2231940 - RNA, 19 nt, Homo sapiens
  misc_RNA (1)...(19): siRNA sense strand
gggcaaagaguuggaguuc

SEQ ID NO: 2231941 - RNA, 19 nt, Homo sapiens
  misc_RNA (1)...(19): siRNA sense strand
gcaccgauccuuagccaga

SEQ ID NO: 2231942 - RNA, 19 nt, Homo sapiens
  misc_RNA (1)...(19): siRNA sense strand
gcaaggagcccaagagcca

SEQ ID NO: 2231943 - RNA, 19 nt, Homo sapiens
  misc_RNA (1)...(19): siRNA sense strand
uggucaaguuauacagguu

SEQ ID NO: 2231944 - RNA, 19 nt, Homo sapiens
  misc_RNA (1)...(19): siRNA sense strand
acgaagaagaggaggaaga

SEQ ID NO: 2231945 - RNA, 19 nt, Homo sapiens
  misc_RNA (1)...(19): siRNA sense strand
aagaagaggaggaagacga

SEQ ID NO: 2231946 - RNA, 19 nt, Homo sapiens
  misc_RNA (1)...(19): siRNA sense strand
aggacgaagaagaggagga

SEQ ID NO: 2231947 - RNA, 19 nt, Homo sapiens
  misc_RNA (1)...(19): siRNA sense strand
auauaauggccaagaggaa

SEQ ID NO: 2231948 - RNA, 19 nt, Homo sapiens
  misc_RNA (1)...(19): siRNA sense strand
gcgaaaugcgagucggcuu

SEQ ID NO: 2231949 - RNA, 19 nt, Homo sapiens
  misc_RNA (1)...(19): siRNA sense strand
cugcaauggcugcugcuaa

SEQ ID NO: 2231950 - RNA, 19 nt, Homo sapiens
  misc_RNA (1)...(19): siRNA sense strand
agggacagucggaagaaau

SEQ ID NO: 2231951 - RNA, 19 nt, Homo sapiens
  misc_RNA (1)...(19): siRNA sense strand
ggccauuacuggugcaucu

SEQ ID NO: 2231952 - RNA, 19 nt, Homo sapiens
  misc_RNA (1)...(19): siRNA sense strand
uuagaaaggcucaacgaga

SEQ ID NO: 2231953 - RNA, 19 nt, Homo sapiens
  misc_RNA (1)...(19): siRNA sense strand
aggcuaagcaagcaucuaa

SEQ ID NO: 2231954 - RNA, 19 nt, Homo sapiens
  misc_RNA (1)...(19): siRNA sense strand
uugugaagccugugaaagu

SEQ ID NO: 2231955 - RNA, 19 nt, Homo sapiens
  misc_RNA (1)...(19): siRNA sense strand
gucaaauuccagagggcca

SEQ ID NO: 2231956 - RNA, 19 nt, Homo sapiens
  misc_RNA (1)...(19): siRNA sense strand
aggcagcaccuaagcaaaa

SEQ ID NO: 2231957 - RNA, 19 nt, Homo sapiens
  misc_RNA (1)...(19): siRNA sense strand
agaaaccugaaguuagaaa

SEQ ID NO: 2231958 - RNA, 19 nt, Homo sapiens
  misc_RNA (1)...(19): siRNA sense strand
uccccgaguugguggaaaa

SEQ ID NO: 2231959 - RNA, 19 nt, Homo sapiens
  misc_RNA (1)...(19): siRNA sense strand
cugugauggugaagaggaa

SEQ ID NO: 2231960 - RNA, 19 nt, Homo sapiens
  misc_RNA (1)...(19): siRNA sense strand
aggaauaagcagaccuaca

SEQ ID NO: 2231961 - RNA, 19 nt, Homo sapiens
  misc_RNA (1)...(19): siRNA sense strand
aauggauggucgugcggaa

SEQ ID NO: 2231962 - RNA, 19 nt, Homo sapiens
  misc_RNA (1)...(19): siRNA sense strand
gcuacaacggacugauuca

SEQ ID NO: 2231963 - RNA, 19 nt, Homo sapiens
  misc_RNA (1)...(19): siRNA sense strand
ccuacagcacugagcccaa

SEQ ID NO: 2231964 - RNA, 19 nt, Homo sapiens
  misc_RNA (1)...(19): siRNA sense strand
guagaagauucaagggcca

SEQ ID NO: 2231965 - RNA, 19 nt, Homo sapiens
  misc_RNA (1)...(19): siRNA sense strand
gguuauggaagcaacaaaa

SEQ ID NO: 2231966 - RNA, 19 nt, Homo sapiens
  misc_RNA (1)...(19): siRNA sense strand
caacauugguuauggaagc

SEQ ID NO: 2231967 - RNA, 19 nt, Homo sapiens
  misc_RNA (1)...(19): siRNA sense strand
gauucaagggccagaucuu

SEQ ID NO: 2231968 - RNA, 19 nt, Homo sapiens
  misc_RNA (1)...(19): siRNA sense strand
ccaagaaguucauccggca

SEQ ID NO: 2231969 - RNA, 19 nt, Homo sapiens
  misc_RNA (1)...(19): siRNA sense strand
agucagaccgauaugucaa

SEQ ID NO: 2231970 - RNA, 19 nt, Homo sapiens
  misc_RNA (1)...(19): siRNA sense strand
cguggaaagagcugcccaa

SEQ ID NO: 2231971 - RNA, 19 nt, Homo sapiens
  misc_RNA (1)...(19): siRNA sense strand
aaguauaacuggagugcca

SEQ ID NO: 2231972 - RNA, 19 nt, Homo sapiens
  misc_RNA (1)...(19): siRNA sense strand
gaagucgaccuguggcaaa

SEQ ID NO: 2231973 - RNA, 19 nt, Homo sapiens
  misc_RNA (1)...(19): siRNA sense strand
ugaaggaacaacaccuaaa

SEQ ID NO: 2231974 - RNA, 19 nt, Homo sapiens
  misc_RNA (1)...(19): siRNA sense strand
gaacaacaccuaaacccaa

SEQ ID NO: 2231975 - RNA, 19 nt, Homo sapiens
  misc_RNA (1)...(19): siRNA sense strand
agacgaaauaccaccggaa

SEQ ID NO: 2231976 - RNA, 19 nt, Homo sapiens
  misc_RNA (1)...(19): siRNA sense strand
gcauggauuccgugaagga

SEQ ID NO: 2231977 - RNA, 19 nt, Homo sapiens
  misc_RNA (1)...(19): siRNA sense strand
cgugaaggaacaacaccua

SEQ ID NO: 2231978 - RNA, 19 nt, Homo sapiens
  misc_RNA (1)...(19): siRNA sense strand
ggaacaacaccuaaaccca

SEQ ID NO: 2231979 - RNA, 19 nt, Homo sapiens
  misc_RNA (1)...(19): siRNA sense strand
agacauuggagaagaacca

SEQ ID NO: 2231980 - RNA, 19 nt, Homo sapiens
  misc_RNA (1)...(19): siRNA sense strand
aaaaggagacauuggagaa

SEQ ID NO: 2231981 - RNA, 19 nt, Homo sapiens
  misc_RNA (1)...(19): siRNA sense strand
cggaugaaaacuggaaaua

SEQ ID NO: 2231982 - RNA, 19 nt, Homo sapiens
  misc_RNA (1)...(19): siRNA sense strand
gcaaggagucucaggccaa

SEQ ID NO: 2231983 - RNA, 19 nt, Homo sapiens
  misc_RNA (1)...(19): siRNA sense strand
gaaacuaggagaaugggua

SEQ ID NO: 2231984 - RNA, 19 nt, Homo sapiens
  misc_RNA (1)...(19): siRNA sense strand
cugccaaagccuuagacaa

SEQ ID NO: 2231985 - RNA, 19 nt, Homo sapiens
  misc_RNA (1)...(19): siRNA sense strand
gcaguuguguaguaguuaa

SEQ ID NO: 2231986 - RNA, 19 nt, Homo sapiens
  misc_RNA (1)...(19): siRNA sense strand
ccaaggaugucauugaaga

SEQ ID NO: 2231987 - RNA, 19 nt, Homo sapiens
  misc_RNA (1)...(19): siRNA sense strand
acaacaagaaacuaggaga

SEQ ID NO: 2231988 - RNA, 19 nt, Homo sapiens
  misc_RNA (1)...(19): siRNA sense strand
aggcauugcugcuggaggu

SEQ ID NO: 2231989 - RNA, 19 nt, Homo sapiens
  misc_RNA (1)...(19): siRNA sense strand
agacaagcgccaagcccau

SEQ ID NO: 2231990 - RNA, 19 nt, Homo sapiens
  misc_RNA (1)...(19): siRNA sense strand
aggccaaggaugucauuga

SEQ ID NO: 2231991 - RNA, 19 nt, Homo sapiens
  misc_RNA (1)...(19): siRNA sense strand
gaaagcaucuugagaggaa

SEQ ID NO: 2231992 - RNA, 19 nt, Homo sapiens
  misc_RNA (1)...(19): siRNA sense strand
gagaggaacagaaaggaua

SEQ ID NO: 2231993 - RNA, 19 nt, Homo sapiens
  misc_RNA (1)...(19): siRNA sense strand
agaggaacagaaaggauaa

SEQ ID NO: 2231994 - RNA, 19 nt, Homo sapiens
  misc_RNA (1)...(19): siRNA sense strand
gaaaggauaaggaugcuaa

SEQ ID NO: 2231995 - RNA, 19 nt, Homo sapiens
  misc_RNA (1)...(19): siRNA sense strand
gaacagaaaggauaaggau

SEQ ID NO: 2231996 - RNA, 19 nt, Homo sapiens
  misc_RNA (1)...(19): siRNA sense strand
aggauaaggaugcuaaauu

SEQ ID NO: 2231997 - RNA, 19 nt, Homo sapiens
  misc_RNA (1)...(19): siRNA sense strand
ggauaaggaugcuaaauuc

SEQ ID NO: 2231998 - RNA, 19 nt, Homo sapiens
  misc_RNA (1)...(19): siRNA sense strand
gcucgauauuauaagacca

SEQ ID NO: 2231999 - RNA, 19 nt, Homo sapiens
  misc_RNA (1)...(19): siRNA sense strand
ggaacagaaaggauaagga

SEQ ID NO: 2232000 - RNA, 19 nt, Homo sapiens
  misc_RNA (1)...(19): siRNA sense strand
cugacgacgugaaggagca

SEQ ID NO: 2232001 - RNA, 19 nt, Homo sapiens
  misc_RNA (1)...(19): siRNA sense strand
agauuuacaaacuggccaa

SEQ ID NO: 2232002 - RNA, 19 nt, Homo sapiens
  misc_RNA (1)...(19): siRNA sense strand
gugaaggagcagauuuaca

SEQ ID NO: 2232003 - RNA, 19 nt, Homo sapiens
  misc_RNA (1)...(19): siRNA sense strand
ucaaccagguggagaucaa

SEQ ID NO: 2232004 - RNA, 19 nt, Homo sapiens
  misc_RNA (1)...(19): siRNA sense strand
cggaaguggugaagacgca

SEQ ID NO: 2232005 - RNA, 19 nt, Homo sapiens
  misc_RNA (1)...(19): siRNA sense strand
gagcagaagaagaagcgga

SEQ ID NO: 2232006 - RNA, 19 nt, Homo sapiens
  misc_RNA (1)...(19): siRNA sense strand
ccuucaaccagguggagau

SEQ ID NO: 2232007 - RNA, 19 nt, Homo sapiens
  misc_RNA (1)...(19): siRNA sense strand
cagaagaagaagcggaccu

SEQ ID NO: 2232008 - RNA, 19 nt, Homo sapiens
  misc_RNA (1)...(19): siRNA sense strand
gcaacaagauagcagguua

SEQ ID NO: 2232009 - RNA, 19 nt, Homo sapiens
  misc_RNA (1)...(19): siRNA sense strand
gagaaaggagagacaauua

SEQ ID NO: 2232010 - RNA, 19 nt, Homo sapiens
  misc_RNA (1)...(19): siRNA sense strand
caggaggaggagagagaaa

SEQ ID NO: 2232011 - RNA, 19 nt, Homo sapiens
  misc_RNA (1)...(19): siRNA sense strand
gagagaaaggagagacaau

SEQ ID NO: 2232012 - RNA, 19 nt, Homo sapiens
  misc_RNA (1)...(19): siRNA sense strand
gagagagaaaggagagaca

SEQ ID NO: 2232013 - RNA, 19 nt, Homo sapiens
  misc_RNA (1)...(19): siRNA sense strand
ccaucaagcugcaggagga

SEQ ID NO: 2232014 - RNA, 19 nt, Homo sapiens
  misc_RNA (1)...(19): siRNA sense strand
cgaacaagcgcgugugcga

SEQ ID NO: 2232015 - RNA, 19 nt, Homo sapiens
  misc_RNA (1)...(19): siRNA sense strand
acacuaaggaaaugcugaa

SEQ ID NO: 2232016 - RNA, 19 nt, Homo sapiens
  misc_RNA (1)...(19): siRNA sense strand
ccuuggaucaggagauuau

SEQ ID NO: 2232017 - RNA, 19 nt, Homo sapiens
  misc_RNA (1)...(19): siRNA sense strand
ggaggagagagaaaggaga

SEQ ID NO: 2232018 - RNA, 19 nt, Homo sapiens
  misc_RNA (1)...(19): siRNA sense strand
aggaaaugcugaagcuuuu

SEQ ID NO: 2232019 - RNA, 19 nt, Homo sapiens
  misc_RNA (1)...(19): siRNA sense strand
ugcaggaggaggagagaga

SEQ ID NO: 2232020 - RNA, 19 nt, Homo sapiens
  misc_RNA (1)...(19): siRNA sense strand
aaggaaaugcugaagcuuu

SEQ ID NO: 2232021 - RNA, 19 nt, Homo sapiens
  misc_RNA (1)...(19): siRNA sense strand
cuacaguugggaugaauuu

SEQ ID NO: 2232022 - RNA, 19 nt, Homo sapiens
  misc_RNA (1)...(19): siRNA sense strand
aggagauuauugaaguaga

SEQ ID NO: 2232023 - RNA, 19 nt, Homo sapiens
  misc_RNA (1)...(19): siRNA sense strand
gcgaauucagagaggccca

SEQ ID NO: 2232024 - RNA, 19 nt, Homo sapiens
  misc_RNA (1)...(19): siRNA sense strand
ugaacguggccgagguuga

SEQ ID NO: 2232025 - RNA, 19 nt, Homo sapiens
  misc_RNA (1)...(19): siRNA sense strand
ucguaggaugggugaguca

SEQ ID NO: 2232026 - RNA, 19 nt, Homo sapiens
  misc_RNA (1)...(19): siRNA sense strand
ggcaagaaggaaagaccaa

SEQ ID NO: 2232027 - RNA, 19 nt, Homo sapiens
  misc_RNA (1)...(19): siRNA sense strand
gcacagcccuaaaggccaa

SEQ ID NO: 2232028 - RNA, 19 nt, Homo sapiens
  misc_RNA (1)...(19): siRNA sense strand
aaguaggaguugaagccaa

SEQ ID NO: 2232029 - RNA, 19 nt, Homo sapiens
  misc_RNA (1)...(19): siRNA sense strand
aaggaaucgugcuggaaaa

SEQ ID NO: 2232030 - RNA, 19 nt, Homo sapiens
  misc_RNA (1)...(19): siRNA sense strand
cuugaacuuuauugaggaa

SEQ ID NO: 2232031 - RNA, 19 nt, Homo sapiens
  misc_RNA (1)...(19): siRNA sense strand
aguucugguugcuggauuu

SEQ ID NO: 2232032 - RNA, 19 nt, Homo sapiens
  misc_RNA (1)...(19): siRNA sense strand
ccgcuuuaagguugucaaa

SEQ ID NO: 2232033 - RNA, 19 nt, Homo sapiens
  misc_RNA (1)...(19): siRNA sense strand
aggucaugcuguuggugau

SEQ ID NO: 2232034 - RNA, 19 nt, Homo sapiens
  misc_RNA (1)...(19): siRNA sense strand
uggcaugauaaacaguaua

SEQ ID NO: 2232035 - RNA, 19 nt, Homo sapiens
  misc_RNA (1)...(19): siRNA sense strand
ucaagaauggcaagaaaau

SEQ ID NO: 2232036 - RNA, 19 nt, Homo sapiens
  misc_RNA (1)...(19): siRNA sense strand
caagaaaaucacagccuuu

SEQ ID NO: 2232037 - RNA, 19 nt, Homo sapiens
  misc_RNA (1)...(19): siRNA sense strand
aagacagaaauucgggaaa

SEQ ID NO: 2232038 - RNA, 19 nt, Homo sapiens
  misc_RNA (1)...(19): siRNA sense strand
caaacauagacuugcaaga

SEQ ID NO: 2232039 - RNA, 19 nt, Homo sapiens
  misc_RNA (1)...(19): siRNA sense strand
acauagacuugcaagacau

SEQ ID NO: 2232040 - RNA, 19 nt, Homo sapiens
  misc_RNA (1)...(19): siRNA sense strand
uggcaagacaacuggcuuu

SEQ ID NO: 2232041 - RNA, 19 nt, Homo sapiens
  misc_RNA (1)...(19): siRNA sense strand
acuagaaaguucaugacca

SEQ ID NO: 2232042 - RNA, 19 nt, Homo sapiens
  misc_RNA (1)...(19): siRNA sense strand
ccgacuacuucagaggaaa

SEQ ID NO: 2232043 - RNA, 19 nt, Homo sapiens
  misc_RNA (1)...(19): siRNA sense strand
cagaggaaacaaaugguca

SEQ ID NO: 2232044 - RNA, 19 nt, Homo sapiens
  misc_RNA (1)...(19): siRNA sense strand
guacaagaccacaccggau

SEQ ID NO: 2232045 - RNA, 19 nt, Homo sapiens
  misc_RNA (1)...(19): siRNA sense strand
agaggaaacaaauggucau

SEQ ID NO: 2232046 - RNA, 19 nt, Homo sapiens
  misc_RNA (1)...(19): siRNA sense strand
aagacagaaauucgggaaa

SEQ ID NO: 2232047 - RNA, 19 nt, Homo sapiens
  misc_RNA (1)...(19): siRNA sense strand
caaacauagacuugcaaga

SEQ ID NO: 2232048 - RNA, 19 nt, Homo sapiens
  misc_RNA (1)...(19): siRNA sense strand
acauagacuugcaagacau

SEQ ID NO: 2232049 - RNA, 19 nt, Homo sapiens
  misc_RNA (1)...(19): siRNA sense strand
uggcaagacaacuggcuuu

SEQ ID NO: 2232050 - RNA, 19 nt, Homo sapiens
  misc_RNA (1)...(19): siRNA sense strand
acuagaaaguucaugacca

SEQ ID NO: 2232051 - RNA, 19 nt, Homo sapiens
  misc_RNA (1)...(19): siRNA sense strand
ccgacuacuucagaggaaa

SEQ ID NO: 2232052 - RNA, 19 nt, Homo sapiens
  misc_RNA (1)...(19): siRNA sense strand
cagaggaaacaaaugguca

SEQ ID NO: 2232053 - RNA, 19 nt, Homo sapiens
  misc_RNA (1)...(19): siRNA sense strand
guacaagaccacaccggau

SEQ ID NO: 2232054 - RNA, 19 nt, Homo sapiens
  misc_RNA (1)...(19): siRNA sense strand
agaggaaacaaauggucau

SEQ ID NO: 2232055 - RNA, 19 nt, Homo sapiens
  misc_RNA (1)...(19): siRNA sense strand
aggagaagaggaaacacaa

SEQ ID NO: 2232056 - RNA, 19 nt, Homo sapiens
  misc_RNA (1)...(19): siRNA sense strand
ccagaagaggagaagagga

SEQ ID NO: 2232057 - RNA, 19 nt, Homo sapiens
  misc_RNA (1)...(19): siRNA sense strand
cggaaauauggccucaaua

SEQ ID NO: 2232058 - RNA, 19 nt, Homo sapiens
  misc_RNA (1)...(19): siRNA sense strand
acgcgaaggauaucgguuu

SEQ ID NO: 2232059 - RNA, 19 nt, Homo sapiens
  misc_RNA (1)...(19): siRNA sense strand
caguuaaagaagaugaaga

SEQ ID NO: 2232060 - RNA, 19 nt, Homo sapiens
  misc_RNA (1)...(19): siRNA sense strand
ccauccagacugaggaaga

SEQ ID NO: 2232061 - RNA, 19 nt, Homo sapiens
  misc_RNA (1)...(19): siRNA sense strand
acaaauaccacccaggcua

SEQ ID NO: 2232062 - RNA, 19 nt, Homo sapiens
  misc_RNA (1)...(19): siRNA sense strand
cgguaaugcugguggucug

SEQ ID NO: 2232063 - RNA, 19 nt, Homo sapiens
  misc_RNA (1)...(19): siRNA sense strand
agagcugaggagaagauua

SEQ ID NO: 2232064 - RNA, 19 nt, Homo sapiens
  misc_RNA (1)...(19): siRNA sense strand
acgggugaaugcugcuaaa

SEQ ID NO: 2232065 - RNA, 19 nt, Homo sapiens
  misc_RNA (1)...(19): siRNA sense strand
agaagaaagaugaggcaga

SEQ ID NO: 2232066 - RNA, 19 nt, Homo sapiens
  misc_RNA (1)...(19): siRNA sense strand
gcgcaaaagaagaaagaug

SEQ ID NO: 2232067 - RNA, 19 nt, Homo sapiens
  misc_RNA (1)...(19): siRNA sense strand
aagaugaggcagaggucca

SEQ ID NO: 2232068 - RNA, 19 nt, Homo sapiens
  misc_RNA (1)...(19): siRNA sense strand
aaguggaggaagaagcgaa

SEQ ID NO: 2232069 - RNA, 19 nt, Homo sapiens
  misc_RNA (1)...(19): siRNA sense strand
gcuaaauaaugcagcccau

SEQ ID NO: 2232070 - RNA, 19 nt, Homo sapiens
  misc_RNA (1)...(19): siRNA sense strand
ugguugauguggacggcaa

SEQ ID NO: 2232071 - RNA, 19 nt, Homo sapiens
  misc_RNA (1)...(19): siRNA sense strand
uuucggaagcugagagaca

SEQ ID NO: 2232072 - RNA, 19 nt, Homo sapiens
  misc_RNA (1)...(19): siRNA sense strand
aaggaggaguucaggccua

SEQ ID NO: 2232073 - RNA, 19 nt, Homo sapiens
  misc_RNA (1)...(19): siRNA sense strand
ggaggaucugauugugaaa

SEQ ID NO: 2232074 - RNA, 19 nt, Homo sapiens
  misc_RNA (1)...(19): siRNA sense strand
ggaucaucguggagcccau

SEQ ID NO: 2232075 - RNA, 19 nt, Homo sapiens
  misc_RNA (1)...(19): siRNA sense strand
gagcaaggaaagagggcag

SEQ ID NO: 2232076 - RNA, 19 nt, Homo sapiens
  misc_RNA (1)...(19): siRNA sense strand
cagcagggugagaggacga

SEQ ID NO: 2232077 - RNA, 19 nt, Homo sapiens
  misc_RNA (1)...(19): siRNA sense strand
aguuaaugaaacagcugaa

SEQ ID NO: 2232078 - RNA, 19 nt, Homo sapiens
  misc_RNA (1)...(19): siRNA sense strand
acacauuagucaagcugca

SEQ ID NO: 2232079 - RNA, 19 nt, Homo sapiens
  misc_RNA (1)...(19): siRNA sense strand
gggccuagaucucaggagu

SEQ ID NO: 2232080 - RNA, 19 nt, Homo sapiens
  misc_RNA (1)...(19): siRNA sense strand
ccggagaacuuuguggaga

SEQ ID NO: 2232081 - RNA, 19 nt, Homo sapiens
  misc_RNA (1)...(19): siRNA sense strand
acucuaaagccauucacaa

SEQ ID NO: 2232082 - RNA, 19 nt, Homo sapiens
  misc_RNA (1)...(19): siRNA sense strand
gcgccuucuugguggacga

SEQ ID NO: 2232083 - RNA, 19 nt, Homo sapiens
  misc_RNA (1)...(19): siRNA sense strand
gcuaaauaaugcagcccau

SEQ ID NO: 2232084 - RNA, 19 nt, Homo sapiens
  misc_RNA (1)...(19): siRNA sense strand
ugguugauguggacggcaa

SEQ ID NO: 2232085 - RNA, 19 nt, Homo sapiens
  misc_RNA (1)...(19): siRNA sense strand
uuucggaagcugagagaca

SEQ ID NO: 2232086 - RNA, 19 nt, Homo sapiens
  misc_RNA (1)...(19): siRNA sense strand
aaggaggaguucaggccua

SEQ ID NO: 2232087 - RNA, 19 nt, Homo sapiens
  misc_RNA (1)...(19): siRNA sense strand
ggaggaucugauugugaaa

SEQ ID NO: 2232088 - RNA, 19 nt, Homo sapiens
  misc_RNA (1)...(19): siRNA sense strand
ggaucaucguggagcccau

SEQ ID NO: 2232089 - RNA, 19 nt, Homo sapiens
  misc_RNA (1)...(19): siRNA sense strand
gagcaaggaaagagggcag

SEQ ID NO: 2232090 - RNA, 19 nt, Homo sapiens
  misc_RNA (1)...(19): siRNA sense strand
cagcagggugagaggacga

SEQ ID NO: 2232091 - RNA, 19 nt, Homo sapiens
  misc_RNA (1)...(19): siRNA sense strand
aguuaaugaaacagcugaa

SEQ ID NO: 2232092 - RNA, 19 nt, Homo sapiens
  misc_RNA (1)...(19): siRNA sense strand
acacauuagucaagcugca

SEQ ID NO: 2232093 - RNA, 19 nt, Homo sapiens
  misc_RNA (1)...(19): siRNA sense strand
gggccuagaucucaggagu

SEQ ID NO: 2232094 - RNA, 19 nt, Homo sapiens
  misc_RNA (1)...(19): siRNA sense strand
ccggagaacuuuguggaga

SEQ ID NO: 2232095 - RNA, 19 nt, Homo sapiens
  misc_RNA (1)...(19): siRNA sense strand
acucuaaagccauucacaa

SEQ ID NO: 2232096 - RNA, 19 nt, Homo sapiens
  misc_RNA (1)...(19): siRNA sense strand
gcgccuucuugguggacga

SEQ ID NO: 2232097 - RNA, 19 nt, Homo sapiens
  misc_RNA (1)...(19): siRNA sense strand
ggaaggaguuggagaacaa

SEQ ID NO: 2232098 - RNA, 19 nt, Homo sapiens
  misc_RNA (1)...(19): siRNA sense strand
gggauaaguuugaggagga

SEQ ID NO: 2232099 - RNA, 19 nt, Homo sapiens
  misc_RNA (1)...(19): siRNA sense strand
gggccgagacagaaagaaa

SEQ ID NO: 2232100 - RNA, 19 nt, Homo sapiens
  misc_RNA (1)...(19): siRNA sense strand
aagaggaaguggauagaua

SEQ ID NO: 2232101 - RNA, 19 nt, Homo sapiens
  misc_RNA (1)...(19): siRNA sense strand
guacagagaugguggcuga

SEQ ID NO: 2232102 - RNA, 19 nt, Homo sapiens
  misc_RNA (1)...(19): siRNA sense strand
gcacagaagugacagacua

SEQ ID NO: 2232103 - RNA, 19 nt, Homo sapiens
  misc_RNA (1)...(19): siRNA sense strand
cggaguggcuagagaaaca

SEQ ID NO: 2232104 - RNA, 19 nt, Homo sapiens
  misc_RNA (1)...(19): siRNA sense strand
ccuuaaagccaaugcagaa

SEQ ID NO: 2232105 - RNA, 19 nt, Homo sapiens
  misc_RNA (1)...(19): siRNA sense strand
gcgauguacuguuggacaa

SEQ ID NO: 2232106 - RNA, 19 nt, Homo sapiens
  misc_RNA (1)...(19): siRNA sense strand
cguggaagaugaaggagaa

SEQ ID NO: 2232107 - RNA, 19 nt, Homo sapiens
  misc_RNA (1)...(19): siRNA sense strand
ggguagagcgauugaugaa

SEQ ID NO: 2232108 - RNA, 19 nt, Homo sapiens
  misc_RNA (1)...(19): siRNA sense strand
ggaaauaaagugauugaga

SEQ ID NO: 2232109 - RNA, 19 nt, Homo sapiens
  misc_RNA (1)...(19): siRNA sense strand
gcagcuauguucagagaau

SEQ ID NO: 2232110 - RNA, 19 nt, Homo sapiens
  misc_RNA (1)...(19): siRNA sense strand
ggacagacugauagcagaa

SEQ ID NO: 2232111 - RNA, 19 nt, Homo sapiens
  misc_RNA (1)...(19): siRNA sense strand
cugaugagcugcugaauau

SEQ ID NO: 2232112 - RNA, 19 nt, Homo sapiens
  misc_RNA (1)...(19): siRNA sense strand
uggcauugcagcagugaaa

SEQ ID NO: 2232113 - RNA, 19 nt, Homo sapiens
  misc_RNA (1)...(19): siRNA sense strand
cuaaauuuccgcagcaaua

SEQ ID NO: 2232114 - RNA, 19 nt, Homo sapiens
  misc_RNA (1)...(19): siRNA sense strand
ucaaauuguuagagacuga

SEQ ID NO: 2232115 - RNA, 19 nt, Homo sapiens
  misc_RNA (1)...(19): siRNA sense strand
uggaaugauugcuggagaa

SEQ ID NO: 2232116 - RNA, 19 nt, Homo sapiens
  misc_RNA (1)...(19): siRNA sense strand
cagcugaggaaguuggaua

SEQ ID NO: 2232117 - RNA, 19 nt, Homo sapiens
  misc_RNA (1)...(19): siRNA sense strand
gaugugagccugcggaaua

SEQ ID NO: 2232118 - RNA, 19 nt, Homo sapiens
  misc_RNA (1)...(19): siRNA sense strand
ccggaaaucugaacgggaa

SEQ ID NO: 2232119 - RNA, 19 nt, Homo sapiens
  misc_RNA (1)...(19): siRNA sense strand
gaauauucucacagagcua

SEQ ID NO: 2232120 - RNA, 19 nt, Homo sapiens
  misc_RNA (1)...(19): siRNA sense strand
agacagaaucaucgaguuu

SEQ ID NO: 2232121 - RNA, 19 nt, Homo sapiens
  misc_RNA (1)...(19): siRNA sense strand
ugaaggagcgggaggaauu

SEQ ID NO: 2232122 - RNA, 19 nt, Homo sapiens
  misc_RNA (1)...(19): siRNA sense strand
caaacauggugguggcuuu

SEQ ID NO: 2232123 - RNA, 19 nt, Homo sapiens
  misc_RNA (1)...(19): siRNA sense strand
gugcugggacuguggaaua

SEQ ID NO: 2232124 - RNA, 19 nt, Homo sapiens
  misc_RNA (1)...(19): siRNA sense strand
ggaagucgccuguggaaau

SEQ ID NO: 2232125 - RNA, 19 nt, Homo sapiens
  misc_RNA (1)...(19): siRNA sense strand
gagaagaggcaauuucaaa

SEQ ID NO: 2232126 - RNA, 19 nt, Homo sapiens
  misc_RNA (1)...(19): siRNA sense strand
agaucauguuucaggcaua

SEQ ID NO: 2232127 - RNA, 19 nt, Homo sapiens
  misc_RNA (1)...(19): siRNA sense strand
gaauccagguacaagauaa

SEQ ID NO: 2232128 - RNA, 19 nt, Homo sapiens
  misc_RNA (1)...(19): siRNA sense strand
gcucauacacuucugaaua

SEQ ID NO: 2232129 - RNA, 19 nt, Homo sapiens
  misc_RNA (1)...(19): siRNA sense strand
uguagaagauggaggucau

SEQ ID NO: 2232130 - RNA, 19 nt, Homo sapiens
  misc_RNA (1)...(19): siRNA sense strand
gcaaccaaguagugaggau

SEQ ID NO: 2232131 - RNA, 19 nt, Homo sapiens
  misc_RNA (1)...(19): siRNA sense strand
guggauggcuugagggagu

SEQ ID NO: 2232132 - RNA, 19 nt, Homo sapiens
  misc_RNA (1)...(19): siRNA sense strand
cguagguggucuuaugaaa

SEQ ID NO: 2232133 - RNA, 19 nt, Homo sapiens
  misc_RNA (1)...(19): siRNA sense strand
gcacaauccuuagggacaa

SEQ ID NO: 2232134 - RNA, 19 nt, Homo sapiens
  misc_RNA (1)...(19): siRNA sense strand
gugaaaugcaugcggucua

SEQ ID NO: 2232135 - RNA, 19 nt, Homo sapiens
  misc_RNA (1)...(19): siRNA sense strand
gagguaaugaagaugguaa

SEQ ID NO: 2232136 - RNA, 19 nt, Homo sapiens
  misc_RNA (1)...(19): siRNA sense strand
ucagaaagcaggucaacua

SEQ ID NO: 2232137 - RNA, 19 nt, Homo sapiens
  misc_RNA (1)...(19): siRNA sense strand
gagcugaaccggaugagaa

SEQ ID NO: 2232138 - RNA, 19 nt, Homo sapiens
  misc_RNA (1)...(19): siRNA sense strand
cugaagaccuuaaagccaa

SEQ ID NO: 2232139 - RNA, 19 nt, Homo sapiens
  misc_RNA (1)...(19): siRNA sense strand
augcugagauugagguaau

SEQ ID NO: 2232140 - RNA, 19 nt, Homo sapiens
  misc_RNA (1)...(19): siRNA sense strand
caagauuauaagagaguca

SEQ ID NO: 2232141 - RNA, 19 nt, Homo sapiens
  misc_RNA (1)...(19): siRNA sense strand
ggacaguagaaaucaaauu

SEQ ID NO: 2232142 - RNA, 19 nt, Homo sapiens
  misc_RNA (1)...(19): siRNA sense strand
gcucauguguagaaguaga

SEQ ID NO: 2232143 - RNA, 19 nt, Homo sapiens
  misc_RNA (1)...(19): siRNA sense strand
agguacaagauaacagaua

SEQ ID NO: 2232144 - RNA, 19 nt, Homo sapiens
  misc_RNA (1)...(19): siRNA sense strand
agauggaggucauguguuu

SEQ ID NO: 2232145 - RNA, 19 nt, Homo sapiens
  misc_RNA (1)...(19): siRNA sense strand
ccaaaaugcaacuggacaa

SEQ ID NO: 2232146 - RNA, 19 nt, Homo sapiens
  misc_RNA (1)...(19): siRNA sense strand
cggagauuucauagagaau

SEQ ID NO: 2232147 - RNA, 19 nt, Homo sapiens
  misc_RNA (1)...(19): siRNA sense strand
gugaacacguggaagauga

SEQ ID NO: 2232148 - RNA, 19 nt, Homo sapiens
  misc_RNA (1)...(19): siRNA sense strand
gguacaagauaacagauau

SEQ ID NO: 2232149 - RNA, 19 nt, Homo sapiens
  misc_RNA (1)...(19): siRNA sense strand
cagaagggacaguagaaau

SEQ ID NO: 2232150 - RNA, 19 nt, Homo sapiens
  misc_RNA (1)...(19): siRNA sense strand
agauguggaugaugggcua

SEQ ID NO: 2232151 - RNA, 19 nt, Homo sapiens
  misc_RNA (1)...(19): siRNA sense strand
gcuucuacuuucuggaauu

SEQ ID NO: 2232152 - RNA, 19 nt, Homo sapiens
  misc_RNA (1)...(19): siRNA sense strand
agauugagguaaugaagau

SEQ ID NO: 2232153 - RNA, 19 nt, Homo sapiens
  misc_RNA (1)...(19): siRNA sense strand
aagacuggguagagcgauu

SEQ ID NO: 2232154 - RNA, 19 nt, Homo sapiens
  misc_RNA (1)...(19): siRNA sense strand
cggacuggcagaagaaauu

SEQ ID NO: 2232155 - RNA, 19 nt, Homo sapiens
  misc_RNA (1)...(19): siRNA sense strand
ucgaaaugaacgugcaauu

SEQ ID NO: 2232156 - RNA, 19 nt, Homo sapiens
  misc_RNA (1)...(19): siRNA sense strand
gagggaagggaauuagaaa

SEQ ID NO: 2232157 - RNA, 19 nt, Homo sapiens
  misc_RNA (1)...(19): siRNA sense strand
gaagauuauugaagaagca

SEQ ID NO: 2232158 - RNA, 19 nt, Homo sapiens
  misc_RNA (1)...(19): siRNA sense strand
gaggaauaccugugggagu

SEQ ID NO: 2232159 - RNA, 19 nt, Homo sapiens
  misc_RNA (1)...(19): siRNA sense strand
gaacaguagaacuaaguau

SEQ ID NO: 2232160 - RNA, 19 nt, Homo sapiens
  misc_RNA (1)...(19): siRNA sense strand
gcuacaggcagcugaggaa

SEQ ID NO: 2232161 - RNA, 19 nt, Homo sapiens
  misc_RNA (1)...(19): siRNA sense strand
gaggaggagggaagggaau

SEQ ID NO: 2232162 - RNA, 19 nt, Homo sapiens
  misc_RNA (1)...(19): siRNA sense strand
gaucaaauuguuagagacu

SEQ ID NO: 2232163 - RNA, 19 nt, Homo sapiens
  misc_RNA (1)...(19): siRNA sense strand
cagaugaacagaauugaua

SEQ ID NO: 2232164 - RNA, 19 nt, Homo sapiens
  misc_RNA (1)...(19): siRNA sense strand
caguagauguugaacuuau

SEQ ID NO: 2232165 - RNA, 19 nt, Homo sapiens
  misc_RNA (1)...(19): siRNA sense strand
guggagaagucuaucaaga

SEQ ID NO: 2232166 - RNA, 19 nt, Homo sapiens
  misc_RNA (1)...(19): siRNA sense strand
caaagagguuccaggcaca

SEQ ID NO: 2232167 - RNA, 19 nt, Homo sapiens
  misc_RNA (1)...(19): siRNA sense strand
aaggaacagugaaggcuua

SEQ ID NO: 2232168 - RNA, 19 nt, Homo sapiens
  misc_RNA (1)...(19): siRNA sense strand
ggaaguuaauccaguacau

SEQ ID NO: 2232169 - RNA, 19 nt, Homo sapiens
  misc_RNA (1)...(19): siRNA sense strand
gggaguuguugcuguagaa

SEQ ID NO: 2232170 - RNA, 19 nt, Homo sapiens
  misc_RNA (1)...(19): siRNA sense strand
cagcaaaccuggauucuga

SEQ ID NO: 2232171 - RNA, 19 nt, Homo sapiens
  misc_RNA (1)...(19): siRNA sense strand
gcuccuggguggugauuga

SEQ ID NO: 2232172 - RNA, 19 nt, Homo sapiens
  misc_RNA (1)...(19): siRNA sense strand
uugccaaaaugguggguua

SEQ ID NO: 2232173 - RNA, 19 nt, Homo sapiens
  misc_RNA (1)...(19): siRNA sense strand
ugaaagaggaaguggauag

SEQ ID NO: 2232174 - RNA, 19 nt, Homo sapiens
  misc_RNA (1)...(19): siRNA sense strand
uggaauaccuguacagcca

SEQ ID NO: 2232175 - RNA, 19 nt, Homo sapiens
  misc_RNA (1)...(19): siRNA sense strand
aagucuaucaagaaggaaa

SEQ ID NO: 2232176 - RNA, 19 nt, Homo sapiens
  misc_RNA (1)...(19): siRNA sense strand
gagcaagggauaaguuuga

SEQ ID NO: 2232177 - RNA, 19 nt, Homo sapiens
  misc_RNA (1)...(19): siRNA sense strand
gcagaagaaauucgccaua

SEQ ID NO: 2232178 - RNA, 19 nt, Homo sapiens
  misc_RNA (1)...(19): siRNA sense strand
uugggaaagaagagggaau

SEQ ID NO: 2232179 - RNA, 19 nt, Homo sapiens
  misc_RNA (1)...(19): siRNA sense strand
caacaacaacuaugcaaau

SEQ ID NO: 2232180 - RNA, 19 nt, Homo sapiens
  misc_RNA (1)...(19): siRNA sense strand
ccauauuugugaugagacu

SEQ ID NO: 2232181 - RNA, 19 nt, Homo sapiens
  misc_RNA (1)...(19): siRNA sense strand
ccaaagaccugcugcaauc

SEQ ID NO: 2232182 - RNA, 19 nt, Homo sapiens
  misc_RNA (1)...(19): siRNA sense strand
gaacaggcuuccaggagga

SEQ ID NO: 2232183 - RNA, 19 nt, Homo sapiens
  misc_RNA (1)...(19): siRNA sense strand
uguagaaacccgaacagua

SEQ ID NO: 2232184 - RNA, 19 nt, Homo sapiens
  misc_RNA (1)...(19): siRNA sense strand
cguguggacuggcaggaaa

SEQ ID NO: 2232185 - RNA, 19 nt, Homo sapiens
  misc_RNA (1)...(19): siRNA sense strand
gcauugagaaccugcagaa

SEQ ID NO: 2232186 - RNA, 19 nt, Homo sapiens
  misc_RNA (1)...(19): siRNA sense strand
agguaaugaagaugguaau

SEQ ID NO: 2232187 - RNA, 19 nt, Homo sapiens
  misc_RNA (1)...(19): siRNA sense strand
aggcagaacugaaaaucaa

SEQ ID NO: 2232188 - RNA, 19 nt, Homo sapiens
  misc_RNA (1)...(19): siRNA sense strand
ggcacaauccuuagggaca

SEQ ID NO: 2232189 - RNA, 19 nt, Homo sapiens
  misc_RNA (1)...(19): siRNA sense strand
ucucagagcuuccgaacuu

SEQ ID NO: 2232190 - RNA, 19 nt, Homo sapiens
  misc_RNA (1)...(19): siRNA sense strand
acucgguaauagaggaaaa

SEQ ID NO: 2232191 - RNA, 19 nt, Homo sapiens
  misc_RNA (1)...(19): siRNA sense strand
ggaggagggaagggaauua

SEQ ID NO: 2232192 - RNA, 19 nt, Homo sapiens
  misc_RNA (1)...(19): siRNA sense strand
uguuagagacugaaagcuu

SEQ ID NO: 2232193 - RNA, 19 nt, Homo sapiens
  misc_RNA (1)...(19): siRNA sense strand
cuucugacaugcugacuua

SEQ ID NO: 2232194 - RNA, 19 nt, Homo sapiens
  misc_RNA (1)...(19): siRNA sense strand
uggcaugguagcuuggaaa

SEQ ID NO: 2232195 - RNA, 19 nt, Homo sapiens
  misc_RNA (1)...(19): siRNA sense strand
gaaggagaauccagguaca

SEQ ID NO: 2232196 - RNA, 19 nt, Homo sapiens
  misc_RNA (1)...(19): siRNA sense strand
augugaaagauguggauga

SEQ ID NO: 2232197 - RNA, 19 nt, Homo sapiens
  misc_RNA (1)...(19): siRNA sense strand
ggaaggaguuggagaacaa

SEQ ID NO: 2232198 - RNA, 19 nt, Homo sapiens
  misc_RNA (1)...(19): siRNA sense strand
gggauaaguuugaggagga

SEQ ID NO: 2232199 - RNA, 19 nt, Homo sapiens
  misc_RNA (1)...(19): siRNA sense strand
gggccgagacagaaagaaa

SEQ ID NO: 2232200 - RNA, 19 nt, Homo sapiens
  misc_RNA (1)...(19): siRNA sense strand
aagaggaaguggauagaua

SEQ ID NO: 2232201 - RNA, 19 nt, Homo sapiens
  misc_RNA (1)...(19): siRNA sense strand
guacagagaugguggcuga

SEQ ID NO: 2232202 - RNA, 19 nt, Homo sapiens
  misc_RNA (1)...(19): siRNA sense strand
gcacagaagugacagacua

SEQ ID NO: 2232203 - RNA, 19 nt, Homo sapiens
  misc_RNA (1)...(19): siRNA sense strand
cggaguggcuagagaaaca

SEQ ID NO: 2232204 - RNA, 19 nt, Homo sapiens
  misc_RNA (1)...(19): siRNA sense strand
ccuuaaagccaaugcagaa

SEQ ID NO: 2232205 - RNA, 19 nt, Homo sapiens
  misc_RNA (1)...(19): siRNA sense strand
gcgauguacuguuggacaa

SEQ ID NO: 2232206 - RNA, 19 nt, Homo sapiens
  misc_RNA (1)...(19): siRNA sense strand
cguggaagaugaaggagaa

SEQ ID NO: 2232207 - RNA, 19 nt, Homo sapiens
  misc_RNA (1)...(19): siRNA sense strand
ggguagagcgauugaugaa

SEQ ID NO: 2232208 - RNA, 19 nt, Homo sapiens
  misc_RNA (1)...(19): siRNA sense strand
ggaaauaaagugauugaga

SEQ ID NO: 2232209 - RNA, 19 nt, Homo sapiens
  misc_RNA (1)...(19): siRNA sense strand
gcagcuauguucagagaau

SEQ ID NO: 2232210 - RNA, 19 nt, Homo sapiens
  misc_RNA (1)...(19): siRNA sense strand
ggacagacugauagcagaa

SEQ ID NO: 2232211 - RNA, 19 nt, Homo sapiens
  misc_RNA (1)...(19): siRNA sense strand
cugaugagcugcugaauau

SEQ ID NO: 2232212 - RNA, 19 nt, Homo sapiens
  misc_RNA (1)...(19): siRNA sense strand
uggcauugcagcagugaaa

SEQ ID NO: 2232213 - RNA, 19 nt, Homo sapiens
  misc_RNA (1)...(19): siRNA sense strand
cuaaauuuccgcagcaaua

SEQ ID NO: 2232214 - RNA, 19 nt, Homo sapiens
  misc_RNA (1)...(19): siRNA sense strand
ucaaauuguuagagacuga

SEQ ID NO: 2232215 - RNA, 19 nt, Homo sapiens
  misc_RNA (1)...(19): siRNA sense strand
uggaaugauugcuggagaa

SEQ ID NO: 2232216 - RNA, 19 nt, Homo sapiens
  misc_RNA (1)...(19): siRNA sense strand
cagcugaggaaguuggaua

SEQ ID NO: 2232217 - RNA, 19 nt, Homo sapiens
  misc_RNA (1)...(19): siRNA sense strand
gaugugagccugcggaaua

SEQ ID NO: 2232218 - RNA, 19 nt, Homo sapiens
  misc_RNA (1)...(19): siRNA sense strand
ccggaaaucugaacgggaa

SEQ ID NO: 2232219 - RNA, 19 nt, Homo sapiens
  misc_RNA (1)...(19): siRNA sense strand
gaauauucucacagagcua

SEQ ID NO: 2232220 - RNA, 19 nt, Homo sapiens
  misc_RNA (1)...(19): siRNA sense strand
agacagaaucaucgaguuu

SEQ ID NO: 2232221 - RNA, 19 nt, Homo sapiens
  misc_RNA (1)...(19): siRNA sense strand
ugaaggagcgggaggaauu

SEQ ID NO: 2232222 - RNA, 19 nt, Homo sapiens
  misc_RNA (1)...(19): siRNA sense strand
caaacauggugguggcuuu

SEQ ID NO: 2232223 - RNA, 19 nt, Homo sapiens
  misc_RNA (1)...(19): siRNA sense strand
gugcugggacuguggaaua

SEQ ID NO: 2232224 - RNA, 19 nt, Homo sapiens
  misc_RNA (1)...(19): siRNA sense strand
ggaagucgccuguggaaau

SEQ ID NO: 2232225 - RNA, 19 nt, Homo sapiens
  misc_RNA (1)...(19): siRNA sense strand
gagaagaggcaauuucaaa

SEQ ID NO: 2232226 - RNA, 19 nt, Homo sapiens
  misc_RNA (1)...(19): siRNA sense strand
agaucauguuucaggcaua

SEQ ID NO: 2232227 - RNA, 19 nt, Homo sapiens
  misc_RNA (1)...(19): siRNA sense strand
gaauccagguacaagauaa

SEQ ID NO: 2232228 - RNA, 19 nt, Homo sapiens
  misc_RNA (1)...(19): siRNA sense strand
gcucauacacuucugaaua

SEQ ID NO: 2232229 - RNA, 19 nt, Homo sapiens
  misc_RNA (1)...(19): siRNA sense strand
uguagaagauggaggucau

SEQ ID NO: 2232230 - RNA, 19 nt, Homo sapiens
  misc_RNA (1)...(19): siRNA sense strand
gcaaccaaguagugaggau

SEQ ID NO: 2232231 - RNA, 19 nt, Homo sapiens
  misc_RNA (1)...(19): siRNA sense strand
guggauggcuugagggagu

SEQ ID NO: 2232232 - RNA, 19 nt, Homo sapiens
  misc_RNA (1)...(19): siRNA sense strand
cguagguggucuuaugaaa

SEQ ID NO: 2232233 - RNA, 19 nt, Homo sapiens
  misc_RNA (1)...(19): siRNA sense strand
gcacaauccuuagggacaa

SEQ ID NO: 2232234 - RNA, 19 nt, Homo sapiens
  misc_RNA (1)...(19): siRNA sense strand
gugaaaugcaugcggucua

SEQ ID NO: 2232235 - RNA, 19 nt, Homo sapiens
  misc_RNA (1)...(19): siRNA sense strand
gagguaaugaagaugguaa

SEQ ID NO: 2232236 - RNA, 19 nt, Homo sapiens
  misc_RNA (1)...(19): siRNA sense strand
ucagaaagcaggucaacua

SEQ ID NO: 2232237 - RNA, 19 nt, Homo sapiens
  misc_RNA (1)...(19): siRNA sense strand
gagcugaaccggaugagaa

SEQ ID NO: 2232238 - RNA, 19 nt, Homo sapiens
  misc_RNA (1)...(19): siRNA sense strand
cugaagaccuuaaagccaa

SEQ ID NO: 2232239 - RNA, 19 nt, Homo sapiens
  misc_RNA (1)...(19): siRNA sense strand
augcugagauugagguaau

SEQ ID NO: 2232240 - RNA, 19 nt, Homo sapiens
  misc_RNA (1)...(19): siRNA sense strand
caagauuauaagagaguca

SEQ ID NO: 2232241 - RNA, 19 nt, Homo sapiens
  misc_RNA (1)...(19): siRNA sense strand
ggacaguagaaaucaaauu

SEQ ID NO: 2232242 - RNA, 19 nt, Homo sapiens
  misc_RNA (1)...(19): siRNA sense strand
gcucauguguagaaguaga

SEQ ID NO: 2232243 - RNA, 19 nt, Homo sapiens
  misc_RNA (1)...(19): siRNA sense strand
agguacaagauaacagaua

SEQ ID NO: 2232244 - RNA, 19 nt, Homo sapiens
  misc_RNA (1)...(19): siRNA sense strand
agauggaggucauguguuu

SEQ ID NO: 2232245 - RNA, 19 nt, Homo sapiens
  misc_RNA (1)...(19): siRNA sense strand
ccaaaaugcaacuggacaa

SEQ ID NO: 2232246 - RNA, 19 nt, Homo sapiens
  misc_RNA (1)...(19): siRNA sense strand
cggagauuucauagagaau

SEQ ID NO: 2232247 - RNA, 19 nt, Homo sapiens
  misc_RNA (1)...(19): siRNA sense strand
gugaacacguggaagauga

SEQ ID NO: 2232248 - RNA, 19 nt, Homo sapiens
  misc_RNA (1)...(19): siRNA sense strand
gguacaagauaacagauau

SEQ ID NO: 2232249 - RNA, 19 nt, Homo sapiens
  misc_RNA (1)...(19): siRNA sense strand
cagaagggacaguagaaau

SEQ ID NO: 2232250 - RNA, 19 nt, Homo sapiens
  misc_RNA (1)...(19): siRNA sense strand
agauguggaugaugggcua

SEQ ID NO: 2232251 - RNA, 19 nt, Homo sapiens
  misc_RNA (1)...(19): siRNA sense strand
gcuucuacuuucuggaauu

SEQ ID NO: 2232252 - RNA, 19 nt, Homo sapiens
  misc_RNA (1)...(19): siRNA sense strand
agauugagguaaugaagau

SEQ ID NO: 2232253 - RNA, 19 nt, Homo sapiens
  misc_RNA (1)...(19): siRNA sense strand
aagacuggguagagcgauu

SEQ ID NO: 2232254 - RNA, 19 nt, Homo sapiens
  misc_RNA (1)...(19): siRNA sense strand
cggacuggcagaagaaauu

SEQ ID NO: 2232255 - RNA, 19 nt, Homo sapiens
  misc_RNA (1)...(19): siRNA sense strand
ucgaaaugaacgugcaauu

SEQ ID NO: 2232256 - RNA, 19 nt, Homo sapiens
  misc_RNA (1)...(19): siRNA sense strand
gagggaagggaauuagaaa

SEQ ID NO: 2232257 - RNA, 19 nt, Homo sapiens
  misc_RNA (1)...(19): siRNA sense strand
gaagauuauugaagaagca

SEQ ID NO: 2232258 - RNA, 19 nt, Homo sapiens
  misc_RNA (1)...(19): siRNA sense strand
gaggaauaccugugggagu

SEQ ID NO: 2232259 - RNA, 19 nt, Homo sapiens
  misc_RNA (1)...(19): siRNA sense strand
gaacaguagaacuaaguau

SEQ ID NO: 2232260 - RNA, 19 nt, Homo sapiens
  misc_RNA (1)...(19): siRNA sense strand
gcuacaggcagcugaggaa

SEQ ID NO: 2232261 - RNA, 19 nt, Homo sapiens
  misc_RNA (1)...(19): siRNA sense strand
gaggaggagggaagggaau

SEQ ID NO: 2232262 - RNA, 19 nt, Homo sapiens
  misc_RNA (1)...(19): siRNA sense strand
gaucaaauuguuagagacu

SEQ ID NO: 2232263 - RNA, 19 nt, Homo sapiens
  misc_RNA (1)...(19): siRNA sense strand
cagaugaacagaauugaua

SEQ ID NO: 2232264 - RNA, 19 nt, Homo sapiens
  misc_RNA (1)...(19): siRNA sense strand
caguagauguugaacuuau

SEQ ID NO: 2232265 - RNA, 19 nt, Homo sapiens
  misc_RNA (1)...(19): siRNA sense strand
guggagaagucuaucaaga

SEQ ID NO: 2232266 - RNA, 19 nt, Homo sapiens
  misc_RNA (1)...(19): siRNA sense strand
caaagagguuccaggcaca

SEQ ID NO: 2232267 - RNA, 19 nt, Homo sapiens
  misc_RNA (1)...(19): siRNA sense strand
aaggaacagugaaggcuua

SEQ ID NO: 2232268 - RNA, 19 nt, Homo sapiens
  misc_RNA (1)...(19): siRNA sense strand
ggaaguuaauccaguacau

SEQ ID NO: 2232269 - RNA, 19 nt, Homo sapiens
  misc_RNA (1)...(19): siRNA sense strand
gggaguuguugcuguagaa

SEQ ID NO: 2232270 - RNA, 19 nt, Homo sapiens
  misc_RNA (1)...(19): siRNA sense strand
cagcaaaccuggauucuga

SEQ ID NO: 2232271 - RNA, 19 nt, Homo sapiens
  misc_RNA (1)...(19): siRNA sense strand
gcuccuggguggugauuga

SEQ ID NO: 2232272 - RNA, 19 nt, Homo sapiens
  misc_RNA (1)...(19): siRNA sense strand
uugccaaaaugguggguua

SEQ ID NO: 2232273 - RNA, 19 nt, Homo sapiens
  misc_RNA (1)...(19): siRNA sense strand
ugaaagaggaaguggauag

SEQ ID NO: 2232274 - RNA, 19 nt, Homo sapiens
  misc_RNA (1)...(19): siRNA sense strand
uggaauaccuguacagcca

SEQ ID NO: 2232275 - RNA, 19 nt, Homo sapiens
  misc_RNA (1)...(19): siRNA sense strand
aagucuaucaagaaggaaa

SEQ ID NO: 2232276 - RNA, 19 nt, Homo sapiens
  misc_RNA (1)...(19): siRNA sense strand
gagcaagggauaaguuuga

SEQ ID NO: 2232277 - RNA, 19 nt, Homo sapiens
  misc_RNA (1)...(19): siRNA sense strand
gcagaagaaauucgccaua

SEQ ID NO: 2232278 - RNA, 19 nt, Homo sapiens
  misc_RNA (1)...(19): siRNA sense strand
uugggaaagaagagggaau

SEQ ID NO: 2232279 - RNA, 19 nt, Homo sapiens
  misc_RNA (1)...(19): siRNA sense strand
caacaacaacuaugcaaau

SEQ ID NO: 2232280 - RNA, 19 nt, Homo sapiens
  misc_RNA (1)...(19): siRNA sense strand
ccauauuugugaugagacu

SEQ ID NO: 2232281 - RNA, 19 nt, Homo sapiens
  misc_RNA (1)...(19): siRNA sense strand
ccaaagaccugcugcaauc

SEQ ID NO: 2232282 - RNA, 19 nt, Homo sapiens
  misc_RNA (1)...(19): siRNA sense strand
gaacaggcuuccaggagga

SEQ ID NO: 2232283 - RNA, 19 nt, Homo sapiens
  misc_RNA (1)...(19): siRNA sense strand
uguagaaacccgaacagua

SEQ ID NO: 2232284 - RNA, 19 nt, Homo sapiens
  misc_RNA (1)...(19): siRNA sense strand
cguguggacuggcaggaaa

SEQ ID NO: 2232285 - RNA, 19 nt, Homo sapiens
  misc_RNA (1)...(19): siRNA sense strand
gcauugagaaccugcagaa

SEQ ID NO: 2232286 - RNA, 19 nt, Homo sapiens
  misc_RNA (1)...(19): siRNA sense strand
agguaaugaagaugguaau

SEQ ID NO: 2232287 - RNA, 19 nt, Homo sapiens
  misc_RNA (1)...(19): siRNA sense strand
aggcagaacugaaaaucaa

SEQ ID NO: 2232288 - RNA, 19 nt, Homo sapiens
  misc_RNA (1)...(19): siRNA sense strand
ggcacaauccuuagggaca

SEQ ID NO: 2232289 - RNA, 19 nt, Homo sapiens
  misc_RNA (1)...(19): siRNA sense strand
ucucagagcuuccgaacuu

SEQ ID NO: 2232290 - RNA, 19 nt, Homo sapiens
  misc_RNA (1)...(19): siRNA sense strand
acucgguaauagaggaaaa

SEQ ID NO: 2232291 - RNA, 19 nt, Homo sapiens
  misc_RNA (1)...(19): siRNA sense strand
ggaggagggaagggaauua

SEQ ID NO: 2232292 - RNA, 19 nt, Homo sapiens
  misc_RNA (1)...(19): siRNA sense strand
uguuagagacugaaagcuu

SEQ ID NO: 2232293 - RNA, 19 nt, Homo sapiens
  misc_RNA (1)...(19): siRNA sense strand
cuucugacaugcugacuua

SEQ ID NO: 2232294 - RNA, 19 nt, Homo sapiens
  misc_RNA (1)...(19): siRNA sense strand
uggcaugguagcuuggaaa

SEQ ID NO: 2232295 - RNA, 19 nt, Homo sapiens
  misc_RNA (1)...(19): siRNA sense strand
gaaggagaauccagguaca

SEQ ID NO: 2232296 - RNA, 19 nt, Homo sapiens
  misc_RNA (1)...(19): siRNA sense strand
augugaaagauguggauga

SEQ ID NO: 2232297 - RNA, 19 nt, Homo sapiens
  misc_RNA (1)...(19): siRNA sense strand
ggaaggaguuggagaacaa

SEQ ID NO: 2232298 - RNA, 19 nt, Homo sapiens
  misc_RNA (1)...(19): siRNA sense strand
gggauaaguuugaggagga

SEQ ID NO: 2232299 - RNA, 19 nt, Homo sapiens
  misc_RNA (1)...(19): siRNA sense strand
gggccgagacagaaagaaa

SEQ ID NO: 2232300 - RNA, 19 nt, Homo sapiens
  misc_RNA (1)...(19): siRNA sense strand
aagaggaaguggauagaua

SEQ ID NO: 2232301 - RNA, 19 nt, Homo sapiens
  misc_RNA (1)...(19): siRNA sense strand
guacagagaugguggcuga

SEQ ID NO: 2232302 - RNA, 19 nt, Homo sapiens
  misc_RNA (1)...(19): siRNA sense strand
gcacagaagugacagacua

SEQ ID NO: 2232303 - RNA, 19 nt, Homo sapiens
  misc_RNA (1)...(19): siRNA sense strand
cggaguggcuagagaaaca

SEQ ID NO: 2232304 - RNA, 19 nt, Homo sapiens
  misc_RNA (1)...(19): siRNA sense strand
ccuuaaagccaaugcagaa

SEQ ID NO: 2232305 - RNA, 19 nt, Homo sapiens
  misc_RNA (1)...(19): siRNA sense strand
gcgauguacuguuggacaa

SEQ ID NO: 2232306 - RNA, 19 nt, Homo sapiens
  misc_RNA (1)...(19): siRNA sense strand
cguggaagaugaaggagaa

SEQ ID NO: 2232307 - RNA, 19 nt, Homo sapiens
  misc_RNA (1)...(19): siRNA sense strand
ggguagagcgauugaugaa

SEQ ID NO: 2232308 - RNA, 19 nt, Homo sapiens
  misc_RNA (1)...(19): siRNA sense strand
ggaaauaaagugauugaga

SEQ ID NO: 2232309 - RNA, 19 nt, Homo sapiens
  misc_RNA (1)...(19): siRNA sense strand
gcagcuauguucagagaau

SEQ ID NO: 2232310 - RNA, 19 nt, Homo sapiens
  misc_RNA (1)...(19): siRNA sense strand
ggacagacugauagcagaa

SEQ ID NO: 2232311 - RNA, 19 nt, Homo sapiens
  misc_RNA (1)...(19): siRNA sense strand
cugaugagcugcugaauau

SEQ ID NO: 2232312 - RNA, 19 nt, Homo sapiens
  misc_RNA (1)...(19): siRNA sense strand
uggcauugcagcagugaaa

SEQ ID NO: 2232313 - RNA, 19 nt, Homo sapiens
  misc_RNA (1)...(19): siRNA sense strand
cuaaauuuccgcagcaaua

SEQ ID NO: 2232314 - RNA, 19 nt, Homo sapiens
  misc_RNA (1)...(19): siRNA sense strand
ucaaauuguuagagacuga

SEQ ID NO: 2232315 - RNA, 19 nt, Homo sapiens
  misc_RNA (1)...(19): siRNA sense strand
uggaaugauugcuggagaa

SEQ ID NO: 2232316 - RNA, 19 nt, Homo sapiens
  misc_RNA (1)...(19): siRNA sense strand
cagcugaggaaguuggaua

SEQ ID NO: 2232317 - RNA, 19 nt, Homo sapiens
  misc_RNA (1)...(19): siRNA sense strand
gaugugagccugcggaaua

SEQ ID NO: 2232318 - RNA, 19 nt, Homo sapiens
  misc_RNA (1)...(19): siRNA sense strand
ccggaaaucugaacgggaa

SEQ ID NO: 2232319 - RNA, 19 nt, Homo sapiens
  misc_RNA (1)...(19): siRNA sense strand
gaauauucucacagagcua

SEQ ID NO: 2232320 - RNA, 19 nt, Homo sapiens
  misc_RNA (1)...(19): siRNA sense strand
agacagaaucaucgaguuu

SEQ ID NO: 2232321 - RNA, 19 nt, Homo sapiens
  misc_RNA (1)...(19): siRNA sense strand
ugaaggagcgggaggaauu

SEQ ID NO: 2232322 - RNA, 19 nt, Homo sapiens
  misc_RNA (1)...(19): siRNA sense strand
caaacauggugguggcuuu

SEQ ID NO: 2232323 - RNA, 19 nt, Homo sapiens
  misc_RNA (1)...(19): siRNA sense strand
gugcugggacuguggaaua

SEQ ID NO: 2232324 - RNA, 19 nt, Homo sapiens
  misc_RNA (1)...(19): siRNA sense strand
ggaagucgccuguggaaau

SEQ ID NO: 2232325 - RNA, 19 nt, Homo sapiens
  misc_RNA (1)...(19): siRNA sense strand
gagaagaggcaauuucaaa

SEQ ID NO: 2232326 - RNA, 19 nt, Homo sapiens
  misc_RNA (1)...(19): siRNA sense strand
agaucauguuucaggcaua

SEQ ID NO: 2232327 - RNA, 19 nt, Homo sapiens
  misc_RNA (1)...(19): siRNA sense strand
gaauccagguacaagauaa

SEQ ID NO: 2232328 - RNA, 19 nt, Homo sapiens
  misc_RNA (1)...(19): siRNA sense strand
gcucauacacuucugaaua

SEQ ID NO: 2232329 - RNA, 19 nt, Homo sapiens
  misc_RNA (1)...(19): siRNA sense strand
uguagaagauggaggucau

SEQ ID NO: 2232330 - RNA, 19 nt, Homo sapiens
  misc_RNA (1)...(19): siRNA sense strand
gcaaccaaguagugaggau

SEQ ID NO: 2232331 - RNA, 19 nt, Homo sapiens
  misc_RNA (1)...(19): siRNA sense strand
guggauggcuugagggagu

SEQ ID NO: 2232332 - RNA, 19 nt, Homo sapiens
  misc_RNA (1)...(19): siRNA sense strand
cguagguggucuuaugaaa

SEQ ID NO: 2232333 - RNA, 19 nt, Homo sapiens
  misc_RNA (1)...(19): siRNA sense strand
gcacaauccuuagggacaa

SEQ ID NO: 2232334 - RNA, 19 nt, Homo sapiens
  misc_RNA (1)...(19): siRNA sense strand
gugaaaugcaugcggucua

SEQ ID NO: 2232335 - RNA, 19 nt, Homo sapiens
  misc_RNA (1)...(19): siRNA sense strand
gagguaaugaagaugguaa

SEQ ID NO: 2232336 - RNA, 19 nt, Homo sapiens
  misc_RNA (1)...(19): siRNA sense strand
ucagaaagcaggucaacua

SEQ ID NO: 2232337 - RNA, 19 nt, Homo sapiens
  misc_RNA (1)...(19): siRNA sense strand
gagcugaaccggaugagaa

SEQ ID NO: 2232338 - RNA, 19 nt, Homo sapiens
  misc_RNA (1)...(19): siRNA sense strand
cugaagaccuuaaagccaa

SEQ ID NO: 2232339 - RNA, 19 nt, Homo sapiens
  misc_RNA (1)...(19): siRNA sense strand
augcugagauugagguaau

SEQ ID NO: 2232340 - RNA, 19 nt, Homo sapiens
  misc_RNA (1)...(19): siRNA sense strand
caagauuauaagagaguca

SEQ ID NO: 2232341 - RNA, 19 nt, Homo sapiens
  misc_RNA (1)...(19): siRNA sense strand
ggacaguagaaaucaaauu

SEQ ID NO: 2232342 - RNA, 19 nt, Homo sapiens
  misc_RNA (1)...(19): siRNA sense strand
gcucauguguagaaguaga

SEQ ID NO: 2232343 - RNA, 19 nt, Homo sapiens
  misc_RNA (1)...(19): siRNA sense strand
agguacaagauaacagaua

SEQ ID NO: 2232344 - RNA, 19 nt, Homo sapiens
  misc_RNA (1)...(19): siRNA sense strand
agauggaggucauguguuu

SEQ ID NO: 2232345 - RNA, 19 nt, Homo sapiens
  misc_RNA (1)...(19): siRNA sense strand
ccaaaaugcaacuggacaa

SEQ ID NO: 2232346 - RNA, 19 nt, Homo sapiens
  misc_RNA (1)...(19): siRNA sense strand
cggagauuucauagagaau

SEQ ID NO: 2232347 - RNA, 19 nt, Homo sapiens
  misc_RNA (1)...(19): siRNA sense strand
gugaacacguggaagauga

SEQ ID NO: 2232348 - RNA, 19 nt, Homo sapiens
  misc_RNA (1)...(19): siRNA sense strand
gguacaagauaacagauau

SEQ ID NO: 2232349 - RNA, 19 nt, Homo sapiens
  misc_RNA (1)...(19): siRNA sense strand
cagaagggacaguagaaau

SEQ ID NO: 2232350 - RNA, 19 nt, Homo sapiens
  misc_RNA (1)...(19): siRNA sense strand
agauguggaugaugggcua

SEQ ID NO: 2232351 - RNA, 19 nt, Homo sapiens
  misc_RNA (1)...(19): siRNA sense strand
gcuucuacuuucuggaauu

SEQ ID NO: 2232352 - RNA, 19 nt, Homo sapiens
  misc_RNA (1)...(19): siRNA sense strand
agauugagguaaugaagau

SEQ ID NO: 2232353 - RNA, 19 nt, Homo sapiens
  misc_RNA (1)...(19): siRNA sense strand
aagacuggguagagcgauu

SEQ ID NO: 2232354 - RNA, 19 nt, Homo sapiens
  misc_RNA (1)...(19): siRNA sense strand
cggacuggcagaagaaauu

SEQ ID NO: 2232355 - RNA, 19 nt, Homo sapiens
  misc_RNA (1)...(19): siRNA sense strand
ucgaaaugaacgugcaauu

SEQ ID NO: 2232356 - RNA, 19 nt, Homo sapiens
  misc_RNA (1)...(19): siRNA sense strand
gagggaagggaauuagaaa

SEQ ID NO: 2232357 - RNA, 19 nt, Homo sapiens
  misc_RNA (1)...(19): siRNA sense strand
gaagauuauugaagaagca

SEQ ID NO: 2232358 - RNA, 19 nt, Homo sapiens
  misc_RNA (1)...(19): siRNA sense strand
gaggaauaccugugggagu

SEQ ID NO: 2232359 - RNA, 19 nt, Homo sapiens
  misc_RNA (1)...(19): siRNA sense strand
gaacaguagaacuaaguau

SEQ ID NO: 2232360 - RNA, 19 nt, Homo sapiens
  misc_RNA (1)...(19): siRNA sense strand
gcuacaggcagcugaggaa

SEQ ID NO: 2232361 - RNA, 19 nt, Homo sapiens
  misc_RNA (1)...(19): siRNA sense strand
gaggaggagggaagggaau

SEQ ID NO: 2232362 - RNA, 19 nt, Homo sapiens
  misc_RNA (1)...(19): siRNA sense strand
gaucaaauuguuagagacu

SEQ ID NO: 2232363 - RNA, 19 nt, Homo sapiens
  misc_RNA (1)...(19): siRNA sense strand
cagaugaacagaauugaua

SEQ ID NO: 2232364 - RNA, 19 nt, Homo sapiens
  misc_RNA (1)...(19): siRNA sense strand
caguagauguugaacuuau

SEQ ID NO: 2232365 - RNA, 19 nt, Homo sapiens
  misc_RNA (1)...(19): siRNA sense strand
guggagaagucuaucaaga

SEQ ID NO: 2232366 - RNA, 19 nt, Homo sapiens
  misc_RNA (1)...(19): siRNA sense strand
caaagagguuccaggcaca

SEQ ID NO: 2232367 - RNA, 19 nt, Homo sapiens
  misc_RNA (1)...(19): siRNA sense strand
aaggaacagugaaggcuua

SEQ ID NO: 2232368 - RNA, 19 nt, Homo sapiens
  misc_RNA (1)...(19): siRNA sense strand
ggaaguuaauccaguacau

SEQ ID NO: 2232369 - RNA, 19 nt, Homo sapiens
  misc_RNA (1)...(19): siRNA sense strand
gggaguuguugcuguagaa

SEQ ID NO: 2232370 - RNA, 19 nt, Homo sapiens
  misc_RNA (1)...(19): siRNA sense strand
cagcaaaccuggauucuga

SEQ ID NO: 2232371 - RNA, 19 nt, Homo sapiens
  misc_RNA (1)...(19): siRNA sense strand
gcuccuggguggugauuga

SEQ ID NO: 2232372 - RNA, 19 nt, Homo sapiens
  misc_RNA (1)...(19): siRNA sense strand
uugccaaaaugguggguua

SEQ ID NO: 2232373 - RNA, 19 nt, Homo sapiens
  misc_RNA (1)...(19): siRNA sense strand
ugaaagaggaaguggauag

SEQ ID NO: 2232374 - RNA, 19 nt, Homo sapiens
  misc_RNA (1)...(19): siRNA sense strand
uggaauaccuguacagcca

SEQ ID NO: 2232375 - RNA, 19 nt, Homo sapiens
  misc_RNA (1)...(19): siRNA sense strand
aagucuaucaagaaggaaa

SEQ ID NO: 2232376 - RNA, 19 nt, Homo sapiens
  misc_RNA (1)...(19): siRNA sense strand
gagcaagggauaaguuuga

SEQ ID NO: 2232377 - RNA, 19 nt, Homo sapiens
  misc_RNA (1)...(19): siRNA sense strand
gcagaagaaauucgccaua

SEQ ID NO: 2232378 - RNA, 19 nt, Homo sapiens
  misc_RNA (1)...(19): siRNA sense strand
uugggaaagaagagggaau

SEQ ID NO: 2232379 - RNA, 19 nt, Homo sapiens
  misc_RNA (1)...(19): siRNA sense strand
caacaacaacuaugcaaau

SEQ ID NO: 2232380 - RNA, 19 nt, Homo sapiens
  misc_RNA (1)...(19): siRNA sense strand
ccauauuugugaugagacu

SEQ ID NO: 2232381 - RNA, 19 nt, Homo sapiens
  misc_RNA (1)...(19): siRNA sense strand
ccaaagaccugcugcaauc

SEQ ID NO: 2232382 - RNA, 19 nt, Homo sapiens
  misc_RNA (1)...(19): siRNA sense strand
gaacaggcuuccaggagga

SEQ ID NO: 2232383 - RNA, 19 nt, Homo sapiens
  misc_RNA (1)...(19): siRNA sense strand
uguagaaacccgaacagua

SEQ ID NO: 2232384 - RNA, 19 nt, Homo sapiens
  misc_RNA (1)...(19): siRNA sense strand
cguguggacuggcaggaaa

SEQ ID NO: 2232385 - RNA, 19 nt, Homo sapiens
  misc_RNA (1)...(19): siRNA sense strand
gcauugagaaccugcagaa

SEQ ID NO: 2232386 - RNA, 19 nt, Homo sapiens
  misc_RNA (1)...(19): siRNA sense strand
agguaaugaagaugguaau

SEQ ID NO: 2232387 - RNA, 19 nt, Homo sapiens
  misc_RNA (1)...(19): siRNA sense strand
aggcagaacugaaaaucaa

SEQ ID NO: 2232388 - RNA, 19 nt, Homo sapiens
  misc_RNA (1)...(19): siRNA sense strand
ggcacaauccuuagggaca

SEQ ID NO: 2232389 - RNA, 19 nt, Homo sapiens
  misc_RNA (1)...(19): siRNA sense strand
ucucagagcuuccgaacuu

SEQ ID NO: 2232390 - RNA, 19 nt, Homo sapiens
  misc_RNA (1)...(19): siRNA sense strand
acucgguaauagaggaaaa

SEQ ID NO: 2232391 - RNA, 19 nt, Homo sapiens
  misc_RNA (1)...(19): siRNA sense strand
ggaggagggaagggaauua

SEQ ID NO: 2232392 - RNA, 19 nt, Homo sapiens
  misc_RNA (1)...(19): siRNA sense strand
uguuagagacugaaagcuu

SEQ ID NO: 2232393 - RNA, 19 nt, Homo sapiens
  misc_RNA (1)...(19): siRNA sense strand
cuucugacaugcugacuua

SEQ ID NO: 2232394 - RNA, 19 nt, Homo sapiens
  misc_RNA (1)...(19): siRNA sense strand
uggcaugguagcuuggaaa

SEQ ID NO: 2232395 - RNA, 19 nt, Homo sapiens
  misc_RNA (1)...(19): siRNA sense strand
gaaggagaauccagguaca

SEQ ID NO: 2232396 - RNA, 19 nt, Homo sapiens
  misc_RNA (1)...(19): siRNA sense strand
augugaaagauguggauga

SEQ ID NO: 2232397 - RNA, 19 nt, Homo sapiens
  misc_RNA (1)...(19): siRNA sense strand
ggaaggaguuggagaacaa

SEQ ID NO: 2232398 - RNA, 19 nt, Homo sapiens
  misc_RNA (1)...(19): siRNA sense strand
gggauaaguuugaggagga

SEQ ID NO: 2232399 - RNA, 19 nt, Homo sapiens
  misc_RNA (1)...(19): siRNA sense strand
gggccgagacagaaagaaa

SEQ ID NO: 2232400 - RNA, 19 nt, Homo sapiens
  misc_RNA (1)...(19): siRNA sense strand
aagaggaaguggauagaua

SEQ ID NO: 2232401 - RNA, 19 nt, Homo sapiens
  misc_RNA (1)...(19): siRNA sense strand
guacagagaugguggcuga

SEQ ID NO: 2232402 - RNA, 19 nt, Homo sapiens
  misc_RNA (1)...(19): siRNA sense strand
gcacagaagugacagacua

SEQ ID NO: 2232403 - RNA, 19 nt, Homo sapiens
  misc_RNA (1)...(19): siRNA sense strand
cggaguggcuagagaaaca

SEQ ID NO: 2232404 - RNA, 19 nt, Homo sapiens
  misc_RNA (1)...(19): siRNA sense strand
ccuuaaagccaaugcagaa

SEQ ID NO: 2232405 - RNA, 19 nt, Homo sapiens
  misc_RNA (1)...(19): siRNA sense strand
gcgauguacuguuggacaa

SEQ ID NO: 2232406 - RNA, 19 nt, Homo sapiens
  misc_RNA (1)...(19): siRNA sense strand
cguggaagaugaaggagaa

SEQ ID NO: 2232407 - RNA, 19 nt, Homo sapiens
  misc_RNA (1)...(19): siRNA sense strand
ggguagagcgauugaugaa

SEQ ID NO: 2232408 - RNA, 19 nt, Homo sapiens
  misc_RNA (1)...(19): siRNA sense strand
ggaaauaaagugauugaga

SEQ ID NO: 2232409 - RNA, 19 nt, Homo sapiens
  misc_RNA (1)...(19): siRNA sense strand
gcagcuauguucagagaau

SEQ ID NO: 2232410 - RNA, 19 nt, Homo sapiens
  misc_RNA (1)...(19): siRNA sense strand
ggacagacugauagcagaa

SEQ ID NO: 2232411 - RNA, 19 nt, Homo sapiens
  misc_RNA (1)...(19): siRNA sense strand
cugaugagcugcugaauau

SEQ ID NO: 2232412 - RNA, 19 nt, Homo sapiens
  misc_RNA (1)...(19): siRNA sense strand
uggcauugcagcagugaaa

SEQ ID NO: 2232413 - RNA, 19 nt, Homo sapiens
  misc_RNA (1)...(19): siRNA sense strand
cuaaauuuccgcagcaaua

SEQ ID NO: 2232414 - RNA, 19 nt, Homo sapiens
  misc_RNA (1)...(19): siRNA sense strand
ucaaauuguuagagacuga

SEQ ID NO: 2232415 - RNA, 19 nt, Homo sapiens
  misc_RNA (1)...(19): siRNA sense strand
uggaaugauugcuggagaa

SEQ ID NO: 2232416 - RNA, 19 nt, Homo sapiens
  misc_RNA (1)...(19): siRNA sense strand
cagcugaggaaguuggaua

SEQ ID NO: 2232417 - RNA, 19 nt, Homo sapiens
  misc_RNA (1)...(19): siRNA sense strand
gaugugagccugcggaaua

SEQ ID NO: 2232418 - RNA, 19 nt, Homo sapiens
  misc_RNA (1)...(19): siRNA sense strand
ccggaaaucugaacgggaa

SEQ ID NO: 2232419 - RNA, 19 nt, Homo sapiens
  misc_RNA (1)...(19): siRNA sense strand
gaauauucucacagagcua

SEQ ID NO: 2232420 - RNA, 19 nt, Homo sapiens
  misc_RNA (1)...(19): siRNA sense strand
agacagaaucaucgaguuu

SEQ ID NO: 2232421 - RNA, 19 nt, Homo sapiens
  misc_RNA (1)...(19): siRNA sense strand
ugaaggagcgggaggaauu

SEQ ID NO: 2232422 - RNA, 19 nt, Homo sapiens
  misc_RNA (1)...(19): siRNA sense strand
caaacauggugguggcuuu

SEQ ID NO: 2232423 - RNA, 19 nt, Homo sapiens
  misc_RNA (1)...(19): siRNA sense strand
gugcugggacuguggaaua

SEQ ID NO: 2232424 - RNA, 19 nt, Homo sapiens
  misc_RNA (1)...(19): siRNA sense strand
ggaagucgccuguggaaau

SEQ ID NO: 2232425 - RNA, 19 nt, Homo sapiens
  misc_RNA (1)...(19): siRNA sense strand
gagaagaggcaauuucaaa

SEQ ID NO: 2232426 - RNA, 19 nt, Homo sapiens
  misc_RNA (1)...(19): siRNA sense strand
agaucauguuucaggcaua

SEQ ID NO: 2232427 - RNA, 19 nt, Homo sapiens
  misc_RNA (1)...(19): siRNA sense strand
gaauccagguacaagauaa

SEQ ID NO: 2232428 - RNA, 19 nt, Homo sapiens
  misc_RNA (1)...(19): siRNA sense strand
gcucauacacuucugaaua

SEQ ID NO: 2232429 - RNA, 19 nt, Homo sapiens
  misc_RNA (1)...(19): siRNA sense strand
uguagaagauggaggucau

SEQ ID NO: 2232430 - RNA, 19 nt, Homo sapiens
  misc_RNA (1)...(19): siRNA sense strand
gcaaccaaguagugaggau

SEQ ID NO: 2232431 - RNA, 19 nt, Homo sapiens
  misc_RNA (1)...(19): siRNA sense strand
guggauggcuugagggagu

SEQ ID NO: 2232432 - RNA, 19 nt, Homo sapiens
  misc_RNA (1)...(19): siRNA sense strand
cguagguggucuuaugaaa

SEQ ID NO: 2232433 - RNA, 19 nt, Homo sapiens
  misc_RNA (1)...(19): siRNA sense strand
gcacaauccuuagggacaa

SEQ ID NO: 2232434 - RNA, 19 nt, Homo sapiens
  misc_RNA (1)...(19): siRNA sense strand
gugaaaugcaugcggucua

SEQ ID NO: 2232435 - RNA, 19 nt, Homo sapiens
  misc_RNA (1)...(19): siRNA sense strand
gagguaaugaagaugguaa

SEQ ID NO: 2232436 - RNA, 19 nt, Homo sapiens
  misc_RNA (1)...(19): siRNA sense strand
ucagaaagcaggucaacua

SEQ ID NO: 2232437 - RNA, 19 nt, Homo sapiens
  misc_RNA (1)...(19): siRNA sense strand
gagcugaaccggaugagaa

SEQ ID NO: 2232438 - RNA, 19 nt, Homo sapiens
  misc_RNA (1)...(19): siRNA sense strand
cugaagaccuuaaagccaa

SEQ ID NO: 2232439 - RNA, 19 nt, Homo sapiens
  misc_RNA (1)...(19): siRNA sense strand
augcugagauugagguaau

SEQ ID NO: 2232440 - RNA, 19 nt, Homo sapiens
  misc_RNA (1)...(19): siRNA sense strand
caagauuauaagagaguca

SEQ ID NO: 2232441 - RNA, 19 nt, Homo sapiens
  misc_RNA (1)...(19): siRNA sense strand
ggacaguagaaaucaaauu

SEQ ID NO: 2232442 - RNA, 19 nt, Homo sapiens
  misc_RNA (1)...(19): siRNA sense strand
gcucauguguagaaguaga

SEQ ID NO: 2232443 - RNA, 19 nt, Homo sapiens
  misc_RNA (1)...(19): siRNA sense strand
agguacaagauaacagaua

SEQ ID NO: 2232444 - RNA, 19 nt, Homo sapiens
  misc_RNA (1)...(19): siRNA sense strand
agauggaggucauguguuu

SEQ ID NO: 2232445 - RNA, 19 nt, Homo sapiens
  misc_RNA (1)...(19): siRNA sense strand
ccaaaaugcaacuggacaa

SEQ ID NO: 2232446 - RNA, 19 nt, Homo sapiens
  misc_RNA (1)...(19): siRNA sense strand
cggagauuucauagagaau

SEQ ID NO: 2232447 - RNA, 19 nt, Homo sapiens
  misc_RNA (1)...(19): siRNA sense strand
gugaacacguggaagauga

SEQ ID NO: 2232448 - RNA, 19 nt, Homo sapiens
  misc_RNA (1)...(19): siRNA sense strand
gguacaagauaacagauau

SEQ ID NO: 2232449 - RNA, 19 nt, Homo sapiens
  misc_RNA (1)...(19): siRNA sense strand
cagaagggacaguagaaau

SEQ ID NO: 2232450 - RNA, 19 nt, Homo sapiens
  misc_RNA (1)...(19): siRNA sense strand
agauguggaugaugggcua

SEQ ID NO: 2232451 - RNA, 19 nt, Homo sapiens
  misc_RNA (1)...(19): siRNA sense strand
gcuucuacuuucuggaauu

SEQ ID NO: 2232452 - RNA, 19 nt, Homo sapiens
  misc_RNA (1)...(19): siRNA sense strand
agauugagguaaugaagau

SEQ ID NO: 2232453 - RNA, 19 nt, Homo sapiens
  misc_RNA (1)...(19): siRNA sense strand
aagacuggguagagcgauu

SEQ ID NO: 2232454 - RNA, 19 nt, Homo sapiens
  misc_RNA (1)...(19): siRNA sense strand
cggacuggcagaagaaauu

SEQ ID NO: 2232455 - RNA, 19 nt, Homo sapiens
  misc_RNA (1)...(19): siRNA sense strand
ucgaaaugaacgugcaauu

SEQ ID NO: 2232456 - RNA, 19 nt, Homo sapiens
  misc_RNA (1)...(19): siRNA sense strand
gagggaagggaauuagaaa

SEQ ID NO: 2232457 - RNA, 19 nt, Homo sapiens
  misc_RNA (1)...(19): siRNA sense strand
gaagauuauugaagaagca

SEQ ID NO: 2232458 - RNA, 19 nt, Homo sapiens
  misc_RNA (1)...(19): siRNA sense strand
gaggaauaccugugggagu

SEQ ID NO: 2232459 - RNA, 19 nt, Homo sapiens
  misc_RNA (1)...(19): siRNA sense strand
gaacaguagaacuaaguau

SEQ ID NO: 2232460 - RNA, 19 nt, Homo sapiens
  misc_RNA (1)...(19): siRNA sense strand
gcuacaggcagcugaggaa

SEQ ID NO: 2232461 - RNA, 19 nt, Homo sapiens
  misc_RNA (1)...(19): siRNA sense strand
gaggaggagggaagggaau

SEQ ID NO: 2232462 - RNA, 19 nt, Homo sapiens
  misc_RNA (1)...(19): siRNA sense strand
gaucaaauuguuagagacu

SEQ ID NO: 2232463 - RNA, 19 nt, Homo sapiens
  misc_RNA (1)...(19): siRNA sense strand
cagaugaacagaauugaua

SEQ ID NO: 2232464 - RNA, 19 nt, Homo sapiens
  misc_RNA (1)...(19): siRNA sense strand
caguagauguugaacuuau

SEQ ID NO: 2232465 - RNA, 19 nt, Homo sapiens
  misc_RNA (1)...(19): siRNA sense strand
guggagaagucuaucaaga

SEQ ID NO: 2232466 - RNA, 19 nt, Homo sapiens
  misc_RNA (1)...(19): siRNA sense strand
caaagagguuccaggcaca

SEQ ID NO: 2232467 - RNA, 19 nt, Homo sapiens
  misc_RNA (1)...(19): siRNA sense strand
aaggaacagugaaggcuua

SEQ ID NO: 2232468 - RNA, 19 nt, Homo sapiens
  misc_RNA (1)...(19): siRNA sense strand
ggaaguuaauccaguacau

SEQ ID NO: 2232469 - RNA, 19 nt, Homo sapiens
  misc_RNA (1)...(19): siRNA sense strand
gggaguuguugcuguagaa

SEQ ID NO: 2232470 - RNA, 19 nt, Homo sapiens
  misc_RNA (1)...(19): siRNA sense strand
cagcaaaccuggauucuga

SEQ ID NO: 2232471 - RNA, 19 nt, Homo sapiens
  misc_RNA (1)...(19): siRNA sense strand
gcuccuggguggugauuga

SEQ ID NO: 2232472 - RNA, 19 nt, Homo sapiens
  misc_RNA (1)...(19): siRNA sense strand
uugccaaaaugguggguua

SEQ ID NO: 2232473 - RNA, 19 nt, Homo sapiens
  misc_RNA (1)...(19): siRNA sense strand
ugaaagaggaaguggauag

SEQ ID NO: 2232474 - RNA, 19 nt, Homo sapiens
  misc_RNA (1)...(19): siRNA sense strand
uggaauaccuguacagcca

SEQ ID NO: 2232475 - RNA, 19 nt, Homo sapiens
  misc_RNA (1)...(19): siRNA sense strand
aagucuaucaagaaggaaa

SEQ ID NO: 2232476 - RNA, 19 nt, Homo sapiens
  misc_RNA (1)...(19): siRNA sense strand
gagcaagggauaaguuuga

SEQ ID NO: 2232477 - RNA, 19 nt, Homo sapiens
  misc_RNA (1)...(19): siRNA sense strand
gcagaagaaauucgccaua

SEQ ID NO: 2232478 - RNA, 19 nt, Homo sapiens
  misc_RNA (1)...(19): siRNA sense strand
uugggaaagaagagggaau

SEQ ID NO: 2232479 - RNA, 19 nt, Homo sapiens
  misc_RNA (1)...(19): siRNA sense strand
caacaacaacuaugcaaau

SEQ ID NO: 2232480 - RNA, 19 nt, Homo sapiens
  misc_RNA (1)...(19): siRNA sense strand
ccauauuugugaugagacu

SEQ ID NO: 2232481 - RNA, 19 nt, Homo sapiens
  misc_RNA (1)...(19): siRNA sense strand
ccaaagaccugcugcaauc

SEQ ID NO: 2232482 - RNA, 19 nt, Homo sapiens
  misc_RNA (1)...(19): siRNA sense strand
gaacaggcuuccaggagga

SEQ ID NO: 2232483 - RNA, 19 nt, Homo sapiens
  misc_RNA (1)...(19): siRNA sense strand
uguagaaacccgaacagua

SEQ ID NO: 2232484 - RNA, 19 nt, Homo sapiens
  misc_RNA (1)...(19): siRNA sense strand
cguguggacuggcaggaaa

SEQ ID NO: 2232485 - RNA, 19 nt, Homo sapiens
  misc_RNA (1)...(19): siRNA sense strand
gcauugagaaccugcagaa

SEQ ID NO: 2232486 - RNA, 19 nt, Homo sapiens
  misc_RNA (1)...(19): siRNA sense strand
agguaaugaagaugguaau

SEQ ID NO: 2232487 - RNA, 19 nt, Homo sapiens
  misc_RNA (1)...(19): siRNA sense strand
aggcagaacugaaaaucaa

SEQ ID NO: 2232488 - RNA, 19 nt, Homo sapiens
  misc_RNA (1)...(19): siRNA sense strand
ggcacaauccuuagggaca

SEQ ID NO: 2232489 - RNA, 19 nt, Homo sapiens
  misc_RNA (1)...(19): siRNA sense strand
ucucagagcuuccgaacuu

SEQ ID NO: 2232490 - RNA, 19 nt, Homo sapiens
  misc_RNA (1)...(19): siRNA sense strand
acucgguaauagaggaaaa

SEQ ID NO: 2232491 - RNA, 19 nt, Homo sapiens
  misc_RNA (1)...(19): siRNA sense strand
ggaggagggaagggaauua

SEQ ID NO: 2232492 - RNA, 19 nt, Homo sapiens
  misc_RNA (1)...(19): siRNA sense strand
uguuagagacugaaagcuu

SEQ ID NO: 2232493 - RNA, 19 nt, Homo sapiens
  misc_RNA (1)...(19): siRNA sense strand
cuucugacaugcugacuua

SEQ ID NO: 2232494 - RNA, 19 nt, Homo sapiens
  misc_RNA (1)...(19): siRNA sense strand
uggcaugguagcuuggaaa

SEQ ID NO: 2232495 - RNA, 19 nt, Homo sapiens
  misc_RNA (1)...(19): siRNA sense strand
gaaggagaauccagguaca

SEQ ID NO: 2232496 - RNA, 19 nt, Homo sapiens
  misc_RNA (1)...(19): siRNA sense strand
augugaaagauguggauga

SEQ ID NO: 2232497 - RNA, 19 nt, Homo sapiens
  misc_RNA (1)...(19): siRNA sense strand
ggaaggaguuggagaacaa

SEQ ID NO: 2232498 - RNA, 19 nt, Homo sapiens
  misc_RNA (1)...(19): siRNA sense strand
gggauaaguuugaggagga

SEQ ID NO: 2232499 - RNA, 19 nt, Homo sapiens
  misc_RNA (1)...(19): siRNA sense strand
gggccgagacagaaagaaa

SEQ ID NO: 2232500 - RNA, 19 nt, Homo sapiens
  misc_RNA (1)...(19): siRNA sense strand
aagaggaaguggauagaua

SEQ ID NO: 2232501 - RNA, 19 nt, Homo sapiens
  misc_RNA (1)...(19): siRNA sense strand
guacagagaugguggcuga

SEQ ID NO: 2232502 - RNA, 19 nt, Homo sapiens
  misc_RNA (1)...(19): siRNA sense strand
gcacagaagugacagacua

SEQ ID NO: 2232503 - RNA, 19 nt, Homo sapiens
  misc_RNA (1)...(19): siRNA sense strand
cggaguggcuagagaaaca

SEQ ID NO: 2232504 - RNA, 19 nt, Homo sapiens
  misc_RNA (1)...(19): siRNA sense strand
ccuuaaagccaaugcagaa

SEQ ID NO: 2232505 - RNA, 19 nt, Homo sapiens
  misc_RNA (1)...(19): siRNA sense strand
gcgauguacuguuggacaa

SEQ ID NO: 2232506 - RNA, 19 nt, Homo sapiens
  misc_RNA (1)...(19): siRNA sense strand
cguggaagaugaaggagaa

SEQ ID NO: 2232507 - RNA, 19 nt, Homo sapiens
  misc_RNA (1)...(19): siRNA sense strand
ggguagagcgauugaugaa

SEQ ID NO: 2232508 - RNA, 19 nt, Homo sapiens
  misc_RNA (1)...(19): siRNA sense strand
ggaaauaaagugauugaga

SEQ ID NO: 2232509 - RNA, 19 nt, Homo sapiens
  misc_RNA (1)...(19): siRNA sense strand
gcagcuauguucagagaau

SEQ ID NO: 2232510 - RNA, 19 nt, Homo sapiens
  misc_RNA (1)...(19): siRNA sense strand
ggacagacugauagcagaa

SEQ ID NO: 2232511 - RNA, 19 nt, Homo sapiens
  misc_RNA (1)...(19): siRNA sense strand
cugaugagcugcugaauau

SEQ ID NO: 2232512 - RNA, 19 nt, Homo sapiens
  misc_RNA (1)...(19): siRNA sense strand
uggcauugcagcagugaaa

SEQ ID NO: 2232513 - RNA, 19 nt, Homo sapiens
  misc_RNA (1)...(19): siRNA sense strand
cuaaauuuccgcagcaaua

SEQ ID NO: 2232514 - RNA, 19 nt, Homo sapiens
  misc_RNA (1)...(19): siRNA sense strand
ucaaauuguuagagacuga

SEQ ID NO: 2232515 - RNA, 19 nt, Homo sapiens
  misc_RNA (1)...(19): siRNA sense strand
uggaaugauugcuggagaa

SEQ ID NO: 2232516 - RNA, 19 nt, Homo sapiens
  misc_RNA (1)...(19): siRNA sense strand
cagcugaggaaguuggaua

SEQ ID NO: 2232517 - RNA, 19 nt, Homo sapiens
  misc_RNA (1)...(19): siRNA sense strand
gaugugagccugcggaaua

SEQ ID NO: 2232518 - RNA, 19 nt, Homo sapiens
  misc_RNA (1)...(19): siRNA sense strand
ccggaaaucugaacgggaa

SEQ ID NO: 2232519 - RNA, 19 nt, Homo sapiens
  misc_RNA (1)...(19): siRNA sense strand
gaauauucucacagagcua

SEQ ID NO: 2232520 - RNA, 19 nt, Homo sapiens
  misc_RNA (1)...(19): siRNA sense strand
agacagaaucaucgaguuu

SEQ ID NO: 2232521 - RNA, 19 nt, Homo sapiens
  misc_RNA (1)...(19): siRNA sense strand
ugaaggagcgggaggaauu

SEQ ID NO: 2232522 - RNA, 19 nt, Homo sapiens
  misc_RNA (1)...(19): siRNA sense strand
caaacauggugguggcuuu

SEQ ID NO: 2232523 - RNA, 19 nt, Homo sapiens
  misc_RNA (1)...(19): siRNA sense strand
gugcugggacuguggaaua

SEQ ID NO: 2232524 - RNA, 19 nt, Homo sapiens
  misc_RNA (1)...(19): siRNA sense strand
ggaagucgccuguggaaau

SEQ ID NO: 2232525 - RNA, 19 nt, Homo sapiens
  misc_RNA (1)...(19): siRNA sense strand
gagaagaggcaauuucaaa

SEQ ID NO: 2232526 - RNA, 19 nt, Homo sapiens
  misc_RNA (1)...(19): siRNA sense strand
agaucauguuucaggcaua

SEQ ID NO: 2232527 - RNA, 19 nt, Homo sapiens
  misc_RNA (1)...(19): siRNA sense strand
gaauccagguacaagauaa

SEQ ID NO: 2232528 - RNA, 19 nt, Homo sapiens
  misc_RNA (1)...(19): siRNA sense strand
gcucauacacuucugaaua

SEQ ID NO: 2232529 - RNA, 19 nt, Homo sapiens
  misc_RNA (1)...(19): siRNA sense strand
uguagaagauggaggucau

SEQ ID NO: 2232530 - RNA, 19 nt, Homo sapiens
  misc_RNA (1)...(19): siRNA sense strand
gcaaccaaguagugaggau

SEQ ID NO: 2232531 - RNA, 19 nt, Homo sapiens
  misc_RNA (1)...(19): siRNA sense strand
guggauggcuugagggagu

SEQ ID NO: 2232532 - RNA, 19 nt, Homo sapiens
  misc_RNA (1)...(19): siRNA sense strand
cguagguggucuuaugaaa

SEQ ID NO: 2232533 - RNA, 19 nt, Homo sapiens
  misc_RNA (1)...(19): siRNA sense strand
gcacaauccuuagggacaa

SEQ ID NO: 2232534 - RNA, 19 nt, Homo sapiens
  misc_RNA (1)...(19): siRNA sense strand
gugaaaugcaugcggucua

SEQ ID NO: 2232535 - RNA, 19 nt, Homo sapiens
  misc_RNA (1)...(19): siRNA sense strand
gagguaaugaagaugguaa

SEQ ID NO: 2232536 - RNA, 19 nt, Homo sapiens
  misc_RNA (1)...(19): siRNA sense strand
ucagaaagcaggucaacua

SEQ ID NO: 2232537 - RNA, 19 nt, Homo sapiens
  misc_RNA (1)...(19): siRNA sense strand
gagcugaaccggaugagaa

SEQ ID NO: 2232538 - RNA, 19 nt, Homo sapiens
  misc_RNA (1)...(19): siRNA sense strand
cugaagaccuuaaagccaa

SEQ ID NO: 2232539 - RNA, 19 nt, Homo sapiens
  misc_RNA (1)...(19): siRNA sense strand
augcugagauugagguaau

SEQ ID NO: 2232540 - RNA, 19 nt, Homo sapiens
  misc_RNA (1)...(19): siRNA sense strand
caagauuauaagagaguca

SEQ ID NO: 2232541 - RNA, 19 nt, Homo sapiens
  misc_RNA (1)...(19): siRNA sense strand
ggacaguagaaaucaaauu

SEQ ID NO: 2232542 - RNA, 19 nt, Homo sapiens
  misc_RNA (1)...(19): siRNA sense strand
gcucauguguagaaguaga

SEQ ID NO: 2232543 - RNA, 19 nt, Homo sapiens
  misc_RNA (1)...(19): siRNA sense strand
agguacaagauaacagaua

SEQ ID NO: 2232544 - RNA, 19 nt, Homo sapiens
  misc_RNA (1)...(19): siRNA sense strand
agauggaggucauguguuu

SEQ ID NO: 2232545 - RNA, 19 nt, Homo sapiens
  misc_RNA (1)...(19): siRNA sense strand
ccaaaaugcaacuggacaa

SEQ ID NO: 2232546 - RNA, 19 nt, Homo sapiens
  misc_RNA (1)...(19): siRNA sense strand
cggagauuucauagagaau

SEQ ID NO: 2232547 - RNA, 19 nt, Homo sapiens
  misc_RNA (1)...(19): siRNA sense strand
gugaacacguggaagauga

SEQ ID NO: 2232548 - RNA, 19 nt, Homo sapiens
  misc_RNA (1)...(19): siRNA sense strand
gguacaagauaacagauau

SEQ ID NO: 2232549 - RNA, 19 nt, Homo sapiens
  misc_RNA (1)...(19): siRNA sense strand
cagaagggacaguagaaau

SEQ ID NO: 2232550 - RNA, 19 nt, Homo sapiens
  misc_RNA (1)...(19): siRNA sense strand
agauguggaugaugggcua

SEQ ID NO: 2232551 - RNA, 19 nt, Homo sapiens
  misc_RNA (1)...(19): siRNA sense strand
gcuucuacuuucuggaauu

SEQ ID NO: 2232552 - RNA, 19 nt, Homo sapiens
  misc_RNA (1)...(19): siRNA sense strand
agauugagguaaugaagau

SEQ ID NO: 2232553 - RNA, 19 nt, Homo sapiens
  misc_RNA (1)...(19): siRNA sense strand
aagacuggguagagcgauu

SEQ ID NO: 2232554 - RNA, 19 nt, Homo sapiens
  misc_RNA (1)...(19): siRNA sense strand
cggacuggcagaagaaauu

SEQ ID NO: 2232555 - RNA, 19 nt, Homo sapiens
  misc_RNA (1)...(19): siRNA sense strand
ucgaaaugaacgugcaauu

SEQ ID NO: 2232556 - RNA, 19 nt, Homo sapiens
  misc_RNA (1)...(19): siRNA sense strand
gagggaagggaauuagaaa

SEQ ID NO: 2232557 - RNA, 19 nt, Homo sapiens
  misc_RNA (1)...(19): siRNA sense strand
gaagauuauugaagaagca

SEQ ID NO: 2232558 - RNA, 19 nt, Homo sapiens
  misc_RNA (1)...(19): siRNA sense strand
gaggaauaccugugggagu

SEQ ID NO: 2232559 - RNA, 19 nt, Homo sapiens
  misc_RNA (1)...(19): siRNA sense strand
gaacaguagaacuaaguau

SEQ ID NO: 2232560 - RNA, 19 nt, Homo sapiens
  misc_RNA (1)...(19): siRNA sense strand
gcuacaggcagcugaggaa

SEQ ID NO: 2232561 - RNA, 19 nt, Homo sapiens
  misc_RNA (1)...(19): siRNA sense strand
gaggaggagggaagggaau

SEQ ID NO: 2232562 - RNA, 19 nt, Homo sapiens
  misc_RNA (1)...(19): siRNA sense strand
gaucaaauuguuagagacu

SEQ ID NO: 2232563 - RNA, 19 nt, Homo sapiens
  misc_RNA (1)...(19): siRNA sense strand
cagaugaacagaauugaua

SEQ ID NO: 2232564 - RNA, 19 nt, Homo sapiens
  misc_RNA (1)...(19): siRNA sense strand
caguagauguugaacuuau

SEQ ID NO: 2232565 - RNA, 19 nt, Homo sapiens
  misc_RNA (1)...(19): siRNA sense strand
guggagaagucuaucaaga

SEQ ID NO: 2232566 - RNA, 19 nt, Homo sapiens
  misc_RNA (1)...(19): siRNA sense strand
caaagagguuccaggcaca

SEQ ID NO: 2232567 - RNA, 19 nt, Homo sapiens
  misc_RNA (1)...(19): siRNA sense strand
aaggaacagugaaggcuua

SEQ ID NO: 2232568 - RNA, 19 nt, Homo sapiens
  misc_RNA (1)...(19): siRNA sense strand
ggaaguuaauccaguacau

SEQ ID NO: 2232569 - RNA, 19 nt, Homo sapiens
  misc_RNA (1)...(19): siRNA sense strand
gggaguuguugcuguagaa

SEQ ID NO: 2232570 - RNA, 19 nt, Homo sapiens
  misc_RNA (1)...(19): siRNA sense strand
cagcaaaccuggauucuga

SEQ ID NO: 2232571 - RNA, 19 nt, Homo sapiens
  misc_RNA (1)...(19): siRNA sense strand
gcuccuggguggugauuga

SEQ ID NO: 2232572 - RNA, 19 nt, Homo sapiens
  misc_RNA (1)...(19): siRNA sense strand
uugccaaaaugguggguua

SEQ ID NO: 2232573 - RNA, 19 nt, Homo sapiens
  misc_RNA (1)...(19): siRNA sense strand
ugaaagaggaaguggauag

SEQ ID NO: 2232574 - RNA, 19 nt, Homo sapiens
  misc_RNA (1)...(19): siRNA sense strand
uggaauaccuguacagcca

SEQ ID NO: 2232575 - RNA, 19 nt, Homo sapiens
  misc_RNA (1)...(19): siRNA sense strand
aagucuaucaagaaggaaa

SEQ ID NO: 2232576 - RNA, 19 nt, Homo sapiens
  misc_RNA (1)...(19): siRNA sense strand
gagcaagggauaaguuuga

SEQ ID NO: 2232577 - RNA, 19 nt, Homo sapiens
  misc_RNA (1)...(19): siRNA sense strand
gcagaagaaauucgccaua

SEQ ID NO: 2232578 - RNA, 19 nt, Homo sapiens
  misc_RNA (1)...(19): siRNA sense strand
uugggaaagaagagggaau

SEQ ID NO: 2232579 - RNA, 19 nt, Homo sapiens
  misc_RNA (1)...(19): siRNA sense strand
caacaacaacuaugcaaau

SEQ ID NO: 2232580 - RNA, 19 nt, Homo sapiens
  misc_RNA (1)...(19): siRNA sense strand
ccauauuugugaugagacu

SEQ ID NO: 2232581 - RNA, 19 nt, Homo sapiens
  misc_RNA (1)...(19): siRNA sense strand
ccaaagaccugcugcaauc

SEQ ID NO: 2232582 - RNA, 19 nt, Homo sapiens
  misc_RNA (1)...(19): siRNA sense strand
gaacaggcuuccaggagga

SEQ ID NO: 2232583 - RNA, 19 nt, Homo sapiens
  misc_RNA (1)...(19): siRNA sense strand
uguagaaacccgaacagua

SEQ ID NO: 2232584 - RNA, 19 nt, Homo sapiens
  misc_RNA (1)...(19): siRNA sense strand
cguguggacuggcaggaaa

SEQ ID NO: 2232585 - RNA, 19 nt, Homo sapiens
  misc_RNA (1)...(19): siRNA sense strand
gcauugagaaccugcagaa

SEQ ID NO: 2232586 - RNA, 19 nt, Homo sapiens
  misc_RNA (1)...(19): siRNA sense strand
agguaaugaagaugguaau

SEQ ID NO: 2232587 - RNA, 19 nt, Homo sapiens
  misc_RNA (1)...(19): siRNA sense strand
aggcagaacugaaaaucaa

SEQ ID NO: 2232588 - RNA, 19 nt, Homo sapiens
  misc_RNA (1)...(19): siRNA sense strand
ggcacaauccuuagggaca

SEQ ID NO: 2232589 - RNA, 19 nt, Homo sapiens
  misc_RNA (1)...(19): siRNA sense strand
ucucagagcuuccgaacuu

SEQ ID NO: 2232590 - RNA, 19 nt, Homo sapiens
  misc_RNA (1)...(19): siRNA sense strand
acucgguaauagaggaaaa

SEQ ID NO: 2232591 - RNA, 19 nt, Homo sapiens
  misc_RNA (1)...(19): siRNA sense strand
ggaggagggaagggaauua

SEQ ID NO: 2232592 - RNA, 19 nt, Homo sapiens
  misc_RNA (1)...(19): siRNA sense strand
uguuagagacugaaagcuu

SEQ ID NO: 2232593 - RNA, 19 nt, Homo sapiens
  misc_RNA (1)...(19): siRNA sense strand
cuucugacaugcugacuua

SEQ ID NO: 2232594 - RNA, 19 nt, Homo sapiens
  misc_RNA (1)...(19): siRNA sense strand
uggcaugguagcuuggaaa

SEQ ID NO: 2232595 - RNA, 19 nt, Homo sapiens
  misc_RNA (1)...(19): siRNA sense strand
gaaggagaauccagguaca

SEQ ID NO: 2232596 - RNA, 19 nt, Homo sapiens
  misc_RNA (1)...(19): siRNA sense strand
augugaaagauguggauga

SEQ ID NO: 2232597 - RNA, 19 nt, Homo sapiens
  misc_RNA (1)...(19): siRNA sense strand
aggcggcacuggugggaau

SEQ ID NO: 2232598 - RNA, 19 nt, Homo sapiens
  misc_RNA (1)...(19): siRNA sense strand
acuacacggcagaggagaa

SEQ ID NO: 2232599 - RNA, 19 nt, Homo sapiens
  misc_RNA (1)...(19): siRNA sense strand
acgccuacgucuuugaaca

SEQ ID NO: 2232600 - RNA, 19 nt, Homo sapiens
  misc_RNA (1)...(19): siRNA sense strand
ugagcgauguggugggcga

SEQ ID NO: 2232601 - RNA, 19 nt, Homo sapiens
  misc_RNA (1)...(19): siRNA sense strand
aggcggcacuggugggaau

SEQ ID NO: 2232602 - RNA, 19 nt, Homo sapiens
  misc_RNA (1)...(19): siRNA sense strand
acuacacggcagaggagaa

SEQ ID NO: 2232603 - RNA, 19 nt, Homo sapiens
  misc_RNA (1)...(19): siRNA sense strand
acgccuacgucuuugaaca

SEQ ID NO: 2232604 - RNA, 19 nt, Homo sapiens
  misc_RNA (1)...(19): siRNA sense strand
ugagcgauguggugggcga

SEQ ID NO: 2232605 - RNA, 19 nt, Homo sapiens
  misc_RNA (1)...(19): siRNA sense strand
gggccugggcugucagaaa

SEQ ID NO: 2232606 - RNA, 19 nt, Homo sapiens
  misc_RNA (1)...(19): siRNA sense strand
ucaaggauucugagggcua

SEQ ID NO: 2232607 - RNA, 19 nt, Homo sapiens
  misc_RNA (1)...(19): siRNA sense strand
ggaugagggcauagccaau

SEQ ID NO: 2232608 - RNA, 19 nt, Homo sapiens
  misc_RNA (1)...(19): siRNA sense strand
ggacacagcagcagagaag

SEQ ID NO: 2232609 - RNA, 19 nt, Homo sapiens
  misc_RNA (1)...(19): siRNA sense strand
cgggagaaggaauggcaga

SEQ ID NO: 2232610 - RNA, 19 nt, Homo sapiens
  misc_RNA (1)...(19): siRNA sense strand
ugacuaagcuagagggugg

SEQ ID NO: 2232611 - RNA, 19 nt, Homo sapiens
  misc_RNA (1)...(19): siRNA sense strand
cagagaagcugcacaaggu

SEQ ID NO: 2232612 - RNA, 19 nt, Homo sapiens
  misc_RNA (1)...(19): siRNA sense strand
ccuccgugaaccugacuaa

SEQ ID NO: 2232613 - RNA, 19 nt, Homo sapiens
  misc_RNA (1)...(19): siRNA sense strand
gcauggagcuguucgugca

SEQ ID NO: 2232614 - RNA, 19 nt, Homo sapiens
  misc_RNA (1)...(19): siRNA sense strand
ggaaaugacugauggaggu

SEQ ID NO: 2232615 - RNA, 19 nt, Homo sapiens
  misc_RNA (1)...(19): siRNA sense strand
ugaaaaugcaguagccaaa

SEQ ID NO: 2232616 - RNA, 19 nt, Homo sapiens
  misc_RNA (1)...(19): siRNA sense strand
guauuaagaugguggcugu

SEQ ID NO: 2232617 - RNA, 19 nt, Homo sapiens
  misc_RNA (1)...(19): siRNA sense strand
acaaauuugcaaaggccaa

SEQ ID NO: 2232618 - RNA, 19 nt, Homo sapiens
  misc_RNA (1)...(19): siRNA sense strand
ccauccaggaggugcuaaa

SEQ ID NO: 2232619 - RNA, 19 nt, Homo sapiens
  misc_RNA (1)...(19): siRNA sense strand
uugcaaaggccaaagaguu

SEQ ID NO: 2232620 - RNA, 19 nt, Homo sapiens
  misc_RNA (1)...(19): siRNA sense strand
agaugguggcuguaggaau

SEQ ID NO: 2232621 - RNA, 19 nt, Homo sapiens
  misc_RNA (1)...(19): siRNA sense strand
gaaucauugcgguggacau

SEQ ID NO: 2232622 - RNA, 19 nt, Homo sapiens
  misc_RNA (1)...(19): siRNA sense strand
acaucaacaaggacaaauu

SEQ ID NO: 2232623 - RNA, 19 nt, Homo sapiens
  misc_RNA (1)...(19): siRNA sense strand
cagucaaaccaggugauaa

SEQ ID NO: 2232624 - RNA, 19 nt, Homo sapiens
  misc_RNA (1)...(19): siRNA sense strand
cugauggagguguggauuu

SEQ ID NO: 2232625 - RNA, 19 nt, Homo sapiens
  misc_RNA (1)...(19): siRNA sense strand
ggacguaccuggaagggag

SEQ ID NO: 2232626 - RNA, 19 nt, Homo sapiens
  misc_RNA (1)...(19): siRNA sense strand
uggacaucaacaaggacaa

SEQ ID NO: 2232627 - RNA, 19 nt, Homo sapiens
  misc_RNA (1)...(19): siRNA sense strand
ugcuaaaggaaaugacuga

SEQ ID NO: 2232628 - RNA, 19 nt, Homo sapiens
  misc_RNA (1)...(19): siRNA sense strand
ccugcuucacucugggaaa

SEQ ID NO: 2232629 - RNA, 19 nt, Homo sapiens
  misc_RNA (1)...(19): siRNA sense strand
ccggcaucguggagagugu

SEQ ID NO: 2232630 - RNA, 19 nt, Homo sapiens
  misc_RNA (1)...(19): siRNA sense strand
ucccaaaacuuguggcuga

SEQ ID NO: 2232631 - RNA, 19 nt, Homo sapiens
  misc_RNA (1)...(19): siRNA sense strand
cccucaagacuacaagaaa

SEQ ID NO: 2232632 - RNA, 19 nt, Homo sapiens
  misc_RNA (1)...(19): siRNA sense strand
ccaggaggugcuaaaggaa

SEQ ID NO: 2232633 - RNA, 19 nt, Homo sapiens
  misc_RNA (1)...(19): siRNA sense strand
aaguaaagaauguguccca

SEQ ID NO: 2232634 - RNA, 19 nt, Homo sapiens
  misc_RNA (1)...(19): siRNA sense strand
ccauugaggagguggaggu

SEQ ID NO: 2232635 - RNA, 19 nt, Homo sapiens
  misc_RNA (1)...(19): siRNA sense strand
ggaaaugacugauggaggu

SEQ ID NO: 2232636 - RNA, 19 nt, Homo sapiens
  misc_RNA (1)...(19): siRNA sense strand
gcauuaagaugguggcugu

SEQ ID NO: 2232637 - RNA, 19 nt, Homo sapiens
  misc_RNA (1)...(19): siRNA sense strand
acaaauuugcaaaggccaa

SEQ ID NO: 2232638 - RNA, 19 nt, Homo sapiens
  misc_RNA (1)...(19): siRNA sense strand
acacggugguggaugagaa

SEQ ID NO: 2232639 - RNA, 19 nt, Homo sapiens
  misc_RNA (1)...(19): siRNA sense strand
cuguaaagcagcuggagca

SEQ ID NO: 2232640 - RNA, 19 nt, Homo sapiens
  misc_RNA (1)...(19): siRNA sense strand
ccaggaagugcuaaaggaa

SEQ ID NO: 2232641 - RNA, 19 nt, Homo sapiens
  misc_RNA (1)...(19): siRNA sense strand
caagaaacccauccaggaa

SEQ ID NO: 2232642 - RNA, 19 nt, Homo sapiens
  misc_RNA (1)...(19): siRNA sense strand
ccauccaggaagugcuaaa

SEQ ID NO: 2232643 - RNA, 19 nt, Homo sapiens
  misc_RNA (1)...(19): siRNA sense strand
aguacacggugguggauga

SEQ ID NO: 2232644 - RNA, 19 nt, Homo sapiens
  misc_RNA (1)...(19): siRNA sense strand
augagaaugcaguggccaa

SEQ ID NO: 2232645 - RNA, 19 nt, Homo sapiens
  misc_RNA (1)...(19): siRNA sense strand
uugcaaaggccaaagaguu

SEQ ID NO: 2232646 - RNA, 19 nt, Homo sapiens
  misc_RNA (1)...(19): siRNA sense strand
agaugguggcuguaggaau

SEQ ID NO: 2232647 - RNA, 19 nt, Homo sapiens
  misc_RNA (1)...(19): siRNA sense strand
acaucaacaaggacaaauu

SEQ ID NO: 2232648 - RNA, 19 nt, Homo sapiens
  misc_RNA (1)...(19): siRNA sense strand
cagucaaaccaggugauaa

SEQ ID NO: 2232649 - RNA, 19 nt, Homo sapiens
  misc_RNA (1)...(19): siRNA sense strand
cugauggagguguggauuu

SEQ ID NO: 2232650 - RNA, 19 nt, Homo sapiens
  misc_RNA (1)...(19): siRNA sense strand
augguggcuuuaagaguaa

SEQ ID NO: 2232651 - RNA, 19 nt, Homo sapiens
  misc_RNA (1)...(19): siRNA sense strand
uggacaucaacaaggacaa

SEQ ID NO: 2232652 - RNA, 19 nt, Homo sapiens
  misc_RNA (1)...(19): siRNA sense strand
ugcuaaaggaaaugacuga

SEQ ID NO: 2232653 - RNA, 19 nt, Homo sapiens
  misc_RNA (1)...(19): siRNA sense strand
ccugcuucacucugggaaa

SEQ ID NO: 2232654 - RNA, 19 nt, Homo sapiens
  misc_RNA (1)...(19): siRNA sense strand
ccggcaucguggagagugu

SEQ ID NO: 2232655 - RNA, 19 nt, Homo sapiens
  misc_RNA (1)...(19): siRNA sense strand
ucccaaaacuuguggcuga

SEQ ID NO: 2232656 - RNA, 19 nt, Homo sapiens
  misc_RNA (1)...(19): siRNA sense strand
cccucaagacuacaagaaa

SEQ ID NO: 2232657 - RNA, 19 nt, Homo sapiens
  misc_RNA (1)...(19): siRNA sense strand
gaguaaagaagguauccca

SEQ ID NO: 2232658 - RNA, 19 nt, Homo sapiens
  misc_RNA (1)...(19): siRNA sense strand
ccauugaggauguggaggu

SEQ ID NO: 2232659 - RNA, 19 nt, Homo sapiens
  misc_RNA (1)...(19): siRNA sense strand
ggaaaugacugauggaggu

SEQ ID NO: 2232660 - RNA, 19 nt, Homo sapiens
  misc_RNA (1)...(19): siRNA sense strand
caagaaacccauucaggaa

SEQ ID NO: 2232661 - RNA, 19 nt, Homo sapiens
  misc_RNA (1)...(19): siRNA sense strand
ccauucaggaagugcuaaa

SEQ ID NO: 2232662 - RNA, 19 nt, Homo sapiens
  misc_RNA (1)...(19): siRNA sense strand
ggacaaauuugcaaaggcu

SEQ ID NO: 2232663 - RNA, 19 nt, Homo sapiens
  misc_RNA (1)...(19): siRNA sense strand
cuguaaagcagcuggagca

SEQ ID NO: 2232664 - RNA, 19 nt, Homo sapiens
  misc_RNA (1)...(19): siRNA sense strand
augagaaugcaguggccaa

SEQ ID NO: 2232665 - RNA, 19 nt, Homo sapiens
  misc_RNA (1)...(19): siRNA sense strand
uugcaaaggcuaaagaguu

SEQ ID NO: 2232666 - RNA, 19 nt, Homo sapiens
  misc_RNA (1)...(19): siRNA sense strand
gaaucauugcuguggacau

SEQ ID NO: 2232667 - RNA, 19 nt, Homo sapiens
  misc_RNA (1)...(19): siRNA sense strand
cagucaaaccaggugauaa

SEQ ID NO: 2232668 - RNA, 19 nt, Homo sapiens
  misc_RNA (1)...(19): siRNA sense strand
cugauggagguguggauuu

SEQ ID NO: 2232669 - RNA, 19 nt, Homo sapiens
  misc_RNA (1)...(19): siRNA sense strand
guggcugacuuuauggcua

SEQ ID NO: 2232670 - RNA, 19 nt, Homo sapiens
  misc_RNA (1)...(19): siRNA sense strand
ucaggaagugcuaaaggaa

SEQ ID NO: 2232671 - RNA, 19 nt, Homo sapiens
  misc_RNA (1)...(19): siRNA sense strand
gcaugugguuaguggcaac

SEQ ID NO: 2232672 - RNA, 19 nt, Homo sapiens
  misc_RNA (1)...(19): siRNA sense strand
ugcuaaaggaaaugacuga

SEQ ID NO: 2232673 - RNA, 19 nt, Homo sapiens
  misc_RNA (1)...(19): siRNA sense strand
ugcaaaggcuaaagaguug

SEQ ID NO: 2232674 - RNA, 19 nt, Homo sapiens
  misc_RNA (1)...(19): siRNA sense strand
gcauuaagaugguggcugc

SEQ ID NO: 2232675 - RNA, 19 nt, Homo sapiens
  misc_RNA (1)...(19): siRNA sense strand
cccucaagacuacaagaaa

SEQ ID NO: 2232676 - RNA, 19 nt, Homo sapiens
  misc_RNA (1)...(19): siRNA sense strand
ccuaaugaaccaaggaaaa

SEQ ID NO: 2232677 - RNA, 19 nt, Homo sapiens
  misc_RNA (1)...(19): siRNA sense strand
augcaaauuuagagagagu

SEQ ID NO: 2232678 - RNA, 19 nt, Homo sapiens
  misc_RNA (1)...(19): siRNA sense strand
auucuuuggugguuggaaa

SEQ ID NO: 2232679 - RNA, 19 nt, Homo sapiens
  misc_RNA (1)...(19): siRNA sense strand
gagaaguuugugaaggcua

SEQ ID NO: 2232680 - RNA, 19 nt, Homo sapiens
  misc_RNA (1)...(19): siRNA sense strand
uguggaaaguauugggcca

SEQ ID NO: 2232681 - RNA, 19 nt, Homo sapiens
  misc_RNA (1)...(19): siRNA sense strand
ugacaaaaucagugaggca

SEQ ID NO: 2232682 - RNA, 19 nt, Homo sapiens
  misc_RNA (1)...(19): siRNA sense strand
accuaaugaaccaaggaaa

SEQ ID NO: 2232683 - RNA, 19 nt, Homo sapiens
  misc_RNA (1)...(19): siRNA sense strand
uggaagaugccaggagcaa

SEQ ID NO: 2232684 - RNA, 19 nt, Homo sapiens
  misc_RNA (1)...(19): siRNA sense strand
auucuaaauuugagggccu

SEQ ID NO: 2232685 - RNA, 19 nt, Homo sapiens
  misc_RNA (1)...(19): siRNA sense strand
cuuccagaaucauagguau

SEQ ID NO: 2232686 - RNA, 19 nt, Homo sapiens
  misc_RNA (1)...(19): siRNA sense strand
acaucaacagugagaaguu

SEQ ID NO: 2232687 - RNA, 19 nt, Homo sapiens
  misc_RNA (1)...(19): siRNA sense strand
gguuuaccugcaaaggaaa

SEQ ID NO: 2232688 - RNA, 19 nt, Homo sapiens
  misc_RNA (1)...(19): siRNA sense strand
uuccagaaucauagguauu

SEQ ID NO: 2232689 - RNA, 19 nt, Homo sapiens
  misc_RNA (1)...(19): siRNA sense strand
gcuaaagcccugggagcca

SEQ ID NO: 2232690 - RNA, 19 nt, Homo sapiens
  misc_RNA (1)...(19): siRNA sense strand
gcuaauaaucggccguacu

SEQ ID NO: 2232691 - RNA, 19 nt, Homo sapiens
  misc_RNA (1)...(19): siRNA sense strand
ggaaaguguuggugaggga

SEQ ID NO: 2232692 - RNA, 19 nt, Homo sapiens
  misc_RNA (1)...(19): siRNA sense strand
ggaaaggauuaaugccaga

SEQ ID NO: 2232693 - RNA, 19 nt, Homo sapiens
  misc_RNA (1)...(19): siRNA sense strand
caaaguuggugucugaaua

SEQ ID NO: 2232694 - RNA, 19 nt, Homo sapiens
  misc_RNA (1)...(19): siRNA sense strand
cacucaagggaaaggauua

SEQ ID NO: 2232695 - RNA, 19 nt, Homo sapiens
  misc_RNA (1)...(19): siRNA sense strand
ccgauggaggaguggacua

SEQ ID NO: 2232696 - RNA, 19 nt, Homo sapiens
  misc_RNA (1)...(19): siRNA sense strand
auggaagaguguagaaagu

SEQ ID NO: 2232697 - RNA, 19 nt, Homo sapiens
  misc_RNA (1)...(19): siRNA sense strand
guguagaaagugucccaaa

SEQ ID NO: 2232698 - RNA, 19 nt, Homo sapiens
  misc_RNA (1)...(19): siRNA sense strand
ugccagaagauaagaguca

SEQ ID NO: 2232699 - RNA, 19 nt, Homo sapiens
  misc_RNA (1)...(19): siRNA sense strand
cuuuagcaccuuuguauaa

SEQ ID NO: 2232700 - RNA, 19 nt, Homo sapiens
  misc_RNA (1)...(19): siRNA sense strand
guauaaagucugccuucua

SEQ ID NO: 2232701 - RNA, 19 nt, Homo sapiens
  misc_RNA (1)...(19): siRNA sense strand
gaucauugccacugcgguu

SEQ ID NO: 2232702 - RNA, 19 nt, Homo sapiens
  misc_RNA (1)...(19): siRNA sense strand
gauuaaugccagaugguac

SEQ ID NO: 2232703 - RNA, 19 nt, Homo sapiens
  misc_RNA (1)...(19): siRNA sense strand
ccuuugaauguauugguaa

SEQ ID NO: 2232704 - RNA, 19 nt, Homo sapiens
  misc_RNA (1)...(19): siRNA sense strand
gauaaauuugcaagggcca

SEQ ID NO: 2232705 - RNA, 19 nt, Homo sapiens
  misc_RNA (1)...(19): siRNA sense strand
acucaagggaaaggauuaa

SEQ ID NO: 2232706 - RNA, 19 nt, Homo sapiens
  misc_RNA (1)...(19): siRNA sense strand
gagcagcacuugaggcaug

SEQ ID NO: 2232707 - RNA, 19 nt, Homo sapiens
  misc_RNA (1)...(19): siRNA sense strand
ggaucauugguguggacau

SEQ ID NO: 2232708 - RNA, 19 nt, Homo sapiens
  misc_RNA (1)...(19): siRNA sense strand
gagcugauccugaggguug

SEQ ID NO: 2232709 - RNA, 19 nt, Homo sapiens
  misc_RNA (1)...(19): siRNA sense strand
agggaaaggauuaaugcca

SEQ ID NO: 2232710 - RNA, 19 nt, Homo sapiens
  misc_RNA (1)...(19): siRNA sense strand
cuggaauuguggaaagugu

SEQ ID NO: 2232711 - RNA, 19 nt, Homo sapiens
  misc_RNA (1)...(19): siRNA sense strand
cguccauuccagcugguaa

SEQ ID NO: 2232712 - RNA, 19 nt, Homo sapiens
  misc_RNA (1)...(19): siRNA sense strand
acgagguuaucaagugcaa

SEQ ID NO: 2232713 - RNA, 19 nt, Homo sapiens
  misc_RNA (1)...(19): siRNA sense strand
cuugcaaaggaaagacaau

SEQ ID NO: 2232714 - RNA, 19 nt, Homo sapiens
  misc_RNA (1)...(19): siRNA sense strand
ccagaugguaccagcagau

SEQ ID NO: 2232715 - RNA, 19 nt, Homo sapiens
  misc_RNA (1)...(19): siRNA sense strand
gagagcagcacuugaggca

SEQ ID NO: 2232716 - RNA, 19 nt, Homo sapiens
  misc_RNA (1)...(19): siRNA sense strand
caggcaacaacgugggaua

SEQ ID NO: 2232717 - RNA, 19 nt, Homo sapiens
  misc_RNA (1)...(19): siRNA sense strand
cuuugaaguuauugggcau

SEQ ID NO: 2232718 - RNA, 19 nt, Homo sapiens
  misc_RNA (1)...(19): siRNA sense strand
uuuaauuggcuguggguuu

SEQ ID NO: 2232719 - RNA, 19 nt, Homo sapiens
  misc_RNA (1)...(19): siRNA sense strand
uguagagagcauuggagaa

SEQ ID NO: 2232720 - RNA, 19 nt, Homo sapiens
  misc_RNA (1)...(19): siRNA sense strand
cugccacaauguagagaau

SEQ ID NO: 2232721 - RNA, 19 nt, Homo sapiens
  misc_RNA (1)...(19): siRNA sense strand
acaugaggcaacugggauu

SEQ ID NO: 2232722 - RNA, 19 nt, Homo sapiens
  misc_RNA (1)...(19): siRNA sense strand
agugaggugcugucagaaa

SEQ ID NO: 2232723 - RNA, 19 nt, Homo sapiens
  misc_RNA (1)...(19): siRNA sense strand
ggacgcacauggaagggau

SEQ ID NO: 2232724 - RNA, 19 nt, Homo sapiens
  misc_RNA (1)...(19): siRNA sense strand
ccaccaaagacuaaagaag

SEQ ID NO: 2232725 - RNA, 19 nt, Homo sapiens
  misc_RNA (1)...(19): siRNA sense strand
ccuucuccauugaggaaau

SEQ ID NO: 2232726 - RNA, 19 nt, Homo sapiens
  misc_RNA (1)...(19): siRNA sense strand
cugggauuguagagagcau

SEQ ID NO: 2232727 - RNA, 19 nt, Homo sapiens
  misc_RNA (1)...(19): siRNA sense strand
agacuaaagaaguucgcau

SEQ ID NO: 2232728 - RNA, 19 nt, Homo sapiens
  misc_RNA (1)...(19): siRNA sense strand
cagaaaugacaggcaacaa

SEQ ID NO: 2232729 - RNA, 19 nt, Homo sapiens
  misc_RNA (1)...(19): siRNA sense strand
gauuuacaugcaagggcaa

SEQ ID NO: 2232730 - RNA, 19 nt, Homo sapiens
  misc_RNA (1)...(19): siRNA sense strand
agaaguucgcauuaagauu

SEQ ID NO: 2232731 - RNA, 19 nt, Homo sapiens
  misc_RNA (1)...(19): siRNA sense strand
ugaccucaacaaagacaaa

SEQ ID NO: 2232732 - RNA, 19 nt, Homo sapiens
  misc_RNA (1)...(19): siRNA sense strand
ugucuuuggagguuugaaa

SEQ ID NO: 2232733 - RNA, 19 nt, Homo sapiens
  misc_RNA (1)...(19): siRNA sense strand
cauugaggaaauagaaguu

SEQ ID NO: 2232734 - RNA, 19 nt, Homo sapiens
  misc_RNA (1)...(19): siRNA sense strand
ucccaaaacuagugacuga

SEQ ID NO: 2232735 - RNA, 19 nt, Homo sapiens
  misc_RNA (1)...(19): siRNA sense strand
agaaauuugaccuggacca

SEQ ID NO: 2232736 - RNA, 19 nt, Homo sapiens
  misc_RNA (1)...(19): siRNA sense strand
uuccagugauugugggaca

SEQ ID NO: 2232737 - RNA, 19 nt, Homo sapiens
  misc_RNA (1)...(19): siRNA sense strand
acaaauuugagaaggccau

SEQ ID NO: 2232738 - RNA, 19 nt, Homo sapiens
  misc_RNA (1)...(19): siRNA sense strand
ggaaauagaaguugcccca

SEQ ID NO: 2232739 - RNA, 19 nt, Homo sapiens
  misc_RNA (1)...(19): siRNA sense strand
cuuugcauuaggagcgaua

SEQ ID NO: 2232740 - RNA, 19 nt, Homo sapiens
  misc_RNA (1)...(19): siRNA sense strand
aagcagagaugauguccca

SEQ ID NO: 2232741 - RNA, 19 nt, Homo sapiens
  misc_RNA (1)...(19): siRNA sense strand
ccgcagaaguacuauggga

SEQ ID NO: 2232742 - RNA, 19 nt, Homo sapiens
  misc_RNA (1)...(19): siRNA sense strand
gguacaagaugguggugac

SEQ ID NO: 2232743 - RNA, 19 nt, Homo sapiens
  misc_RNA (1)...(19): siRNA sense strand
cgcagaaguacuaugggaa

SEQ ID NO: 2232744 - RNA, 19 nt, Homo sapiens
  misc_RNA (1)...(19): siRNA sense strand
ccacagaccuacuuccaca

SEQ ID NO: 2232745 - RNA, 19 nt, Homo sapiens
  misc_RNA (1)...(19): siRNA sense strand
gggcggugaaggugaacca

SEQ ID NO: 2232746 - RNA, 19 nt, Homo sapiens
  misc_RNA (1)...(19): siRNA sense strand
ccgggaacgugcuggugau

SEQ ID NO: 2232747 - RNA, 19 nt, Homo sapiens
  misc_RNA (1)...(19): siRNA sense strand
acauugggccacagaccua

SEQ ID NO: 2232748 - RNA, 19 nt, Homo sapiens
  misc_RNA (1)...(19): siRNA sense strand
gcacgagggcuaagggcau

SEQ ID NO: 2232749 - RNA, 19 nt, Homo sapiens
  misc_RNA (1)...(19): siRNA sense strand
cagcugaagcagauggaga

SEQ ID NO: 2232750 - RNA, 19 nt, Homo sapiens
  misc_RNA (1)...(19): siRNA sense strand
gccaugagcucaagggagu

SEQ ID NO: 2232751 - RNA, 19 nt, Homo sapiens
  misc_RNA (1)...(19): siRNA sense strand
gcuggugaguggagggagu

SEQ ID NO: 2232752 - RNA, 19 nt, Homo sapiens
  misc_RNA (1)...(19): siRNA sense strand
ugaagcagauggagagcca

SEQ ID NO: 2232753 - RNA, 19 nt, Homo sapiens
  misc_RNA (1)...(19): siRNA sense strand
gaguggagggagugcccaa

SEQ ID NO: 2232754 - RNA, 19 nt, Homo sapiens
  misc_RNA (1)...(19): siRNA sense strand
cgccagaccuuccgcaaga

SEQ ID NO: 2232755 - RNA, 19 nt, Homo sapiens
  misc_RNA (1)...(19): siRNA sense strand
cgacgacagcugaagcaga

SEQ ID NO: 2232756 - RNA, 19 nt, Homo sapiens
  misc_RNA (1)...(19): siRNA sense strand
gcggaggcccaauggcuau

SEQ ID NO: 2232757 - RNA, 19 nt, Homo sapiens
  misc_RNA (1)...(19): siRNA sense strand
gcacugagcugauggacca

SEQ ID NO: 2232758 - RNA, 19 nt, Homo sapiens
  misc_RNA (1)...(19): siRNA sense strand
gggcaaugaauauggccau

SEQ ID NO: 2232759 - RNA, 19 nt, Homo sapiens
  misc_RNA (1)...(19): siRNA sense strand
gcagaugucaagaguggga

SEQ ID NO: 2232760 - RNA, 19 nt, Homo sapiens
  misc_RNA (1)...(19): siRNA sense strand
ccuacaucaccauggaaau

SEQ ID NO: 2232761 - RNA, 19 nt, Homo sapiens
  misc_RNA (1)...(19): siRNA sense strand
cgggaguucaagacggcua

SEQ ID NO: 2232762 - RNA, 19 nt, Homo sapiens
  misc_RNA (1)...(19): siRNA sense strand
gucagauacaagaggguca

SEQ ID NO: 2232763 - RNA, 19 nt, Homo sapiens
  misc_RNA (1)...(19): siRNA sense strand
ccgucaugagaauggacua

SEQ ID NO: 2232764 - RNA, 19 nt, Homo sapiens
  misc_RNA (1)...(19): siRNA sense strand
gggaguucaagacggcuaa

SEQ ID NO: 2232765 - RNA, 19 nt, Homo sapiens
  misc_RNA (1)...(19): siRNA sense strand
gcucagagguggaggcugu

SEQ ID NO: 2232766 - RNA, 19 nt, Homo sapiens
  misc_RNA (1)...(19): siRNA sense strand
ccauggagguucugggcuu

SEQ ID NO: 2232767 - RNA, 19 nt, Homo sapiens
  misc_RNA (1)...(19): siRNA sense strand
ccaucaugaccgagcgcaa

SEQ ID NO: 2232768 - RNA, 19 nt, Homo sapiens
  misc_RNA (1)...(19): siRNA sense strand
gugagaagaaagcggccaa

SEQ ID NO: 2232769 - RNA, 19 nt, Homo sapiens
  misc_RNA (1)...(19): siRNA sense strand
cggucaucguggucaugua

SEQ ID NO: 2232770 - RNA, 19 nt, Homo sapiens
  misc_RNA (1)...(19): siRNA sense strand
cagcuaagacguugggcau

SEQ ID NO: 2232771 - RNA, 19 nt, Homo sapiens
  misc_RNA (1)...(19): siRNA sense strand
gugucuauauaguggccaa

SEQ ID NO: 2232772 - RNA, 19 nt, Homo sapiens
  misc_RNA (1)...(19): siRNA sense strand
cccuagaggugcucggcua

SEQ ID NO: 2232773 - RNA, 19 nt, Homo sapiens
  misc_RNA (1)...(19): siRNA sense strand
ccuucaagcuccugaccga

SEQ ID NO: 2232774 - RNA, 19 nt, Homo sapiens
  misc_RNA (1)...(19): siRNA sense strand
ccaagaacuuucacgagga

SEQ ID NO: 2232775 - RNA, 19 nt, Homo sapiens
  misc_RNA (1)...(19): siRNA sense strand
gcaggagucaugaaggaga

SEQ ID NO: 2232776 - RNA, 19 nt, Homo sapiens
  misc_RNA (1)...(19): siRNA sense strand
gcaaggacucgcuggacga

SEQ ID NO: 2232777 - RNA, 19 nt, Homo sapiens
  misc_RNA (1)...(19): siRNA sense strand
ucaugaaggagauguccaa

SEQ ID NO: 2232778 - RNA, 19 nt, Homo sapiens
  misc_RNA (1)...(19): siRNA sense strand
caccaagaaccuagaggca

SEQ ID NO: 2232779 - RNA, 19 nt, Homo sapiens
  misc_RNA (1)...(19): siRNA sense strand
auauaguggccaagagaac

SEQ ID NO: 2232780 - RNA, 19 nt, Homo sapiens
  misc_RNA (1)...(19): siRNA sense strand
ccaagaaccuagaggcagg

SEQ ID NO: 2232781 - RNA, 19 nt, Homo sapiens
  misc_RNA (1)...(19): siRNA sense strand
ccgaccugcuguugagcuu

SEQ ID NO: 2232782 - RNA, 19 nt, Homo sapiens
  misc_RNA (1)...(19): siRNA sense strand
cggucauucuagucaugua

SEQ ID NO: 2232783 - RNA, 19 nt, Homo sapiens
  misc_RNA (1)...(19): siRNA sense strand
gcgucuacgugguggccaa

SEQ ID NO: 2232784 - RNA, 19 nt, Homo sapiens
  misc_RNA (1)...(19): siRNA sense strand
gggagaagaaagcggccaa

SEQ ID NO: 2232785 - RNA, 19 nt, Homo sapiens
  misc_RNA (1)...(19): siRNA sense strand
gcuacaucggcgugagcua

SEQ ID NO: 2232786 - RNA, 19 nt, Homo sapiens
  misc_RNA (1)...(19): siRNA sense strand
ucuucgagguccuaggcua

SEQ ID NO: 2232787 - RNA, 19 nt, Homo sapiens
  misc_RNA (1)...(19): siRNA sense strand
gcgccaagaccaagacgca

SEQ ID NO: 2232788 - RNA, 19 nt, Homo sapiens
  misc_RNA (1)...(19): siRNA sense strand
gcuccagccaagaguucaa

SEQ ID NO: 2232789 - RNA, 19 nt, Homo sapiens
  misc_RNA (1)...(19): siRNA sense strand
cguggaucugccaggauua

SEQ ID NO: 2232790 - RNA, 19 nt, Homo sapiens
  misc_RNA (1)...(19): siRNA sense strand
acggauggcguuugugaau

SEQ ID NO: 2232791 - RNA, 19 nt, Homo sapiens
  misc_RNA (1)...(19): siRNA sense strand
ggguaacauccuagugauc

SEQ ID NO: 2232792 - RNA, 19 nt, Homo sapiens
  misc_RNA (1)...(19): siRNA sense strand
gcgucuacgugguggccaa

SEQ ID NO: 2232793 - RNA, 19 nt, Homo sapiens
  misc_RNA (1)...(19): siRNA sense strand
gggagaagaaagcggccaa

SEQ ID NO: 2232794 - RNA, 19 nt, Homo sapiens
  misc_RNA (1)...(19): siRNA sense strand
gcuacaucggcgugagcua

SEQ ID NO: 2232795 - RNA, 19 nt, Homo sapiens
  misc_RNA (1)...(19): siRNA sense strand
ucuucgagguccuaggcua

SEQ ID NO: 2232796 - RNA, 19 nt, Homo sapiens
  misc_RNA (1)...(19): siRNA sense strand
gcgccaagaccaagacgca

SEQ ID NO: 2232797 - RNA, 19 nt, Homo sapiens
  misc_RNA (1)...(19): siRNA sense strand
gcuccagccaagaguucaa

SEQ ID NO: 2232798 - RNA, 19 nt, Homo sapiens
  misc_RNA (1)...(19): siRNA sense strand
cguggaucugccaggauua

SEQ ID NO: 2232799 - RNA, 19 nt, Homo sapiens
  misc_RNA (1)...(19): siRNA sense strand
acggauggcguuugugaau

SEQ ID NO: 2232800 - RNA, 19 nt, Homo sapiens
  misc_RNA (1)...(19): siRNA sense strand
ggguaacauccuagugauc

SEQ ID NO: 2232801 - RNA, 19 nt, Homo sapiens
  misc_RNA (1)...(19): siRNA sense strand
gcgucuacgugguggccaa

SEQ ID NO: 2232802 - RNA, 19 nt, Homo sapiens
  misc_RNA (1)...(19): siRNA sense strand
gggagaagaaagcggccaa

SEQ ID NO: 2232803 - RNA, 19 nt, Homo sapiens
  misc_RNA (1)...(19): siRNA sense strand
gcuacaucggcgugagcua

SEQ ID NO: 2232804 - RNA, 19 nt, Homo sapiens
  misc_RNA (1)...(19): siRNA sense strand
acaaggacauggugcgcau

SEQ ID NO: 2232805 - RNA, 19 nt, Homo sapiens
  misc_RNA (1)...(19): siRNA sense strand
ucuucgagguccuaggcua

SEQ ID NO: 2232806 - RNA, 19 nt, Homo sapiens
  misc_RNA (1)...(19): siRNA sense strand
gcgccaagaccaagacgca

SEQ ID NO: 2232807 - RNA, 19 nt, Homo sapiens
  misc_RNA (1)...(19): siRNA sense strand
gcuccagccaagaguucaa

SEQ ID NO: 2232808 - RNA, 19 nt, Homo sapiens
  misc_RNA (1)...(19): siRNA sense strand
cguggaucugccaggauua

SEQ ID NO: 2232809 - RNA, 19 nt, Homo sapiens
  misc_RNA (1)...(19): siRNA sense strand
acggauggcguuugugaau

SEQ ID NO: 2232810 - RNA, 19 nt, Homo sapiens
  misc_RNA (1)...(19): siRNA sense strand
ggguaacauccuagugauc

SEQ ID NO: 2232811 - RNA, 19 nt, Homo sapiens
  misc_RNA (1)...(19): siRNA sense strand
gcgucuacgugguggccaa

SEQ ID NO: 2232812 - RNA, 19 nt, Homo sapiens
  misc_RNA (1)...(19): siRNA sense strand
gggagaagaaagcggccaa

SEQ ID NO: 2232813 - RNA, 19 nt, Homo sapiens
  misc_RNA (1)...(19): siRNA sense strand
gcuacaucggcgugagcua

SEQ ID NO: 2232814 - RNA, 19 nt, Homo sapiens
  misc_RNA (1)...(19): siRNA sense strand
ucuucgagguccuaggcua

SEQ ID NO: 2232815 - RNA, 19 nt, Homo sapiens
  misc_RNA (1)...(19): siRNA sense strand
gcgccaagaccaagacgca

SEQ ID NO: 2232816 - RNA, 19 nt, Homo sapiens
  misc_RNA (1)...(19): siRNA sense strand
gcuccagccaagaguucaa

SEQ ID NO: 2232817 - RNA, 19 nt, Homo sapiens
  misc_RNA (1)...(19): siRNA sense strand
cguggaucugccaggauua

SEQ ID NO: 2232818 - RNA, 19 nt, Homo sapiens
  misc_RNA (1)...(19): siRNA sense strand
acggauggcguuugugaau

SEQ ID NO: 2232819 - RNA, 19 nt, Homo sapiens
  misc_RNA (1)...(19): siRNA sense strand
ggguaacauccuagugauc

SEQ ID NO: 2232820 - RNA, 19 nt, Homo sapiens
  misc_RNA (1)...(19): siRNA sense strand
ccaacgagcugcugggcua

SEQ ID NO: 2232821 - RNA, 19 nt, Homo sapiens
  misc_RNA (1)...(19): siRNA sense strand
ccagagaggucaacggaca

SEQ ID NO: 2232822 - RNA, 19 nt, Homo sapiens
  misc_RNA (1)...(19): siRNA sense strand
aggaagaggaggaggagga

SEQ ID NO: 2232823 - RNA, 19 nt, Homo sapiens
  misc_RNA (1)...(19): siRNA sense strand
aggaggaggaggaggaaga

SEQ ID NO: 2232824 - RNA, 19 nt, Homo sapiens
  misc_RNA (1)...(19): siRNA sense strand
aagcugaagaggaggaaga

SEQ ID NO: 2232825 - RNA, 19 nt, Homo sapiens
  misc_RNA (1)...(19): siRNA sense strand
ggaugaagcugaagaggag

SEQ ID NO: 2232826 - RNA, 19 nt, Homo sapiens
  misc_RNA (1)...(19): siRNA sense strand
aggaggaggaagaguguga

SEQ ID NO: 2232827 - RNA, 19 nt, Homo sapiens
  misc_RNA (1)...(19): siRNA sense strand
cugaagaggaggaagagga

SEQ ID NO: 2232828 - RNA, 19 nt, Homo sapiens
  misc_RNA (1)...(19): siRNA sense strand
aggaggaagaggaggagga

SEQ ID NO: 2232829 - RNA, 19 nt, Homo sapiens
  misc_RNA (1)...(19): siRNA sense strand
aggaggaggaggaggagga

SEQ ID NO: 2232830 - RNA, 19 nt, Homo sapiens
  misc_RNA (1)...(19): siRNA sense strand
ccaucagccuggaccgcua

SEQ ID NO: 2232831 - RNA, 19 nt, Homo sapiens
  misc_RNA (1)...(19): siRNA sense strand
gcaucuaccugaucgccaa

SEQ ID NO: 2232832 - RNA, 19 nt, Homo sapiens
  misc_RNA (1)...(19): siRNA sense strand
aagaggaggaagaggagga

SEQ ID NO: 2232833 - RNA, 19 nt, Homo sapiens
  misc_RNA (1)...(19): siRNA sense strand
aagaggaggaggaggagga

SEQ ID NO: 2232834 - RNA, 19 nt, Homo sapiens
  misc_RNA (1)...(19): siRNA sense strand
aggaugaagcugaagagga

SEQ ID NO: 2232835 - RNA, 19 nt, Homo sapiens
  misc_RNA (1)...(19): siRNA sense strand
ccaacgagcucauggccua

SEQ ID NO: 2232836 - RNA, 19 nt, Homo sapiens
  misc_RNA (1)...(19): siRNA sense strand
gcaucuaccgaguggccaa

SEQ ID NO: 2232837 - RNA, 19 nt, Homo sapiens
  misc_RNA (1)...(19): siRNA sense strand
ccaucagccuggaccgcua

SEQ ID NO: 2232838 - RNA, 19 nt, Homo sapiens
  misc_RNA (1)...(19): siRNA sense strand
ccaacguggugaaggccuu

SEQ ID NO: 2232839 - RNA, 19 nt, Homo sapiens
  misc_RNA (1)...(19): siRNA sense strand
ugaagaagaucgacagcug

SEQ ID NO: 2232840 - RNA, 19 nt, Homo sapiens
  misc_RNA (1)...(19): siRNA sense strand
aagaagaaaucccuggcaa

SEQ ID NO: 2232841 - RNA, 19 nt, Homo sapiens
  misc_RNA (1)...(19): siRNA sense strand
gaaauaugcccaaugguca

SEQ ID NO: 2232842 - RNA, 19 nt, Homo sapiens
  misc_RNA (1)...(19): siRNA sense strand
cauuaauagcugcgaaguu

SEQ ID NO: 2232843 - RNA, 19 nt, Homo sapiens
  misc_RNA (1)...(19): siRNA sense strand
gggaaaagagagaguaugu

SEQ ID NO: 2232844 - RNA, 19 nt, Homo sapiens
  misc_RNA (1)...(19): siRNA sense strand
agacgaauagcuaugggaa

SEQ ID NO: 2232845 - RNA, 19 nt, Homo sapiens
  misc_RNA (1)...(19): siRNA sense strand
acuucgggcuugugaacau

SEQ ID NO: 2232846 - RNA, 19 nt, Homo sapiens
  misc_RNA (1)...(19): siRNA sense strand
aaacauuaccagcggucuu

SEQ ID NO: 2232847 - RNA, 19 nt, Homo sapiens
  misc_RNA (1)...(19): siRNA sense strand
cgaaguuauagcagucauu

SEQ ID NO: 2232848 - RNA, 19 nt, Homo sapiens
  misc_RNA (1)...(19): siRNA sense strand
gagaguaugucuugccgga

SEQ ID NO: 2232849 - RNA, 19 nt, Homo sapiens
  misc_RNA (1)...(19): siRNA sense strand
cgaauagcuaugggaagaa

SEQ ID NO: 2232850 - RNA, 19 nt, Homo sapiens
  misc_RNA (1)...(19): siRNA sense strand
acgucagaaccauugaaua

SEQ ID NO: 2232851 - RNA, 19 nt, Homo sapiens
  misc_RNA (1)...(19): siRNA sense strand
acgagaacgccguggagaa

SEQ ID NO: 2232852 - RNA, 19 nt, Homo sapiens
  misc_RNA (1)...(19): siRNA sense strand
ucuacaagaugauggccaa

SEQ ID NO: 2232853 - RNA, 19 nt, Homo sapiens
  misc_RNA (1)...(19): siRNA sense strand
gcuauggugaugugggcaa

SEQ ID NO: 2232854 - RNA, 19 nt, Homo sapiens
  misc_RNA (1)...(19): siRNA sense strand
ccguggagaaggugaacau

SEQ ID NO: 2232855 - RNA, 19 nt, Homo sapiens
  misc_RNA (1)...(19): siRNA sense strand
acguggagaucgaugucaa

SEQ ID NO: 2232856 - RNA, 19 nt, Homo sapiens
  misc_RNA (1)...(19): siRNA sense strand
uggaugaggcaguggcuga

SEQ ID NO: 2232857 - RNA, 19 nt, Homo sapiens
  misc_RNA (1)...(19): siRNA sense strand
aggcugccauggagggcua

SEQ ID NO: 2232858 - RNA, 19 nt, Homo sapiens
  misc_RNA (1)...(19): siRNA sense strand
cgucaucaucaccgagauu

SEQ ID NO: 2232859 - RNA, 19 nt, Homo sapiens
  misc_RNA (1)...(19): siRNA sense strand
acuuugacguggagaucga

SEQ ID NO: 2232860 - RNA, 19 nt, Homo sapiens
  misc_RNA (1)...(19): siRNA sense strand
agaugaaggaugaugccau

SEQ ID NO: 2232861 - RNA, 19 nt, Homo sapiens
  misc_RNA (1)...(19): siRNA sense strand
ugaaugugaaguugaccaa

SEQ ID NO: 2232862 - RNA, 19 nt, Homo sapiens
  misc_RNA (1)...(19): siRNA sense strand
gaugauggccaaugggauc

SEQ ID NO: 2232863 - RNA, 19 nt, Homo sapiens
  misc_RNA (1)...(19): siRNA sense strand
aggaaauggcagagaacua

SEQ ID NO: 2232864 - RNA, 19 nt, Homo sapiens
  misc_RNA (1)...(19): siRNA sense strand
cagacaaaauccagggcaa

SEQ ID NO: 2232865 - RNA, 19 nt, Homo sapiens
  misc_RNA (1)...(19): siRNA sense strand
gugaaguggaagaaggaga

SEQ ID NO: 2232866 - RNA, 19 nt, Homo sapiens
  misc_RNA (1)...(19): siRNA sense strand
aaauaugugaaguggaaga

SEQ ID NO: 2232867 - RNA, 19 nt, Homo sapiens
  misc_RNA (1)...(19): siRNA sense strand
gugaauacgcuuuggccga

SEQ ID NO: 2232868 - RNA, 19 nt, Homo sapiens
  misc_RNA (1)...(19): siRNA sense strand
ggguguucguggaggagca

SEQ ID NO: 2232869 - RNA, 19 nt, Homo sapiens
  misc_RNA (1)...(19): siRNA sense strand
gagauaagcccgacgugga

SEQ ID NO: 2232870 - RNA, 19 nt, Homo sapiens
  misc_RNA (1)...(19): siRNA sense strand
gaucaaaagcaguucgaca

SEQ ID NO: 2232871 - RNA, 19 nt, Homo sapiens
  misc_RNA (1)...(19): siRNA sense strand
cgaauccaagagugggaaa

SEQ ID NO: 2232872 - RNA, 19 nt, Homo sapiens
  misc_RNA (1)...(19): siRNA sense strand
ggacaaggcuguggaggcu

SEQ ID NO: 2232873 - RNA, 19 nt, Homo sapiens
  misc_RNA (1)...(19): siRNA sense strand
ucgacaaagcccugaaguu

SEQ ID NO: 2232874 - RNA, 19 nt, Homo sapiens
  misc_RNA (1)...(19): siRNA sense strand
cgacaaaaucuuagagcug

SEQ ID NO: 2232875 - RNA, 19 nt, Homo sapiens
  misc_RNA (1)...(19): siRNA sense strand
ucguggaggagcaggucua

SEQ ID NO: 2232876 - RNA, 19 nt, Homo sapiens
  misc_RNA (1)...(19): siRNA sense strand
cagagaacuaggugaauac

SEQ ID NO: 2232877 - RNA, 19 nt, Homo sapiens
  misc_RNA (1)...(19): siRNA sense strand
ggaagaaggaaggggccaa

SEQ ID NO: 2232878 - RNA, 19 nt, Homo sapiens
  misc_RNA (1)...(19): siRNA sense strand
cagaagucacagacaacau

SEQ ID NO: 2232879 - RNA, 19 nt, Homo sapiens
  misc_RNA (1)...(19): siRNA sense strand
cuucaacucgggagcaaau

SEQ ID NO: 2232880 - RNA, 19 nt, Homo sapiens
  misc_RNA (1)...(19): siRNA sense strand
ccaggguguucguggagga

SEQ ID NO: 2232881 - RNA, 19 nt, Homo sapiens
  misc_RNA (1)...(19): siRNA sense strand
augaauggcacgaauccaa

SEQ ID NO: 2232882 - RNA, 19 nt, Homo sapiens
  misc_RNA (1)...(19): siRNA sense strand
ggaugaaggacgagcgugu

SEQ ID NO: 2232883 - RNA, 19 nt, Homo sapiens
  misc_RNA (1)...(19): siRNA sense strand
gggccuggaugaaggacga

SEQ ID NO: 2232884 - RNA, 19 nt, Homo sapiens
  misc_RNA (1)...(19): siRNA sense strand
ucgugaacgugcagagcuu

SEQ ID NO: 2232885 - RNA, 19 nt, Homo sapiens
  misc_RNA (1)...(19): siRNA sense strand
cuugcuacguggacgacaa

SEQ ID NO: 2232886 - RNA, 19 nt, Homo sapiens
  misc_RNA (1)...(19): siRNA sense strand
gcaucaucaaccagaaaca

SEQ ID NO: 2232887 - RNA, 19 nt, Homo sapiens
  misc_RNA (1)...(19): siRNA sense strand
gugcugaagccaucggaga

SEQ ID NO: 2232888 - RNA, 19 nt, Homo sapiens
  misc_RNA (1)...(19): siRNA sense strand
ccgcaucaucaaccagaaa

SEQ ID NO: 2232889 - RNA, 19 nt, Homo sapiens
  misc_RNA (1)...(19): siRNA sense strand
cugugaugcaggaggagau

SEQ ID NO: 2232890 - RNA, 19 nt, Homo sapiens
  misc_RNA (1)...(19): siRNA sense strand
ccaucggagauuagcaaga

SEQ ID NO: 2232891 - RNA, 19 nt, Homo sapiens
  misc_RNA (1)...(19): siRNA sense strand
ucgagaagauccuggccga

SEQ ID NO: 2232892 - RNA, 19 nt, Homo sapiens
  misc_RNA (1)...(19): siRNA sense strand
aggacgagcgugugcccaa

SEQ ID NO: 2232893 - RNA, 19 nt, Homo sapiens
  misc_RNA (1)...(19): siRNA sense strand
ugguggaugugcaggagau

SEQ ID NO: 2232894 - RNA, 19 nt, Homo sapiens
  misc_RNA (1)...(19): siRNA sense strand
ggaugcugcugguggccau

SEQ ID NO: 2232895 - RNA, 19 nt, Homo sapiens
  misc_RNA (1)...(19): siRNA sense strand
agauggagccugugaugca

SEQ ID NO: 2232896 - RNA, 19 nt, Homo sapiens
  misc_RNA (1)...(19): siRNA sense strand
cagagaagguccuggcuga

SEQ ID NO: 2232897 - RNA, 19 nt, Homo sapiens
  misc_RNA (1)...(19): siRNA sense strand
ggaauugcguggugcugaa

SEQ ID NO: 2232898 - RNA, 19 nt, Homo sapiens
  misc_RNA (1)...(19): siRNA sense strand
cuggagaaauuaaaggaga

SEQ ID NO: 2232899 - RNA, 19 nt, Homo sapiens
  misc_RNA (1)...(19): siRNA sense strand
ccugcuacguggacgacaa

SEQ ID NO: 2232900 - RNA, 19 nt, Homo sapiens
  misc_RNA (1)...(19): siRNA sense strand
aauuaaaggagauccgcua

SEQ ID NO: 2232901 - RNA, 19 nt, Homo sapiens
  misc_RNA (1)...(19): siRNA sense strand
gcaucaucaaccagaaaca

SEQ ID NO: 2232902 - RNA, 19 nt, Homo sapiens
  misc_RNA (1)...(19): siRNA sense strand
ucaucaaccggcaggagaa

SEQ ID NO: 2232903 - RNA, 19 nt, Homo sapiens
  misc_RNA (1)...(19): siRNA sense strand
ccgcaucaucaaccagaaa

SEQ ID NO: 2232904 - RNA, 19 nt, Homo sapiens
  misc_RNA (1)...(19): siRNA sense strand
cugugaugcaggaggagau

SEQ ID NO: 2232905 - RNA, 19 nt, Homo sapiens
  misc_RNA (1)...(19): siRNA sense strand
ggauauaagaagucaggau

SEQ ID NO: 2232906 - RNA, 19 nt, Homo sapiens
  misc_RNA (1)...(19): siRNA sense strand
cuuggaacuuggaggcaaa

SEQ ID NO: 2232907 - RNA, 19 nt, Homo sapiens
  misc_RNA (1)...(19): siRNA sense strand
uuacagaggaaguggugaa

SEQ ID NO: 2232908 - RNA, 19 nt, Homo sapiens
  misc_RNA (1)...(19): siRNA sense strand
guauuugugcagaaagaaa

SEQ ID NO: 2232909 - RNA, 19 nt, Homo sapiens
  misc_RNA (1)...(19): siRNA sense strand
gguuauaccagaagagaac

SEQ ID NO: 2232910 - RNA, 19 nt, Homo sapiens
  misc_RNA (1)...(19): siRNA sense strand
gggaauaggagcauggaac

SEQ ID NO: 2232911 - RNA, 19 nt, Homo sapiens
  misc_RNA (1)...(19): siRNA sense strand
gggaacgggaggaugaaau

SEQ ID NO: 2232912 - RNA, 19 nt, Homo sapiens
  misc_RNA (1)...(19): siRNA sense strand
gguucuagaaagagccaau

SEQ ID NO: 2232913 - RNA, 19 nt, Homo sapiens
  misc_RNA (1)...(19): siRNA sense strand
ccugaagaucccaaauuaa

SEQ ID NO: 2232914 - RNA, 19 nt, Homo sapiens
  misc_RNA (1)...(19): siRNA sense strand
cugcauugcuacuggcuga

SEQ ID NO: 2232915 - RNA, 19 nt, Homo sapiens
  misc_RNA (1)...(19): siRNA sense strand
cuguaauggcacaagagua

SEQ ID NO: 2232916 - RNA, 19 nt, Homo sapiens
  misc_RNA (1)...(19): siRNA sense strand
caggagaaaaggaaguaaa

SEQ ID NO: 2232917 - RNA, 19 nt, Homo sapiens
  misc_RNA (1)...(19): siRNA sense strand
ggauaauaagggaacggga

SEQ ID NO: 2232918 - RNA, 19 nt, Homo sapiens
  misc_RNA (1)...(19): siRNA sense strand
cagcauuagccugugguaa

SEQ ID NO: 2232919 - RNA, 19 nt, Homo sapiens
  misc_RNA (1)...(19): siRNA sense strand
ucaaaguggcaaaggagca

SEQ ID NO: 2232920 - RNA, 19 nt, Homo sapiens
  misc_RNA (1)...(19): siRNA sense strand
aguguuaugugguggagau

SEQ ID NO: 2232921 - RNA, 19 nt, Homo sapiens
  misc_RNA (1)...(19): siRNA sense strand
agagaacggccgugugaca

SEQ ID NO: 2232922 - RNA, 19 nt, Homo sapiens
  misc_RNA (1)...(19): siRNA sense strand
ccuuggaacuuggaggcaa

SEQ ID NO: 2232923 - RNA, 19 nt, Homo sapiens
  misc_RNA (1)...(19): siRNA sense strand
aggauuuggcagagagaac

SEQ ID NO: 2232924 - RNA, 19 nt, Homo sapiens
  misc_RNA (1)...(19): siRNA sense strand
ccgcuuggacauugacauu

SEQ ID NO: 2232925 - RNA, 19 nt, Homo sapiens
  misc_RNA (1)...(19): siRNA sense strand
agcugagguucuagaaaga

SEQ ID NO: 2232926 - RNA, 19 nt, Homo sapiens
  misc_RNA (1)...(19): siRNA sense strand
cagacugugauaugaacaa

SEQ ID NO: 2232927 - RNA, 19 nt, Homo sapiens
  misc_RNA (1)...(19): siRNA sense strand
acacugaagcugagguucu

SEQ ID NO: 2232928 - RNA, 19 nt, Homo sapiens
  misc_RNA (1)...(19): siRNA sense strand
ugauaugaacaaugcugua

SEQ ID NO: 2232929 - RNA, 19 nt, Homo sapiens
  misc_RNA (1)...(19): siRNA sense strand
gcuacuauggagugcauca

SEQ ID NO: 2232930 - RNA, 19 nt, Homo sapiens
  misc_RNA (1)...(19): siRNA sense strand
guggugaaacagacccaaa

SEQ ID NO: 2232931 - RNA, 19 nt, Homo sapiens
  misc_RNA (1)...(19): siRNA sense strand
ccgugugacaaucgaauau

SEQ ID NO: 2232932 - RNA, 19 nt, Homo sapiens
  misc_RNA (1)...(19): siRNA sense strand
gaccacaccuggagcgagu

SEQ ID NO: 2232933 - RNA, 19 nt, Homo sapiens
  misc_RNA (1)...(19): siRNA sense strand
aagagaaccacuuggggua

SEQ ID NO: 2232934 - RNA, 19 nt, Homo sapiens
  misc_RNA (1)...(19): siRNA sense strand
aaaaugaagagcaggaaua

SEQ ID NO: 2232935 - RNA, 19 nt, Homo sapiens
  misc_RNA (1)...(19): siRNA sense strand
agaucuggccaaagacaua

SEQ ID NO: 2232936 - RNA, 19 nt, Homo sapiens
  misc_RNA (1)...(19): siRNA sense strand
gaaacaaugcacagcguca

SEQ ID NO: 2232937 - RNA, 19 nt, Homo sapiens
  misc_RNA (1)...(19): siRNA sense strand
ugguuaaagguguggauga

SEQ ID NO: 2232938 - RNA, 19 nt, Homo sapiens
  misc_RNA (1)...(19): siRNA sense strand
cugaaauugacaugaauga

SEQ ID NO: 2232939 - RNA, 19 nt, Homo sapiens
  misc_RNA (1)...(19): siRNA sense strand
cagaaauacaccaaguaca

SEQ ID NO: 2232940 - RNA, 19 nt, Homo sapiens
  misc_RNA (1)...(19): siRNA sense strand
cuaacaaagaaaucagaga

SEQ ID NO: 2232941 - RNA, 19 nt, Homo sapiens
  misc_RNA (1)...(19): siRNA sense strand
ugaaugaagacuuggcuga

SEQ ID NO: 2232942 - RNA, 19 nt, Homo sapiens
  misc_RNA (1)...(19): siRNA sense strand
aagcaggagaaaggagaaa

SEQ ID NO: 2232943 - RNA, 19 nt, Homo sapiens
  misc_RNA (1)...(19): siRNA sense strand
gggccuuggaacugaugaa

SEQ ID NO: 2232944 - RNA, 19 nt, Homo sapiens
  misc_RNA (1)...(19): siRNA sense strand
ugaagagagaucuggccaa

SEQ ID NO: 2232945 - RNA, 19 nt, Homo sapiens
  misc_RNA (1)...(19): siRNA sense strand
uggaugaaaccaaaggaga

SEQ ID NO: 2232946 - RNA, 19 nt, Homo sapiens
  misc_RNA (1)...(19): siRNA sense strand
gagaaaggggacagacgua

SEQ ID NO: 2232947 - RNA, 19 nt, Homo sapiens
  misc_RNA (1)...(19): siRNA sense strand
aacaaagaaaucagagaca

SEQ ID NO: 2232948 - RNA, 19 nt, Homo sapiens
  misc_RNA (1)...(19): siRNA sense strand
ggagaaaggagaaagggga

SEQ ID NO: 2232949 - RNA, 19 nt, Homo sapiens
  misc_RNA (1)...(19): siRNA sense strand
gcagcauaucuccaggaaa

SEQ ID NO: 2232950 - RNA, 19 nt, Homo sapiens
  misc_RNA (1)...(19): siRNA sense strand
ggccaaagacauaaccuca

SEQ ID NO: 2232951 - RNA, 19 nt, Homo sapiens
  misc_RNA (1)...(19): siRNA sense strand
acaacuucgcagaguguuu

SEQ ID NO: 2232952 - RNA, 19 nt, Homo sapiens
  misc_RNA (1)...(19): siRNA sense strand
acauucuaacuaagcgaaa

SEQ ID NO: 2232953 - RNA, 19 nt, Homo sapiens
  misc_RNA (1)...(19): siRNA sense strand
gggucuacagagaggaacu

SEQ ID NO: 2232954 - RNA, 19 nt, Homo sapiens
  misc_RNA (1)...(19): siRNA sense strand
aggcauugaucaggauuau

SEQ ID NO: 2232955 - RNA, 19 nt, Homo sapiens
  misc_RNA (1)...(19): siRNA sense strand
ggaacucgccauaaggcau

SEQ ID NO: 2232956 - RNA, 19 nt, Homo sapiens
  misc_RNA (1)...(19): siRNA sense strand
uggaugaaacacuuaagaa

SEQ ID NO: 2232957 - RNA, 19 nt, Homo sapiens
  misc_RNA (1)...(19): siRNA sense strand
auuugaugcugaugaacuu

SEQ ID NO: 2232958 - RNA, 19 nt, Homo sapiens
  misc_RNA (1)...(19): siRNA sense strand
cggcucugcaggagaagaa

SEQ ID NO: 2232959 - RNA, 19 nt, Homo sapiens
  misc_RNA (1)...(19): siRNA sense strand
ugugcaaggucauggcaga

SEQ ID NO: 2232960 - RNA, 19 nt, Homo sapiens
  misc_RNA (1)...(19): siRNA sense strand
augaagggaaaguggaguu

SEQ ID NO: 2232961 - RNA, 19 nt, Homo sapiens
  misc_RNA (1)...(19): siRNA sense strand
ggaaagagcugggaggcuu

SEQ ID NO: 2232962 - RNA, 19 nt, Homo sapiens
  misc_RNA (1)...(19): siRNA sense strand
cgacaaaugggcugggccu

SEQ ID NO: 2232963 - RNA, 19 nt, Homo sapiens
  misc_RNA (1)...(19): siRNA sense strand
gcguauggcgggacaacca

SEQ ID NO: 2232964 - RNA, 19 nt, Homo sapiens
  misc_RNA (1)...(19): siRNA sense strand
cgacaaaugggcugggccu

SEQ ID NO: 2232965 - RNA, 19 nt, Homo sapiens
  misc_RNA (1)...(19): siRNA sense strand
gcguauggcgggacaacca

SEQ ID NO: 2232966 - RNA, 19 nt, Homo sapiens
  misc_RNA (1)...(19): siRNA sense strand
cagcauuucuggaggagga

SEQ ID NO: 2232967 - RNA, 19 nt, Homo sapiens
  misc_RNA (1)...(19): siRNA sense strand
aggaacagacagugagcau

SEQ ID NO: 2232968 - RNA, 19 nt, Homo sapiens
  misc_RNA (1)...(19): siRNA sense strand
gaggagaaacugaggcacu

SEQ ID NO: 2232969 - RNA, 19 nt, Homo sapiens
  misc_RNA (1)...(19): siRNA sense strand
ccaaggcaaagguggacaa

SEQ ID NO: 2232970 - RNA, 19 nt, Homo sapiens
  misc_RNA (1)...(19): siRNA sense strand
gauaagaagcaaacgugga

SEQ ID NO: 2232971 - RNA, 19 nt, Homo sapiens
  misc_RNA (1)...(19): siRNA sense strand
uguacuacgacaaggaaca

SEQ ID NO: 2232972 - RNA, 19 nt, Homo sapiens
  misc_RNA (1)...(19): siRNA sense strand
acagugagcaugaaggaca

SEQ ID NO: 2232973 - RNA, 19 nt, Homo sapiens
  misc_RNA (1)...(19): siRNA sense strand
gugaugauguugcuggaga

SEQ ID NO: 2232974 - RNA, 19 nt, Homo sapiens
  misc_RNA (1)...(19): siRNA sense strand
ggaaugugaaagaggccca

SEQ ID NO: 2232975 - RNA, 19 nt, Homo sapiens
  misc_RNA (1)...(19): siRNA sense strand
ugguggaggcacugucuaa

SEQ ID NO: 2232976 - RNA, 19 nt, Homo sapiens
  misc_RNA (1)...(19): siRNA sense strand
gcuacgagguucaagccga

SEQ ID NO: 2232977 - RNA, 19 nt, Homo sapiens
  misc_RNA (1)...(19): siRNA sense strand
guggaaacugccagaagga

SEQ ID NO: 2232978 - RNA, 19 nt, Homo sapiens
  misc_RNA (1)...(19): siRNA sense strand
cguaggcagcugaggguau

SEQ ID NO: 2232979 - RNA, 19 nt, Homo sapiens
  misc_RNA (1)...(19): siRNA sense strand
ucguuaagaaccugcagaa

SEQ ID NO: 2232980 - RNA, 19 nt, Homo sapiens
  misc_RNA (1)...(19): siRNA sense strand
uugcaaaagcuguggaaga

SEQ ID NO: 2232981 - RNA, 19 nt, Homo sapiens
  misc_RNA (1)...(19): siRNA sense strand
guuugacaacuaugggaaa

SEQ ID NO: 2232982 - RNA, 19 nt, Homo sapiens
  misc_RNA (1)...(19): siRNA sense strand
uggaaaugcuccccggaaa

SEQ ID NO: 2232983 - RNA, 19 nt, Homo sapiens
  misc_RNA (1)...(19): siRNA sense strand
aggagggacgcguggacaa

SEQ ID NO: 2232984 - RNA, 19 nt, Homo sapiens
  misc_RNA (1)...(19): siRNA sense strand
ccauuggcaacaaaggaaa

SEQ ID NO: 2232985 - RNA, 19 nt, Homo sapiens
  misc_RNA (1)...(19): siRNA sense strand
gagcagacuccgucagcga

SEQ ID NO: 2232986 - RNA, 19 nt, Homo sapiens
  misc_RNA (1)...(19): siRNA sense strand
cggcaggagaagacagcca

SEQ ID NO: 2232987 - RNA, 19 nt, Homo sapiens
  misc_RNA (1)...(19): siRNA sense strand
caguugagaaagauaguca

SEQ ID NO: 2232988 - RNA, 19 nt, Homo sapiens
  misc_RNA (1)...(19): siRNA sense strand
ggaaaugcuccccggaaau

SEQ ID NO: 2232989 - RNA, 19 nt, Homo sapiens
  misc_RNA (1)...(19): siRNA sense strand
cggaggcugcgguggaaau

SEQ ID NO: 2232990 - RNA, 19 nt, Homo sapiens
  misc_RNA (1)...(19): siRNA sense strand
gccaaucgcugguacgaca

SEQ ID NO: 2232991 - RNA, 19 nt, Homo sapiens
  misc_RNA (1)...(19): siRNA sense strand
aggacacgcugguggcuca

SEQ ID NO: 2232992 - RNA, 19 nt, Homo sapiens
  misc_RNA (1)...(19): siRNA sense strand
gaguacuggcugaaugaca

SEQ ID NO: 2232993 - RNA, 19 nt, Homo sapiens
  misc_RNA (1)...(19): siRNA sense strand
auuaagaagcagaaaugca

SEQ ID NO: 2232994 - RNA, 19 nt, Homo sapiens
  misc_RNA (1)...(19): siRNA sense strand
ggguauggugccugcuaca

SEQ ID NO: 2232995 - RNA, 19 nt, Homo sapiens
  misc_RNA (1)...(19): siRNA sense strand
uugcaaaagcuguggaaga

SEQ ID NO: 2232996 - RNA, 19 nt, Homo sapiens
  misc_RNA (1)...(19): siRNA sense strand
guuugacaacuaugggaaa

SEQ ID NO: 2232997 - RNA, 19 nt, Homo sapiens
  misc_RNA (1)...(19): siRNA sense strand
uggaaaugcuccccggaaa

SEQ ID NO: 2232998 - RNA, 19 nt, Homo sapiens
  misc_RNA (1)...(19): siRNA sense strand
aggagggacgcguggacaa

SEQ ID NO: 2232999 - RNA, 19 nt, Homo sapiens
  misc_RNA (1)...(19): siRNA sense strand
ccauuggcaacaaaggaaa

SEQ ID NO: 2233000 - RNA, 19 nt, Homo sapiens
  misc_RNA (1)...(19): siRNA sense strand
gagcagacuccgucagcga

SEQ ID NO: 2233001 - RNA, 19 nt, Homo sapiens
  misc_RNA (1)...(19): siRNA sense strand
cggcaggagaagacagcca

SEQ ID NO: 2233002 - RNA, 19 nt, Homo sapiens
  misc_RNA (1)...(19): siRNA sense strand
caguugagaaagauaguca

SEQ ID NO: 2233003 - RNA, 19 nt, Homo sapiens
  misc_RNA (1)...(19): siRNA sense strand
ggaaaugcuccccggaaau

SEQ ID NO: 2233004 - RNA, 19 nt, Homo sapiens
  misc_RNA (1)...(19): siRNA sense strand
cggaggcugcgguggaaau

SEQ ID NO: 2233005 - RNA, 19 nt, Homo sapiens
  misc_RNA (1)...(19): siRNA sense strand
gccaaucgcugguacgaca

SEQ ID NO: 2233006 - RNA, 19 nt, Homo sapiens
  misc_RNA (1)...(19): siRNA sense strand
aggacacgcugguggcuca

SEQ ID NO: 2233007 - RNA, 19 nt, Homo sapiens
  misc_RNA (1)...(19): siRNA sense strand
gaguacuggcugaaugaca

SEQ ID NO: 2233008 - RNA, 19 nt, Homo sapiens
  misc_RNA (1)...(19): siRNA sense strand
auuaagaagcagaaaugca

SEQ ID NO: 2233009 - RNA, 19 nt, Homo sapiens
  misc_RNA (1)...(19): siRNA sense strand
ggguauggugccugcuaca

SEQ ID NO: 2233010 - RNA, 19 nt, Homo sapiens
  misc_RNA (1)...(19): siRNA sense strand
uugcaaaagcuguggaaga

SEQ ID NO: 2233011 - RNA, 19 nt, Homo sapiens
  misc_RNA (1)...(19): siRNA sense strand
guuugacaacuaugggaaa

SEQ ID NO: 2233012 - RNA, 19 nt, Homo sapiens
  misc_RNA (1)...(19): siRNA sense strand
uggaaaugcuccccggaaa

SEQ ID NO: 2233013 - RNA, 19 nt, Homo sapiens
  misc_RNA (1)...(19): siRNA sense strand
aggagggacgcguggacaa

SEQ ID NO: 2233014 - RNA, 19 nt, Homo sapiens
  misc_RNA (1)...(19): siRNA sense strand
ccauuggcaacaaaggaaa

SEQ ID NO: 2233015 - RNA, 19 nt, Homo sapiens
  misc_RNA (1)...(19): siRNA sense strand
gagcagacuccgucagcga

SEQ ID NO: 2233016 - RNA, 19 nt, Homo sapiens
  misc_RNA (1)...(19): siRNA sense strand
cggcaggagaagacagcca

SEQ ID NO: 2233017 - RNA, 19 nt, Homo sapiens
  misc_RNA (1)...(19): siRNA sense strand
caguugagaaagauaguca

SEQ ID NO: 2233018 - RNA, 19 nt, Homo sapiens
  misc_RNA (1)...(19): siRNA sense strand
ggaaaugcuccccggaaau

SEQ ID NO: 2233019 - RNA, 19 nt, Homo sapiens
  misc_RNA (1)...(19): siRNA sense strand
cggaggcugcgguggaaau

SEQ ID NO: 2233020 - RNA, 19 nt, Homo sapiens
  misc_RNA (1)...(19): siRNA sense strand
gccaaucgcugguacgaca

SEQ ID NO: 2233021 - RNA, 19 nt, Homo sapiens
  misc_RNA (1)...(19): siRNA sense strand
aggacacgcugguggcuca

SEQ ID NO: 2233022 - RNA, 19 nt, Homo sapiens
  misc_RNA (1)...(19): siRNA sense strand
gaguacuggcugaaugaca

SEQ ID NO: 2233023 - RNA, 19 nt, Homo sapiens
  misc_RNA (1)...(19): siRNA sense strand
auuaagaagcagaaaugca

SEQ ID NO: 2233024 - RNA, 19 nt, Homo sapiens
  misc_RNA (1)...(19): siRNA sense strand
ggguauggugccugcuaca

SEQ ID NO: 2233025 - RNA, 19 nt, Homo sapiens
  misc_RNA (1)...(19): siRNA sense strand
uugcaaaagcuguggaaga

SEQ ID NO: 2233026 - RNA, 19 nt, Homo sapiens
  misc_RNA (1)...(19): siRNA sense strand
guuugacaacuaugggaaa

SEQ ID NO: 2233027 - RNA, 19 nt, Homo sapiens
  misc_RNA (1)...(19): siRNA sense strand
uggaaaugcuccccggaaa

SEQ ID NO: 2233028 - RNA, 19 nt, Homo sapiens
  misc_RNA (1)...(19): siRNA sense strand
aggagggacgcguggacaa

SEQ ID NO: 2233029 - RNA, 19 nt, Homo sapiens
  misc_RNA (1)...(19): siRNA sense strand
ccauuggcaacaaaggaaa

SEQ ID NO: 2233030 - RNA, 19 nt, Homo sapiens
  misc_RNA (1)...(19): siRNA sense strand
gagcagacuccgucagcga

SEQ ID NO: 2233031 - RNA, 19 nt, Homo sapiens
  misc_RNA (1)...(19): siRNA sense strand
cggcaggagaagacagcca

SEQ ID NO: 2233032 - RNA, 19 nt, Homo sapiens
  misc_RNA (1)...(19): siRNA sense strand
caguugagaaagauaguca

SEQ ID NO: 2233033 - RNA, 19 nt, Homo sapiens
  misc_RNA (1)...(19): siRNA sense strand
ggaaaugcuccccggaaau

SEQ ID NO: 2233034 - RNA, 19 nt, Homo sapiens
  misc_RNA (1)...(19): siRNA sense strand
cggaggcugcgguggaaau

SEQ ID NO: 2233035 - RNA, 19 nt, Homo sapiens
  misc_RNA (1)...(19): siRNA sense strand
gccaaucgcugguacgaca

SEQ ID NO: 2233036 - RNA, 19 nt, Homo sapiens
  misc_RNA (1)...(19): siRNA sense strand
aggacacgcugguggcuca

SEQ ID NO: 2233037 - RNA, 19 nt, Homo sapiens
  misc_RNA (1)...(19): siRNA sense strand
gaguacuggcugaaugaca

SEQ ID NO: 2233038 - RNA, 19 nt, Homo sapiens
  misc_RNA (1)...(19): siRNA sense strand
auuaagaagcagaaaugca

SEQ ID NO: 2233039 - RNA, 19 nt, Homo sapiens
  misc_RNA (1)...(19): siRNA sense strand
ggguauggugccugcuaca

SEQ ID NO: 2233040 - RNA, 19 nt, Homo sapiens
  misc_RNA (1)...(19): siRNA sense strand
aagaaagucaccaggacaa

SEQ ID NO: 2233041 - RNA, 19 nt, Homo sapiens
  misc_RNA (1)...(19): siRNA sense strand
aggucagaauggagaugaa

SEQ ID NO: 2233042 - RNA, 19 nt, Homo sapiens
  misc_RNA (1)...(19): siRNA sense strand
gcaggauaaagaaggacaa

SEQ ID NO: 2233043 - RNA, 19 nt, Homo sapiens
  misc_RNA (1)...(19): siRNA sense strand
uggacuauguggucagcaa

SEQ ID NO: 2233044 - RNA, 19 nt, Homo sapiens
  misc_RNA (1)...(19): siRNA sense strand
augaaauaacccaggauga

SEQ ID NO: 2233045 - RNA, 19 nt, Homo sapiens
  misc_RNA (1)...(19): siRNA sense strand
acgauggccuggagcacaa

SEQ ID NO: 2233046 - RNA, 19 nt, Homo sapiens
  misc_RNA (1)...(19): siRNA sense strand
agaaggagccuguugccaa

SEQ ID NO: 2233047 - RNA, 19 nt, Homo sapiens
  misc_RNA (1)...(19): siRNA sense strand
ccauuaaagucaaccgcca

SEQ ID NO: 2233048 - RNA, 19 nt, Homo sapiens
  misc_RNA (1)...(19): siRNA sense strand
ggaaggauagugaagccaa

SEQ ID NO: 2233049 - RNA, 19 nt, Homo sapiens
  misc_RNA (1)...(19): siRNA sense strand
guguucagggagaggagaa

SEQ ID NO: 2233050 - RNA, 19 nt, Homo sapiens
  misc_RNA (1)...(19): siRNA sense strand
gggugagaacuguggagga

SEQ ID NO: 2233051 - RNA, 19 nt, Homo sapiens
  misc_RNA (1)...(19): siRNA sense strand
agauugugaagaugacuaa

SEQ ID NO: 2233052 - RNA, 19 nt, Homo sapiens
  misc_RNA (1)...(19): siRNA sense strand
ucugguacaaggaaggaua

SEQ ID NO: 2233053 - RNA, 19 nt, Homo sapiens
  misc_RNA (1)...(19): siRNA sense strand
agaugagaacucuaagcaa

SEQ ID NO: 2233054 - RNA, 19 nt, Homo sapiens
  misc_RNA (1)...(19): siRNA sense strand
gagaggagaaggagagcuc

SEQ ID NO: 2233055 - RNA, 19 nt, Homo sapiens
  misc_RNA (1)...(19): siRNA sense strand
cccgcaagauugugaagau

SEQ ID NO: 2233056 - RNA, 19 nt, Homo sapiens
  misc_RNA (1)...(19): siRNA sense strand
agacauuugaagugguguu

SEQ ID NO: 2233057 - RNA, 19 nt, Homo sapiens
  misc_RNA (1)...(19): siRNA sense strand
aaagaaagucaccaggaca

SEQ ID NO: 2233058 - RNA, 19 nt, Homo sapiens
  misc_RNA (1)...(19): siRNA sense strand
aagccaaacaauaacaaca

SEQ ID NO: 2233059 - RNA, 19 nt, Homo sapiens
  misc_RNA (1)...(19): siRNA sense strand
agaauauuguagcccgcaa

SEQ ID NO: 2233060 - RNA, 19 nt, Homo sapiens
  misc_RNA (1)...(19): siRNA sense strand
ugguggacuuggagaggaa

SEQ ID NO: 2233061 - RNA, 19 nt, Homo sapiens
  misc_RNA (1)...(19): siRNA sense strand
cagcagagacagucgguca

SEQ ID NO: 2233062 - RNA, 19 nt, Homo sapiens
  misc_RNA (1)...(19): siRNA sense strand
ccugcaagccucugggaca

SEQ ID NO: 2233063 - RNA, 19 nt, Homo sapiens
  misc_RNA (1)...(19): siRNA sense strand
acaucaugguucuggugaa

SEQ ID NO: 2233064 - RNA, 19 nt, Homo sapiens
  misc_RNA (1)...(19): siRNA sense strand
ccaaagagcuugcuggccu

SEQ ID NO: 2233065 - RNA, 19 nt, Homo sapiens
  misc_RNA (1)...(19): siRNA sense strand
acagaggcagagacagaaa

SEQ ID NO: 2233066 - RNA, 19 nt, Homo sapiens
  misc_RNA (1)...(19): siRNA sense strand
ccaucuuguucuggcaaua

SEQ ID NO: 2233067 - RNA, 19 nt, Homo sapiens
  misc_RNA (1)...(19): siRNA sense strand
cuucaacagcaaagcauga

SEQ ID NO: 2233068 - RNA, 19 nt, Homo sapiens
  misc_RNA (1)...(19): siRNA sense strand
caacaaagagagccggugu

SEQ ID NO: 2233069 - RNA, 19 nt, Homo sapiens
  misc_RNA (1)...(19): siRNA sense strand
cagcaaagcaugaaacgcu

SEQ ID NO: 2233070 - RNA, 19 nt, Homo sapiens
  misc_RNA (1)...(19): siRNA sense strand
ucaacuccucaguggguaa

SEQ ID NO: 2233071 - RNA, 19 nt, Homo sapiens
  misc_RNA (1)...(19): siRNA sense strand
cuacaauguuucucgagca

SEQ ID NO: 2233072 - RNA, 19 nt, Homo sapiens
  misc_RNA (1)...(19): siRNA sense strand
ccgugaaccccgugugcua

SEQ ID NO: 2233073 - RNA, 19 nt, Homo sapiens
  misc_RNA (1)...(19): siRNA sense strand
aggcagagacagaaaacuu

SEQ ID NO: 2233074 - RNA, 19 nt, Homo sapiens
  misc_RNA (1)...(19): siRNA sense strand
accaagagcuggaaaccca

SEQ ID NO: 2233075 - RNA, 19 nt, Homo sapiens
  misc_RNA (1)...(19): siRNA sense strand
ugucauuuaaggucaacaa

SEQ ID NO: 2233076 - RNA, 19 nt, Homo sapiens
  misc_RNA (1)...(19): siRNA sense strand
ccacagcagcagugacagu

SEQ ID NO: 2233077 - RNA, 19 nt, Homo sapiens
  misc_RNA (1)...(19): siRNA sense strand
cuaaugaagcagagcguca

SEQ ID NO: 2233078 - RNA, 19 nt, Homo sapiens
  misc_RNA (1)...(19): siRNA sense strand
uguacaucaucaagggcua

SEQ ID NO: 2233079 - RNA, 19 nt, Homo sapiens
  misc_RNA (1)...(19): siRNA sense strand
cgaaggagaagaaagccaa

SEQ ID NO: 2233080 - RNA, 19 nt, Homo sapiens
  misc_RNA (1)...(19): siRNA sense strand
ccaucaaggucaacaggca

SEQ ID NO: 2233081 - RNA, 19 nt, Homo sapiens
  misc_RNA (1)...(19): siRNA sense strand
aggcaaugagugugugaca

SEQ ID NO: 2233082 - RNA, 19 nt, Homo sapiens
  misc_RNA (1)...(19): siRNA sense strand
ccgaaggagaagaaagcca

SEQ ID NO: 2233083 - RNA, 19 nt, Homo sapiens
  misc_RNA (1)...(19): siRNA sense strand
cuucauugccacagugaca

SEQ ID NO: 2233084 - RNA, 19 nt, Homo sapiens
  misc_RNA (1)...(19): siRNA sense strand
ugacgaagcagacaggcaa

SEQ ID NO: 2233085 - RNA, 19 nt, Homo sapiens
  misc_RNA (1)...(19): siRNA sense strand
uggugacugucgugggcaa

SEQ ID NO: 2233086 - RNA, 19 nt, Homo sapiens
  misc_RNA (1)...(19): siRNA sense strand
ccagaugguccaagaucca

SEQ ID NO: 2233087 - RNA, 19 nt, Homo sapiens
  misc_RNA (1)...(19): siRNA sense strand
ggaccuacgacaaggccaa

SEQ ID NO: 2233088 - RNA, 19 nt, Homo sapiens
  misc_RNA (1)...(19): siRNA sense strand
cagcuggacuucugggaga

SEQ ID NO: 2233089 - RNA, 19 nt, Homo sapiens
  misc_RNA (1)...(19): siRNA sense strand
cggugaaggaggacuggaa

SEQ ID NO: 2233090 - RNA, 19 nt, Homo sapiens
  misc_RNA (1)...(19): siRNA sense strand
gggugaagcaggaguggca

SEQ ID NO: 2233091 - RNA, 19 nt, Homo sapiens
  misc_RNA (1)...(19): siRNA sense strand
gagaguggcgaguggguca

SEQ ID NO: 2233092 - RNA, 19 nt, Homo sapiens
  misc_RNA (1)...(19): siRNA sense strand
acguaugggugaagcagga

SEQ ID NO: 2233093 - RNA, 19 nt, Homo sapiens
  misc_RNA (1)...(19): siRNA sense strand
acgacaaggccaagaucga

SEQ ID NO: 2233094 - RNA, 19 nt, Homo sapiens
  misc_RNA (1)...(19): siRNA sense strand
ccaagaucgaccuggugaa

SEQ ID NO: 2233095 - RNA, 19 nt, Homo sapiens
  misc_RNA (1)...(19): siRNA sense strand
uugacguggaugagaagaa

SEQ ID NO: 2233096 - RNA, 19 nt, Homo sapiens
  misc_RNA (1)...(19): siRNA sense strand
gugaaggaggacuggaagu

SEQ ID NO: 2233097 - RNA, 19 nt, Homo sapiens
  misc_RNA (1)...(19): siRNA sense strand
aggaguggcacgacuacaa

SEQ ID NO: 2233098 - RNA, 19 nt, Homo sapiens
  misc_RNA (1)...(19): siRNA sense strand
acaucguccucuacaacaa

SEQ ID NO: 2233099 - RNA, 19 nt, Homo sapiens
  misc_RNA (1)...(19): siRNA sense strand
gcguggaccagcuggacuu

SEQ ID NO: 2233100 - RNA, 19 nt, Homo sapiens
  misc_RNA (1)...(19): siRNA sense strand
gagaauggccagugggaga

SEQ ID NO: 2233101 - RNA, 19 nt, Homo sapiens
  misc_RNA (1)...(19): siRNA sense strand
ccacauucaugaagggacu

SEQ ID NO: 2233102 - RNA, 19 nt, Homo sapiens
  misc_RNA (1)...(19): siRNA sense strand
acgagaaggaugaagagau

SEQ ID NO: 2233103 - RNA, 19 nt, Homo sapiens
  misc_RNA (1)...(19): siRNA sense strand
acguggugcuacugaacaa

SEQ ID NO: 2233104 - RNA, 19 nt, Homo sapiens
  misc_RNA (1)...(19): siRNA sense strand
ugaacaacaaugaugggaa

SEQ ID NO: 2233105 - RNA, 19 nt, Homo sapiens
  misc_RNA (1)...(19): siRNA sense strand
ccaauagguuccagccuga

SEQ ID NO: 2233106 - RNA, 19 nt, Homo sapiens
  misc_RNA (1)...(19): siRNA sense strand
gagaugagcacaaaggugu

SEQ ID NO: 2233107 - RNA, 19 nt, Homo sapiens
  misc_RNA (1)...(19): siRNA sense strand
cagaauugcacuauggugu

SEQ ID NO: 2233108 - RNA, 19 nt, Homo sapiens
  misc_RNA (1)...(19): siRNA sense strand
gccugaacgagaaggauga

SEQ ID NO: 2233109 - RNA, 19 nt, Homo sapiens
  misc_RNA (1)...(19): siRNA sense strand
uggacugacuacaggcuga

SEQ ID NO: 2233110 - RNA, 19 nt, Homo sapiens
  misc_RNA (1)...(19): siRNA sense strand
cgggcaagggcaucaggaa

SEQ ID NO: 2233111 - RNA, 19 nt, Homo sapiens
  misc_RNA (1)...(19): siRNA sense strand
ugaaagaaguugaggagac

SEQ ID NO: 2233112 - RNA, 19 nt, Homo sapiens
  misc_RNA (1)...(19): siRNA sense strand
acaugagggaccagaacaa

SEQ ID NO: 2233113 - RNA, 19 nt, Homo sapiens
  misc_RNA (1)...(19): siRNA sense strand
auuacaaugaggagaaaga

SEQ ID NO: 2233114 - RNA, 19 nt, Homo sapiens
  misc_RNA (1)...(19): siRNA sense strand
augcugaagaauuuggaaa

SEQ ID NO: 2233115 - RNA, 19 nt, Homo sapiens
  misc_RNA (1)...(19): siRNA sense strand
ggagaaagacagcuggaac

SEQ ID NO: 2233116 - RNA, 19 nt, Homo sapiens
  misc_RNA (1)...(19): siRNA sense strand
aaguauacggccaaagaga

SEQ ID NO: 2233117 - RNA, 19 nt, Homo sapiens
  misc_RNA (1)...(19): siRNA sense strand
uguuucaagagaagggcua

SEQ ID NO: 2233118 - RNA, 19 nt, Homo sapiens
  misc_RNA (1)...(19): siRNA sense strand
gguguggcucccagagauu

SEQ ID NO: 2233119 - RNA, 19 nt, Homo sapiens
  misc_RNA (1)...(19): siRNA sense strand
aaacaggaugccaaggaga

SEQ ID NO: 2233120 - RNA, 19 nt, Homo sapiens
  misc_RNA (1)...(19): siRNA sense strand
gagcagaaggagugggcca

SEQ ID NO: 2233121 - RNA, 19 nt, Homo sapiens
  misc_RNA (1)...(19): siRNA sense strand
acaccaaggagcagcgcau

SEQ ID NO: 2233122 - RNA, 19 nt, Homo sapiens
  misc_RNA (1)...(19): siRNA sense strand
gagcagaaggagugggcca

SEQ ID NO: 2233123 - RNA, 19 nt, Homo sapiens
  misc_RNA (1)...(19): siRNA sense strand
acaccaaggagcagcgcau

SEQ ID NO: 2233124 - RNA, 19 nt, Homo sapiens
  misc_RNA (1)...(19): siRNA sense strand
gaggcaccggagagagaaa

SEQ ID NO: 2233125 - RNA, 19 nt, Homo sapiens
  misc_RNA (1)...(19): siRNA sense strand
cagcaagcucacagcaaca

SEQ ID NO: 2233126 - RNA, 19 nt, Homo sapiens
  misc_RNA (1)...(19): siRNA sense strand
ucauggagauuauugggaa

SEQ ID NO: 2233127 - RNA, 19 nt, Homo sapiens
  misc_RNA (1)...(19): siRNA sense strand
aggaggcaccggagagaga

SEQ ID NO: 2233128 - RNA, 19 nt, Homo sapiens
  misc_RNA (1)...(19): siRNA sense strand
caggaaacucauggagauu

SEQ ID NO: 2233129 - RNA, 19 nt, Homo sapiens
  misc_RNA (1)...(19): siRNA sense strand
gggccgagcaguuagcaca

SEQ ID NO: 2233130 - RNA, 19 nt, Homo sapiens
  misc_RNA (1)...(19): siRNA sense strand
uccgggaagucuuggaaau

SEQ ID NO: 2233131 - RNA, 19 nt, Homo sapiens
  misc_RNA (1)...(19): siRNA sense strand
gcugcugagaugaaugaaa

SEQ ID NO: 2233132 - RNA, 19 nt, Homo sapiens
  misc_RNA (1)...(19): siRNA sense strand
aaagagaaccugaaggacu

SEQ ID NO: 2233133 - RNA, 19 nt, Homo sapiens
  misc_RNA (1)...(19): siRNA sense strand
cagaaauguuugaccucca

SEQ ID NO: 2233134 - RNA, 19 nt, Homo sapiens
  misc_RNA (1)...(19): siRNA sense strand
gaacagaaugggagagcca

SEQ ID NO: 2233135 - RNA, 19 nt, Homo sapiens
  misc_RNA (1)...(19): siRNA sense strand
ucacagugcuggaggagga

SEQ ID NO: 2233136 - RNA, 19 nt, Homo sapiens
  misc_RNA (1)...(19): siRNA sense strand
gagacugggagcagagcuu

SEQ ID NO: 2233137 - RNA, 19 nt, Homo sapiens
  misc_RNA (1)...(19): siRNA sense strand
cggacggauccaagguuau

SEQ ID NO: 2233138 - RNA, 19 nt, Homo sapiens
  misc_RNA (1)...(19): siRNA sense strand
cugggaaacugcagccuga

SEQ ID NO: 2233139 - RNA, 19 nt, Homo sapiens
  misc_RNA (1)...(19): siRNA sense strand
agccuggagcugagaacua

SEQ ID NO: 2233140 - RNA, 19 nt, Homo sapiens
  misc_RNA (1)...(19): siRNA sense strand
auccauggccucagggcua

SEQ ID NO: 2233141 - RNA, 19 nt, Homo sapiens
  misc_RNA (1)...(19): siRNA sense strand
gauggaacagaaugggaga

SEQ ID NO: 2233142 - RNA, 19 nt, Homo sapiens
  misc_RNA (1)...(19): siRNA sense strand
aucuaaagcacauuggcaa

SEQ ID NO: 2233143 - RNA, 19 nt, Homo sapiens
  misc_RNA (1)...(19): siRNA sense strand
gaacagaaugggagagcca

SEQ ID NO: 2233144 - RNA, 19 nt, Homo sapiens
  misc_RNA (1)...(19): siRNA sense strand
ucacagugcuggaggagga

SEQ ID NO: 2233145 - RNA, 19 nt, Homo sapiens
  misc_RNA (1)...(19): siRNA sense strand
gagacugggagcagagcuu

SEQ ID NO: 2233146 - RNA, 19 nt, Homo sapiens
  misc_RNA (1)...(19): siRNA sense strand
cggacggauccaagguuau

SEQ ID NO: 2233147 - RNA, 19 nt, Homo sapiens
  misc_RNA (1)...(19): siRNA sense strand
cugggaaacugcagccuga

SEQ ID NO: 2233148 - RNA, 19 nt, Homo sapiens
  misc_RNA (1)...(19): siRNA sense strand
agccuggagcugagaacua

SEQ ID NO: 2233149 - RNA, 19 nt, Homo sapiens
  misc_RNA (1)...(19): siRNA sense strand
auccauggccucagggcua

SEQ ID NO: 2233150 - RNA, 19 nt, Homo sapiens
  misc_RNA (1)...(19): siRNA sense strand
gauggaacagaaugggaga

SEQ ID NO: 2233151 - RNA, 19 nt, Homo sapiens
  misc_RNA (1)...(19): siRNA sense strand
aucuaaagcacauuggcaa

SEQ ID NO: 2233152 - RNA, 19 nt, Homo sapiens
  misc_RNA (1)...(19): siRNA sense strand
gaacagaaugggagagcca

SEQ ID NO: 2233153 - RNA, 19 nt, Homo sapiens
  misc_RNA (1)...(19): siRNA sense strand
ucacagugcuggaggagga

SEQ ID NO: 2233154 - RNA, 19 nt, Homo sapiens
  misc_RNA (1)...(19): siRNA sense strand
gagacugggagcagagcuu

SEQ ID NO: 2233155 - RNA, 19 nt, Homo sapiens
  misc_RNA (1)...(19): siRNA sense strand
cggacggauccaagguuau

SEQ ID NO: 2233156 - RNA, 19 nt, Homo sapiens
  misc_RNA (1)...(19): siRNA sense strand
cugggaaacugcagccuga

SEQ ID NO: 2233157 - RNA, 19 nt, Homo sapiens
  misc_RNA (1)...(19): siRNA sense strand
agccuggagcugagaacua

SEQ ID NO: 2233158 - RNA, 19 nt, Homo sapiens
  misc_RNA (1)...(19): siRNA sense strand
auccauggccucagggcua

SEQ ID NO: 2233159 - RNA, 19 nt, Homo sapiens
  misc_RNA (1)...(19): siRNA sense strand
gauggaacagaaugggaga

SEQ ID NO: 2233160 - RNA, 19 nt, Homo sapiens
  misc_RNA (1)...(19): siRNA sense strand
aucuaaagcacauuggcaa

SEQ ID NO: 2233161 - RNA, 19 nt, Homo sapiens
  misc_RNA (1)...(19): siRNA sense strand
gaacagaaugggagagcca

SEQ ID NO: 2233162 - RNA, 19 nt, Homo sapiens
  misc_RNA (1)...(19): siRNA sense strand
ucacagugcuggaggagga

SEQ ID NO: 2233163 - RNA, 19 nt, Homo sapiens
  misc_RNA (1)...(19): siRNA sense strand
cugcauacuuuaaggacca

SEQ ID NO: 2233164 - RNA, 19 nt, Homo sapiens
  misc_RNA (1)...(19): siRNA sense strand
gagacugggagcagagcuu

SEQ ID NO: 2233165 - RNA, 19 nt, Homo sapiens
  misc_RNA (1)...(19): siRNA sense strand
acuuuaaggaccagaucau

SEQ ID NO: 2233166 - RNA, 19 nt, Homo sapiens
  misc_RNA (1)...(19): siRNA sense strand
cggacggauccaagguuau

SEQ ID NO: 2233167 - RNA, 19 nt, Homo sapiens
  misc_RNA (1)...(19): siRNA sense strand
cugggaaacugcagccuga

SEQ ID NO: 2233168 - RNA, 19 nt, Homo sapiens
  misc_RNA (1)...(19): siRNA sense strand
agccuggagcugagaacua

SEQ ID NO: 2233169 - RNA, 19 nt, Homo sapiens
  misc_RNA (1)...(19): siRNA sense strand
auccauggccucagggcua

SEQ ID NO: 2233170 - RNA, 19 nt, Homo sapiens
  misc_RNA (1)...(19): siRNA sense strand
gauggaacagaaugggaga

SEQ ID NO: 2233171 - RNA, 19 nt, Homo sapiens
  misc_RNA (1)...(19): siRNA sense strand
aucuaaagcacauuggcaa

SEQ ID NO: 2233172 - RNA, 19 nt, Homo sapiens
  misc_RNA (1)...(19): siRNA sense strand
caguauuaccagagaccca

SEQ ID NO: 2233173 - RNA, 19 nt, Homo sapiens
  misc_RNA (1)...(19): siRNA sense strand
uaccauuucuggagggaga

SEQ ID NO: 2233174 - RNA, 19 nt, Homo sapiens
  misc_RNA (1)...(19): siRNA sense strand
ugagcaaagacaagaacau

SEQ ID NO: 2233175 - RNA, 19 nt, Homo sapiens
  misc_RNA (1)...(19): siRNA sense strand
gggacgugauuuucaguaa

SEQ ID NO: 2233176 - RNA, 19 nt, Homo sapiens
  misc_RNA (1)...(19): siRNA sense strand
cugggaauugagacagaaa

SEQ ID NO: 2233177 - RNA, 19 nt, Homo sapiens
  misc_RNA (1)...(19): siRNA sense strand
ggcccgauuuacagggaga

SEQ ID NO: 2233178 - RNA, 19 nt, Homo sapiens
  misc_RNA (1)...(19): siRNA sense strand
uguaugagauggcacgcaa

SEQ ID NO: 2233179 - RNA, 19 nt, Homo sapiens
  misc_RNA (1)...(19): siRNA sense strand
ggacgugauuuucaguaaa

SEQ ID NO: 2233180 - RNA, 19 nt, Homo sapiens
  misc_RNA (1)...(19): siRNA sense strand
cugcaugggacgugauuuu

SEQ ID NO: 2233181 - RNA, 19 nt, Homo sapiens
  misc_RNA (1)...(19): siRNA sense strand
ucuacugggaauugagaca

SEQ ID NO: 2233182 - RNA, 19 nt, Homo sapiens
  misc_RNA (1)...(19): siRNA sense strand
aggcaacaguucuggguga

SEQ ID NO: 2233183 - RNA, 19 nt, Homo sapiens
  misc_RNA (1)...(19): siRNA sense strand
gggaagugaugaagcugga

SEQ ID NO: 2233184 - RNA, 19 nt, Homo sapiens
  misc_RNA (1)...(19): siRNA sense strand
ugagaagagauuugggcuu

SEQ ID NO: 2233185 - RNA, 19 nt, Homo sapiens
  misc_RNA (1)...(19): siRNA sense strand
uguuguaugagaagagauu

SEQ ID NO: 2233186 - RNA, 19 nt, Homo sapiens
  misc_RNA (1)...(19): siRNA sense strand
ucaaugaggucuuggccga

SEQ ID NO: 2233187 - RNA, 19 nt, Homo sapiens
  misc_RNA (1)...(19): siRNA sense strand
gugaauaugcuuuacccaa

SEQ ID NO: 2233188 - RNA, 19 nt, Homo sapiens
  misc_RNA (1)...(19): siRNA sense strand
ccaaaggaacagugcucau

SEQ ID NO: 2233189 - RNA, 19 nt, Homo sapiens
  misc_RNA (1)...(19): siRNA sense strand
cauccaggccacagacaau

SEQ ID NO: 2233190 - RNA, 19 nt, Homo sapiens
  misc_RNA (1)...(19): siRNA sense strand
gggcagaauagaugagcuc

SEQ ID NO: 2233191 - RNA, 19 nt, Homo sapiens
  misc_RNA (1)...(19): siRNA sense strand
ucgaagacuuguacagcga

SEQ ID NO: 2233192 - RNA, 19 nt, Homo sapiens
  misc_RNA (1)...(19): siRNA sense strand
ccagaagaaugcaggggau

SEQ ID NO: 2233193 - RNA, 19 nt, Homo sapiens
  misc_RNA (1)...(19): siRNA sense strand
gcaaagaaggcuacgggcu

SEQ ID NO: 2233194 - RNA, 19 nt, Homo sapiens
  misc_RNA (1)...(19): siRNA sense strand
ugaaagaaucuaugaggcu

SEQ ID NO: 2233195 - RNA, 19 nt, Homo sapiens
  misc_RNA (1)...(19): siRNA sense strand
agaugagcucugugaugaa

SEQ ID NO: 2233196 - RNA, 19 nt, Homo sapiens
  misc_RNA (1)...(19): siRNA sense strand
acuaaugaaaccaggggaa

SEQ ID NO: 2233197 - RNA, 19 nt, Homo sapiens
  misc_RNA (1)...(19): siRNA sense strand
cgguggaaacgacagcaaa

SEQ ID NO: 2233198 - RNA, 19 nt, Homo sapiens
  misc_RNA (1)...(19): siRNA sense strand
ccguaauccccaagugcaa

SEQ ID NO: 2233199 - RNA, 19 nt, Homo sapiens
  misc_RNA (1)...(19): siRNA sense strand
aaguguauuaccugagaau

SEQ ID NO: 2233200 - RNA, 19 nt, Homo sapiens
  misc_RNA (1)...(19): siRNA sense strand
gaacguuggcuucaggaga

SEQ ID NO: 2233201 - RNA, 19 nt, Homo sapiens
  misc_RNA (1)...(19): siRNA sense strand
aagugaugaagcuggacaa

SEQ ID NO: 2233202 - RNA, 19 nt, Homo sapiens
  misc_RNA (1)...(19): siRNA sense strand
gcgguggaaacgacagcaa

SEQ ID NO: 2233203 - RNA, 19 nt, Homo sapiens
  misc_RNA (1)...(19): siRNA sense strand
gaaagaaucuaugaggcuu

SEQ ID NO: 2233204 - RNA, 19 nt, Homo sapiens
  misc_RNA (1)...(19): siRNA sense strand
uguacagcgaacugaacaa

SEQ ID NO: 2233205 - RNA, 19 nt, Homo sapiens
  misc_RNA (1)...(19): siRNA sense strand
ccguguauccuguggacaa

SEQ ID NO: 2233206 - RNA, 19 nt, Homo sapiens
  misc_RNA (1)...(19): siRNA sense strand
acaaguuggacauggaaau

SEQ ID NO: 2233207 - RNA, 19 nt, Homo sapiens
  misc_RNA (1)...(19): siRNA sense strand
gagcagaacauucgcgcca

SEQ ID NO: 2233208 - RNA, 19 nt, Homo sapiens
  misc_RNA (1)...(19): siRNA sense strand
gagcugaagaguaaggguu

SEQ ID NO: 2233209 - RNA, 19 nt, Homo sapiens
  misc_RNA (1)...(19): siRNA sense strand
agagcaaucaagacaacaa

SEQ ID NO: 2233210 - RNA, 19 nt, Homo sapiens
  misc_RNA (1)...(19): siRNA sense strand
uggaggccuucgaggaaau

SEQ ID NO: 2233211 - RNA, 19 nt, Homo sapiens
  misc_RNA (1)...(19): siRNA sense strand
acauggaaauuuuggaaca

SEQ ID NO: 2233212 - RNA, 19 nt, Homo sapiens
  misc_RNA (1)...(19): siRNA sense strand
caugcaggcacuaaagcaa

SEQ ID NO: 2233213 - RNA, 19 nt, Homo sapiens
  misc_RNA (1)...(19): siRNA sense strand
ccguguauccuguggacaa

SEQ ID NO: 2233214 - RNA, 19 nt, Homo sapiens
  misc_RNA (1)...(19): siRNA sense strand
acaaguuggacauggaaau

SEQ ID NO: 2233215 - RNA, 19 nt, Homo sapiens
  misc_RNA (1)...(19): siRNA sense strand
gagcagaacauucgcgcca

SEQ ID NO: 2233216 - RNA, 19 nt, Homo sapiens
  misc_RNA (1)...(19): siRNA sense strand
gagcugaagaguaaggguu

SEQ ID NO: 2233217 - RNA, 19 nt, Homo sapiens
  misc_RNA (1)...(19): siRNA sense strand
agagcaaucaagacaacaa

SEQ ID NO: 2233218 - RNA, 19 nt, Homo sapiens
  misc_RNA (1)...(19): siRNA sense strand
uggaggccuucgaggaaau

SEQ ID NO: 2233219 - RNA, 19 nt, Homo sapiens
  misc_RNA (1)...(19): siRNA sense strand
acauggaaauuuuggaaca

SEQ ID NO: 2233220 - RNA, 19 nt, Homo sapiens
  misc_RNA (1)...(19): siRNA sense strand
caugcaggcacuaaagcaa

SEQ ID NO: 2233221 - RNA, 19 nt, Homo sapiens
  misc_RNA (1)...(19): siRNA sense strand
acgaggaaguggugggugu

SEQ ID NO: 2233222 - RNA, 19 nt, Homo sapiens
  misc_RNA (1)...(19): siRNA sense strand
aaauugaaguugauggcuu

SEQ ID NO: 2233223 - RNA, 19 nt, Homo sapiens
  misc_RNA (1)...(19): siRNA sense strand
ccaauaagaaagugggccu

SEQ ID NO: 2233224 - RNA, 19 nt, Homo sapiens
  misc_RNA (1)...(19): siRNA sense strand
ucgaagauauggaggccca

SEQ ID NO: 2233225 - RNA, 19 nt, Homo sapiens
  misc_RNA (1)...(19): siRNA sense strand
gcucauggcuggaguggac

SEQ ID NO: 2233226 - RNA, 19 nt, Homo sapiens
  misc_RNA (1)...(19): siRNA sense strand
ggaucauagaaaaggaaau

SEQ ID NO: 2233227 - RNA, 19 nt, Homo sapiens
  misc_RNA (1)...(19): siRNA sense strand
gcucugugcccuuuggcua

SEQ ID NO: 2233228 - RNA, 19 nt, Homo sapiens
  misc_RNA (1)...(19): siRNA sense strand
caacggagcuuagaggaga

SEQ ID NO: 2233229 - RNA, 19 nt, Homo sapiens
  misc_RNA (1)...(19): siRNA sense strand
ccgaggacaccgugaccuu

SEQ ID NO: 2233230 - RNA, 19 nt, Homo sapiens
  misc_RNA (1)...(19): siRNA sense strand
ccugguucccaauaagaaa

SEQ ID NO: 2233231 - RNA, 19 nt, Homo sapiens
  misc_RNA (1)...(19): siRNA sense strand
ucgaggagcugcugcgaca

SEQ ID NO: 2233232 - RNA, 19 nt, Homo sapiens
  misc_RNA (1)...(19): siRNA sense strand
ugcugaaggcgguggucaa

SEQ ID NO: 2233233 - RNA, 19 nt, Homo sapiens
  misc_RNA (1)...(19): siRNA sense strand
aggcgguggucaaggaagu

SEQ ID NO: 2233234 - RNA, 19 nt, Homo sapiens
  misc_RNA (1)...(19): siRNA sense strand
ucaaggaagugcuaagacu

SEQ ID NO: 2233235 - RNA, 19 nt, Homo sapiens
  misc_RNA (1)...(19): siRNA sense strand
gcucacugcggaaggcgaa

SEQ ID NO: 2233236 - RNA, 19 nt, Homo sapiens
  misc_RNA (1)...(19): siRNA sense strand
ggaaggcgaagaauggcaa

SEQ ID NO: 2233237 - RNA, 19 nt, Homo sapiens
  misc_RNA (1)...(19): siRNA sense strand
gggaagaguugccugccca

SEQ ID NO: 2233238 - RNA, 19 nt, Homo sapiens
  misc_RNA (1)...(19): siRNA sense strand
uugaauugcaaauggcuuu

SEQ ID NO: 2233239 - RNA, 19 nt, Homo sapiens
  misc_RNA (1)...(19): siRNA sense strand
uggaaauucucguguccca

SEQ ID NO: 2233240 - RNA, 19 nt, Homo sapiens
  misc_RNA (1)...(19): siRNA sense strand
acccagagguggaggccaa

SEQ ID NO: 2233241 - RNA, 19 nt, Homo sapiens
  misc_RNA (1)...(19): siRNA sense strand
gcuuugacuauaaggacaa

SEQ ID NO: 2233242 - RNA, 19 nt, Homo sapiens
  misc_RNA (1)...(19): siRNA sense strand
gcaagaaccggcagcccaa

SEQ ID NO: 2233243 - RNA, 19 nt, Homo sapiens
  misc_RNA (1)...(19): siRNA sense strand
ugcaggaggaggagaagaa

SEQ ID NO: 2233244 - RNA, 19 nt, Homo sapiens
  misc_RNA (1)...(19): siRNA sense strand
cuguuuggcagcagaggaa

SEQ ID NO: 2233245 - RNA, 19 nt, Homo sapiens
  misc_RNA (1)...(19): siRNA sense strand
ccaagguccaugaggagau

SEQ ID NO: 2233246 - RNA, 19 nt, Homo sapiens
  misc_RNA (1)...(19): siRNA sense strand
ugaagaucagugagcgcua

SEQ ID NO: 2233247 - RNA, 19 nt, Homo sapiens
  misc_RNA (1)...(19): siRNA sense strand
aggccaagguccaugagga

SEQ ID NO: 2233248 - RNA, 19 nt, Homo sapiens
  misc_RNA (1)...(19): siRNA sense strand
aggcagugauccacgagau

SEQ ID NO: 2233249 - RNA, 19 nt, Homo sapiens
  misc_RNA (1)...(19): siRNA sense strand
caguuuaagaagagugaug

SEQ ID NO: 2233250 - RNA, 19 nt, Homo sapiens
  misc_RNA (1)...(19): siRNA sense strand
cgcuuugacuauaaggaca

SEQ ID NO: 2233251 - RNA, 19 nt, Homo sapiens
  misc_RNA (1)...(19): siRNA sense strand
ccaugaggagauugacaga

SEQ ID NO: 2233252 - RNA, 19 nt, Homo sapiens
  misc_RNA (1)...(19): siRNA sense strand
uugacagagugaucggcaa

SEQ ID NO: 2233253 - RNA, 19 nt, Homo sapiens
  misc_RNA (1)...(19): siRNA sense strand
ggcagcagaggaagagcaa

SEQ ID NO: 2233254 - RNA, 19 nt, Homo sapiens
  misc_RNA (1)...(19): siRNA sense strand
guuuggcagcagaggaaga

SEQ ID NO: 2233255 - RNA, 19 nt, Homo sapiens
  misc_RNA (1)...(19): siRNA sense strand
acccagagguggaggccaa

SEQ ID NO: 2233256 - RNA, 19 nt, Homo sapiens
  misc_RNA (1)...(19): siRNA sense strand
gcuuugacuaugaggacaa

SEQ ID NO: 2233257 - RNA, 19 nt, Homo sapiens
  misc_RNA (1)...(19): siRNA sense strand
gcaagaaccggcagcccaa

SEQ ID NO: 2233258 - RNA, 19 nt, Homo sapiens
  misc_RNA (1)...(19): siRNA sense strand
acaugcaggaggaggagaa

SEQ ID NO: 2233259 - RNA, 19 nt, Homo sapiens
  misc_RNA (1)...(19): siRNA sense strand
ugcaggaggaggagaagaa

SEQ ID NO: 2233260 - RNA, 19 nt, Homo sapiens
  misc_RNA (1)...(19): siRNA sense strand
ccaagguccaugaggagau

SEQ ID NO: 2233261 - RNA, 19 nt, Homo sapiens
  misc_RNA (1)...(19): siRNA sense strand
ccacaggacuucaucgacu

SEQ ID NO: 2233262 - RNA, 19 nt, Homo sapiens
  misc_RNA (1)...(19): siRNA sense strand
aggccaagguccaugagga

SEQ ID NO: 2233263 - RNA, 19 nt, Homo sapiens
  misc_RNA (1)...(19): siRNA sense strand
aggcagugauccacgagau

SEQ ID NO: 2233264 - RNA, 19 nt, Homo sapiens
  misc_RNA (1)...(19): siRNA sense strand
caguuuaagaagagugaug

SEQ ID NO: 2233265 - RNA, 19 nt, Homo sapiens
  misc_RNA (1)...(19): siRNA sense strand
ccaugaggagauugacaga

SEQ ID NO: 2233266 - RNA, 19 nt, Homo sapiens
  misc_RNA (1)...(19): siRNA sense strand
uugacagagugaucggcaa

SEQ ID NO: 2233267 - RNA, 19 nt, Homo sapiens
  misc_RNA (1)...(19): siRNA sense strand
acccagagguggaggccaa

SEQ ID NO: 2233268 - RNA, 19 nt, Homo sapiens
  misc_RNA (1)...(19): siRNA sense strand
gcuuugacuaugaggacaa

SEQ ID NO: 2233269 - RNA, 19 nt, Homo sapiens
  misc_RNA (1)...(19): siRNA sense strand
gcaagaaccggcagcccaa

SEQ ID NO: 2233270 - RNA, 19 nt, Homo sapiens
  misc_RNA (1)...(19): siRNA sense strand
acaugcaggaggaggagaa

SEQ ID NO: 2233271 - RNA, 19 nt, Homo sapiens
  misc_RNA (1)...(19): siRNA sense strand
ugcaggaggaggagaagaa

SEQ ID NO: 2233272 - RNA, 19 nt, Homo sapiens
  misc_RNA (1)...(19): siRNA sense strand
ccaagguccaugaggagau

SEQ ID NO: 2233273 - RNA, 19 nt, Homo sapiens
  misc_RNA (1)...(19): siRNA sense strand
ccacaggacuucaucgacu

SEQ ID NO: 2233274 - RNA, 19 nt, Homo sapiens
  misc_RNA (1)...(19): siRNA sense strand
aggccaagguccaugagga

SEQ ID NO: 2233275 - RNA, 19 nt, Homo sapiens
  misc_RNA (1)...(19): siRNA sense strand
aggcagugauccacgagau

SEQ ID NO: 2233276 - RNA, 19 nt, Homo sapiens
  misc_RNA (1)...(19): siRNA sense strand
caguuuaagaagagugaug

SEQ ID NO: 2233277 - RNA, 19 nt, Homo sapiens
  misc_RNA (1)...(19): siRNA sense strand
ccaugaggagauugacaga

SEQ ID NO: 2233278 - RNA, 19 nt, Homo sapiens
  misc_RNA (1)...(19): siRNA sense strand
uugacagagugaucggcaa

SEQ ID NO: 2233279 - RNA, 19 nt, Homo sapiens
  misc_RNA (1)...(19): siRNA sense strand
gagagagucuacagggaga

SEQ ID NO: 2233280 - RNA, 19 nt, Homo sapiens
  misc_RNA (1)...(19): siRNA sense strand
gggacuucgggaugggaaa

SEQ ID NO: 2233281 - RNA, 19 nt, Homo sapiens
  misc_RNA (1)...(19): siRNA sense strand
gcuucaugaccgagccaaa

SEQ ID NO: 2233282 - RNA, 19 nt, Homo sapiens
  misc_RNA (1)...(19): siRNA sense strand
ucugagguuccgagagaaa

SEQ ID NO: 2233283 - RNA, 19 nt, Homo sapiens
  misc_RNA (1)...(19): siRNA sense strand
gauggauagaagaggccua

SEQ ID NO: 2233284 - RNA, 19 nt, Homo sapiens
  misc_RNA (1)...(19): siRNA sense strand
cagagagagucuacaggga

SEQ ID NO: 2233285 - RNA, 19 nt, Homo sapiens
  misc_RNA (1)...(19): siRNA sense strand
ugauagaggagcuucggaa

SEQ ID NO: 2233286 - RNA, 19 nt, Homo sapiens
  misc_RNA (1)...(19): siRNA sense strand
aggaguguggugugggcaa

SEQ ID NO: 2233287 - RNA, 19 nt, Homo sapiens
  misc_RNA (1)...(19): siRNA sense strand
gaguagaggccauacggga

SEQ ID NO: 2233288 - RNA, 19 nt, Homo sapiens
  misc_RNA (1)...(19): siRNA sense strand
ggaguguggaggagcggau

SEQ ID NO: 2233289 - RNA, 19 nt, Homo sapiens
  misc_RNA (1)...(19): siRNA sense strand
ccaaaaugccauacacaga

SEQ ID NO: 2233290 - RNA, 19 nt, Homo sapiens
  misc_RNA (1)...(19): siRNA sense strand
auagaggagcuucggaaau

SEQ ID NO: 2233291 - RNA, 19 nt, Homo sapiens
  misc_RNA (1)...(19): siRNA sense strand
cccucauguugcagagaga

SEQ ID NO: 2233292 - RNA, 19 nt, Homo sapiens
  misc_RNA (1)...(19): siRNA sense strand
ugaucuuugccaauggaaa

SEQ ID NO: 2233293 - RNA, 19 nt, Homo sapiens
  misc_RNA (1)...(19): siRNA sense strand
ggaaagagauggaaggaga

SEQ ID NO: 2233294 - RNA, 19 nt, Homo sapiens
  misc_RNA (1)...(19): siRNA sense strand
guuauguauuggagagaau

SEQ ID NO: 2233295 - RNA, 19 nt, Homo sapiens
  misc_RNA (1)...(19): siRNA sense strand
ucaaaauggaacaggaaaa

SEQ ID NO: 2233296 - RNA, 19 nt, Homo sapiens
  misc_RNA (1)...(19): siRNA sense strand
guugaaagcuugauagcca

SEQ ID NO: 2233297 - RNA, 19 nt, Homo sapiens
  misc_RNA (1)...(19): siRNA sense strand
uuguggaggaguugagaaa

SEQ ID NO: 2233298 - RNA, 19 nt, Homo sapiens
  misc_RNA (1)...(19): siRNA sense strand
ggagagaauaaaagaacau

SEQ ID NO: 2233299 - RNA, 19 nt, Homo sapiens
  misc_RNA (1)...(19): siRNA sense strand
agguugacccaaaggauau

SEQ ID NO: 2233300 - RNA, 19 nt, Homo sapiens
  misc_RNA (1)...(19): siRNA sense strand
gaucaaaauggaacaggaa

SEQ ID NO: 2233301 - RNA, 19 nt, Homo sapiens
  misc_RNA (1)...(19): siRNA sense strand
cccaagggcacgaccauaa

SEQ ID NO: 2233302 - RNA, 19 nt, Homo sapiens
  misc_RNA (1)...(19): siRNA sense strand
caucaagaaucccuggaca

SEQ ID NO: 2233303 - RNA, 19 nt, Homo sapiens
  misc_RNA (1)...(19): siRNA sense strand
ccucaugacucugcggaau

SEQ ID NO: 2233304 - RNA, 19 nt, Homo sapiens
  misc_RNA (1)...(19): siRNA sense strand
ccaugaucgauuugauuau

SEQ ID NO: 2233305 - RNA, 19 nt, Homo sapiens
  misc_RNA (1)...(19): siRNA sense strand
caucgaggaccguguucaa

SEQ ID NO: 2233306 - RNA, 19 nt, Homo sapiens
  misc_RNA (1)...(19): siRNA sense strand
ccaggaagucauaauaaaa

SEQ ID NO: 2233307 - RNA, 19 nt, Homo sapiens
  misc_RNA (1)...(19): siRNA sense strand
uugcagaacuuuaaccuga

SEQ ID NO: 2233308 - RNA, 19 nt, Homo sapiens
  misc_RNA (1)...(19): siRNA sense strand
uggaaauauccugcaguua

SEQ ID NO: 2233309 - RNA, 19 nt, Homo sapiens
  misc_RNA (1)...(19): siRNA sense strand
cuaaaguccaggaagagau

SEQ ID NO: 2233310 - RNA, 19 nt, Homo sapiens
  misc_RNA (1)...(19): siRNA sense strand
gaacagagacaacgagcac

SEQ ID NO: 2233311 - RNA, 19 nt, Homo sapiens
  misc_RNA (1)...(19): siRNA sense strand
cugcacaaugacaaagaau

SEQ ID NO: 2233312 - RNA, 19 nt, Homo sapiens
  misc_RNA (1)...(19): siRNA sense strand
aggaaaagcacaaucaaca

SEQ ID NO: 2233313 - RNA, 19 nt, Homo sapiens
  misc_RNA (1)...(19): siRNA sense strand
cccagaggucacagcuaaa

SEQ ID NO: 2233314 - RNA, 19 nt, Homo sapiens
  misc_RNA (1)...(19): siRNA sense strand
cacgagauccagagauaca

SEQ ID NO: 2233315 - RNA, 19 nt, Homo sapiens
  misc_RNA (1)...(19): siRNA sense strand
gggcacgaccauaauaaca

SEQ ID NO: 2233316 - RNA, 19 nt, Homo sapiens
  misc_RNA (1)...(19): siRNA sense strand
caggaaaacggauguguau

SEQ ID NO: 2233317 - RNA, 19 nt, Homo sapiens
  misc_RNA (1)...(19): siRNA sense strand
ggaccuaccuggaaggaca

SEQ ID NO: 2233318 - RNA, 19 nt, Homo sapiens
  misc_RNA (1)...(19): siRNA sense strand
guggaaauggagaaggaaa

SEQ ID NO: 2233319 - RNA, 19 nt, Homo sapiens
  misc_RNA (1)...(19): siRNA sense strand
uggaaauggagaaggaaaa

SEQ ID NO: 2233320 - RNA, 19 nt, Homo sapiens
  misc_RNA (1)...(19): siRNA sense strand
cugaaagggugaaggagca

SEQ ID NO: 2233321 - RNA, 19 nt, Homo sapiens
  misc_RNA (1)...(19): siRNA sense strand
gaagaaauugacaggguga

SEQ ID NO: 2233322 - RNA, 19 nt, Homo sapiens
  misc_RNA (1)...(19): siRNA sense strand
cagaaaaguuuaagccaga

SEQ ID NO: 2233323 - RNA, 19 nt, Homo sapiens
  misc_RNA (1)...(19): siRNA sense strand
acuacaaugaugagaaguu

SEQ ID NO: 2233324 - RNA, 19 nt, Homo sapiens
  misc_RNA (1)...(19): siRNA sense strand
cuggaagcacucaggaaga

SEQ ID NO: 2233325 - RNA, 19 nt, Homo sapiens
  misc_RNA (1)...(19): siRNA sense strand
agaaauugacagggugauu

SEQ ID NO: 2233326 - RNA, 19 nt, Homo sapiens
  misc_RNA (1)...(19): siRNA sense strand
ucguugacccaaaggauau

SEQ ID NO: 2233327 - RNA, 19 nt, Homo sapiens
  misc_RNA (1)...(19): siRNA sense strand
ggaacuaugggauggggaa

SEQ ID NO: 2233328 - RNA, 19 nt, Homo sapiens
  misc_RNA (1)...(19): siRNA sense strand
ccgacauccucuuccgcaa

SEQ ID NO: 2233329 - RNA, 19 nt, Homo sapiens
  misc_RNA (1)...(19): siRNA sense strand
aguuuaagccagaacacuu

SEQ ID NO: 2233330 - RNA, 19 nt, Homo sapiens
  misc_RNA (1)...(19): siRNA sense strand
augaagaaauugacagggu

SEQ ID NO: 2233331 - RNA, 19 nt, Homo sapiens
  misc_RNA (1)...(19): siRNA sense strand
cguuacaaacucuguguca

SEQ ID NO: 2233332 - RNA, 19 nt, Homo sapiens
  misc_RNA (1)...(19): siRNA sense strand
ggauggggaaacagggcaa

SEQ ID NO: 2233333 - RNA, 19 nt, Homo sapiens
  misc_RNA (1)...(19): siRNA sense strand
aaaauguggcugaaguaaa

SEQ ID NO: 2233334 - RNA, 19 nt, Homo sapiens
  misc_RNA (1)...(19): siRNA sense strand
uggcugaaguaaaagagua

SEQ ID NO: 2233335 - RNA, 19 nt, Homo sapiens
  misc_RNA (1)...(19): siRNA sense strand
aaagaguaugugucugaaa

SEQ ID NO: 2233336 - RNA, 19 nt, Homo sapiens
  misc_RNA (1)...(19): siRNA sense strand
uguacacaauggacgguau

SEQ ID NO: 2233337 - RNA, 19 nt, Homo sapiens
  misc_RNA (1)...(19): siRNA sense strand
uggcagaggagaaggagga

SEQ ID NO: 2233338 - RNA, 19 nt, Homo sapiens
  misc_RNA (1)...(19): siRNA sense strand
acacagacgcggugaucca

SEQ ID NO: 2233339 - RNA, 19 nt, Homo sapiens
  misc_RNA (1)...(19): siRNA sense strand
ccgccauccugcagagcuu

SEQ ID NO: 2233340 - RNA, 19 nt, Homo sapiens
  misc_RNA (1)...(19): siRNA sense strand
gaagcauugaggagcgaau

SEQ ID NO: 2233341 - RNA, 19 nt, Homo sapiens
  misc_RNA (1)...(19): siRNA sense strand
cgacuaugaugaugagcgu

SEQ ID NO: 2233342 - RNA, 19 nt, Homo sapiens
  misc_RNA (1)...(19): siRNA sense strand
gcucaguguccaacauuau

SEQ ID NO: 2233343 - RNA, 19 nt, Homo sapiens
  misc_RNA (1)...(19): siRNA sense strand
gaagagaagcauugaggag

SEQ ID NO: 2233344 - RNA, 19 nt, Homo sapiens
  misc_RNA (1)...(19): siRNA sense strand
cagcauaagcacagccauc

SEQ ID NO: 2233345 - RNA, 19 nt, Homo sapiens
  misc_RNA (1)...(19): siRNA sense strand
ucaacuuuaccaagggcaa

SEQ ID NO: 2233346 - RNA, 19 nt, Homo sapiens
  misc_RNA (1)...(19): siRNA sense strand
cccucucaauccugggaaa

SEQ ID NO: 2233347 - RNA, 19 nt, Homo sapiens
  misc_RNA (1)...(19): siRNA sense strand
ugucaaagcacacaggcaa

SEQ ID NO: 2233348 - RNA, 19 nt, Homo sapiens
  misc_RNA (1)...(19): siRNA sense strand
aaagaaaugucaaagcaca

SEQ ID NO: 2233349 - RNA, 19 nt, Homo sapiens
  misc_RNA (1)...(19): siRNA sense strand
aaguacaagcugagauuga

SEQ ID NO: 2233350 - RNA, 19 nt, Homo sapiens
  misc_RNA (1)...(19): siRNA sense strand
gcugaaguuacuagaugaa

SEQ ID NO: 2233351 - RNA, 19 nt, Homo sapiens
  misc_RNA (1)...(19): siRNA sense strand
aagcaauaaaagaggagaa

SEQ ID NO: 2233352 - RNA, 19 nt, Homo sapiens
  misc_RNA (1)...(19): siRNA sense strand
cggagaacgcuuugaguac

SEQ ID NO: 2233353 - RNA, 19 nt, Homo sapiens
  misc_RNA (1)...(19): siRNA sense strand
cuuggagcuuggugacaua

SEQ ID NO: 2233354 - RNA, 19 nt, Homo sapiens
  misc_RNA (1)...(19): siRNA sense strand
ucacauacuuggaggcuuc

SEQ ID NO: 2233355 - RNA, 19 nt, Homo sapiens
  misc_RNA (1)...(19): siRNA sense strand
ugauugacaaacacagaaa

SEQ ID NO: 2233356 - RNA, 19 nt, Homo sapiens
  misc_RNA (1)...(19): siRNA sense strand
agcuguuugugaagaaaua

SEQ ID NO: 2233357 - RNA, 19 nt, Homo sapiens
  misc_RNA (1)...(19): siRNA sense strand
guuuaggaaagaagagcuu

SEQ ID NO: 2233358 - RNA, 19 nt, Homo sapiens
  misc_RNA (1)...(19): siRNA sense strand
gcugagauugacagaguga

SEQ ID NO: 2233359 - RNA, 19 nt, Homo sapiens
  misc_RNA (1)...(19): siRNA sense strand
acccagaaauccaagaaaa

SEQ ID NO: 2233360 - RNA, 19 nt, Homo sapiens
  misc_RNA (1)...(19): siRNA sense strand
uuggaauccugcagaaaca

SEQ ID NO: 2233361 - RNA, 19 nt, Homo sapiens
  misc_RNA (1)...(19): siRNA sense strand
ugcagaaacaagagacuuu

SEQ ID NO: 2233362 - RNA, 19 nt, Homo sapiens
  misc_RNA (1)...(19): siRNA sense strand
aaugagaagcugagccuga

SEQ ID NO: 2233363 - RNA, 19 nt, Homo sapiens
  misc_RNA (1)...(19): siRNA sense strand
uggagaauggacaguuuaa

SEQ ID NO: 2233364 - RNA, 19 nt, Homo sapiens
  misc_RNA (1)...(19): siRNA sense strand
gaaagaagagcuuagagga

SEQ ID NO: 2233365 - RNA, 19 nt, Homo sapiens
  misc_RNA (1)...(19): siRNA sense strand
ccaaacaaugagaagcuga

SEQ ID NO: 2233366 - RNA, 19 nt, Homo sapiens
  misc_RNA (1)...(19): siRNA sense strand
gugcagagaaugggcaaca

SEQ ID NO: 2233367 - RNA, 19 nt, Homo sapiens
  misc_RNA (1)...(19): siRNA sense strand
uaaaagaggagaacggaca

SEQ ID NO: 2233368 - RNA, 19 nt, Homo sapiens
  misc_RNA (1)...(19): siRNA sense strand
cgcuuugaguaccaggaua

SEQ ID NO: 2233369 - RNA, 19 nt, Homo sapiens
  misc_RNA (1)...(19): siRNA sense strand
gggaagugacaguugauac

SEQ ID NO: 2233370 - RNA, 19 nt, Homo sapiens
  misc_RNA (1)...(19): siRNA sense strand
augaagaauggaagagaau

SEQ ID NO: 2233371 - RNA, 19 nt, Homo sapiens
  misc_RNA (1)...(19): siRNA sense strand
cgucagggucucuggaaau

SEQ ID NO: 2233372 - RNA, 19 nt, Homo sapiens
  misc_RNA (1)...(19): siRNA sense strand
cgaaagaaacugaguccca

SEQ ID NO: 2233373 - RNA, 19 nt, Homo sapiens
  misc_RNA (1)...(19): siRNA sense strand
gggaagcagagaaaggcaa

SEQ ID NO: 2233374 - RNA, 19 nt, Homo sapiens
  misc_RNA (1)...(19): siRNA sense strand
gaggcgggaagcagagaaa

SEQ ID NO: 2233375 - RNA, 19 nt, Homo sapiens
  misc_RNA (1)...(19): siRNA sense strand
uugacaugguggugaauga

SEQ ID NO: 2233376 - RNA, 19 nt, Homo sapiens
  misc_RNA (1)...(19): siRNA sense strand
ccuaugaugccgugguaca

SEQ ID NO: 2233377 - RNA, 19 nt, Homo sapiens
  misc_RNA (1)...(19): siRNA sense strand
gaggaugaagaauggaaga

SEQ ID NO: 2233378 - RNA, 19 nt, Homo sapiens
  misc_RNA (1)...(19): siRNA sense strand
ucucuuuagcugaggauga

SEQ ID NO: 2233379 - RNA, 19 nt, Homo sapiens
  misc_RNA (1)...(19): siRNA sense strand
caaauuuggcgguggaaac

SEQ ID NO: 2233380 - RNA, 19 nt, Homo sapiens
  misc_RNA (1)...(19): siRNA sense strand
ucgucagggucucuggaaa

SEQ ID NO: 2233381 - RNA, 19 nt, Homo sapiens
  misc_RNA (1)...(19): siRNA sense strand
caucauuuggagugaacau

SEQ ID NO: 2233382 - RNA, 19 nt, Homo sapiens
  misc_RNA (1)...(19): siRNA sense strand
ggucaaugguggugauucc

SEQ ID NO: 2233383 - RNA, 19 nt, Homo sapiens
  misc_RNA (1)...(19): siRNA sense strand
cuauuagacuugagaggac

SEQ ID NO: 2233384 - RNA, 19 nt, Homo sapiens
  misc_RNA (1)...(19): siRNA sense strand
aauuugacacagagugcua

SEQ ID NO: 2233385 - RNA, 19 nt, Homo sapiens
  misc_RNA (1)...(19): siRNA sense strand
ccgugguacagauggagua

SEQ ID NO: 2233386 - RNA, 19 nt, Homo sapiens
  misc_RNA (1)...(19): siRNA sense strand
ccaaaguacuggacagagc

SEQ ID NO: 2233387 - RNA, 19 nt, Homo sapiens
  misc_RNA (1)...(19): siRNA sense strand
cgugaucagaacagugcua

SEQ ID NO: 2233388 - RNA, 19 nt, Homo sapiens
  misc_RNA (1)...(19): siRNA sense strand
auucauucccaaaggguca

SEQ ID NO: 2233389 - RNA, 19 nt, Homo sapiens
  misc_RNA (1)...(19): siRNA sense strand
caaaccuuguaaagaaaca

SEQ ID NO: 2233390 - RNA, 19 nt, Homo sapiens
  misc_RNA (1)...(19): siRNA sense strand
uggaagagaauacggucau

SEQ ID NO: 2233391 - RNA, 19 nt, Homo sapiens
  misc_RNA (1)...(19): siRNA sense strand
gauuauucccaguugcuau

SEQ ID NO: 2233392 - RNA, 19 nt, Homo sapiens
  misc_RNA (1)...(19): siRNA sense strand
ccuugaaauuagacacgca

SEQ ID NO: 2233393 - RNA, 19 nt, Homo sapiens
  misc_RNA (1)...(19): siRNA sense strand
cagaaagugcagaaggaaa

SEQ ID NO: 2233394 - RNA, 19 nt, Homo sapiens
  misc_RNA (1)...(19): siRNA sense strand
augaagaauggaagagaau

SEQ ID NO: 2233395 - RNA, 19 nt, Homo sapiens
  misc_RNA (1)...(19): siRNA sense strand
caaaacagugcuagugaaa

SEQ ID NO: 2233396 - RNA, 19 nt, Homo sapiens
  misc_RNA (1)...(19): siRNA sense strand
gaaauuacgcuuuggagga

SEQ ID NO: 2233397 - RNA, 19 nt, Homo sapiens
  misc_RNA (1)...(19): siRNA sense strand
cguaagggcuauuggacgu

SEQ ID NO: 2233398 - RNA, 19 nt, Homo sapiens
  misc_RNA (1)...(19): siRNA sense strand
uugacaugguggugaauga

SEQ ID NO: 2233399 - RNA, 19 nt, Homo sapiens
  misc_RNA (1)...(19): siRNA sense strand
ucucuauagcugaggauga

SEQ ID NO: 2233400 - RNA, 19 nt, Homo sapiens
  misc_RNA (1)...(19): siRNA sense strand
ccaaaggggugguggugau

SEQ ID NO: 2233401 - RNA, 19 nt, Homo sapiens
  misc_RNA (1)...(19): siRNA sense strand
gaccguaaguggagccuga

SEQ ID NO: 2233402 - RNA, 19 nt, Homo sapiens
  misc_RNA (1)...(19): siRNA sense strand
gaggaugaagaauggaaga

SEQ ID NO: 2233403 - RNA, 19 nt, Homo sapiens
  misc_RNA (1)...(19): siRNA sense strand
agcagaaagugcagaagga

SEQ ID NO: 2233404 - RNA, 19 nt, Homo sapiens
  misc_RNA (1)...(19): siRNA sense strand
cuaugagacuugagagggu

SEQ ID NO: 2233405 - RNA, 19 nt, Homo sapiens
  misc_RNA (1)...(19): siRNA sense strand
ccaacauucaccagcggaa

SEQ ID NO: 2233406 - RNA, 19 nt, Homo sapiens
  misc_RNA (1)...(19): siRNA sense strand
cuuucgggccagugggauu

SEQ ID NO: 2233407 - RNA, 19 nt, Homo sapiens
  misc_RNA (1)...(19): siRNA sense strand
gggaagcagagacaggcaa

SEQ ID NO: 2233408 - RNA, 19 nt, Homo sapiens
  misc_RNA (1)...(19): siRNA sense strand
caaacuuggccguggaaac

SEQ ID NO: 2233409 - RNA, 19 nt, Homo sapiens
  misc_RNA (1)...(19): siRNA sense strand
ccaaaguacuggacagagc

SEQ ID NO: 2233410 - RNA, 19 nt, Homo sapiens
  misc_RNA (1)...(19): siRNA sense strand
uggaagagaauacgaucau

SEQ ID NO: 2233411 - RNA, 19 nt, Homo sapiens
  misc_RNA (1)...(19): siRNA sense strand
ccauuguucuaaaggcuga

SEQ ID NO: 2233412 - RNA, 19 nt, Homo sapiens
  misc_RNA (1)...(19): siRNA sense strand
caaaccuuguaaagaaaca

SEQ ID NO: 2233413 - RNA, 19 nt, Homo sapiens
  misc_RNA (1)...(19): siRNA sense strand
auagaaaagucugggguau

SEQ ID NO: 2233414 - RNA, 19 nt, Homo sapiens
  misc_RNA (1)...(19): siRNA sense strand
ugucugaucuggagcucau

SEQ ID NO: 2233415 - RNA, 19 nt, Homo sapiens
  misc_RNA (1)...(19): siRNA sense strand
gauuauucccaguugcuau

SEQ ID NO: 2233416 - RNA, 19 nt, Homo sapiens
  misc_RNA (1)...(19): siRNA sense strand
cuugagagggucugcaaaa

SEQ ID NO: 2233417 - RNA, 19 nt, Homo sapiens
  misc_RNA (1)...(19): siRNA sense strand
agucaagggaugagaccgu

SEQ ID NO: 2233418 - RNA, 19 nt, Homo sapiens
  misc_RNA (1)...(19): siRNA sense strand
gggaagagcuccuuggcca

SEQ ID NO: 2233419 - RNA, 19 nt, Homo sapiens
  misc_RNA (1)...(19): siRNA sense strand
cguucauguuugagggcca

SEQ ID NO: 2233420 - RNA, 19 nt, Homo sapiens
  misc_RNA (1)...(19): siRNA sense strand
ggacaaaugggaagagcuc

SEQ ID NO: 2233421 - RNA, 19 nt, Homo sapiens
  misc_RNA (1)...(19): siRNA sense strand
ccauuagugaccugaacaa

SEQ ID NO: 2233422 - RNA, 19 nt, Homo sapiens
  misc_RNA (1)...(19): siRNA sense strand
aucaagaggaagaggcauu

SEQ ID NO: 2233423 - RNA, 19 nt, Homo sapiens
  misc_RNA (1)...(19): siRNA sense strand
gcuuugagcugcugccuga

SEQ ID NO: 2233424 - RNA, 19 nt, Homo sapiens
  misc_RNA (1)...(19): siRNA sense strand
acacagaccaagugaucca

SEQ ID NO: 2233425 - RNA, 19 nt, Homo sapiens
  misc_RNA (1)...(19): siRNA sense strand
gggagcuggagaagaucaa

SEQ ID NO: 2233426 - RNA, 19 nt, Homo sapiens
  misc_RNA (1)...(19): siRNA sense strand
ggaacugcaucgggaaaca

SEQ ID NO: 2233427 - RNA, 19 nt, Homo sapiens
  misc_RNA (1)...(19): siRNA sense strand
aggcauuggcagagagcuc

SEQ ID NO: 2233428 - RNA, 19 nt, Homo sapiens
  misc_RNA (1)...(19): siRNA sense strand
aaggaacugcaucgggaaa

SEQ ID NO: 2233429 - RNA, 19 nt, Homo sapiens
  misc_RNA (1)...(19): siRNA sense strand
agaucaagaggaagaggca

SEQ ID NO: 2233430 - RNA, 19 nt, Homo sapiens
  misc_RNA (1)...(19): siRNA sense strand
aggcaaaguucguguccag

SEQ ID NO: 2233431 - RNA, 19 nt, Homo sapiens
  misc_RNA (1)...(19): siRNA sense strand
cugacuauaugaaggugau

SEQ ID NO: 2233432 - RNA, 19 nt, Homo sapiens
  misc_RNA (1)...(19): siRNA sense strand
ccaucagcacacagaccaa

SEQ ID NO: 2233433 - RNA, 19 nt, Homo sapiens
  misc_RNA (1)...(19): siRNA sense strand
gggaggagauccacagccu

SEQ ID NO: 2233434 - RNA, 19 nt, Homo sapiens
  misc_RNA (1)...(19): siRNA sense strand
ggacaaauucccagggccu

SEQ ID NO: 2233435 - RNA, 19 nt, Homo sapiens
  misc_RNA (1)...(19): siRNA sense strand
aggaugagaaggugcggaa

SEQ ID NO: 2233436 - RNA, 19 nt, Homo sapiens
  misc_RNA (1)...(19): siRNA sense strand
uggacaagugggaagagaa

SEQ ID NO: 2233437 - RNA, 19 nt, Homo sapiens
  misc_RNA (1)...(19): siRNA sense strand
ggaagaagauccagaaccg

SEQ ID NO: 2233438 - RNA, 19 nt, Homo sapiens
  misc_RNA (1)...(19): siRNA sense strand
caguuugccaugagugaga

SEQ ID NO: 2233439 - RNA, 19 nt, Homo sapiens
  misc_RNA (1)...(19): siRNA sense strand
ccagagaacaucaaggaga

SEQ ID NO: 2233440 - RNA, 19 nt, Homo sapiens
  misc_RNA (1)...(19): siRNA sense strand
cuaaagagauugaauggga

SEQ ID NO: 2233441 - RNA, 19 nt, Homo sapiens
  misc_RNA (1)...(19): siRNA sense strand
gcaaggaugaagacgggaa

SEQ ID NO: 2233442 - RNA, 19 nt, Homo sapiens
  misc_RNA (1)...(19): siRNA sense strand
gcuuugacccagagaacau

SEQ ID NO: 2233443 - RNA, 19 nt, Homo sapiens
  misc_RNA (1)...(19): siRNA sense strand
ccuuuauguuugagggcca

SEQ ID NO: 2233444 - RNA, 19 nt, Homo sapiens
  misc_RNA (1)...(19): siRNA sense strand
aggccaaauccaagacuuu

SEQ ID NO: 2233445 - RNA, 19 nt, Homo sapiens
  misc_RNA (1)...(19): siRNA sense strand
acauaagagcagaagcuga

SEQ ID NO: 2233446 - RNA, 19 nt, Homo sapiens
  misc_RNA (1)...(19): siRNA sense strand
ucgcgauggcggagaugaa

SEQ ID NO: 2233447 - RNA, 19 nt, Homo sapiens
  misc_RNA (1)...(19): siRNA sense strand
cagccauugucaggagaaa

SEQ ID NO: 2233448 - RNA, 19 nt, Homo sapiens
  misc_RNA (1)...(19): siRNA sense strand
aggaugaagacgggaagaa

SEQ ID NO: 2233449 - RNA, 19 nt, Homo sapiens
  misc_RNA (1)...(19): siRNA sense strand
augaagacgggaagaaguu

SEQ ID NO: 2233450 - RNA, 19 nt, Homo sapiens
  misc_RNA (1)...(19): siRNA sense strand
gugaauauauugccgccau

SEQ ID NO: 2233451 - RNA, 19 nt, Homo sapiens
  misc_RNA (1)...(19): siRNA sense strand
ucaacauccugaagcccua

SEQ ID NO: 2233452 - RNA, 19 nt, Homo sapiens
  misc_RNA (1)...(19): siRNA sense strand
cagaauaccaggagcgcug

SEQ ID NO: 2233453 - RNA, 19 nt, Homo sapiens
  misc_RNA (1)...(19): siRNA sense strand
ccuccaagccaaggccaaa

SEQ ID NO: 2233454 - RNA, 19 nt, Homo sapiens
  misc_RNA (1)...(19): siRNA sense strand
ccaaagaacaucaaggaga

SEQ ID NO: 2233455 - RNA, 19 nt, Homo sapiens
  misc_RNA (1)...(19): siRNA sense strand
ggaauugguucuuggguca

SEQ ID NO: 2233456 - RNA, 19 nt, Homo sapiens
  misc_RNA (1)...(19): siRNA sense strand
cuaaagagauugaauggga

SEQ ID NO: 2233457 - RNA, 19 nt, Homo sapiens
  misc_RNA (1)...(19): siRNA sense strand
gcaaggaugaagaugggaa

SEQ ID NO: 2233458 - RNA, 19 nt, Homo sapiens
  misc_RNA (1)...(19): siRNA sense strand
gggaagaaguuguccgaug

SEQ ID NO: 2233459 - RNA, 19 nt, Homo sapiens
  misc_RNA (1)...(19): siRNA sense strand
ccuuuauguuugagggcca

SEQ ID NO: 2233460 - RNA, 19 nt, Homo sapiens
  misc_RNA (1)...(19): siRNA sense strand
aggccaaauccaagacuuu

SEQ ID NO: 2233461 - RNA, 19 nt, Homo sapiens
  misc_RNA (1)...(19): siRNA sense strand
acauaagagcagaagcuga

SEQ ID NO: 2233462 - RNA, 19 nt, Homo sapiens
  misc_RNA (1)...(19): siRNA sense strand
ucgcgauggcggagaugaa

SEQ ID NO: 2233463 - RNA, 19 nt, Homo sapiens
  misc_RNA (1)...(19): siRNA sense strand
aggaugaagaugggaagaa

SEQ ID NO: 2233464 - RNA, 19 nt, Homo sapiens
  misc_RNA (1)...(19): siRNA sense strand
caaagaacaucaaggagag

SEQ ID NO: 2233465 - RNA, 19 nt, Homo sapiens
  misc_RNA (1)...(19): siRNA sense strand
acaucaagccugugcucuu

SEQ ID NO: 2233466 - RNA, 19 nt, Homo sapiens
  misc_RNA (1)...(19): siRNA sense strand
gugaauauauugccgccau

SEQ ID NO: 2233467 - RNA, 19 nt, Homo sapiens
  misc_RNA (1)...(19): siRNA sense strand
uaccaaaggacaaggucuu

SEQ ID NO: 2233468 - RNA, 19 nt, Homo sapiens
  misc_RNA (1)...(19): siRNA sense strand
ucaacauccugaagcccua

SEQ ID NO: 2233469 - RNA, 19 nt, Homo sapiens
  misc_RNA (1)...(19): siRNA sense strand
augaagaugggaagaaguu

SEQ ID NO: 2233470 - RNA, 19 nt, Homo sapiens
  misc_RNA (1)...(19): siRNA sense strand
ccugcugagugcuggugaa

SEQ ID NO: 2233471 - RNA, 19 nt, Homo sapiens
  misc_RNA (1)...(19): siRNA sense strand
ccuccaagccaaggccaaa

SEQ ID NO: 2233472 - RNA, 19 nt, Homo sapiens
  misc_RNA (1)...(19): siRNA sense strand
ggacagagcucaucgggaa

SEQ ID NO: 2233473 - RNA, 19 nt, Homo sapiens
  misc_RNA (1)...(19): siRNA sense strand
ggguagaacgccuggacuu

SEQ ID NO: 2233474 - RNA, 19 nt, Homo sapiens
  misc_RNA (1)...(19): siRNA sense strand
acuuaaagacucaugggua

SEQ ID NO: 2233475 - RNA, 19 nt, Homo sapiens
  misc_RNA (1)...(19): siRNA sense strand
gggaaaaguccaauugaau

SEQ ID NO: 2233476 - RNA, 19 nt, Homo sapiens
  misc_RNA (1)...(19): siRNA sense strand
uugcauacgaugugccuaa

SEQ ID NO: 2233477 - RNA, 19 nt, Homo sapiens
  misc_RNA (1)...(19): siRNA sense strand
gagcagaagaaaauguuaa

SEQ ID NO: 2233478 - RNA, 19 nt, Homo sapiens
  misc_RNA (1)...(19): siRNA sense strand
cuuaaagacucauggguag

SEQ ID NO: 2233479 - RNA, 19 nt, Homo sapiens
  misc_RNA (1)...(19): siRNA sense strand
aaaggaaaucagaagucaa

SEQ ID NO: 2233480 - RNA, 19 nt, Homo sapiens
  misc_RNA (1)...(19): siRNA sense strand
augaagaccugaaugcaga

SEQ ID NO: 2233481 - RNA, 19 nt, Homo sapiens
  misc_RNA (1)...(19): siRNA sense strand
ggaugcugcugcugggcuu

SEQ ID NO: 2233482 - RNA, 19 nt, Homo sapiens
  misc_RNA (1)...(19): siRNA sense strand
uagcacagcuguaugcaga

SEQ ID NO: 2233483 - RNA, 19 nt, Homo sapiens
  misc_RNA (1)...(19): siRNA sense strand
gacagagcucaucgggaaa

SEQ ID NO: 2233484 - RNA, 19 nt, Homo sapiens
  misc_RNA (1)...(19): siRNA sense strand
gagacaaaacacuucaaaa

SEQ ID NO: 2233485 - RNA, 19 nt, Homo sapiens
  misc_RNA (1)...(19): siRNA sense strand
acuuuaauccugaucgcua

SEQ ID NO: 2233486 - RNA, 19 nt, Homo sapiens
  misc_RNA (1)...(19): siRNA sense strand
cggaaagcaugauggaaaa

SEQ ID NO: 2233487 - RNA, 19 nt, Homo sapiens
  misc_RNA (1)...(19): siRNA sense strand
uggaauuaggagaaggcaa

SEQ ID NO: 2233488 - RNA, 19 nt, Homo sapiens
  misc_RNA (1)...(19): siRNA sense strand
ggagaaggcaaacggguga

SEQ ID NO: 2233489 - RNA, 19 nt, Homo sapiens
  misc_RNA (1)...(19): siRNA sense strand
uggagaaggccaagacaca

SEQ ID NO: 2233490 - RNA, 19 nt, Homo sapiens
  misc_RNA (1)...(19): siRNA sense strand
agaaacuggcagagagcuu

SEQ ID NO: 2233491 - RNA, 19 nt, Homo sapiens
  misc_RNA (1)...(19): siRNA sense strand
gaugaaaacgggaagacaa

SEQ ID NO: 2233492 - RNA, 19 nt, Homo sapiens
  misc_RNA (1)...(19): siRNA sense strand
ccuggaagauuguucgcua

SEQ ID NO: 2233493 - RNA, 19 nt, Homo sapiens
  misc_RNA (1)...(19): siRNA sense strand
caucauagcucuuuaccca

SEQ ID NO: 2233494 - RNA, 19 nt, Homo sapiens
  misc_RNA (1)...(19): siRNA sense strand
cuucaagcaauucgacaaa

SEQ ID NO: 2233495 - RNA, 19 nt, Homo sapiens
  misc_RNA (1)...(19): siRNA sense strand
augaaaacgggaagacaaa

SEQ ID NO: 2233496 - RNA, 19 nt, Homo sapiens
  misc_RNA (1)...(19): siRNA sense strand
gggccaagcuaaaugucca

SEQ ID NO: 2233497 - RNA, 19 nt, Homo sapiens
  misc_RNA (1)...(19): siRNA sense strand
gaucuuacaaggcgggaca

SEQ ID NO: 2233498 - RNA, 19 nt, Homo sapiens
  misc_RNA (1)...(19): siRNA sense strand
gugaaaagaacauuagaga

SEQ ID NO: 2233499 - RNA, 19 nt, Homo sapiens
  misc_RNA (1)...(19): siRNA sense strand
gcagagagcuugaggcacg

SEQ ID NO: 2233500 - RNA, 19 nt, Homo sapiens
  misc_RNA (1)...(19): siRNA sense strand
uuguaauggacucaaguua

SEQ ID NO: 2233501 - RNA, 19 nt, Homo sapiens
  misc_RNA (1)...(19): siRNA sense strand
ccuuugaugaucuggagaa

SEQ ID NO: 2233502 - RNA, 19 nt, Homo sapiens
  misc_RNA (1)...(19): siRNA sense strand
aaggaaucgcugaggcuuu

SEQ ID NO: 2233503 - RNA, 19 nt, Homo sapiens
  misc_RNA (1)...(19): siRNA sense strand
uggcagagagcuugaggca

SEQ ID NO: 2233504 - RNA, 19 nt, Homo sapiens
  misc_RNA (1)...(19): siRNA sense strand
gauuaggaacccagaagca

SEQ ID NO: 2233505 - RNA, 19 nt, Homo sapiens
  misc_RNA (1)...(19): siRNA sense strand
auuagagaaugcuggucaa

SEQ ID NO: 2233506 - RNA, 19 nt, Homo sapiens
  misc_RNA (1)...(19): siRNA sense strand
gcauuugggcacagaagca

SEQ ID NO: 2233507 - RNA, 19 nt, Homo sapiens
  misc_RNA (1)...(19): siRNA sense strand
acuucaagcaauucgacaa

SEQ ID NO: 2233508 - RNA, 19 nt, Homo sapiens
  misc_RNA (1)...(19): siRNA sense strand
aagucagcuuggaaggcaa

SEQ ID NO: 2233509 - RNA, 19 nt, Homo sapiens
  misc_RNA (1)...(19): siRNA sense strand
ggacacacagaaagcacau

SEQ ID NO: 2233510 - RNA, 19 nt, Homo sapiens
  misc_RNA (1)...(19): siRNA sense strand
cugaagaagugaaaagaac

SEQ ID NO: 2233511 - RNA, 19 nt, Homo sapiens
  misc_RNA (1)...(19): siRNA sense strand
cugcaaacuaaugggaaaa

SEQ ID NO: 2233512 - RNA, 19 nt, Homo sapiens
  misc_RNA (1)...(19): siRNA sense strand
ccucuagagaauggauuaa

SEQ ID NO: 2233513 - RNA, 19 nt, Homo sapiens
  misc_RNA (1)...(19): siRNA sense strand
guuaaugcacuuagaucca

SEQ ID NO: 2233514 - RNA, 19 nt, Homo sapiens
  misc_RNA (1)...(19): siRNA sense strand
cuggaagauuguucgcuau

SEQ ID NO: 2233515 - RNA, 19 nt, Homo sapiens
  misc_RNA (1)...(19): siRNA sense strand
gauguuugaagcuggguau

SEQ ID NO: 2233516 - RNA, 19 nt, Homo sapiens
  misc_RNA (1)...(19): siRNA sense strand
gguucaacaacgaggaugu

SEQ ID NO: 2233517 - RNA, 19 nt, Homo sapiens
  misc_RNA (1)...(19): siRNA sense strand
gugucaacuacgugcacua

SEQ ID NO: 2233518 - RNA, 19 nt, Homo sapiens
  misc_RNA (1)...(19): siRNA sense strand
agugggagaucgugaacca

SEQ ID NO: 2233519 - RNA, 19 nt, Homo sapiens
  misc_RNA (1)...(19): siRNA sense strand
ccaucgucaccaagggcaa

SEQ ID NO: 2233520 - RNA, 19 nt, Homo sapiens
  misc_RNA (1)...(19): siRNA sense strand
agaucgugaaccaggacaa

SEQ ID NO: 2233521 - RNA, 19 nt, Homo sapiens
  misc_RNA (1)...(19): siRNA sense strand
ggaucauggagcugggacu

SEQ ID NO: 2233522 - RNA, 19 nt, Homo sapiens
  misc_RNA (1)...(19): siRNA sense strand
cguacuggugcuacauuaa

SEQ ID NO: 2233523 - RNA, 19 nt, Homo sapiens
  misc_RNA (1)...(19): siRNA sense strand
gaacaucgcugcagggaag

SEQ ID NO: 2233524 - RNA, 19 nt, Homo sapiens
  misc_RNA (1)...(19): siRNA sense strand
gaaaugaagagcaaggcau

SEQ ID NO: 2233525 - RNA, 19 nt, Homo sapiens
  misc_RNA (1)...(19): siRNA sense strand
gccuugaauuggauggaau

SEQ ID NO: 2233526 - RNA, 19 nt, Homo sapiens
  misc_RNA (1)...(19): siRNA sense strand
augaaagucugguugaaaa

SEQ ID NO: 2233527 - RNA, 19 nt, Homo sapiens
  misc_RNA (1)...(19): siRNA sense strand
cgaucuguguauagugaca

SEQ ID NO: 2233528 - RNA, 19 nt, Homo sapiens
  misc_RNA (1)...(19): siRNA sense strand
ggaacaucgcugcagggaa

SEQ ID NO: 2233529 - RNA, 19 nt, Homo sapiens
  misc_RNA (1)...(19): siRNA sense strand
aaugagacagaguggacaa

SEQ ID NO: 2233530 - RNA, 19 nt, Homo sapiens
  misc_RNA (1)...(19): siRNA sense strand
gugcaauguucaaaguacu

SEQ ID NO: 2233531 - RNA, 19 nt, Homo sapiens
  misc_RNA (1)...(19): siRNA sense strand
cugcauaggacacugaaaa

SEQ ID NO: 2233532 - RNA, 19 nt, Homo sapiens
  misc_RNA (1)...(19): siRNA sense strand
acuuacaaugucucagaaa

SEQ ID NO: 2233533 - RNA, 19 nt, Homo sapiens
  misc_RNA (1)...(19): siRNA sense strand
cuuacaaugucucagaaaa

SEQ ID NO: 2233534 - RNA, 19 nt, Homo sapiens
  misc_RNA (1)...(19): siRNA sense strand
agaauauauuuacggggaa

SEQ ID NO: 2233535 - RNA, 19 nt, Homo sapiens
  misc_RNA (1)...(19): siRNA sense strand
ccagcaaguuuguggagga

SEQ ID NO: 2233536 - RNA, 19 nt, Homo sapiens
  misc_RNA (1)...(19): siRNA sense strand
acgaguaugccgaggccaa

SEQ ID NO: 2233537 - RNA, 19 nt, Homo sapiens
  misc_RNA (1)...(19): siRNA sense strand
caggagugguggagccuca

SEQ ID NO: 2233538 - RNA, 19 nt, Homo sapiens
  misc_RNA (1)...(19): siRNA sense strand
ggaaguuugaugugaacca

SEQ ID NO: 2233539 - RNA, 19 nt, Homo sapiens
  misc_RNA (1)...(19): siRNA sense strand
ggaucauaaagaagguuca

SEQ ID NO: 2233540 - RNA, 19 nt, Homo sapiens
  misc_RNA (1)...(19): siRNA sense strand
ccgugaacuuggaggaccu

SEQ ID NO: 2233541 - RNA, 19 nt, Homo sapiens
  misc_RNA (1)...(19): siRNA sense strand
ggaacaagucgaugcugga

SEQ ID NO: 2233542 - RNA, 19 nt, Homo sapiens
  misc_RNA (1)...(19): siRNA sense strand
ggauguuuaaggaggcuga

SEQ ID NO: 2233543 - RNA, 19 nt, Homo sapiens
  misc_RNA (1)...(19): siRNA sense strand
ggaagcaucaccaaggaga

SEQ ID NO: 2233544 - RNA, 19 nt, Homo sapiens
  misc_RNA (1)...(19): siRNA sense strand
gcacggagaacgagcugca

SEQ ID NO: 2233545 - RNA, 19 nt, Homo sapiens
  misc_RNA (1)...(19): siRNA sense strand
ggaggaauaugaccggaca

SEQ ID NO: 2233546 - RNA, 19 nt, Homo sapiens
  misc_RNA (1)...(19): siRNA sense strand
cuggaggaguacaacaaga

SEQ ID NO: 2233547 - RNA, 19 nt, Homo sapiens
  misc_RNA (1)...(19): siRNA sense strand
ccagcaaguuuguggagga

SEQ ID NO: 2233548 - RNA, 19 nt, Homo sapiens
  misc_RNA (1)...(19): siRNA sense strand
acgaguaugccgaggccaa

SEQ ID NO: 2233549 - RNA, 19 nt, Homo sapiens
  misc_RNA (1)...(19): siRNA sense strand
caggagugguggagccuca

SEQ ID NO: 2233550 - RNA, 19 nt, Homo sapiens
  misc_RNA (1)...(19): siRNA sense strand
ggaaguuugaugugaacca

SEQ ID NO: 2233551 - RNA, 19 nt, Homo sapiens
  misc_RNA (1)...(19): siRNA sense strand
ggaucauaaagaagguuca

SEQ ID NO: 2233552 - RNA, 19 nt, Homo sapiens
  misc_RNA (1)...(19): siRNA sense strand
ccgugaacuuggaggaccu

SEQ ID NO: 2233553 - RNA, 19 nt, Homo sapiens
  misc_RNA (1)...(19): siRNA sense strand
ggaacaagucgaugcugga

SEQ ID NO: 2233554 - RNA, 19 nt, Homo sapiens
  misc_RNA (1)...(19): siRNA sense strand
ggauguuuaaggaggcuga

SEQ ID NO: 2233555 - RNA, 19 nt, Homo sapiens
  misc_RNA (1)...(19): siRNA sense strand
ggaagcaucaccaaggaga

SEQ ID NO: 2233556 - RNA, 19 nt, Homo sapiens
  misc_RNA (1)...(19): siRNA sense strand
gcacggagaacgagcugca

SEQ ID NO: 2233557 - RNA, 19 nt, Homo sapiens
  misc_RNA (1)...(19): siRNA sense strand
ggaggaauaugaccggaca

SEQ ID NO: 2233558 - RNA, 19 nt, Homo sapiens
  misc_RNA (1)...(19): siRNA sense strand
cuggaggaguacaacaaga

SEQ ID NO: 2233559 - RNA, 19 nt, Homo sapiens
  misc_RNA (1)...(19): siRNA sense strand
ccagcaaguuuguggagga

SEQ ID NO: 2233560 - RNA, 19 nt, Homo sapiens
  misc_RNA (1)...(19): siRNA sense strand
acgaguaugccgaggccaa

SEQ ID NO: 2233561 - RNA, 19 nt, Homo sapiens
  misc_RNA (1)...(19): siRNA sense strand
caggagugguggagccuca

SEQ ID NO: 2233562 - RNA, 19 nt, Homo sapiens
  misc_RNA (1)...(19): siRNA sense strand
ggaaguuugaugugaacca

SEQ ID NO: 2233563 - RNA, 19 nt, Homo sapiens
  misc_RNA (1)...(19): siRNA sense strand
ggaucauaaagaagguuca

SEQ ID NO: 2233564 - RNA, 19 nt, Homo sapiens
  misc_RNA (1)...(19): siRNA sense strand
ccgugaacuuggaggaccu

SEQ ID NO: 2233565 - RNA, 19 nt, Homo sapiens
  misc_RNA (1)...(19): siRNA sense strand
ggaacaagucgaugcugga

SEQ ID NO: 2233566 - RNA, 19 nt, Homo sapiens
  misc_RNA (1)...(19): siRNA sense strand
ggauguuuaaggaggcuga

SEQ ID NO: 2233567 - RNA, 19 nt, Homo sapiens
  misc_RNA (1)...(19): siRNA sense strand
ggaagcaucaccaaggaga

SEQ ID NO: 2233568 - RNA, 19 nt, Homo sapiens
  misc_RNA (1)...(19): siRNA sense strand
gcacggagaacgagcugca

SEQ ID NO: 2233569 - RNA, 19 nt, Homo sapiens
  misc_RNA (1)...(19): siRNA sense strand
ggaggaauaugaccggaca

SEQ ID NO: 2233570 - RNA, 19 nt, Homo sapiens
  misc_RNA (1)...(19): siRNA sense strand
cuggaggaguacaacaaga

SEQ ID NO: 2233571 - RNA, 19 nt, Homo sapiens
  misc_RNA (1)...(19): siRNA sense strand
gcagagaacucaaggaacc

SEQ ID NO: 2233572 - RNA, 19 nt, Homo sapiens
  misc_RNA (1)...(19): siRNA sense strand
cuggauaguugguggcagu

SEQ ID NO: 2233573 - RNA, 19 nt, Homo sapiens
  misc_RNA (1)...(19): siRNA sense strand
cugauguccaggaggagaa

SEQ ID NO: 2233574 - RNA, 19 nt, Homo sapiens
  misc_RNA (1)...(19): siRNA sense strand
acaaccagaauuagcaaau

SEQ ID NO: 2233575 - RNA, 19 nt, Homo sapiens
  misc_RNA (1)...(19): siRNA sense strand
agaacaugggcaucggcaa

SEQ ID NO: 2233576 - RNA, 19 nt, Homo sapiens
  misc_RNA (1)...(19): siRNA sense strand
cagacagagucaagcggaa

SEQ ID NO: 2233577 - RNA, 19 nt, Homo sapiens
  misc_RNA (1)...(19): siRNA sense strand
acaacauggacaucagaaa

SEQ ID NO: 2233578 - RNA, 19 nt, Homo sapiens
  misc_RNA (1)...(19): siRNA sense strand
acuacaacccagaggaagu

SEQ ID NO: 2233579 - RNA, 19 nt, Homo sapiens
  misc_RNA (1)...(19): siRNA sense strand
ggauccucuacaaggguaa

SEQ ID NO: 2233580 - RNA, 19 nt, Homo sapiens
  misc_RNA (1)...(19): siRNA sense strand
ggaguuuaugcaagguaau

SEQ ID NO: 2233581 - RNA, 19 nt, Homo sapiens
  misc_RNA (1)...(19): siRNA sense strand
uuuaagaacaacauggaca

SEQ ID NO: 2233582 - RNA, 19 nt, Homo sapiens
  misc_RNA (1)...(19): siRNA sense strand
gagaagacggguaugacca

SEQ ID NO: 2233583 - RNA, 19 nt, Homo sapiens
  misc_RNA (1)...(19): siRNA sense strand
gcauguggucguggguaaa

SEQ ID NO: 2233584 - RNA, 19 nt, Homo sapiens
  misc_RNA (1)...(19): siRNA sense strand
caacauagcuuacggggua

SEQ ID NO: 2233585 - RNA, 19 nt, Homo sapiens
  misc_RNA (1)...(19): siRNA sense strand
ggugaaauugggugaggau

SEQ ID NO: 2233586 - RNA, 19 nt, Homo sapiens
  misc_RNA (1)...(19): siRNA sense strand
ggagaagauagcugaggga

SEQ ID NO: 2233587 - RNA, 19 nt, Homo sapiens
  misc_RNA (1)...(19): siRNA sense strand
uggcugaccgcauggacaa

SEQ ID NO: 2233588 - RNA, 19 nt, Homo sapiens
  misc_RNA (1)...(19): siRNA sense strand
ccaggaagaucgaugugca

SEQ ID NO: 2233589 - RNA, 19 nt, Homo sapiens
  misc_RNA (1)...(19): siRNA sense strand
cauugugcagagacagaaa

SEQ ID NO: 2233590 - RNA, 19 nt, Homo sapiens
  misc_RNA (1)...(19): siRNA sense strand
ggaagaucgaugugcagca

SEQ ID NO: 2233591 - RNA, 19 nt, Homo sapiens
  misc_RNA (1)...(19): siRNA sense strand
cggcauuggcuggagaaga

SEQ ID NO: 2233592 - RNA, 19 nt, Homo sapiens
  misc_RNA (1)...(19): siRNA sense strand
ccuuugaacgugugugcau

SEQ ID NO: 2233593 - RNA, 19 nt, Homo sapiens
  misc_RNA (1)...(19): siRNA sense strand
cugacuuccugcuggucua

SEQ ID NO: 2233594 - RNA, 19 nt, Homo sapiens
  misc_RNA (1)...(19): siRNA sense strand
caacauagcuuacggggua

SEQ ID NO: 2233595 - RNA, 19 nt, Homo sapiens
  misc_RNA (1)...(19): siRNA sense strand
ggugaaauugggugaggau

SEQ ID NO: 2233596 - RNA, 19 nt, Homo sapiens
  misc_RNA (1)...(19): siRNA sense strand
ggagaagauagcugaggga

SEQ ID NO: 2233597 - RNA, 19 nt, Homo sapiens
  misc_RNA (1)...(19): siRNA sense strand
uggcugaccgcauggacaa

SEQ ID NO: 2233598 - RNA, 19 nt, Homo sapiens
  misc_RNA (1)...(19): siRNA sense strand
ccaggaagaucgaugugca

SEQ ID NO: 2233599 - RNA, 19 nt, Homo sapiens
  misc_RNA (1)...(19): siRNA sense strand
cauugugcagagacagaaa

SEQ ID NO: 2233600 - RNA, 19 nt, Homo sapiens
  misc_RNA (1)...(19): siRNA sense strand
ggaagaucgaugugcagca

SEQ ID NO: 2233601 - RNA, 19 nt, Homo sapiens
  misc_RNA (1)...(19): siRNA sense strand
cggcauuggcuggagaaga

SEQ ID NO: 2233602 - RNA, 19 nt, Homo sapiens
  misc_RNA (1)...(19): siRNA sense strand
ccuuugaacgugugugcau

SEQ ID NO: 2233603 - RNA, 19 nt, Homo sapiens
  misc_RNA (1)...(19): siRNA sense strand
cugacuuccugcuggucua

SEQ ID NO: 2233604 - RNA, 19 nt, Homo sapiens
  misc_RNA (1)...(19): siRNA sense strand
guggacagguauugggcua

SEQ ID NO: 2233605 - RNA, 19 nt, Homo sapiens
  misc_RNA (1)...(19): siRNA sense strand
cgguaugagagaaagauga

SEQ ID NO: 2233606 - RNA, 19 nt, Homo sapiens
  misc_RNA (1)...(19): siRNA sense strand
acgaauaaugccauagaga

SEQ ID NO: 2233607 - RNA, 19 nt, Homo sapiens
  misc_RNA (1)...(19): siRNA sense strand
ccuggaaggcaguggcuga

SEQ ID NO: 2233608 - RNA, 19 nt, Homo sapiens
  misc_RNA (1)...(19): siRNA sense strand
cugaagacucugucgguga

SEQ ID NO: 2233609 - RNA, 19 nt, Homo sapiens
  misc_RNA (1)...(19): siRNA sense strand
ucgccagacccuuggagaa

SEQ ID NO: 2233610 - RNA, 19 nt, Homo sapiens
  misc_RNA (1)...(19): siRNA sense strand
aggauugcucagaaacaaa

SEQ ID NO: 2233611 - RNA, 19 nt, Homo sapiens
  misc_RNA (1)...(19): siRNA sense strand
gaauaaugccauagagacg

SEQ ID NO: 2233612 - RNA, 19 nt, Homo sapiens
  misc_RNA (1)...(19): siRNA sense strand
cgaauguucucaaccggaa

SEQ ID NO: 2233613 - RNA, 19 nt, Homo sapiens
  misc_RNA (1)...(19): siRNA sense strand
cagaaggagaagaaagcca

SEQ ID NO: 2233614 - RNA, 19 nt, Homo sapiens
  misc_RNA (1)...(19): siRNA sense strand
guggaaauucagcaggauu

SEQ ID NO: 2233615 - RNA, 19 nt, Homo sapiens
  misc_RNA (1)...(19): siRNA sense strand
augaugaucuggagaggca

SEQ ID NO: 2233616 - RNA, 19 nt, Homo sapiens
  misc_RNA (1)...(19): siRNA sense strand
gaguggaaauucagcagga

SEQ ID NO: 2233617 - RNA, 19 nt, Homo sapiens
  misc_RNA (1)...(19): siRNA sense strand
cagcagaaggagaagaaag

SEQ ID NO: 2233618 - RNA, 19 nt, Homo sapiens
  misc_RNA (1)...(19): siRNA sense strand
gugguaggugaguggaaau

SEQ ID NO: 2233619 - RNA, 19 nt, Homo sapiens
  misc_RNA (1)...(19): siRNA sense strand
cccagcagaaggagaagaa

SEQ ID NO: 2233620 - RNA, 19 nt, Homo sapiens
  misc_RNA (1)...(19): siRNA sense strand
cugucaucgucuucggcaa

SEQ ID NO: 2233621 - RNA, 19 nt, Homo sapiens
  misc_RNA (1)...(19): siRNA sense strand
ucuuugagauccagaccau

SEQ ID NO: 2233622 - RNA, 19 nt, Homo sapiens
  misc_RNA (1)...(19): siRNA sense strand
cagaaggagaagaaagcca

SEQ ID NO: 2233623 - RNA, 19 nt, Homo sapiens
  misc_RNA (1)...(19): siRNA sense strand
guggaaauucagcaggauu

SEQ ID NO: 2233624 - RNA, 19 nt, Homo sapiens
  misc_RNA (1)...(19): siRNA sense strand
augaugaucuggagaggca

SEQ ID NO: 2233625 - RNA, 19 nt, Homo sapiens
  misc_RNA (1)...(19): siRNA sense strand
gaguggaaauucagcagga

SEQ ID NO: 2233626 - RNA, 19 nt, Homo sapiens
  misc_RNA (1)...(19): siRNA sense strand
cagcagaaggagaagaaag

SEQ ID NO: 2233627 - RNA, 19 nt, Homo sapiens
  misc_RNA (1)...(19): siRNA sense strand
gugguaggugaguggaaau

SEQ ID NO: 2233628 - RNA, 19 nt, Homo sapiens
  misc_RNA (1)...(19): siRNA sense strand
cccagcagaaggagaagaa

SEQ ID NO: 2233629 - RNA, 19 nt, Homo sapiens
  misc_RNA (1)...(19): siRNA sense strand
cugucaucgucuucggcaa

SEQ ID NO: 2233630 - RNA, 19 nt, Homo sapiens
  misc_RNA (1)...(19): siRNA sense strand
ucuuugagauccagaccau

SEQ ID NO: 2233631 - RNA, 19 nt, Homo sapiens
  misc_RNA (1)...(19): siRNA sense strand
ccgcauuugcugugauguu

SEQ ID NO: 2233632 - RNA, 19 nt, Homo sapiens
  misc_RNA (1)...(19): siRNA sense strand
uggccaucgucuucggcaa

SEQ ID NO: 2233633 - RNA, 19 nt, Homo sapiens
  misc_RNA (1)...(19): siRNA sense strand
ggagaagaaggcaacccaa

SEQ ID NO: 2233634 - RNA, 19 nt, Homo sapiens
  misc_RNA (1)...(19): siRNA sense strand
ccgcauuugcugugauguu

SEQ ID NO: 2233635 - RNA, 19 nt, Homo sapiens
  misc_RNA (1)...(19): siRNA sense strand
uggccaucgucuucggcaa

SEQ ID NO: 2233636 - RNA, 19 nt, Homo sapiens
  misc_RNA (1)...(19): siRNA sense strand
ccgcauuugcugugauguu

SEQ ID NO: 2233637 - RNA, 19 nt, Homo sapiens
  misc_RNA (1)...(19): siRNA sense strand
uggccaucgucuucggcaa

SEQ ID NO: 2233638 - RNA, 19 nt, Homo sapiens
  misc_RNA (1)...(19): siRNA sense strand
ggagaagaaggcaacccaa

SEQ ID NO: 2233639 - RNA, 19 nt, Homo sapiens
  misc_RNA (1)...(19): siRNA sense strand
ccgcauuugcugugauguu

SEQ ID NO: 2233640 - RNA, 19 nt, Homo sapiens
  misc_RNA (1)...(19): siRNA sense strand
uggccaucgucuucggcaa

SEQ ID NO: 2233641 - RNA, 19 nt, Homo sapiens
  misc_RNA (1)...(19): siRNA sense strand
ggagaagaaggcaacccaa

SEQ ID NO: 2233642 - RNA, 19 nt, Homo sapiens
  misc_RNA (1)...(19): siRNA sense strand
ccgcauuugcugugauguu

SEQ ID NO: 2233643 - RNA, 19 nt, Homo sapiens
  misc_RNA (1)...(19): siRNA sense strand
uggccaucgucuucggcaa

SEQ ID NO: 2233644 - RNA, 19 nt, Homo sapiens
  misc_RNA (1)...(19): siRNA sense strand
ggagaagaaggcaacccaa

SEQ ID NO: 2233645 - RNA, 19 nt, Homo sapiens
  misc_RNA (1)...(19): siRNA sense strand
ggaauuacaagaagcccaa

SEQ ID NO: 2233646 - RNA, 19 nt, Homo sapiens
  misc_RNA (1)...(19): siRNA sense strand
guggaugggacaagggaca

SEQ ID NO: 2233647 - RNA, 19 nt, Homo sapiens
  misc_RNA (1)...(19): siRNA sense strand
cacuauggccagaaagcaa

SEQ ID NO: 2233648 - RNA, 19 nt, Homo sapiens
  misc_RNA (1)...(19): siRNA sense strand
gggaauuacaagaagccca

SEQ ID NO: 2233649 - RNA, 19 nt, Homo sapiens
  misc_RNA (1)...(19): siRNA sense strand
ggacaagggacaggagcga

SEQ ID NO: 2233650 - RNA, 19 nt, Homo sapiens
  misc_RNA (1)...(19): siRNA sense strand
ccuauauauccaagaagca

SEQ ID NO: 2233651 - RNA, 19 nt, Homo sapiens
  misc_RNA (1)...(19): siRNA sense strand
cuggaaaggcuggaggaga

SEQ ID NO: 2233652 - RNA, 19 nt, Homo sapiens
  misc_RNA (1)...(19): siRNA sense strand
uggcacaguggaugggaca

SEQ ID NO: 2233653 - RNA, 19 nt, Homo sapiens
  misc_RNA (1)...(19): siRNA sense strand
aagcaugcagagaagaauu

SEQ ID NO: 2233654 - RNA, 19 nt, Homo sapiens
  misc_RNA (1)...(19): siRNA sense strand
ggaauuacaagaagcccaa

SEQ ID NO: 2233655 - RNA, 19 nt, Homo sapiens
  misc_RNA (1)...(19): siRNA sense strand
guggaugggacaagggaca

SEQ ID NO: 2233656 - RNA, 19 nt, Homo sapiens
  misc_RNA (1)...(19): siRNA sense strand
gggaauuacaagaagccca

SEQ ID NO: 2233657 - RNA, 19 nt, Homo sapiens
  misc_RNA (1)...(19): siRNA sense strand
ggacaagggacaggagcga

SEQ ID NO: 2233658 - RNA, 19 nt, Homo sapiens
  misc_RNA (1)...(19): siRNA sense strand
uggcacaguggaugggaca

SEQ ID NO: 2233659 - RNA, 19 nt, Homo sapiens
  misc_RNA (1)...(19): siRNA sense strand
ggaauuacaagaagcccaa

SEQ ID NO: 2233660 - RNA, 19 nt, Homo sapiens
  misc_RNA (1)...(19): siRNA sense strand
guggaugggacaagggaca

SEQ ID NO: 2233661 - RNA, 19 nt, Homo sapiens
  misc_RNA (1)...(19): siRNA sense strand
gggaauuacaagaagccca

SEQ ID NO: 2233662 - RNA, 19 nt, Homo sapiens
  misc_RNA (1)...(19): siRNA sense strand
ggacaagggacaggagcga

SEQ ID NO: 2233663 - RNA, 19 nt, Homo sapiens
  misc_RNA (1)...(19): siRNA sense strand
uggcacaguggaugggaca

SEQ ID NO: 2233664 - RNA, 19 nt, Homo sapiens
  misc_RNA (1)...(19): siRNA sense strand
ggaugcuugaagauggaaa

SEQ ID NO: 2233665 - RNA, 19 nt, Homo sapiens
  misc_RNA (1)...(19): siRNA sense strand
ggaugcuugaagauggaaa

SEQ ID NO: 2233666 - RNA, 19 nt, Homo sapiens
  misc_RNA (1)...(19): siRNA sense strand
gcaugaacgccaagcacca

SEQ ID NO: 2233667 - RNA, 19 nt, Homo sapiens
  misc_RNA (1)...(19): siRNA sense strand
caacuacagccgagggagu

SEQ ID NO: 2233668 - RNA, 19 nt, Homo sapiens
  misc_RNA (1)...(19): siRNA sense strand
ccaagcaccacaaggaaaa

SEQ ID NO: 2233669 - RNA, 19 nt, Homo sapiens
  misc_RNA (1)...(19): siRNA sense strand
cuauauagauucaacugga

SEQ ID NO: 2233670 - RNA, 19 nt, Homo sapiens
  misc_RNA (1)...(19): siRNA sense strand
aggacaaguugcaugagca

SEQ ID NO: 2233671 - RNA, 19 nt, Homo sapiens
  misc_RNA (1)...(19): siRNA sense strand
gcaugaacgccaagcacca

SEQ ID NO: 2233672 - RNA, 19 nt, Homo sapiens
  misc_RNA (1)...(19): siRNA sense strand
caacuacagccgagggagu

SEQ ID NO: 2233673 - RNA, 19 nt, Homo sapiens
  misc_RNA (1)...(19): siRNA sense strand
ccaagcaccacaaggaaaa

SEQ ID NO: 2233674 - RNA, 19 nt, Homo sapiens
  misc_RNA (1)...(19): siRNA sense strand
cuauauagauucaacugga

SEQ ID NO: 2233675 - RNA, 19 nt, Homo sapiens
  misc_RNA (1)...(19): siRNA sense strand
aggacaaguugcaugagca

SEQ ID NO: 2233676 - RNA, 19 nt, Homo sapiens
  misc_RNA (1)...(19): siRNA sense strand
gcaugaacgccaagcacca

SEQ ID NO: 2233677 - RNA, 19 nt, Homo sapiens
  misc_RNA (1)...(19): siRNA sense strand
caacuacagccgagggagu

SEQ ID NO: 2233678 - RNA, 19 nt, Homo sapiens
  misc_RNA (1)...(19): siRNA sense strand
ccaagcaccacaaggaaaa

SEQ ID NO: 2233679 - RNA, 19 nt, Homo sapiens
  misc_RNA (1)...(19): siRNA sense strand
cuauauagauucaacugga

SEQ ID NO: 2233680 - RNA, 19 nt, Homo sapiens
  misc_RNA (1)...(19): siRNA sense strand
aggacaaguugcaugagca

SEQ ID NO: 2233681 - RNA, 19 nt, Homo sapiens
  misc_RNA (1)...(19): siRNA sense strand
gcaugaacgccaagcacca

SEQ ID NO: 2233682 - RNA, 19 nt, Homo sapiens
  misc_RNA (1)...(19): siRNA sense strand
caacuacagccgagggagu

SEQ ID NO: 2233683 - RNA, 19 nt, Homo sapiens
  misc_RNA (1)...(19): siRNA sense strand
ccaagcaccacaaggaaaa

SEQ ID NO: 2233684 - RNA, 19 nt, Homo sapiens
  misc_RNA (1)...(19): siRNA sense strand
cuauauagauucaacugga

SEQ ID NO: 2233685 - RNA, 19 nt, Homo sapiens
  misc_RNA (1)...(19): siRNA sense strand
aggacaaguugcaugagca

SEQ ID NO: 2233686 - RNA, 19 nt, Homo sapiens
  misc_RNA (1)...(19): siRNA sense strand
gcaugaacgccaagcacca

SEQ ID NO: 2233687 - RNA, 19 nt, Homo sapiens
  misc_RNA (1)...(19): siRNA sense strand
caacuacagccgagggagu

SEQ ID NO: 2233688 - RNA, 19 nt, Homo sapiens
  misc_RNA (1)...(19): siRNA sense strand
ccaagcaccacaaggaaaa

SEQ ID NO: 2233689 - RNA, 19 nt, Homo sapiens
  misc_RNA (1)...(19): siRNA sense strand
cuauauagauucaacugga

SEQ ID NO: 2233690 - RNA, 19 nt, Homo sapiens
  misc_RNA (1)...(19): siRNA sense strand
aggacaaguugcaugagca

SEQ ID NO: 2233691 - RNA, 19 nt, Homo sapiens
  misc_RNA (1)...(19): siRNA sense strand
gcaugaacgccaagcacca

SEQ ID NO: 2233692 - RNA, 19 nt, Homo sapiens
  misc_RNA (1)...(19): siRNA sense strand
caacuacagccgagggagu

SEQ ID NO: 2233693 - RNA, 19 nt, Homo sapiens
  misc_RNA (1)...(19): siRNA sense strand
ccaagcaccacaaggaaaa

SEQ ID NO: 2233694 - RNA, 19 nt, Homo sapiens
  misc_RNA (1)...(19): siRNA sense strand
cuauauagauucaacugga

SEQ ID NO: 2233695 - RNA, 19 nt, Homo sapiens
  misc_RNA (1)...(19): siRNA sense strand
aggacaaguugcaugagca

SEQ ID NO: 2233696 - RNA, 19 nt, Homo sapiens
  misc_RNA (1)...(19): siRNA sense strand
ccaagcaccacaagacaaa

SEQ ID NO: 2233697 - RNA, 19 nt, Homo sapiens
  misc_RNA (1)...(19): siRNA sense strand
acucauacaaggucagcaa

SEQ ID NO: 2233698 - RNA, 19 nt, Homo sapiens
  misc_RNA (1)...(19): siRNA sense strand
gugaaucagacguggcgaa

SEQ ID NO: 2233699 - RNA, 19 nt, Homo sapiens
  misc_RNA (1)...(19): siRNA sense strand
aggacaagcugcaugacca

SEQ ID NO: 2233700 - RNA, 19 nt, Homo sapiens
  misc_RNA (1)...(19): siRNA sense strand
ccucaaugucuguauggau

SEQ ID NO: 2233701 - RNA, 19 nt, Homo sapiens
  misc_RNA (1)...(19): siRNA sense strand
gaagaaugccugcugcaca

SEQ ID NO: 2233702 - RNA, 19 nt, Homo sapiens
  misc_RNA (1)...(19): siRNA sense strand
cgucaaagcuggaaggaug

SEQ ID NO: 2233703 - RNA, 19 nt, Homo sapiens
  misc_RNA (1)...(19): siRNA sense strand
aggucaagcccgaaacaaa

SEQ ID NO: 2233704 - RNA, 19 nt, Homo sapiens
  misc_RNA (1)...(19): siRNA sense strand
ccaacaaacuccugcggau

SEQ ID NO: 2233705 - RNA, 19 nt, Homo sapiens
  misc_RNA (1)...(19): siRNA sense strand
gcucagugguuguagcaga

SEQ ID NO: 2233706 - RNA, 19 nt, Homo sapiens
  misc_RNA (1)...(19): siRNA sense strand
cuaaagaggucaagcccga

SEQ ID NO: 2233707 - RNA, 19 nt, Homo sapiens
  misc_RNA (1)...(19): siRNA sense strand
uggaaggaugaaagguuaa

SEQ ID NO: 2233708 - RNA, 19 nt, Homo sapiens
  misc_RNA (1)...(19): siRNA sense strand
gaaagaagucaguggccca

SEQ ID NO: 2233709 - RNA, 19 nt, Homo sapiens
  misc_RNA (1)...(19): siRNA sense strand
gcauaaugacagugauucu

SEQ ID NO: 2233710 - RNA, 19 nt, Homo sapiens
  misc_RNA (1)...(19): siRNA sense strand
gguuuauugccgugugcua

SEQ ID NO: 2233711 - RNA, 19 nt, Homo sapiens
  misc_RNA (1)...(19): siRNA sense strand
augcauaaugacagugauu

SEQ ID NO: 2233712 - RNA, 19 nt, Homo sapiens
  misc_RNA (1)...(19): siRNA sense strand
augacaacauugagcauca

SEQ ID NO: 2233713 - RNA, 19 nt, Homo sapiens
  misc_RNA (1)...(19): siRNA sense strand
cgaugcauuuggaggacuu

SEQ ID NO: 2233714 - RNA, 19 nt, Homo sapiens
  misc_RNA (1)...(19): siRNA sense strand
caaagaaaguaaaggaucc

SEQ ID NO: 2233715 - RNA, 19 nt, Homo sapiens
  misc_RNA (1)...(19): siRNA sense strand
cuuuaacagugucagcaaa

SEQ ID NO: 2233716 - RNA, 19 nt, Homo sapiens
  misc_RNA (1)...(19): siRNA sense strand
gggagagcguguaaccgaa

SEQ ID NO: 2233717 - RNA, 19 nt, Homo sapiens
  misc_RNA (1)...(19): siRNA sense strand
ccaaagaaaguaaaggauc

SEQ ID NO: 2233718 - RNA, 19 nt, Homo sapiens
  misc_RNA (1)...(19): siRNA sense strand
ugaauggaccagagagcca

SEQ ID NO: 2233719 - RNA, 19 nt, Homo sapiens
  misc_RNA (1)...(19): siRNA sense strand
guauuuaaacagagagccu

SEQ ID NO: 2233720 - RNA, 19 nt, Homo sapiens
  misc_RNA (1)...(19): siRNA sense strand
caggagaauauguuguuau

SEQ ID NO: 2233721 - RNA, 19 nt, Homo sapiens
  misc_RNA (1)...(19): siRNA sense strand
ccuuuaacagugucagcaa

SEQ ID NO: 2233722 - RNA, 19 nt, Homo sapiens
  misc_RNA (1)...(19): siRNA sense strand
ccaccagaacccaagaaaa

SEQ ID NO: 2233723 - RNA, 19 nt, Homo sapiens
  misc_RNA (1)...(19): siRNA sense strand
aguaugaccuucuuggaca

SEQ ID NO: 2233724 - RNA, 19 nt, Homo sapiens
  misc_RNA (1)...(19): siRNA sense strand
gccaaagaaaguaaaggau

SEQ ID NO: 2233725 - RNA, 19 nt, Homo sapiens
  misc_RNA (1)...(19): siRNA sense strand
gagcacacugacuggaaga

SEQ ID NO: 2233726 - RNA, 19 nt, Homo sapiens
  misc_RNA (1)...(19): siRNA sense strand
gcugacagugagagcugaa

SEQ ID NO: 2233727 - RNA, 19 nt, Homo sapiens
  misc_RNA (1)...(19): siRNA sense strand
aaacaguagacucuggaau

SEQ ID NO: 2233728 - RNA, 19 nt, Homo sapiens
  misc_RNA (1)...(19): siRNA sense strand
gcguguaaccgaagugaag

SEQ ID NO: 2233729 - RNA, 19 nt, Homo sapiens
  misc_RNA (1)...(19): siRNA sense strand
auuuaaaggaccuaugaca

SEQ ID NO: 2233730 - RNA, 19 nt, Homo sapiens
  misc_RNA (1)...(19): siRNA sense strand
agaagauggaucacgucua

SEQ ID NO: 2233731 - RNA, 19 nt, Homo sapiens
  misc_RNA (1)...(19): siRNA sense strand
cuguacaccaugaggcuga

SEQ ID NO: 2233732 - RNA, 19 nt, Homo sapiens
  misc_RNA (1)...(19): siRNA sense strand
cagucaaguacaggagaau

SEQ ID NO: 2233733 - RNA, 19 nt, Homo sapiens
  misc_RNA (1)...(19): siRNA sense strand
agucaaguacaggagaaua

SEQ ID NO: 2233734 - RNA, 19 nt, Homo sapiens
  misc_RNA (1)...(19): siRNA sense strand
ugaagagaaagauuggcua

SEQ ID NO: 2233735 - RNA, 19 nt, Homo sapiens
  misc_RNA (1)...(19): siRNA sense strand
acagcuauggauugguuua

SEQ ID NO: 2233736 - RNA, 19 nt, Homo sapiens
  misc_RNA (1)...(19): siRNA sense strand
ccguuaugauacagaacaa

SEQ ID NO: 2233737 - RNA, 19 nt, Homo sapiens
  misc_RNA (1)...(19): siRNA sense strand
uccaagaagaugaggcuaa

SEQ ID NO: 2233738 - RNA, 19 nt, Homo sapiens
  misc_RNA (1)...(19): siRNA sense strand
acaagaagccagaaaacaa

SEQ ID NO: 2233739 - RNA, 19 nt, Homo sapiens
  misc_RNA (1)...(19): siRNA sense strand
guguaguaaaugacaagaa

SEQ ID NO: 2233740 - RNA, 19 nt, Homo sapiens
  misc_RNA (1)...(19): siRNA sense strand
cccaacaagaagccagaaa

SEQ ID NO: 2233741 - RNA, 19 nt, Homo sapiens
  misc_RNA (1)...(19): siRNA sense strand
caaucggaaaggagacaau

SEQ ID NO: 2233742 - RNA, 19 nt, Homo sapiens
  misc_RNA (1)...(19): siRNA sense strand
agaguguaguaaaugacaa

SEQ ID NO: 2233743 - RNA, 19 nt, Homo sapiens
  misc_RNA (1)...(19): siRNA sense strand
aauuuaguuuacugggcua

SEQ ID NO: 2233744 - RNA, 19 nt, Homo sapiens
  misc_RNA (1)...(19): siRNA sense strand
caaucaaucggaaaggaga

SEQ ID NO: 2233745 - RNA, 19 nt, Homo sapiens
  misc_RNA (1)...(19): siRNA sense strand
ccaacaagaagccagaaaa

SEQ ID NO: 2233746 - RNA, 19 nt, Homo sapiens
  misc_RNA (1)...(19): siRNA sense strand
ucagauacagauauggaau

SEQ ID NO: 2233747 - RNA, 19 nt, Homo sapiens
  misc_RNA (1)...(19): siRNA sense strand
uggaaagaugaacguuuaa

SEQ ID NO: 2233748 - RNA, 19 nt, Homo sapiens
  misc_RNA (1)...(19): siRNA sense strand
aauggaaagaugaacguuu

SEQ ID NO: 2233749 - RNA, 19 nt, Homo sapiens
  misc_RNA (1)...(19): siRNA sense strand
aauaugaccugcugggcca

SEQ ID NO: 2233750 - RNA, 19 nt, Homo sapiens
  misc_RNA (1)...(19): siRNA sense strand
gguuaaaucaauaugaccu

SEQ ID NO: 2233751 - RNA, 19 nt, Homo sapiens
  misc_RNA (1)...(19): siRNA sense strand
uggaguaacaacuguccua

SEQ ID NO: 2233752 - RNA, 19 nt, Homo sapiens
  misc_RNA (1)...(19): siRNA sense strand
augggaagaguguaguaaa

SEQ ID NO: 2233753 - RNA, 19 nt, Homo sapiens
  misc_RNA (1)...(19): siRNA sense strand
cuuugaaauucgggaguua

SEQ ID NO: 2233754 - RNA, 19 nt, Homo sapiens
  misc_RNA (1)...(19): siRNA sense strand
caauaugaugguaacgaaa

SEQ ID NO: 2233755 - RNA, 19 nt, Homo sapiens
  misc_RNA (1)...(19): siRNA sense strand
acagaacugaggugggaaa

SEQ ID NO: 2233756 - RNA, 19 nt, Homo sapiens
  misc_RNA (1)...(19): siRNA sense strand
gcuccagugcagagagaga

SEQ ID NO: 2233757 - RNA, 19 nt, Homo sapiens
  misc_RNA (1)...(19): siRNA sense strand
accaaaaggaggagaaauu

SEQ ID NO: 2233758 - RNA, 19 nt, Homo sapiens
  misc_RNA (1)...(19): siRNA sense strand
gcagaauacaaaugccaau

SEQ ID NO: 2233759 - RNA, 19 nt, Homo sapiens
  misc_RNA (1)...(19): siRNA sense strand
augcaugcccuuugaaauu

SEQ ID NO: 2233760 - RNA, 19 nt, Homo sapiens
  misc_RNA (1)...(19): siRNA sense strand
acugggaaguugucagcua

SEQ ID NO: 2233761 - RNA, 19 nt, Homo sapiens
  misc_RNA (1)...(19): siRNA sense strand
accuauauuccgugcauua

SEQ ID NO: 2233762 - RNA, 19 nt, Homo sapiens
  misc_RNA (1)...(19): siRNA sense strand
gugcauuaugacagugauu

SEQ ID NO: 2233763 - RNA, 19 nt, Homo sapiens
  misc_RNA (1)...(19): siRNA sense strand
ggaucuggcacaaguaaaa

SEQ ID NO: 2233764 - RNA, 19 nt, Homo sapiens
  misc_RNA (1)...(19): siRNA sense strand
cugauguugaaauggaaua

SEQ ID NO: 2233765 - RNA, 19 nt, Homo sapiens
  misc_RNA (1)...(19): siRNA sense strand
agugaaaccaucaaaucaa

SEQ ID NO: 2233766 - RNA, 19 nt, Homo sapiens
  misc_RNA (1)...(19): siRNA sense strand
gccaaaaggaagacaucaa

SEQ ID NO: 2233767 - RNA, 19 nt, Homo sapiens
  misc_RNA (1)...(19): siRNA sense strand
ucaaaucaauuacggguga

SEQ ID NO: 2233768 - RNA, 19 nt, Homo sapiens
  misc_RNA (1)...(19): siRNA sense strand
ugggaaaccauucaagcaa

SEQ ID NO: 2233769 - RNA, 19 nt, Homo sapiens
  misc_RNA (1)...(19): siRNA sense strand
cugcagaggauaaagacca

SEQ ID NO: 2233770 - RNA, 19 nt, Homo sapiens
  misc_RNA (1)...(19): siRNA sense strand
uggaauacacaauggaugu

SEQ ID NO: 2233771 - RNA, 19 nt, Homo sapiens
  misc_RNA (1)...(19): siRNA sense strand
ucuaaggacacuauggaga

SEQ ID NO: 2233772 - RNA, 19 nt, Homo sapiens
  misc_RNA (1)...(19): siRNA sense strand
acuauggagaaaucagaaa

SEQ ID NO: 2233773 - RNA, 19 nt, Homo sapiens
  misc_RNA (1)...(19): siRNA sense strand
caacagaacugagguggga

SEQ ID NO: 2233774 - RNA, 19 nt, Homo sapiens
  misc_RNA (1)...(19): siRNA sense strand
gaggagaaauugugcacag

SEQ ID NO: 2233775 - RNA, 19 nt, Homo sapiens
  misc_RNA (1)...(19): siRNA sense strand
gaaauugugcacagaaaau

SEQ ID NO: 2233776 - RNA, 19 nt, Homo sapiens
  misc_RNA (1)...(19): siRNA sense strand
uggagaaaucagaaagucu

SEQ ID NO: 2233777 - RNA, 19 nt, Homo sapiens
  misc_RNA (1)...(19): siRNA sense strand
cuuccagcuuaguucaaua

SEQ ID NO: 2233778 - RNA, 19 nt, Homo sapiens
  misc_RNA (1)...(19): siRNA sense strand
ggaucaagacugcagagga

SEQ ID NO: 2233779 - RNA, 19 nt, Homo sapiens
  misc_RNA (1)...(19): siRNA sense strand
gcauuaugacagugauucu

SEQ ID NO: 2233780 - RNA, 19 nt, Homo sapiens
  misc_RNA (1)...(19): siRNA sense strand
uaacaugguuuauuggguu

SEQ ID NO: 2233781 - RNA, 19 nt, Homo sapiens
  misc_RNA (1)...(19): siRNA sense strand
gaaccaaaaggaggagaaa

SEQ ID NO: 2233782 - RNA, 19 nt, Homo sapiens
  misc_RNA (1)...(19): siRNA sense strand
augccuauccaaagaguga

SEQ ID NO: 2233783 - RNA, 19 nt, Homo sapiens
  misc_RNA (1)...(19): siRNA sense strand
aucaauuacgggugaauau

SEQ ID NO: 2233784 - RNA, 19 nt, Homo sapiens
  misc_RNA (1)...(19): siRNA sense strand
cagugaaagaugagaccaa

SEQ ID NO: 2233785 - RNA, 19 nt, Homo sapiens
  misc_RNA (1)...(19): siRNA sense strand
cuggaaagaugaaaggcuu

SEQ ID NO: 2233786 - RNA, 19 nt, Homo sapiens
  misc_RNA (1)...(19): siRNA sense strand
uggaagcagccaagaucaa

SEQ ID NO: 2233787 - RNA, 19 nt, Homo sapiens
  misc_RNA (1)...(19): siRNA sense strand
ggaagaaguccaucgcuca

SEQ ID NO: 2233788 - RNA, 19 nt, Homo sapiens
  misc_RNA (1)...(19): siRNA sense strand
agaugaaaggcuucgguuu

SEQ ID NO: 2233789 - RNA, 19 nt, Homo sapiens
  misc_RNA (1)...(19): siRNA sense strand
gggaagaaguccaucgcuc

SEQ ID NO: 2233790 - RNA, 19 nt, Homo sapiens
  misc_RNA (1)...(19): siRNA sense strand
ccaacaagcugcugcggcu

SEQ ID NO: 2233791 - RNA, 19 nt, Homo sapiens
  misc_RNA (1)...(19): siRNA sense strand
ccgacacggaaauggagua

SEQ ID NO: 2233792 - RNA, 19 nt, Homo sapiens
  misc_RNA (1)...(19): siRNA sense strand
cggugggcacugagaacau

SEQ ID NO: 2233793 - RNA, 19 nt, Homo sapiens
  misc_RNA (1)...(19): siRNA sense strand
caguaaaacccucugaaga

SEQ ID NO: 2233794 - RNA, 19 nt, Homo sapiens
  misc_RNA (1)...(19): siRNA sense strand
agaaaaugcccuagggaaa

SEQ ID NO: 2233795 - RNA, 19 nt, Homo sapiens
  misc_RNA (1)...(19): siRNA sense strand
cugaauaauuugaugguca

SEQ ID NO: 2233796 - RNA, 19 nt, Homo sapiens
  misc_RNA (1)...(19): siRNA sense strand
aguagaagucccagaagaa

SEQ ID NO: 2233797 - RNA, 19 nt, Homo sapiens
  misc_RNA (1)...(19): siRNA sense strand
acaacuugcuugaaggcua

SEQ ID NO: 2233798 - RNA, 19 nt, Homo sapiens
  misc_RNA (1)...(19): siRNA sense strand
cagauguggagauggagua

SEQ ID NO: 2233799 - RNA, 19 nt, Homo sapiens
  misc_RNA (1)...(19): siRNA sense strand
caauaaagugcucacgaga

SEQ ID NO: 2233800 - RNA, 19 nt, Homo sapiens
  misc_RNA (1)...(19): siRNA sense strand
ugcaaaggaagaugggcua

SEQ ID NO: 2233801 - RNA, 19 nt, Homo sapiens
  misc_RNA (1)...(19): siRNA sense strand
gaauaaugcagaauggaac

SEQ ID NO: 2233802 - RNA, 19 nt, Homo sapiens
  misc_RNA (1)...(19): siRNA sense strand
auauacacuccuugcauua

SEQ ID NO: 2233803 - RNA, 19 nt, Homo sapiens
  misc_RNA (1)...(19): siRNA sense strand
auacaauggaagugaguag

SEQ ID NO: 2233804 - RNA, 19 nt, Homo sapiens
  misc_RNA (1)...(19): siRNA sense strand
gugacaauaucaaaagcua

SEQ ID NO: 2233805 - RNA, 19 nt, Homo sapiens
  misc_RNA (1)...(19): siRNA sense strand
ugaucugauuggacaaaca

SEQ ID NO: 2233806 - RNA, 19 nt, Homo sapiens
  misc_RNA (1)...(19): siRNA sense strand
aguaugaucugauuggaca

SEQ ID NO: 2233807 - RNA, 19 nt, Homo sapiens
  misc_RNA (1)...(19): siRNA sense strand
guaugaucugauuggacaa

SEQ ID NO: 2233808 - RNA, 19 nt, Homo sapiens
  misc_RNA (1)...(19): siRNA sense strand
ggaagugaguagcaguguu

SEQ ID NO: 2233809 - RNA, 19 nt, Homo sapiens
  misc_RNA (1)...(19): siRNA sense strand
gaguagcaguguugaauag

SEQ ID NO: 2233810 - RNA, 19 nt, Homo sapiens
  misc_RNA (1)...(19): siRNA sense strand
cacucaaguuugggagcua

SEQ ID NO: 2233811 - RNA, 19 nt, Homo sapiens
  misc_RNA (1)...(19): siRNA sense strand
gugcauuauucuguggcua

SEQ ID NO: 2233812 - RNA, 19 nt, Homo sapiens
  misc_RNA (1)...(19): siRNA sense strand
agugaguagcaguguugaa

SEQ ID NO: 2233813 - RNA, 19 nt, Homo sapiens
  misc_RNA (1)...(19): siRNA sense strand
ugaauaaaguccaggucga

SEQ ID NO: 2233814 - RNA, 19 nt, Homo sapiens
  misc_RNA (1)...(19): siRNA sense strand
aaacaagaccagagugcca

SEQ ID NO: 2233815 - RNA, 19 nt, Homo sapiens
  misc_RNA (1)...(19): siRNA sense strand
caauaggguagcugaccaa

SEQ ID NO: 2233816 - RNA, 19 nt, Homo sapiens
  misc_RNA (1)...(19): siRNA sense strand
gagaagaauaaacuggaga

SEQ ID NO: 2233817 - RNA, 19 nt, Homo sapiens
  misc_RNA (1)...(19): siRNA sense strand
aguacaaaaucgagagagu

SEQ ID NO: 2233818 - RNA, 19 nt, Homo sapiens
  misc_RNA (1)...(19): siRNA sense strand
cagauugcucaaaggauau

SEQ ID NO: 2233819 - RNA, 19 nt, Homo sapiens
  misc_RNA (1)...(19): siRNA sense strand
ugaaagagacaguggacag

SEQ ID NO: 2233820 - RNA, 19 nt, Homo sapiens
  misc_RNA (1)...(19): siRNA sense strand
aggucgacgcccacgguaa

SEQ ID NO: 2233821 - RNA, 19 nt, Homo sapiens
  misc_RNA (1)...(19): siRNA sense strand
agaagaauaaacuggagau

SEQ ID NO: 2233822 - RNA, 19 nt, Homo sapiens
  misc_RNA (1)...(19): siRNA sense strand
cggaaugagacgaguggcu

SEQ ID NO: 2233823 - RNA, 19 nt, Homo sapiens
  misc_RNA (1)...(19): siRNA sense strand
ccagagucgcacuaggaau

SEQ ID NO: 2233824 - RNA, 19 nt, Homo sapiens
  misc_RNA (1)...(19): siRNA sense strand
aguaacaggaguaacgaaa

SEQ ID NO: 2233825 - RNA, 19 nt, Homo sapiens
  misc_RNA (1)...(19): siRNA sense strand
cugaagucaauauggauua

SEQ ID NO: 2233826 - RNA, 19 nt, Homo sapiens
  misc_RNA (1)...(19): siRNA sense strand
cgaugauaaugcaguaaca

SEQ ID NO: 2233827 - RNA, 19 nt, Homo sapiens
  misc_RNA (1)...(19): siRNA sense strand
guuaaagagacgguggaua

SEQ ID NO: 2233828 - RNA, 19 nt, Homo sapiens
  misc_RNA (1)...(19): siRNA sense strand
cuuuauggacucagaauca

SEQ ID NO: 2233829 - RNA, 19 nt, Homo sapiens
  misc_RNA (1)...(19): siRNA sense strand
gugccaacaaugagaagau

SEQ ID NO: 2233830 - RNA, 19 nt, Homo sapiens
  misc_RNA (1)...(19): siRNA sense strand
uggaauaugcccuagucaa

SEQ ID NO: 2233831 - RNA, 19 nt, Homo sapiens
  misc_RNA (1)...(19): siRNA sense strand
ggaacgacauguggcgcaa

SEQ ID NO: 2233832 - RNA, 19 nt, Homo sapiens
  misc_RNA (1)...(19): siRNA sense strand
uggauuauaccuugacaau

SEQ ID NO: 2233833 - RNA, 19 nt, Homo sapiens
  misc_RNA (1)...(19): siRNA sense strand
uaaacuugacucuggacaa

SEQ ID NO: 2233834 - RNA, 19 nt, Homo sapiens
  misc_RNA (1)...(19): siRNA sense strand
cugcaaacauacaugccuu

SEQ ID NO: 2233835 - RNA, 19 nt, Homo sapiens
  misc_RNA (1)...(19): siRNA sense strand
agguuaucccucagcuuua

SEQ ID NO: 2233836 - RNA, 19 nt, Homo sapiens
  misc_RNA (1)...(19): siRNA sense strand
ugacaauguacuuucaaca

SEQ ID NO: 2233837 - RNA, 19 nt, Homo sapiens
  misc_RNA (1)...(19): siRNA sense strand
aguaacaggaguaacgaaa

SEQ ID NO: 2233838 - RNA, 19 nt, Homo sapiens
  misc_RNA (1)...(19): siRNA sense strand
cugaagucaauauggauua

SEQ ID NO: 2233839 - RNA, 19 nt, Homo sapiens
  misc_RNA (1)...(19): siRNA sense strand
cgaugauaaugcaguaaca

SEQ ID NO: 2233840 - RNA, 19 nt, Homo sapiens
  misc_RNA (1)...(19): siRNA sense strand
guuaaagagacgguggaua

SEQ ID NO: 2233841 - RNA, 19 nt, Homo sapiens
  misc_RNA (1)...(19): siRNA sense strand
cuuuauggacucagaauca

SEQ ID NO: 2233842 - RNA, 19 nt, Homo sapiens
  misc_RNA (1)...(19): siRNA sense strand
gugccaacaaugagaagau

SEQ ID NO: 2233843 - RNA, 19 nt, Homo sapiens
  misc_RNA (1)...(19): siRNA sense strand
uggaauaugcccuagucaa

SEQ ID NO: 2233844 - RNA, 19 nt, Homo sapiens
  misc_RNA (1)...(19): siRNA sense strand
ggaacgacauguggcgcaa

SEQ ID NO: 2233845 - RNA, 19 nt, Homo sapiens
  misc_RNA (1)...(19): siRNA sense strand
uggauuauaccuugacaau

SEQ ID NO: 2233846 - RNA, 19 nt, Homo sapiens
  misc_RNA (1)...(19): siRNA sense strand
uaaacuugacucuggacaa

SEQ ID NO: 2233847 - RNA, 19 nt, Homo sapiens
  misc_RNA (1)...(19): siRNA sense strand
cugcaaacauacaugccuu

SEQ ID NO: 2233848 - RNA, 19 nt, Homo sapiens
  misc_RNA (1)...(19): siRNA sense strand
agguuaucccucagcuuua

SEQ ID NO: 2233849 - RNA, 19 nt, Homo sapiens
  misc_RNA (1)...(19): siRNA sense strand
ugacaauguacuuucaaca

SEQ ID NO: 2233850 - RNA, 19 nt, Homo sapiens
  misc_RNA (1)...(19): siRNA sense strand
ggguggaugcucauggaaa

SEQ ID NO: 2233851 - RNA, 19 nt, Homo sapiens
  misc_RNA (1)...(19): siRNA sense strand
cagcaauauccuuugacaa

SEQ ID NO: 2233852 - RNA, 19 nt, Homo sapiens
  misc_RNA (1)...(19): siRNA sense strand
cuguaugggcucagaauca

SEQ ID NO: 2233853 - RNA, 19 nt, Homo sapiens
  misc_RNA (1)...(19): siRNA sense strand
ggacaaggcuguuaccgga

SEQ ID NO: 2233854 - RNA, 19 nt, Homo sapiens
  misc_RNA (1)...(19): siRNA sense strand
ugaucuaaccgaugugaau

SEQ ID NO: 2233855 - RNA, 19 nt, Homo sapiens
  misc_RNA (1)...(19): siRNA sense strand
gcuuucgguugaagaggaa

SEQ ID NO: 2233856 - RNA, 19 nt, Homo sapiens
  misc_RNA (1)...(19): siRNA sense strand
ugugaaugccauagacaga

SEQ ID NO: 2233857 - RNA, 19 nt, Homo sapiens
  misc_RNA (1)...(19): siRNA sense strand
cucuggaaauugaaagcua

SEQ ID NO: 2233858 - RNA, 19 nt, Homo sapiens
  misc_RNA (1)...(19): siRNA sense strand
caggaauccaguacaggaa

SEQ ID NO: 2233859 - RNA, 19 nt, Homo sapiens
  misc_RNA (1)...(19): siRNA sense strand
ggaacauguccuuugugaa

SEQ ID NO: 2233860 - RNA, 19 nt, Homo sapiens
  misc_RNA (1)...(19): siRNA sense strand
gaaaagacagccaaggcaa

SEQ ID NO: 2233861 - RNA, 19 nt, Homo sapiens
  misc_RNA (1)...(19): siRNA sense strand
ccucaaaggcagaagaagc

SEQ ID NO: 2233862 - RNA, 19 nt, Homo sapiens
  misc_RNA (1)...(19): siRNA sense strand
gaccguucaaagagcgaaa

SEQ ID NO: 2233863 - RNA, 19 nt, Homo sapiens
  misc_RNA (1)...(19): siRNA sense strand
ggcuguuaccggaguggaa

SEQ ID NO: 2233864 - RNA, 19 nt, Homo sapiens
  misc_RNA (1)...(19): siRNA sense strand
aaauugaaagcuauggcua

SEQ ID NO: 2233865 - RNA, 19 nt, Homo sapiens
  misc_RNA (1)...(19): siRNA sense strand
gauaccaggaauucagcaa

SEQ ID NO: 2233866 - RNA, 19 nt, Homo sapiens
  misc_RNA (1)...(19): siRNA sense strand
gcucagaaucaccacgaca

SEQ ID NO: 2233867 - RNA, 19 nt, Homo sapiens
  misc_RNA (1)...(19): siRNA sense strand
agaacugcacucuggaaau

SEQ ID NO: 2233868 - RNA, 19 nt, Homo sapiens
  misc_RNA (1)...(19): siRNA sense strand
ccaaaauccccuaugucaa

SEQ ID NO: 2233869 - RNA, 19 nt, Homo sapiens
  misc_RNA (1)...(19): siRNA sense strand
ucgagaagggcaugggcga

SEQ ID NO: 2233870 - RNA, 19 nt, Homo sapiens
  misc_RNA (1)...(19): siRNA sense strand
aggcaaagaaugaccguuc

SEQ ID NO: 2233871 - RNA, 19 nt, Homo sapiens
  misc_RNA (1)...(19): siRNA sense strand
aguacaggaaacagagcau

SEQ ID NO: 2233872 - RNA, 19 nt, Homo sapiens
  misc_RNA (1)...(19): siRNA sense strand
ggguggaugcucauggaaa

SEQ ID NO: 2233873 - RNA, 19 nt, Homo sapiens
  misc_RNA (1)...(19): siRNA sense strand
cagcaauauccuuugacaa

SEQ ID NO: 2233874 - RNA, 19 nt, Homo sapiens
  misc_RNA (1)...(19): siRNA sense strand
cuguaugggcucagaauca

SEQ ID NO: 2233875 - RNA, 19 nt, Homo sapiens
  misc_RNA (1)...(19): siRNA sense strand
ggacaaggcuguuaccgga

SEQ ID NO: 2233876 - RNA, 19 nt, Homo sapiens
  misc_RNA (1)...(19): siRNA sense strand
ugaucuaaccgaugugaau

SEQ ID NO: 2233877 - RNA, 19 nt, Homo sapiens
  misc_RNA (1)...(19): siRNA sense strand
gcuuucgguugaagaggaa

SEQ ID NO: 2233878 - RNA, 19 nt, Homo sapiens
  misc_RNA (1)...(19): siRNA sense strand
ugugaaugccauagacaga

SEQ ID NO: 2233879 - RNA, 19 nt, Homo sapiens
  misc_RNA (1)...(19): siRNA sense strand
cucuggaaauugaaagcua

SEQ ID NO: 2233880 - RNA, 19 nt, Homo sapiens
  misc_RNA (1)...(19): siRNA sense strand
caggaauccaguacaggaa

SEQ ID NO: 2233881 - RNA, 19 nt, Homo sapiens
  misc_RNA (1)...(19): siRNA sense strand
ggaacauguccuuugugaa

SEQ ID NO: 2233882 - RNA, 19 nt, Homo sapiens
  misc_RNA (1)...(19): siRNA sense strand
gaaaagacagccaaggcaa

SEQ ID NO: 2233883 - RNA, 19 nt, Homo sapiens
  misc_RNA (1)...(19): siRNA sense strand
ccucaaaggcagaagaagc

SEQ ID NO: 2233884 - RNA, 19 nt, Homo sapiens
  misc_RNA (1)...(19): siRNA sense strand
gaccguucaaagagcgaaa

SEQ ID NO: 2233885 - RNA, 19 nt, Homo sapiens
  misc_RNA (1)...(19): siRNA sense strand
ggcuguuaccggaguggaa

SEQ ID NO: 2233886 - RNA, 19 nt, Homo sapiens
  misc_RNA (1)...(19): siRNA sense strand
aaauugaaagcuauggcua

SEQ ID NO: 2233887 - RNA, 19 nt, Homo sapiens
  misc_RNA (1)...(19): siRNA sense strand
gauaccaggaauucagcaa

SEQ ID NO: 2233888 - RNA, 19 nt, Homo sapiens
  misc_RNA (1)...(19): siRNA sense strand
gcucagaaucaccacgaca

SEQ ID NO: 2233889 - RNA, 19 nt, Homo sapiens
  misc_RNA (1)...(19): siRNA sense strand
agaacugcacucuggaaau

SEQ ID NO: 2233890 - RNA, 19 nt, Homo sapiens
  misc_RNA (1)...(19): siRNA sense strand
ccaaaauccccuaugucaa

SEQ ID NO: 2233891 - RNA, 19 nt, Homo sapiens
  misc_RNA (1)...(19): siRNA sense strand
ucgagaagggcaugggcga

SEQ ID NO: 2233892 - RNA, 19 nt, Homo sapiens
  misc_RNA (1)...(19): siRNA sense strand
aggcaaagaaugaccguuc

SEQ ID NO: 2233893 - RNA, 19 nt, Homo sapiens
  misc_RNA (1)...(19): siRNA sense strand
aguacaggaaacagagcau

SEQ ID NO: 2233894 - RNA, 19 nt, Homo sapiens
  misc_RNA (1)...(19): siRNA sense strand
gagaugaagaguacggcua

SEQ ID NO: 2233895 - RNA, 19 nt, Homo sapiens
  misc_RNA (1)...(19): siRNA sense strand
ccaaauauauggagcacag

SEQ ID NO: 2233896 - RNA, 19 nt, Homo sapiens
  misc_RNA (1)...(19): siRNA sense strand
ccgaaguagugaagacaac

SEQ ID NO: 2233897 - RNA, 19 nt, Homo sapiens
  misc_RNA (1)...(19): siRNA sense strand
caaaaguuccugaggguga

SEQ ID NO: 2233898 - RNA, 19 nt, Homo sapiens
  misc_RNA (1)...(19): siRNA sense strand
uggcuauccacgugaagaa

SEQ ID NO: 2233899 - RNA, 19 nt, Homo sapiens
  misc_RNA (1)...(19): siRNA sense strand
guuuaucaauggaagcgaa

SEQ ID NO: 2233900 - RNA, 19 nt, Homo sapiens
  misc_RNA (1)...(19): siRNA sense strand
gauauaggagugaagccaa

SEQ ID NO: 2233901 - RNA, 19 nt, Homo sapiens
  misc_RNA (1)...(19): siRNA sense strand
ugagcagaagaaugggaua

SEQ ID NO: 2233902 - RNA, 19 nt, Homo sapiens
  misc_RNA (1)...(19): siRNA sense strand
gcaacaugguggggaaaau

SEQ ID NO: 2233903 - RNA, 19 nt, Homo sapiens
  misc_RNA (1)...(19): siRNA sense strand
gaaugauggucgagugcuc

SEQ ID NO: 2233904 - RNA, 19 nt, Homo sapiens
  misc_RNA (1)...(19): siRNA sense strand
acagcaacaugguggggaa

SEQ ID NO: 2233905 - RNA, 19 nt, Homo sapiens
  misc_RNA (1)...(19): siRNA sense strand
augagugucuggacggcaa

SEQ ID NO: 2233906 - RNA, 19 nt, Homo sapiens
  misc_RNA (1)...(19): siRNA sense strand
acauauccgcauugccaaa

SEQ ID NO: 2233907 - RNA, 19 nt, Homo sapiens
  misc_RNA (1)...(19): siRNA sense strand
uaucaauggaagcgaaguu

SEQ ID NO: 2233908 - RNA, 19 nt, Homo sapiens
  misc_RNA (1)...(19): siRNA sense strand
caauugaugcugagugcca

SEQ ID NO: 2233909 - RNA, 19 nt, Homo sapiens
  misc_RNA (1)...(19): siRNA sense strand
ccggagauuauguggucau

SEQ ID NO: 2233910 - RNA, 19 nt, Homo sapiens
  misc_RNA (1)...(19): siRNA sense strand
aauauauggagcacaggaa

SEQ ID NO: 2233911 - RNA, 19 nt, Homo sapiens
  misc_RNA (1)...(19): siRNA sense strand
cggaaaccaagcaaggaca

SEQ ID NO: 2233912 - RNA, 19 nt, Homo sapiens
  misc_RNA (1)...(19): siRNA sense strand
agaaaaugacgguguggau

SEQ ID NO: 2233913 - RNA, 19 nt, Homo sapiens
  misc_RNA (1)...(19): siRNA sense strand
gagaugaagaguacggcua

SEQ ID NO: 2233914 - RNA, 19 nt, Homo sapiens
  misc_RNA (1)...(19): siRNA sense strand
ccgaaguagugaagacaac

SEQ ID NO: 2233915 - RNA, 19 nt, Homo sapiens
  misc_RNA (1)...(19): siRNA sense strand
uggcuauccacgugaagaa

SEQ ID NO: 2233916 - RNA, 19 nt, Homo sapiens
  misc_RNA (1)...(19): siRNA sense strand
guuuaucaauggaagcgaa

SEQ ID NO: 2233917 - RNA, 19 nt, Homo sapiens
  misc_RNA (1)...(19): siRNA sense strand
ugagcagaagaaugggaua

SEQ ID NO: 2233918 - RNA, 19 nt, Homo sapiens
  misc_RNA (1)...(19): siRNA sense strand
gaaugauggucgagugcuc

SEQ ID NO: 2233919 - RNA, 19 nt, Homo sapiens
  misc_RNA (1)...(19): siRNA sense strand
augagugucuggacggcaa

SEQ ID NO: 2233920 - RNA, 19 nt, Homo sapiens
  misc_RNA (1)...(19): siRNA sense strand
acauauccgcauugccaaa

SEQ ID NO: 2233921 - RNA, 19 nt, Homo sapiens
  misc_RNA (1)...(19): siRNA sense strand
uaucaauggaagcgaaguu

SEQ ID NO: 2233922 - RNA, 19 nt, Homo sapiens
  misc_RNA (1)...(19): siRNA sense strand
caauugaugcugagugcca

SEQ ID NO: 2233923 - RNA, 19 nt, Homo sapiens
  misc_RNA (1)...(19): siRNA sense strand
ccggagauuauguggucau

SEQ ID NO: 2233924 - RNA, 19 nt, Homo sapiens
  misc_RNA (1)...(19): siRNA sense strand
cggaaaccaagcaaggaca

SEQ ID NO: 2233925 - RNA, 19 nt, Homo sapiens
  misc_RNA (1)...(19): siRNA sense strand
gagaugaagaguacggcua

SEQ ID NO: 2233926 - RNA, 19 nt, Homo sapiens
  misc_RNA (1)...(19): siRNA sense strand
ccaaauauauggagcacag

SEQ ID NO: 2233927 - RNA, 19 nt, Homo sapiens
  misc_RNA (1)...(19): siRNA sense strand
ccgaaguagugaagacaac

SEQ ID NO: 2233928 - RNA, 19 nt, Homo sapiens
  misc_RNA (1)...(19): siRNA sense strand
caaaaguuccugaggguga

SEQ ID NO: 2233929 - RNA, 19 nt, Homo sapiens
  misc_RNA (1)...(19): siRNA sense strand
uggcuauccacgugaagaa

SEQ ID NO: 2233930 - RNA, 19 nt, Homo sapiens
  misc_RNA (1)...(19): siRNA sense strand
guuuaucaauggaagcgaa

SEQ ID NO: 2233931 - RNA, 19 nt, Homo sapiens
  misc_RNA (1)...(19): siRNA sense strand
gauauaggagugaagccaa

SEQ ID NO: 2233932 - RNA, 19 nt, Homo sapiens
  misc_RNA (1)...(19): siRNA sense strand
ugagcagaagaaugggaua

SEQ ID NO: 2233933 - RNA, 19 nt, Homo sapiens
  misc_RNA (1)...(19): siRNA sense strand
gcaacaugguggggaaaau

SEQ ID NO: 2233934 - RNA, 19 nt, Homo sapiens
  misc_RNA (1)...(19): siRNA sense strand
gaaugauggucgagugcuc

SEQ ID NO: 2233935 - RNA, 19 nt, Homo sapiens
  misc_RNA (1)...(19): siRNA sense strand
acagcaacaugguggggaa

SEQ ID NO: 2233936 - RNA, 19 nt, Homo sapiens
  misc_RNA (1)...(19): siRNA sense strand
augagugucuggacggcaa

SEQ ID NO: 2233937 - RNA, 19 nt, Homo sapiens
  misc_RNA (1)...(19): siRNA sense strand
acauauccgcauugccaaa

SEQ ID NO: 2233938 - RNA, 19 nt, Homo sapiens
  misc_RNA (1)...(19): siRNA sense strand
uaucaauggaagcgaaguu

SEQ ID NO: 2233939 - RNA, 19 nt, Homo sapiens
  misc_RNA (1)...(19): siRNA sense strand
caauugaugcugagugcca

SEQ ID NO: 2233940 - RNA, 19 nt, Homo sapiens
  misc_RNA (1)...(19): siRNA sense strand
ccggagauuauguggucau

SEQ ID NO: 2233941 - RNA, 19 nt, Homo sapiens
  misc_RNA (1)...(19): siRNA sense strand
aauauauggagcacaggaa

SEQ ID NO: 2233942 - RNA, 19 nt, Homo sapiens
  misc_RNA (1)...(19): siRNA sense strand
cggaaaccaagcaaggaca

SEQ ID NO: 2233943 - RNA, 19 nt, Homo sapiens
  misc_RNA (1)...(19): siRNA sense strand
agaaaaugacgguguggau

SEQ ID NO: 2233944 - RNA, 19 nt, Homo sapiens
  misc_RNA (1)...(19): siRNA sense strand
uggaaggcauggagggcuu

SEQ ID NO: 2233945 - RNA, 19 nt, Homo sapiens
  misc_RNA (1)...(19): siRNA sense strand
cugguugacugcagagaca

SEQ ID NO: 2233946 - RNA, 19 nt, Homo sapiens
  misc_RNA (1)...(19): siRNA sense strand
cuaagaacggugaggagca

SEQ ID NO: 2233947 - RNA, 19 nt, Homo sapiens
  misc_RNA (1)...(19): siRNA sense strand
aggagcaaaccgugcaauu

SEQ ID NO: 2233948 - RNA, 19 nt, Homo sapiens
  misc_RNA (1)...(19): siRNA sense strand
uggaagugguggacauacu

SEQ ID NO: 2233949 - RNA, 19 nt, Homo sapiens
  misc_RNA (1)...(19): siRNA sense strand
uggaaggcauggagggcuu

SEQ ID NO: 2233950 - RNA, 19 nt, Homo sapiens
  misc_RNA (1)...(19): siRNA sense strand
cugguugacugcagagaca

SEQ ID NO: 2233951 - RNA, 19 nt, Homo sapiens
  misc_RNA (1)...(19): siRNA sense strand
cuaagaacggugaggagca

SEQ ID NO: 2233952 - RNA, 19 nt, Homo sapiens
  misc_RNA (1)...(19): siRNA sense strand
aggagcaaaccgugcaauu

SEQ ID NO: 2233953 - RNA, 19 nt, Homo sapiens
  misc_RNA (1)...(19): siRNA sense strand
uggaagugguggacauacu

SEQ ID NO: 2233954 - RNA, 19 nt, Homo sapiens
  misc_RNA (1)...(19): siRNA sense strand
uggcugauguggagggcaa

SEQ ID NO: 2233955 - RNA, 19 nt, Homo sapiens
  misc_RNA (1)...(19): siRNA sense strand
aagacaaugaagagagaau

SEQ ID NO: 2233956 - RNA, 19 nt, Homo sapiens
  misc_RNA (1)...(19): siRNA sense strand
ucuugaagccaaacagaaa

SEQ ID NO: 2233957 - RNA, 19 nt, Homo sapiens
  misc_RNA (1)...(19): siRNA sense strand
aauagaacgccuuggacaa

SEQ ID NO: 2233958 - RNA, 19 nt, Homo sapiens
  misc_RNA (1)...(19): siRNA sense strand
ugguuagagaagagggauu

SEQ ID NO: 2233959 - RNA, 19 nt, Homo sapiens
  misc_RNA (1)...(19): siRNA sense strand
gggcucuggcgaugggaua

SEQ ID NO: 2233960 - RNA, 19 nt, Homo sapiens
  misc_RNA (1)...(19): siRNA sense strand
augugaugagagagggaaa

SEQ ID NO: 2233961 - RNA, 19 nt, Homo sapiens
  misc_RNA (1)...(19): siRNA sense strand
gaagagggauugaugcaga

SEQ ID NO: 2233962 - RNA, 19 nt, Homo sapiens
  misc_RNA (1)...(19): siRNA sense strand
agaugguguuugaugggaa

SEQ ID NO: 2233963 - RNA, 19 nt, Homo sapiens
  misc_RNA (1)...(19): siRNA sense strand
aagucaaggagaaaggaau

SEQ ID NO: 2233964 - RNA, 19 nt, Homo sapiens
  misc_RNA (1)...(19): siRNA sense strand
gaaggauucuugaagccaa

SEQ ID NO: 2233965 - RNA, 19 nt, Homo sapiens
  misc_RNA (1)...(19): siRNA sense strand
ccgagaaggauaugagaug

SEQ ID NO: 2233966 - RNA, 19 nt, Homo sapiens
  misc_RNA (1)...(19): siRNA sense strand
aaggauucuugaagccaaa

SEQ ID NO: 2233967 - RNA, 19 nt, Homo sapiens
  misc_RNA (1)...(19): siRNA sense strand
guugauaaauguuuggagu

SEQ ID NO: 2233968 - RNA, 19 nt, Homo sapiens
  misc_RNA (1)...(19): siRNA sense strand
uggaguuggcagaguauuu

SEQ ID NO: 2233969 - RNA, 19 nt, Homo sapiens
  misc_RNA (1)...(19): siRNA sense strand
gcuuuaagauguucccaga

SEQ ID NO: 2233970 - RNA, 19 nt, Homo sapiens
  misc_RNA (1)...(19): siRNA sense strand
cccagaagucaaggagaaa

SEQ ID NO: 2233971 - RNA, 19 nt, Homo sapiens
  misc_RNA (1)...(19): siRNA sense strand
uggaacagacagcgugauu

SEQ ID NO: 2233972 - RNA, 19 nt, Homo sapiens
  misc_RNA (1)...(19): siRNA sense strand
aaauagaacgccuuggaca

SEQ ID NO: 2233973 - RNA, 19 nt, Homo sapiens
  misc_RNA (1)...(19): siRNA sense strand
gcagacuggcugacaucaa

SEQ ID NO: 2233974 - RNA, 19 nt, Homo sapiens
  misc_RNA (1)...(19): siRNA sense strand
cacacaagaugaugggagu

SEQ ID NO: 2233975 - RNA, 19 nt, Homo sapiens
  misc_RNA (1)...(19): siRNA sense strand
aagagggauugaugcagaa

SEQ ID NO: 2233976 - RNA, 19 nt, Homo sapiens
  misc_RNA (1)...(19): siRNA sense strand
gguuugaagcgcauguuga

SEQ ID NO: 2233977 - RNA, 19 nt, Homo sapiens
  misc_RNA (1)...(19): siRNA sense strand
ggaagauggcucuggggau

SEQ ID NO: 2233978 - RNA, 19 nt, Homo sapiens
  misc_RNA (1)...(19): siRNA sense strand
cacuaaagaaaaugagaga

SEQ ID NO: 2233979 - RNA, 19 nt, Homo sapiens
  misc_RNA (1)...(19): siRNA sense strand
gagaaggauaugagauggu

SEQ ID NO: 2233980 - RNA, 19 nt, Homo sapiens
  misc_RNA (1)...(19): siRNA sense strand
gccaaagaguuuauggaca

SEQ ID NO: 2233981 - RNA, 19 nt, Homo sapiens
  misc_RNA (1)...(19): siRNA sense strand
cuauaaaguuugagggagc

SEQ ID NO: 2233982 - RNA, 19 nt, Homo sapiens
  misc_RNA (1)...(19): siRNA sense strand
caguuagaguccagcaaaa

SEQ ID NO: 2233983 - RNA, 19 nt, Homo sapiens
  misc_RNA (1)...(19): siRNA sense strand
ccaaagaguuuauggacag

SEQ ID NO: 2233984 - RNA, 19 nt, Homo sapiens
  misc_RNA (1)...(19): siRNA sense strand
agcgauuacuggagggaga

SEQ ID NO: 2233985 - RNA, 19 nt, Homo sapiens
  misc_RNA (1)...(19): siRNA sense strand
uggcaguggaggaagggaa

SEQ ID NO: 2233986 - RNA, 19 nt, Homo sapiens
  misc_RNA (1)...(19): siRNA sense strand
cuggaauaaugcugaccaa

SEQ ID NO: 2233987 - RNA, 19 nt, Homo sapiens
  misc_RNA (1)...(19): siRNA sense strand
ggacagacauggaauccca

SEQ ID NO: 2233988 - RNA, 19 nt, Homo sapiens
  misc_RNA (1)...(19): siRNA sense strand
uauaauuggcaguggagga

SEQ ID NO: 2233989 - RNA, 19 nt, Homo sapiens
  misc_RNA (1)...(19): siRNA sense strand
ggguagaguucuugcaguc

SEQ ID NO: 2233990 - RNA, 19 nt, Homo sapiens
  misc_RNA (1)...(19): siRNA sense strand
gcacaggaccauaagcgau

SEQ ID NO: 2233991 - RNA, 19 nt, Homo sapiens
  misc_RNA (1)...(19): siRNA sense strand
uguagagauaacaggguuu

SEQ ID NO: 2233992 - RNA, 19 nt, Homo sapiens
  misc_RNA (1)...(19): siRNA sense strand
guguagagauaacaggguu

SEQ ID NO: 2233993 - RNA, 19 nt, Homo sapiens
  misc_RNA (1)...(19): siRNA sense strand
caagagaucaugcaggaga

SEQ ID NO: 2233994 - RNA, 19 nt, Homo sapiens
  misc_RNA (1)...(19): siRNA sense strand
cugcugggauuguugggaa

SEQ ID NO: 2233995 - RNA, 19 nt, Homo sapiens
  misc_RNA (1)...(19): siRNA sense strand
ccgcacaauggaaggcuuu

SEQ ID NO: 2233996 - RNA, 19 nt, Homo sapiens
  misc_RNA (1)...(19): siRNA sense strand
ugugaaggccaguggucuu

SEQ ID NO: 2233997 - RNA, 19 nt, Homo sapiens
  misc_RNA (1)...(19): siRNA sense strand
gcaugcagcaagaggguac

SEQ ID NO: 2233998 - RNA, 19 nt, Homo sapiens
  misc_RNA (1)...(19): siRNA sense strand
uggcaaaguaguaacucau

SEQ ID NO: 2233999 - RNA, 19 nt, Homo sapiens
  misc_RNA (1)...(19): siRNA sense strand
ccugcaaagcuguacaaga

SEQ ID NO: 2234000 - RNA, 19 nt, Homo sapiens
  misc_RNA (1)...(19): siRNA sense strand
auuuguaguuguuggacca

SEQ ID NO: 2234001 - RNA, 19 nt, Homo sapiens
  misc_RNA (1)...(19): siRNA sense strand
cuguugucauggcaaguaa

SEQ ID NO: 2234002 - RNA, 19 nt, Homo sapiens
  misc_RNA (1)...(19): siRNA sense strand
gccaaagaguuuauggaca

SEQ ID NO: 2234003 - RNA, 19 nt, Homo sapiens
  misc_RNA (1)...(19): siRNA sense strand
cuauaaaguuugagggagc

SEQ ID NO: 2234004 - RNA, 19 nt, Homo sapiens
  misc_RNA (1)...(19): siRNA sense strand
caguuagaguccagcaaaa

SEQ ID NO: 2234005 - RNA, 19 nt, Homo sapiens
  misc_RNA (1)...(19): siRNA sense strand
ccaaagaguuuauggacag

SEQ ID NO: 2234006 - RNA, 19 nt, Homo sapiens
  misc_RNA (1)...(19): siRNA sense strand
agcgauuacuggagggaga

SEQ ID NO: 2234007 - RNA, 19 nt, Homo sapiens
  misc_RNA (1)...(19): siRNA sense strand
uggcaguggaggaagggaa

SEQ ID NO: 2234008 - RNA, 19 nt, Homo sapiens
  misc_RNA (1)...(19): siRNA sense strand
cuggaauaaugcugaccaa

SEQ ID NO: 2234009 - RNA, 19 nt, Homo sapiens
  misc_RNA (1)...(19): siRNA sense strand
ggacagacauggaauccca

SEQ ID NO: 2234010 - RNA, 19 nt, Homo sapiens
  misc_RNA (1)...(19): siRNA sense strand
uauaauuggcaguggagga

SEQ ID NO: 2234011 - RNA, 19 nt, Homo sapiens
  misc_RNA (1)...(19): siRNA sense strand
ggguagaguucuugcaguc

SEQ ID NO: 2234012 - RNA, 19 nt, Homo sapiens
  misc_RNA (1)...(19): siRNA sense strand
gcacaggaccauaagcgau

SEQ ID NO: 2234013 - RNA, 19 nt, Homo sapiens
  misc_RNA (1)...(19): siRNA sense strand
uguagagauaacaggguuu

SEQ ID NO: 2234014 - RNA, 19 nt, Homo sapiens
  misc_RNA (1)...(19): siRNA sense strand
guguagagauaacaggguu

SEQ ID NO: 2234015 - RNA, 19 nt, Homo sapiens
  misc_RNA (1)...(19): siRNA sense strand
caagagaucaugcaggaga

SEQ ID NO: 2234016 - RNA, 19 nt, Homo sapiens
  misc_RNA (1)...(19): siRNA sense strand
cugcugggauuguugggaa

SEQ ID NO: 2234017 - RNA, 19 nt, Homo sapiens
  misc_RNA (1)...(19): siRNA sense strand
ccgcacaauggaaggcuuu

SEQ ID NO: 2234018 - RNA, 19 nt, Homo sapiens
  misc_RNA (1)...(19): siRNA sense strand
ugugaaggccaguggucuu

SEQ ID NO: 2234019 - RNA, 19 nt, Homo sapiens
  misc_RNA (1)...(19): siRNA sense strand
gcaugcagcaagaggguac

SEQ ID NO: 2234020 - RNA, 19 nt, Homo sapiens
  misc_RNA (1)...(19): siRNA sense strand
uggcaaaguaguaacucau

SEQ ID NO: 2234021 - RNA, 19 nt, Homo sapiens
  misc_RNA (1)...(19): siRNA sense strand
ccugcaaagcuguacaaga

SEQ ID NO: 2234022 - RNA, 19 nt, Homo sapiens
  misc_RNA (1)...(19): siRNA sense strand
auuuguaguuguuggacca

SEQ ID NO: 2234023 - RNA, 19 nt, Homo sapiens
  misc_RNA (1)...(19): siRNA sense strand
cuguugucauggcaaguaa

SEQ ID NO: 2234024 - RNA, 19 nt, Homo sapiens
  misc_RNA (1)...(19): siRNA sense strand
aggaagaagaagaagccua

SEQ ID NO: 2234025 - RNA, 19 nt, Homo sapiens
  misc_RNA (1)...(19): siRNA sense strand
ggcuggaggaagaagaaga

SEQ ID NO: 2234026 - RNA, 19 nt, Homo sapiens
  misc_RNA (1)...(19): siRNA sense strand
aagaagaagccuauggaug

SEQ ID NO: 2234027 - RNA, 19 nt, Homo sapiens
  misc_RNA (1)...(19): siRNA sense strand
aaguagaagucguggcuca

SEQ ID NO: 2234028 - RNA, 19 nt, Homo sapiens
  misc_RNA (1)...(19): siRNA sense strand
ggaacuggcugaacggaga

SEQ ID NO: 2234029 - RNA, 19 nt, Homo sapiens
  misc_RNA (1)...(19): siRNA sense strand
gccaggaccucaugggcaa

SEQ ID NO: 2234030 - RNA, 19 nt, Homo sapiens
  misc_RNA (1)...(19): siRNA sense strand
gcguacaagcacagcgaca

SEQ ID NO: 2234031 - RNA, 19 nt, Homo sapiens
  misc_RNA (1)...(19): siRNA sense strand
acgaaugcagccaggagaa

SEQ ID NO: 2234032 - RNA, 19 nt, Homo sapiens
  misc_RNA (1)...(19): siRNA sense strand
ucaucaaggucaacaggga

SEQ ID NO: 2234033 - RNA, 19 nt, Homo sapiens
  misc_RNA (1)...(19): siRNA sense strand
augcagugcuucucgguga

SEQ ID NO: 2234034 - RNA, 19 nt, Homo sapiens
  misc_RNA (1)...(19): siRNA sense strand
ugaaagugaacacgaggau

SEQ ID NO: 2234035 - RNA, 19 nt, Homo sapiens
  misc_RNA (1)...(19): siRNA sense strand
gggaagaguaccagggcaa

SEQ ID NO: 2234036 - RNA, 19 nt, Homo sapiens
  misc_RNA (1)...(19): siRNA sense strand
ugguggaucuugagagaaa

SEQ ID NO: 2234037 - RNA, 19 nt, Homo sapiens
  misc_RNA (1)...(19): siRNA sense strand
ggauuuaaugcgagagcaa

SEQ ID NO: 2234038 - RNA, 19 nt, Homo sapiens
  misc_RNA (1)...(19): siRNA sense strand
gguuagaauccauggacaa

SEQ ID NO: 2234039 - RNA, 19 nt, Homo sapiens
  misc_RNA (1)...(19): siRNA sense strand
aaucagagauggaggcuau

SEQ ID NO: 2234040 - RNA, 19 nt, Homo sapiens
  misc_RNA (1)...(19): siRNA sense strand
gaauguaagcaaugagauu

SEQ ID NO: 2234041 - RNA, 19 nt, Homo sapiens
  misc_RNA (1)...(19): siRNA sense strand
ucacaguaaugaagggcaa

SEQ ID NO: 2234042 - RNA, 19 nt, Homo sapiens
  misc_RNA (1)...(19): siRNA sense strand
gcagcaaguacuaggcaaa

SEQ ID NO: 2234043 - RNA, 19 nt, Homo sapiens
  misc_RNA (1)...(19): siRNA sense strand
ucgaauggcuacagagaga

SEQ ID NO: 2234044 - RNA, 19 nt, Homo sapiens
  misc_RNA (1)...(19): siRNA sense strand
ugugggaacucaugggaaa

SEQ ID NO: 2234045 - RNA, 19 nt, Homo sapiens
  misc_RNA (1)...(19): siRNA sense strand
cuuagagaguauaggguau

SEQ ID NO: 2234046 - RNA, 19 nt, Homo sapiens
  misc_RNA (1)...(19): siRNA sense strand
ugggaaagguccugcguau

SEQ ID NO: 2234047 - RNA, 19 nt, Homo sapiens
  misc_RNA (1)...(19): siRNA sense strand
ggauuuggcauguggagaa

SEQ ID NO: 2234048 - RNA, 19 nt, Homo sapiens
  misc_RNA (1)...(19): siRNA sense strand
uggcgaacguggagaacuu

SEQ ID NO: 2234049 - RNA, 19 nt, Homo sapiens
  misc_RNA (1)...(19): siRNA sense strand
cugcaaugccagagugaca

SEQ ID NO: 2234050 - RNA, 19 nt, Homo sapiens
  misc_RNA (1)...(19): siRNA sense strand
ggacaugccuuguggugga

SEQ ID NO: 2234051 - RNA, 19 nt, Homo sapiens
  misc_RNA (1)...(19): siRNA sense strand
cauuagagagggaaggauu

SEQ ID NO: 2234052 - RNA, 19 nt, Homo sapiens
  misc_RNA (1)...(19): siRNA sense strand
uggaaaugguuaugggcca

SEQ ID NO: 2234053 - RNA, 19 nt, Homo sapiens
  misc_RNA (1)...(19): siRNA sense strand
cgaauggaauguaugacaa

SEQ ID NO: 2234054 - RNA, 19 nt, Homo sapiens
  misc_RNA (1)...(19): siRNA sense strand
ggaaaugguuaugggccaa

SEQ ID NO: 2234055 - RNA, 19 nt, Homo sapiens
  misc_RNA (1)...(19): siRNA sense strand
ggaugaauuaacuggagaa

SEQ ID NO: 2234056 - RNA, 19 nt, Homo sapiens
  misc_RNA (1)...(19): siRNA sense strand
cguguauccuggagaaaga

SEQ ID NO: 2234057 - RNA, 19 nt, Homo sapiens
  misc_RNA (1)...(19): siRNA sense strand
aauaugaggcaaagaguuu

SEQ ID NO: 2234058 - RNA, 19 nt, Homo sapiens
  misc_RNA (1)...(19): siRNA sense strand
cuacauugccauugguuau

SEQ ID NO: 2234059 - RNA, 19 nt, Homo sapiens
  misc_RNA (1)...(19): siRNA sense strand
aggacaauacuguggaaau

SEQ ID NO: 2234060 - RNA, 19 nt, Homo sapiens
  misc_RNA (1)...(19): siRNA sense strand
gcgaauggacucucagcaa

SEQ ID NO: 2234061 - RNA, 19 nt, Homo sapiens
  misc_RNA (1)...(19): siRNA sense strand
ccaaauaugacgacuguga

SEQ ID NO: 2234062 - RNA, 19 nt, Homo sapiens
  misc_RNA (1)...(19): siRNA sense strand
gggaauauucuauggcuca

SEQ ID NO: 2234063 - RNA, 19 nt, Homo sapiens
  misc_RNA (1)...(19): siRNA sense strand
agauggacauagaagaaau

SEQ ID NO: 2234064 - RNA, 19 nt, Homo sapiens
  misc_RNA (1)...(19): siRNA sense strand
cuagagaaacuguguagua

SEQ ID NO: 2234065 - RNA, 19 nt, Homo sapiens
  misc_RNA (1)...(19): siRNA sense strand
ggaaacacaaugaaaguca

SEQ ID NO: 2234066 - RNA, 19 nt, Homo sapiens
  misc_RNA (1)...(19): siRNA sense strand
uggaggaagccauuggaaa

SEQ ID NO: 2234067 - RNA, 19 nt, Homo sapiens
  misc_RNA (1)...(19): siRNA sense strand
gcgcauuugaacuggaauu

SEQ ID NO: 2234068 - RNA, 19 nt, Homo sapiens
  misc_RNA (1)...(19): siRNA sense strand
aagaaaugggagaggcuuu

SEQ ID NO: 2234069 - RNA, 19 nt, Homo sapiens
  misc_RNA (1)...(19): siRNA sense strand
gugaaaccuuacuuggaaa

SEQ ID NO: 2234070 - RNA, 19 nt, Homo sapiens
  misc_RNA (1)...(19): siRNA sense strand
gggcagauacuguggaaac

SEQ ID NO: 2234071 - RNA, 19 nt, Homo sapiens
  misc_RNA (1)...(19): siRNA sense strand
caaagauuaccuugagauu

SEQ ID NO: 2234072 - RNA, 19 nt, Homo sapiens
  misc_RNA (1)...(19): siRNA sense strand
uggaaaugagcuagcaauu

SEQ ID NO: 2234073 - RNA, 19 nt, Homo sapiens
  misc_RNA (1)...(19): siRNA sense strand
auugcaaggugguggauuu

SEQ ID NO: 2234074 - RNA, 19 nt, Homo sapiens
  misc_RNA (1)...(19): siRNA sense strand
gcugguggaucuugagaga

SEQ ID NO: 2234075 - RNA, 19 nt, Homo sapiens
  misc_RNA (1)...(19): siRNA sense strand
cagcauguuugcaagacua

SEQ ID NO: 2234076 - RNA, 19 nt, Homo sapiens
  misc_RNA (1)...(19): siRNA sense strand
uaaugaagggcaaggauuu

SEQ ID NO: 2234077 - RNA, 19 nt, Homo sapiens
  misc_RNA (1)...(19): siRNA sense strand
cuggaguuguaaacagaaa

SEQ ID NO: 2234078 - RNA, 19 nt, Homo sapiens
  misc_RNA (1)...(19): siRNA sense strand
cuacgauuuaagagugaua

SEQ ID NO: 2234079 - RNA, 19 nt, Homo sapiens
  misc_RNA (1)...(19): siRNA sense strand
ggaauaaauggaagcuuca

SEQ ID NO: 2234080 - RNA, 19 nt, Homo sapiens
  misc_RNA (1)...(19): siRNA sense strand
ggaggaagccauuggaaac

SEQ ID NO: 2234081 - RNA, 19 nt, Homo sapiens
  misc_RNA (1)...(19): siRNA sense strand
gaguauaggguauccgaau

SEQ ID NO: 2234082 - RNA, 19 nt, Homo sapiens
  misc_RNA (1)...(19): siRNA sense strand
gaacuugaaagaagcacaa

SEQ ID NO: 2234083 - RNA, 19 nt, Homo sapiens
  misc_RNA (1)...(19): siRNA sense strand
agggaaggauuuaaugcua

SEQ ID NO: 2234084 - RNA, 19 nt, Homo sapiens
  misc_RNA (1)...(19): siRNA sense strand
gggcaaguacuguggaacu

SEQ ID NO: 2234085 - RNA, 19 nt, Homo sapiens
  misc_RNA (1)...(19): siRNA sense strand
acgaguuucuucagguuua

SEQ ID NO: 2234086 - RNA, 19 nt, Homo sapiens
  misc_RNA (1)...(19): siRNA sense strand
caccaaacaaggaguguau

SEQ ID NO: 2234087 - RNA, 19 nt, Homo sapiens
  misc_RNA (1)...(19): siRNA sense strand
guaaugaagggcaaggauu

SEQ ID NO: 2234088 - RNA, 19 nt, Homo sapiens
  misc_RNA (1)...(19): siRNA sense strand
uuuagguugugguggaaua

SEQ ID NO: 2234089 - RNA, 19 nt, Homo sapiens
  misc_RNA (1)...(19): siRNA sense strand
acaaggugaucgagcucaa

SEQ ID NO: 2234090 - RNA, 19 nt, Homo sapiens
  misc_RNA (1)...(19): siRNA sense strand
uguuaacgaaugugagauu

SEQ ID NO: 2234091 - RNA, 19 nt, Homo sapiens
  misc_RNA (1)...(19): siRNA sense strand
guaccagggugacggaaga

SEQ ID NO: 2234092 - RNA, 19 nt, Homo sapiens
  misc_RNA (1)...(19): siRNA sense strand
uuucagagcuguuuaucaa

SEQ ID NO: 2234093 - RNA, 19 nt, Homo sapiens
  misc_RNA (1)...(19): siRNA sense strand
ccggcagacaugugagaau

SEQ ID NO: 2234094 - RNA, 19 nt, Homo sapiens
  misc_RNA (1)...(19): siRNA sense strand
caggcaacacugugaacua

SEQ ID NO: 2234095 - RNA, 19 nt, Homo sapiens
  misc_RNA (1)...(19): siRNA sense strand
gcucaguaauauuugccua

SEQ ID NO: 2234096 - RNA, 19 nt, Homo sapiens
  misc_RNA (1)...(19): siRNA sense strand
uggagguuguggugggauu

SEQ ID NO: 2234097 - RNA, 19 nt, Homo sapiens
  misc_RNA (1)...(19): siRNA sense strand
gcuaagaaaugguccugau

SEQ ID NO: 2234098 - RNA, 19 nt, Homo sapiens
  misc_RNA (1)...(19): siRNA sense strand
cuguauaccaucaccguua

SEQ ID NO: 2234099 - RNA, 19 nt, Homo sapiens
  misc_RNA (1)...(19): siRNA sense strand
gggaugaauuaacuggaga

SEQ ID NO: 2234100 - RNA, 19 nt, Homo sapiens
  misc_RNA (1)...(19): siRNA sense strand
uggagauccgugaaggaaa

SEQ ID NO: 2234101 - RNA, 19 nt, Homo sapiens
  misc_RNA (1)...(19): siRNA sense strand
cgggcuggccugacaguua

SEQ ID NO: 2234102 - RNA, 19 nt, Homo sapiens
  misc_RNA (1)...(19): siRNA sense strand
ggcuacagagagaggaaau

SEQ ID NO: 2234103 - RNA, 19 nt, Homo sapiens
  misc_RNA (1)...(19): siRNA sense strand
gcggaaguccaaagggaaa

SEQ ID NO: 2234104 - RNA, 19 nt, Homo sapiens
  misc_RNA (1)...(19): siRNA sense strand
augaaaugcuugaaggcaa

SEQ ID NO: 2234105 - RNA, 19 nt, Homo sapiens
  misc_RNA (1)...(19): siRNA sense strand
gugaaagggauaaaguaaa

SEQ ID NO: 2234106 - RNA, 19 nt, Homo sapiens
  misc_RNA (1)...(19): siRNA sense strand
gggauaaaguaaacgacau

SEQ ID NO: 2234107 - RNA, 19 nt, Homo sapiens
  misc_RNA (1)...(19): siRNA sense strand
gguuauuaccauuggaaaa

SEQ ID NO: 2234108 - RNA, 19 nt, Homo sapiens
  misc_RNA (1)...(19): siRNA sense strand
ugugaaagggauaaaguaa

SEQ ID NO: 2234109 - RNA, 19 nt, Homo sapiens
  misc_RNA (1)...(19): siRNA sense strand
cuucaugagccucgggaua

SEQ ID NO: 2234110 - RNA, 19 nt, Homo sapiens
  misc_RNA (1)...(19): siRNA sense strand
ccaugaaaguugguggaaa

SEQ ID NO: 2234111 - RNA, 19 nt, Homo sapiens
  misc_RNA (1)...(19): siRNA sense strand
agucaagggccgaggcgaa

SEQ ID NO: 2234112 - RNA, 19 nt, Homo sapiens
  misc_RNA (1)...(19): siRNA sense strand
caugaaaguugguggaaac

SEQ ID NO: 2234113 - RNA, 19 nt, Homo sapiens
  misc_RNA (1)...(19): siRNA sense strand
cgauaaaggugaaugugga

SEQ ID NO: 2234114 - RNA, 19 nt, Homo sapiens
  misc_RNA (1)...(19): siRNA sense strand
agaacuuguauaugggaaa

SEQ ID NO: 2234115 - RNA, 19 nt, Homo sapiens
  misc_RNA (1)...(19): siRNA sense strand
ugaagauggaagagaaaca

SEQ ID NO: 2234116 - RNA, 19 nt, Homo sapiens
  misc_RNA (1)...(19): siRNA sense strand
ggaaugggaugguuggaga

SEQ ID NO: 2234117 - RNA, 19 nt, Homo sapiens
  misc_RNA (1)...(19): siRNA sense strand
cugcuaucaaugugggaaa

SEQ ID NO: 2234118 - RNA, 19 nt, Homo sapiens
  misc_RNA (1)...(19): siRNA sense strand
ugggaugguuggagaacuu

SEQ ID NO: 2234119 - RNA, 19 nt, Homo sapiens
  misc_RNA (1)...(19): siRNA sense strand
ugagagaagaggugauuga

SEQ ID NO: 2234120 - RNA, 19 nt, Homo sapiens
  misc_RNA (1)...(19): siRNA sense strand
uuugaagauggaagagaaa

SEQ ID NO: 2234121 - RNA, 19 nt, Homo sapiens
  misc_RNA (1)...(19): siRNA sense strand
aacacaaaguagugaauca

SEQ ID NO: 2234122 - RNA, 19 nt, Homo sapiens
  misc_RNA (1)...(19): siRNA sense strand
gggccgaggcgaaacgaau

SEQ ID NO: 2234123 - RNA, 19 nt, Homo sapiens
  misc_RNA (1)...(19): siRNA sense strand
cguauguuaugaugaagaa

SEQ ID NO: 2234124 - RNA, 19 nt, Homo sapiens
  misc_RNA (1)...(19): siRNA sense strand
cgccaaacauuguggguuc

SEQ ID NO: 2234125 - RNA, 19 nt, Homo sapiens
  misc_RNA (1)...(19): siRNA sense strand
gguuggagaacuuguauau

SEQ ID NO: 2234126 - RNA, 19 nt, Homo sapiens
  misc_RNA (1)...(19): siRNA sense strand
gagaacuuguauaugggaa

SEQ ID NO: 2234127 - RNA, 19 nt, Homo sapiens
  misc_RNA (1)...(19): siRNA sense strand
gcggcaaggaugcgauauu

SEQ ID NO: 2234128 - RNA, 19 nt, Homo sapiens
  misc_RNA (1)...(19): siRNA sense strand
guuacaacguauauggcau

SEQ ID NO: 2234129 - RNA, 19 nt, Homo sapiens
  misc_RNA (1)...(19): siRNA sense strand
cuauuacccuugugagaga

SEQ ID NO: 2234130 - RNA, 19 nt, Homo sapiens
  misc_RNA (1)...(19): siRNA sense strand
guguaauucuggacuguga

SEQ ID NO: 2234131 - RNA, 19 nt, Homo sapiens
  misc_RNA (1)...(19): siRNA sense strand
ccaaagggaaauaugccua

SEQ ID NO: 2234132 - RNA, 19 nt, Homo sapiens
  misc_RNA (1)...(19): siRNA sense strand
uggcaaagaaugcacagaa

SEQ ID NO: 2234133 - RNA, 19 nt, Homo sapiens
  misc_RNA (1)...(19): siRNA sense strand
ugacaagaagucuguaaau

SEQ ID NO: 2234134 - RNA, 19 nt, Homo sapiens
  misc_RNA (1)...(19): siRNA sense strand
aguuugaccagaauggaaa

SEQ ID NO: 2234135 - RNA, 19 nt, Homo sapiens
  misc_RNA (1)...(19): siRNA sense strand
ggacugugaaagggauaaa

SEQ ID NO: 2234136 - RNA, 19 nt, Homo sapiens
  misc_RNA (1)...(19): siRNA sense strand
ccuaaggaagcaaagaauu

SEQ ID NO: 2234137 - RNA, 19 nt, Homo sapiens
  misc_RNA (1)...(19): siRNA sense strand
gggaaagcugauauugcaa

SEQ ID NO: 2234138 - RNA, 19 nt, Homo sapiens
  misc_RNA (1)...(19): siRNA sense strand
gaauacuaucaaugggaca

SEQ ID NO: 2234139 - RNA, 19 nt, Homo sapiens
  misc_RNA (1)...(19): siRNA sense strand
gauaaaauguggaccuaca

SEQ ID NO: 2234140 - RNA, 19 nt, Homo sapiens
  misc_RNA (1)...(19): siRNA sense strand
gcacagaauauuaacccau

SEQ ID NO: 2234141 - RNA, 19 nt, Homo sapiens
  misc_RNA (1)...(19): siRNA sense strand
ccucuaugacagugacaga

SEQ ID NO: 2234142 - RNA, 19 nt, Homo sapiens
  misc_RNA (1)...(19): siRNA sense strand
ggaguuugaagauggaaga

SEQ ID NO: 2234143 - RNA, 19 nt, Homo sapiens
  misc_RNA (1)...(19): siRNA sense strand
ccacgaugaacgaguacau

SEQ ID NO: 2234144 - RNA, 19 nt, Homo sapiens
  misc_RNA (1)...(19): siRNA sense strand
uggcaucgaaaguguuaaa

SEQ ID NO: 2234145 - RNA, 19 nt, Homo sapiens
  misc_RNA (1)...(19): siRNA sense strand
gaagcaaagaauugaaauc

SEQ ID NO: 2234146 - RNA, 19 nt, Homo sapiens
  misc_RNA (1)...(19): siRNA sense strand
gugcggaaguccaaaggga

SEQ ID NO: 2234147 - RNA, 19 nt, Homo sapiens
  misc_RNA (1)...(19): siRNA sense strand
gaaugggaugguuggagaa

SEQ ID NO: 2234148 - RNA, 19 nt, Homo sapiens
  misc_RNA (1)...(19): siRNA sense strand
agauggaagagaaacacaa

SEQ ID NO: 2234149 - RNA, 19 nt, Homo sapiens
  misc_RNA (1)...(19): siRNA sense strand
ucgaaagugcugaggaucu

SEQ ID NO: 2234150 - RNA, 19 nt, Homo sapiens
  misc_RNA (1)...(19): siRNA sense strand
uggaauuuacugauggaga

SEQ ID NO: 2234151 - RNA, 19 nt, Homo sapiens
  misc_RNA (1)...(19): siRNA sense strand
uaugaugauucguugguau

SEQ ID NO: 2234152 - RNA, 19 nt, Homo sapiens
  misc_RNA (1)...(19): siRNA sense strand
cgaugaacgaguacauuga

SEQ ID NO: 2234153 - RNA, 19 nt, Homo sapiens
  misc_RNA (1)...(19): siRNA sense strand
ggacucuggaaguaaggaa

SEQ ID NO: 2234154 - RNA, 19 nt, Homo sapiens
  misc_RNA (1)...(19): siRNA sense strand
ccaaucaguuugagggcaa

SEQ ID NO: 2234155 - RNA, 19 nt, Homo sapiens
  misc_RNA (1)...(19): siRNA sense strand
gagaagaacuggcagguga

SEQ ID NO: 2234156 - RNA, 19 nt, Homo sapiens
  misc_RNA (1)...(19): siRNA sense strand
caaccacagaggagggaua

SEQ ID NO: 2234157 - RNA, 19 nt, Homo sapiens
  misc_RNA (1)...(19): siRNA sense strand
gggugaaggugauggcuga

SEQ ID NO: 2234158 - RNA, 19 nt, Homo sapiens
  misc_RNA (1)...(19): siRNA sense strand
ggaauggcauggugggaga

SEQ ID NO: 2234159 - RNA, 19 nt, Homo sapiens
  misc_RNA (1)...(19): siRNA sense strand
gggccagauuauaaagcua

SEQ ID NO: 2234160 - RNA, 19 nt, Homo sapiens
  misc_RNA (1)...(19): siRNA sense strand
caacgaagccauacggaca

SEQ ID NO: 2234161 - RNA, 19 nt, Homo sapiens
  misc_RNA (1)...(19): siRNA sense strand
cagugaagaguuugaggaa

SEQ ID NO: 2234162 - RNA, 19 nt, Homo sapiens
  misc_RNA (1)...(19): siRNA sense strand
cuagcgaagcagacagaaa

SEQ ID NO: 2234163 - RNA, 19 nt, Homo sapiens
  misc_RNA (1)...(19): siRNA sense strand
cgugcaguuuaaugagaaa

SEQ ID NO: 2234164 - RNA, 19 nt, Homo sapiens
  misc_RNA (1)...(19): siRNA sense strand
ggaugauucgagugaggaa

SEQ ID NO: 2234165 - RNA, 19 nt, Homo sapiens
  misc_RNA (1)...(19): siRNA sense strand
uugccaagcacgugggcua

SEQ ID NO: 2234166 - RNA, 19 nt, Homo sapiens
  misc_RNA (1)...(19): siRNA sense strand
gauuauaaagcuagagaag

SEQ ID NO: 2234167 - RNA, 19 nt, Homo sapiens
  misc_RNA (1)...(19): siRNA sense strand
augugaugcucaagaagaa

SEQ ID NO: 2234168 - RNA, 19 nt, Homo sapiens
  misc_RNA (1)...(19): siRNA sense strand
gaggcagagaauugauaua

SEQ ID NO: 2234169 - RNA, 19 nt, Homo sapiens
  misc_RNA (1)...(19): siRNA sense strand
ccaaaggagucuaugccau

SEQ ID NO: 2234170 - RNA, 19 nt, Homo sapiens
  misc_RNA (1)...(19): siRNA sense strand
gugaagaguuugaggaagg

SEQ ID NO: 2234171 - RNA, 19 nt, Homo sapiens
  misc_RNA (1)...(19): siRNA sense strand
ggucuauggaagagcagau

SEQ ID NO: 2234172 - RNA, 19 nt, Homo sapiens
  misc_RNA (1)...(19): siRNA sense strand
acaaauggugguacgacaa

SEQ ID NO: 2234173 - RNA, 19 nt, Homo sapiens
  misc_RNA (1)...(19): siRNA sense strand
gaagaauagugaugcucga

SEQ ID NO: 2234174 - RNA, 19 nt, Homo sapiens
  misc_RNA (1)...(19): siRNA sense strand
aaaugaaacaugacagcau

SEQ ID NO: 2234175 - RNA, 19 nt, Homo sapiens
  misc_RNA (1)...(19): siRNA sense strand
cgggaagaaguuauagauu

SEQ ID NO: 2234176 - RNA, 19 nt, Homo sapiens
  misc_RNA (1)...(19): siRNA sense strand
gcuuaugagauuuggaugu

SEQ ID NO: 2234177 - RNA, 19 nt, Homo sapiens
  misc_RNA (1)...(19): siRNA sense strand
gugcagaggaccuagcgaa

SEQ ID NO: 2234178 - RNA, 19 nt, Homo sapiens
  misc_RNA (1)...(19): siRNA sense strand
ugaggaaauccaaaggcaa

SEQ ID NO: 2234179 - RNA, 19 nt, Homo sapiens
  misc_RNA (1)...(19): siRNA sense strand
gaggugauuccaaggacaa

SEQ ID NO: 2234180 - RNA, 19 nt, Homo sapiens
  misc_RNA (1)...(19): siRNA sense strand
ggaggugauuccaaggaca

SEQ ID NO: 2234181 - RNA, 19 nt, Homo sapiens
  misc_RNA (1)...(19): siRNA sense strand
cggccaagaucaugcagca

SEQ ID NO: 2234182 - RNA, 19 nt, Homo sapiens
  misc_RNA (1)...(19): siRNA sense strand
aggugauggcugaggcuuu

SEQ ID NO: 2234183 - RNA, 19 nt, Homo sapiens
  misc_RNA (1)...(19): siRNA sense strand
ugacagcauccgaaagauu

SEQ ID NO: 2234184 - RNA, 19 nt, Homo sapiens
  misc_RNA (1)...(19): siRNA sense strand
ggagauugucagugaugga

SEQ ID NO: 2234185 - RNA, 19 nt, Homo sapiens
  misc_RNA (1)...(19): siRNA sense strand
cugcagaaaguccuggaua

SEQ ID NO: 2234186 - RNA, 19 nt, Homo sapiens
  misc_RNA (1)...(19): siRNA sense strand
uggaagagacccaaguaca

SEQ ID NO: 2234187 - RNA, 19 nt, Homo sapiens
  misc_RNA (1)...(19): siRNA sense strand
acuggaaugaagaugauaa

SEQ ID NO: 2234188 - RNA, 19 nt, Homo sapiens
  misc_RNA (1)...(19): siRNA sense strand
auuacaaguggcagaaauu

SEQ ID NO: 2234189 - RNA, 19 nt, Homo sapiens
  misc_RNA (1)...(19): siRNA sense strand
gauugucagugauggaaaa

SEQ ID NO: 2234190 - RNA, 19 nt, Homo sapiens
  misc_RNA (1)...(19): siRNA sense strand
gaccauuacaaguggcaga

SEQ ID NO: 2234191 - RNA, 19 nt, Homo sapiens
  misc_RNA (1)...(19): siRNA sense strand
gagaaaggacgccggacca

SEQ ID NO: 2234192 - RNA, 19 nt, Homo sapiens
  misc_RNA (1)...(19): siRNA sense strand
ccagauugauauugugaac

SEQ ID NO: 2234193 - RNA, 19 nt, Homo sapiens
  misc_RNA (1)...(19): siRNA sense strand
ccaccaugaaugaguacau

SEQ ID NO: 2234194 - RNA, 19 nt, Homo sapiens
  misc_RNA (1)...(19): siRNA sense strand
agaagaauggcaucggcua

SEQ ID NO: 2234195 - RNA, 19 nt, Homo sapiens
  misc_RNA (1)...(19): siRNA sense strand
agaucaugcagcaguggaa

SEQ ID NO: 2234196 - RNA, 19 nt, Homo sapiens
  misc_RNA (1)...(19): siRNA sense strand
gugaggaaauccaaaggca

SEQ ID NO: 2234197 - RNA, 19 nt, Homo sapiens
  misc_RNA (1)...(19): siRNA sense strand
aacaaauggugguacgaca

SEQ ID NO: 2234198 - RNA, 19 nt, Homo sapiens
  misc_RNA (1)...(19): siRNA sense strand
uuugaagguuuaacaggaa

SEQ ID NO: 2234199 - RNA, 19 nt, Homo sapiens
  misc_RNA (1)...(19): siRNA sense strand
aggcuauggcauugcaaca

SEQ ID NO: 2234200 - RNA, 19 nt, Homo sapiens
  misc_RNA (1)...(19): siRNA sense strand
cuggugaacuacacagaca

SEQ ID NO: 2234201 - RNA, 19 nt, Homo sapiens
  misc_RNA (1)...(19): siRNA sense strand
cagcggaaacccugugaca

SEQ ID NO: 2234202 - RNA, 19 nt, Homo sapiens
  misc_RNA (1)...(19): siRNA sense strand
uuccaaaggcuauggcauu

SEQ ID NO: 2234203 - RNA, 19 nt, Homo sapiens
  misc_RNA (1)...(19): siRNA sense strand
aguaaaccuggcaguguua

SEQ ID NO: 2234204 - RNA, 19 nt, Homo sapiens
  misc_RNA (1)...(19): siRNA sense strand
ggugguacgacaagggcga

SEQ ID NO: 2234205 - RNA, 19 nt, Homo sapiens
  misc_RNA (1)...(19): siRNA sense strand
uugaagguuuaacaggaaa

SEQ ID NO: 2234206 - RNA, 19 nt, Homo sapiens
  misc_RNA (1)...(19): siRNA sense strand
agauugucagugauggaaa

SEQ ID NO: 2234207 - RNA, 19 nt, Homo sapiens
  misc_RNA (1)...(19): siRNA sense strand
ggacgggaccagacaacca

SEQ ID NO: 2234208 - RNA, 19 nt, Homo sapiens
  misc_RNA (1)...(19): siRNA sense strand
gagcuuucccguugauaca

SEQ ID NO: 2234209 - RNA, 19 nt, Homo sapiens
  misc_RNA (1)...(19): siRNA sense strand
cacaacaauccuagaagau

SEQ ID NO: 2234210 - RNA, 19 nt, Homo sapiens
  misc_RNA (1)...(19): siRNA sense strand
uugcuguguuugagaagau

SEQ ID NO: 2234211 - RNA, 19 nt, Homo sapiens
  misc_RNA (1)...(19): siRNA sense strand
ccuuaaucgaguucugcua

SEQ ID NO: 2234212 - RNA, 19 nt, Homo sapiens
  misc_RNA (1)...(19): siRNA sense strand
uacaaaucccguagugaau

SEQ ID NO: 2234213 - RNA, 19 nt, Homo sapiens
  misc_RNA (1)...(19): siRNA sense strand
gaaacacagugcaggagca

SEQ ID NO: 2234214 - RNA, 19 nt, Homo sapiens
  misc_RNA (1)...(19): siRNA sense strand
cagaagaaaauggggcaaa

SEQ ID NO: 2234215 - RNA, 19 nt, Homo sapiens
  misc_RNA (1)...(19): siRNA sense strand
ugagaaacacagugcagga

SEQ ID NO: 2234216 - RNA, 19 nt, Homo sapiens
  misc_RNA (1)...(19): siRNA sense strand
caucagcauagguggacuu

SEQ ID NO: 2234217 - RNA, 19 nt, Homo sapiens
  misc_RNA (1)...(19): siRNA sense strand
gaaacacagugcaggagca

SEQ ID NO: 2234218 - RNA, 19 nt, Homo sapiens
  misc_RNA (1)...(19): siRNA sense strand
cagaagaaaauggggcaaa

SEQ ID NO: 2234219 - RNA, 19 nt, Homo sapiens
  misc_RNA (1)...(19): siRNA sense strand
ugagaaacacagugcagga

SEQ ID NO: 2234220 - RNA, 19 nt, Homo sapiens
  misc_RNA (1)...(19): siRNA sense strand
caucagcauagguggacuu

SEQ ID NO: 2234221 - RNA, 19 nt, Homo sapiens
  misc_RNA (1)...(19): siRNA sense strand
gaaacacagugcaggagca

SEQ ID NO: 2234222 - RNA, 19 nt, Homo sapiens
  misc_RNA (1)...(19): siRNA sense strand
cagaagaaaauggggcaaa

SEQ ID NO: 2234223 - RNA, 19 nt, Homo sapiens
  misc_RNA (1)...(19): siRNA sense strand
ugagaaacacagugcagga

SEQ ID NO: 2234224 - RNA, 19 nt, Homo sapiens
  misc_RNA (1)...(19): siRNA sense strand
caucagcauagguggacuu

SEQ ID NO: 2234225 - RNA, 19 nt, Homo sapiens
  misc_RNA (1)...(19): siRNA sense strand
agaacuuguuuaugggaaa

SEQ ID NO: 2234226 - RNA, 19 nt, Homo sapiens
  misc_RNA (1)...(19): siRNA sense strand
cgaugaaagugggaggaaa

SEQ ID NO: 2234227 - RNA, 19 nt, Homo sapiens
  misc_RNA (1)...(19): siRNA sense strand
acagaagacaagagaagaa

SEQ ID NO: 2234228 - RNA, 19 nt, Homo sapiens
  misc_RNA (1)...(19): siRNA sense strand
agaaauugccuauggaaca

SEQ ID NO: 2234229 - RNA, 19 nt, Homo sapiens
  misc_RNA (1)...(19): siRNA sense strand
ggaaugggaugguaggaga

SEQ ID NO: 2234230 - RNA, 19 nt, Homo sapiens
  misc_RNA (1)...(19): siRNA sense strand
augacaaguaugaaggaua

SEQ ID NO: 2234231 - RNA, 19 nt, Homo sapiens
  misc_RNA (1)...(19): siRNA sense strand
ggccaaacaaacagaaauu

SEQ ID NO: 2234232 - RNA, 19 nt, Homo sapiens
  misc_RNA (1)...(19): siRNA sense strand
cgauaaaggugaaugugga

SEQ ID NO: 2234233 - RNA, 19 nt, Homo sapiens
  misc_RNA (1)...(19): siRNA sense strand
gugcagaagaccuggccaa

SEQ ID NO: 2234234 - RNA, 19 nt, Homo sapiens
  misc_RNA (1)...(19): siRNA sense strand
gcgaagagaaugaagcuga

SEQ ID NO: 2234235 - RNA, 19 nt, Homo sapiens
  misc_RNA (1)...(19): siRNA sense strand
cauaagaaacaaagccaga

SEQ ID NO: 2234236 - RNA, 19 nt, Homo sapiens
  misc_RNA (1)...(19): siRNA sense strand
ugacagaagacaagagaag

SEQ ID NO: 2234237 - RNA, 19 nt, Homo sapiens
  misc_RNA (1)...(19): siRNA sense strand
gauuauuuccagacagauu

SEQ ID NO: 2234238 - RNA, 19 nt, Homo sapiens
  misc_RNA (1)...(19): siRNA sense strand
ccgcaaauccaagggcaaa

SEQ ID NO: 2234239 - RNA, 19 nt, Homo sapiens
  misc_RNA (1)...(19): siRNA sense strand
uguaaguguuggaaagcau

SEQ ID NO: 2234240 - RNA, 19 nt, Homo sapiens
  misc_RNA (1)...(19): siRNA sense strand
gaaagcauguuaaaggcua

SEQ ID NO: 2234241 - RNA, 19 nt, Homo sapiens
  misc_RNA (1)...(19): siRNA sense strand
cagcgaaagccaugugaca

SEQ ID NO: 2234242 - RNA, 19 nt, Homo sapiens
  misc_RNA (1)...(19): siRNA sense strand
aggugaauguggacccaaa

SEQ ID NO: 2234243 - RNA, 19 nt, Homo sapiens
  misc_RNA (1)...(19): siRNA sense strand
ucgaauuguuggagguguu

SEQ ID NO: 2234244 - RNA, 19 nt, Homo sapiens
  misc_RNA (1)...(19): siRNA sense strand
cuucaugaguuugggcaua

SEQ ID NO: 2234245 - RNA, 19 nt, Homo sapiens
  misc_RNA (1)...(19): siRNA sense strand
ggacuacagcugagggagu

SEQ ID NO: 2234246 - RNA, 19 nt, Homo sapiens
  misc_RNA (1)...(19): siRNA sense strand
uuuaauacacccaugguaa

SEQ ID NO: 2234247 - RNA, 19 nt, Homo sapiens
  misc_RNA (1)...(19): siRNA sense strand
agaaacuagaucagagaga

SEQ ID NO: 2234248 - RNA, 19 nt, Homo sapiens
  misc_RNA (1)...(19): siRNA sense strand
gcgcuauauguguggaaaa

SEQ ID NO: 2234249 - RNA, 19 nt, Homo sapiens
  misc_RNA (1)...(19): siRNA sense strand
cuauggacguagagucaau

SEQ ID NO: 2234250 - RNA, 19 nt, Homo sapiens
  misc_RNA (1)...(19): siRNA sense strand
aggauuauuuccagacaga

SEQ ID NO: 2234251 - RNA, 19 nt, Homo sapiens
  misc_RNA (1)...(19): siRNA sense strand
acuggaaugauauggauaa

SEQ ID NO: 2234252 - RNA, 19 nt, Homo sapiens
  misc_RNA (1)...(19): siRNA sense strand
gagaacuuguuuaugggaa

SEQ ID NO: 2234253 - RNA, 19 nt, Homo sapiens
  misc_RNA (1)...(19): siRNA sense strand
agaacuugacagaagacaa

SEQ ID NO: 2234254 - RNA, 19 nt, Homo sapiens
  misc_RNA (1)...(19): siRNA sense strand
ccauagaaagugcagaaga

SEQ ID NO: 2234255 - RNA, 19 nt, Homo sapiens
  misc_RNA (1)...(19): siRNA sense strand
agaaacaaagccagauuau

SEQ ID NO: 2234256 - RNA, 19 nt, Homo sapiens
  misc_RNA (1)...(19): siRNA sense strand
ugggagugugggagagaau

SEQ ID NO: 2234257 - RNA, 19 nt, Homo sapiens
  misc_RNA (1)...(19): siRNA sense strand
uaauagacugugagauaga

SEQ ID NO: 2234258 - RNA, 19 nt, Homo sapiens
  misc_RNA (1)...(19): siRNA sense strand
gaaugggaugguaggagaa

SEQ ID NO: 2234259 - RNA, 19 nt, Homo sapiens
  misc_RNA (1)...(19): siRNA sense strand
ccaaagacucuggaagcaa

SEQ ID NO: 2234260 - RNA, 19 nt, Homo sapiens
  misc_RNA (1)...(19): siRNA sense strand
uauacaugguggagccaau

SEQ ID NO: 2234261 - RNA, 19 nt, Homo sapiens
  misc_RNA (1)...(19): siRNA sense strand
cauagaaagugcagaagac

SEQ ID NO: 2234262 - RNA, 19 nt, Homo sapiens
  misc_RNA (1)...(19): siRNA sense strand
ccgaaacacagaucaggaa

SEQ ID NO: 2234263 - RNA, 19 nt, Homo sapiens
  misc_RNA (1)...(19): siRNA sense strand
aaacuagaucagagagagu

SEQ ID NO: 2234264 - RNA, 19 nt, Homo sapiens
  misc_RNA (1)...(19): siRNA sense strand
uggauguguuugagcugaa

SEQ ID NO: 2234265 - RNA, 19 nt, Homo sapiens
  misc_RNA (1)...(19): siRNA sense strand
ucuagaagaacuugacaga

SEQ ID NO: 2234266 - RNA, 19 nt, Homo sapiens
  misc_RNA (1)...(19): siRNA sense strand
acugugagauagagagacu

SEQ ID NO: 2234267 - RNA, 19 nt, Homo sapiens
  misc_RNA (1)...(19): siRNA sense strand
auaacauugagcagcgaaa

SEQ ID NO: 2234268 - RNA, 19 nt, Homo sapiens
  misc_RNA (1)...(19): siRNA sense strand
agacugugagauagagaga

SEQ ID NO: 2234269 - RNA, 19 nt, Homo sapiens
  misc_RNA (1)...(19): siRNA sense strand
agagagacuucaaaacaua

SEQ ID NO: 2234270 - RNA, 19 nt, Homo sapiens
  misc_RNA (1)...(19): siRNA sense strand
ggaagaaacuagaucagag

SEQ ID NO: 2234271 - RNA, 19 nt, Homo sapiens
  misc_RNA (1)...(19): siRNA sense strand
ucccauagaaagugcagaa

SEQ ID NO: 2234272 - RNA, 19 nt, Homo sapiens
  misc_RNA (1)...(19): siRNA sense strand
agauuguaaguguuggaaa

SEQ ID NO: 2234273 - RNA, 19 nt, Homo sapiens
  misc_RNA (1)...(19): siRNA sense strand
gaauugacauggagaggac

SEQ ID NO: 2234274 - RNA, 19 nt, Homo sapiens
  misc_RNA (1)...(19): siRNA sense strand
acucaaacagguucgaauu

SEQ ID NO: 2234275 - RNA, 19 nt, Homo sapiens
  misc_RNA (1)...(19): siRNA sense strand
cacuauggacguagaguca

SEQ ID NO: 2234276 - RNA, 19 nt, Homo sapiens
  misc_RNA (1)...(19): siRNA sense strand
aaggaaaugacaaguauga

SEQ ID NO: 2234277 - RNA, 19 nt, Homo sapiens
  misc_RNA (1)...(19): siRNA sense strand
ugggaugguaggagaacuu

SEQ ID NO: 2234278 - RNA, 19 nt, Homo sapiens
  misc_RNA (1)...(19): siRNA sense strand
gccagaggacggaaaggaa

SEQ ID NO: 2234279 - RNA, 19 nt, Homo sapiens
  misc_RNA (1)...(19): siRNA sense strand
cauuaagaacuccuguaaa

SEQ ID NO: 2234280 - RNA, 19 nt, Homo sapiens
  misc_RNA (1)...(19): siRNA sense strand
ccacuaugaaugauaacau

SEQ ID NO: 2234281 - RNA, 19 nt, Homo sapiens
  misc_RNA (1)...(19): siRNA sense strand
auuaagaacuccuguaaac

SEQ ID NO: 2234282 - RNA, 19 nt, Homo sapiens
  misc_RNA (1)...(19): siRNA sense strand
acuagaucagagagaguau

SEQ ID NO: 2234283 - RNA, 19 nt, Homo sapiens
  misc_RNA (1)...(19): siRNA sense strand
auguuaaaggcuaccauua

SEQ ID NO: 2234284 - RNA, 19 nt, Homo sapiens
  misc_RNA (1)...(19): siRNA sense strand
guacgauaaaggugaaugu

SEQ ID NO: 2234285 - RNA, 19 nt, Homo sapiens
  misc_RNA (1)...(19): siRNA sense strand
acucagacgugguggaaaa

SEQ ID NO: 2234286 - RNA, 19 nt, Homo sapiens
  misc_RNA (1)...(19): siRNA sense strand
cugcagugccauagacaua

SEQ ID NO: 2234287 - RNA, 19 nt, Homo sapiens
  misc_RNA (1)...(19): siRNA sense strand
gagaagugguccauggaga

SEQ ID NO: 2234288 - RNA, 19 nt, Homo sapiens
  misc_RNA (1)...(19): siRNA sense strand
aagcaaaccaagauagaau

SEQ ID NO: 2234289 - RNA, 19 nt, Homo sapiens
  misc_RNA (1)...(19): siRNA sense strand
gggcuuaacaugacggaca

SEQ ID NO: 2234290 - RNA, 19 nt, Homo sapiens
  misc_RNA (1)...(19): siRNA sense strand
augacagauuugaaggaua

SEQ ID NO: 2234291 - RNA, 19 nt, Homo sapiens
  misc_RNA (1)...(19): siRNA sense strand
acucaggaucggagggauu

SEQ ID NO: 2234292 - RNA, 19 nt, Homo sapiens
  misc_RNA (1)...(19): siRNA sense strand
aguaugugacgcagagaaa

SEQ ID NO: 2234293 - RNA, 19 nt, Homo sapiens
  misc_RNA (1)...(19): siRNA sense strand
cugcauaugaugaaagaga

SEQ ID NO: 2234294 - RNA, 19 nt, Homo sapiens
  misc_RNA (1)...(19): siRNA sense strand
auuuguagcuauuggagaa

SEQ ID NO: 2234295 - RNA, 19 nt, Homo sapiens
  misc_RNA (1)...(19): siRNA sense strand
ucuugacaguagagagaau

SEQ ID NO: 2234296 - RNA, 19 nt, Homo sapiens
  misc_RNA (1)...(19): siRNA sense strand
cugaaauccuuaagcagau

SEQ ID NO: 2234297 - RNA, 19 nt, Homo sapiens
  misc_RNA (1)...(19): siRNA sense strand
ggaaaauauuggaggcauc

SEQ ID NO: 2234298 - RNA, 19 nt, Homo sapiens
  misc_RNA (1)...(19): siRNA sense strand
cauacagacccgcuggaaa

SEQ ID NO: 2234299 - RNA, 19 nt, Homo sapiens
  misc_RNA (1)...(19): siRNA sense strand
ugaagaaaggcaaggaguu

SEQ ID NO: 2234300 - RNA, 19 nt, Homo sapiens
  misc_RNA (1)...(19): siRNA sense strand
gcugaaauccuuaagcaga

SEQ ID NO: 2234301 - RNA, 19 nt, Homo sapiens
  misc_RNA (1)...(19): siRNA sense strand
aaaccaauggcuugaggaa

SEQ ID NO: 2234302 - RNA, 19 nt, Homo sapiens
  misc_RNA (1)...(19): siRNA sense strand
gagaagugguggcguggga

SEQ ID NO: 2234303 - RNA, 19 nt, Homo sapiens
  misc_RNA (1)...(19): siRNA sense strand
ccacauuaaccuaugacau

SEQ ID NO: 2234304 - RNA, 19 nt, Homo sapiens
  misc_RNA (1)...(19): siRNA sense strand
aagauugggauuuggaauu

SEQ ID NO: 2234305 - RNA, 19 nt, Homo sapiens
  misc_RNA (1)...(19): siRNA sense strand
cuucuugacaguagagaga

SEQ ID NO: 2234306 - RNA, 19 nt, Homo sapiens
  misc_RNA (1)...(19): siRNA sense strand
ccgaggaagacaacaaaga

SEQ ID NO: 2234307 - RNA, 19 nt, Homo sapiens
  misc_RNA (1)...(19): siRNA sense strand
uaugagaagaugugggcuu

SEQ ID NO: 2234308 - RNA, 19 nt, Homo sapiens
  misc_RNA (1)...(19): siRNA sense strand
ucucaaagaggaaggaacu

SEQ ID NO: 2234309 - RNA, 19 nt, Homo sapiens
  misc_RNA (1)...(19): siRNA sense strand
gccuguuaauguugaagaa

SEQ ID NO: 2234310 - RNA, 19 nt, Homo sapiens
  misc_RNA (1)...(19): siRNA sense strand
cagagaaacugcaaccuca

SEQ ID NO: 2234311 - RNA, 19 nt, Homo sapiens
  misc_RNA (1)...(19): siRNA sense strand
uacaaaucacggaagaaua

SEQ ID NO: 2234312 - RNA, 19 nt, Homo sapiens
  misc_RNA (1)...(19): siRNA sense strand
aggucuaauucgucuacaa

SEQ ID NO: 2234313 - RNA, 19 nt, Homo sapiens
  misc_RNA (1)...(19): siRNA sense strand
gaauaaagaugccaagccu

SEQ ID NO: 2234314 - RNA, 19 nt, Homo sapiens
  misc_RNA (1)...(19): siRNA sense strand
gcguaaacaugaccggguu

SEQ ID NO: 2234315 - RNA, 19 nt, Homo sapiens
  misc_RNA (1)...(19): siRNA sense strand
gauuuaugaaccugaucaa

SEQ ID NO: 2234316 - RNA, 19 nt, Homo sapiens
  misc_RNA (1)...(19): siRNA sense strand
ucauugacuccaaagguua

SEQ ID NO: 2234317 - RNA, 19 nt, Homo sapiens
  misc_RNA (1)...(19): siRNA sense strand
caucaaagcucccuccaga

SEQ ID NO: 2234318 - RNA, 19 nt, Homo sapiens
  misc_RNA (1)...(19): siRNA sense strand
aggagaugaagaaaggcaa

SEQ ID NO: 2234319 - RNA, 19 nt, Homo sapiens
  misc_RNA (1)...(19): siRNA sense strand
acaaagacaaguccagcaa

SEQ ID NO: 2234320 - RNA, 19 nt, Homo sapiens
  misc_RNA (1)...(19): siRNA sense strand
gcauaugaugaaagagaag

SEQ ID NO: 2234321 - RNA, 19 nt, Homo sapiens
  misc_RNA (1)...(19): siRNA sense strand
auauacaaaucacggaaga

SEQ ID NO: 2234322 - RNA, 19 nt, Homo sapiens
  misc_RNA (1)...(19): siRNA sense strand
gguaagaaacagugaugag

SEQ ID NO: 2234323 - RNA, 19 nt, Homo sapiens
  misc_RNA (1)...(19): siRNA sense strand
ccauagauucggcagauga

SEQ ID NO: 2234324 - RNA, 19 nt, Homo sapiens
  misc_RNA (1)...(19): siRNA sense strand
ggcaaagcaaaccaagaua

SEQ ID NO: 2234325 - RNA, 19 nt, Homo sapiens
  misc_RNA (1)...(19): siRNA sense strand
ccuauguuauguacaggaa

SEQ ID NO: 2234326 - RNA, 19 nt, Homo sapiens
  misc_RNA (1)...(19): siRNA sense strand
cagacgugguggaaaacaa

SEQ ID NO: 2234327 - RNA, 19 nt, Homo sapiens
  misc_RNA (1)...(19): siRNA sense strand
gaguaugugacgcagagaa

SEQ ID NO: 2234328 - RNA, 19 nt, Homo sapiens
  misc_RNA (1)...(19): siRNA sense strand
uauuagucucaaagaggaa

SEQ ID NO: 2234329 - RNA, 19 nt, Homo sapiens
  misc_RNA (1)...(19): siRNA sense strand
cuggaagaacccuauguua

SEQ ID NO: 2234330 - RNA, 19 nt, Homo sapiens
  misc_RNA (1)...(19): siRNA sense strand
acuaguucccgauggcaaa

SEQ ID NO: 2234331 - RNA, 19 nt, Homo sapiens
  misc_RNA (1)...(19): siRNA sense strand
gcugaugcccaaagcucua

SEQ ID NO: 2234332 - RNA, 19 nt, Homo sapiens
  misc_RNA (1)...(19): siRNA sense strand
cuauagguacaguggcgua

SEQ ID NO: 2234333 - RNA, 19 nt, Homo sapiens
  misc_RNA (1)...(19): siRNA sense strand
uuaacaugacggacagcaa

SEQ ID NO: 2234334 - RNA, 19 nt, Homo sapiens
  misc_RNA (1)...(19): siRNA sense strand
aagaagggaagcugcauau

SEQ ID NO: 2234335 - RNA, 19 nt, Homo sapiens
  misc_RNA (1)...(19): siRNA sense strand
gaagugguggcgugggaau

SEQ ID NO: 2234336 - RNA, 19 nt, Homo sapiens
  misc_RNA (1)...(19): siRNA sense strand
auacaaaucacggaagaau

SEQ ID NO: 2234337 - RNA, 19 nt, Homo sapiens
  misc_RNA (1)...(19): siRNA sense strand
cggacagcaacaaagacaa

SEQ ID NO: 2234338 - RNA, 19 nt, Homo sapiens
  misc_RNA (1)...(19): siRNA sense strand
gguucuccuuaccgggaua

SEQ ID NO: 2234339 - RNA, 19 nt, Homo sapiens
  misc_RNA (1)...(19): siRNA sense strand
ggaaaaugagccuguuaau

SEQ ID NO: 2234340 - RNA, 19 nt, Homo sapiens
  misc_RNA (1)...(19): siRNA sense strand
caguagagagaauggaauc

SEQ ID NO: 2234341 - RNA, 19 nt, Homo sapiens
  misc_RNA (1)...(19): siRNA sense strand
augccuaacaccacauuaa

SEQ ID NO: 2234342 - RNA, 19 nt, Homo sapiens
  misc_RNA (1)...(19): siRNA sense strand
cuggaacucuauagguaca

SEQ ID NO: 2234343 - RNA, 19 nt, Homo sapiens
  misc_RNA (1)...(19): siRNA sense strand
cugaagcggcucugaugua

SEQ ID NO: 2234344 - RNA, 19 nt, Homo sapiens
  misc_RNA (1)...(19): siRNA sense strand
cuguguacucuuugugauu

SEQ ID NO: 2234345 - RNA, 19 nt, Homo sapiens
  misc_RNA (1)...(19): siRNA sense strand
ccagaauaguuggagggau

SEQ ID NO: 2234346 - RNA, 19 nt, Homo sapiens
  misc_RNA (1)...(19): siRNA sense strand
cagcauuaacagaaaccga

SEQ ID NO: 2234347 - RNA, 19 nt, Homo sapiens
  misc_RNA (1)...(19): siRNA sense strand
cgguggacaacaaagauuu

SEQ ID NO: 2234348 - RNA, 19 nt, Homo sapiens
  misc_RNA (1)...(19): siRNA sense strand
uuggauggcaugaugacaa

SEQ ID NO: 2234349 - RNA, 19 nt, Homo sapiens
  misc_RNA (1)...(19): siRNA sense strand
uggcaaagcaaaccaagau

SEQ ID NO: 2234350 - RNA, 19 nt, Homo sapiens
  misc_RNA (1)...(19): siRNA sense strand
acucagacgugguggaaaa

SEQ ID NO: 2234351 - RNA, 19 nt, Homo sapiens
  misc_RNA (1)...(19): siRNA sense strand
cugcagugccauagacaua

SEQ ID NO: 2234352 - RNA, 19 nt, Homo sapiens
  misc_RNA (1)...(19): siRNA sense strand
gagaagugguccauggaga

SEQ ID NO: 2234353 - RNA, 19 nt, Homo sapiens
  misc_RNA (1)...(19): siRNA sense strand
aagcaaaccaagauagaau

SEQ ID NO: 2234354 - RNA, 19 nt, Homo sapiens
  misc_RNA (1)...(19): siRNA sense strand
gggcuuaacaugacggaca

SEQ ID NO: 2234355 - RNA, 19 nt, Homo sapiens
  misc_RNA (1)...(19): siRNA sense strand
augacagauuugaaggaua

SEQ ID NO: 2234356 - RNA, 19 nt, Homo sapiens
  misc_RNA (1)...(19): siRNA sense strand
acucaggaucggagggauu

SEQ ID NO: 2234357 - RNA, 19 nt, Homo sapiens
  misc_RNA (1)...(19): siRNA sense strand
aguaugugacgcagagaaa

SEQ ID NO: 2234358 - RNA, 19 nt, Homo sapiens
  misc_RNA (1)...(19): siRNA sense strand
cugcauaugaugaaagaga

SEQ ID NO: 2234359 - RNA, 19 nt, Homo sapiens
  misc_RNA (1)...(19): siRNA sense strand
auuuguagcuauuggagaa

SEQ ID NO: 2234360 - RNA, 19 nt, Homo sapiens
  misc_RNA (1)...(19): siRNA sense strand
ucuugacaguagagagaau

SEQ ID NO: 2234361 - RNA, 19 nt, Homo sapiens
  misc_RNA (1)...(19): siRNA sense strand
cugaaauccuuaagcagau

SEQ ID NO: 2234362 - RNA, 19 nt, Homo sapiens
  misc_RNA (1)...(19): siRNA sense strand
ggaaaauauuggaggcauc

SEQ ID NO: 2234363 - RNA, 19 nt, Homo sapiens
  misc_RNA (1)...(19): siRNA sense strand
cauacagacccgcuggaaa

SEQ ID NO: 2234364 - RNA, 19 nt, Homo sapiens
  misc_RNA (1)...(19): siRNA sense strand
ugaagaaaggcaaggaguu

SEQ ID NO: 2234365 - RNA, 19 nt, Homo sapiens
  misc_RNA (1)...(19): siRNA sense strand
gcugaaauccuuaagcaga

SEQ ID NO: 2234366 - RNA, 19 nt, Homo sapiens
  misc_RNA (1)...(19): siRNA sense strand
aaaccaauggcuugaggaa

SEQ ID NO: 2234367 - RNA, 19 nt, Homo sapiens
  misc_RNA (1)...(19): siRNA sense strand
gagaagugguggcguggga

SEQ ID NO: 2234368 - RNA, 19 nt, Homo sapiens
  misc_RNA (1)...(19): siRNA sense strand
ccacauuaaccuaugacau

SEQ ID NO: 2234369 - RNA, 19 nt, Homo sapiens
  misc_RNA (1)...(19): siRNA sense strand
aagauugggauuuggaauu

SEQ ID NO: 2234370 - RNA, 19 nt, Homo sapiens
  misc_RNA (1)...(19): siRNA sense strand
cuucuugacaguagagaga

SEQ ID NO: 2234371 - RNA, 19 nt, Homo sapiens
  misc_RNA (1)...(19): siRNA sense strand
ccgaggaagacaacaaaga

SEQ ID NO: 2234372 - RNA, 19 nt, Homo sapiens
  misc_RNA (1)...(19): siRNA sense strand
uaugagaagaugugggcuu

SEQ ID NO: 2234373 - RNA, 19 nt, Homo sapiens
  misc_RNA (1)...(19): siRNA sense strand
ucucaaagaggaaggaacu

SEQ ID NO: 2234374 - RNA, 19 nt, Homo sapiens
  misc_RNA (1)...(19): siRNA sense strand
gccuguuaauguugaagaa

SEQ ID NO: 2234375 - RNA, 19 nt, Homo sapiens
  misc_RNA (1)...(19): siRNA sense strand
cagagaaacugcaaccuca

SEQ ID NO: 2234376 - RNA, 19 nt, Homo sapiens
  misc_RNA (1)...(19): siRNA sense strand
uacaaaucacggaagaaua

SEQ ID NO: 2234377 - RNA, 19 nt, Homo sapiens
  misc_RNA (1)...(19): siRNA sense strand
aggucuaauucgucuacaa

SEQ ID NO: 2234378 - RNA, 19 nt, Homo sapiens
  misc_RNA (1)...(19): siRNA sense strand
gaauaaagaugccaagccu

SEQ ID NO: 2234379 - RNA, 19 nt, Homo sapiens
  misc_RNA (1)...(19): siRNA sense strand
gcguaaacaugaccggguu

SEQ ID NO: 2234380 - RNA, 19 nt, Homo sapiens
  misc_RNA (1)...(19): siRNA sense strand
gauuuaugaaccugaucaa

SEQ ID NO: 2234381 - RNA, 19 nt, Homo sapiens
  misc_RNA (1)...(19): siRNA sense strand
ucauugacuccaaagguua

SEQ ID NO: 2234382 - RNA, 19 nt, Homo sapiens
  misc_RNA (1)...(19): siRNA sense strand
caucaaagcucccuccaga

SEQ ID NO: 2234383 - RNA, 19 nt, Homo sapiens
  misc_RNA (1)...(19): siRNA sense strand
aggagaugaagaaaggcaa

SEQ ID NO: 2234384 - RNA, 19 nt, Homo sapiens
  misc_RNA (1)...(19): siRNA sense strand
acaaagacaaguccagcaa

SEQ ID NO: 2234385 - RNA, 19 nt, Homo sapiens
  misc_RNA (1)...(19): siRNA sense strand
gcauaugaugaaagagaag

SEQ ID NO: 2234386 - RNA, 19 nt, Homo sapiens
  misc_RNA (1)...(19): siRNA sense strand
auauacaaaucacggaaga

SEQ ID NO: 2234387 - RNA, 19 nt, Homo sapiens
  misc_RNA (1)...(19): siRNA sense strand
gguaagaaacagugaugag

SEQ ID NO: 2234388 - RNA, 19 nt, Homo sapiens
  misc_RNA (1)...(19): siRNA sense strand
ccauagauucggcagauga

SEQ ID NO: 2234389 - RNA, 19 nt, Homo sapiens
  misc_RNA (1)...(19): siRNA sense strand
ggcaaagcaaaccaagaua

SEQ ID NO: 2234390 - RNA, 19 nt, Homo sapiens
  misc_RNA (1)...(19): siRNA sense strand
ccuauguuauguacaggaa

SEQ ID NO: 2234391 - RNA, 19 nt, Homo sapiens
  misc_RNA (1)...(19): siRNA sense strand
cagacgugguggaaaacaa

SEQ ID NO: 2234392 - RNA, 19 nt, Homo sapiens
  misc_RNA (1)...(19): siRNA sense strand
gaguaugugacgcagagaa

SEQ ID NO: 2234393 - RNA, 19 nt, Homo sapiens
  misc_RNA (1)...(19): siRNA sense strand
uauuagucucaaagaggaa

SEQ ID NO: 2234394 - RNA, 19 nt, Homo sapiens
  misc_RNA (1)...(19): siRNA sense strand
cuggaagaacccuauguua

SEQ ID NO: 2234395 - RNA, 19 nt, Homo sapiens
  misc_RNA (1)...(19): siRNA sense strand
acuaguucccgauggcaaa

SEQ ID NO: 2234396 - RNA, 19 nt, Homo sapiens
  misc_RNA (1)...(19): siRNA sense strand
gcugaugcccaaagcucua

SEQ ID NO: 2234397 - RNA, 19 nt, Homo sapiens
  misc_RNA (1)...(19): siRNA sense strand
cuauagguacaguggcgua

SEQ ID NO: 2234398 - RNA, 19 nt, Homo sapiens
  misc_RNA (1)...(19): siRNA sense strand
uuaacaugacggacagcaa

SEQ ID NO: 2234399 - RNA, 19 nt, Homo sapiens
  misc_RNA (1)...(19): siRNA sense strand
aagaagggaagcugcauau

SEQ ID NO: 2234400 - RNA, 19 nt, Homo sapiens
  misc_RNA (1)...(19): siRNA sense strand
gaagugguggcgugggaau

SEQ ID NO: 2234401 - RNA, 19 nt, Homo sapiens
  misc_RNA (1)...(19): siRNA sense strand
auacaaaucacggaagaau

SEQ ID NO: 2234402 - RNA, 19 nt, Homo sapiens
  misc_RNA (1)...(19): siRNA sense strand
cggacagcaacaaagacaa

SEQ ID NO: 2234403 - RNA, 19 nt, Homo sapiens
  misc_RNA (1)...(19): siRNA sense strand
gguucuccuuaccgggaua

SEQ ID NO: 2234404 - RNA, 19 nt, Homo sapiens
  misc_RNA (1)...(19): siRNA sense strand
ggaaaaugagccuguuaau

SEQ ID NO: 2234405 - RNA, 19 nt, Homo sapiens
  misc_RNA (1)...(19): siRNA sense strand
caguagagagaauggaauc

SEQ ID NO: 2234406 - RNA, 19 nt, Homo sapiens
  misc_RNA (1)...(19): siRNA sense strand
augccuaacaccacauuaa

SEQ ID NO: 2234407 - RNA, 19 nt, Homo sapiens
  misc_RNA (1)...(19): siRNA sense strand
cuggaacucuauagguaca

SEQ ID NO: 2234408 - RNA, 19 nt, Homo sapiens
  misc_RNA (1)...(19): siRNA sense strand
cugaagcggcucugaugua

SEQ ID NO: 2234409 - RNA, 19 nt, Homo sapiens
  misc_RNA (1)...(19): siRNA sense strand
cuguguacucuuugugauu

SEQ ID NO: 2234410 - RNA, 19 nt, Homo sapiens
  misc_RNA (1)...(19): siRNA sense strand
ccagaauaguuggagggau

SEQ ID NO: 2234411 - RNA, 19 nt, Homo sapiens
  misc_RNA (1)...(19): siRNA sense strand
cagcauuaacagaaaccga

SEQ ID NO: 2234412 - RNA, 19 nt, Homo sapiens
  misc_RNA (1)...(19): siRNA sense strand
cgguggacaacaaagauuu

SEQ ID NO: 2234413 - RNA, 19 nt, Homo sapiens
  misc_RNA (1)...(19): siRNA sense strand
uuggauggcaugaugacaa

SEQ ID NO: 2234414 - RNA, 19 nt, Homo sapiens
  misc_RNA (1)...(19): siRNA sense strand
uggcaaagcaaaccaagau

SEQ ID NO: 2234415 - RNA, 19 nt, Homo sapiens
  misc_RNA (1)...(19): siRNA sense strand
cuuuaugacacuuggaaua

SEQ ID NO: 2234416 - RNA, 19 nt, Homo sapiens
  misc_RNA (1)...(19): siRNA sense strand
acucagacgugguggaaaa

SEQ ID NO: 2234417 - RNA, 19 nt, Homo sapiens
  misc_RNA (1)...(19): siRNA sense strand
acucaaaauucgucaguua

SEQ ID NO: 2234418 - RNA, 19 nt, Homo sapiens
  misc_RNA (1)...(19): siRNA sense strand
ggaugaugccaauggacaa

SEQ ID NO: 2234419 - RNA, 19 nt, Homo sapiens
  misc_RNA (1)...(19): siRNA sense strand
aggcauuagcuaugggaau

SEQ ID NO: 2234420 - RNA, 19 nt, Homo sapiens
  misc_RNA (1)...(19): siRNA sense strand
cagaaagucaaaagggaaa

SEQ ID NO: 2234421 - RNA, 19 nt, Homo sapiens
  misc_RNA (1)...(19): siRNA sense strand
gagaaaugguggaggggca

SEQ ID NO: 2234422 - RNA, 19 nt, Homo sapiens
  misc_RNA (1)...(19): siRNA sense strand
gugccaugguagaagaauu

SEQ ID NO: 2234423 - RNA, 19 nt, Homo sapiens
  misc_RNA (1)...(19): siRNA sense strand
ugaaauuagacuuguggaa

SEQ ID NO: 2234424 - RNA, 19 nt, Homo sapiens
  misc_RNA (1)...(19): siRNA sense strand
cugcauaugaugaaggaga

SEQ ID NO: 2234425 - RNA, 19 nt, Homo sapiens
  misc_RNA (1)...(19): siRNA sense strand
ggccugaauaugacagaaa

SEQ ID NO: 2234426 - RNA, 19 nt, Homo sapiens
  misc_RNA (1)...(19): siRNA sense strand
caggauagugggaggcauu

SEQ ID NO: 2234427 - RNA, 19 nt, Homo sapiens
  misc_RNA (1)...(19): siRNA sense strand
agggaaagccagcgaacau

SEQ ID NO: 2234428 - RNA, 19 nt, Homo sapiens
  misc_RNA (1)...(19): siRNA sense strand
gcugcaagaggaaggcaaa

SEQ ID NO: 2234429 - RNA, 19 nt, Homo sapiens
  misc_RNA (1)...(19): siRNA sense strand
ugguagaagaauugaggau

SEQ ID NO: 2234430 - RNA, 19 nt, Homo sapiens
  misc_RNA (1)...(19): siRNA sense strand
gcauaugaugaaggagaaa

SEQ ID NO: 2234431 - RNA, 19 nt, Homo sapiens
  misc_RNA (1)...(19): siRNA sense strand
augacaggguucagaauau

SEQ ID NO: 2234432 - RNA, 19 nt, Homo sapiens
  misc_RNA (1)...(19): siRNA sense strand
gagucuaauuaaagaggca

SEQ ID NO: 2234433 - RNA, 19 nt, Homo sapiens
  misc_RNA (1)...(19): siRNA sense strand
guucugagcucaugcccaa

SEQ ID NO: 2234434 - RNA, 19 nt, Homo sapiens
  misc_RNA (1)...(19): siRNA sense strand
cagaagguugccagguaaa

SEQ ID NO: 2234435 - RNA, 19 nt, Homo sapiens
  misc_RNA (1)...(19): siRNA sense strand
gguaaagaaaccauggcau

SEQ ID NO: 2234436 - RNA, 19 nt, Homo sapiens
  misc_RNA (1)...(19): siRNA sense strand
aggaagaaggucuagaaaa

SEQ ID NO: 2234437 - RNA, 19 nt, Homo sapiens
  misc_RNA (1)...(19): siRNA sense strand
acuuguggaagaugggaaa

SEQ ID NO: 2234438 - RNA, 19 nt, Homo sapiens
  misc_RNA (1)...(19): siRNA sense strand
ggaauggaaugguucguga

SEQ ID NO: 2234439 - RNA, 19 nt, Homo sapiens
  misc_RNA (1)...(19): siRNA sense strand
ccgcaagcccaaugguaca

SEQ ID NO: 2234440 - RNA, 19 nt, Homo sapiens
  misc_RNA (1)...(19): siRNA sense strand
caagauagaauauggagca

SEQ ID NO: 2234441 - RNA, 19 nt, Homo sapiens
  misc_RNA (1)...(19): siRNA sense strand
gguuaaaacauaagccaca

SEQ ID NO: 2234442 - RNA, 19 nt, Homo sapiens
  misc_RNA (1)...(19): siRNA sense strand
ugguaaugaucgauuugaa

SEQ ID NO: 2234443 - RNA, 19 nt, Homo sapiens
  misc_RNA (1)...(19): siRNA sense strand
caaaaguaaugaagaagga

SEQ ID NO: 2234444 - RNA, 19 nt, Homo sapiens
  misc_RNA (1)...(19): siRNA sense strand
ugcauaugaugaaggagaa

SEQ ID NO: 2234445 - RNA, 19 nt, Homo sapiens
  misc_RNA (1)...(19): siRNA sense strand
agguauaaucuucgacuca

SEQ ID NO: 2234446 - RNA, 19 nt, Homo sapiens
  misc_RNA (1)...(19): siRNA sense strand
gggaaugaugacagaauac

SEQ ID NO: 2234447 - RNA, 19 nt, Homo sapiens
  misc_RNA (1)...(19): siRNA sense strand
auguugagcccuaccgaua

SEQ ID NO: 2234448 - RNA, 19 nt, Homo sapiens
  misc_RNA (1)...(19): siRNA sense strand
aagaaggaauccagcgagu

SEQ ID NO: 2234449 - RNA, 19 nt, Homo sapiens
  misc_RNA (1)...(19): siRNA sense strand
gaaaaguggucgauggaac

SEQ ID NO: 2234450 - RNA, 19 nt, Homo sapiens
  misc_RNA (1)...(19): siRNA sense strand
auauggagcaguagaggau

SEQ ID NO: 2234451 - RNA, 19 nt, Homo sapiens
  misc_RNA (1)...(19): siRNA sense strand
augcaaaacccuuacuaaa

SEQ ID NO: 2234452 - RNA, 19 nt, Homo sapiens
  misc_RNA (1)...(19): siRNA sense strand
acagaaagucaaaagggaa

SEQ ID NO: 2234453 - RNA, 19 nt, Homo sapiens
  misc_RNA (1)...(19): siRNA sense strand
aguccuuaugagugguaua

SEQ ID NO: 2234454 - RNA, 19 nt, Homo sapiens
  misc_RNA (1)...(19): siRNA sense strand
caaugggagcugaggaacu

SEQ ID NO: 2234455 - RNA, 19 nt, Homo sapiens
  misc_RNA (1)...(19): siRNA sense strand
gcagcaagguucugagcuc

SEQ ID NO: 2234456 - RNA, 19 nt, Homo sapiens
  misc_RNA (1)...(19): siRNA sense strand
ucugaaggaagaaggucua

SEQ ID NO: 2234457 - RNA, 19 nt, Homo sapiens
  misc_RNA (1)...(19): siRNA sense strand
ccagcgaacaucacagauu

SEQ ID NO: 2234458 - RNA, 19 nt, Homo sapiens
  misc_RNA (1)...(19): siRNA sense strand
cagacgugguggaaaacaa

SEQ ID NO: 2234459 - RNA, 19 nt, Homo sapiens
  misc_RNA (1)...(19): siRNA sense strand
cagcggaacuguaaccuga

SEQ ID NO: 2234460 - RNA, 19 nt, Homo sapiens
  misc_RNA (1)...(19): siRNA sense strand
cugcaaugcucugggaguu

SEQ ID NO: 2234461 - RNA, 19 nt, Homo sapiens
  misc_RNA (1)...(19): siRNA sense strand
ugaucgauuugaaggcuau

SEQ ID NO: 2234462 - RNA, 19 nt, Homo sapiens
  misc_RNA (1)...(19): siRNA sense strand
ccuaugauacccagaagau

SEQ ID NO: 2234463 - RNA, 19 nt, Homo sapiens
  misc_RNA (1)...(19): siRNA sense strand
cagaaacagaacauugcua

SEQ ID NO: 2234464 - RNA, 19 nt, Homo sapiens
  misc_RNA (1)...(19): siRNA sense strand
cgacauaaacccuggcgcu

SEQ ID NO: 2234465 - RNA, 19 nt, Homo sapiens
  misc_RNA (1)...(19): siRNA sense strand
agagaaggucaucgacuuu

SEQ ID NO: 2234466 - RNA, 19 nt, Homo sapiens
  misc_RNA (1)...(19): siRNA sense strand
aauauggagcccaggauga

SEQ ID NO: 2234467 - RNA, 19 nt, Homo sapiens
  misc_RNA (1)...(19): siRNA sense strand
cuaugggaaugaugacaga

SEQ ID NO: 2234468 - RNA, 19 nt, Homo sapiens
  misc_RNA (1)...(19): siRNA sense strand
uuguggaagaugggaaaua

SEQ ID NO: 2234469 - RNA, 19 nt, Homo sapiens
  misc_RNA (1)...(19): siRNA sense strand
agcuaaacaaaccaagaua

SEQ ID NO: 2234470 - RNA, 19 nt, Homo sapiens
  misc_RNA (1)...(19): siRNA sense strand
gugaacacaauuaacagaa

SEQ ID NO: 2234471 - RNA, 19 nt, Homo sapiens
  misc_RNA (1)...(19): siRNA sense strand
uugcaguguaaucgacaua

SEQ ID NO: 2234472 - RNA, 19 nt, Homo sapiens
  misc_RNA (1)...(19): siRNA sense strand
aaggaagaaggucuagaaa

SEQ ID NO: 2234473 - RNA, 19 nt, Homo sapiens
  misc_RNA (1)...(19): siRNA sense strand
cuuuaugacacuuggaaua

SEQ ID NO: 2234474 - RNA, 19 nt, Homo sapiens
  misc_RNA (1)...(19): siRNA sense strand
acucagacgugguggaaaa

SEQ ID NO: 2234475 - RNA, 19 nt, Homo sapiens
  misc_RNA (1)...(19): siRNA sense strand
acucaaaauucgucaguua

SEQ ID NO: 2234476 - RNA, 19 nt, Homo sapiens
  misc_RNA (1)...(19): siRNA sense strand
ggaugaugccaauggacaa

SEQ ID NO: 2234477 - RNA, 19 nt, Homo sapiens
  misc_RNA (1)...(19): siRNA sense strand
aggcauuagcuaugggaau

SEQ ID NO: 2234478 - RNA, 19 nt, Homo sapiens
  misc_RNA (1)...(19): siRNA sense strand
cagaaagucaaaagggaaa

SEQ ID NO: 2234479 - RNA, 19 nt, Homo sapiens
  misc_RNA (1)...(19): siRNA sense strand
gagaaaugguggaggggca

SEQ ID NO: 2234480 - RNA, 19 nt, Homo sapiens
  misc_RNA (1)...(19): siRNA sense strand
ugaaauuagacuuguggaa

SEQ ID NO: 2234481 - RNA, 19 nt, Homo sapiens
  misc_RNA (1)...(19): siRNA sense strand
cugcauaugaugaaggaga

SEQ ID NO: 2234482 - RNA, 19 nt, Homo sapiens
  misc_RNA (1)...(19): siRNA sense strand
ggccugaauaugacagaaa

SEQ ID NO: 2234483 - RNA, 19 nt, Homo sapiens
  misc_RNA (1)...(19): siRNA sense strand
caggauagugggaggcauu

SEQ ID NO: 2234484 - RNA, 19 nt, Homo sapiens
  misc_RNA (1)...(19): siRNA sense strand
agggaaagccagcgaacau

SEQ ID NO: 2234485 - RNA, 19 nt, Homo sapiens
  misc_RNA (1)...(19): siRNA sense strand
gcugcaagaggaaggcaaa

SEQ ID NO: 2234486 - RNA, 19 nt, Homo sapiens
  misc_RNA (1)...(19): siRNA sense strand
gcauaugaugaaggagaaa

SEQ ID NO: 2234487 - RNA, 19 nt, Homo sapiens
  misc_RNA (1)...(19): siRNA sense strand
augacaggguucagaauau

SEQ ID NO: 2234488 - RNA, 19 nt, Homo sapiens
  misc_RNA (1)...(19): siRNA sense strand
gagucuaauuaaagaggca

SEQ ID NO: 2234489 - RNA, 19 nt, Homo sapiens
  misc_RNA (1)...(19): siRNA sense strand
guucugagcucaugcccaa

SEQ ID NO: 2234490 - RNA, 19 nt, Homo sapiens
  misc_RNA (1)...(19): siRNA sense strand
aggaagaaggucuagaaaa

SEQ ID NO: 2234491 - RNA, 19 nt, Homo sapiens
  misc_RNA (1)...(19): siRNA sense strand
acuuguggaagaugggaaa

SEQ ID NO: 2234492 - RNA, 19 nt, Homo sapiens
  misc_RNA (1)...(19): siRNA sense strand
ggaauggaaugguucguga

SEQ ID NO: 2234493 - RNA, 19 nt, Homo sapiens
  misc_RNA (1)...(19): siRNA sense strand
ccgcaagcccaaugguaca

SEQ ID NO: 2234494 - RNA, 19 nt, Homo sapiens
  misc_RNA (1)...(19): siRNA sense strand
caagauagaauauggagca

SEQ ID NO: 2234495 - RNA, 19 nt, Homo sapiens
  misc_RNA (1)...(19): siRNA sense strand
ugguaaugaucgauuugaa

SEQ ID NO: 2234496 - RNA, 19 nt, Homo sapiens
  misc_RNA (1)...(19): siRNA sense strand
caaaaguaaugaagaagga

SEQ ID NO: 2234497 - RNA, 19 nt, Homo sapiens
  misc_RNA (1)...(19): siRNA sense strand
ugcauaugaugaaggagaa

SEQ ID NO: 2234498 - RNA, 19 nt, Homo sapiens
  misc_RNA (1)...(19): siRNA sense strand
agguauaaucuucgacuca

SEQ ID NO: 2234499 - RNA, 19 nt, Homo sapiens
  misc_RNA (1)...(19): siRNA sense strand
gggaaugaugacagaauac

SEQ ID NO: 2234500 - RNA, 19 nt, Homo sapiens
  misc_RNA (1)...(19): siRNA sense strand
auguugagcccuaccgaua

SEQ ID NO: 2234501 - RNA, 19 nt, Homo sapiens
  misc_RNA (1)...(19): siRNA sense strand
aagaaggaauccagcgagu

SEQ ID NO: 2234502 - RNA, 19 nt, Homo sapiens
  misc_RNA (1)...(19): siRNA sense strand
gaaaaguggucgauggaac

SEQ ID NO: 2234503 - RNA, 19 nt, Homo sapiens
  misc_RNA (1)...(19): siRNA sense strand
auauggagcaguagaggau

SEQ ID NO: 2234504 - RNA, 19 nt, Homo sapiens
  misc_RNA (1)...(19): siRNA sense strand
augcaaaacccuuacuaaa

SEQ ID NO: 2234505 - RNA, 19 nt, Homo sapiens
  misc_RNA (1)...(19): siRNA sense strand
acagaaagucaaaagggaa

SEQ ID NO: 2234506 - RNA, 19 nt, Homo sapiens
  misc_RNA (1)...(19): siRNA sense strand
aguccuuaugagugguaua

SEQ ID NO: 2234507 - RNA, 19 nt, Homo sapiens
  misc_RNA (1)...(19): siRNA sense strand
caaugggagcugaggaacu

SEQ ID NO: 2234508 - RNA, 19 nt, Homo sapiens
  misc_RNA (1)...(19): siRNA sense strand
gcagcaagguucugagcuc

SEQ ID NO: 2234509 - RNA, 19 nt, Homo sapiens
  misc_RNA (1)...(19): siRNA sense strand
ucugaaggaagaaggucua

SEQ ID NO: 2234510 - RNA, 19 nt, Homo sapiens
  misc_RNA (1)...(19): siRNA sense strand
ccagcgaacaucacagauu

SEQ ID NO: 2234511 - RNA, 19 nt, Homo sapiens
  misc_RNA (1)...(19): siRNA sense strand
cagacgugguggaaaacaa

SEQ ID NO: 2234512 - RNA, 19 nt, Homo sapiens
  misc_RNA (1)...(19): siRNA sense strand
cagcggaacuguaaccuga

SEQ ID NO: 2234513 - RNA, 19 nt, Homo sapiens
  misc_RNA (1)...(19): siRNA sense strand
cugcaaugcucugggaguu

SEQ ID NO: 2234514 - RNA, 19 nt, Homo sapiens
  misc_RNA (1)...(19): siRNA sense strand
ugaucgauuugaaggcuau

SEQ ID NO: 2234515 - RNA, 19 nt, Homo sapiens
  misc_RNA (1)...(19): siRNA sense strand
ccuaugauacccagaagau

SEQ ID NO: 2234516 - RNA, 19 nt, Homo sapiens
  misc_RNA (1)...(19): siRNA sense strand
cagaaacagaacauugcua

SEQ ID NO: 2234517 - RNA, 19 nt, Homo sapiens
  misc_RNA (1)...(19): siRNA sense strand
cgacauaaacccuggcgcu

SEQ ID NO: 2234518 - RNA, 19 nt, Homo sapiens
  misc_RNA (1)...(19): siRNA sense strand
agagaaggucaucgacuuu

SEQ ID NO: 2234519 - RNA, 19 nt, Homo sapiens
  misc_RNA (1)...(19): siRNA sense strand
aauauggagcccaggauga

SEQ ID NO: 2234520 - RNA, 19 nt, Homo sapiens
  misc_RNA (1)...(19): siRNA sense strand
cuaugggaaugaugacaga

SEQ ID NO: 2234521 - RNA, 19 nt, Homo sapiens
  misc_RNA (1)...(19): siRNA sense strand
uuguggaagaugggaaaua

SEQ ID NO: 2234522 - RNA, 19 nt, Homo sapiens
  misc_RNA (1)...(19): siRNA sense strand
agcuaaacaaaccaagaua

SEQ ID NO: 2234523 - RNA, 19 nt, Homo sapiens
  misc_RNA (1)...(19): siRNA sense strand
gugaacacaauuaacagaa

SEQ ID NO: 2234524 - RNA, 19 nt, Homo sapiens
  misc_RNA (1)...(19): siRNA sense strand
uugcaguguaaucgacaua

SEQ ID NO: 2234525 - RNA, 19 nt, Homo sapiens
  misc_RNA (1)...(19): siRNA sense strand
aaggaagaaggucuagaaa

SEQ ID NO: 2234526 - RNA, 19 nt, Homo sapiens
  misc_RNA (1)...(19): siRNA sense strand
ccauuuuggaagagccuua

SEQ ID NO: 2234527 - RNA, 19 nt, Homo sapiens
  misc_RNA (1)...(19): siRNA sense strand
cugcugaugauuuagcuaa

SEQ ID NO: 2234528 - RNA, 19 nt, Homo sapiens
  misc_RNA (1)...(19): siRNA sense strand
ccgcaaaacagcagagaga

SEQ ID NO: 2234529 - RNA, 19 nt, Homo sapiens
  misc_RNA (1)...(19): siRNA sense strand
gcaaaacagcagagagaga

SEQ ID NO: 2234530 - RNA, 19 nt, Homo sapiens
  misc_RNA (1)...(19): siRNA sense strand
ggucugagcugaugcccaa

SEQ ID NO: 2234531 - RNA, 19 nt, Homo sapiens
  misc_RNA (1)...(19): siRNA sense strand
cuuuagaccuggagcccua

SEQ ID NO: 2234532 - RNA, 19 nt, Homo sapiens
  misc_RNA (1)...(19): siRNA sense strand
agaacaacgaggagggcau

SEQ ID NO: 2234533 - RNA, 19 nt, Homo sapiens
  misc_RNA (1)...(19): siRNA sense strand
cugcauaucaugaaggaga

SEQ ID NO: 2234534 - RNA, 19 nt, Homo sapiens
  misc_RNA (1)...(19): siRNA sense strand
cggcgcuggugaagaacaa

SEQ ID NO: 2234535 - RNA, 19 nt, Homo sapiens
  misc_RNA (1)...(19): siRNA sense strand
caaggaggcucaaugggaa

SEQ ID NO: 2234536 - RNA, 19 nt, Homo sapiens
  misc_RNA (1)...(19): siRNA sense strand
ggcucaaugggaaggauua

SEQ ID NO: 2234537 - RNA, 19 nt, Homo sapiens
  misc_RNA (1)...(19): siRNA sense strand
caacaaaacuaguggcuug

SEQ ID NO: 2234538 - RNA, 19 nt, Homo sapiens
  misc_RNA (1)...(19): siRNA sense strand
ucauugacuccaagggcua

SEQ ID NO: 2234539 - RNA, 19 nt, Homo sapiens
  misc_RNA (1)...(19): siRNA sense strand
gagucaagcacaagccuca

SEQ ID NO: 2234540 - RNA, 19 nt, Homo sapiens
  misc_RNA (1)...(19): siRNA sense strand
ucaugaaugccgaggagca

SEQ ID NO: 2234541 - RNA, 19 nt, Homo sapiens
  misc_RNA (1)...(19): siRNA sense strand
ggaaggauuaacuggacga

SEQ ID NO: 2234542 - RNA, 19 nt, Homo sapiens
  misc_RNA (1)...(19): siRNA sense strand
augacaagggccaguggaa

SEQ ID NO: 2234543 - RNA, 19 nt, Homo sapiens
  misc_RNA (1)...(19): siRNA sense strand
ggauucucaauguggacaa

SEQ ID NO: 2234544 - RNA, 19 nt, Homo sapiens
  misc_RNA (1)...(19): siRNA sense strand
augaccgguucgagggcua

SEQ ID NO: 2234545 - RNA, 19 nt, Homo sapiens
  misc_RNA (1)...(19): siRNA sense strand
gggcaugaugacugaguac

SEQ ID NO: 2234546 - RNA, 19 nt, Homo sapiens
  misc_RNA (1)...(19): siRNA sense strand
ccuuaugagugguacgaug

SEQ ID NO: 2234547 - RNA, 19 nt, Homo sapiens
  misc_RNA (1)...(19): siRNA sense strand
uggaauugcccuucagaaa

SEQ ID NO: 2234548 - RNA, 19 nt, Homo sapiens
  misc_RNA (1)...(19): siRNA sense strand
gcacagaauccaaagcgaa

SEQ ID NO: 2234549 - RNA, 19 nt, Homo sapiens
  misc_RNA (1)...(19): siRNA sense strand
auggaagcacggagagaaa

SEQ ID NO: 2234550 - RNA, 19 nt, Homo sapiens
  misc_RNA (1)...(19): siRNA sense strand
gggaugaaugugaagaaau

SEQ ID NO: 2234551 - RNA, 19 nt, Homo sapiens
  misc_RNA (1)...(19): siRNA sense strand
cuucaugauccaagaggaa

SEQ ID NO: 2234552 - RNA, 19 nt, Homo sapiens
  misc_RNA (1)...(19): siRNA sense strand
cggcagcuguggaagaaau

SEQ ID NO: 2234553 - RNA, 19 nt, Homo sapiens
  misc_RNA (1)...(19): siRNA sense strand
ugggaagcauggcaagaaa

SEQ ID NO: 2234554 - RNA, 19 nt, Homo sapiens
  misc_RNA (1)...(19): siRNA sense strand
gaaacuuagccaaagggaa

SEQ ID NO: 2234555 - RNA, 19 nt, Homo sapiens
  misc_RNA (1)...(19): siRNA sense strand
cgucaucguggaagacaua

SEQ ID NO: 2234556 - RNA, 19 nt, Homo sapiens
  misc_RNA (1)...(19): siRNA sense strand
cugaagaagcuuuccagaa

SEQ ID NO: 2234557 - RNA, 19 nt, Homo sapiens
  misc_RNA (1)...(19): siRNA sense strand
ggaagcacggagagaaaca

SEQ ID NO: 2234558 - RNA, 19 nt, Homo sapiens
  misc_RNA (1)...(19): siRNA sense strand
uggacaugguuucagauaa

SEQ ID NO: 2234559 - RNA, 19 nt, Homo sapiens
  misc_RNA (1)...(19): siRNA sense strand
ccaaccggcagaaggauaa

SEQ ID NO: 2234560 - RNA, 19 nt, Homo sapiens
  misc_RNA (1)...(19): siRNA sense strand
aggacugggcacagaacaa

SEQ ID NO: 2234561 - RNA, 19 nt, Homo sapiens
  misc_RNA (1)...(19): siRNA sense strand
cacuauagauggugagaag

SEQ ID NO: 2234562 - RNA, 19 nt, Homo sapiens
  misc_RNA (1)...(19): siRNA sense strand
acgcuugguuauugggaga

SEQ ID NO: 2234563 - RNA, 19 nt, Homo sapiens
  misc_RNA (1)...(19): siRNA sense strand
aagaggaauuuguggacca

SEQ ID NO: 2234564 - RNA, 19 nt, Homo sapiens
  misc_RNA (1)...(19): siRNA sense strand
cggucaugcugaagaucau

SEQ ID NO: 2234565 - RNA, 19 nt, Homo sapiens
  misc_RNA (1)...(19): siRNA sense strand
ggaauggaaugaucgguga

SEQ ID NO: 2234566 - RNA, 19 nt, Homo sapiens
  misc_RNA (1)...(19): siRNA sense strand
caucaguacaugaccaaau

SEQ ID NO: 2234567 - RNA, 19 nt, Homo sapiens
  misc_RNA (1)...(19): siRNA sense strand
acgagaagaacgaggugau

SEQ ID NO: 2234568 - RNA, 19 nt, Homo sapiens
  misc_RNA (1)...(19): siRNA sense strand
cuauagauggugagaagga

SEQ ID NO: 2234569 - RNA, 19 nt, Homo sapiens
  misc_RNA (1)...(19): siRNA sense strand
cggcagaacuccacgcacu

SEQ ID NO: 2234570 - RNA, 19 nt, Homo sapiens
  misc_RNA (1)...(19): siRNA sense strand
cugaagaucaugcaggauu

SEQ ID NO: 2234571 - RNA, 19 nt, Homo sapiens
  misc_RNA (1)...(19): siRNA sense strand
gcauaagccucaaggacag

SEQ ID NO: 2234572 - RNA, 19 nt, Homo sapiens
  misc_RNA (1)...(19): siRNA sense strand
ucaugauccaagaggaauu

SEQ ID NO: 2234573 - RNA, 19 nt, Homo sapiens
  misc_RNA (1)...(19): siRNA sense strand
ccuaauggaagcacggaga

SEQ ID NO: 2234574 - RNA, 19 nt, Homo sapiens
  misc_RNA (1)...(19): siRNA sense strand
ugacgggaucccagagcaa

SEQ ID NO: 2234575 - RNA, 19 nt, Homo sapiens
  misc_RNA (1)...(19): siRNA sense strand
acuauguauuccagggaca

SEQ ID NO: 2234576 - RNA, 19 nt, Homo sapiens
  misc_RNA (1)...(19): siRNA sense strand
caagcaaacucucggggaa

SEQ ID NO: 2234577 - RNA, 19 nt, Homo sapiens
  misc_RNA (1)...(19): siRNA sense strand
caucuaugaucauggcuga

SEQ ID NO: 2234578 - RNA, 19 nt, Homo sapiens
  misc_RNA (1)...(19): siRNA sense strand
gagacgugugugaggaaca

SEQ ID NO: 2234579 - RNA, 19 nt, Homo sapiens
  misc_RNA (1)...(19): siRNA sense strand
gaggacagcaagaggagca

SEQ ID NO: 2234580 - RNA, 19 nt, Homo sapiens
  misc_RNA (1)...(19): siRNA sense strand
gauuugggacagugccuaa

SEQ ID NO: 2234581 - RNA, 19 nt, Homo sapiens
  misc_RNA (1)...(19): siRNA sense strand
ccgagacgugugugaggaa

SEQ ID NO: 2234582 - RNA, 19 nt, Homo sapiens
  misc_RNA (1)...(19): siRNA sense strand
augccgcagucuugaauua

SEQ ID NO: 2234583 - RNA, 19 nt, Homo sapiens
  misc_RNA (1)...(19): siRNA sense strand
ggcaagugggagaaccaua

SEQ ID NO: 2234584 - RNA, 19 nt, Homo sapiens
  misc_RNA (1)...(19): siRNA sense strand
aaguuaacaauguguggaa

SEQ ID NO: 2234585 - RNA, 19 nt, Homo sapiens
  misc_RNA (1)...(19): siRNA sense strand
ggacagugccuaauggaag

SEQ ID NO: 2234586 - RNA, 19 nt, Homo sapiens
  misc_RNA (1)...(19): siRNA sense strand
gugagaccagcgagcgaua

SEQ ID NO: 2234587 - RNA, 19 nt, Homo sapiens
  misc_RNA (1)...(19): siRNA sense strand
caucccaggcggugaauga

SEQ ID NO: 2234588 - RNA, 19 nt, Homo sapiens
  misc_RNA (1)...(19): siRNA sense strand
guuccaaagacgaggcugu

SEQ ID NO: 2234589 - RNA, 19 nt, Homo sapiens
  misc_RNA (1)...(19): siRNA sense strand
uggcaagaaaguuaacaau

SEQ ID NO: 2234590 - RNA, 19 nt, Homo sapiens
  misc_RNA (1)...(19): siRNA sense strand
ccgcagucuugaauuacaa

SEQ ID NO: 2234591 - RNA, 19 nt, Homo sapiens
  misc_RNA (1)...(19): siRNA sense strand
gagugcacauugaagaaaa

SEQ ID NO: 2234592 - RNA, 19 nt, Homo sapiens
  misc_RNA (1)...(19): siRNA sense strand
aagaauggacucacccaaa

SEQ ID NO: 2234593 - RNA, 19 nt, Homo sapiens
  misc_RNA (1)...(19): siRNA sense strand
acugugagccggaugacaa

SEQ ID NO: 2234594 - RNA, 19 nt, Homo sapiens
  misc_RNA (1)...(19): siRNA sense strand
cauucgucaucguggaaga

SEQ ID NO: 2234595 - RNA, 19 nt, Homo sapiens
  misc_RNA (1)...(19): siRNA sense strand
ccaaugggaagcauggcaa

SEQ ID NO: 2234596 - RNA, 19 nt, Homo sapiens
  misc_RNA (1)...(19): siRNA sense strand
gccaaccggcagaaggaua

SEQ ID NO: 2234597 - RNA, 19 nt, Homo sapiens
  misc_RNA (1)...(19): siRNA sense strand
cuaaagggaccaccagcaa

SEQ ID NO: 2234598 - RNA, 19 nt, Homo sapiens
  misc_RNA (1)...(19): siRNA sense strand
gggacagugccuaauggaa

SEQ ID NO: 2234599 - RNA, 19 nt, Homo sapiens
  misc_RNA (1)...(19): siRNA sense strand
ucagaaaggaguagaggac

SEQ ID NO: 2234600 - RNA, 19 nt, Homo sapiens
  misc_RNA (1)...(19): siRNA sense strand
cggcagaaggauaaccuca

SEQ ID NO: 2234601 - RNA, 19 nt, Homo sapiens
  misc_RNA (1)...(19): siRNA sense strand
ucguacuguuccagggaca

SEQ ID NO: 2234602 - RNA, 19 nt, Homo sapiens
  misc_RNA (1)...(19): siRNA sense strand
cuggagacccuguggcuca

SEQ ID NO: 2234603 - RNA, 19 nt, Homo sapiens
  misc_RNA (1)...(19): siRNA sense strand
aggcaacagcagagaauag

SEQ ID NO: 2234604 - RNA, 19 nt, Homo sapiens
  misc_RNA (1)...(19): siRNA sense strand
cgcuaaauauugcggugau

SEQ ID NO: 2234605 - RNA, 19 nt, Homo sapiens
  misc_RNA (1)...(19): siRNA sense strand
gaauggaaugaucggugaa

SEQ ID NO: 2234606 - RNA, 19 nt, Homo sapiens
  misc_RNA (1)...(19): siRNA sense strand
gggaaccugacaacaguaa

SEQ ID NO: 2234607 - RNA, 19 nt, Homo sapiens
  misc_RNA (1)...(19): siRNA sense strand
ggaaguucgucaaaaucaa

SEQ ID NO: 2234608 - RNA, 19 nt, Homo sapiens
  misc_RNA (1)...(19): siRNA sense strand
ugucaugguuucaagaagu

SEQ ID NO: 2234609 - RNA, 19 nt, Homo sapiens
  misc_RNA (1)...(19): siRNA sense strand
aaggagaggaagugggaaa

SEQ ID NO: 2234610 - RNA, 19 nt, Homo sapiens
  misc_RNA (1)...(19): siRNA sense strand
acgcauagucacugagaau

SEQ ID NO: 2234611 - RNA, 19 nt, Homo sapiens
  misc_RNA (1)...(19): siRNA sense strand
gggagaagaaccugaccaa

SEQ ID NO: 2234612 - RNA, 19 nt, Homo sapiens
  misc_RNA (1)...(19): siRNA sense strand
cuucaugauccaagaggaa

SEQ ID NO: 2234613 - RNA, 19 nt, Homo sapiens
  misc_RNA (1)...(19): siRNA sense strand
ucaugauccaagaggaaua

SEQ ID NO: 2234614 - RNA, 19 nt, Homo sapiens
  misc_RNA (1)...(19): siRNA sense strand
cagaagaagaaccggaaca

SEQ ID NO: 2234615 - RNA, 19 nt, Homo sapiens
  misc_RNA (1)...(19): siRNA sense strand
ugggcauguuuaugagaaa

SEQ ID NO: 2234616 - RNA, 19 nt, Homo sapiens
  misc_RNA (1)...(19): siRNA sense strand
augggaacaucgagggcaa

SEQ ID NO: 2234617 - RNA, 19 nt, Homo sapiens
  misc_RNA (1)...(19): siRNA sense strand
ccgcagcaccauugagaau

SEQ ID NO: 2234618 - RNA, 19 nt, Homo sapiens
  misc_RNA (1)...(19): siRNA sense strand
ccgaauguguccagagacu

SEQ ID NO: 2234619 - RNA, 19 nt, Homo sapiens
  misc_RNA (1)...(19): siRNA sense strand
cagacgaggagccggguua

SEQ ID NO: 2234620 - RNA, 19 nt, Homo sapiens
  misc_RNA (1)...(19): siRNA sense strand
acccgaaacuggugauaau

SEQ ID NO: 2234621 - RNA, 19 nt, Homo sapiens
  misc_RNA (1)...(19): siRNA sense strand
caucagugagguagagaga

SEQ ID NO: 2234622 - RNA, 19 nt, Homo sapiens
  misc_RNA (1)...(19): siRNA sense strand
cuaugauaauggcagauaa

SEQ ID NO: 2234623 - RNA, 19 nt, Homo sapiens
  misc_RNA (1)...(19): siRNA sense strand
ggacaucuguauagggaac

SEQ ID NO: 2234624 - RNA, 19 nt, Homo sapiens
  misc_RNA (1)...(19): siRNA sense strand
auuccaaggcccagaagaa

SEQ ID NO: 2234625 - RNA, 19 nt, Homo sapiens
  misc_RNA (1)...(19): siRNA sense strand
uggaagaauaugacuggua

SEQ ID NO: 2234626 - RNA, 19 nt, Homo sapiens
  misc_RNA (1)...(19): siRNA sense strand
aggcguaagcagcaauaua

SEQ ID NO: 2234627 - RNA, 19 nt, Homo sapiens
  misc_RNA (1)...(19): siRNA sense strand
ccguaaugcucaacaucau

SEQ ID NO: 2234628 - RNA, 19 nt, Homo sapiens
  misc_RNA (1)...(19): siRNA sense strand
cagagugagagauggaauu

SEQ ID NO: 2234629 - RNA, 19 nt, Homo sapiens
  misc_RNA (1)...(19): siRNA sense strand
caauauaaggacagccuga

SEQ ID NO: 2234630 - RNA, 19 nt, Homo sapiens
  misc_RNA (1)...(19): siRNA sense strand
uggcaagcaugggaagaaa

SEQ ID NO: 2234631 - RNA, 19 nt, Homo sapiens
  misc_RNA (1)...(19): siRNA sense strand
acuucagcccuguggguua

SEQ ID NO: 2234632 - RNA, 19 nt, Homo sapiens
  misc_RNA (1)...(19): siRNA sense strand
acggcagcacagagagaaa

SEQ ID NO: 2234633 - RNA, 19 nt, Homo sapiens
  misc_RNA (1)...(19): siRNA sense strand
ggguggaacugguagccau

SEQ ID NO: 2234634 - RNA, 19 nt, Homo sapiens
  misc_RNA (1)...(19): siRNA sense strand
ggaaccugcaugaggaaca

SEQ ID NO: 2234635 - RNA, 19 nt, Homo sapiens
  misc_RNA (1)...(19): siRNA sense strand
uggaagaacuggaagcucu

SEQ ID NO: 2234636 - RNA, 19 nt, Homo sapiens
  misc_RNA (1)...(19): siRNA sense strand
ucagugagguagagagaac

SEQ ID NO: 2234637 - RNA, 19 nt, Homo sapiens
  misc_RNA (1)...(19): siRNA sense strand
gcaagaagccccuggacau

SEQ ID NO: 2234638 - RNA, 19 nt, Homo sapiens
  misc_RNA (1)...(19): siRNA sense strand
ugaccaacguggaguggga

SEQ ID NO: 2234639 - RNA, 19 nt, Homo sapiens
  misc_RNA (1)...(19): siRNA sense strand
ccgacgagguggccaucaa

SEQ ID NO: 2234640 - RNA, 19 nt, Homo sapiens
  misc_RNA (1)...(19): siRNA sense strand
ccucuaugauaauggcaga

SEQ ID NO: 2234641 - RNA, 19 nt, Homo sapiens
  misc_RNA (1)...(19): siRNA sense strand
ucgcaauaacuaugcagaa

SEQ ID NO: 2234642 - RNA, 19 nt, Homo sapiens
  misc_RNA (1)...(19): siRNA sense strand
ccagaaucagcucaagaaa

SEQ ID NO: 2234643 - RNA, 19 nt, Homo sapiens
  misc_RNA (1)...(19): siRNA sense strand
ccagagugagagauggaau

SEQ ID NO: 2234644 - RNA, 19 nt, Homo sapiens
  misc_RNA (1)...(19): siRNA sense strand
cugaacaaggagaggaagu

SEQ ID NO: 2234645 - RNA, 19 nt, Homo sapiens
  misc_RNA (1)...(19): siRNA sense strand
acguaugggugaugauguu

SEQ ID NO: 2234646 - RNA, 19 nt, Homo sapiens
  misc_RNA (1)...(19): siRNA sense strand
gggaagaaaaucaauggaa

SEQ ID NO: 2234647 - RNA, 19 nt, Homo sapiens
  misc_RNA (1)...(19): siRNA sense strand
uuggagagguggucaugaa

SEQ ID NO: 2234648 - RNA, 19 nt, Homo sapiens
  misc_RNA (1)...(19): siRNA sense strand
ggcagcacagagagaaaua

SEQ ID NO: 2234649 - RNA, 19 nt, Homo sapiens
  misc_RNA (1)...(19): siRNA sense strand
ugacuacaucagugaggua

SEQ ID NO: 2234650 - RNA, 19 nt, Homo sapiens
  misc_RNA (1)...(19): siRNA sense strand
agaagaagaaccggaacaa

SEQ ID NO: 2234651 - RNA, 19 nt, Homo sapiens
  misc_RNA (1)...(19): siRNA sense strand
agaccgacccaaagagcau

SEQ ID NO: 2234652 - RNA, 19 nt, Homo sapiens
  misc_RNA (1)...(19): siRNA sense strand
ugauaauggcagauaagga

SEQ ID NO: 2234653 - RNA, 19 nt, Homo sapiens
  misc_RNA (1)...(19): siRNA sense strand
cagcaaugggcauguuuau

SEQ ID NO: 2234654 - RNA, 19 nt, Homo sapiens
  misc_RNA (1)...(19): siRNA sense strand
gcugggagcuagaggaggu

SEQ ID NO: 2234655 - RNA, 19 nt, Homo sapiens
  misc_RNA (1)...(19): siRNA sense strand
agacugaagagcaggagga

SEQ ID NO: 2234656 - RNA, 19 nt, Homo sapiens
  misc_RNA (1)...(19): siRNA sense strand
cagcacagagagaaauauu

SEQ ID NO: 2234657 - RNA, 19 nt, Homo sapiens
  misc_RNA (1)...(19): siRNA sense strand
ucagugaccuguacggcaa

SEQ ID NO: 2234658 - RNA, 19 nt, Homo sapiens
  misc_RNA (1)...(19): siRNA sense strand
gaagaauaugacugguaca

SEQ ID NO: 2234659 - RNA, 19 nt, Homo sapiens
  misc_RNA (1)...(19): siRNA sense strand
gcuaccaggacuuuguaaa

SEQ ID NO: 2234660 - RNA, 19 nt, Homo sapiens
  misc_RNA (1)...(19): siRNA sense strand
ggaaugguaugauuggaga

SEQ ID NO: 2234661 - RNA, 19 nt, Homo sapiens
  misc_RNA (1)...(19): siRNA sense strand
guauagggaaccaguccaa

SEQ ID NO: 2234662 - RNA, 19 nt, Homo sapiens
  misc_RNA (1)...(19): siRNA sense strand
acacagugccugcggaguu

SEQ ID NO: 2234663 - RNA, 19 nt, Homo sapiens
  misc_RNA (1)...(19): siRNA sense strand
cagggaaacuggaugccuu

SEQ ID NO: 2234664 - RNA, 19 nt, Homo sapiens
  misc_RNA (1)...(19): siRNA sense strand
ggaagaaaaucaauggaac

SEQ ID NO: 2234665 - RNA, 19 nt, Homo sapiens
  misc_RNA (1)...(19): siRNA sense strand
gaacuauauggcaggcaga

SEQ ID NO: 2234666 - RNA, 19 nt, Homo sapiens
  misc_RNA (1)...(19): siRNA sense strand
gugaugacuuuaagcgcga

SEQ ID NO: 2234667 - RNA, 19 nt, Homo sapiens
  misc_RNA (1)...(19): siRNA sense strand
acacagaccaggaagccau

SEQ ID NO: 2234668 - RNA, 19 nt, Homo sapiens
  misc_RNA (1)...(19): siRNA sense strand
guuucuggccugagcgaca

SEQ ID NO: 2234669 - RNA, 19 nt, Homo sapiens
  misc_RNA (1)...(19): siRNA sense strand
aagcagcaauauaaggaca

SEQ ID NO: 2234670 - RNA, 19 nt, Homo sapiens
  misc_RNA (1)...(19): siRNA sense strand
aagaagaaccggaacaaac

SEQ ID NO: 2234671 - RNA, 19 nt, Homo sapiens
  misc_RNA (1)...(19): siRNA sense strand
caacggcagcacagagaga

SEQ ID NO: 2234672 - RNA, 19 nt, Homo sapiens
  misc_RNA (1)...(19): siRNA sense strand
guuacaacacccacgagaa

SEQ ID NO: 2234673 - RNA, 19 nt, Homo sapiens
  misc_RNA (1)...(19): siRNA sense strand
cuucaugauccaagagcaa

SEQ ID NO: 2234674 - RNA, 19 nt, Homo sapiens
  misc_RNA (1)...(19): siRNA sense strand
cggccuucuuggagccaua

SEQ ID NO: 2234675 - RNA, 19 nt, Homo sapiens
  misc_RNA (1)...(19): siRNA sense strand
ucaugauccaagagcaaua

SEQ ID NO: 2234676 - RNA, 19 nt, Homo sapiens
  misc_RNA (1)...(19): siRNA sense strand
ucaacuacauggcaggcaa

SEQ ID NO: 2234677 - RNA, 19 nt, Homo sapiens
  misc_RNA (1)...(19): siRNA sense strand
augagaagaacgaggugau

SEQ ID NO: 2234678 - RNA, 19 nt, Homo sapiens
  misc_RNA (1)...(19): siRNA sense strand
acguguggcuggugcccaa

SEQ ID NO: 2234679 - RNA, 19 nt, Homo sapiens
  misc_RNA (1)...(19): siRNA sense strand
acggagagacacagaaacu

SEQ ID NO: 2234680 - RNA, 19 nt, Homo sapiens
  misc_RNA (1)...(19): siRNA sense strand
cccacauggucaaguucaa

SEQ ID NO: 2234681 - RNA, 19 nt, Homo sapiens
  misc_RNA (1)...(19): siRNA sense strand
agaacgaggugaugagcag

SEQ ID NO: 2234682 - RNA, 19 nt, Homo sapiens
  misc_RNA (1)...(19): siRNA sense strand
aggacaacguggacaccga

SEQ ID NO: 2234683 - RNA, 19 nt, Homo sapiens
  misc_RNA (1)...(19): siRNA sense strand
augaacaucacgugggaua

SEQ ID NO: 2234684 - RNA, 19 nt, Homo sapiens
  misc_RNA (1)...(19): siRNA sense strand
gaaagaagaucgauggcgu

SEQ ID NO: 2234685 - RNA, 19 nt, Homo sapiens
  misc_RNA (1)...(19): siRNA sense strand
acagcuacauggugcgcua

SEQ ID NO: 2234686 - RNA, 19 nt, Homo sapiens
  misc_RNA (1)...(19): siRNA sense strand
ucaugauccaggaggagua

SEQ ID NO: 2234687 - RNA, 19 nt, Homo sapiens
  misc_RNA (1)...(19): siRNA sense strand
cagggaagcuggacgccuu

SEQ ID NO: 2234688 - RNA, 19 nt, Homo sapiens
  misc_RNA (1)...(19): siRNA sense strand
cggggaaccaccagcaaaa

SEQ ID NO: 2234689 - RNA, 19 nt, Homo sapiens
  misc_RNA (1)...(19): siRNA sense strand
gagaagaacauccgcagca

SEQ ID NO: 2234690 - RNA, 19 nt, Homo sapiens
  misc_RNA (1)...(19): siRNA sense strand
ccuucaugauccaggagga

SEQ ID NO: 2234691 - RNA, 19 nt, Homo sapiens
  misc_RNA (1)...(19): siRNA sense strand
aggaaaggccguuugucau

SEQ ID NO: 2234692 - RNA, 19 nt, Homo sapiens
  misc_RNA (1)...(19): siRNA sense strand
auucggugcccguggagaa

SEQ ID NO: 2234693 - RNA, 19 nt, Homo sapiens
  misc_RNA (1)...(19): siRNA sense strand
agcaacagcuucaggucau

SEQ ID NO: 2234694 - RNA, 19 nt, Homo sapiens
  misc_RNA (1)...(19): siRNA sense strand
gagcaacagcuucagguca

SEQ ID NO: 2234695 - RNA, 19 nt, Homo sapiens
  misc_RNA (1)...(19): siRNA sense strand
ucuuugaggugcuggagga

SEQ ID NO: 2234696 - RNA, 19 nt, Homo sapiens
  misc_RNA (1)...(19): siRNA sense strand
gguuauacggaaaggagaa

SEQ ID NO: 2234697 - RNA, 19 nt, Homo sapiens
  misc_RNA (1)...(19): siRNA sense strand
guuaugagguggaagccaa

SEQ ID NO: 2234698 - RNA, 19 nt, Homo sapiens
  misc_RNA (1)...(19): siRNA sense strand
uugccaagccugagaggaa

SEQ ID NO: 2234699 - RNA, 19 nt, Homo sapiens
  misc_RNA (1)...(19): siRNA sense strand
uggaagaggaggaggagga

SEQ ID NO: 2234700 - RNA, 19 nt, Homo sapiens
  misc_RNA (1)...(19): siRNA sense strand
ggaagaagacgaacuggaa

SEQ ID NO: 2234701 - RNA, 19 nt, Homo sapiens
  misc_RNA (1)...(19): siRNA sense strand
agauuaagguuauacggaa

SEQ ID NO: 2234702 - RNA, 19 nt, Homo sapiens
  misc_RNA (1)...(19): siRNA sense strand
acguagaggaggaggagga

SEQ ID NO: 2234703 - RNA, 19 nt, Homo sapiens
  misc_RNA (1)...(19): siRNA sense strand
ccugcaaagagaaugaaua

SEQ ID NO: 2234704 - RNA, 19 nt, Homo sapiens
  misc_RNA (1)...(19): siRNA sense strand
agaaugaauaugugcaaga

SEQ ID NO: 2234705 - RNA, 19 nt, Homo sapiens
  misc_RNA (1)...(19): siRNA sense strand
gggaagggaacacggaaga

SEQ ID NO: 2234706 - RNA, 19 nt, Homo sapiens
  misc_RNA (1)...(19): siRNA sense strand
aagaagacgaacuggaaga

SEQ ID NO: 2234707 - RNA, 19 nt, Homo sapiens
  misc_RNA (1)...(19): siRNA sense strand
ccauuuacuuugggagcaa

SEQ ID NO: 2234708 - RNA, 19 nt, Homo sapiens
  misc_RNA (1)...(19): siRNA sense strand
gaacaagaguggaguggug

SEQ ID NO: 2234709 - RNA, 19 nt, Homo sapiens
  misc_RNA (1)...(19): siRNA sense strand
ggagaagagcuuugaccga

SEQ ID NO: 2234710 - RNA, 19 nt, Homo sapiens
  misc_RNA (1)...(19): siRNA sense strand
augaaggagugcugaacau

SEQ ID NO: 2234711 - RNA, 19 nt, Homo sapiens
  misc_RNA (1)...(19): siRNA sense strand
agagaaugaauaugugcaa

SEQ ID NO: 2234712 - RNA, 19 nt, Homo sapiens
  misc_RNA (1)...(19): siRNA sense strand
agaaaucgcugauggacca

SEQ ID NO: 2234713 - RNA, 19 nt, Homo sapiens
  misc_RNA (1)...(19): siRNA sense strand
caggacaccuucuggaaaa

SEQ ID NO: 2234714 - RNA, 19 nt, Homo sapiens
  misc_RNA (1)...(19): siRNA sense strand
ggaaaggagaagugagcug

SEQ ID NO: 2234715 - RNA, 19 nt, Homo sapiens
  misc_RNA (1)...(19): siRNA sense strand
cugacaaaaucuacagcaa

SEQ ID NO: 2234716 - RNA, 19 nt, Homo sapiens
  misc_RNA (1)...(19): siRNA sense strand
gcgcaaacuccgagagagg

SEQ ID NO: 2234717 - RNA, 19 nt, Homo sapiens
  misc_RNA (1)...(19): siRNA sense strand
gggagaucagggagcagua

SEQ ID NO: 2234718 - RNA, 19 nt, Homo sapiens
  misc_RNA (1)...(19): siRNA sense strand
acacguuggauaagaucaa

SEQ ID NO: 2234719 - RNA, 19 nt, Homo sapiens
  misc_RNA (1)...(19): siRNA sense strand
acaaauacuuccugagggu

SEQ ID NO: 2234720 - RNA, 19 nt, Homo sapiens
  misc_RNA (1)...(19): siRNA sense strand
ccaaacagccgucaucaaa

SEQ ID NO: 2234721 - RNA, 19 nt, Homo sapiens
  misc_RNA (1)...(19): siRNA sense strand
gaacacggaagaagacgaa

SEQ ID NO: 2234722 - RNA, 19 nt, Homo sapiens
  misc_RNA (1)...(19): siRNA sense strand
cugcgggacuacaagcaaa

SEQ ID NO: 2234723 - RNA, 19 nt, Homo sapiens
  misc_RNA (1)...(19): siRNA sense strand
gagaugagaaggaugggau

SEQ ID NO: 2234724 - RNA, 19 nt, Homo sapiens
  misc_RNA (1)...(19): siRNA sense strand
aggugugguuugaugagaa

SEQ ID NO: 2234725 - RNA, 19 nt, Homo sapiens
  misc_RNA (1)...(19): siRNA sense strand
cggaagaagacgaacugga

SEQ ID NO: 2234726 - RNA, 19 nt, Homo sapiens
  misc_RNA (1)...(19): siRNA sense strand
uggccagaauggacggaga

SEQ ID NO: 2234727 - RNA, 19 nt, Homo sapiens
  misc_RNA (1)...(19): siRNA sense strand
acaaaauccagaugaacaa

SEQ ID NO: 2234728 - RNA, 19 nt, Homo sapiens
  misc_RNA (1)...(19): siRNA sense strand
ccaacuucaacgaggccaa

SEQ ID NO: 2234729 - RNA, 19 nt, Homo sapiens
  misc_RNA (1)...(19): siRNA sense strand
uuuacaacguagaggagga

SEQ ID NO: 2234730 - RNA, 19 nt, Homo sapiens
  misc_RNA (1)...(19): siRNA sense strand
gcauugaguucauuaggga

SEQ ID NO: 2234731 - RNA, 19 nt, Homo sapiens
  misc_RNA (1)...(19): siRNA sense strand
gguuugaugagaaaggaga

SEQ ID NO: 2234732 - RNA, 19 nt, Homo sapiens
  misc_RNA (1)...(19): siRNA sense strand
ccgcaugcauguuggcgau

SEQ ID NO: 2234733 - RNA, 19 nt, Homo sapiens
  misc_RNA (1)...(19): siRNA sense strand
aagacgaacuggaagagga

SEQ ID NO: 2234734 - RNA, 19 nt, Homo sapiens
  misc_RNA (1)...(19): siRNA sense strand
gggcagacagagaugaagu

SEQ ID NO: 2234735 - RNA, 19 nt, Homo sapiens
  misc_RNA (1)...(19): siRNA sense strand
acacugaagcuaaucgcua

SEQ ID NO: 2234736 - RNA, 19 nt, Homo sapiens
  misc_RNA (1)...(19): siRNA sense strand
aauucugauuagugugcaa

SEQ ID NO: 2234737 - RNA, 19 nt, Homo sapiens
  misc_RNA (1)...(19): siRNA sense strand
uggaagugauggaugggca

SEQ ID NO: 2234738 - RNA, 19 nt, Homo sapiens
  misc_RNA (1)...(19): siRNA sense strand
cuggagaggaggugugguu

SEQ ID NO: 2234739 - RNA, 19 nt, Homo sapiens
  misc_RNA (1)...(19): siRNA sense strand
cggccugcaaagagaauga

SEQ ID NO: 2234740 - RNA, 19 nt, Homo sapiens
  misc_RNA (1)...(19): siRNA sense strand
ggagcaacuacaagaucau

SEQ ID NO: 2234741 - RNA, 19 nt, Homo sapiens
  misc_RNA (1)...(19): siRNA sense strand
guggaggacaggugcccaa

SEQ ID NO: 2234742 - RNA, 19 nt, Homo sapiens
  misc_RNA (1)...(19): siRNA sense strand
uguaugagcacgagcggga

SEQ ID NO: 2234743 - RNA, 19 nt, Homo sapiens
  misc_RNA (1)...(19): siRNA sense strand
gaaccuggcaugaaggagu

SEQ ID NO: 2234744 - RNA, 19 nt, Homo sapiens
  misc_RNA (1)...(19): siRNA sense strand
acuucaacgaggccaaaua

SEQ ID NO: 2234745 - RNA, 19 nt, Homo sapiens
  misc_RNA (1)...(19): siRNA sense strand
cgauaaagcugcagucucc

SEQ ID NO: 2234746 - RNA, 19 nt, Homo sapiens
  misc_RNA (1)...(19): siRNA sense strand
gggccagauuaagguuaua

SEQ ID NO: 2234747 - RNA, 19 nt, Homo sapiens
  misc_RNA (1)...(19): siRNA sense strand
auggaugggcagacagaga

SEQ ID NO: 2234748 - RNA, 19 nt, Homo sapiens
  misc_RNA (1)...(19): siRNA sense strand
ucaaagagcuggcugccca

SEQ ID NO: 2234749 - RNA, 19 nt, Homo sapiens
  misc_RNA (1)...(19): siRNA sense strand
acucauuggaagugaugga

SEQ ID NO: 2234750 - RNA, 19 nt, Homo sapiens
  misc_RNA (1)...(19): siRNA sense strand
cauugaagguuaugaggug

SEQ ID NO: 2234751 - RNA, 19 nt, Homo sapiens
  misc_RNA (1)...(19): siRNA sense strand
gacacuaacacgaggaauc

SEQ ID NO: 2234752 - RNA, 19 nt, Homo sapiens
  misc_RNA (1)...(19): siRNA sense strand
ggcaugaaggagugcugaa

SEQ ID NO: 2234753 - RNA, 19 nt, Homo sapiens
  misc_RNA (1)...(19): siRNA sense strand
ggaacacggaagaagacga

SEQ ID NO: 2234754 - RNA, 19 nt, Homo sapiens
  misc_RNA (1)...(19): siRNA sense strand
gacaggugcccaagggaca

SEQ ID NO: 2234755 - RNA, 19 nt, Homo sapiens
  misc_RNA (1)...(19): siRNA sense strand
cugugcacgugaagaccaa

SEQ ID NO: 2234756 - RNA, 19 nt, Homo sapiens
  misc_RNA (1)...(19): siRNA sense strand
agaucauguuuguggucaa

SEQ ID NO: 2234757 - RNA, 19 nt, Homo sapiens
  misc_RNA (1)...(19): siRNA sense strand
gcuaccagaaggugggcua

SEQ ID NO: 2234758 - RNA, 19 nt, Homo sapiens
  misc_RNA (1)...(19): siRNA sense strand
agaagaacgugguuagcca

SEQ ID NO: 2234759 - RNA, 19 nt, Homo sapiens
  misc_RNA (1)...(19): siRNA sense strand
ccuuugaacaggaguccaa

SEQ ID NO: 2234760 - RNA, 19 nt, Homo sapiens
  misc_RNA (1)...(19): siRNA sense strand
ccaagaaggugcugacccu

SEQ ID NO: 2234761 - RNA, 19 nt, Homo sapiens
  misc_RNA (1)...(19): siRNA sense strand
ccgcagaagaacgugguua

SEQ ID NO: 2234762 - RNA, 19 nt, Homo sapiens
  misc_RNA (1)...(19): siRNA sense strand
gggcacaggcaaggagaca

SEQ ID NO: 2234763 - RNA, 19 nt, Homo sapiens
  misc_RNA (1)...(19): siRNA sense strand
gcuacugggcagaaggcuu

SEQ ID NO: 2234764 - RNA, 19 nt, Homo sapiens
  misc_RNA (1)...(19): siRNA sense strand
gacaguugcuccaaggaca

SEQ ID NO: 2234765 - RNA, 19 nt, Homo sapiens
  misc_RNA (1)...(19): siRNA sense strand
cccaaugaaaugaagaaua

SEQ ID NO: 2234766 - RNA, 19 nt, Homo sapiens
  misc_RNA (1)...(19): siRNA sense strand
agacagggaucgaggccuu

SEQ ID NO: 2234767 - RNA, 19 nt, Homo sapiens
  misc_RNA (1)...(19): siRNA sense strand
cuuucuaaggagagagauu

SEQ ID NO: 2234768 - RNA, 19 nt, Homo sapiens
  misc_RNA (1)...(19): siRNA sense strand
caucaagggcagcgagcau

SEQ ID NO: 2234769 - RNA, 19 nt, Homo sapiens
  misc_RNA (1)...(19): siRNA sense strand
agaucauguuuguggugaa

SEQ ID NO: 2234770 - RNA, 19 nt, Homo sapiens
  misc_RNA (1)...(19): siRNA sense strand
gcagcgagcauguggccua

SEQ ID NO: 2234771 - RNA, 19 nt, Homo sapiens
  misc_RNA (1)...(19): siRNA sense strand
ccauaacuuucuaaggaga

SEQ ID NO: 2234772 - RNA, 19 nt, Homo sapiens
  misc_RNA (1)...(19): siRNA sense strand
ggauacauguucaagggau

SEQ ID NO: 2234773 - RNA, 19 nt, Homo sapiens
  misc_RNA (1)...(19): siRNA sense strand
ccuuaucgcuagaugucaa

SEQ ID NO: 2234774 - RNA, 19 nt, Homo sapiens
  misc_RNA (1)...(19): siRNA sense strand
ccuaaaaugcaaugucaaa

SEQ ID NO: 2234775 - RNA, 19 nt, Homo sapiens
  misc_RNA (1)...(19): siRNA sense strand
cuguauggauugugggucu

SEQ ID NO: 2234776 - RNA, 19 nt, Homo sapiens
  misc_RNA (1)...(19): siRNA sense strand
aagaaguuguacaaggauu

SEQ ID NO: 2234777 - RNA, 19 nt, Homo sapiens
  misc_RNA (1)...(19): siRNA sense strand
gcagcaacuacgagcaaga

SEQ ID NO: 2234778 - RNA, 19 nt, Homo sapiens
  misc_RNA (1)...(19): siRNA sense strand
gcgaaucaaugaagaccga

SEQ ID NO: 2234779 - RNA, 19 nt, Homo sapiens
  misc_RNA (1)...(19): siRNA sense strand
gcgacaagcaccuggccau

SEQ ID NO: 2234780 - RNA, 19 nt, Homo sapiens
  misc_RNA (1)...(19): siRNA sense strand
ggcagaaaccuuaucgcua

SEQ ID NO: 2234781 - RNA, 19 nt, Homo sapiens
  misc_RNA (1)...(19): siRNA sense strand
cuugcagagaagcgggaaa

SEQ ID NO: 2234782 - RNA, 19 nt, Homo sapiens
  misc_RNA (1)...(19): siRNA sense strand
uggcugagaucuugcgcuu

SEQ ID NO: 2234783 - RNA, 19 nt, Homo sapiens
  misc_RNA (1)...(19): siRNA sense strand
agugcagccuccagaacaa

SEQ ID NO: 2234784 - RNA, 19 nt, Homo sapiens
  misc_RNA (1)...(19): siRNA sense strand
uuuccauacagguggcaaa

SEQ ID NO: 2234785 - RNA, 19 nt, Homo sapiens
  misc_RNA (1)...(19): siRNA sense strand
acuacgagcaagaguccaa

SEQ ID NO: 2234786 - RNA, 19 nt, Homo sapiens
  misc_RNA (1)...(19): siRNA sense strand
gggaagaaguuguacaagg

SEQ ID NO: 2234787 - RNA, 19 nt, Homo sapiens
  misc_RNA (1)...(19): siRNA sense strand
aggauuacuugcugaaaau

SEQ ID NO: 2234788 - RNA, 19 nt, Homo sapiens
  misc_RNA (1)...(19): siRNA sense strand
gcggaagugcccagaaaau

SEQ ID NO: 2234789 - RNA, 19 nt, Homo sapiens
  misc_RNA (1)...(19): siRNA sense strand
aggcacuggaacugaagaa

SEQ ID NO: 2234790 - RNA, 19 nt, Homo sapiens
  misc_RNA (1)...(19): siRNA sense strand
cagcagcaacuacgagcaa

SEQ ID NO: 2234791 - RNA, 19 nt, Homo sapiens
  misc_RNA (1)...(19): siRNA sense strand
agcaagaguccaagaucau

SEQ ID NO: 2234792 - RNA, 19 nt, Homo sapiens
  misc_RNA (1)...(19): siRNA sense strand
cugaagaaugugggcgaau

SEQ ID NO: 2234793 - RNA, 19 nt, Homo sapiens
  misc_RNA (1)...(19): siRNA sense strand
uucuaaggagagagauuaa

SEQ ID NO: 2234794 - RNA, 19 nt, Homo sapiens
  misc_RNA (1)...(19): siRNA sense strand
cauucaacccaaauaaaga

SEQ ID NO: 2234795 - RNA, 19 nt, Homo sapiens
  misc_RNA (1)...(19): siRNA sense strand
acaacacacccuuggucaa

SEQ ID NO: 2234796 - RNA, 19 nt, Homo sapiens
  misc_RNA (1)...(19): siRNA sense strand
gcucagaggccaaaauuca

SEQ ID NO: 2234797 - RNA, 19 nt, Homo sapiens
  misc_RNA (1)...(19): siRNA sense strand
cgggaaacagucauccuaa

SEQ ID NO: 2234798 - RNA, 19 nt, Homo sapiens
  misc_RNA (1)...(19): siRNA sense strand
ggcgauacaacguguucaa

SEQ ID NO: 2234799 - RNA, 19 nt, Homo sapiens
  misc_RNA (1)...(19): siRNA sense strand
gugcaaauugugauggugu

SEQ ID NO: 2234800 - RNA, 19 nt, Homo sapiens
  misc_RNA (1)...(19): siRNA sense strand
cucaacagguucaguguca

SEQ ID NO: 2234801 - RNA, 19 nt, Homo sapiens
  misc_RNA (1)...(19): siRNA sense strand
aaggauuacuugcugaaaa

SEQ ID NO: 2234802 - RNA, 19 nt, Homo sapiens
  misc_RNA (1)...(19): siRNA sense strand
ccaaaauguagguggaaag

SEQ ID NO: 2234803 - RNA, 19 nt, Homo sapiens
  misc_RNA (1)...(19): siRNA sense strand
gcgccagaccugagugaca

SEQ ID NO: 2234804 - RNA, 19 nt, Homo sapiens
  misc_RNA (1)...(19): siRNA sense strand
agaagacagugaagggcau

SEQ ID NO: 2234805 - RNA, 19 nt, Homo sapiens
  misc_RNA (1)...(19): siRNA sense strand
gcaucuucgagcagggcaa

SEQ ID NO: 2234806 - RNA, 19 nt, Homo sapiens
  misc_RNA (1)...(19): siRNA sense strand
cuuaugagcaggaggggaa

SEQ ID NO: 2234807 - RNA, 19 nt, Homo sapiens
  misc_RNA (1)...(19): siRNA sense strand
agaacgugcccaagcgcaa

SEQ ID NO: 2234808 - RNA, 19 nt, Homo sapiens
  misc_RNA (1)...(19): siRNA sense strand
ccgaguucugggaggacaa

SEQ ID NO: 2234809 - RNA, 19 nt, Homo sapiens
  misc_RNA (1)...(19): siRNA sense strand
aggacaacuuccacugcaa

SEQ ID NO: 2234810 - RNA, 19 nt, Homo sapiens
  misc_RNA (1)...(19): siRNA sense strand
aguaccagguggaccgcua

SEQ ID NO: 2234811 - RNA, 19 nt, Homo sapiens
  misc_RNA (1)...(19): siRNA sense strand
ucaucugccugcugggcua

SEQ ID NO: 2234812 - RNA, 19 nt, Homo sapiens
  misc_RNA (1)...(19): siRNA sense strand
gagaacuuaagaaggaaaa

SEQ ID NO: 2234813 - RNA, 19 nt, Homo sapiens
  misc_RNA (1)...(19): siRNA sense strand
gcacgaagggccaaccaga

SEQ ID NO: 2234814 - RNA, 19 nt, Homo sapiens
  misc_RNA (1)...(19): siRNA sense strand
accaauaccagcugcgcaa

SEQ ID NO: 2234815 - RNA, 19 nt, Homo sapiens
  misc_RNA (1)...(19): siRNA sense strand
cugcuuaaguacauccgaa

SEQ ID NO: 2234816 - RNA, 19 nt, Homo sapiens
  misc_RNA (1)...(19): siRNA sense strand
cuucaaugagaauggagau

SEQ ID NO: 2234817 - RNA, 19 nt, Homo sapiens
  misc_RNA (1)...(19): siRNA sense strand
cggagcagaacgugcccaa

SEQ ID NO: 2234818 - RNA, 19 nt, Homo sapiens
  misc_RNA (1)...(19): siRNA sense strand
aggcaggcgaguucgacaa

SEQ ID NO: 2234819 - RNA, 19 nt, Homo sapiens
  misc_RNA (1)...(19): siRNA sense strand
ccgggugagcggaagaaga

SEQ ID NO: 2234820 - RNA, 19 nt, Homo sapiens
  misc_RNA (1)...(19): siRNA sense strand
agaccuucaaugaggccaa

SEQ ID NO: 2234821 - RNA, 19 nt, Homo sapiens
  misc_RNA (1)...(19): siRNA sense strand
aguucacgcagaagggcaa

SEQ ID NO: 2234822 - RNA, 19 nt, Homo sapiens
  misc_RNA (1)...(19): siRNA sense strand
uggccaaaccagagagaaa

SEQ ID NO: 2234823 - RNA, 19 nt, Homo sapiens
  misc_RNA (1)...(19): siRNA sense strand
cagugaaccaugugagaaa

SEQ ID NO: 2234824 - RNA, 19 nt, Homo sapiens
  misc_RNA (1)...(19): siRNA sense strand
acaaaguucaugagaggaa

SEQ ID NO: 2234825 - RNA, 19 nt, Homo sapiens
  misc_RNA (1)...(19): siRNA sense strand
cagaagaggaagaaggcuu

SEQ ID NO: 2234826 - RNA, 19 nt, Homo sapiens
  misc_RNA (1)...(19): siRNA sense strand
ggacaaaguucaugagagg

SEQ ID NO: 2234827 - RNA, 19 nt, Homo sapiens
  misc_RNA (1)...(19): siRNA sense strand
uggacauagugaagaggua

SEQ ID NO: 2234828 - RNA, 19 nt, Homo sapiens
  misc_RNA (1)...(19): siRNA sense strand
ccacaggagaacagcaaau

SEQ ID NO: 2234829 - RNA, 19 nt, Homo sapiens
  misc_RNA (1)...(19): siRNA sense strand
gugagaaaggccagaucaa

SEQ ID NO: 2234830 - RNA, 19 nt, Homo sapiens
  misc_RNA (1)...(19): siRNA sense strand
gggacaauggagaauuaaa

SEQ ID NO: 2234831 - RNA, 19 nt, Homo sapiens
  misc_RNA (1)...(19): siRNA sense strand
cagaaacaaaccaccgaaa

SEQ ID NO: 2234832 - RNA, 19 nt, Homo sapiens
  misc_RNA (1)...(19): siRNA sense strand
acugcuaccuucagagaau

SEQ ID NO: 2234833 - RNA, 19 nt, Homo sapiens
  misc_RNA (1)...(19): siRNA sense strand
caggaagguaugaaauaau

SEQ ID NO: 2234834 - RNA, 19 nt, Homo sapiens
  misc_RNA (1)...(19): siRNA sense strand
ggagaaagugggauggaag

SEQ ID NO: 2234835 - RNA, 19 nt, Homo sapiens
  misc_RNA (1)...(19): siRNA sense strand
cgaugagaauggagacucu

SEQ ID NO: 2234836 - RNA, 19 nt, Homo sapiens
  misc_RNA (1)...(19): siRNA sense strand
cacaucaacaagaaagaaa

SEQ ID NO: 2234837 - RNA, 19 nt, Homo sapiens
  misc_RNA (1)...(19): siRNA sense strand
aggcaacuauggagaaagu

SEQ ID NO: 2234838 - RNA, 19 nt, Homo sapiens
  misc_RNA (1)...(19): siRNA sense strand
cguuggaaguugggacaau

SEQ ID NO: 2234839 - RNA, 19 nt, Homo sapiens
  misc_RNA (1)...(19): siRNA sense strand
gugacaagacucuguucaa

SEQ ID NO: 2234840 - RNA, 19 nt, Homo sapiens
  misc_RNA (1)...(19): siRNA sense strand
agaagauguccgugggagu

SEQ ID NO: 2234841 - RNA, 19 nt, Homo sapiens
  misc_RNA (1)...(19): siRNA sense strand
aggaaaugggaaaagauua

SEQ ID NO: 2234842 - RNA, 19 nt, Homo sapiens
  misc_RNA (1)...(19): siRNA sense strand
guucaagaccagaaauguu

SEQ ID NO: 2234843 - RNA, 19 nt, Homo sapiens
  misc_RNA (1)...(19): siRNA sense strand
cagaaauguuccagcuaac

SEQ ID NO: 2234844 - RNA, 19 nt, Homo sapiens
  misc_RNA (1)...(19): siRNA sense strand
agaggagggugguggcuca

SEQ ID NO: 2234845 - RNA, 19 nt, Homo sapiens
  misc_RNA (1)...(19): siRNA sense strand
gcgcaugcauguaggggau

SEQ ID NO: 2234846 - RNA, 19 nt, Homo sapiens
  misc_RNA (1)...(19): siRNA sense strand
ucaaauauuucaugagggu

SEQ ID NO: 2234847 - RNA, 19 nt, Homo sapiens
  misc_RNA (1)...(19): siRNA sense strand
gugaagagguacaacugga

SEQ ID NO: 2234848 - RNA, 19 nt, Homo sapiens
  misc_RNA (1)...(19): siRNA sense strand
augaugugacagauggaua

SEQ ID NO: 2234849 - RNA, 19 nt, Homo sapiens
  misc_RNA (1)...(19): siRNA sense strand
cugacauaaugcaugacua

SEQ ID NO: 2234850 - RNA, 19 nt, Homo sapiens
  misc_RNA (1)...(19): siRNA sense strand
gggccaugguggacauagu

SEQ ID NO: 2234851 - RNA, 19 nt, Homo sapiens
  misc_RNA (1)...(19): siRNA sense strand
caggagaacagcaaauaca

SEQ ID NO: 2234852 - RNA, 19 nt, Homo sapiens
  misc_RNA (1)...(19): siRNA sense strand
uccaggaagguaugaaaua

SEQ ID NO: 2234853 - RNA, 19 nt, Homo sapiens
  misc_RNA (1)...(19): siRNA sense strand
ugaugugacagauggauau

SEQ ID NO: 2234854 - RNA, 19 nt, Homo sapiens
  misc_RNA (1)...(19): siRNA sense strand
cagaaggcaacuauggaga

SEQ ID NO: 2234855 - RNA, 19 nt, Homo sapiens
  misc_RNA (1)...(19): siRNA sense strand
ucaaagauaugucagcgaa

SEQ ID NO: 2234856 - RNA, 19 nt, Homo sapiens
  misc_RNA (1)...(19): siRNA sense strand
guaacaaagaccaaccgua

SEQ ID NO: 2234857 - RNA, 19 nt, Homo sapiens
  misc_RNA (1)...(19): siRNA sense strand
cagcagauccagcagccua

SEQ ID NO: 2234858 - RNA, 19 nt, Homo sapiens
  misc_RNA (1)...(19): siRNA sense strand
aggcaagggccauggugga

SEQ ID NO: 2234859 - RNA, 19 nt, Homo sapiens
  misc_RNA (1)...(19): siRNA sense strand
uuguaaggagaaugaguau

SEQ ID NO: 2234860 - RNA, 19 nt, Homo sapiens
  misc_RNA (1)...(19): siRNA sense strand
cuguagucuucaucauuua

SEQ ID NO: 2234861 - RNA, 19 nt, Homo sapiens
  misc_RNA (1)...(19): siRNA sense strand
gcugcauguuugugccgaa

SEQ ID NO: 2234862 - RNA, 19 nt, Homo sapiens
  misc_RNA (1)...(19): siRNA sense strand
cuagucaaccuguggaaga

SEQ ID NO: 2234863 - RNA, 19 nt, Homo sapiens
  misc_RNA (1)...(19): siRNA sense strand
aaagaaaaccccaaccaaa

SEQ ID NO: 2234864 - RNA, 19 nt, Homo sapiens
  misc_RNA (1)...(19): siRNA sense strand
ccagcauggaucugaguga

SEQ ID NO: 2234865 - RNA, 19 nt, Homo sapiens
  misc_RNA (1)...(19): siRNA sense strand
aagaagaagaucuguacca

SEQ ID NO: 2234866 - RNA, 19 nt, Homo sapiens
  misc_RNA (1)...(19): siRNA sense strand
ccuucagagaauuggcauu

SEQ ID NO: 2234867 - RNA, 19 nt, Homo sapiens
  misc_RNA (1)...(19): siRNA sense strand
cuaacuucaacgaggccaa

SEQ ID NO: 2234868 - RNA, 19 nt, Homo sapiens
  misc_RNA (1)...(19): siRNA sense strand
uggagaaagugggauggaa

SEQ ID NO: 2234869 - RNA, 19 nt, Homo sapiens
  misc_RNA (1)...(19): siRNA sense strand
cgauccuauucgaugagaa

SEQ ID NO: 2234870 - RNA, 19 nt, Homo sapiens
  misc_RNA (1)...(19): siRNA sense strand
cuuguaaggagaaugagua

SEQ ID NO: 2234871 - RNA, 19 nt, Homo sapiens
  misc_RNA (1)...(19): siRNA sense strand
aguaugucuuugaugagua

SEQ ID NO: 2234872 - RNA, 19 nt, Homo sapiens
  misc_RNA (1)...(19): siRNA sense strand
ccaacaucagcgagcucaa

SEQ ID NO: 2234873 - RNA, 19 nt, Homo sapiens
  misc_RNA (1)...(19): siRNA sense strand
cagauggauaucagcgaga

SEQ ID NO: 2234874 - RNA, 19 nt, Homo sapiens
  misc_RNA (1)...(19): siRNA sense strand
gugccgacuggaaggguuu

SEQ ID NO: 2234875 - RNA, 19 nt, Homo sapiens
  misc_RNA (1)...(19): siRNA sense strand
agaacagcaaauacaacaa

SEQ ID NO: 2234876 - RNA, 19 nt, Homo sapiens
  misc_RNA (1)...(19): siRNA sense strand
gaaguugggacaauggaga

SEQ ID NO: 2234877 - RNA, 19 nt, Homo sapiens
  misc_RNA (1)...(19): siRNA sense strand
ccuacgagcaggagggcaa

SEQ ID NO: 2234878 - RNA, 19 nt, Homo sapiens
  misc_RNA (1)...(19): siRNA sense strand
gagcggaagaagaugguga

SEQ ID NO: 2234879 - RNA, 19 nt, Homo sapiens
  misc_RNA (1)...(19): siRNA sense strand
gcaucuuugagcagggcaa

SEQ ID NO: 2234880 - RNA, 19 nt, Homo sapiens
  misc_RNA (1)...(19): siRNA sense strand
cagaaugugcagaagcgaa

SEQ ID NO: 2234881 - RNA, 19 nt, Homo sapiens
  misc_RNA (1)...(19): siRNA sense strand
ugauugacuaugaggaaca

SEQ ID NO: 2234882 - RNA, 19 nt, Homo sapiens
  misc_RNA (1)...(19): siRNA sense strand
agaagauggugaagggcgu

SEQ ID NO: 2234883 - RNA, 19 nt, Homo sapiens
  misc_RNA (1)...(19): siRNA sense strand
aagcgaaagcggagccuca

SEQ ID NO: 2234884 - RNA, 19 nt, Homo sapiens
  misc_RNA (1)...(19): siRNA sense strand
gcacaggcgaggaacgcau

SEQ ID NO: 2234885 - RNA, 19 nt, Homo sapiens
  misc_RNA (1)...(19): siRNA sense strand
cugugauguucaacgagaa

SEQ ID NO: 2234886 - RNA, 19 nt, Homo sapiens
  misc_RNA (1)...(19): siRNA sense strand
ggaagaagauggugaaggg

SEQ ID NO: 2234887 - RNA, 19 nt, Homo sapiens
  misc_RNA (1)...(19): siRNA sense strand
ugaagaaggagcagggcgu

SEQ ID NO: 2234888 - RNA, 19 nt, Homo sapiens
  misc_RNA (1)...(19): siRNA sense strand
aggugcaguuugugauuga

SEQ ID NO: 2234889 - RNA, 19 nt, Homo sapiens
  misc_RNA (1)...(19): siRNA sense strand
ggagaguucagcaagguga

SEQ ID NO: 2234890 - RNA, 19 nt, Homo sapiens
  misc_RNA (1)...(19): siRNA sense strand
caucuuugccaaugaggau

SEQ ID NO: 2234891 - RNA, 19 nt, Homo sapiens
  misc_RNA (1)...(19): siRNA sense strand
gugcagaagcgaaagcgga

SEQ ID NO: 2234892 - RNA, 19 nt, Homo sapiens
  misc_RNA (1)...(19): siRNA sense strand
cagcaaggugaucaggaga

SEQ ID NO: 2234893 - RNA, 19 nt, Homo sapiens
  misc_RNA (1)...(19): siRNA sense strand
gcaucaucaucuuugccaa

SEQ ID NO: 2234894 - RNA, 19 nt, Homo sapiens
  misc_RNA (1)...(19): siRNA sense strand
agaccuucaacgaggccaa

SEQ ID NO: 2234895 - RNA, 19 nt, Homo sapiens
  misc_RNA (1)...(19): siRNA sense strand
cugaaaagaucuacaucca

SEQ ID NO: 2234896 - RNA, 19 nt, Homo sapiens
  misc_RNA (1)...(19): siRNA sense strand
aggaaguuauggagagaaa

SEQ ID NO: 2234897 - RNA, 19 nt, Homo sapiens
  misc_RNA (1)...(19): siRNA sense strand
ccgaauacugggaggaaaa

SEQ ID NO: 2234898 - RNA, 19 nt, Homo sapiens
  misc_RNA (1)...(19): siRNA sense strand
gcauauuugagcagggcaa

SEQ ID NO: 2234899 - RNA, 19 nt, Homo sapiens
  misc_RNA (1)...(19): siRNA sense strand
cggagaaaguaguuggagu

SEQ ID NO: 2234900 - RNA, 19 nt, Homo sapiens
  misc_RNA (1)...(19): siRNA sense strand
gggcaagaaaucaguaaca

SEQ ID NO: 2234901 - RNA, 19 nt, Homo sapiens
  misc_RNA (1)...(19): siRNA sense strand
gugaaaacguagacccaaa

SEQ ID NO: 2234902 - RNA, 19 nt, Homo sapiens
  misc_RNA (1)...(19): siRNA sense strand
aagaagacacagaaaggaa

SEQ ID NO: 2234903 - RNA, 19 nt, Homo sapiens
  misc_RNA (1)...(19): siRNA sense strand
ggcgacaucaagagggaaa

SEQ ID NO: 2234904 - RNA, 19 nt, Homo sapiens
  misc_RNA (1)...(19): siRNA sense strand
ggagcaagcuggaggcaag

SEQ ID NO: 2234905 - RNA, 19 nt, Homo sapiens
  misc_RNA (1)...(19): siRNA sense strand
gacaaugaacccugagcaa

SEQ ID NO: 2234906 - RNA, 19 nt, Homo sapiens
  misc_RNA (1)...(19): siRNA sense strand
aagaaguugcugaaguaua

SEQ ID NO: 2234907 - RNA, 19 nt, Homo sapiens
  misc_RNA (1)...(19): siRNA sense strand
cagagaaagaagacacaga

SEQ ID NO: 2234908 - RNA, 19 nt, Homo sapiens
  misc_RNA (1)...(19): siRNA sense strand
uggaaggguuugaugccua

SEQ ID NO: 2234909 - RNA, 19 nt, Homo sapiens
  misc_RNA (1)...(19): siRNA sense strand
auguaugguuugccgaaua

SEQ ID NO: 2234910 - RNA, 19 nt, Homo sapiens
  misc_RNA (1)...(19): siRNA sense strand
gacccaacggugaggcaaa

SEQ ID NO: 2234911 - RNA, 19 nt, Homo sapiens
  misc_RNA (1)...(19): siRNA sense strand
ucaucaaacuggaguggca

SEQ ID NO: 2234912 - RNA, 19 nt, Homo sapiens
  misc_RNA (1)...(19): siRNA sense strand
cuugaaaacaacagaagaa

SEQ ID NO: 2234913 - RNA, 19 nt, Homo sapiens
  misc_RNA (1)...(19): siRNA sense strand
aagaagacacagaucgcaa

SEQ ID NO: 2234914 - RNA, 19 nt, Homo sapiens
  misc_RNA (1)...(19): siRNA sense strand
aagccaggacagagaaaga

SEQ ID NO: 2234915 - RNA, 19 nt, Homo sapiens
  misc_RNA (1)...(19): siRNA sense strand
ggacagagaaagaagacac

SEQ ID NO: 2234916 - RNA, 19 nt, Homo sapiens
  misc_RNA (1)...(19): siRNA sense strand
ucauuugcuccuugggaua

SEQ ID NO: 2234917 - RNA, 19 nt, Homo sapiens
  misc_RNA (1)...(19): siRNA sense strand
cggaaggaaguuauggaga

SEQ ID NO: 2234918 - RNA, 19 nt, Homo sapiens
  misc_RNA (1)...(19): siRNA sense strand
ggaaggaaguuauggagag

SEQ ID NO: 2234919 - RNA, 19 nt, Homo sapiens
  misc_RNA (1)...(19): siRNA sense strand
gguaaaguccaguucguga

SEQ ID NO: 2234920 - RNA, 19 nt, Homo sapiens
  misc_RNA (1)...(19): siRNA sense strand
ucgucaagccggagaaagu

SEQ ID NO: 2234921 - RNA, 19 nt, Homo sapiens
  misc_RNA (1)...(19): siRNA sense strand
uugccaacgaugaggauau

SEQ ID NO: 2234922 - RNA, 19 nt, Homo sapiens
  misc_RNA (1)...(19): siRNA sense strand
gauccuugcagcagccaaa

SEQ ID NO: 2234923 - RNA, 19 nt, Homo sapiens
  misc_RNA (1)...(19): siRNA sense strand
gccgaauacugggaggaaa

SEQ ID NO: 2234924 - RNA, 19 nt, Homo sapiens
  misc_RNA (1)...(19): siRNA sense strand
augaugaacacaagacaau

SEQ ID NO: 2234925 - RNA, 19 nt, Homo sapiens
  misc_RNA (1)...(19): siRNA sense strand
acucauaagcccaacauca

SEQ ID NO: 2234926 - RNA, 19 nt, Homo sapiens
  misc_RNA (1)...(19): siRNA sense strand
aggaaaacuucaacugcaa

SEQ ID NO: 2234927 - RNA, 19 nt, Homo sapiens
  misc_RNA (1)...(19): siRNA sense strand
ggagaaaguaguuggagug

SEQ ID NO: 2234928 - RNA, 19 nt, Homo sapiens
  misc_RNA (1)...(19): siRNA sense strand
gcagauuuccaaagaggca

SEQ ID NO: 2234929 - RNA, 19 nt, Homo sapiens
  misc_RNA (1)...(19): siRNA sense strand
gacacuuguuccagggaca

SEQ ID NO: 2234930 - RNA, 19 nt, Homo sapiens
  misc_RNA (1)...(19): siRNA sense strand
gaaccggaugccaggauau

SEQ ID NO: 2234931 - RNA, 19 nt, Homo sapiens
  misc_RNA (1)...(19): siRNA sense strand
guccagaaacggaagcgaa

SEQ ID NO: 2234932 - RNA, 19 nt, Homo sapiens
  misc_RNA (1)...(19): siRNA sense strand
aaauaaacccacugcacca

SEQ ID NO: 2234933 - RNA, 19 nt, Homo sapiens
  misc_RNA (1)...(19): siRNA sense strand
ccaugguagacauuguaaa

SEQ ID NO: 2234934 - RNA, 19 nt, Homo sapiens
  misc_RNA (1)...(19): siRNA sense strand
acaggagagaauuggaaaa

SEQ ID NO: 2234935 - RNA, 19 nt, Homo sapiens
  misc_RNA (1)...(19): siRNA sense strand
guaagccaggacagagaaa

SEQ ID NO: 2234936 - RNA, 19 nt, Homo sapiens
  misc_RNA (1)...(19): siRNA sense strand
gaagacaugcaguggggua

SEQ ID NO: 2234937 - RNA, 19 nt, Homo sapiens
  misc_RNA (1)...(19): siRNA sense strand
auguaagccaggacagaga

SEQ ID NO: 2234938 - RNA, 19 nt, Homo sapiens
  misc_RNA (1)...(19): siRNA sense strand
gcggcgacaucaagaggga

SEQ ID NO: 2234939 - RNA, 19 nt, Homo sapiens
  misc_RNA (1)...(19): siRNA sense strand
gcucaauauagaagacaug

SEQ ID NO: 2234940 - RNA, 19 nt, Homo sapiens
  misc_RNA (1)...(19): siRNA sense strand
cuucaaggcgguagucaca

SEQ ID NO: 2234941 - RNA, 19 nt, Homo sapiens
  misc_RNA (1)...(19): siRNA sense strand
gcgcucauccagaaggaca

SEQ ID NO: 2234942 - RNA, 19 nt, Homo sapiens
  misc_RNA (1)...(19): siRNA sense strand
gagagaaagguguggaguc

SEQ ID NO: 2234943 - RNA, 19 nt, Homo sapiens
  misc_RNA (1)...(19): siRNA sense strand
gugacagacccaacgguga

SEQ ID NO: 2234944 - RNA, 19 nt, Homo sapiens
  misc_RNA (1)...(19): siRNA sense strand
aggaaguuauggagagaaa

SEQ ID NO: 2234945 - RNA, 19 nt, Homo sapiens
  misc_RNA (1)...(19): siRNA sense strand
ccgaauacugggaggaaaa

SEQ ID NO: 2234946 - RNA, 19 nt, Homo sapiens
  misc_RNA (1)...(19): siRNA sense strand
gcauauuugagcagggcaa

SEQ ID NO: 2234947 - RNA, 19 nt, Homo sapiens
  misc_RNA (1)...(19): siRNA sense strand
cggagaaaguaguuggagu

SEQ ID NO: 2234948 - RNA, 19 nt, Homo sapiens
  misc_RNA (1)...(19): siRNA sense strand
gggcaagaaaucaguaaca

SEQ ID NO: 2234949 - RNA, 19 nt, Homo sapiens
  misc_RNA (1)...(19): siRNA sense strand
gugaaaacguagacccaaa

SEQ ID NO: 2234950 - RNA, 19 nt, Homo sapiens
  misc_RNA (1)...(19): siRNA sense strand
aagaagacacagaaaggaa

SEQ ID NO: 2234951 - RNA, 19 nt, Homo sapiens
  misc_RNA (1)...(19): siRNA sense strand
ggcgacaucaagagggaaa

SEQ ID NO: 2234952 - RNA, 19 nt, Homo sapiens
  misc_RNA (1)...(19): siRNA sense strand
ggagcaagcuggaggcaag

SEQ ID NO: 2234953 - RNA, 19 nt, Homo sapiens
  misc_RNA (1)...(19): siRNA sense strand
gacaaugaacccugagcaa

SEQ ID NO: 2234954 - RNA, 19 nt, Homo sapiens
  misc_RNA (1)...(19): siRNA sense strand
aagaaguugcugaaguaua

SEQ ID NO: 2234955 - RNA, 19 nt, Homo sapiens
  misc_RNA (1)...(19): siRNA sense strand
cagagaaagaagacacaga

SEQ ID NO: 2234956 - RNA, 19 nt, Homo sapiens
  misc_RNA (1)...(19): siRNA sense strand
uggaaggguuugaugccua

SEQ ID NO: 2234957 - RNA, 19 nt, Homo sapiens
  misc_RNA (1)...(19): siRNA sense strand
auguaugguuugccgaaua

SEQ ID NO: 2234958 - RNA, 19 nt, Homo sapiens
  misc_RNA (1)...(19): siRNA sense strand
gacccaacggugaggcaaa

SEQ ID NO: 2234959 - RNA, 19 nt, Homo sapiens
  misc_RNA (1)...(19): siRNA sense strand
ucaucaaacuggaguggca

SEQ ID NO: 2234960 - RNA, 19 nt, Homo sapiens
  misc_RNA (1)...(19): siRNA sense strand
cuugaaaacaacagaagaa

SEQ ID NO: 2234961 - RNA, 19 nt, Homo sapiens
  misc_RNA (1)...(19): siRNA sense strand
aagaagacacagaucgcaa

SEQ ID NO: 2234962 - RNA, 19 nt, Homo sapiens
  misc_RNA (1)...(19): siRNA sense strand
aagccaggacagagaaaga

SEQ ID NO: 2234963 - RNA, 19 nt, Homo sapiens
  misc_RNA (1)...(19): siRNA sense strand
ggacagagaaagaagacac

SEQ ID NO: 2234964 - RNA, 19 nt, Homo sapiens
  misc_RNA (1)...(19): siRNA sense strand
ucauuugcuccuugggaua

SEQ ID NO: 2234965 - RNA, 19 nt, Homo sapiens
  misc_RNA (1)...(19): siRNA sense strand
cggaaggaaguuauggaga

SEQ ID NO: 2234966 - RNA, 19 nt, Homo sapiens
  misc_RNA (1)...(19): siRNA sense strand
ggaaggaaguuauggagag

SEQ ID NO: 2234967 - RNA, 19 nt, Homo sapiens
  misc_RNA (1)...(19): siRNA sense strand
gguaaaguccaguucguga

SEQ ID NO: 2234968 - RNA, 19 nt, Homo sapiens
  misc_RNA (1)...(19): siRNA sense strand
ucgucaagccggagaaagu

SEQ ID NO: 2234969 - RNA, 19 nt, Homo sapiens
  misc_RNA (1)...(19): siRNA sense strand
uugccaacgaugaggauau

SEQ ID NO: 2234970 - RNA, 19 nt, Homo sapiens
  misc_RNA (1)...(19): siRNA sense strand
gauccuugcagcagccaaa

SEQ ID NO: 2234971 - RNA, 19 nt, Homo sapiens
  misc_RNA (1)...(19): siRNA sense strand
gccgaauacugggaggaaa

SEQ ID NO: 2234972 - RNA, 19 nt, Homo sapiens
  misc_RNA (1)...(19): siRNA sense strand
augaugaacacaagacaau

SEQ ID NO: 2234973 - RNA, 19 nt, Homo sapiens
  misc_RNA (1)...(19): siRNA sense strand
acucauaagcccaacauca

SEQ ID NO: 2234974 - RNA, 19 nt, Homo sapiens
  misc_RNA (1)...(19): siRNA sense strand
aggaaaacuucaacugcaa

SEQ ID NO: 2234975 - RNA, 19 nt, Homo sapiens
  misc_RNA (1)...(19): siRNA sense strand
ggagaaaguaguuggagug

SEQ ID NO: 2234976 - RNA, 19 nt, Homo sapiens
  misc_RNA (1)...(19): siRNA sense strand
gcagauuuccaaagaggca

SEQ ID NO: 2234977 - RNA, 19 nt, Homo sapiens
  misc_RNA (1)...(19): siRNA sense strand
gacacuuguuccagggaca

SEQ ID NO: 2234978 - RNA, 19 nt, Homo sapiens
  misc_RNA (1)...(19): siRNA sense strand
gaaccggaugccaggauau

SEQ ID NO: 2234979 - RNA, 19 nt, Homo sapiens
  misc_RNA (1)...(19): siRNA sense strand
guccagaaacggaagcgaa

SEQ ID NO: 2234980 - RNA, 19 nt, Homo sapiens
  misc_RNA (1)...(19): siRNA sense strand
aaauaaacccacugcacca

SEQ ID NO: 2234981 - RNA, 19 nt, Homo sapiens
  misc_RNA (1)...(19): siRNA sense strand
ccaugguagacauuguaaa

SEQ ID NO: 2234982 - RNA, 19 nt, Homo sapiens
  misc_RNA (1)...(19): siRNA sense strand
acaggagagaauuggaaaa

SEQ ID NO: 2234983 - RNA, 19 nt, Homo sapiens
  misc_RNA (1)...(19): siRNA sense strand
guaagccaggacagagaaa

SEQ ID NO: 2234984 - RNA, 19 nt, Homo sapiens
  misc_RNA (1)...(19): siRNA sense strand
gaagacaugcaguggggua

SEQ ID NO: 2234985 - RNA, 19 nt, Homo sapiens
  misc_RNA (1)...(19): siRNA sense strand
auguaagccaggacagaga

SEQ ID NO: 2234986 - RNA, 19 nt, Homo sapiens
  misc_RNA (1)...(19): siRNA sense strand
gcggcgacaucaagaggga

SEQ ID NO: 2234987 - RNA, 19 nt, Homo sapiens
  misc_RNA (1)...(19): siRNA sense strand
gcucaauauagaagacaug

SEQ ID NO: 2234988 - RNA, 19 nt, Homo sapiens
  misc_RNA (1)...(19): siRNA sense strand
cuucaaggcgguagucaca

SEQ ID NO: 2234989 - RNA, 19 nt, Homo sapiens
  misc_RNA (1)...(19): siRNA sense strand
gcgcucauccagaaggaca

SEQ ID NO: 2234990 - RNA, 19 nt, Homo sapiens
  misc_RNA (1)...(19): siRNA sense strand
gagagaaagguguggaguc

SEQ ID NO: 2234991 - RNA, 19 nt, Homo sapiens
  misc_RNA (1)...(19): siRNA sense strand
gugacagacccaacgguga

SEQ ID NO: 2234992 - RNA, 19 nt, Homo sapiens
  misc_RNA (1)...(19): siRNA sense strand
aggaaguuauggagagaaa

SEQ ID NO: 2234993 - RNA, 19 nt, Homo sapiens
  misc_RNA (1)...(19): siRNA sense strand
ccgaauacugggaggaaaa

SEQ ID NO: 2234994 - RNA, 19 nt, Homo sapiens
  misc_RNA (1)...(19): siRNA sense strand
gcauauuugagcagggcaa

SEQ ID NO: 2234995 - RNA, 19 nt, Homo sapiens
  misc_RNA (1)...(19): siRNA sense strand
cggagaaaguaguuggagu

SEQ ID NO: 2234996 - RNA, 19 nt, Homo sapiens
  misc_RNA (1)...(19): siRNA sense strand
gggcaagaaaucaguaaca

SEQ ID NO: 2234997 - RNA, 19 nt, Homo sapiens
  misc_RNA (1)...(19): siRNA sense strand
gugaaaacguagacccaaa

SEQ ID NO: 2234998 - RNA, 19 nt, Homo sapiens
  misc_RNA (1)...(19): siRNA sense strand
aagaagacacagaaaggaa

SEQ ID NO: 2234999 - RNA, 19 nt, Homo sapiens
  misc_RNA (1)...(19): siRNA sense strand
ggcgacaucaagagggaaa

SEQ ID NO: 2235000 - RNA, 19 nt, Homo sapiens
  misc_RNA (1)...(19): siRNA sense strand
ggagcaagcuggaggcaag

SEQ ID NO: 2235001 - RNA, 19 nt, Homo sapiens
  misc_RNA (1)...(19): siRNA sense strand
gacaaugaacccugagcaa

SEQ ID NO: 2235002 - RNA, 19 nt, Homo sapiens
  misc_RNA (1)...(19): siRNA sense strand
aagaaguugcugaaguaua

SEQ ID NO: 2235003 - RNA, 19 nt, Homo sapiens
  misc_RNA (1)...(19): siRNA sense strand
cagagaaagaagacacaga

SEQ ID NO: 2235004 - RNA, 19 nt, Homo sapiens
  misc_RNA (1)...(19): siRNA sense strand
uggaaggguuugaugccua

SEQ ID NO: 2235005 - RNA, 19 nt, Homo sapiens
  misc_RNA (1)...(19): siRNA sense strand
auguaugguuugccgaaua

SEQ ID NO: 2235006 - RNA, 19 nt, Homo sapiens
  misc_RNA (1)...(19): siRNA sense strand
gacccaacggugaggcaaa

SEQ ID NO: 2235007 - RNA, 19 nt, Homo sapiens
  misc_RNA (1)...(19): siRNA sense strand
ucaucaaacuggaguggca

SEQ ID NO: 2235008 - RNA, 19 nt, Homo sapiens
  misc_RNA (1)...(19): siRNA sense strand
cuugaaaacaacagaagaa

SEQ ID NO: 2235009 - RNA, 19 nt, Homo sapiens
  misc_RNA (1)...(19): siRNA sense strand
aagaagacacagaucgcaa

SEQ ID NO: 2235010 - RNA, 19 nt, Homo sapiens
  misc_RNA (1)...(19): siRNA sense strand
aagccaggacagagaaaga

SEQ ID NO: 2235011 - RNA, 19 nt, Homo sapiens
  misc_RNA (1)...(19): siRNA sense strand
ggacagagaaagaagacac

SEQ ID NO: 2235012 - RNA, 19 nt, Homo sapiens
  misc_RNA (1)...(19): siRNA sense strand
ucauuugcuccuugggaua

SEQ ID NO: 2235013 - RNA, 19 nt, Homo sapiens
  misc_RNA (1)...(19): siRNA sense strand
cggaaggaaguuauggaga

SEQ ID NO: 2235014 - RNA, 19 nt, Homo sapiens
  misc_RNA (1)...(19): siRNA sense strand
ggaaggaaguuauggagag

SEQ ID NO: 2235015 - RNA, 19 nt, Homo sapiens
  misc_RNA (1)...(19): siRNA sense strand
gguaaaguccaguucguga

SEQ ID NO: 2235016 - RNA, 19 nt, Homo sapiens
  misc_RNA (1)...(19): siRNA sense strand
ucgucaagccggagaaagu

SEQ ID NO: 2235017 - RNA, 19 nt, Homo sapiens
  misc_RNA (1)...(19): siRNA sense strand
uugccaacgaugaggauau

SEQ ID NO: 2235018 - RNA, 19 nt, Homo sapiens
  misc_RNA (1)...(19): siRNA sense strand
gauccuugcagcagccaaa

SEQ ID NO: 2235019 - RNA, 19 nt, Homo sapiens
  misc_RNA (1)...(19): siRNA sense strand
gccgaauacugggaggaaa

SEQ ID NO: 2235020 - RNA, 19 nt, Homo sapiens
  misc_RNA (1)...(19): siRNA sense strand
augaugaacacaagacaau

SEQ ID NO: 2235021 - RNA, 19 nt, Homo sapiens
  misc_RNA (1)...(19): siRNA sense strand
acucauaagcccaacauca

SEQ ID NO: 2235022 - RNA, 19 nt, Homo sapiens
  misc_RNA (1)...(19): siRNA sense strand
aggaaaacuucaacugcaa

SEQ ID NO: 2235023 - RNA, 19 nt, Homo sapiens
  misc_RNA (1)...(19): siRNA sense strand
ggagaaaguaguuggagug

SEQ ID NO: 2235024 - RNA, 19 nt, Homo sapiens
  misc_RNA (1)...(19): siRNA sense strand
gcagauuuccaaagaggca

SEQ ID NO: 2235025 - RNA, 19 nt, Homo sapiens
  misc_RNA (1)...(19): siRNA sense strand
gacacuuguuccagggaca

SEQ ID NO: 2235026 - RNA, 19 nt, Homo sapiens
  misc_RNA (1)...(19): siRNA sense strand
gaaccggaugccaggauau

SEQ ID NO: 2235027 - RNA, 19 nt, Homo sapiens
  misc_RNA (1)...(19): siRNA sense strand
guccagaaacggaagcgaa

SEQ ID NO: 2235028 - RNA, 19 nt, Homo sapiens
  misc_RNA (1)...(19): siRNA sense strand
aaauaaacccacugcacca

SEQ ID NO: 2235029 - RNA, 19 nt, Homo sapiens
  misc_RNA (1)...(19): siRNA sense strand
ccaugguagacauuguaaa

SEQ ID NO: 2235030 - RNA, 19 nt, Homo sapiens
  misc_RNA (1)...(19): siRNA sense strand
acaggagagaauuggaaaa

SEQ ID NO: 2235031 - RNA, 19 nt, Homo sapiens
  misc_RNA (1)...(19): siRNA sense strand
guaagccaggacagagaaa

SEQ ID NO: 2235032 - RNA, 19 nt, Homo sapiens
  misc_RNA (1)...(19): siRNA sense strand
gaagacaugcaguggggua

SEQ ID NO: 2235033 - RNA, 19 nt, Homo sapiens
  misc_RNA (1)...(19): siRNA sense strand
auguaagccaggacagaga

SEQ ID NO: 2235034 - RNA, 19 nt, Homo sapiens
  misc_RNA (1)...(19): siRNA sense strand
gcggcgacaucaagaggga

SEQ ID NO: 2235035 - RNA, 19 nt, Homo sapiens
  misc_RNA (1)...(19): siRNA sense strand
gcucaauauagaagacaug

SEQ ID NO: 2235036 - RNA, 19 nt, Homo sapiens
  misc_RNA (1)...(19): siRNA sense strand
cuucaaggcgguagucaca

SEQ ID NO: 2235037 - RNA, 19 nt, Homo sapiens
  misc_RNA (1)...(19): siRNA sense strand
gcgcucauccagaaggaca

SEQ ID NO: 2235038 - RNA, 19 nt, Homo sapiens
  misc_RNA (1)...(19): siRNA sense strand
gagagaaagguguggaguc

SEQ ID NO: 2235039 - RNA, 19 nt, Homo sapiens
  misc_RNA (1)...(19): siRNA sense strand
gugacagacccaacgguga

SEQ ID NO: 2235040 - RNA, 19 nt, Homo sapiens
  misc_RNA (1)...(19): siRNA sense strand
aggcauuaauagagaaaga

SEQ ID NO: 2235041 - RNA, 19 nt, Homo sapiens
  misc_RNA (1)...(19): siRNA sense strand
cuuaugaacaggaaggaaa

SEQ ID NO: 2235042 - RNA, 19 nt, Homo sapiens
  misc_RNA (1)...(19): siRNA sense strand
gggaaaaggaacagucaua

SEQ ID NO: 2235043 - RNA, 19 nt, Homo sapiens
  misc_RNA (1)...(19): siRNA sense strand
ggauauuggaagcagcaaa

SEQ ID NO: 2235044 - RNA, 19 nt, Homo sapiens
  misc_RNA (1)...(19): siRNA sense strand
guuaggaucacaugggaaa

SEQ ID NO: 2235045 - RNA, 19 nt, Homo sapiens
  misc_RNA (1)...(19): siRNA sense strand
cuguauauuccauggcuua

SEQ ID NO: 2235046 - RNA, 19 nt, Homo sapiens
  misc_RNA (1)...(19): siRNA sense strand
gaccaaauggcgaggugaa

SEQ ID NO: 2235047 - RNA, 19 nt, Homo sapiens
  misc_RNA (1)...(19): siRNA sense strand
aggaaaugacagaccaaau

SEQ ID NO: 2235048 - RNA, 19 nt, Homo sapiens
  misc_RNA (1)...(19): siRNA sense strand
gcaggcauuaauagagaaa

SEQ ID NO: 2235049 - RNA, 19 nt, Homo sapiens
  misc_RNA (1)...(19): siRNA sense strand
ugccaauaaucgaagaaau

SEQ ID NO: 2235050 - RNA, 19 nt, Homo sapiens
  misc_RNA (1)...(19): siRNA sense strand
augcaauugaccagauuaa

SEQ ID NO: 2235051 - RNA, 19 nt, Homo sapiens
  misc_RNA (1)...(19): siRNA sense strand
cauugaugggaaagagcua

SEQ ID NO: 2235052 - RNA, 19 nt, Homo sapiens
  misc_RNA (1)...(19): siRNA sense strand
ccacgcaaagggagagaga

SEQ ID NO: 2235053 - RNA, 19 nt, Homo sapiens
  misc_RNA (1)...(19): siRNA sense strand
caacaaaagcacagaguac

SEQ ID NO: 2235054 - RNA, 19 nt, Homo sapiens
  misc_RNA (1)...(19): siRNA sense strand
gacacgugcucuagggaca

SEQ ID NO: 2235055 - RNA, 19 nt, Homo sapiens
  misc_RNA (1)...(19): siRNA sense strand
guucauuaguccagcaucu

SEQ ID NO: 2235056 - RNA, 19 nt, Homo sapiens
  misc_RNA (1)...(19): siRNA sense strand
cagaaggggcugugacaau

SEQ ID NO: 2235057 - RNA, 19 nt, Homo sapiens
  misc_RNA (1)...(19): siRNA sense strand
aagccgaacucuugccaau

SEQ ID NO: 2235058 - RNA, 19 nt, Homo sapiens
  misc_RNA (1)...(19): siRNA sense strand
aggaacagucauauaaaga

SEQ ID NO: 2235059 - RNA, 19 nt, Homo sapiens
  misc_RNA (1)...(19): siRNA sense strand
ucaucaaauuggaguggca

SEQ ID NO: 2235060 - RNA, 19 nt, Homo sapiens
  misc_RNA (1)...(19): siRNA sense strand
gaauauuugagcaggggaa

SEQ ID NO: 2235061 - RNA, 19 nt, Homo sapiens
  misc_RNA (1)...(19): siRNA sense strand
agagaaagaugcuucggau

SEQ ID NO: 2235062 - RNA, 19 nt, Homo sapiens
  misc_RNA (1)...(19): siRNA sense strand
uugauggauuugaucgaua

SEQ ID NO: 2235063 - RNA, 19 nt, Homo sapiens
  misc_RNA (1)...(19): siRNA sense strand
acaaaagcacagaguacaa

SEQ ID NO: 2235064 - RNA, 19 nt, Homo sapiens
  misc_RNA (1)...(19): siRNA sense strand
aggccaugcuuuaugcaau

SEQ ID NO: 2235065 - RNA, 19 nt, Homo sapiens
  misc_RNA (1)...(19): siRNA sense strand
ggaugugaagugugcuaau

SEQ ID NO: 2235066 - RNA, 19 nt, Homo sapiens
  misc_RNA (1)...(19): siRNA sense strand
ggggagugcucaaguguga

SEQ ID NO: 2235067 - RNA, 19 nt, Homo sapiens
  misc_RNA (1)...(19): siRNA sense strand
gauauuggaagcagcaaaa

SEQ ID NO: 2235068 - RNA, 19 nt, Homo sapiens
  misc_RNA (1)...(19): siRNA sense strand
aguacaaagucaucggcca

SEQ ID NO: 2235069 - RNA, 19 nt, Homo sapiens
  misc_RNA (1)...(19): siRNA sense strand
uggcuuacgcccugcacaa

SEQ ID NO: 2235070 - RNA, 19 nt, Homo sapiens
  misc_RNA (1)...(19): siRNA sense strand
gugaacgcugugaagguua

SEQ ID NO: 2235071 - RNA, 19 nt, Homo sapiens
  misc_RNA (1)...(19): siRNA sense strand
acaccuaucgugagggcuu

SEQ ID NO: 2235072 - RNA, 19 nt, Homo sapiens
  misc_RNA (1)...(19): siRNA sense strand
acgcaaagggagagagagg

SEQ ID NO: 2235073 - RNA, 19 nt, Homo sapiens
  misc_RNA (1)...(19): siRNA sense strand
gguuauauucgggcuguaa

SEQ ID NO: 2235074 - RNA, 19 nt, Homo sapiens
  misc_RNA (1)...(19): siRNA sense strand
ugaagaaggaaaaggggau

SEQ ID NO: 2235075 - RNA, 19 nt, Homo sapiens
  misc_RNA (1)...(19): siRNA sense strand
gagggagauuggugguguu

SEQ ID NO: 2235076 - RNA, 19 nt, Homo sapiens
  misc_RNA (1)...(19): siRNA sense strand
ugaaccaagaccuggagaa

SEQ ID NO: 2235077 - RNA, 19 nt, Homo sapiens
  misc_RNA (1)...(19): siRNA sense strand
cuucaaggcuguggugaca

SEQ ID NO: 2235078 - RNA, 19 nt, Homo sapiens
  misc_RNA (1)...(19): siRNA sense strand
gcccaaacgagcaucaauu

SEQ ID NO: 2235079 - RNA, 19 nt, Homo sapiens
  misc_RNA (1)...(19): siRNA sense strand
cgaagaaaugugugguuug

SEQ ID NO: 2235080 - RNA, 19 nt, Homo sapiens
  misc_RNA (1)...(19): siRNA sense strand
aggaaggaaagguccaauu

SEQ ID NO: 2235081 - RNA, 19 nt, Homo sapiens
  misc_RNA (1)...(19): siRNA sense strand
gccuguguuuguugcaaua

SEQ ID NO: 2235082 - RNA, 19 nt, Homo sapiens
  misc_RNA (1)...(19): siRNA sense strand
cuucaguaucucugggcau

SEQ ID NO: 2235083 - RNA, 19 nt, Homo sapiens
  misc_RNA (1)...(19): siRNA sense strand
aaaggaaaugacagaccaa

SEQ ID NO: 2235084 - RNA, 19 nt, Homo sapiens
  misc_RNA (1)...(19): siRNA sense strand
ucacaugggaaaaggaaca

SEQ ID NO: 2235085 - RNA, 19 nt, Homo sapiens
  misc_RNA (1)...(19): siRNA sense strand
aguuuaagugcuucaguau

SEQ ID NO: 2235086 - RNA, 19 nt, Homo sapiens
  misc_RNA (1)...(19): siRNA sense strand
gggagcugaagaaggaaaa

SEQ ID NO: 2235087 - RNA, 19 nt, Homo sapiens
  misc_RNA (1)...(19): siRNA sense strand
ccucaaaucagcuaugcau

SEQ ID NO: 2235088 - RNA, 19 nt, Homo sapiens
  misc_RNA (1)...(19): siRNA sense strand
cuuuagaagccgaacucuu

SEQ ID NO: 2235089 - RNA, 19 nt, Homo sapiens
  misc_RNA (1)...(19): siRNA sense strand
gaauuuuggcugcaaguua

SEQ ID NO: 2235090 - RNA, 19 nt, Homo sapiens
  misc_RNA (1)...(19): siRNA sense strand
aguuaggaucacaugggaa

SEQ ID NO: 2235091 - RNA, 19 nt, Homo sapiens
  misc_RNA (1)...(19): siRNA sense strand
gcacaaagaucucugcccu

SEQ ID NO: 2235092 - RNA, 19 nt, Homo sapiens
  misc_RNA (1)...(19): siRNA sense strand
ccuuugugaucgugaccuu

SEQ ID NO: 2235093 - RNA, 19 nt, Homo sapiens
  misc_RNA (1)...(19): siRNA sense strand
caucaggaggauauuggaa

SEQ ID NO: 2235094 - RNA, 19 nt, Homo sapiens
  misc_RNA (1)...(19): siRNA sense strand
cugcagaagauuuggacaa

SEQ ID NO: 2235095 - RNA, 19 nt, Homo sapiens
  misc_RNA (1)...(19): siRNA sense strand
gggaaagacauaaaggaga

SEQ ID NO: 2235096 - RNA, 19 nt, Homo sapiens
  misc_RNA (1)...(19): siRNA sense strand
cuuaaagagccauggacaa

SEQ ID NO: 2235097 - RNA, 19 nt, Homo sapiens
  misc_RNA (1)...(19): siRNA sense strand
ggaaagacauaaaggagag

SEQ ID NO: 2235098 - RNA, 19 nt, Homo sapiens
  misc_RNA (1)...(19): siRNA sense strand
aauacaaccucuaugggaa

SEQ ID NO: 2235099 - RNA, 19 nt, Homo sapiens
  misc_RNA (1)...(19): siRNA sense strand
auacaaccucuaugggaaa

SEQ ID NO: 2235100 - RNA, 19 nt, Homo sapiens
  misc_RNA (1)...(19): siRNA sense strand
ggaugaagcuggugcagac

SEQ ID NO: 2235101 - RNA, 19 nt, Homo sapiens
  misc_RNA (1)...(19): siRNA sense strand
guauagcagauuuggguga

SEQ ID NO: 2235102 - RNA, 19 nt, Homo sapiens
  misc_RNA (1)...(19): siRNA sense strand
aggaagauuuucagguuuu

SEQ ID NO: 2235103 - RNA, 19 nt, Homo sapiens
  misc_RNA (1)...(19): siRNA sense strand
ggugcagaccagagccauu

SEQ ID NO: 2235104 - RNA, 19 nt, Homo sapiens
  misc_RNA (1)...(19): siRNA sense strand
cagagaagcccaagcucca

SEQ ID NO: 2235105 - RNA, 19 nt, Homo sapiens
  misc_RNA (1)...(19): siRNA sense strand
aggagagagcccugauuga

SEQ ID NO: 2235106 - RNA, 19 nt, Homo sapiens
  misc_RNA (1)...(19): siRNA sense strand
gauuugagggcuuggagaa

SEQ ID NO: 2235107 - RNA, 19 nt, Homo sapiens
  misc_RNA (1)...(19): siRNA sense strand
acucaagcuacgaggaaaa

SEQ ID NO: 2235108 - RNA, 19 nt, Homo sapiens
  misc_RNA (1)...(19): siRNA sense strand
acaagaucacccagagcaa

SEQ ID NO: 2235109 - RNA, 19 nt, Homo sapiens
  misc_RNA (1)...(19): siRNA sense strand
ucccaaaccugaaggacuu

SEQ ID NO: 2235110 - RNA, 19 nt, Homo sapiens
  misc_RNA (1)...(19): siRNA sense strand
gcuacgaggaaaagaagua

SEQ ID NO: 2235111 - RNA, 19 nt, Homo sapiens
  misc_RNA (1)...(19): siRNA sense strand
gagaaccaguuuauggaca

SEQ ID NO: 2235112 - RNA, 19 nt, Homo sapiens
  misc_RNA (1)...(19): siRNA sense strand
agacucaagcuacgaggaa

SEQ ID NO: 2235113 - RNA, 19 nt, Homo sapiens
  misc_RNA (1)...(19): siRNA sense strand
acucacaguuucuggggaa

SEQ ID NO: 2235114 - RNA, 19 nt, Homo sapiens
  misc_RNA (1)...(19): siRNA sense strand
cuacuugauugaugggacu

SEQ ID NO: 2235115 - RNA, 19 nt, Homo sapiens
  misc_RNA (1)...(19): siRNA sense strand
gacucaagcuacgaggaaa

SEQ ID NO: 2235116 - RNA, 19 nt, Homo sapiens
  misc_RNA (1)...(19): siRNA sense strand
uuaugauguccuugagaga

SEQ ID NO: 2235117 - RNA, 19 nt, Homo sapiens
  misc_RNA (1)...(19): siRNA sense strand
agaaacugaaaccagaaua

SEQ ID NO: 2235118 - RNA, 19 nt, Homo sapiens
  misc_RNA (1)...(19): siRNA sense strand
gggagacagaagaggagaa

SEQ ID NO: 2235119 - RNA, 19 nt, Homo sapiens
  misc_RNA (1)...(19): siRNA sense strand
caaaauacuuggaggaacu

SEQ ID NO: 2235120 - RNA, 19 nt, Homo sapiens
  misc_RNA (1)...(19): siRNA sense strand
gcuacauggaacagcaaau

SEQ ID NO: 2235121 - RNA, 19 nt, Homo sapiens
  misc_RNA (1)...(19): siRNA sense strand
acaagaucacccagagcaa

SEQ ID NO: 2235122 - RNA, 19 nt, Homo sapiens
  misc_RNA (1)...(19): siRNA sense strand
acucaagcuauguggaaaa

SEQ ID NO: 2235123 - RNA, 19 nt, Homo sapiens
  misc_RNA (1)...(19): siRNA sense strand
ggccaugguuugcaggaga

SEQ ID NO: 2235124 - RNA, 19 nt, Homo sapiens
  misc_RNA (1)...(19): siRNA sense strand
ugaagaagaucucugccua

SEQ ID NO: 2235125 - RNA, 19 nt, Homo sapiens
  misc_RNA (1)...(19): siRNA sense strand
ggagaagauucguguggac

SEQ ID NO: 2235126 - RNA, 19 nt, Homo sapiens
  misc_RNA (1)...(19): siRNA sense strand
gcaaugccauccugcgcua

SEQ ID NO: 2235127 - RNA, 19 nt, Homo sapiens
  misc_RNA (1)...(19): siRNA sense strand
gcuuggacgccuuccuaaa

SEQ ID NO: 2235128 - RNA, 19 nt, Homo sapiens
  misc_RNA (1)...(19): siRNA sense strand
guguggacauuuuggagaa

SEQ ID NO: 2235129 - RNA, 19 nt, Homo sapiens
  misc_RNA (1)...(19): siRNA sense strand
gcuauguggaaaagaagua

SEQ ID NO: 2235130 - RNA, 19 nt, Homo sapiens
  misc_RNA (1)...(19): siRNA sense strand
agaagauucguguggacau

SEQ ID NO: 2235131 - RNA, 19 nt, Homo sapiens
  misc_RNA (1)...(19): siRNA sense strand
uuugagaaacugaagccaa

SEQ ID NO: 2235132 - RNA, 19 nt, Homo sapiens
  misc_RNA (1)...(19): siRNA sense strand
aggcagcccugguggacau

SEQ ID NO: 2235133 - RNA, 19 nt, Homo sapiens
  misc_RNA (1)...(19): siRNA sense strand
ccaaguuccaggacggaga

SEQ ID NO: 2235134 - RNA, 19 nt, Homo sapiens
  misc_RNA (1)...(19): siRNA sense strand
acucaaagccuccugccua

SEQ ID NO: 2235135 - RNA, 19 nt, Homo sapiens
  misc_RNA (1)...(19): siRNA sense strand
aggaggagguggugaccgu

SEQ ID NO: 2235136 - RNA, 19 nt, Homo sapiens
  misc_RNA (1)...(19): siRNA sense strand
ggaaggaggagguggugac

SEQ ID NO: 2235137 - RNA, 19 nt, Homo sapiens
  misc_RNA (1)...(19): siRNA sense strand
gcaaauauaaggucccuga

SEQ ID NO: 2235138 - RNA, 19 nt, Homo sapiens
  misc_RNA (1)...(19): siRNA sense strand
aggucauucugaaggccaa

SEQ ID NO: 2235139 - RNA, 19 nt, Homo sapiens
  misc_RNA (1)...(19): siRNA sense strand
ggucagcacuuaagcgaug

SEQ ID NO: 2235140 - RNA, 19 nt, Homo sapiens
  misc_RNA (1)...(19): siRNA sense strand
ugauuaaaggucagcacuu

SEQ ID NO: 2235141 - RNA, 19 nt, Homo sapiens
  misc_RNA (1)...(19): siRNA sense strand
aggagaagguggaacgcaa

SEQ ID NO: 2235142 - RNA, 19 nt, Homo sapiens
  misc_RNA (1)...(19): siRNA sense strand
gcaccguggauuuggucaa

SEQ ID NO: 2235143 - RNA, 19 nt, Homo sapiens
  misc_RNA (1)...(19): siRNA sense strand
aggaguucuugcagaucaa

SEQ ID NO: 2235144 - RNA, 19 nt, Homo sapiens
  misc_RNA (1)...(19): siRNA sense strand
uggucaaagggcagcacaa

SEQ ID NO: 2235145 - RNA, 19 nt, Homo sapiens
  misc_RNA (1)...(19): siRNA sense strand
cugauuuaccugagcugua

SEQ ID NO: 2235146 - RNA, 19 nt, Homo sapiens
  misc_RNA (1)...(19): siRNA sense strand
ccguggcaccuuugguaua

SEQ ID NO: 2235147 - RNA, 19 nt, Homo sapiens
  misc_RNA (1)...(19): siRNA sense strand
gaucaacagccuggggaaa

SEQ ID NO: 2235148 - RNA, 19 nt, Homo sapiens
  misc_RNA (1)...(19): siRNA sense strand
gcucggccauccugauuua

SEQ ID NO: 2235149 - RNA, 19 nt, Homo sapiens
  misc_RNA (1)...(19): siRNA sense strand
gggaaacugccgacgcuca

SEQ ID NO: 2235150 - RNA, 19 nt, Homo sapiens
  misc_RNA (1)...(19): siRNA sense strand
ccgucuacaucuucgccaa

SEQ ID NO: 2235151 - RNA, 19 nt, Homo sapiens
  misc_RNA (1)...(19): siRNA sense strand
agggauaaaccgagaaaga

SEQ ID NO: 2235152 - RNA, 19 nt, Homo sapiens
  misc_RNA (1)...(19): siRNA sense strand
uucaaaggguacagagaaa

SEQ ID NO: 2235153 - RNA, 19 nt, Homo sapiens
  misc_RNA (1)...(19): siRNA sense strand
caggaugaaguaagggaaa

SEQ ID NO: 2235154 - RNA, 19 nt, Homo sapiens
  misc_RNA (1)...(19): siRNA sense strand
gauagagggaagaggaaaa

SEQ ID NO: 2235155 - RNA, 19 nt, Homo sapiens
  misc_RNA (1)...(19): siRNA sense strand
agaggaagagacagggaua

SEQ ID NO: 2235156 - RNA, 19 nt, Homo sapiens
  misc_RNA (1)...(19): siRNA sense strand
aggaagagacagggauaaa

SEQ ID NO: 2235157 - RNA, 19 nt, Homo sapiens
  misc_RNA (1)...(19): siRNA sense strand
acuugggaaugcagagaaa

SEQ ID NO: 2235158 - RNA, 19 nt, Homo sapiens
  misc_RNA (1)...(19): siRNA sense strand
cauuaggacuggaugaaaa

SEQ ID NO: 2235159 - RNA, 19 nt, Homo sapiens
  misc_RNA (1)...(19): siRNA sense strand
gugauucaguagaggaaga

SEQ ID NO: 2235160 - RNA, 19 nt, Homo sapiens
  misc_RNA (1)...(19): siRNA sense strand
ggauagagggaagaggaaa

SEQ ID NO: 2235161 - RNA, 19 nt, Homo sapiens
  misc_RNA (1)...(19): siRNA sense strand
uuggaaacucugauggaaa

SEQ ID NO: 2235162 - RNA, 19 nt, Homo sapiens
  misc_RNA (1)...(19): siRNA sense strand
gggagcuuguugugagaau

SEQ ID NO: 2235163 - RNA, 19 nt, Homo sapiens
  misc_RNA (1)...(19): siRNA sense strand
cugcagagcaauaggucuu

SEQ ID NO: 2235164 - RNA, 19 nt, Homo sapiens
  misc_RNA (1)...(19): siRNA sense strand
cgaaacaucugaaggguuc

SEQ ID NO: 2235165 - RNA, 19 nt, Homo sapiens
  misc_RNA (1)...(19): siRNA sense strand
uguugaaugucuugugauu

SEQ ID NO: 2235166 - RNA, 19 nt, Homo sapiens
  misc_RNA (1)...(19): siRNA sense strand
gaggaagagacagggauaa

SEQ ID NO: 2235167 - RNA, 19 nt, Homo sapiens
  misc_RNA (1)...(19): siRNA sense strand
caagguugucagagaagua

SEQ ID NO: 2235168 - RNA, 19 nt, Homo sapiens
  misc_RNA (1)...(19): siRNA sense strand
uggauagagggaagaggaa

SEQ ID NO: 2235169 - RNA, 19 nt, Homo sapiens
  misc_RNA (1)...(19): siRNA sense strand
acaaagaauugacaggcuu

SEQ ID NO: 2235170 - RNA, 19 nt, Homo sapiens
  misc_RNA (1)...(19): siRNA sense strand
aaccuaugcuggucagaaa

SEQ ID NO: 2235171 - RNA, 19 nt, Homo sapiens
  misc_RNA (1)...(19): siRNA sense strand
caaagauaauccuggggaa

SEQ ID NO: 2235172 - RNA, 19 nt, Homo sapiens
  misc_RNA (1)...(19): siRNA sense strand
ccuguaacucagaggguca

SEQ ID NO: 2235173 - RNA, 19 nt, Homo sapiens
  misc_RNA (1)...(19): siRNA sense strand
agacagggauaaaccgaga

SEQ ID NO: 2235174 - RNA, 19 nt, Homo sapiens
  misc_RNA (1)...(19): siRNA sense strand
gugcaaaauuccuuaguga

SEQ ID NO: 2235175 - RNA, 19 nt, Homo sapiens
  misc_RNA (1)...(19): siRNA sense strand
agcaauaggucuuggugga

SEQ ID NO: 2235176 - RNA, 19 nt, Homo sapiens
  misc_RNA (1)...(19): siRNA sense strand
acaacaggucgaagaucaa

SEQ ID NO: 2235177 - RNA, 19 nt, Homo sapiens
  misc_RNA (1)...(19): siRNA sense strand
cagugauaaaggaggcauu

SEQ ID NO: 2235178 - RNA, 19 nt, Homo sapiens
  misc_RNA (1)...(19): siRNA sense strand
ccuuaguggcugaaacaga

SEQ ID NO: 2235179 - RNA, 19 nt, Homo sapiens
  misc_RNA (1)...(19): siRNA sense strand
gagaaguauuaaagacuac

SEQ ID NO: 2235180 - RNA, 19 nt, Homo sapiens
  misc_RNA (1)...(19): siRNA sense strand
aggucaacauuaacaagaa

SEQ ID NO: 2235181 - RNA, 19 nt, Homo sapiens
  misc_RNA (1)...(19): siRNA sense strand
cagcauuggcagcaggaca

SEQ ID NO: 2235182 - RNA, 19 nt, Homo sapiens
  misc_RNA (1)...(19): siRNA sense strand
ugaacaaguuauuacccua

SEQ ID NO: 2235183 - RNA, 19 nt, Homo sapiens
  misc_RNA (1)...(19): siRNA sense strand
ccaacuacuucguguucau

SEQ ID NO: 2235184 - RNA, 19 nt, Homo sapiens
  misc_RNA (1)...(19): siRNA sense strand
agaaagaaaaguugagguu

SEQ ID NO: 2235185 - RNA, 19 nt, Homo sapiens
  misc_RNA (1)...(19): siRNA sense strand
gauggaaacucaugagcgu

SEQ ID NO: 2235186 - RNA, 19 nt, Homo sapiens
  misc_RNA (1)...(19): siRNA sense strand
uauaauuacuccuugguga

SEQ ID NO: 2235187 - RNA, 19 nt, Homo sapiens
  misc_RNA (1)...(19): siRNA sense strand
cagagaaguauuaaagacu

SEQ ID NO: 2235188 - RNA, 19 nt, Homo sapiens
  misc_RNA (1)...(19): siRNA sense strand
agagcaagcacauuagcaa

SEQ ID NO: 2235189 - RNA, 19 nt, Homo sapiens
  misc_RNA (1)...(19): siRNA sense strand
guuccaacucacaggauga

SEQ ID NO: 2235190 - RNA, 19 nt, Homo sapiens
  misc_RNA (1)...(19): siRNA sense strand
acucagagggucaagauga

SEQ ID NO: 2235191 - RNA, 19 nt, Homo sapiens
  misc_RNA (1)...(19): siRNA sense strand
uaaauuggauagagggaag

SEQ ID NO: 2235192 - RNA, 19 nt, Homo sapiens
  misc_RNA (1)...(19): siRNA sense strand
acagaauguugguaguuca

SEQ ID NO: 2235193 - RNA, 19 nt, Homo sapiens
  misc_RNA (1)...(19): siRNA sense strand
ccuuagugaugcugagauc

SEQ ID NO: 2235194 - RNA, 19 nt, Homo sapiens
  misc_RNA (1)...(19): siRNA sense strand
gaacaugauuucaaagggu

SEQ ID NO: 2235195 - RNA, 19 nt, Homo sapiens
  misc_RNA (1)...(19): siRNA sense strand
uuucaaaacuucacgagua

SEQ ID NO: 2235196 - RNA, 19 nt, Homo sapiens
  misc_RNA (1)...(19): siRNA sense strand
gcuagguguucaaggagca

SEQ ID NO: 2235197 - RNA, 19 nt, Homo sapiens
  misc_RNA (1)...(19): siRNA sense strand
uguucaaggagcaugcaaa

SEQ ID NO: 2235198 - RNA, 19 nt, Homo sapiens
  misc_RNA (1)...(19): siRNA sense strand
guuccagaauuuacgucaa

SEQ ID NO: 2235199 - RNA, 19 nt, Homo sapiens
  misc_RNA (1)...(19): siRNA sense strand
aggaugaaguaagggaaaa

SEQ ID NO: 2235200 - RNA, 19 nt, Homo sapiens
  misc_RNA (1)...(19): siRNA sense strand
uugaacaaacagagacaga

SEQ ID NO: 2235201 - RNA, 19 nt, Homo sapiens
  misc_RNA (1)...(19): siRNA sense strand
ucuacagauacuugggaau

SEQ ID NO: 2235202 - RNA, 19 nt, Homo sapiens
  misc_RNA (1)...(19): siRNA sense strand
caauagaggcugcagagca

SEQ ID NO: 2235203 - RNA, 19 nt, Homo sapiens
  misc_RNA (1)...(19): siRNA sense strand
gguaacuauuguacugaca

SEQ ID NO: 2235204 - RNA, 19 nt, Homo sapiens
  misc_RNA (1)...(19): siRNA sense strand
gcagaugcuagguguucaa

SEQ ID NO: 2235205 - RNA, 19 nt, Homo sapiens
  misc_RNA (1)...(19): siRNA sense strand
gauaaaccgagaaagaaaa

SEQ ID NO: 2235206 - RNA, 19 nt, Homo sapiens
  misc_RNA (1)...(19): siRNA sense strand
gcuuguugugagaauguua

SEQ ID NO: 2235207 - RNA, 19 nt, Homo sapiens
  misc_RNA (1)...(19): siRNA sense strand
ccauuuugcccgaguuuua

SEQ ID NO: 2235208 - RNA, 19 nt, Homo sapiens
  misc_RNA (1)...(19): siRNA sense strand
ugacucugcagaagugaaa

SEQ ID NO: 2235209 - RNA, 19 nt, Homo sapiens
  misc_RNA (1)...(19): siRNA sense strand
ugaaggguucgcagugaua

SEQ ID NO: 2235210 - RNA, 19 nt, Homo sapiens
  misc_RNA (1)...(19): siRNA sense strand
auuugcacgucuacagaaa

SEQ ID NO: 2235211 - RNA, 19 nt, Homo sapiens
  misc_RNA (1)...(19): siRNA sense strand
aaagauaauccuggggaaa

SEQ ID NO: 2235212 - RNA, 19 nt, Homo sapiens
  misc_RNA (1)...(19): siRNA sense strand
acaagaugugugagggcaa

SEQ ID NO: 2235213 - RNA, 19 nt, Homo sapiens
  misc_RNA (1)...(19): siRNA sense strand
aggacaagugugagacaga

SEQ ID NO: 2235214 - RNA, 19 nt, Homo sapiens
  misc_RNA (1)...(19): siRNA sense strand
gaaauuaagcugaggccag

SEQ ID NO: 2235215 - RNA, 19 nt, Homo sapiens
  misc_RNA (1)...(19): siRNA sense strand
augauagagaaguagacaa

SEQ ID NO: 2235216 - RNA, 19 nt, Homo sapiens
  misc_RNA (1)...(19): siRNA sense strand
ucuacaaggccguacgaca

SEQ ID NO: 2235217 - RNA, 19 nt, Homo sapiens
  misc_RNA (1)...(19): siRNA sense strand
ccguacggagugagcggaa

SEQ ID NO: 2235218 - RNA, 19 nt, Homo sapiens
  misc_RNA (1)...(19): siRNA sense strand
caaauugaggagugggucu

SEQ ID NO: 2235219 - RNA, 19 nt, Homo sapiens
  misc_RNA (1)...(19): siRNA sense strand
agacagaugagcagggccu

SEQ ID NO: 2235220 - RNA, 19 nt, Homo sapiens
  misc_RNA (1)...(19): siRNA sense strand
agugcaaaguccaggucaa

SEQ ID NO: 2235221 - RNA, 19 nt, Homo sapiens
  misc_RNA (1)...(19): siRNA sense strand
caggcaacaggaagagaaa

SEQ ID NO: 2235222 - RNA, 19 nt, Homo sapiens
  misc_RNA (1)...(19): siRNA sense strand
uggaacagcaggaacgaga

SEQ ID NO: 2235223 - RNA, 19 nt, Homo sapiens
  misc_RNA (1)...(19): siRNA sense strand
gcaaguggagcuuuggcaa

SEQ ID NO: 2235224 - RNA, 19 nt, Homo sapiens
  misc_RNA (1)...(19): siRNA sense strand
ccaccaucagggagcacaa

SEQ ID NO: 2235225 - RNA, 19 nt, Homo sapiens
  misc_RNA (1)...(19): siRNA sense strand
ccaucaaugagguguuaga

SEQ ID NO: 2235226 - RNA, 19 nt, Homo sapiens
  misc_RNA (1)...(19): siRNA sense strand
ugaucagccucgaccggua

SEQ ID NO: 2235227 - RNA, 19 nt, Homo sapiens
  misc_RNA (1)...(19): siRNA sense strand
cuuuaagcgagaacagaaa

SEQ ID NO: 2235228 - RNA, 19 nt, Homo sapiens
  misc_RNA (1)...(19): siRNA sense strand
gcaaguggaucuuuggaca

SEQ ID NO: 2235229 - RNA, 19 nt, Homo sapiens
  misc_RNA (1)...(19): siRNA sense strand
ggacaaugccuccggcugu

SEQ ID NO: 2235230 - RNA, 19 nt, Homo sapiens
  misc_RNA (1)...(19): siRNA sense strand
acggcagagucgagaaagu

SEQ ID NO: 2235231 - RNA, 19 nt, Homo sapiens
  misc_RNA (1)...(19): siRNA sense strand
ugugaggcagaaugggaaa

SEQ ID NO: 2235232 - RNA, 19 nt, Homo sapiens
  misc_RNA (1)...(19): siRNA sense strand
ccgugugcuucgucaagaa

SEQ ID NO: 2235233 - RNA, 19 nt, Homo sapiens
  misc_RNA (1)...(19): siRNA sense strand
ucuuuaagcgagaacagaa

SEQ ID NO: 2235234 - RNA, 19 nt, Homo sapiens
  misc_RNA (1)...(19): siRNA sense strand
guaaaugaugauaaggugu

SEQ ID NO: 2235235 - RNA, 19 nt, Homo sapiens
  misc_RNA (1)...(19): siRNA sense strand
cuuuaagcgagaacagaaa

SEQ ID NO: 2235236 - RNA, 19 nt, Homo sapiens
  misc_RNA (1)...(19): siRNA sense strand
gcaaguggaucuuuggaca

SEQ ID NO: 2235237 - RNA, 19 nt, Homo sapiens
  misc_RNA (1)...(19): siRNA sense strand
ggacaaugccuccggcugu

SEQ ID NO: 2235238 - RNA, 19 nt, Homo sapiens
  misc_RNA (1)...(19): siRNA sense strand
acggcagagucgagaaagu

SEQ ID NO: 2235239 - RNA, 19 nt, Homo sapiens
  misc_RNA (1)...(19): siRNA sense strand
ugugaggcagaaugggaaa

SEQ ID NO: 2235240 - RNA, 19 nt, Homo sapiens
  misc_RNA (1)...(19): siRNA sense strand
ccgugugcuucgucaagaa

SEQ ID NO: 2235241 - RNA, 19 nt, Homo sapiens
  misc_RNA (1)...(19): siRNA sense strand
ucuuuaagcgagaacagaa

SEQ ID NO: 2235242 - RNA, 19 nt, Homo sapiens
  misc_RNA (1)...(19): siRNA sense strand
guaaaugaugauaaggugu

SEQ ID NO: 2235243 - RNA, 19 nt, Homo sapiens
  misc_RNA (1)...(19): siRNA sense strand
cuuuaagcgagaacagaaa

SEQ ID NO: 2235244 - RNA, 19 nt, Homo sapiens
  misc_RNA (1)...(19): siRNA sense strand
gcaaguggaucuuuggaca

SEQ ID NO: 2235245 - RNA, 19 nt, Homo sapiens
  misc_RNA (1)...(19): siRNA sense strand
ggacaaugccuccggcugu

SEQ ID NO: 2235246 - RNA, 19 nt, Homo sapiens
  misc_RNA (1)...(19): siRNA sense strand
acggcagagucgagaaagu

SEQ ID NO: 2235247 - RNA, 19 nt, Homo sapiens
  misc_RNA (1)...(19): siRNA sense strand
ugugaggcagaaugggaaa

SEQ ID NO: 2235248 - RNA, 19 nt, Homo sapiens
  misc_RNA (1)...(19): siRNA sense strand
ccgugugcuucgucaagaa

SEQ ID NO: 2235249 - RNA, 19 nt, Homo sapiens
  misc_RNA (1)...(19): siRNA sense strand
ucuuuaagcgagaacagaa

SEQ ID NO: 2235250 - RNA, 19 nt, Homo sapiens
  misc_RNA (1)...(19): siRNA sense strand
guaaaugaugauaaggugu

SEQ ID NO: 2235251 - RNA, 19 nt, Homo sapiens
  misc_RNA (1)...(19): siRNA sense strand
caaagaagcuggcgguuga

SEQ ID NO: 2235252 - RNA, 19 nt, Homo sapiens
  misc_RNA (1)...(19): siRNA sense strand
agaagguauucgagguaca

SEQ ID NO: 2235253 - RNA, 19 nt, Homo sapiens
  misc_RNA (1)...(19): siRNA sense strand
cuuugguggcugugggcaa

SEQ ID NO: 2235254 - RNA, 19 nt, Homo sapiens
  misc_RNA (1)...(19): siRNA sense strand
ggaucggaugagaagguau

SEQ ID NO: 2235255 - RNA, 19 nt, Homo sapiens
  misc_RNA (1)...(19): siRNA sense strand
ucaaugaauuccaacguca

SEQ ID NO: 2235256 - RNA, 19 nt, Homo sapiens
  misc_RNA (1)...(19): siRNA sense strand
acuaugagaccuucgggaa

SEQ ID NO: 2235257 - RNA, 19 nt, Homo sapiens
  misc_RNA (1)...(19): siRNA sense strand
uaaauaagauucugcugga

SEQ ID NO: 2235258 - RNA, 19 nt, Homo sapiens
  misc_RNA (1)...(19): siRNA sense strand
gcacggugaucgagggcua

SEQ ID NO: 2235259 - RNA, 19 nt, Homo sapiens
  misc_RNA (1)...(19): siRNA sense strand
gcaccaucuucaagggcaa

SEQ ID NO: 2235260 - RNA, 19 nt, Homo sapiens
  misc_RNA (1)...(19): siRNA sense strand
ucuccaaggccgaggacua

SEQ ID NO: 2235261 - RNA, 19 nt, Homo sapiens
  misc_RNA (1)...(19): siRNA sense strand
ccgagaaggaggaggcuga

SEQ ID NO: 2235262 - RNA, 19 nt, Homo sapiens
  misc_RNA (1)...(19): siRNA sense strand
ccuccaagccugagcaaga

SEQ ID NO: 2235263 - RNA, 19 nt, Homo sapiens
  misc_RNA (1)...(19): siRNA sense strand
gggcgugcaccgagaacaa

SEQ ID NO: 2235264 - RNA, 19 nt, Homo sapiens
  misc_RNA (1)...(19): siRNA sense strand
aguuaaucgugaaguggaa

SEQ ID NO: 2235265 - RNA, 19 nt, Homo sapiens
  misc_RNA (1)...(19): siRNA sense strand
gggaaugggucguggacag

SEQ ID NO: 2235266 - RNA, 19 nt, Homo sapiens
  misc_RNA (1)...(19): siRNA sense strand
cuuuacaaccugaggaaca

SEQ ID NO: 2235267 - RNA, 19 nt, Homo sapiens
  misc_RNA (1)...(19): siRNA sense strand
ucucaaggauauugggcuu

SEQ ID NO: 2235268 - RNA, 19 nt, Homo sapiens
  misc_RNA (1)...(19): siRNA sense strand
ccaucaacaaugaguacaa

SEQ ID NO: 2235269 - RNA, 19 nt, Homo sapiens
  misc_RNA (1)...(19): siRNA sense strand
ggccaucaggauugagaaa

SEQ ID NO: 2235270 - RNA, 19 nt, Homo sapiens
  misc_RNA (1)...(19): siRNA sense strand
aggagcagcuagaagggaa

SEQ ID NO: 2235271 - RNA, 19 nt, Homo sapiens
  misc_RNA (1)...(19): siRNA sense strand
agacaggaauacaggaagu

SEQ ID NO: 2235272 - RNA, 19 nt, Homo sapiens
  misc_RNA (1)...(19): siRNA sense strand
gcgagauaucuaugagaca

SEQ ID NO: 2235273 - RNA, 19 nt, Homo sapiens
  misc_RNA (1)...(19): siRNA sense strand
uaagaaugucacagaguau

SEQ ID NO: 2235274 - RNA, 19 nt, Homo sapiens
  misc_RNA (1)...(19): siRNA sense strand
gaccaucaaagcagggaaa

SEQ ID NO: 2235275 - RNA, 19 nt, Homo sapiens
  misc_RNA (1)...(19): siRNA sense strand
agagcagaguggauaacaa

SEQ ID NO: 2235276 - RNA, 19 nt, Homo sapiens
  misc_RNA (1)...(19): siRNA sense strand
cagagaacauggagagcgu

SEQ ID NO: 2235277 - RNA, 19 nt, Homo sapiens
  misc_RNA (1)...(19): siRNA sense strand
cuggagaacugcacgguga

SEQ ID NO: 2235278 - RNA, 19 nt, Homo sapiens
  misc_RNA (1)...(19): siRNA sense strand
gcaugguagccgaagauuu

SEQ ID NO: 2235279 - RNA, 19 nt, Homo sapiens
  misc_RNA (1)...(19): siRNA sense strand
aaacugaagccgagaagca

SEQ ID NO: 2235280 - RNA, 19 nt, Homo sapiens
  misc_RNA (1)...(19): siRNA sense strand
ccgagaagcaggccgagaa

SEQ ID NO: 2235281 - RNA, 19 nt, Homo sapiens
  misc_RNA (1)...(19): siRNA sense strand
ugggaggguuggugauuau

SEQ ID NO: 2235282 - RNA, 19 nt, Homo sapiens
  misc_RNA (1)...(19): siRNA sense strand
cagaaggagcagaugacau

SEQ ID NO: 2235283 - RNA, 19 nt, Homo sapiens
  misc_RNA (1)...(19): siRNA sense strand
ccagacaggaauacaggaa

SEQ ID NO: 2235284 - RNA, 19 nt, Homo sapiens
  misc_RNA (1)...(19): siRNA sense strand
acuacagcgaggagaacaa

SEQ ID NO: 2235285 - RNA, 19 nt, Homo sapiens
  misc_RNA (1)...(19): siRNA sense strand
cgaagauuucacagucaaa

SEQ ID NO: 2235286 - RNA, 19 nt, Homo sapiens
  misc_RNA (1)...(19): siRNA sense strand
cccgaaggucugugaggaa

SEQ ID NO: 2235287 - RNA, 19 nt, Homo sapiens
  misc_RNA (1)...(19): siRNA sense strand
ggaacaugguggacgugga

SEQ ID NO: 2235288 - RNA, 19 nt, Homo sapiens
  misc_RNA (1)...(19): siRNA sense strand
ccaaaacaggauaugaaaa

SEQ ID NO: 2235289 - RNA, 19 nt, Homo sapiens
  misc_RNA (1)...(19): siRNA sense strand
gagauaucuaugagacaga

SEQ ID NO: 2235290 - RNA, 19 nt, Homo sapiens
  misc_RNA (1)...(19): siRNA sense strand
ggagcagcuagaagggaau

SEQ ID NO: 2235291 - RNA, 19 nt, Homo sapiens
  misc_RNA (1)...(19): siRNA sense strand
acauaaacaccaggaacaa

SEQ ID NO: 2235292 - RNA, 19 nt, Homo sapiens
  misc_RNA (1)...(19): siRNA sense strand
ccgcagaaggagcagauga

SEQ ID NO: 2235293 - RNA, 19 nt, Homo sapiens
  misc_RNA (1)...(19): siRNA sense strand
agacagacuauuaccggaa

SEQ ID NO: 2235294 - RNA, 19 nt, Homo sapiens
  misc_RNA (1)...(19): siRNA sense strand
ccgcagacaccuacaacau

SEQ ID NO: 2235295 - RNA, 19 nt, Homo sapiens
  misc_RNA (1)...(19): siRNA sense strand
guugaggaucagcgagaau

SEQ ID NO: 2235296 - RNA, 19 nt, Homo sapiens
  misc_RNA (1)...(19): siRNA sense strand
uugcagacggcauggcaua

SEQ ID NO: 2235297 - RNA, 19 nt, Homo sapiens
  misc_RNA (1)...(19): siRNA sense strand
cgaaggucugugaggaaga

SEQ ID NO: 2235298 - RNA, 19 nt, Homo sapiens
  misc_RNA (1)...(19): siRNA sense strand
ggacauaaacaccaggaac

SEQ ID NO: 2235299 - RNA, 19 nt, Homo sapiens
  misc_RNA (1)...(19): siRNA sense strand
ccuucuacguccucgacaa

SEQ ID NO: 2235300 - RNA, 19 nt, Homo sapiens
  misc_RNA (1)...(19): siRNA sense strand
agaagcaggccgagaagga

SEQ ID NO: 2235301 - RNA, 19 nt, Homo sapiens
  misc_RNA (1)...(19): siRNA sense strand
gaggaagaaaagaaaacaa

SEQ ID NO: 2235302 - RNA, 19 nt, Homo sapiens
  misc_RNA (1)...(19): siRNA sense strand
gggcuuguccaacgagcaa

SEQ ID NO: 2235303 - RNA, 19 nt, Homo sapiens
  misc_RNA (1)...(19): siRNA sense strand
uugagaauuuccugcacaa

SEQ ID NO: 2235304 - RNA, 19 nt, Homo sapiens
  misc_RNA (1)...(19): siRNA sense strand
uggauaacaaggagagaac

SEQ ID NO: 2235305 - RNA, 19 nt, Homo sapiens
  misc_RNA (1)...(19): siRNA sense strand
gcugcaaccacgaggcuga

SEQ ID NO: 2235306 - RNA, 19 nt, Homo sapiens
  misc_RNA (1)...(19): siRNA sense strand
ucuacuacagcgaggagaa

SEQ ID NO: 2235307 - RNA, 19 nt, Homo sapiens
  misc_RNA (1)...(19): siRNA sense strand
auaacuacauuguggggaa

SEQ ID NO: 2235308 - RNA, 19 nt, Homo sapiens
  misc_RNA (1)...(19): siRNA sense strand
caaauuauguguuuccgaa

SEQ ID NO: 2235309 - RNA, 19 nt, Homo sapiens
  misc_RNA (1)...(19): siRNA sense strand
ggccaaaacaggauaugaa

SEQ ID NO: 2235310 - RNA, 19 nt, Homo sapiens
  misc_RNA (1)...(19): siRNA sense strand
ugccaaggguguggugaaa

SEQ ID NO: 2235311 - RNA, 19 nt, Homo sapiens
  misc_RNA (1)...(19): siRNA sense strand
uguuugaacugaugcgcau

SEQ ID NO: 2235312 - RNA, 19 nt, Homo sapiens
  misc_RNA (1)...(19): siRNA sense strand
caguauaaccccaagauga

SEQ ID NO: 2235313 - RNA, 19 nt, Homo sapiens
  misc_RNA (1)...(19): siRNA sense strand
cagggaccauggaggagaa

SEQ ID NO: 2235314 - RNA, 19 nt, Homo sapiens
  misc_RNA (1)...(19): siRNA sense strand
ucgagguggugacgggcua

SEQ ID NO: 2235315 - RNA, 19 nt, Homo sapiens
  misc_RNA (1)...(19): siRNA sense strand
ucuucuauguccaggccaa

SEQ ID NO: 2235316 - RNA, 19 nt, Homo sapiens
  misc_RNA (1)...(19): siRNA sense strand
uuaccggaaaggaggcaaa

SEQ ID NO: 2235317 - RNA, 19 nt, Homo sapiens
  misc_RNA (1)...(19): siRNA sense strand
ucacagaguaugaugggca

SEQ ID NO: 2235318 - RNA, 19 nt, Homo sapiens
  misc_RNA (1)...(19): siRNA sense strand
aaguugaggaucagcgaga

SEQ ID NO: 2235319 - RNA, 19 nt, Homo sapiens
  misc_RNA (1)...(19): siRNA sense strand
agaaagagaaauaacagca

SEQ ID NO: 2235320 - RNA, 19 nt, Homo sapiens
  misc_RNA (1)...(19): siRNA sense strand
ggguguggugaaagaugaa

SEQ ID NO: 2235321 - RNA, 19 nt, Homo sapiens
  misc_RNA (1)...(19): siRNA sense strand
gugaaagaugaaccugaaa

SEQ ID NO: 2235322 - RNA, 19 nt, Homo sapiens
  misc_RNA (1)...(19): siRNA sense strand
ccauuaaaacagugaacga

SEQ ID NO: 2235323 - RNA, 19 nt, Homo sapiens
  misc_RNA (1)...(19): siRNA sense strand
ccagcuucgacgagagaca

SEQ ID NO: 2235324 - RNA, 19 nt, Homo sapiens
  misc_RNA (1)...(19): siRNA sense strand
uagaagugcuggagaggga

SEQ ID NO: 2235325 - RNA, 19 nt, Homo sapiens
  misc_RNA (1)...(19): siRNA sense strand
uccaagaacuccaggguca

SEQ ID NO: 2235326 - RNA, 19 nt, Homo sapiens
  misc_RNA (1)...(19): siRNA sense strand
gaaccaaaccugugagcug

SEQ ID NO: 2235327 - RNA, 19 nt, Homo sapiens
  misc_RNA (1)...(19): siRNA sense strand
ggacaaagccugcagcccu

SEQ ID NO: 2235328 - RNA, 19 nt, Homo sapiens
  misc_RNA (1)...(19): siRNA sense strand
cuggcuaccucuugggcau

SEQ ID NO: 2235329 - RNA, 19 nt, Homo sapiens
  misc_RNA (1)...(19): siRNA sense strand
gggcaucugcagcggugaa

SEQ ID NO: 2235330 - RNA, 19 nt, Homo sapiens
  misc_RNA (1)...(19): siRNA sense strand
uugaaagacaccuggaguu

SEQ ID NO: 2235331 - RNA, 19 nt, Homo sapiens
  misc_RNA (1)...(19): siRNA sense strand
cgauggagggugauggcca

SEQ ID NO: 2235332 - RNA, 19 nt, Homo sapiens
  misc_RNA (1)...(19): siRNA sense strand
ugcaacauaagcugggaaa

SEQ ID NO: 2235333 - RNA, 19 nt, Homo sapiens
  misc_RNA (1)...(19): siRNA sense strand
cuggagagggacaagguga

SEQ ID NO: 2235334 - RNA, 19 nt, Homo sapiens
  misc_RNA (1)...(19): siRNA sense strand
gaauggaucugccuggaga

SEQ ID NO: 2235335 - RNA, 19 nt, Homo sapiens
  misc_RNA (1)...(19): siRNA sense strand
agaaauacauugacggcca

SEQ ID NO: 2235336 - RNA, 19 nt, Homo sapiens
  misc_RNA (1)...(19): siRNA sense strand
uggagaagaaagacggaga

SEQ ID NO: 2235337 - RNA, 19 nt, Homo sapiens
  misc_RNA (1)...(19): siRNA sense strand
ugaaagagaccuuggcacu

SEQ ID NO: 2235338 - RNA, 19 nt, Homo sapiens
  misc_RNA (1)...(19): siRNA sense strand
gaaauacauugacggccaa

SEQ ID NO: 2235339 - RNA, 19 nt, Homo sapiens
  misc_RNA (1)...(19): siRNA sense strand
agaaagacggagaguaaac

SEQ ID NO: 2235340 - RNA, 19 nt, Homo sapiens
  misc_RNA (1)...(19): siRNA sense strand
ggaauaggcacacuggaga

SEQ ID NO: 2235341 - RNA, 19 nt, Homo sapiens
  misc_RNA (1)...(19): siRNA sense strand
ggagagucaaacugugcaa

SEQ ID NO: 2235342 - RNA, 19 nt, Homo sapiens
  misc_RNA (1)...(19): siRNA sense strand
uggccagguuaaaggaaga

SEQ ID NO: 2235343 - RNA, 19 nt, Homo sapiens
  misc_RNA (1)...(19): siRNA sense strand
uggcaaacaauaugagagu

SEQ ID NO: 2235344 - RNA, 19 nt, Homo sapiens
  misc_RNA (1)...(19): siRNA sense strand
cugugaugcuaauaaggaa

SEQ ID NO: 2235345 - RNA, 19 nt, Homo sapiens
  misc_RNA (1)...(19): siRNA sense strand
ugaagguaaagauggcaaa

SEQ ID NO: 2235346 - RNA, 19 nt, Homo sapiens
  misc_RNA (1)...(19): siRNA sense strand
augcuaauaaggaagguau

SEQ ID NO: 2235347 - RNA, 19 nt, Homo sapiens
  misc_RNA (1)...(19): siRNA sense strand
gaaaauggaaaguggaaaa

SEQ ID NO: 2235348 - RNA, 19 nt, Homo sapiens
  misc_RNA (1)...(19): siRNA sense strand
guuuaaugcuggagaugau

SEQ ID NO: 2235349 - RNA, 19 nt, Homo sapiens
  misc_RNA (1)...(19): siRNA sense strand
gugaaaaugaagaggaaau

SEQ ID NO: 2235350 - RNA, 19 nt, Homo sapiens
  misc_RNA (1)...(19): siRNA sense strand
uggaagagaagcaaauaaa

SEQ ID NO: 2235351 - RNA, 19 nt, Homo sapiens
  misc_RNA (1)...(19): siRNA sense strand
augaagaggaaauggacaa

SEQ ID NO: 2235352 - RNA, 19 nt, Homo sapiens
  misc_RNA (1)...(19): siRNA sense strand
uggaaauaaugguaccaaa

SEQ ID NO: 2235353 - RNA, 19 nt, Homo sapiens
  misc_RNA (1)...(19): siRNA sense strand
gaagaaaacagaagagaca

SEQ ID NO: 2235354 - RNA, 19 nt, Homo sapiens
  misc_RNA (1)...(19): siRNA sense strand
caucagagaggaaggaaga

SEQ ID NO: 2235355 - RNA, 19 nt, Homo sapiens
  misc_RNA (1)...(19): siRNA sense strand
acagagaauugaaggacuu

SEQ ID NO: 2235356 - RNA, 19 nt, Homo sapiens
  misc_RNA (1)...(19): siRNA sense strand
gucaguaaauagaacgaaa

SEQ ID NO: 2235357 - RNA, 19 nt, Homo sapiens
  misc_RNA (1)...(19): siRNA sense strand
guaaugaaugcaauggaaa

SEQ ID NO: 2235358 - RNA, 19 nt, Homo sapiens
  misc_RNA (1)...(19): siRNA sense strand
ccucguuggaagugacaaa

SEQ ID NO: 2235359 - RNA, 19 nt, Homo sapiens
  misc_RNA (1)...(19): siRNA sense strand
cgugauuacaggaagcaua

SEQ ID NO: 2235360 - RNA, 19 nt, Homo sapiens
  misc_RNA (1)...(19): siRNA sense strand
cggaaagaugugcgggaca

SEQ ID NO: 2235361 - RNA, 19 nt, Homo sapiens
  misc_RNA (1)...(19): siRNA sense strand
cgaacagaacugaguaaaa

SEQ ID NO: 2235362 - RNA, 19 nt, Homo sapiens
  misc_RNA (1)...(19): siRNA sense strand
agaggaaggaagaguguuu

SEQ ID NO: 2235363 - RNA, 19 nt, Homo sapiens
  misc_RNA (1)...(19): siRNA sense strand
caauguuaguguggaaaua

SEQ ID NO: 2235364 - RNA, 19 nt, Homo sapiens
  misc_RNA (1)...(19): siRNA sense strand
ggguagcccuaauggagaa

SEQ ID NO: 2235365 - RNA, 19 nt, Homo sapiens
  misc_RNA (1)...(19): siRNA sense strand
caucgugacuugugggcau

SEQ ID NO: 2235366 - RNA, 19 nt, Homo sapiens
  misc_RNA (1)...(19): siRNA sense strand
caauaaacuuugcaagguu

SEQ ID NO: 2235367 - RNA, 19 nt, Homo sapiens
  misc_RNA (1)...(19): siRNA sense strand
ggaugagaauguugcgcau

SEQ ID NO: 2235368 - RNA, 19 nt, Homo sapiens
  misc_RNA (1)...(19): siRNA sense strand
aggaaauggacaaucuaaa

SEQ ID NO: 2235369 - RNA, 19 nt, Homo sapiens
  misc_RNA (1)...(19): siRNA sense strand
ggaaagacuuguuuggaag

SEQ ID NO: 2235370 - RNA, 19 nt, Homo sapiens
  misc_RNA (1)...(19): siRNA sense strand
gugcaugcuaccugugaaa

SEQ ID NO: 2235371 - RNA, 19 nt, Homo sapiens
  misc_RNA (1)...(19): siRNA sense strand
cugugaaaaugaagaggaa

SEQ ID NO: 2235372 - RNA, 19 nt, Homo sapiens
  misc_RNA (1)...(19): siRNA sense strand
aggcuauuguacugcauaa

SEQ ID NO: 2235373 - RNA, 19 nt, Homo sapiens
  misc_RNA (1)...(19): siRNA sense strand
gggaaaauggaaaguggaa

SEQ ID NO: 2235374 - RNA, 19 nt, Homo sapiens
  misc_RNA (1)...(19): siRNA sense strand
guuugaaauaagagcaaca

SEQ ID NO: 2235375 - RNA, 19 nt, Homo sapiens
  misc_RNA (1)...(19): siRNA sense strand
aguaaugaaugcaauggaa

SEQ ID NO: 2235376 - RNA, 19 nt, Homo sapiens
  misc_RNA (1)...(19): siRNA sense strand
aaacaaaccucguuggaag

SEQ ID NO: 2235377 - RNA, 19 nt, Homo sapiens
  misc_RNA (1)...(19): siRNA sense strand
gugcauuagagcagcaaaa

SEQ ID NO: 2235378 - RNA, 19 nt, Homo sapiens
  misc_RNA (1)...(19): siRNA sense strand
gccaaauccaagaguaauu

SEQ ID NO: 2235379 - RNA, 19 nt, Homo sapiens
  misc_RNA (1)...(19): siRNA sense strand
aggcauauauauucagcau

SEQ ID NO: 2235380 - RNA, 19 nt, Homo sapiens
  misc_RNA (1)...(19): siRNA sense strand
cauauaagggcaaggaagu

SEQ ID NO: 2235381 - RNA, 19 nt, Homo sapiens
  misc_RNA (1)...(19): siRNA sense strand
cuggaagagaagcaaauaa

SEQ ID NO: 2235382 - RNA, 19 nt, Homo sapiens
  misc_RNA (1)...(19): siRNA sense strand
cugcaguauuggcuauaua

SEQ ID NO: 2235383 - RNA, 19 nt, Homo sapiens
  misc_RNA (1)...(19): siRNA sense strand
cguuaaguauguuuggaca

SEQ ID NO: 2235384 - RNA, 19 nt, Homo sapiens
  misc_RNA (1)...(19): siRNA sense strand
cagaagagacaguuggagu

SEQ ID NO: 2235385 - RNA, 19 nt, Homo sapiens
  misc_RNA (1)...(19): siRNA sense strand
cgugcaugguggagaaaau

SEQ ID NO: 2235386 - RNA, 19 nt, Homo sapiens
  misc_RNA (1)...(19): siRNA sense strand
uggagaaccuuguggaaag

SEQ ID NO: 2235387 - RNA, 19 nt, Homo sapiens
  misc_RNA (1)...(19): siRNA sense strand
gagcaccaucagagaggaa

SEQ ID NO: 2235388 - RNA, 19 nt, Homo sapiens
  misc_RNA (1)...(19): siRNA sense strand
ccuacaacguggacacuga

SEQ ID NO: 2235389 - RNA, 19 nt, Homo sapiens
  misc_RNA (1)...(19): siRNA sense strand
uccaagaguaauugaacua

SEQ ID NO: 2235390 - RNA, 19 nt, Homo sapiens
  misc_RNA (1)...(19): siRNA sense strand
uggaagagagagacaauca

SEQ ID NO: 2235391 - RNA, 19 nt, Homo sapiens
  misc_RNA (1)...(19): siRNA sense strand
cuaaagcacagcagaguga

SEQ ID NO: 2235392 - RNA, 19 nt, Homo sapiens
  misc_RNA (1)...(19): siRNA sense strand
augcaggaucggaaagaau

SEQ ID NO: 2235393 - RNA, 19 nt, Homo sapiens
  misc_RNA (1)...(19): siRNA sense strand
cgaaguagucggaggagcu

SEQ ID NO: 2235394 - RNA, 19 nt, Homo sapiens
  misc_RNA (1)...(19): siRNA sense strand
cguuggaagugacaaauau

SEQ ID NO: 2235395 - RNA, 19 nt, Homo sapiens
  misc_RNA (1)...(19): siRNA sense strand
aguuaaucuuggcgacauu

SEQ ID NO: 2235396 - RNA, 19 nt, Homo sapiens
  misc_RNA (1)...(19): siRNA sense strand
caaugauggcuuugaagau

SEQ ID NO: 2235397 - RNA, 19 nt, Homo sapiens
  misc_RNA (1)...(19): siRNA sense strand
aggacaaauugaugcagau

SEQ ID NO: 2235398 - RNA, 19 nt, Homo sapiens
  misc_RNA (1)...(19): siRNA sense strand
uaucaaagagugugugcau

SEQ ID NO: 2235399 - RNA, 19 nt, Homo sapiens
  misc_RNA (1)...(19): siRNA sense strand
gcugacuguucauggguuu

SEQ ID NO: 2235400 - RNA, 19 nt, Homo sapiens
  misc_RNA (1)...(19): siRNA sense strand
ggacuucagaucagcaaau

SEQ ID NO: 2235401 - RNA, 19 nt, Homo sapiens
  misc_RNA (1)...(19): siRNA sense strand
ucccaauguuaguguggaa

SEQ ID NO: 2235402 - RNA, 19 nt, Homo sapiens
  misc_RNA (1)...(19): siRNA sense strand
gagaaugccacuuugaaaa

SEQ ID NO: 2235403 - RNA, 19 nt, Homo sapiens
  misc_RNA (1)...(19): siRNA sense strand
uuuuagagcuggaagagaa

SEQ ID NO: 2235404 - RNA, 19 nt, Homo sapiens
  misc_RNA (1)...(19): siRNA sense strand
gcagagugacuguagcaau

SEQ ID NO: 2235405 - RNA, 19 nt, Homo sapiens
  misc_RNA (1)...(19): siRNA sense strand
gacaaauugaugcagauaa

SEQ ID NO: 2235406 - RNA, 19 nt, Homo sapiens
  misc_RNA (1)...(19): siRNA sense strand
gcuaaggacaagaccugua

SEQ ID NO: 2235407 - RNA, 19 nt, Homo sapiens
  misc_RNA (1)...(19): siRNA sense strand
gcaccuguguggaggguca

SEQ ID NO: 2235408 - RNA, 19 nt, Homo sapiens
  misc_RNA (1)...(19): siRNA sense strand
ugacuuuggaggagaagaa

SEQ ID NO: 2235409 - RNA, 19 nt, Homo sapiens
  misc_RNA (1)...(19): siRNA sense strand
cagaagacuguaaggaaga

SEQ ID NO: 2235410 - RNA, 19 nt, Homo sapiens
  misc_RNA (1)...(19): siRNA sense strand
caaucaaugacauggagaa

SEQ ID NO: 2235411 - RNA, 19 nt, Homo sapiens
  misc_RNA (1)...(19): siRNA sense strand
aaaucgagucacaaagaaa

SEQ ID NO: 2235412 - RNA, 19 nt, Homo sapiens
  misc_RNA (1)...(19): siRNA sense strand
aaucaaugacauggagaaa

SEQ ID NO: 2235413 - RNA, 19 nt, Homo sapiens
  misc_RNA (1)...(19): siRNA sense strand
ccaaagucgcugaguacau

SEQ ID NO: 2235414 - RNA, 19 nt, Homo sapiens
  misc_RNA (1)...(19): siRNA sense strand
ugauaugagaggagucaau

SEQ ID NO: 2235415 - RNA, 19 nt, Homo sapiens
  misc_RNA (1)...(19): siRNA sense strand
ccaucgagacauuuauaaa

SEQ ID NO: 2235416 - RNA, 19 nt, Homo sapiens
  misc_RNA (1)...(19): siRNA sense strand
ccagaagacuguaaggaag

SEQ ID NO: 2235417 - RNA, 19 nt, Homo sapiens
  misc_RNA (1)...(19): siRNA sense strand
ucaaauaagugcuugccau

SEQ ID NO: 2235418 - RNA, 19 nt, Homo sapiens
  misc_RNA (1)...(19): siRNA sense strand
cccagaagacuguaaggaa

SEQ ID NO: 2235419 - RNA, 19 nt, Homo sapiens
  misc_RNA (1)...(19): siRNA sense strand
ggggaaaagaugcuuguaa

SEQ ID NO: 2235420 - RNA, 19 nt, Homo sapiens
  misc_RNA (1)...(19): siRNA sense strand
acagagcagugauggaaaa

SEQ ID NO: 2235421 - RNA, 19 nt, Homo sapiens
  misc_RNA (1)...(19): siRNA sense strand
aggugagccugcaggugaa

SEQ ID NO: 2235422 - RNA, 19 nt, Homo sapiens
  misc_RNA (1)...(19): siRNA sense strand
auaaagucucagaagggaa

SEQ ID NO: 2235423 - RNA, 19 nt, Homo sapiens
  misc_RNA (1)...(19): siRNA sense strand
ccuuugaauuacacugaau

SEQ ID NO: 2235424 - RNA, 19 nt, Homo sapiens
  misc_RNA (1)...(19): siRNA sense strand
aggcagaguaccggaacaa

SEQ ID NO: 2235425 - RNA, 19 nt, Homo sapiens
  misc_RNA (1)...(19): siRNA sense strand
gaaagauaguguuacagga

SEQ ID NO: 2235426 - RNA, 19 nt, Homo sapiens
  misc_RNA (1)...(19): siRNA sense strand
aaacauuucacaaggcaga

SEQ ID NO: 2235427 - RNA, 19 nt, Homo sapiens
  misc_RNA (1)...(19): siRNA sense strand
gggaguugacuuuggagga

SEQ ID NO: 2235428 - RNA, 19 nt, Homo sapiens
  misc_RNA (1)...(19): siRNA sense strand
cugguuacucuuugagauu

SEQ ID NO: 2235429 - RNA, 19 nt, Homo sapiens
  misc_RNA (1)...(19): siRNA sense strand
aguugacuuuggaggagaa

SEQ ID NO: 2235430 - RNA, 19 nt, Homo sapiens
  misc_RNA (1)...(19): siRNA sense strand
uggaaaaucgagucacaaa

SEQ ID NO: 2235431 - RNA, 19 nt, Homo sapiens
  misc_RNA (1)...(19): siRNA sense strand
gcacaaagaugauucgcug

SEQ ID NO: 2235432 - RNA, 19 nt, Homo sapiens
  misc_RNA (1)...(19): siRNA sense strand
aagaaugccagaaaagaua

SEQ ID NO: 2235433 - RNA, 19 nt, Homo sapiens
  misc_RNA (1)...(19): siRNA sense strand
gaguacauggacuggauuu

SEQ ID NO: 2235434 - RNA, 19 nt, Homo sapiens
  misc_RNA (1)...(19): siRNA sense strand
ggucaucaaauaagugcuu

SEQ ID NO: 2235435 - RNA, 19 nt, Homo sapiens
  misc_RNA (1)...(19): siRNA sense strand
uaacaaaugaagaaugcca

SEQ ID NO: 2235436 - RNA, 19 nt, Homo sapiens
  misc_RNA (1)...(19): siRNA sense strand
gaagaaugccagaaaagau

SEQ ID NO: 2235437 - RNA, 19 nt, Homo sapiens
  misc_RNA (1)...(19): siRNA sense strand
acucuuugagauuguguaa

SEQ ID NO: 2235438 - RNA, 19 nt, Homo sapiens
  misc_RNA (1)...(19): siRNA sense strand
caccaaagucgcugaguac

SEQ ID NO: 2235439 - RNA, 19 nt, Homo sapiens
  misc_RNA (1)...(19): siRNA sense strand
cgucaaaacugaagggauc

SEQ ID NO: 2235440 - RNA, 19 nt, Homo sapiens
  misc_RNA (1)...(19): siRNA sense strand
ugcaagagaaagagagaga

SEQ ID NO: 2235441 - RNA, 19 nt, Homo sapiens
  misc_RNA (1)...(19): siRNA sense strand
aaguauguugcaagagaaa

SEQ ID NO: 2235442 - RNA, 19 nt, Homo sapiens
  misc_RNA (1)...(19): siRNA sense strand
uuacaagggcaguugaaaa

SEQ ID NO: 2235443 - RNA, 19 nt, Homo sapiens
  misc_RNA (1)...(19): siRNA sense strand
ggauaagcgagaugguagu

SEQ ID NO: 2235444 - RNA, 19 nt, Homo sapiens
  misc_RNA (1)...(19): siRNA sense strand
guugcaagagaaagagaga

SEQ ID NO: 2235445 - RNA, 19 nt, Homo sapiens
  misc_RNA (1)...(19): siRNA sense strand
auuuaauccucucgucaaa

SEQ ID NO: 2235446 - RNA, 19 nt, Homo sapiens
  misc_RNA (1)...(19): siRNA sense strand
cugcaggaaucgugugacu

SEQ ID NO: 2235447 - RNA, 19 nt, Homo sapiens
  misc_RNA (1)...(19): siRNA sense strand
auguaaaagacgucacuaa

SEQ ID NO: 2235448 - RNA, 19 nt, Homo sapiens
  misc_RNA (1)...(19): siRNA sense strand
uggaagaagagacagccaa

SEQ ID NO: 2235449 - RNA, 19 nt, Homo sapiens
  misc_RNA (1)...(19): siRNA sense strand
augaagaggauaaugagau

SEQ ID NO: 2235450 - RNA, 19 nt, Homo sapiens
  misc_RNA (1)...(19): siRNA sense strand
cauuguuggauaagcgaga

SEQ ID NO: 2235451 - RNA, 19 nt, Homo sapiens
  misc_RNA (1)...(19): siRNA sense strand
caaauauuucugaaggcuu

SEQ ID NO: 2235452 - RNA, 19 nt, Homo sapiens
  misc_RNA (1)...(19): siRNA sense strand
cgugugacuaauaauguaa

SEQ ID NO: 2235453 - RNA, 19 nt, Homo sapiens
  misc_RNA (1)...(19): siRNA sense strand
uggagugcgucaaagaaaa

SEQ ID NO: 2235454 - RNA, 19 nt, Homo sapiens
  misc_RNA (1)...(19): siRNA sense strand
cgucaaaacugaagggauc

SEQ ID NO: 2235455 - RNA, 19 nt, Homo sapiens
  misc_RNA (1)...(19): siRNA sense strand
ugcaagagaaagagagaga

SEQ ID NO: 2235456 - RNA, 19 nt, Homo sapiens
  misc_RNA (1)...(19): siRNA sense strand
aaguauguugcaagagaaa

SEQ ID NO: 2235457 - RNA, 19 nt, Homo sapiens
  misc_RNA (1)...(19): siRNA sense strand
uuacaagggcaguugaaaa

SEQ ID NO: 2235458 - RNA, 19 nt, Homo sapiens
  misc_RNA (1)...(19): siRNA sense strand
ggauaagcgagaugguagu

SEQ ID NO: 2235459 - RNA, 19 nt, Homo sapiens
  misc_RNA (1)...(19): siRNA sense strand
guugcaagagaaagagaga

SEQ ID NO: 2235460 - RNA, 19 nt, Homo sapiens
  misc_RNA (1)...(19): siRNA sense strand
auuuaauccucucgucaaa

SEQ ID NO: 2235461 - RNA, 19 nt, Homo sapiens
  misc_RNA (1)...(19): siRNA sense strand
cugcaggaaucgugugacu

SEQ ID NO: 2235462 - RNA, 19 nt, Homo sapiens
  misc_RNA (1)...(19): siRNA sense strand
auguaaaagacgucacuaa

SEQ ID NO: 2235463 - RNA, 19 nt, Homo sapiens
  misc_RNA (1)...(19): siRNA sense strand
uggaagaagagacagccaa

SEQ ID NO: 2235464 - RNA, 19 nt, Homo sapiens
  misc_RNA (1)...(19): siRNA sense strand
augaagaggauaaugagau

SEQ ID NO: 2235465 - RNA, 19 nt, Homo sapiens
  misc_RNA (1)...(19): siRNA sense strand
cauuguuggauaagcgaga

SEQ ID NO: 2235466 - RNA, 19 nt, Homo sapiens
  misc_RNA (1)...(19): siRNA sense strand
caaauauuucugaaggcuu

SEQ ID NO: 2235467 - RNA, 19 nt, Homo sapiens
  misc_RNA (1)...(19): siRNA sense strand
cgugugacuaauaauguaa

SEQ ID NO: 2235468 - RNA, 19 nt, Homo sapiens
  misc_RNA (1)...(19): siRNA sense strand
uggagugcgucaaagaaaa

SEQ ID NO: 2235469 - RNA, 19 nt, Homo sapiens
  misc_RNA (1)...(19): siRNA sense strand
ucacaaaggugcaggcagu

SEQ ID NO: 2235470 - RNA, 19 nt, Homo sapiens
  misc_RNA (1)...(19): siRNA sense strand
aggccuaucuggaggaaaa

SEQ ID NO: 2235471 - RNA, 19 nt, Homo sapiens
  misc_RNA (1)...(19): siRNA sense strand
uggagaagcugguggagga

SEQ ID NO: 2235472 - RNA, 19 nt, Homo sapiens
  misc_RNA (1)...(19): siRNA sense strand
ccggucacuucaagggaaa

SEQ ID NO: 2235473 - RNA, 19 nt, Homo sapiens
  misc_RNA (1)...(19): siRNA sense strand
ucuacaagguggagacgau

SEQ ID NO: 2235474 - RNA, 19 nt, Homo sapiens
  misc_RNA (1)...(19): siRNA sense strand
cuucaggcccagagggaga

SEQ ID NO: 2235475 - RNA, 19 nt, Homo sapiens
  misc_RNA (1)...(19): siRNA sense strand
ggacaagaacaaugaccga

SEQ ID NO: 2235476 - RNA, 19 nt, Homo sapiens
  misc_RNA (1)...(19): siRNA sense strand
cagaacacaaccugagcua

SEQ ID NO: 2235477 - RNA, 19 nt, Homo sapiens
  misc_RNA (1)...(19): siRNA sense strand
gguguaugcccgagagcca

SEQ ID NO: 2235478 - RNA, 19 nt, Homo sapiens
  misc_RNA (1)...(19): siRNA sense strand
gcuagcauguuguggcgua

SEQ ID NO: 2235479 - RNA, 19 nt, Homo sapiens
  misc_RNA (1)...(19): siRNA sense strand
ggacaaucgcacccgggaa

SEQ ID NO: 2235480 - RNA, 19 nt, Homo sapiens
  misc_RNA (1)...(19): siRNA sense strand
acgccaugcaccagaaauu

SEQ ID NO: 2235481 - RNA, 19 nt, Homo sapiens
  misc_RNA (1)...(19): siRNA sense strand
gcguauucgcugggaagaa

SEQ ID NO: 2235482 - RNA, 19 nt, Homo sapiens
  misc_RNA (1)...(19): siRNA sense strand
guuaaaacggggagagacu

SEQ ID NO: 2235483 - RNA, 19 nt, Homo sapiens
  misc_RNA (1)...(19): siRNA sense strand
cuguauuggugaucacgua

SEQ ID NO: 2235484 - RNA, 19 nt, Homo sapiens
  misc_RNA (1)...(19): siRNA sense strand
cggccuauucccuggguga

SEQ ID NO: 2235485 - RNA, 19 nt, Homo sapiens
  misc_RNA (1)...(19): siRNA sense strand
ggagauagcacuucgcagu

SEQ ID NO: 2235486 - RNA, 19 nt, Homo sapiens
  misc_RNA (1)...(19): siRNA sense strand
gaugcagggacgaagauau

SEQ ID NO: 2235487 - RNA, 19 nt, Homo sapiens
  misc_RNA (1)...(19): siRNA sense strand
agggaaauguugucgccau

SEQ ID NO: 2235488 - RNA, 19 nt, Homo sapiens
  misc_RNA (1)...(19): siRNA sense strand
cagcauuauuucaucgcau

SEQ ID NO: 2235489 - RNA, 19 nt, Homo sapiens
  misc_RNA (1)...(19): siRNA sense strand
aggcugacgucuauagcuu

SEQ ID NO: 2235490 - RNA, 19 nt, Homo sapiens
  misc_RNA (1)...(19): siRNA sense strand
cuguggaccucaagcugua

SEQ ID NO: 2235491 - RNA, 19 nt, Homo sapiens
  misc_RNA (1)...(19): siRNA sense strand
acaagaacaaugaccgaga

SEQ ID NO: 2235492 - RNA, 19 nt, Homo sapiens
  misc_RNA (1)...(19): siRNA sense strand
gugggaguuuacaggauau

SEQ ID NO: 2235493 - RNA, 19 nt, Homo sapiens
  misc_RNA (1)...(19): siRNA sense strand
cgucuauagcuuugggauc

SEQ ID NO: 2235494 - RNA, 19 nt, Homo sapiens
  misc_RNA (1)...(19): siRNA sense strand
aggcugaagcucugcucua

SEQ ID NO: 2235495 - RNA, 19 nt, Homo sapiens
  misc_RNA (1)...(19): siRNA sense strand
cgaagauaucacgguguaa

SEQ ID NO: 2235496 - RNA, 19 nt, Homo sapiens
  misc_RNA (1)...(19): siRNA sense strand
uuggcaacucagagcguua

SEQ ID NO: 2235497 - RNA, 19 nt, Homo sapiens
  misc_RNA (1)...(19): siRNA sense strand
gggaaauguugucgccauc

SEQ ID NO: 2235498 - RNA, 19 nt, Homo sapiens
  misc_RNA (1)...(19): siRNA sense strand
cagacuuuggacagauuaa

SEQ ID NO: 2235499 - RNA, 19 nt, Homo sapiens
  misc_RNA (1)...(19): siRNA sense strand
gugaauaagaagcgcauug

SEQ ID NO: 2235500 - RNA, 19 nt, Homo sapiens
  misc_RNA (1)...(19): siRNA sense strand
agagggagaaucugaccaa

SEQ ID NO: 2235501 - RNA, 19 nt, Homo sapiens
  misc_RNA (1)...(19): siRNA sense strand
gggagagacuguacaggcu

SEQ ID NO: 2235502 - RNA, 19 nt, Homo sapiens
  misc_RNA (1)...(19): siRNA sense strand
auguggaaaugaagggaaa

SEQ ID NO: 2235503 - RNA, 19 nt, Homo sapiens
  misc_RNA (1)...(19): siRNA sense strand
ucacaaaggugcaggcagu

SEQ ID NO: 2235504 - RNA, 19 nt, Homo sapiens
  misc_RNA (1)...(19): siRNA sense strand
aggccuaucuggaggaaaa

SEQ ID NO: 2235505 - RNA, 19 nt, Homo sapiens
  misc_RNA (1)...(19): siRNA sense strand
uggagaagcugguggagga

SEQ ID NO: 2235506 - RNA, 19 nt, Homo sapiens
  misc_RNA (1)...(19): siRNA sense strand
ccggucacuucaagggaaa

SEQ ID NO: 2235507 - RNA, 19 nt, Homo sapiens
  misc_RNA (1)...(19): siRNA sense strand
ucuacaagguggagacgau

SEQ ID NO: 2235508 - RNA, 19 nt, Homo sapiens
  misc_RNA (1)...(19): siRNA sense strand
cuucaggcccagagggaga

SEQ ID NO: 2235509 - RNA, 19 nt, Homo sapiens
  misc_RNA (1)...(19): siRNA sense strand
ggacaagaacaaugaccga

SEQ ID NO: 2235510 - RNA, 19 nt, Homo sapiens
  misc_RNA (1)...(19): siRNA sense strand
cagaacacaaccugagcua

SEQ ID NO: 2235511 - RNA, 19 nt, Homo sapiens
  misc_RNA (1)...(19): siRNA sense strand
gguguaugcccgagagcca

SEQ ID NO: 2235512 - RNA, 19 nt, Homo sapiens
  misc_RNA (1)...(19): siRNA sense strand
cauacuggcucuuaggaga

SEQ ID NO: 2235513 - RNA, 19 nt, Homo sapiens
  misc_RNA (1)...(19): siRNA sense strand
gcuagcauguuguggcgua

SEQ ID NO: 2235514 - RNA, 19 nt, Homo sapiens
  misc_RNA (1)...(19): siRNA sense strand
ggacaaucgcacccgggaa

SEQ ID NO: 2235515 - RNA, 19 nt, Homo sapiens
  misc_RNA (1)...(19): siRNA sense strand
ggaaaaggaaagaugcgaa

SEQ ID NO: 2235516 - RNA, 19 nt, Homo sapiens
  misc_RNA (1)...(19): siRNA sense strand
acgccaugcaccagaaauu

SEQ ID NO: 2235517 - RNA, 19 nt, Homo sapiens
  misc_RNA (1)...(19): siRNA sense strand
aaaugaagggaaaaggaaa

SEQ ID NO: 2235518 - RNA, 19 nt, Homo sapiens
  misc_RNA (1)...(19): siRNA sense strand
gcguauucgcugggaagaa

SEQ ID NO: 2235519 - RNA, 19 nt, Homo sapiens
  misc_RNA (1)...(19): siRNA sense strand
gaauggagucuaaugguca

SEQ ID NO: 2235520 - RNA, 19 nt, Homo sapiens
  misc_RNA (1)...(19): siRNA sense strand
guuaaaacggggagagacu

SEQ ID NO: 2235521 - RNA, 19 nt, Homo sapiens
  misc_RNA (1)...(19): siRNA sense strand
cuguauuggugaucacgua

SEQ ID NO: 2235522 - RNA, 19 nt, Homo sapiens
  misc_RNA (1)...(19): siRNA sense strand
cggccuauucccuggguga

SEQ ID NO: 2235523 - RNA, 19 nt, Homo sapiens
  misc_RNA (1)...(19): siRNA sense strand
ggagauagcacuucgcagu

SEQ ID NO: 2235524 - RNA, 19 nt, Homo sapiens
  misc_RNA (1)...(19): siRNA sense strand
gaugcagggacgaagauau

SEQ ID NO: 2235525 - RNA, 19 nt, Homo sapiens
  misc_RNA (1)...(19): siRNA sense strand
agggaaauguugucgccau

SEQ ID NO: 2235526 - RNA, 19 nt, Homo sapiens
  misc_RNA (1)...(19): siRNA sense strand
cagcauuauuucaucgcau

SEQ ID NO: 2235527 - RNA, 19 nt, Homo sapiens
  misc_RNA (1)...(19): siRNA sense strand
aggcugacgucuauagcuu

SEQ ID NO: 2235528 - RNA, 19 nt, Homo sapiens
  misc_RNA (1)...(19): siRNA sense strand
aaaggaaagaugcgaacau

SEQ ID NO: 2235529 - RNA, 19 nt, Homo sapiens
  misc_RNA (1)...(19): siRNA sense strand
cuguggaccucaagcugua

SEQ ID NO: 2235530 - RNA, 19 nt, Homo sapiens
  misc_RNA (1)...(19): siRNA sense strand
acaagaacaaugaccgaga

SEQ ID NO: 2235531 - RNA, 19 nt, Homo sapiens
  misc_RNA (1)...(19): siRNA sense strand
gugggaguuuacaggauau

SEQ ID NO: 2235532 - RNA, 19 nt, Homo sapiens
  misc_RNA (1)...(19): siRNA sense strand
cgucuauagcuuugggauc

SEQ ID NO: 2235533 - RNA, 19 nt, Homo sapiens
  misc_RNA (1)...(19): siRNA sense strand
aggcugaagcucugcucua

SEQ ID NO: 2235534 - RNA, 19 nt, Homo sapiens
  misc_RNA (1)...(19): siRNA sense strand
cgaagauaucacgguguaa

SEQ ID NO: 2235535 - RNA, 19 nt, Homo sapiens
  misc_RNA (1)...(19): siRNA sense strand
uuggcaacucagagcguua

SEQ ID NO: 2235536 - RNA, 19 nt, Homo sapiens
  misc_RNA (1)...(19): siRNA sense strand
gggaaauguugucgccauc

SEQ ID NO: 2235537 - RNA, 19 nt, Homo sapiens
  misc_RNA (1)...(19): siRNA sense strand
cagacuuuggacagauuaa

SEQ ID NO: 2235538 - RNA, 19 nt, Homo sapiens
  misc_RNA (1)...(19): siRNA sense strand
gugaauaagaagcgcauug

SEQ ID NO: 2235539 - RNA, 19 nt, Homo sapiens
  misc_RNA (1)...(19): siRNA sense strand
agagggagaaucugaccaa

SEQ ID NO: 2235540 - RNA, 19 nt, Homo sapiens
  misc_RNA (1)...(19): siRNA sense strand
gggagagacuguacaggcu

SEQ ID NO: 2235541 - RNA, 19 nt, Homo sapiens
  misc_RNA (1)...(19): siRNA sense strand
cuucucgaauggagucuaa

SEQ ID NO: 2235542 - RNA, 19 nt, Homo sapiens
  misc_RNA (1)...(19): siRNA sense strand
gauguggaaaugaagggaa

SEQ ID NO: 2235543 - RNA, 19 nt, Homo sapiens
  misc_RNA (1)...(19): siRNA sense strand
uggcagaacuugcggcuca

SEQ ID NO: 2235544 - RNA, 19 nt, Homo sapiens
  misc_RNA (1)...(19): siRNA sense strand
gugcagauguggagcgucu

SEQ ID NO: 2235545 - RNA, 19 nt, Homo sapiens
  misc_RNA (1)...(19): siRNA sense strand
ccgcaguugcugugggaca

SEQ ID NO: 2235546 - RNA, 19 nt, Homo sapiens
  misc_RNA (1)...(19): siRNA sense strand
acuugcagguggugggcau

SEQ ID NO: 2235547 - RNA, 19 nt, Homo sapiens
  misc_RNA (1)...(19): siRNA sense strand
gagacgagugccagcaaaa

SEQ ID NO: 2235548 - RNA, 19 nt, Homo sapiens
  misc_RNA (1)...(19): siRNA sense strand
ucaugaagcaccuaagcau

SEQ ID NO: 2235549 - RNA, 19 nt, Homo sapiens
  misc_RNA (1)...(19): siRNA sense strand
gcaaauaggacucggacca

SEQ ID NO: 2235550 - RNA, 19 nt, Homo sapiens
  misc_RNA (1)...(19): siRNA sense strand
gugaaucagaagaggagua

SEQ ID NO: 2235551 - RNA, 19 nt, Homo sapiens
  misc_RNA (1)...(19): siRNA sense strand
guggauacagaguaagaaa

SEQ ID NO: 2235552 - RNA, 19 nt, Homo sapiens
  misc_RNA (1)...(19): siRNA sense strand
guauagauaaagaugggaa

SEQ ID NO: 2235553 - RNA, 19 nt, Homo sapiens
  misc_RNA (1)...(19): siRNA sense strand
agaauuugugagagagauu

SEQ ID NO: 2235554 - RNA, 19 nt, Homo sapiens
  misc_RNA (1)...(19): siRNA sense strand
ggaacaucgaucaguuaaa

SEQ ID NO: 2235555 - RNA, 19 nt, Homo sapiens
  misc_RNA (1)...(19): siRNA sense strand
uguucaaacuggauccaaa

SEQ ID NO: 2235556 - RNA, 19 nt, Homo sapiens
  misc_RNA (1)...(19): siRNA sense strand
gggaaauuauagacaucuu

SEQ ID NO: 2235557 - RNA, 19 nt, Homo sapiens
  misc_RNA (1)...(19): siRNA sense strand
aagaagaagaaguguuaga

SEQ ID NO: 2235558 - RNA, 19 nt, Homo sapiens
  misc_RNA (1)...(19): siRNA sense strand
aagaagaaguguuagacca

SEQ ID NO: 2235559 - RNA, 19 nt, Homo sapiens
  misc_RNA (1)...(19): siRNA sense strand
gaugggaauuauuggguca

SEQ ID NO: 2235560 - RNA, 19 nt, Homo sapiens
  misc_RNA (1)...(19): siRNA sense strand
aggcuuaaaccuugguaau

SEQ ID NO: 2235561 - RNA, 19 nt, Homo sapiens
  misc_RNA (1)...(19): siRNA sense strand
acaccuaaacaguccgaua

SEQ ID NO: 2235562 - RNA, 19 nt, Homo sapiens
  misc_RNA (1)...(19): siRNA sense strand
ucuucaagccagugcgcaa

SEQ ID NO: 2235563 - RNA, 19 nt, Homo sapiens
  misc_RNA (1)...(19): siRNA sense strand
accaagagaaagaggauga

SEQ ID NO: 2235564 - RNA, 19 nt, Homo sapiens
  misc_RNA (1)...(19): siRNA sense strand
agaaagaggaugauggaag

SEQ ID NO: 2235565 - RNA, 19 nt, Homo sapiens
  misc_RNA (1)...(19): siRNA sense strand
ugacugagaaauuggaaca

SEQ ID NO: 2235566 - RNA, 19 nt, Homo sapiens
  misc_RNA (1)...(19): siRNA sense strand
gccaaaacgagaagaagaa

SEQ ID NO: 2235567 - RNA, 19 nt, Homo sapiens
  misc_RNA (1)...(19): siRNA sense strand
gguuaugaugcaugaacau

SEQ ID NO: 2235568 - RNA, 19 nt, Homo sapiens
  misc_RNA (1)...(19): siRNA sense strand
cuguacagauaaagccaau

SEQ ID NO: 2235569 - RNA, 19 nt, Homo sapiens
  misc_RNA (1)...(19): siRNA sense strand
aggaaccuguacagauaaa

SEQ ID NO: 2235570 - RNA, 19 nt, Homo sapiens
  misc_RNA (1)...(19): siRNA sense strand
gugaagucugauaugguua

SEQ ID NO: 2235571 - RNA, 19 nt, Homo sapiens
  misc_RNA (1)...(19): siRNA sense strand
caauugaagaagacacuau

SEQ ID NO: 2235572 - RNA, 19 nt, Homo sapiens
  misc_RNA (1)...(19): siRNA sense strand
aaagaauuugugagagaga

SEQ ID NO: 2235573 - RNA, 19 nt, Homo sapiens
  misc_RNA (1)...(19): siRNA sense strand
cagaguuggaggagagacu

SEQ ID NO: 2235574 - RNA, 19 nt, Homo sapiens
  misc_RNA (1)...(19): siRNA sense strand
gaggaugauggaagugaau

SEQ ID NO: 2235575 - RNA, 19 nt, Homo sapiens
  misc_RNA (1)...(19): siRNA sense strand
cguaguuccuauugauuca

SEQ ID NO: 2235576 - RNA, 19 nt, Homo sapiens
  misc_RNA (1)...(19): siRNA sense strand
ccucgagccagcauggaua

SEQ ID NO: 2235577 - RNA, 19 nt, Homo sapiens
  misc_RNA (1)...(19): siRNA sense strand
agaggaugauggaagugaa

SEQ ID NO: 2235578 - RNA, 19 nt, Homo sapiens
  misc_RNA (1)...(19): siRNA sense strand
acucggaccaauugaagaa

SEQ ID NO: 2235579 - RNA, 19 nt, Homo sapiens
  misc_RNA (1)...(19): siRNA sense strand
ugaccaagagaaagaggau

SEQ ID NO: 2235580 - RNA, 19 nt, Homo sapiens
  misc_RNA (1)...(19): siRNA sense strand
ccauaccaccagaggccaa

SEQ ID NO: 2235581 - RNA, 19 nt, Homo sapiens
  misc_RNA (1)...(19): siRNA sense strand
gagauuaagcauucaucau

SEQ ID NO: 2235582 - RNA, 19 nt, Homo sapiens
  misc_RNA (1)...(19): siRNA sense strand
uggcacgucuagugaugaa

SEQ ID NO: 2235583 - RNA, 19 nt, Homo sapiens
  misc_RNA (1)...(19): siRNA sense strand
ucagaugguuacugcaaca

SEQ ID NO: 2235584 - RNA, 19 nt, Homo sapiens
  misc_RNA (1)...(19): siRNA sense strand
uggaagaggcacuggauug

SEQ ID NO: 2235585 - RNA, 19 nt, Homo sapiens
  misc_RNA (1)...(19): siRNA sense strand
gugagagagauuaagcauu

SEQ ID NO: 2235586 - RNA, 19 nt, Homo sapiens
  misc_RNA (1)...(19): siRNA sense strand
uccaaauaaugcugcagua

SEQ ID NO: 2235587 - RNA, 19 nt, Homo sapiens
  misc_RNA (1)...(19): siRNA sense strand
gauccaaacaauaaagaag

SEQ ID NO: 2235588 - RNA, 19 nt, Homo sapiens
  misc_RNA (1)...(19): siRNA sense strand
cuguauuaauccugggaag

SEQ ID NO: 2235589 - RNA, 19 nt, Homo sapiens
  misc_RNA (1)...(19): siRNA sense strand
guacauuggagaugcucau

SEQ ID NO: 2235590 - RNA, 19 nt, Homo sapiens
  misc_RNA (1)...(19): siRNA sense strand
aggaaggacagaagccaca

SEQ ID NO: 2235591 - RNA, 19 nt, Homo sapiens
  misc_RNA (1)...(19): siRNA sense strand
auucagaguuggaggagag

SEQ ID NO: 2235592 - RNA, 19 nt, Homo sapiens
  misc_RNA (1)...(19): siRNA sense strand
agaaauggacaguggacac

SEQ ID NO: 2235593 - RNA, 19 nt, Homo sapiens
  misc_RNA (1)...(19): siRNA sense strand
aaagaaacuaccagaccau

SEQ ID NO: 2235594 - RNA, 19 nt, Homo sapiens
  misc_RNA (1)...(19): siRNA sense strand
ccuaagaauaaccugguga

SEQ ID NO: 2235595 - RNA, 19 nt, Homo sapiens
  misc_RNA (1)...(19): siRNA sense strand
ggauccaaacaauaaagaa

SEQ ID NO: 2235596 - RNA, 19 nt, Homo sapiens
  misc_RNA (1)...(19): siRNA sense strand
ugauauuguugcaucugaa

SEQ ID NO: 2235597 - RNA, 19 nt, Homo sapiens
  misc_RNA (1)...(19): siRNA sense strand
agagaaagaggaugaugga

SEQ ID NO: 2235598 - RNA, 19 nt, Homo sapiens
  misc_RNA (1)...(19): siRNA sense strand
agagauaauaacaaggacu

SEQ ID NO: 2235599 - RNA, 19 nt, Homo sapiens
  misc_RNA (1)...(19): siRNA sense strand
aaggauuugugaugaacuu

SEQ ID NO: 2235600 - RNA, 19 nt, Homo sapiens
  misc_RNA (1)...(19): siRNA sense strand
cugauaugguuaugaugca

SEQ ID NO: 2235601 - RNA, 19 nt, Homo sapiens
  misc_RNA (1)...(19): siRNA sense strand
aaaacgagaagaagaagaa

SEQ ID NO: 2235602 - RNA, 19 nt, Homo sapiens
  misc_RNA (1)...(19): siRNA sense strand
agaaacuaccagaccauuu

SEQ ID NO: 2235603 - RNA, 19 nt, Homo sapiens
  misc_RNA (1)...(19): siRNA sense strand
gcaaauaggacucggacca

SEQ ID NO: 2235604 - RNA, 19 nt, Homo sapiens
  misc_RNA (1)...(19): siRNA sense strand
gugaaucagaagaggagua

SEQ ID NO: 2235605 - RNA, 19 nt, Homo sapiens
  misc_RNA (1)...(19): siRNA sense strand
guggauacagaguaagaaa

SEQ ID NO: 2235606 - RNA, 19 nt, Homo sapiens
  misc_RNA (1)...(19): siRNA sense strand
guauagauaaagaugggaa

SEQ ID NO: 2235607 - RNA, 19 nt, Homo sapiens
  misc_RNA (1)...(19): siRNA sense strand
agaauuugugagagagauu

SEQ ID NO: 2235608 - RNA, 19 nt, Homo sapiens
  misc_RNA (1)...(19): siRNA sense strand
ggaacaucgaucaguuaaa

SEQ ID NO: 2235609 - RNA, 19 nt, Homo sapiens
  misc_RNA (1)...(19): siRNA sense strand
uguucaaacuggauccaaa

SEQ ID NO: 2235610 - RNA, 19 nt, Homo sapiens
  misc_RNA (1)...(19): siRNA sense strand
gggaaauuauagacaucuu

SEQ ID NO: 2235611 - RNA, 19 nt, Homo sapiens
  misc_RNA (1)...(19): siRNA sense strand
aagaagaagaaguguuaga

SEQ ID NO: 2235612 - RNA, 19 nt, Homo sapiens
  misc_RNA (1)...(19): siRNA sense strand
aagaagaaguguuagacca

SEQ ID NO: 2235613 - RNA, 19 nt, Homo sapiens
  misc_RNA (1)...(19): siRNA sense strand
gaugggaauuauuggguca

SEQ ID NO: 2235614 - RNA, 19 nt, Homo sapiens
  misc_RNA (1)...(19): siRNA sense strand
aggcuuaaaccuugguaau

SEQ ID NO: 2235615 - RNA, 19 nt, Homo sapiens
  misc_RNA (1)...(19): siRNA sense strand
acaccuaaacaguccgaua

SEQ ID NO: 2235616 - RNA, 19 nt, Homo sapiens
  misc_RNA (1)...(19): siRNA sense strand
ucuucaagccagugcgcaa

SEQ ID NO: 2235617 - RNA, 19 nt, Homo sapiens
  misc_RNA (1)...(19): siRNA sense strand
accaagagaaagaggauga

SEQ ID NO: 2235618 - RNA, 19 nt, Homo sapiens
  misc_RNA (1)...(19): siRNA sense strand
agaaagaggaugauggaag

SEQ ID NO: 2235619 - RNA, 19 nt, Homo sapiens
  misc_RNA (1)...(19): siRNA sense strand
ugacugagaaauuggaaca

SEQ ID NO: 2235620 - RNA, 19 nt, Homo sapiens
  misc_RNA (1)...(19): siRNA sense strand
gccaaaacgagaagaagaa

SEQ ID NO: 2235621 - RNA, 19 nt, Homo sapiens
  misc_RNA (1)...(19): siRNA sense strand
gguuaugaugcaugaacau

SEQ ID NO: 2235622 - RNA, 19 nt, Homo sapiens
  misc_RNA (1)...(19): siRNA sense strand
cuguacagauaaagccaau

SEQ ID NO: 2235623 - RNA, 19 nt, Homo sapiens
  misc_RNA (1)...(19): siRNA sense strand
aggaaccuguacagauaaa

SEQ ID NO: 2235624 - RNA, 19 nt, Homo sapiens
  misc_RNA (1)...(19): siRNA sense strand
gugaagucugauaugguua

SEQ ID NO: 2235625 - RNA, 19 nt, Homo sapiens
  misc_RNA (1)...(19): siRNA sense strand
caauugaagaagacacuau

SEQ ID NO: 2235626 - RNA, 19 nt, Homo sapiens
  misc_RNA (1)...(19): siRNA sense strand
aaagaauuugugagagaga

SEQ ID NO: 2235627 - RNA, 19 nt, Homo sapiens
  misc_RNA (1)...(19): siRNA sense strand
cagaguuggaggagagacu

SEQ ID NO: 2235628 - RNA, 19 nt, Homo sapiens
  misc_RNA (1)...(19): siRNA sense strand
gaggaugauggaagugaau

SEQ ID NO: 2235629 - RNA, 19 nt, Homo sapiens
  misc_RNA (1)...(19): siRNA sense strand
cguaguuccuauugauuca

SEQ ID NO: 2235630 - RNA, 19 nt, Homo sapiens
  misc_RNA (1)...(19): siRNA sense strand
ccucgagccagcauggaua

SEQ ID NO: 2235631 - RNA, 19 nt, Homo sapiens
  misc_RNA (1)...(19): siRNA sense strand
agaggaugauggaagugaa

SEQ ID NO: 2235632 - RNA, 19 nt, Homo sapiens
  misc_RNA (1)...(19): siRNA sense strand
acucggaccaauugaagaa

SEQ ID NO: 2235633 - RNA, 19 nt, Homo sapiens
  misc_RNA (1)...(19): siRNA sense strand
ugaccaagagaaagaggau

SEQ ID NO: 2235634 - RNA, 19 nt, Homo sapiens
  misc_RNA (1)...(19): siRNA sense strand
ccauaccaccagaggccaa

SEQ ID NO: 2235635 - RNA, 19 nt, Homo sapiens
  misc_RNA (1)...(19): siRNA sense strand
gagauuaagcauucaucau

SEQ ID NO: 2235636 - RNA, 19 nt, Homo sapiens
  misc_RNA (1)...(19): siRNA sense strand
uggcacgucuagugaugaa

SEQ ID NO: 2235637 - RNA, 19 nt, Homo sapiens
  misc_RNA (1)...(19): siRNA sense strand
ucagaugguuacugcaaca

SEQ ID NO: 2235638 - RNA, 19 nt, Homo sapiens
  misc_RNA (1)...(19): siRNA sense strand
uggaagaggcacuggauug

SEQ ID NO: 2235639 - RNA, 19 nt, Homo sapiens
  misc_RNA (1)...(19): siRNA sense strand
gugagagagauuaagcauu

SEQ ID NO: 2235640 - RNA, 19 nt, Homo sapiens
  misc_RNA (1)...(19): siRNA sense strand
uccaaauaaugcugcagua

SEQ ID NO: 2235641 - RNA, 19 nt, Homo sapiens
  misc_RNA (1)...(19): siRNA sense strand
gauccaaacaauaaagaag

SEQ ID NO: 2235642 - RNA, 19 nt, Homo sapiens
  misc_RNA (1)...(19): siRNA sense strand
cuguauuaauccugggaag

SEQ ID NO: 2235643 - RNA, 19 nt, Homo sapiens
  misc_RNA (1)...(19): siRNA sense strand
guacauuggagaugcucau

SEQ ID NO: 2235644 - RNA, 19 nt, Homo sapiens
  misc_RNA (1)...(19): siRNA sense strand
aggaaggacagaagccaca

SEQ ID NO: 2235645 - RNA, 19 nt, Homo sapiens
  misc_RNA (1)...(19): siRNA sense strand
auucagaguuggaggagag

SEQ ID NO: 2235646 - RNA, 19 nt, Homo sapiens
  misc_RNA (1)...(19): siRNA sense strand
agaaauggacaguggacac

SEQ ID NO: 2235647 - RNA, 19 nt, Homo sapiens
  misc_RNA (1)...(19): siRNA sense strand
aaagaaacuaccagaccau

SEQ ID NO: 2235648 - RNA, 19 nt, Homo sapiens
  misc_RNA (1)...(19): siRNA sense strand
ccuaagaauaaccugguga

SEQ ID NO: 2235649 - RNA, 19 nt, Homo sapiens
  misc_RNA (1)...(19): siRNA sense strand
ggauccaaacaauaaagaa

SEQ ID NO: 2235650 - RNA, 19 nt, Homo sapiens
  misc_RNA (1)...(19): siRNA sense strand
ugauauuguugcaucugaa

SEQ ID NO: 2235651 - RNA, 19 nt, Homo sapiens
  misc_RNA (1)...(19): siRNA sense strand
agagaaagaggaugaugga

SEQ ID NO: 2235652 - RNA, 19 nt, Homo sapiens
  misc_RNA (1)...(19): siRNA sense strand
agagauaauaacaaggacu

SEQ ID NO: 2235653 - RNA, 19 nt, Homo sapiens
  misc_RNA (1)...(19): siRNA sense strand
aaggauuugugaugaacuu

SEQ ID NO: 2235654 - RNA, 19 nt, Homo sapiens
  misc_RNA (1)...(19): siRNA sense strand
cugauaugguuaugaugca

SEQ ID NO: 2235655 - RNA, 19 nt, Homo sapiens
  misc_RNA (1)...(19): siRNA sense strand
aaaacgagaagaagaagaa

SEQ ID NO: 2235656 - RNA, 19 nt, Homo sapiens
  misc_RNA (1)...(19): siRNA sense strand
agaaacuaccagaccauuu

SEQ ID NO: 2235657 - RNA, 19 nt, Homo sapiens
  misc_RNA (1)...(19): siRNA sense strand
gcaaauaggacucggacca

SEQ ID NO: 2235658 - RNA, 19 nt, Homo sapiens
  misc_RNA (1)...(19): siRNA sense strand
gugaaucagaagaggagua

SEQ ID NO: 2235659 - RNA, 19 nt, Homo sapiens
  misc_RNA (1)...(19): siRNA sense strand
guggauacagaguaagaaa

SEQ ID NO: 2235660 - RNA, 19 nt, Homo sapiens
  misc_RNA (1)...(19): siRNA sense strand
guauagauaaagaugggaa

SEQ ID NO: 2235661 - RNA, 19 nt, Homo sapiens
  misc_RNA (1)...(19): siRNA sense strand
agaauuugugagagagauu

SEQ ID NO: 2235662 - RNA, 19 nt, Homo sapiens
  misc_RNA (1)...(19): siRNA sense strand
ggaacaucgaucaguuaaa

SEQ ID NO: 2235663 - RNA, 19 nt, Homo sapiens
  misc_RNA (1)...(19): siRNA sense strand
uguucaaacuggauccaaa

SEQ ID NO: 2235664 - RNA, 19 nt, Homo sapiens
  misc_RNA (1)...(19): siRNA sense strand
gggaaauuauagacaucuu

SEQ ID NO: 2235665 - RNA, 19 nt, Homo sapiens
  misc_RNA (1)...(19): siRNA sense strand
aagaagaagaaguguuaga

SEQ ID NO: 2235666 - RNA, 19 nt, Homo sapiens
  misc_RNA (1)...(19): siRNA sense strand
aagaagaaguguuagacca

SEQ ID NO: 2235667 - RNA, 19 nt, Homo sapiens
  misc_RNA (1)...(19): siRNA sense strand
gaugggaauuauuggguca

SEQ ID NO: 2235668 - RNA, 19 nt, Homo sapiens
  misc_RNA (1)...(19): siRNA sense strand
aggcuuaaaccuugguaau

SEQ ID NO: 2235669 - RNA, 19 nt, Homo sapiens
  misc_RNA (1)...(19): siRNA sense strand
acaccuaaacaguccgaua

SEQ ID NO: 2235670 - RNA, 19 nt, Homo sapiens
  misc_RNA (1)...(19): siRNA sense strand
ucuucaagccagugcgcaa

SEQ ID NO: 2235671 - RNA, 19 nt, Homo sapiens
  misc_RNA (1)...(19): siRNA sense strand
accaagagaaagaggauga

SEQ ID NO: 2235672 - RNA, 19 nt, Homo sapiens
  misc_RNA (1)...(19): siRNA sense strand
agaaagaggaugauggaag

SEQ ID NO: 2235673 - RNA, 19 nt, Homo sapiens
  misc_RNA (1)...(19): siRNA sense strand
ugacugagaaauuggaaca

SEQ ID NO: 2235674 - RNA, 19 nt, Homo sapiens
  misc_RNA (1)...(19): siRNA sense strand
gccaaaacgagaagaagaa

SEQ ID NO: 2235675 - RNA, 19 nt, Homo sapiens
  misc_RNA (1)...(19): siRNA sense strand
gguuaugaugcaugaacau

SEQ ID NO: 2235676 - RNA, 19 nt, Homo sapiens
  misc_RNA (1)...(19): siRNA sense strand
cuguacagauaaagccaau

SEQ ID NO: 2235677 - RNA, 19 nt, Homo sapiens
  misc_RNA (1)...(19): siRNA sense strand
aggaaccuguacagauaaa

SEQ ID NO: 2235678 - RNA, 19 nt, Homo sapiens
  misc_RNA (1)...(19): siRNA sense strand
gugaagucugauaugguua

SEQ ID NO: 2235679 - RNA, 19 nt, Homo sapiens
  misc_RNA (1)...(19): siRNA sense strand
caauugaagaagacacuau

SEQ ID NO: 2235680 - RNA, 19 nt, Homo sapiens
  misc_RNA (1)...(19): siRNA sense strand
aaagaauuugugagagaga

SEQ ID NO: 2235681 - RNA, 19 nt, Homo sapiens
  misc_RNA (1)...(19): siRNA sense strand
cagaguuggaggagagacu

SEQ ID NO: 2235682 - RNA, 19 nt, Homo sapiens
  misc_RNA (1)...(19): siRNA sense strand
gaggaugauggaagugaau

SEQ ID NO: 2235683 - RNA, 19 nt, Homo sapiens
  misc_RNA (1)...(19): siRNA sense strand
cguaguuccuauugauuca

SEQ ID NO: 2235684 - RNA, 19 nt, Homo sapiens
  misc_RNA (1)...(19): siRNA sense strand
ccucgagccagcauggaua

SEQ ID NO: 2235685 - RNA, 19 nt, Homo sapiens
  misc_RNA (1)...(19): siRNA sense strand
agaggaugauggaagugaa

SEQ ID NO: 2235686 - RNA, 19 nt, Homo sapiens
  misc_RNA (1)...(19): siRNA sense strand
acucggaccaauugaagaa

SEQ ID NO: 2235687 - RNA, 19 nt, Homo sapiens
  misc_RNA (1)...(19): siRNA sense strand
ugaccaagagaaagaggau

SEQ ID NO: 2235688 - RNA, 19 nt, Homo sapiens
  misc_RNA (1)...(19): siRNA sense strand
ccauaccaccagaggccaa

SEQ ID NO: 2235689 - RNA, 19 nt, Homo sapiens
  misc_RNA (1)...(19): siRNA sense strand
gagauuaagcauucaucau

SEQ ID NO: 2235690 - RNA, 19 nt, Homo sapiens
  misc_RNA (1)...(19): siRNA sense strand
uggcacgucuagugaugaa

SEQ ID NO: 2235691 - RNA, 19 nt, Homo sapiens
  misc_RNA (1)...(19): siRNA sense strand
ucagaugguuacugcaaca

SEQ ID NO: 2235692 - RNA, 19 nt, Homo sapiens
  misc_RNA (1)...(19): siRNA sense strand
uggaagaggcacuggauug

SEQ ID NO: 2235693 - RNA, 19 nt, Homo sapiens
  misc_RNA (1)...(19): siRNA sense strand
gugagagagauuaagcauu

SEQ ID NO: 2235694 - RNA, 19 nt, Homo sapiens
  misc_RNA (1)...(19): siRNA sense strand
uccaaauaaugcugcagua

SEQ ID NO: 2235695 - RNA, 19 nt, Homo sapiens
  misc_RNA (1)...(19): siRNA sense strand
gauccaaacaauaaagaag

SEQ ID NO: 2235696 - RNA, 19 nt, Homo sapiens
  misc_RNA (1)...(19): siRNA sense strand
cuguauuaauccugggaag

SEQ ID NO: 2235697 - RNA, 19 nt, Homo sapiens
  misc_RNA (1)...(19): siRNA sense strand
guacauuggagaugcucau

SEQ ID NO: 2235698 - RNA, 19 nt, Homo sapiens
  misc_RNA (1)...(19): siRNA sense strand
aggaaggacagaagccaca

SEQ ID NO: 2235699 - RNA, 19 nt, Homo sapiens
  misc_RNA (1)...(19): siRNA sense strand
auucagaguuggaggagag

SEQ ID NO: 2235700 - RNA, 19 nt, Homo sapiens
  misc_RNA (1)...(19): siRNA sense strand
agaaauggacaguggacac

SEQ ID NO: 2235701 - RNA, 19 nt, Homo sapiens
  misc_RNA (1)...(19): siRNA sense strand
aaagaaacuaccagaccau

SEQ ID NO: 2235702 - RNA, 19 nt, Homo sapiens
  misc_RNA (1)...(19): siRNA sense strand
ccuaagaauaaccugguga

SEQ ID NO: 2235703 - RNA, 19 nt, Homo sapiens
  misc_RNA (1)...(19): siRNA sense strand
ggauccaaacaauaaagaa

SEQ ID NO: 2235704 - RNA, 19 nt, Homo sapiens
  misc_RNA (1)...(19): siRNA sense strand
ugauauuguugcaucugaa

SEQ ID NO: 2235705 - RNA, 19 nt, Homo sapiens
  misc_RNA (1)...(19): siRNA sense strand
agagaaagaggaugaugga

SEQ ID NO: 2235706 - RNA, 19 nt, Homo sapiens
  misc_RNA (1)...(19): siRNA sense strand
agagauaauaacaaggacu

SEQ ID NO: 2235707 - RNA, 19 nt, Homo sapiens
  misc_RNA (1)...(19): siRNA sense strand
aaggauuugugaugaacuu

SEQ ID NO: 2235708 - RNA, 19 nt, Homo sapiens
  misc_RNA (1)...(19): siRNA sense strand
cugauaugguuaugaugca

SEQ ID NO: 2235709 - RNA, 19 nt, Homo sapiens
  misc_RNA (1)...(19): siRNA sense strand
aaaacgagaagaagaagaa

SEQ ID NO: 2235710 - RNA, 19 nt, Homo sapiens
  misc_RNA (1)...(19): siRNA sense strand
agaaacuaccagaccauuu

SEQ ID NO: 2235711 - RNA, 19 nt, Homo sapiens
  misc_RNA (1)...(19): siRNA sense strand
gcaaauaggacucggacca

SEQ ID NO: 2235712 - RNA, 19 nt, Homo sapiens
  misc_RNA (1)...(19): siRNA sense strand
gugaaucagaagaggagua

SEQ ID NO: 2235713 - RNA, 19 nt, Homo sapiens
  misc_RNA (1)...(19): siRNA sense strand
guggauacagaguaagaaa

SEQ ID NO: 2235714 - RNA, 19 nt, Homo sapiens
  misc_RNA (1)...(19): siRNA sense strand
guauagauaaagaugggaa

SEQ ID NO: 2235715 - RNA, 19 nt, Homo sapiens
  misc_RNA (1)...(19): siRNA sense strand
agaauuugugagagagauu

SEQ ID NO: 2235716 - RNA, 19 nt, Homo sapiens
  misc_RNA (1)...(19): siRNA sense strand
ggaacaucgaucaguuaaa

SEQ ID NO: 2235717 - RNA, 19 nt, Homo sapiens
  misc_RNA (1)...(19): siRNA sense strand
uguucaaacuggauccaaa

SEQ ID NO: 2235718 - RNA, 19 nt, Homo sapiens
  misc_RNA (1)...(19): siRNA sense strand
gggaaauuauagacaucuu

SEQ ID NO: 2235719 - RNA, 19 nt, Homo sapiens
  misc_RNA (1)...(19): siRNA sense strand
aagaagaagaaguguuaga

SEQ ID NO: 2235720 - RNA, 19 nt, Homo sapiens
  misc_RNA (1)...(19): siRNA sense strand
aagaagaaguguuagacca

SEQ ID NO: 2235721 - RNA, 19 nt, Homo sapiens
  misc_RNA (1)...(19): siRNA sense strand
gaugggaauuauuggguca

SEQ ID NO: 2235722 - RNA, 19 nt, Homo sapiens
  misc_RNA (1)...(19): siRNA sense strand
aggcuuaaaccuugguaau

SEQ ID NO: 2235723 - RNA, 19 nt, Homo sapiens
  misc_RNA (1)...(19): siRNA sense strand
acaccuaaacaguccgaua

SEQ ID NO: 2235724 - RNA, 19 nt, Homo sapiens
  misc_RNA (1)...(19): siRNA sense strand
ucuucaagccagugcgcaa

SEQ ID NO: 2235725 - RNA, 19 nt, Homo sapiens
  misc_RNA (1)...(19): siRNA sense strand
accaagagaaagaggauga

SEQ ID NO: 2235726 - RNA, 19 nt, Homo sapiens
  misc_RNA (1)...(19): siRNA sense strand
agaaagaggaugauggaag

SEQ ID NO: 2235727 - RNA, 19 nt, Homo sapiens
  misc_RNA (1)...(19): siRNA sense strand
ugacugagaaauuggaaca

SEQ ID NO: 2235728 - RNA, 19 nt, Homo sapiens
  misc_RNA (1)...(19): siRNA sense strand
gccaaaacgagaagaagaa

SEQ ID NO: 2235729 - RNA, 19 nt, Homo sapiens
  misc_RNA (1)...(19): siRNA sense strand
gguuaugaugcaugaacau

SEQ ID NO: 2235730 - RNA, 19 nt, Homo sapiens
  misc_RNA (1)...(19): siRNA sense strand
cuguacagauaaagccaau

SEQ ID NO: 2235731 - RNA, 19 nt, Homo sapiens
  misc_RNA (1)...(19): siRNA sense strand
aggaaccuguacagauaaa

SEQ ID NO: 2235732 - RNA, 19 nt, Homo sapiens
  misc_RNA (1)...(19): siRNA sense strand
gugaagucugauaugguua

SEQ ID NO: 2235733 - RNA, 19 nt, Homo sapiens
  misc_RNA (1)...(19): siRNA sense strand
caauugaagaagacacuau

SEQ ID NO: 2235734 - RNA, 19 nt, Homo sapiens
  misc_RNA (1)...(19): siRNA sense strand
aaagaauuugugagagaga

SEQ ID NO: 2235735 - RNA, 19 nt, Homo sapiens
  misc_RNA (1)...(19): siRNA sense strand
cagaguuggaggagagacu

SEQ ID NO: 2235736 - RNA, 19 nt, Homo sapiens
  misc_RNA (1)...(19): siRNA sense strand
gaggaugauggaagugaau

SEQ ID NO: 2235737 - RNA, 19 nt, Homo sapiens
  misc_RNA (1)...(19): siRNA sense strand
cguaguuccuauugauuca

SEQ ID NO: 2235738 - RNA, 19 nt, Homo sapiens
  misc_RNA (1)...(19): siRNA sense strand
ccucgagccagcauggaua

SEQ ID NO: 2235739 - RNA, 19 nt, Homo sapiens
  misc_RNA (1)...(19): siRNA sense strand
agaggaugauggaagugaa

SEQ ID NO: 2235740 - RNA, 19 nt, Homo sapiens
  misc_RNA (1)...(19): siRNA sense strand
acucggaccaauugaagaa

SEQ ID NO: 2235741 - RNA, 19 nt, Homo sapiens
  misc_RNA (1)...(19): siRNA sense strand
ugaccaagagaaagaggau

SEQ ID NO: 2235742 - RNA, 19 nt, Homo sapiens
  misc_RNA (1)...(19): siRNA sense strand
ccauaccaccagaggccaa

SEQ ID NO: 2235743 - RNA, 19 nt, Homo sapiens
  misc_RNA (1)...(19): siRNA sense strand
gagauuaagcauucaucau

SEQ ID NO: 2235744 - RNA, 19 nt, Homo sapiens
  misc_RNA (1)...(19): siRNA sense strand
uggcacgucuagugaugaa

SEQ ID NO: 2235745 - RNA, 19 nt, Homo sapiens
  misc_RNA (1)...(19): siRNA sense strand
ucagaugguuacugcaaca

SEQ ID NO: 2235746 - RNA, 19 nt, Homo sapiens
  misc_RNA (1)...(19): siRNA sense strand
uggaagaggcacuggauug

SEQ ID NO: 2235747 - RNA, 19 nt, Homo sapiens
  misc_RNA (1)...(19): siRNA sense strand
gugagagagauuaagcauu

SEQ ID NO: 2235748 - RNA, 19 nt, Homo sapiens
  misc_RNA (1)...(19): siRNA sense strand
uccaaauaaugcugcagua

SEQ ID NO: 2235749 - RNA, 19 nt, Homo sapiens
  misc_RNA (1)...(19): siRNA sense strand
gauccaaacaauaaagaag

SEQ ID NO: 2235750 - RNA, 19 nt, Homo sapiens
  misc_RNA (1)...(19): siRNA sense strand
cuguauuaauccugggaag

SEQ ID NO: 2235751 - RNA, 19 nt, Homo sapiens
  misc_RNA (1)...(19): siRNA sense strand
guacauuggagaugcucau

SEQ ID NO: 2235752 - RNA, 19 nt, Homo sapiens
  misc_RNA (1)...(19): siRNA sense strand
aggaaggacagaagccaca

SEQ ID NO: 2235753 - RNA, 19 nt, Homo sapiens
  misc_RNA (1)...(19): siRNA sense strand
auucagaguuggaggagag

SEQ ID NO: 2235754 - RNA, 19 nt, Homo sapiens
  misc_RNA (1)...(19): siRNA sense strand
agaaauggacaguggacac

SEQ ID NO: 2235755 - RNA, 19 nt, Homo sapiens
  misc_RNA (1)...(19): siRNA sense strand
aaagaaacuaccagaccau

SEQ ID NO: 2235756 - RNA, 19 nt, Homo sapiens
  misc_RNA (1)...(19): siRNA sense strand
ccuaagaauaaccugguga

SEQ ID NO: 2235757 - RNA, 19 nt, Homo sapiens
  misc_RNA (1)...(19): siRNA sense strand
ggauccaaacaauaaagaa

SEQ ID NO: 2235758 - RNA, 19 nt, Homo sapiens
  misc_RNA (1)...(19): siRNA sense strand
ugauauuguugcaucugaa

SEQ ID NO: 2235759 - RNA, 19 nt, Homo sapiens
  misc_RNA (1)...(19): siRNA sense strand
agagaaagaggaugaugga

SEQ ID NO: 2235760 - RNA, 19 nt, Homo sapiens
  misc_RNA (1)...(19): siRNA sense strand
agagauaauaacaaggacu

SEQ ID NO: 2235761 - RNA, 19 nt, Homo sapiens
  misc_RNA (1)...(19): siRNA sense strand
aaggauuugugaugaacuu

SEQ ID NO: 2235762 - RNA, 19 nt, Homo sapiens
  misc_RNA (1)...(19): siRNA sense strand
cugauaugguuaugaugca

SEQ ID NO: 2235763 - RNA, 19 nt, Homo sapiens
  misc_RNA (1)...(19): siRNA sense strand
aaaacgagaagaagaagaa

SEQ ID NO: 2235764 - RNA, 19 nt, Homo sapiens
  misc_RNA (1)...(19): siRNA sense strand
agaaacuaccagaccauuu

SEQ ID NO: 2235765 - RNA, 19 nt, Homo sapiens
  misc_RNA (1)...(19): siRNA sense strand
gggccaaugcugugggcua

SEQ ID NO: 2235766 - RNA, 19 nt, Homo sapiens
  misc_RNA (1)...(19): siRNA sense strand
ucgcuaaacaggugggcua

SEQ ID NO: 2235767 - RNA, 19 nt, Homo sapiens
  misc_RNA (1)...(19): siRNA sense strand
agaaagucaugguggccaa

SEQ ID NO: 2235768 - RNA, 19 nt, Homo sapiens
  misc_RNA (1)...(19): siRNA sense strand
gcccagaagugguccgcaa

SEQ ID NO: 2235769 - RNA, 19 nt, Homo sapiens
  misc_RNA (1)...(19): siRNA sense strand
cagaggaguuugaggugga

SEQ ID NO: 2235770 - RNA, 19 nt, Homo sapiens
  misc_RNA (1)...(19): siRNA sense strand
aggagcuggaggagaauua

SEQ ID NO: 2235771 - RNA, 19 nt, Homo sapiens
  misc_RNA (1)...(19): siRNA sense strand
guggagaaguucaucgaga

SEQ ID NO: 2235772 - RNA, 19 nt, Homo sapiens
  misc_RNA (1)...(19): siRNA sense strand
uggaguuccugcagggcua

SEQ ID NO: 2235773 - RNA, 19 nt, Homo sapiens
  misc_RNA (1)...(19): siRNA sense strand
ccaagaucgcagaggaguu

SEQ ID NO: 2235774 - RNA, 19 nt, Homo sapiens
  misc_RNA (1)...(19): siRNA sense strand
ccaaguucaaggaggucaa

SEQ ID NO: 2235775 - RNA, 19 nt, Homo sapiens
  misc_RNA (1)...(19): siRNA sense strand
uggagaaggagcugguaga

SEQ ID NO: 2235776 - RNA, 19 nt, Homo sapiens
  misc_RNA (1)...(19): siRNA sense strand
gagacauccugcugcgaga

SEQ ID NO: 2235777 - RNA, 19 nt, Homo sapiens
  misc_RNA (1)...(19): siRNA sense strand
ccaugaaggagaugcacuu

SEQ ID NO: 2235778 - RNA, 19 nt, Homo sapiens
  misc_RNA (1)...(19): siRNA sense strand
aguucaaggaggucaagaa

SEQ ID NO: 2235779 - RNA, 19 nt, Homo sapiens
  misc_RNA (1)...(19): siRNA sense strand
acuacuucaucgaggucaa

SEQ ID NO: 2235780 - RNA, 19 nt, Homo sapiens
  misc_RNA (1)...(19): siRNA sense strand
uaaaggacgugaagggcca

SEQ ID NO: 2235781 - RNA, 19 nt, Homo sapiens
  misc_RNA (1)...(19): siRNA sense strand
ccggcugguuucagagaca

SEQ ID NO: 2235782 - RNA, 19 nt, Homo sapiens
  misc_RNA (1)...(19): siRNA sense strand
agaaagcagaugaagccua

SEQ ID NO: 2235783 - RNA, 19 nt, Homo sapiens
  misc_RNA (1)...(19): siRNA sense strand
acaugacacuggaagguga

SEQ ID NO: 2235784 - RNA, 19 nt, Homo sapiens
  misc_RNA (1)...(19): siRNA sense strand
acucggacguguaugaaaa

SEQ ID NO: 2235785 - RNA, 19 nt, Homo sapiens
  misc_RNA (1)...(19): siRNA sense strand
gcuacgaggagcuggagga

SEQ ID NO: 2235786 - RNA, 19 nt, Homo sapiens
  misc_RNA (1)...(19): siRNA sense strand
aguuugagguggagcugga

SEQ ID NO: 2235787 - RNA, 19 nt, Homo sapiens
  misc_RNA (1)...(19): siRNA sense strand
cugggaaggugauagacau

SEQ ID NO: 2235788 - RNA, 19 nt, Homo sapiens
  misc_RNA (1)...(19): siRNA sense strand
agaacaacguagaugcagu

SEQ ID NO: 2235789 - RNA, 19 nt, Homo sapiens
  misc_RNA (1)...(19): siRNA sense strand
guucaugugaccaaggaca

SEQ ID NO: 2235790 - RNA, 19 nt, Homo sapiens
  misc_RNA (1)...(19): siRNA sense strand
ccgcaagaugggagacaag

SEQ ID NO: 2235791 - RNA, 19 nt, Homo sapiens
  misc_RNA (1)...(19): siRNA sense strand
ggucaaagucauugcccac

SEQ ID NO: 2235792 - RNA, 19 nt, Homo sapiens
  misc_RNA (1)...(19): siRNA sense strand
gggccaaugcugugggcua

SEQ ID NO: 2235793 - RNA, 19 nt, Homo sapiens
  misc_RNA (1)...(19): siRNA sense strand
ucgcuaaacaggugggcua

SEQ ID NO: 2235794 - RNA, 19 nt, Homo sapiens
  misc_RNA (1)...(19): siRNA sense strand
agaaagucaugguggccaa

SEQ ID NO: 2235795 - RNA, 19 nt, Homo sapiens
  misc_RNA (1)...(19): siRNA sense strand
gcccagaagugguccgcaa

SEQ ID NO: 2235796 - RNA, 19 nt, Homo sapiens
  misc_RNA (1)...(19): siRNA sense strand
cagaggaguuugaggugga

SEQ ID NO: 2235797 - RNA, 19 nt, Homo sapiens
  misc_RNA (1)...(19): siRNA sense strand
aggagcuggaggagaauua

SEQ ID NO: 2235798 - RNA, 19 nt, Homo sapiens
  misc_RNA (1)...(19): siRNA sense strand
guggagaaguucaucgaga

SEQ ID NO: 2235799 - RNA, 19 nt, Homo sapiens
  misc_RNA (1)...(19): siRNA sense strand
uggaguuccugcagggcua

SEQ ID NO: 2235800 - RNA, 19 nt, Homo sapiens
  misc_RNA (1)...(19): siRNA sense strand
ccaagaucgcagaggaguu

SEQ ID NO: 2235801 - RNA, 19 nt, Homo sapiens
  misc_RNA (1)...(19): siRNA sense strand
ccaaguucaaggaggucaa

SEQ ID NO: 2235802 - RNA, 19 nt, Homo sapiens
  misc_RNA (1)...(19): siRNA sense strand
uggagaaggagcugguaga

SEQ ID NO: 2235803 - RNA, 19 nt, Homo sapiens
  misc_RNA (1)...(19): siRNA sense strand
gagacauccugcugcgaga

SEQ ID NO: 2235804 - RNA, 19 nt, Homo sapiens
  misc_RNA (1)...(19): siRNA sense strand
ccaugaaggagaugcacuu

SEQ ID NO: 2235805 - RNA, 19 nt, Homo sapiens
  misc_RNA (1)...(19): siRNA sense strand
aguucaaggaggucaagaa

SEQ ID NO: 2235806 - RNA, 19 nt, Homo sapiens
  misc_RNA (1)...(19): siRNA sense strand
acuacuucaucgaggucaa

SEQ ID NO: 2235807 - RNA, 19 nt, Homo sapiens
  misc_RNA (1)...(19): siRNA sense strand
uaaaggacgugaagggcca

SEQ ID NO: 2235808 - RNA, 19 nt, Homo sapiens
  misc_RNA (1)...(19): siRNA sense strand
ccggcugguuucagagaca

SEQ ID NO: 2235809 - RNA, 19 nt, Homo sapiens
  misc_RNA (1)...(19): siRNA sense strand
agaaagcagaugaagccua

SEQ ID NO: 2235810 - RNA, 19 nt, Homo sapiens
  misc_RNA (1)...(19): siRNA sense strand
acaugacacuggaagguga

SEQ ID NO: 2235811 - RNA, 19 nt, Homo sapiens
  misc_RNA (1)...(19): siRNA sense strand
acucggacguguaugaaaa

SEQ ID NO: 2235812 - RNA, 19 nt, Homo sapiens
  misc_RNA (1)...(19): siRNA sense strand
gcuacgaggagcuggagga

SEQ ID NO: 2235813 - RNA, 19 nt, Homo sapiens
  misc_RNA (1)...(19): siRNA sense strand
aguuugagguggagcugga

SEQ ID NO: 2235814 - RNA, 19 nt, Homo sapiens
  misc_RNA (1)...(19): siRNA sense strand
cugggaaggugauagacau

SEQ ID NO: 2235815 - RNA, 19 nt, Homo sapiens
  misc_RNA (1)...(19): siRNA sense strand
agaacaacguagaugcagu

SEQ ID NO: 2235816 - RNA, 19 nt, Homo sapiens
  misc_RNA (1)...(19): siRNA sense strand
guucaugugaccaaggaca

SEQ ID NO: 2235817 - RNA, 19 nt, Homo sapiens
  misc_RNA (1)...(19): siRNA sense strand
ccgcaagaugggagacaag

SEQ ID NO: 2235818 - RNA, 19 nt, Homo sapiens
  misc_RNA (1)...(19): siRNA sense strand
ggucaaagucauugcccac

SEQ ID NO: 2235819 - RNA, 19 nt, Homo sapiens
  misc_RNA (1)...(19): siRNA sense strand
cugccugcucugagggaaa

SEQ ID NO: 2235820 - RNA, 19 nt, Homo sapiens
  misc_RNA (1)...(19): siRNA sense strand
ccgaaggauuugcugggaa

SEQ ID NO: 2235821 - RNA, 19 nt, Homo sapiens
  misc_RNA (1)...(19): siRNA sense strand
gcuacgaggaccagggcau

SEQ ID NO: 2235822 - RNA, 19 nt, Homo sapiens
  misc_RNA (1)...(19): siRNA sense strand
ccaugauccugauaggcaa

SEQ ID NO: 2235823 - RNA, 19 nt, Homo sapiens
  misc_RNA (1)...(19): siRNA sense strand
gaaauagauaccagggcca

SEQ ID NO: 2235824 - RNA, 19 nt, Homo sapiens
  misc_RNA (1)...(19): siRNA sense strand
cggacuggacggaguguga

SEQ ID NO: 2235825 - RNA, 19 nt, Homo sapiens
  misc_RNA (1)...(19): siRNA sense strand
aaacauaauuacugccgga

SEQ ID NO: 2235826 - RNA, 19 nt, Homo sapiens
  misc_RNA (1)...(19): siRNA sense strand
cgaaggauuugcugggaag

SEQ ID NO: 2235827 - RNA, 19 nt, Homo sapiens
  misc_RNA (1)...(19): siRNA sense strand
gcaugacuuuggugggcau

SEQ ID NO: 2235828 - RNA, 19 nt, Homo sapiens
  misc_RNA (1)...(19): siRNA sense strand
gggaaguacagcucagagu

SEQ ID NO: 2235829 - RNA, 19 nt, Homo sapiens
  misc_RNA (1)...(19): siRNA sense strand
gggccugggcaaacauaau

SEQ ID NO: 2235830 - RNA, 19 nt, Homo sapiens
  misc_RNA (1)...(19): siRNA sense strand
agugugagcucuccggcua

SEQ ID NO: 2235831 - RNA, 19 nt, Homo sapiens
  misc_RNA (1)...(19): siRNA sense strand
gcagaaacccagaucgaga

SEQ ID NO: 2235832 - RNA, 19 nt, Homo sapiens
  misc_RNA (1)...(19): siRNA sense strand
cugccugcucugagggaaa

SEQ ID NO: 2235833 - RNA, 19 nt, Homo sapiens
  misc_RNA (1)...(19): siRNA sense strand
ccgaaggauuugcugggaa

SEQ ID NO: 2235834 - RNA, 19 nt, Homo sapiens
  misc_RNA (1)...(19): siRNA sense strand
gcuacgaggaccagggcau

SEQ ID NO: 2235835 - RNA, 19 nt, Homo sapiens
  misc_RNA (1)...(19): siRNA sense strand
ccaugauccugauaggcaa

SEQ ID NO: 2235836 - RNA, 19 nt, Homo sapiens
  misc_RNA (1)...(19): siRNA sense strand
auucagaagaggagccaga

SEQ ID NO: 2235837 - RNA, 19 nt, Homo sapiens
  misc_RNA (1)...(19): siRNA sense strand
gaaauagauaccagggcca

SEQ ID NO: 2235838 - RNA, 19 nt, Homo sapiens
  misc_RNA (1)...(19): siRNA sense strand
cugcagaaacccagaucga

SEQ ID NO: 2235839 - RNA, 19 nt, Homo sapiens
  misc_RNA (1)...(19): siRNA sense strand
cggacuggacggaguguga

SEQ ID NO: 2235840 - RNA, 19 nt, Homo sapiens
  misc_RNA (1)...(19): siRNA sense strand
aaacauaauuacugccgga

SEQ ID NO: 2235841 - RNA, 19 nt, Homo sapiens
  misc_RNA (1)...(19): siRNA sense strand
cgaaggauuugcugggaag

SEQ ID NO: 2235842 - RNA, 19 nt, Homo sapiens
  misc_RNA (1)...(19): siRNA sense strand
ucucagauuucgugugcca

SEQ ID NO: 2235843 - RNA, 19 nt, Homo sapiens
  misc_RNA (1)...(19): siRNA sense strand
gggaaguacagcucagagu

SEQ ID NO: 2235844 - RNA, 19 nt, Homo sapiens
  misc_RNA (1)...(19): siRNA sense strand
gggccugggcaaacauaau

SEQ ID NO: 2235845 - RNA, 19 nt, Homo sapiens
  misc_RNA (1)...(19): siRNA sense strand
agugugagcucuccggcua

SEQ ID NO: 2235846 - RNA, 19 nt, Homo sapiens
  misc_RNA (1)...(19): siRNA sense strand
cugccugcucugagggaaa

SEQ ID NO: 2235847 - RNA, 19 nt, Homo sapiens
  misc_RNA (1)...(19): siRNA sense strand
ccgaaggauuugcugggaa

SEQ ID NO: 2235848 - RNA, 19 nt, Homo sapiens
  misc_RNA (1)...(19): siRNA sense strand
gcuacgaggaccagggcau

SEQ ID NO: 2235849 - RNA, 19 nt, Homo sapiens
  misc_RNA (1)...(19): siRNA sense strand
ccaugauccugauaggcaa

SEQ ID NO: 2235850 - RNA, 19 nt, Homo sapiens
  misc_RNA (1)...(19): siRNA sense strand
gaaauagauaccagggcca

SEQ ID NO: 2235851 - RNA, 19 nt, Homo sapiens
  misc_RNA (1)...(19): siRNA sense strand
cggacuggacggaguguga

SEQ ID NO: 2235852 - RNA, 19 nt, Homo sapiens
  misc_RNA (1)...(19): siRNA sense strand
aaacauaauuacugccgga

SEQ ID NO: 2235853 - RNA, 19 nt, Homo sapiens
  misc_RNA (1)...(19): siRNA sense strand
cgaaggauuugcugggaag

SEQ ID NO: 2235854 - RNA, 19 nt, Homo sapiens
  misc_RNA (1)...(19): siRNA sense strand
gcaugacuuuggugggcau

SEQ ID NO: 2235855 - RNA, 19 nt, Homo sapiens
  misc_RNA (1)...(19): siRNA sense strand
gggaaguacagcucagagu

SEQ ID NO: 2235856 - RNA, 19 nt, Homo sapiens
  misc_RNA (1)...(19): siRNA sense strand
gggccugggcaaacauaau

SEQ ID NO: 2235857 - RNA, 19 nt, Homo sapiens
  misc_RNA (1)...(19): siRNA sense strand
agugugagcucuccggcua

SEQ ID NO: 2235858 - RNA, 19 nt, Homo sapiens
  misc_RNA (1)...(19): siRNA sense strand
cauugaaacuagugacaua

SEQ ID NO: 2235859 - RNA, 19 nt, Homo sapiens
  misc_RNA (1)...(19): siRNA sense strand
gaauaaagcagaacgggaa

SEQ ID NO: 2235860 - RNA, 19 nt, Homo sapiens
  misc_RNA (1)...(19): siRNA sense strand
cgguagaaauguacagaca

SEQ ID NO: 2235861 - RNA, 19 nt, Homo sapiens
  misc_RNA (1)...(19): siRNA sense strand
cuguaaaguuucaagguuu

SEQ ID NO: 2235862 - RNA, 19 nt, Homo sapiens
  misc_RNA (1)...(19): siRNA sense strand
guggaaagaaugaugaaau

SEQ ID NO: 2235863 - RNA, 19 nt, Homo sapiens
  misc_RNA (1)...(19): siRNA sense strand
acguagagguggauaugua

SEQ ID NO: 2235864 - RNA, 19 nt, Homo sapiens
  misc_RNA (1)...(19): siRNA sense strand
cuucaaaguggaugaguuu

SEQ ID NO: 2235865 - RNA, 19 nt, Homo sapiens
  misc_RNA (1)...(19): siRNA sense strand
ucuugaagcuguuggaaaa

SEQ ID NO: 2235866 - RNA, 19 nt, Homo sapiens
  misc_RNA (1)...(19): siRNA sense strand
cugaugaagauuugaagaa

SEQ ID NO: 2235867 - RNA, 19 nt, Homo sapiens
  misc_RNA (1)...(19): siRNA sense strand
uagagaaggcaaugaagaa

SEQ ID NO: 2235868 - RNA, 19 nt, Homo sapiens
  misc_RNA (1)...(19): siRNA sense strand
ucaaagagauuguagcaca

SEQ ID NO: 2235869 - RNA, 19 nt, Homo sapiens
  misc_RNA (1)...(19): siRNA sense strand
ucgaaaugagggaaauaaa

SEQ ID NO: 2235870 - RNA, 19 nt, Homo sapiens
  misc_RNA (1)...(19): siRNA sense strand
acaaggaagcuguugcaaa

SEQ ID NO: 2235871 - RNA, 19 nt, Homo sapiens
  misc_RNA (1)...(19): siRNA sense strand
ugcaauugaaucagggaaa

SEQ ID NO: 2235872 - RNA, 19 nt, Homo sapiens
  misc_RNA (1)...(19): siRNA sense strand
acaagaaaggaaaggccaa

SEQ ID NO: 2235873 - RNA, 19 nt, Homo sapiens
  misc_RNA (1)...(19): siRNA sense strand
gaguuaaacagcagcaaca

SEQ ID NO: 2235874 - RNA, 19 nt, Homo sapiens
  misc_RNA (1)...(19): siRNA sense strand
ggauagaagacuuaaagca

SEQ ID NO: 2235875 - RNA, 19 nt, Homo sapiens
  misc_RNA (1)...(19): siRNA sense strand
cagcaaacaucuuagagga

SEQ ID NO: 2235876 - RNA, 19 nt, Homo sapiens
  misc_RNA (1)...(19): siRNA sense strand
gagcaggcguggauggcau

SEQ ID NO: 2235877 - RNA, 19 nt, Homo sapiens
  misc_RNA (1)...(19): siRNA sense strand
ccaacaauuuucugcaaua

SEQ ID NO: 2235878 - RNA, 19 nt, Homo sapiens
  misc_RNA (1)...(19): siRNA sense strand
agaaacaugcaaaggaaca

SEQ ID NO: 2235879 - RNA, 19 nt, Homo sapiens
  misc_RNA (1)...(19): siRNA sense strand
cugcaguggcacagaucua

SEQ ID NO: 2235880 - RNA, 19 nt, Homo sapiens
  misc_RNA (1)...(19): siRNA sense strand
auucaagccaucaaggaaa

SEQ ID NO: 2235881 - RNA, 19 nt, Homo sapiens
  misc_RNA (1)...(19): siRNA sense strand
caaauauugcgaagaucua

SEQ ID NO: 2235882 - RNA, 19 nt, Homo sapiens
  misc_RNA (1)...(19): siRNA sense strand
ggguagaaggccugagauc

SEQ ID NO: 2235883 - RNA, 19 nt, Homo sapiens
  misc_RNA (1)...(19): siRNA sense strand
caaacaucuuagaggacga

SEQ ID NO: 2235884 - RNA, 19 nt, Homo sapiens
  misc_RNA (1)...(19): siRNA sense strand
gagaaggcaaugaagaaga

SEQ ID NO: 2235885 - RNA, 19 nt, Homo sapiens
  misc_RNA (1)...(19): siRNA sense strand
ggucaaagagauuguagca

SEQ ID NO: 2235886 - RNA, 19 nt, Homo sapiens
  misc_RNA (1)...(19): siRNA sense strand
gagaagugaaggcaaggaa

SEQ ID NO: 2235887 - RNA, 19 nt, Homo sapiens
  misc_RNA (1)...(19): siRNA sense strand
uugcagauguguugaacuu

SEQ ID NO: 2235888 - RNA, 19 nt, Homo sapiens
  misc_RNA (1)...(19): siRNA sense strand
cuggaagggcggauaguuu

SEQ ID NO: 2235889 - RNA, 19 nt, Homo sapiens
  misc_RNA (1)...(19): siRNA sense strand
ucuuagaggacgauaauga

SEQ ID NO: 2235890 - RNA, 19 nt, Homo sapiens
  misc_RNA (1)...(19): siRNA sense strand
acgauaaugaagaggagau

SEQ ID NO: 2235891 - RNA, 19 nt, Homo sapiens
  misc_RNA (1)...(19): siRNA sense strand
cagcagaaggagcuaaauu

SEQ ID NO: 2235892 - RNA, 19 nt, Homo sapiens
  misc_RNA (1)...(19): siRNA sense strand
auacacaacuucagggcca

SEQ ID NO: 2235893 - RNA, 19 nt, Homo sapiens
  misc_RNA (1)...(19): siRNA sense strand
caucaaggaaacugcauuu

SEQ ID NO: 2235894 - RNA, 19 nt, Homo sapiens
  misc_RNA (1)...(19): siRNA sense strand
ugagaauagcuguguauga

SEQ ID NO: 2235895 - RNA, 19 nt, Homo sapiens
  misc_RNA (1)...(19): siRNA sense strand
gcacaguaugacaaagaga

SEQ ID NO: 2235896 - RNA, 19 nt, Homo sapiens
  misc_RNA (1)...(19): siRNA sense strand
aauaaagcagaacgggaaa

SEQ ID NO: 2235897 - RNA, 19 nt, Homo sapiens
  misc_RNA (1)...(19): siRNA sense strand
cuaucaaaccccagauuua

SEQ ID NO: 2235898 - RNA, 19 nt, Homo sapiens
  misc_RNA (1)...(19): siRNA sense strand
agaaaagagagcagaccaa

SEQ ID NO: 2235899 - RNA, 19 nt, Homo sapiens
  misc_RNA (1)...(19): siRNA sense strand
guggaagccaagaaaggua

SEQ ID NO: 2235900 - RNA, 19 nt, Homo sapiens
  misc_RNA (1)...(19): siRNA sense strand
aagaaauggaucaguugaa

SEQ ID NO: 2235901 - RNA, 19 nt, Homo sapiens
  misc_RNA (1)...(19): siRNA sense strand
uguaugaaccugaugaaga

SEQ ID NO: 2235902 - RNA, 19 nt, Homo sapiens
  misc_RNA (1)...(19): siRNA sense strand
ccuacguagagguggauau

SEQ ID NO: 2235903 - RNA, 19 nt, Homo sapiens
  misc_RNA (1)...(19): siRNA sense strand
acaucuuagaggacgauaa

SEQ ID NO: 2235904 - RNA, 19 nt, Homo sapiens
  misc_RNA (1)...(19): siRNA sense strand
aaugaagaggagaucgaaa

SEQ ID NO: 2235905 - RNA, 19 nt, Homo sapiens
  misc_RNA (1)...(19): siRNA sense strand
uggaagaaagaaagagacu

SEQ ID NO: 2235906 - RNA, 19 nt, Homo sapiens
  misc_RNA (1)...(19): siRNA sense strand
cauaugugccugauggauu

SEQ ID NO: 2235907 - RNA, 19 nt, Homo sapiens
  misc_RNA (1)...(19): siRNA sense strand
uagaagacuuaaagcagau

SEQ ID NO: 2235908 - RNA, 19 nt, Homo sapiens
  misc_RNA (1)...(19): siRNA sense strand
agaauaaagcagaacggga

SEQ ID NO: 2235909 - RNA, 19 nt, Homo sapiens
  misc_RNA (1)...(19): siRNA sense strand
aggaaggacaggugcuaga

SEQ ID NO: 2235910 - RNA, 19 nt, Homo sapiens
  misc_RNA (1)...(19): siRNA sense strand
caugauggaagcuggagaa

SEQ ID NO: 2235911 - RNA, 19 nt, Homo sapiens
  misc_RNA (1)...(19): siRNA sense strand
caauuauaacaaacggcaa

SEQ ID NO: 2235912 - RNA, 19 nt, Homo sapiens
  misc_RNA (1)...(19): siRNA sense strand
cuucgaaaugagggaaaua

SEQ ID NO: 2235913 - RNA, 19 nt, Homo sapiens
  misc_RNA (1)...(19): siRNA sense strand
gcacgcaaguugacaaaau

SEQ ID NO: 2235914 - RNA, 19 nt, Homo sapiens
  misc_RNA (1)...(19): siRNA sense strand
ggcugaaaauccagaagua

SEQ ID NO: 2235915 - RNA, 19 nt, Homo sapiens
  misc_RNA (1)...(19): siRNA sense strand
agaaacacuggaugaaauu

SEQ ID NO: 2235916 - RNA, 19 nt, Homo sapiens
  misc_RNA (1)...(19): siRNA sense strand
cauugaaacuagugacaua

SEQ ID NO: 2235917 - RNA, 19 nt, Homo sapiens
  misc_RNA (1)...(19): siRNA sense strand
gaauaaagcagaacgggaa

SEQ ID NO: 2235918 - RNA, 19 nt, Homo sapiens
  misc_RNA (1)...(19): siRNA sense strand
cgguagaaauguacagaca

SEQ ID NO: 2235919 - RNA, 19 nt, Homo sapiens
  misc_RNA (1)...(19): siRNA sense strand
cuguaaaguuucaagguuu

SEQ ID NO: 2235920 - RNA, 19 nt, Homo sapiens
  misc_RNA (1)...(19): siRNA sense strand
guggaaagaaugaugaaau

SEQ ID NO: 2235921 - RNA, 19 nt, Homo sapiens
  misc_RNA (1)...(19): siRNA sense strand
acguagagguggauaugua

SEQ ID NO: 2235922 - RNA, 19 nt, Homo sapiens
  misc_RNA (1)...(19): siRNA sense strand
cuucaaaguggaugaguuu

SEQ ID NO: 2235923 - RNA, 19 nt, Homo sapiens
  misc_RNA (1)...(19): siRNA sense strand
ucuugaagcuguuggaaaa

SEQ ID NO: 2235924 - RNA, 19 nt, Homo sapiens
  misc_RNA (1)...(19): siRNA sense strand
cugaugaagauuugaagaa

SEQ ID NO: 2235925 - RNA, 19 nt, Homo sapiens
  misc_RNA (1)...(19): siRNA sense strand
uagagaaggcaaugaagaa

SEQ ID NO: 2235926 - RNA, 19 nt, Homo sapiens
  misc_RNA (1)...(19): siRNA sense strand
ucaaagagauuguagcaca

SEQ ID NO: 2235927 - RNA, 19 nt, Homo sapiens
  misc_RNA (1)...(19): siRNA sense strand
ucgaaaugagggaaauaaa

SEQ ID NO: 2235928 - RNA, 19 nt, Homo sapiens
  misc_RNA (1)...(19): siRNA sense strand
acaaggaagcuguugcaaa

SEQ ID NO: 2235929 - RNA, 19 nt, Homo sapiens
  misc_RNA (1)...(19): siRNA sense strand
ugcaauugaaucagggaaa

SEQ ID NO: 2235930 - RNA, 19 nt, Homo sapiens
  misc_RNA (1)...(19): siRNA sense strand
acaagaaaggaaaggccaa

SEQ ID NO: 2235931 - RNA, 19 nt, Homo sapiens
  misc_RNA (1)...(19): siRNA sense strand
gaguuaaacagcagcaaca

SEQ ID NO: 2235932 - RNA, 19 nt, Homo sapiens
  misc_RNA (1)...(19): siRNA sense strand
ggauagaagacuuaaagca

SEQ ID NO: 2235933 - RNA, 19 nt, Homo sapiens
  misc_RNA (1)...(19): siRNA sense strand
cagcaaacaucuuagagga

SEQ ID NO: 2235934 - RNA, 19 nt, Homo sapiens
  misc_RNA (1)...(19): siRNA sense strand
gagcaggcguggauggcau

SEQ ID NO: 2235935 - RNA, 19 nt, Homo sapiens
  misc_RNA (1)...(19): siRNA sense strand
ccaacaauuuucugcaaua

SEQ ID NO: 2235936 - RNA, 19 nt, Homo sapiens
  misc_RNA (1)...(19): siRNA sense strand
agaaacaugcaaaggaaca

SEQ ID NO: 2235937 - RNA, 19 nt, Homo sapiens
  misc_RNA (1)...(19): siRNA sense strand
cugcaguggcacagaucua

SEQ ID NO: 2235938 - RNA, 19 nt, Homo sapiens
  misc_RNA (1)...(19): siRNA sense strand
auucaagccaucaaggaaa

SEQ ID NO: 2235939 - RNA, 19 nt, Homo sapiens
  misc_RNA (1)...(19): siRNA sense strand
caaauauugcgaagaucua

SEQ ID NO: 2235940 - RNA, 19 nt, Homo sapiens
  misc_RNA (1)...(19): siRNA sense strand
ggguagaaggccugagauc

SEQ ID NO: 2235941 - RNA, 19 nt, Homo sapiens
  misc_RNA (1)...(19): siRNA sense strand
caaacaucuuagaggacga

SEQ ID NO: 2235942 - RNA, 19 nt, Homo sapiens
  misc_RNA (1)...(19): siRNA sense strand
gagaaggcaaugaagaaga

SEQ ID NO: 2235943 - RNA, 19 nt, Homo sapiens
  misc_RNA (1)...(19): siRNA sense strand
ggucaaagagauuguagca

SEQ ID NO: 2235944 - RNA, 19 nt, Homo sapiens
  misc_RNA (1)...(19): siRNA sense strand
gagaagugaaggcaaggaa

SEQ ID NO: 2235945 - RNA, 19 nt, Homo sapiens
  misc_RNA (1)...(19): siRNA sense strand
uugcagauguguugaacuu

SEQ ID NO: 2235946 - RNA, 19 nt, Homo sapiens
  misc_RNA (1)...(19): siRNA sense strand
cuggaagggcggauaguuu

SEQ ID NO: 2235947 - RNA, 19 nt, Homo sapiens
  misc_RNA (1)...(19): siRNA sense strand
ucuuagaggacgauaauga

SEQ ID NO: 2235948 - RNA, 19 nt, Homo sapiens
  misc_RNA (1)...(19): siRNA sense strand
acgauaaugaagaggagau

SEQ ID NO: 2235949 - RNA, 19 nt, Homo sapiens
  misc_RNA (1)...(19): siRNA sense strand
cagcagaaggagcuaaauu

SEQ ID NO: 2235950 - RNA, 19 nt, Homo sapiens
  misc_RNA (1)...(19): siRNA sense strand
auacacaacuucagggcca

SEQ ID NO: 2235951 - RNA, 19 nt, Homo sapiens
  misc_RNA (1)...(19): siRNA sense strand
caucaaggaaacugcauuu

SEQ ID NO: 2235952 - RNA, 19 nt, Homo sapiens
  misc_RNA (1)...(19): siRNA sense strand
ugagaauagcuguguauga

SEQ ID NO: 2235953 - RNA, 19 nt, Homo sapiens
  misc_RNA (1)...(19): siRNA sense strand
gcacaguaugacaaagaga

SEQ ID NO: 2235954 - RNA, 19 nt, Homo sapiens
  misc_RNA (1)...(19): siRNA sense strand
aauaaagcagaacgggaaa

SEQ ID NO: 2235955 - RNA, 19 nt, Homo sapiens
  misc_RNA (1)...(19): siRNA sense strand
cuaucaaaccccagauuua

SEQ ID NO: 2235956 - RNA, 19 nt, Homo sapiens
  misc_RNA (1)...(19): siRNA sense strand
agaaaagagagcagaccaa

SEQ ID NO: 2235957 - RNA, 19 nt, Homo sapiens
  misc_RNA (1)...(19): siRNA sense strand
guggaagccaagaaaggua

SEQ ID NO: 2235958 - RNA, 19 nt, Homo sapiens
  misc_RNA (1)...(19): siRNA sense strand
aagaaauggaucaguugaa

SEQ ID NO: 2235959 - RNA, 19 nt, Homo sapiens
  misc_RNA (1)...(19): siRNA sense strand
uguaugaaccugaugaaga

SEQ ID NO: 2235960 - RNA, 19 nt, Homo sapiens
  misc_RNA (1)...(19): siRNA sense strand
ccuacguagagguggauau

SEQ ID NO: 2235961 - RNA, 19 nt, Homo sapiens
  misc_RNA (1)...(19): siRNA sense strand
acaucuuagaggacgauaa

SEQ ID NO: 2235962 - RNA, 19 nt, Homo sapiens
  misc_RNA (1)...(19): siRNA sense strand
aaugaagaggagaucgaaa

SEQ ID NO: 2235963 - RNA, 19 nt, Homo sapiens
  misc_RNA (1)...(19): siRNA sense strand
uggaagaaagaaagagacu

SEQ ID NO: 2235964 - RNA, 19 nt, Homo sapiens
  misc_RNA (1)...(19): siRNA sense strand
cauaugugccugauggauu

SEQ ID NO: 2235965 - RNA, 19 nt, Homo sapiens
  misc_RNA (1)...(19): siRNA sense strand
uagaagacuuaaagcagau

SEQ ID NO: 2235966 - RNA, 19 nt, Homo sapiens
  misc_RNA (1)...(19): siRNA sense strand
agaauaaagcagaacggga

SEQ ID NO: 2235967 - RNA, 19 nt, Homo sapiens
  misc_RNA (1)...(19): siRNA sense strand
aggaaggacaggugcuaga

SEQ ID NO: 2235968 - RNA, 19 nt, Homo sapiens
  misc_RNA (1)...(19): siRNA sense strand
caugauggaagcuggagaa

SEQ ID NO: 2235969 - RNA, 19 nt, Homo sapiens
  misc_RNA (1)...(19): siRNA sense strand
caauuauaacaaacggcaa

SEQ ID NO: 2235970 - RNA, 19 nt, Homo sapiens
  misc_RNA (1)...(19): siRNA sense strand
cuucgaaaugagggaaaua

SEQ ID NO: 2235971 - RNA, 19 nt, Homo sapiens
  misc_RNA (1)...(19): siRNA sense strand
gcacgcaaguugacaaaau

SEQ ID NO: 2235972 - RNA, 19 nt, Homo sapiens
  misc_RNA (1)...(19): siRNA sense strand
ggcugaaaauccagaagua

SEQ ID NO: 2235973 - RNA, 19 nt, Homo sapiens
  misc_RNA (1)...(19): siRNA sense strand
agaaacacuggaugaaauu

SEQ ID NO: 2235974 - RNA, 19 nt, Homo sapiens
  misc_RNA (1)...(19): siRNA sense strand
cagauuuagcgaugcaauu

SEQ ID NO: 2235975 - RNA, 19 nt, Homo sapiens
  misc_RNA (1)...(19): siRNA sense strand
gcauugaagccgugcggaa

SEQ ID NO: 2235976 - RNA, 19 nt, Homo sapiens
  misc_RNA (1)...(19): siRNA sense strand
gagggaaccugaugggcaa

SEQ ID NO: 2235977 - RNA, 19 nt, Homo sapiens
  misc_RNA (1)...(19): siRNA sense strand
agcagaacgucgagggcaa

SEQ ID NO: 2235978 - RNA, 19 nt, Homo sapiens
  misc_RNA (1)...(19): siRNA sense strand
ucaaagugguggagggagu

SEQ ID NO: 2235979 - RNA, 19 nt, Homo sapiens
  misc_RNA (1)...(19): siRNA sense strand
ggguggagcuggaucggaa

SEQ ID NO: 2235980 - RNA, 19 nt, Homo sapiens
  misc_RNA (1)...(19): siRNA sense strand
uggaacaaccugaggguga

SEQ ID NO: 2235981 - RNA, 19 nt, Homo sapiens
  misc_RNA (1)...(19): siRNA sense strand
gggucauacuauuggcauu

SEQ ID NO: 2235982 - RNA, 19 nt, Homo sapiens
  misc_RNA (1)...(19): siRNA sense strand
gcuauaagguggaacggca

SEQ ID NO: 2235983 - RNA, 19 nt, Homo sapiens
  misc_RNA (1)...(19): siRNA sense strand
cuaacaacccaaagaucaa

SEQ ID NO: 2235984 - RNA, 19 nt, Homo sapiens
  misc_RNA (1)...(19): siRNA sense strand
cggaauggaagcacguuaa

SEQ ID NO: 2235985 - RNA, 19 nt, Homo sapiens
  misc_RNA (1)...(19): siRNA sense strand
uggagggagucaaggaauu

SEQ ID NO: 2235986 - RNA, 19 nt, Homo sapiens
  misc_RNA (1)...(19): siRNA sense strand
aggaaugggugaaugucua

SEQ ID NO: 2235987 - RNA, 19 nt, Homo sapiens
  misc_RNA (1)...(19): siRNA sense strand
guacaucauccgagacaau

SEQ ID NO: 2235988 - RNA, 19 nt, Homo sapiens
  misc_RNA (1)...(19): siRNA sense strand
ggucguguccggagcuaaa

SEQ ID NO: 2235989 - RNA, 19 nt, Homo sapiens
  misc_RNA (1)...(19): siRNA sense strand
ugaacagcgaugagaacaa

SEQ ID NO: 2235990 - RNA, 19 nt, Homo sapiens
  misc_RNA (1)...(19): siRNA sense strand
gagcagagauccaggagcu

SEQ ID NO: 2235991 - RNA, 19 nt, Homo sapiens
  misc_RNA (1)...(19): siRNA sense strand
cugagagagccaaggauau

SEQ ID NO: 2235992 - RNA, 19 nt, Homo sapiens
  misc_RNA (1)...(19): siRNA sense strand
ugucaagacugcugagacu

SEQ ID NO: 2235993 - RNA, 19 nt, Homo sapiens
  misc_RNA (1)...(19): siRNA sense strand
caaccaagccauugcgcau

SEQ ID NO: 2235994 - RNA, 19 nt, Homo sapiens
  misc_RNA (1)...(19): siRNA sense strand
ccgcacacggugagaguga

SEQ ID NO: 2235995 - RNA, 19 nt, Homo sapiens
  misc_RNA (1)...(19): siRNA sense strand
gcggaauggaagcacguua

SEQ ID NO: 2235996 - RNA, 19 nt, Homo sapiens
  misc_RNA (1)...(19): siRNA sense strand
agaacgaguuggagcggga

SEQ ID NO: 2235997 - RNA, 19 nt, Homo sapiens
  misc_RNA (1)...(19): siRNA sense strand
ucgagaaggcacacaacaa

SEQ ID NO: 2235998 - RNA, 19 nt, Homo sapiens
  misc_RNA (1)...(19): siRNA sense strand
ggacaagauggaugaugau

SEQ ID NO: 2235999 - RNA, 19 nt, Homo sapiens
  misc_RNA (1)...(19): siRNA sense strand
gcaucgagcagaucagcaa

SEQ ID NO: 2236000 - RNA, 19 nt, Homo sapiens
  misc_RNA (1)...(19): siRNA sense strand
cugacaucgugaagaucaa

SEQ ID NO: 2236001 - RNA, 19 nt, Homo sapiens
  misc_RNA (1)...(19): siRNA sense strand
cguuugagaaucaggugaa

SEQ ID NO: 2236002 - RNA, 19 nt, Homo sapiens
  misc_RNA (1)...(19): siRNA sense strand
agcuaaagguuccaagauu

SEQ ID NO: 2236003 - RNA, 19 nt, Homo sapiens
  misc_RNA (1)...(19): siRNA sense strand
aggaggaccuggugaagga

SEQ ID NO: 2236004 - RNA, 19 nt, Homo sapiens
  misc_RNA (1)...(19): siRNA sense strand
agaugcaagaggaggaaga

SEQ ID NO: 2236005 - RNA, 19 nt, Homo sapiens
  misc_RNA (1)...(19): siRNA sense strand
gcgcaaauucaccaagaga

SEQ ID NO: 2236006 - RNA, 19 nt, Homo sapiens
  misc_RNA (1)...(19): siRNA sense strand
aggccaagcaggacguaau

SEQ ID NO: 2236007 - RNA, 19 nt, Homo sapiens
  misc_RNA (1)...(19): siRNA sense strand
gugacgaggaucugaccaa

SEQ ID NO: 2236008 - RNA, 19 nt, Homo sapiens
  misc_RNA (1)...(19): siRNA sense strand
gcagaggaguuucggcuca

SEQ ID NO: 2236009 - RNA, 19 nt, Homo sapiens
  misc_RNA (1)...(19): siRNA sense strand
agaacaagaugcaagagga

SEQ ID NO: 2236010 - RNA, 19 nt, Homo sapiens
  misc_RNA (1)...(19): siRNA sense strand
uggcugacaucgugaagau

SEQ ID NO: 2236011 - RNA, 19 nt, Homo sapiens
  misc_RNA (1)...(19): siRNA sense strand
gcggcagacguuugagaau

SEQ ID NO: 2236012 - RNA, 19 nt, Homo sapiens
  misc_RNA (1)...(19): siRNA sense strand
acaacaagaagaagaucau

SEQ ID NO: 2236013 - RNA, 19 nt, Homo sapiens
  misc_RNA (1)...(19): siRNA sense strand
acaagaugcaagaggagga

SEQ ID NO: 2236014 - RNA, 19 nt, Homo sapiens
  misc_RNA (1)...(19): siRNA sense strand
gaggaucugaccaaagaaa

SEQ ID NO: 2236015 - RNA, 19 nt, Homo sapiens
  misc_RNA (1)...(19): siRNA sense strand
ccaaguacaucauccgaga

SEQ ID NO: 2236016 - RNA, 19 nt, Homo sapiens
  misc_RNA (1)...(19): siRNA sense strand
cagacaacaagaagaagau

SEQ ID NO: 2236017 - RNA, 19 nt, Homo sapiens
  misc_RNA (1)...(19): siRNA sense strand
ucgugaagaucaacaauca

SEQ ID NO: 2236018 - RNA, 19 nt, Homo sapiens
  misc_RNA (1)...(19): siRNA sense strand
uggcagaggaucaggaaug

SEQ ID NO: 2236019 - RNA, 19 nt, Homo sapiens
  misc_RNA (1)...(19): siRNA sense strand
acagacaacaagaagaaga

SEQ ID NO: 2236020 - RNA, 19 nt, Homo sapiens
  misc_RNA (1)...(19): siRNA sense strand
aacccaaagaucaaggaua

SEQ ID NO: 2236021 - RNA, 19 nt, Homo sapiens
  misc_RNA (1)...(19): siRNA sense strand
gugcaggaaacaugacaga

SEQ ID NO: 2236022 - RNA, 19 nt, Homo sapiens
  misc_RNA (1)...(19): siRNA sense strand
ccggaugaacugaagcgaa

SEQ ID NO: 2236023 - RNA, 19 nt, Homo sapiens
  misc_RNA (1)...(19): siRNA sense strand
aguccaacaugcugacaga

SEQ ID NO: 2236024 - RNA, 19 nt, Homo sapiens
  misc_RNA (1)...(19): siRNA sense strand
ccaacaaggcuuuugagaa

SEQ ID NO: 2236025 - RNA, 19 nt, Homo sapiens
  misc_RNA (1)...(19): siRNA sense strand
gagcauacaacguugagga

SEQ ID NO: 2236026 - RNA, 19 nt, Homo sapiens
  misc_RNA (1)...(19): siRNA sense strand
cggcauguucuuugguuca

SEQ ID NO: 2236027 - RNA, 19 nt, Homo sapiens
  misc_RNA (1)...(19): siRNA sense strand
aggacguaauagaggucau

SEQ ID NO: 2236028 - RNA, 19 nt, Homo sapiens
  misc_RNA (1)...(19): siRNA sense strand
agacggacggcgugagcuu

SEQ ID NO: 2236029 - RNA, 19 nt, Homo sapiens
  misc_RNA (1)...(19): siRNA sense strand
ccacagucuccaaccuaua

SEQ ID NO: 2236030 - RNA, 19 nt, Homo sapiens
  misc_RNA (1)...(19): siRNA sense strand
gggagcugaucaugggcau

SEQ ID NO: 2236031 - RNA, 19 nt, Homo sapiens
  misc_RNA (1)...(19): siRNA sense strand
cagugauggugaaguacga

SEQ ID NO: 2236032 - RNA, 19 nt, Homo sapiens
  misc_RNA (1)...(19): siRNA sense strand
gcgagagcguugaguucca

SEQ ID NO: 2236033 - RNA, 19 nt, Homo sapiens
  misc_RNA (1)...(19): siRNA sense strand
gcgaugagaacaagaugca

SEQ ID NO: 2236034 - RNA, 19 nt, Homo sapiens
  misc_RNA (1)...(19): siRNA sense strand
guccagagcgagugcauga

SEQ ID NO: 2236035 - RNA, 19 nt, Homo sapiens
  misc_RNA (1)...(19): siRNA sense strand
acgcacacauccagaacga

SEQ ID NO: 2236036 - RNA, 19 nt, Homo sapiens
  misc_RNA (1)...(19): siRNA sense strand
ccgcauggcagaggaguuu

SEQ ID NO: 2236037 - RNA, 19 nt, Homo sapiens
  misc_RNA (1)...(19): siRNA sense strand
gacaacaagaagaagauca

SEQ ID NO: 2236038 - RNA, 19 nt, Homo sapiens
  misc_RNA (1)...(19): siRNA sense strand
augacagugacgaggagaa

SEQ ID NO: 2236039 - RNA, 19 nt, Homo sapiens
  misc_RNA (1)...(19): siRNA sense strand
ccaaacugcuuguggacuc

SEQ ID NO: 2236040 - RNA, 19 nt, Homo sapiens
  misc_RNA (1)...(19): siRNA sense strand
uguaagaagucucugggca

SEQ ID NO: 2236041 - RNA, 19 nt, Homo sapiens
  misc_RNA (1)...(19): siRNA sense strand
cgagaugcugagagagcca

SEQ ID NO: 2236042 - RNA, 19 nt, Homo sapiens
  misc_RNA (1)...(19): siRNA sense strand
gagcagaucagcaaggugu

SEQ ID NO: 2236043 - RNA, 19 nt, Homo sapiens
  misc_RNA (1)...(19): siRNA sense strand
cauuaaagaaggugaagaa

SEQ ID NO: 2236044 - RNA, 19 nt, Homo sapiens
  misc_RNA (1)...(19): siRNA sense strand
ugguguuacuaaagagaaa

SEQ ID NO: 2236045 - RNA, 19 nt, Homo sapiens
  misc_RNA (1)...(19): siRNA sense strand
cuguaggacuugugaagaa

SEQ ID NO: 2236046 - RNA, 19 nt, Homo sapiens
  misc_RNA (1)...(19): siRNA sense strand
cauaauacguuguggggaa

SEQ ID NO: 2236047 - RNA, 19 nt, Homo sapiens
  misc_RNA (1)...(19): siRNA sense strand
uugcaaucuuuguggaaua

SEQ ID NO: 2236048 - RNA, 19 nt, Homo sapiens
  misc_RNA (1)...(19): siRNA sense strand
ucugauugcccaagagaaa

SEQ ID NO: 2236049 - RNA, 19 nt, Homo sapiens
  misc_RNA (1)...(19): siRNA sense strand
aagccuauuucuugggaua

SEQ ID NO: 2236050 - RNA, 19 nt, Homo sapiens
  misc_RNA (1)...(19): siRNA sense strand
caauugaaagagagagaau

SEQ ID NO: 2236051 - RNA, 19 nt, Homo sapiens
  misc_RNA (1)...(19): siRNA sense strand
gaacuuaugucuaugagua

SEQ ID NO: 2236052 - RNA, 19 nt, Homo sapiens
  misc_RNA (1)...(19): siRNA sense strand
gggccaugcuguaggacuu

SEQ ID NO: 2236053 - RNA, 19 nt, Homo sapiens
  misc_RNA (1)...(19): siRNA sense strand
ggaucuaugcacagaaauu

SEQ ID NO: 2236054 - RNA, 19 nt, Homo sapiens
  misc_RNA (1)...(19): siRNA sense strand
aggauuugaucaagaagaa

SEQ ID NO: 2236055 - RNA, 19 nt, Homo sapiens
  misc_RNA (1)...(19): siRNA sense strand
guuucuaugaucagagaua

SEQ ID NO: 2236056 - RNA, 19 nt, Homo sapiens
  misc_RNA (1)...(19): siRNA sense strand
cagaugauuuacaggagaa

SEQ ID NO: 2236057 - RNA, 19 nt, Homo sapiens
  misc_RNA (1)...(19): siRNA sense strand
aguauagacaagaggauau

SEQ ID NO: 2236058 - RNA, 19 nt, Homo sapiens
  misc_RNA (1)...(19): siRNA sense strand
acagagaucacuauggaaa

SEQ ID NO: 2236059 - RNA, 19 nt, Homo sapiens
  misc_RNA (1)...(19): siRNA sense strand
aggagaaagaaguagcuua

SEQ ID NO: 2236060 - RNA, 19 nt, Homo sapiens
  misc_RNA (1)...(19): siRNA sense strand
cuauagaccuacaggcuga

SEQ ID NO: 2236061 - RNA, 19 nt, Homo sapiens
  misc_RNA (1)...(19): siRNA sense strand
ucgugaucuuugugaguua

SEQ ID NO: 2236062 - RNA, 19 nt, Homo sapiens
  misc_RNA (1)...(19): siRNA sense strand
ggaaagagauggugcuccu

SEQ ID NO: 2236063 - RNA, 19 nt, Homo sapiens
  misc_RNA (1)...(19): siRNA sense strand
cuacacggucuauggaaua

SEQ ID NO: 2236064 - RNA, 19 nt, Homo sapiens
  misc_RNA (1)...(19): siRNA sense strand
ccgcgaaugaugaguguuu

SEQ ID NO: 2236065 - RNA, 19 nt, Homo sapiens
  misc_RNA (1)...(19): siRNA sense strand
aagggaagguaucggcuaa

SEQ ID NO: 2236066 - RNA, 19 nt, Homo sapiens
  misc_RNA (1)...(19): siRNA sense strand
agcauaugguggaugauaa

SEQ ID NO: 2236067 - RNA, 19 nt, Homo sapiens
  misc_RNA (1)...(19): siRNA sense strand
agaugauggaaaugguuaa

SEQ ID NO: 2236068 - RNA, 19 nt, Homo sapiens
  misc_RNA (1)...(19): siRNA sense strand
ggaaagauuguuugaggca

SEQ ID NO: 2236069 - RNA, 19 nt, Homo sapiens
  misc_RNA (1)...(19): siRNA sense strand
uuaaagaaggugaagaaca

SEQ ID NO: 2236070 - RNA, 19 nt, Homo sapiens
  misc_RNA (1)...(19): siRNA sense strand
ucagcaugcuaguggagaa

SEQ ID NO: 2236071 - RNA, 19 nt, Homo sapiens
  misc_RNA (1)...(19): siRNA sense strand
cccaaugaagcuagauuaa

SEQ ID NO: 2236072 - RNA, 19 nt, Homo sapiens
  misc_RNA (1)...(19): siRNA sense strand
aaaccaagacaguugcaua

SEQ ID NO: 2236073 - RNA, 19 nt, Homo sapiens
  misc_RNA (1)...(19): siRNA sense strand
agaaaggcuugguuagaca

SEQ ID NO: 2236074 - RNA, 19 nt, Homo sapiens
  misc_RNA (1)...(19): siRNA sense strand
caaucaggaaggauauaaa

SEQ ID NO: 2236075 - RNA, 19 nt, Homo sapiens
  misc_RNA (1)...(19): siRNA sense strand
caguauagacaagaggaua

SEQ ID NO: 2236076 - RNA, 19 nt, Homo sapiens
  misc_RNA (1)...(19): siRNA sense strand
cuguuaacgugcagaagau

SEQ ID NO: 2236077 - RNA, 19 nt, Homo sapiens
  misc_RNA (1)...(19): siRNA sense strand
agucauuaaagaaggugaa

SEQ ID NO: 2236078 - RNA, 19 nt, Homo sapiens
  misc_RNA (1)...(19): siRNA sense strand
ggacagggugccaagaaga

SEQ ID NO: 2236079 - RNA, 19 nt, Homo sapiens
  misc_RNA (1)...(19): siRNA sense strand
ugguagagacggcaagcua

SEQ ID NO: 2236080 - RNA, 19 nt, Homo sapiens
  misc_RNA (1)...(19): siRNA sense strand
ugcaauaugaugaggauga

SEQ ID NO: 2236081 - RNA, 19 nt, Homo sapiens
  misc_RNA (1)...(19): siRNA sense strand
ggguagaucucgugauggu

SEQ ID NO: 2236082 - RNA, 19 nt, Homo sapiens
  misc_RNA (1)...(19): siRNA sense strand
uucaaagaauuguggaaga

SEQ ID NO: 2236083 - RNA, 19 nt, Homo sapiens
  misc_RNA (1)...(19): siRNA sense strand
ugaugaggaugaugaugaa

SEQ ID NO: 2236084 - RNA, 19 nt, Homo sapiens
  misc_RNA (1)...(19): siRNA sense strand
agaaauggaacgagauugu

SEQ ID NO: 2236085 - RNA, 19 nt, Homo sapiens
  misc_RNA (1)...(19): siRNA sense strand
guucagagcauuagguuuu

SEQ ID NO: 2236086 - RNA, 19 nt, Homo sapiens
  misc_RNA (1)...(19): siRNA sense strand
gagaacuagaugacagaga

SEQ ID NO: 2236087 - RNA, 19 nt, Homo sapiens
  misc_RNA (1)...(19): siRNA sense strand
aaccaagacaguugcauaa

SEQ ID NO: 2236088 - RNA, 19 nt, Homo sapiens
  misc_RNA (1)...(19): siRNA sense strand
uaugaacacccuaaggaaa

SEQ ID NO: 2236089 - RNA, 19 nt, Homo sapiens
  misc_RNA (1)...(19): siRNA sense strand
gcccaaugaagcuagauua

SEQ ID NO: 2236090 - RNA, 19 nt, Homo sapiens
  misc_RNA (1)...(19): siRNA sense strand
augaacacccuaaggaaau

SEQ ID NO: 2236091 - RNA, 19 nt, Homo sapiens
  misc_RNA (1)...(19): siRNA sense strand
accaauugaaagagagaga

SEQ ID NO: 2236092 - RNA, 19 nt, Homo sapiens
  misc_RNA (1)...(19): siRNA sense strand
gcaugcuaguggagaaguu

SEQ ID NO: 2236093 - RNA, 19 nt, Homo sapiens
  misc_RNA (1)...(19): siRNA sense strand
gaguaucucagguguuaaa

SEQ ID NO: 2236094 - RNA, 19 nt, Homo sapiens
  misc_RNA (1)...(19): siRNA sense strand
guuaauggcugcuggguug

SEQ ID NO: 2236095 - RNA, 19 nt, Homo sapiens
  misc_RNA (1)...(19): siRNA sense strand
augauuuacaggagaaaga

SEQ ID NO: 2236096 - RNA, 19 nt, Homo sapiens
  misc_RNA (1)...(19): siRNA sense strand
uguuaggauuccacagauu

SEQ ID NO: 2236097 - RNA, 19 nt, Homo sapiens
  misc_RNA (1)...(19): siRNA sense strand
uagaucaugucuugagaau

SEQ ID NO: 2236098 - RNA, 19 nt, Homo sapiens
  misc_RNA (1)...(19): siRNA sense strand
cuggauauaaucaggaaga

SEQ ID NO: 2236099 - RNA, 19 nt, Homo sapiens
  misc_RNA (1)...(19): siRNA sense strand
aagagagacuguagcacuu

SEQ ID NO: 2236100 - RNA, 19 nt, Homo sapiens
  misc_RNA (1)...(19): siRNA sense strand
cuaucaucucagaggaaau

SEQ ID NO: 2236101 - RNA, 19 nt, Homo sapiens
  misc_RNA (1)...(19): siRNA sense strand
cgcuauaccaagagagacu

SEQ ID NO: 2236102 - RNA, 19 nt, Homo sapiens
  misc_RNA (1)...(19): siRNA sense strand
gcauuguggaucagguuau

SEQ ID NO: 2236103 - RNA, 19 nt, Homo sapiens
  misc_RNA (1)...(19): siRNA sense strand
ccacuuauuaccagcguuu

SEQ ID NO: 2236104 - RNA, 19 nt, Homo sapiens
  misc_RNA (1)...(19): siRNA sense strand
uguucaaagaauuguggaa

SEQ ID NO: 2236105 - RNA, 19 nt, Homo sapiens
  misc_RNA (1)...(19): siRNA sense strand
aagaauggaguauggaaaa

SEQ ID NO: 2236106 - RNA, 19 nt, Homo sapiens
  misc_RNA (1)...(19): siRNA sense strand
gaagagaacuagaugacag

SEQ ID NO: 2236107 - RNA, 19 nt, Homo sapiens
  misc_RNA (1)...(19): siRNA sense strand
acuuggaguuggcaauuaa

SEQ ID NO: 2236108 - RNA, 19 nt, Homo sapiens
  misc_RNA (1)...(19): siRNA sense strand
uuggagaaauggaacgaga

SEQ ID NO: 2236109 - RNA, 19 nt, Homo sapiens
  misc_RNA (1)...(19): siRNA sense strand
uugaagaaccgccacgaua

SEQ ID NO: 2236110 - RNA, 19 nt, Homo sapiens
  misc_RNA (1)...(19): siRNA sense strand
acagagagcuccaggcacu

SEQ ID NO: 2236111 - RNA, 19 nt, Homo sapiens
  misc_RNA (1)...(19): siRNA sense strand
cgagaguauccuuuggcaa

SEQ ID NO: 2236112 - RNA, 19 nt, Homo sapiens
  misc_RNA (1)...(19): siRNA sense strand
augcagugcuguugggcga

SEQ ID NO: 2236113 - RNA, 19 nt, Homo sapiens
  misc_RNA (1)...(19): siRNA sense strand
ggaucagagaagaaagacu

SEQ ID NO: 2236114 - RNA, 19 nt, Homo sapiens
  misc_RNA (1)...(19): siRNA sense strand
cggcugaagaauuacaaca

SEQ ID NO: 2236115 - RNA, 19 nt, Homo sapiens
  misc_RNA (1)...(19): siRNA sense strand
cgaggaugaaggagaagca

SEQ ID NO: 2236116 - RNA, 19 nt, Homo sapiens
  misc_RNA (1)...(19): siRNA sense strand
cggagcaaauggcuggaga

SEQ ID NO: 2236117 - RNA, 19 nt, Homo sapiens
  misc_RNA (1)...(19): siRNA sense strand
ugaaggagaagcacgguga

SEQ ID NO: 2236118 - RNA, 19 nt, Homo sapiens
  misc_RNA (1)...(19): siRNA sense strand
ggaagaagcaguugccaga

SEQ ID NO: 2236119 - RNA, 19 nt, Homo sapiens
  misc_RNA (1)...(19): siRNA sense strand
gcucuuuaaggaugggaaa

SEQ ID NO: 2236120 - RNA, 19 nt, Homo sapiens
  misc_RNA (1)...(19): siRNA sense strand
agauugucaucgaggagua

SEQ ID NO: 2236121 - RNA, 19 nt, Homo sapiens
  misc_RNA (1)...(19): siRNA sense strand
uggaggaauuguauggaga

SEQ ID NO: 2236122 - RNA, 19 nt, Homo sapiens
  misc_RNA (1)...(19): siRNA sense strand
ccaucaagauugucaucga

SEQ ID NO: 2236123 - RNA, 19 nt, Homo sapiens
  misc_RNA (1)...(19): siRNA sense strand
ggggagaguaugauagaga

SEQ ID NO: 2236124 - RNA, 19 nt, Homo sapiens
  misc_RNA (1)...(19): siRNA sense strand
agaaggagauggcagcaga

SEQ ID NO: 2236125 - RNA, 19 nt, Homo sapiens
  misc_RNA (1)...(19): siRNA sense strand
ccaugggaaccaaagggaa

SEQ ID NO: 2236126 - RNA, 19 nt, Homo sapiens
  misc_RNA (1)...(19): siRNA sense strand
caagggucuccuagggaau

SEQ ID NO: 2236127 - RNA, 19 nt, Homo sapiens
  misc_RNA (1)...(19): siRNA sense strand
ccggaguacuggaagccga

SEQ ID NO: 2236128 - RNA, 19 nt, Homo sapiens
  misc_RNA (1)...(19): siRNA sense strand
ggaagaagcaguugccaga

SEQ ID NO: 2236129 - RNA, 19 nt, Homo sapiens
  misc_RNA (1)...(19): siRNA sense strand
gcucuuuaaggaugggaaa

SEQ ID NO: 2236130 - RNA, 19 nt, Homo sapiens
  misc_RNA (1)...(19): siRNA sense strand
agauugucaucgaggagua

SEQ ID NO: 2236131 - RNA, 19 nt, Homo sapiens
  misc_RNA (1)...(19): siRNA sense strand
uggaggaauuguauggaga

SEQ ID NO: 2236132 - RNA, 19 nt, Homo sapiens
  misc_RNA (1)...(19): siRNA sense strand
ccaucaagauugucaucga

SEQ ID NO: 2236133 - RNA, 19 nt, Homo sapiens
  misc_RNA (1)...(19): siRNA sense strand
ggggagaguaugauagaga

SEQ ID NO: 2236134 - RNA, 19 nt, Homo sapiens
  misc_RNA (1)...(19): siRNA sense strand
agaaggagauggcagcaga

SEQ ID NO: 2236135 - RNA, 19 nt, Homo sapiens
  misc_RNA (1)...(19): siRNA sense strand
ccaugggaaccaaagggaa

SEQ ID NO: 2236136 - RNA, 19 nt, Homo sapiens
  misc_RNA (1)...(19): siRNA sense strand
caagggucuccuagggaau

SEQ ID NO: 2236137 - RNA, 19 nt, Homo sapiens
  misc_RNA (1)...(19): siRNA sense strand
ccggaguacuggaagccga

SEQ ID NO: 2236138 - RNA, 19 nt, Homo sapiens
  misc_RNA (1)...(19): siRNA sense strand
ggacaggauucuauggaga

SEQ ID NO: 2236139 - RNA, 19 nt, Homo sapiens
  misc_RNA (1)...(19): siRNA sense strand
ggcuaauacugauaggaga

SEQ ID NO: 2236140 - RNA, 19 nt, Homo sapiens
  misc_RNA (1)...(19): siRNA sense strand
cgggaacacaacagaguau

SEQ ID NO: 2236141 - RNA, 19 nt, Homo sapiens
  misc_RNA (1)...(19): siRNA sense strand
gcaauaacgugaagggcug

SEQ ID NO: 2236142 - RNA, 19 nt, Homo sapiens
  misc_RNA (1)...(19): siRNA sense strand
gaagaaaguucaucccuga

SEQ ID NO: 2236143 - RNA, 19 nt, Homo sapiens
  misc_RNA (1)...(19): siRNA sense strand
agucaaagauacucaggca

SEQ ID NO: 2236144 - RNA, 19 nt, Homo sapiens
  misc_RNA (1)...(19): siRNA sense strand
uugaagaacuuacaggaga

SEQ ID NO: 2236145 - RNA, 19 nt, Homo sapiens
  misc_RNA (1)...(19): siRNA sense strand
ucaaagauacucaggcaga

SEQ ID NO: 2236146 - RNA, 19 nt, Homo sapiens
  misc_RNA (1)...(19): siRNA sense strand
cuccaaacacagugcacua

SEQ ID NO: 2236147 - RNA, 19 nt, Homo sapiens
  misc_RNA (1)...(19): siRNA sense strand
cugcagaguuggaagcacu

SEQ ID NO: 2236148 - RNA, 19 nt, Homo sapiens
  misc_RNA (1)...(19): siRNA sense strand
cagagcaggcagaugaaau

SEQ ID NO: 2236149 - RNA, 19 nt, Homo sapiens
  misc_RNA (1)...(19): siRNA sense strand
gguugcuggugguaggaau

SEQ ID NO: 2236150 - RNA, 19 nt, Homo sapiens
  misc_RNA (1)...(19): siRNA sense strand
uugaaaggacuuaugggua

SEQ ID NO: 2236151 - RNA, 19 nt, Homo sapiens
  misc_RNA (1)...(19): siRNA sense strand
ggguaauguuauauguucu

SEQ ID NO: 2236152 - RNA, 19 nt, Homo sapiens
  misc_RNA (1)...(19): siRNA sense strand
uggaagcacucuaugguga

SEQ ID NO: 2236153 - RNA, 19 nt, Homo sapiens
  misc_RNA (1)...(19): siRNA sense strand
ucaaaugagauuguggaaa

SEQ ID NO: 2236154 - RNA, 19 nt, Homo sapiens
  misc_RNA (1)...(19): siRNA sense strand
ugggauuugaccaguauaa

SEQ ID NO: 2236155 - RNA, 19 nt, Homo sapiens
  misc_RNA (1)...(19): siRNA sense strand
gaccaguauaagugcgauu

SEQ ID NO: 2236156 - RNA, 19 nt, Homo sapiens
  misc_RNA (1)...(19): siRNA sense strand
cggugaaacucuggcuaga

SEQ ID NO: 2236157 - RNA, 19 nt, Homo sapiens
  misc_RNA (1)...(19): siRNA sense strand
agaugaaauaccagucuuu

SEQ ID NO: 2236158 - RNA, 19 nt, Homo sapiens
  misc_RNA (1)...(19): siRNA sense strand
caagacagaucauaagcga

SEQ ID NO: 2236159 - RNA, 19 nt, Homo sapiens
  misc_RNA (1)...(19): siRNA sense strand
auucaugaccagaaauaca

SEQ ID NO: 2236160 - RNA, 19 nt, Homo sapiens
  misc_RNA (1)...(19): siRNA sense strand
cagaaaguaucacaggcuu

SEQ ID NO: 2236161 - RNA, 19 nt, Homo sapiens
  misc_RNA (1)...(19): siRNA sense strand
auguaugagugugggauuu

SEQ ID NO: 2236162 - RNA, 19 nt, Homo sapiens
  misc_RNA (1)...(19): siRNA sense strand
cuugggugucaaagguaaa

SEQ ID NO: 2236163 - RNA, 19 nt, Homo sapiens
  misc_RNA (1)...(19): siRNA sense strand
aagcaggcuaauacugaua

SEQ ID NO: 2236164 - RNA, 19 nt, Homo sapiens
  misc_RNA (1)...(19): siRNA sense strand
ggacaaaucaucaggguac

SEQ ID NO: 2236165 - RNA, 19 nt, Homo sapiens
  misc_RNA (1)...(19): siRNA sense strand
aagaaugcacagagagcua

SEQ ID NO: 2236166 - RNA, 19 nt, Homo sapiens
  misc_RNA (1)...(19): siRNA sense strand
ccgccaggaccuugaggaa

SEQ ID NO: 2236167 - RNA, 19 nt, Homo sapiens
  misc_RNA (1)...(19): siRNA sense strand
aggaaugacaggaacaaga

SEQ ID NO: 2236168 - RNA, 19 nt, Homo sapiens
  misc_RNA (1)...(19): siRNA sense strand
uggaaauggaugacacaga

SEQ ID NO: 2236169 - RNA, 19 nt, Homo sapiens
  misc_RNA (1)...(19): siRNA sense strand
cgacaaaaguagauaagcu

SEQ ID NO: 2236170 - RNA, 19 nt, Homo sapiens
  misc_RNA (1)...(19): siRNA sense strand
caucagugcuaaaggugca

SEQ ID NO: 2236171 - RNA, 19 nt, Homo sapiens
  misc_RNA (1)...(19): siRNA sense strand
ggguaaauacaccacgaau

SEQ ID NO: 2236172 - RNA, 19 nt, Homo sapiens
  misc_RNA (1)...(19): siRNA sense strand
uggagaauucugaaggaca

SEQ ID NO: 2236173 - RNA, 19 nt, Homo sapiens
  misc_RNA (1)...(19): siRNA sense strand
cgaaaagcucaccaggaaa

SEQ ID NO: 2236174 - RNA, 19 nt, Homo sapiens
  misc_RNA (1)...(19): siRNA sense strand
ugcuaaaggugcagagcgu

SEQ ID NO: 2236175 - RNA, 19 nt, Homo sapiens
  misc_RNA (1)...(19): siRNA sense strand
agauaagcuacaagaacca

SEQ ID NO: 2236176 - RNA, 19 nt, Homo sapiens
  misc_RNA (1)...(19): siRNA sense strand
gcaccagcucugaggaacu

SEQ ID NO: 2236177 - RNA, 19 nt, Homo sapiens
  misc_RNA (1)...(19): siRNA sense strand
aggacaaaucaucagggua

SEQ ID NO: 2236178 - RNA, 19 nt, Homo sapiens
  misc_RNA (1)...(19): siRNA sense strand
caccaggaaucgaugccaa

SEQ ID NO: 2236179 - RNA, 19 nt, Homo sapiens
  misc_RNA (1)...(19): siRNA sense strand
cuaaaggugcagagcgugu

SEQ ID NO: 2236180 - RNA, 19 nt, Homo sapiens
  misc_RNA (1)...(19): siRNA sense strand
ucaagaaaugcuggagaau

SEQ ID NO: 2236181 - RNA, 19 nt, Homo sapiens
  misc_RNA (1)...(19): siRNA sense strand
aagaaugcacagagagcua

SEQ ID NO: 2236182 - RNA, 19 nt, Homo sapiens
  misc_RNA (1)...(19): siRNA sense strand
ccgccaggaccuugaggaa

SEQ ID NO: 2236183 - RNA, 19 nt, Homo sapiens
  misc_RNA (1)...(19): siRNA sense strand
aggaaugacaggaacaaga

SEQ ID NO: 2236184 - RNA, 19 nt, Homo sapiens
  misc_RNA (1)...(19): siRNA sense strand
uggaaauggaugacacaga

SEQ ID NO: 2236185 - RNA, 19 nt, Homo sapiens
  misc_RNA (1)...(19): siRNA sense strand
cgacaaaaguagauaagcu

SEQ ID NO: 2236186 - RNA, 19 nt, Homo sapiens
  misc_RNA (1)...(19): siRNA sense strand
caucagugcuaaaggugca

SEQ ID NO: 2236187 - RNA, 19 nt, Homo sapiens
  misc_RNA (1)...(19): siRNA sense strand
ggguaaauacaccacgaau

SEQ ID NO: 2236188 - RNA, 19 nt, Homo sapiens
  misc_RNA (1)...(19): siRNA sense strand
uggagaauucugaaggaca

SEQ ID NO: 2236189 - RNA, 19 nt, Homo sapiens
  misc_RNA (1)...(19): siRNA sense strand
cgaaaagcucaccaggaaa

SEQ ID NO: 2236190 - RNA, 19 nt, Homo sapiens
  misc_RNA (1)...(19): siRNA sense strand
ugcuaaaggugcagagcgu

SEQ ID NO: 2236191 - RNA, 19 nt, Homo sapiens
  misc_RNA (1)...(19): siRNA sense strand
agauaagcuacaagaacca

SEQ ID NO: 2236192 - RNA, 19 nt, Homo sapiens
  misc_RNA (1)...(19): siRNA sense strand
caccaggaaucgaugccaa

SEQ ID NO: 2236193 - RNA, 19 nt, Homo sapiens
  misc_RNA (1)...(19): siRNA sense strand
cuaaaggugcagagcgugu

SEQ ID NO: 2236194 - RNA, 19 nt, Homo sapiens
  misc_RNA (1)...(19): siRNA sense strand
ucaagaaaugcuggagaau

SEQ ID NO: 2236195 - RNA, 19 nt, Homo sapiens
  misc_RNA (1)...(19): siRNA sense strand
aagaagagaaggagaggaa

SEQ ID NO: 2236196 - RNA, 19 nt, Homo sapiens
  misc_RNA (1)...(19): siRNA sense strand
cuaaauaaggagaagcuaa

SEQ ID NO: 2236197 - RNA, 19 nt, Homo sapiens
  misc_RNA (1)...(19): siRNA sense strand
ggagaagauugcaaaguau

SEQ ID NO: 2236198 - RNA, 19 nt, Homo sapiens
  misc_RNA (1)...(19): siRNA sense strand
ggacaagaccagcagcuaa

SEQ ID NO: 2236199 - RNA, 19 nt, Homo sapiens
  misc_RNA (1)...(19): siRNA sense strand
aggagaagcuaaaagauaa

SEQ ID NO: 2236200 - RNA, 19 nt, Homo sapiens
  misc_RNA (1)...(19): siRNA sense strand
guaccgaugcugagaguau

SEQ ID NO: 2236201 - RNA, 19 nt, Homo sapiens
  misc_RNA (1)...(19): siRNA sense strand
caaaagaggaagaagagaa

SEQ ID NO: 2236202 - RNA, 19 nt, Homo sapiens
  misc_RNA (1)...(19): siRNA sense strand
aggagaagauugcaaagua

SEQ ID NO: 2236203 - RNA, 19 nt, Homo sapiens
  misc_RNA (1)...(19): siRNA sense strand
uauaaaacugugugggaaa

SEQ ID NO: 2236204 - RNA, 19 nt, Homo sapiens
  misc_RNA (1)...(19): siRNA sense strand
gcaaaguaugguauaagaa

SEQ ID NO: 2236205 - RNA, 19 nt, Homo sapiens
  misc_RNA (1)...(19): siRNA sense strand
guaugaaagaugacagcau

SEQ ID NO: 2236206 - RNA, 19 nt, Homo sapiens
  misc_RNA (1)...(19): siRNA sense strand
uuaaagaagaacacaggaa

SEQ ID NO: 2236207 - RNA, 19 nt, Homo sapiens
  misc_RNA (1)...(19): siRNA sense strand
gagaguaucuguugggauc

SEQ ID NO: 2236208 - RNA, 19 nt, Homo sapiens
  misc_RNA (1)...(19): siRNA sense strand
gugggaaaucucucagaaa

SEQ ID NO: 2236209 - RNA, 19 nt, Homo sapiens
  misc_RNA (1)...(19): siRNA sense strand
ggagaauagagaugaaugu

SEQ ID NO: 2236210 - RNA, 19 nt, Homo sapiens
  misc_RNA (1)...(19): siRNA sense strand
ggagaagcuaaaagauaaa

SEQ ID NO: 2236211 - RNA, 19 nt, Homo sapiens
  misc_RNA (1)...(19): siRNA sense strand
cagaaauaguggaguacac

SEQ ID NO: 2236212 - RNA, 19 nt, Homo sapiens
  misc_RNA (1)...(19): siRNA sense strand
auucagagcauaccagaaa

SEQ ID NO: 2236213 - RNA, 19 nt, Homo sapiens
  misc_RNA (1)...(19): siRNA sense strand
gaggaagaagagaaggaga

SEQ ID NO: 2236214 - RNA, 19 nt, Homo sapiens
  misc_RNA (1)...(19): siRNA sense strand
ugaaaguaauccaaggcuu

SEQ ID NO: 2236215 - RNA, 19 nt, Homo sapiens
  misc_RNA (1)...(19): siRNA sense strand
cauauguugaugagaguau

SEQ ID NO: 2236216 - RNA, 19 nt, Homo sapiens
  misc_RNA (1)...(19): siRNA sense strand
ccuguaaucgaaagagcaa

SEQ ID NO: 2236217 - RNA, 19 nt, Homo sapiens
  misc_RNA (1)...(19): siRNA sense strand
cugaaagaccacaacauau

SEQ ID NO: 2236218 - RNA, 19 nt, Homo sapiens
  misc_RNA (1)...(19): siRNA sense strand
aaggagaagcuaaaagaua

SEQ ID NO: 2236219 - RNA, 19 nt, Homo sapiens
  misc_RNA (1)...(19): siRNA sense strand
cagcuagauauguggauca

SEQ ID NO: 2236220 - RNA, 19 nt, Homo sapiens
  misc_RNA (1)...(19): siRNA sense strand
augcaaguuaugagaaaca

SEQ ID NO: 2236221 - RNA, 19 nt, Homo sapiens
  misc_RNA (1)...(19): siRNA sense strand
cgaaagagcaaccagcaga

SEQ ID NO: 2236222 - RNA, 19 nt, Homo sapiens
  misc_RNA (1)...(19): siRNA sense strand
gcucagauccuggggaaua

SEQ ID NO: 2236223 - RNA, 19 nt, Homo sapiens
  misc_RNA (1)...(19): siRNA sense strand
uaucaaaagaggaagaaga

SEQ ID NO: 2236224 - RNA, 19 nt, Homo sapiens
  misc_RNA (1)...(19): siRNA sense strand
aagaggaagaagagaagga

SEQ ID NO: 2236225 - RNA, 19 nt, Homo sapiens
  misc_RNA (1)...(19): siRNA sense strand
ugggaaaucucucagaaaa

SEQ ID NO: 2236226 - RNA, 19 nt, Homo sapiens
  misc_RNA (1)...(19): siRNA sense strand
cuuucugagaggugguuua

SEQ ID NO: 2236227 - RNA, 19 nt, Homo sapiens
  misc_RNA (1)...(19): siRNA sense strand
uggaaaaguggcugaaaga

SEQ ID NO: 2236228 - RNA, 19 nt, Homo sapiens
  misc_RNA (1)...(19): siRNA sense strand
auaacaacacagcuagaua

SEQ ID NO: 2236229 - RNA, 19 nt, Homo sapiens
  misc_RNA (1)...(19): siRNA sense strand
gaaccuuacaccagcaaca

SEQ ID NO: 2236230 - RNA, 19 nt, Homo sapiens
  misc_RNA (1)...(19): siRNA sense strand
agucuugucaggagaauuu

SEQ ID NO: 2236231 - RNA, 19 nt, Homo sapiens
  misc_RNA (1)...(19): siRNA sense strand
uggauauuguucuggccaa

SEQ ID NO: 2236232 - RNA, 19 nt, Homo sapiens
  misc_RNA (1)...(19): siRNA sense strand
cagcagaaccugggaacca

SEQ ID NO: 2236233 - RNA, 19 nt, Homo sapiens
  misc_RNA (1)...(19): siRNA sense strand
ccugaagcaacuuuauaaa

SEQ ID NO: 2236234 - RNA, 19 nt, Homo sapiens
  misc_RNA (1)...(19): siRNA sense strand
gacaagaccagcagcuaau

SEQ ID NO: 2236235 - RNA, 19 nt, Homo sapiens
  misc_RNA (1)...(19): siRNA sense strand
gaacaagcguccuggggca

SEQ ID NO: 2236236 - RNA, 19 nt, Homo sapiens
  misc_RNA (1)...(19): siRNA sense strand
acucuaaagcaaugugcau

SEQ ID NO: 2236237 - RNA, 19 nt, Homo sapiens
  misc_RNA (1)...(19): siRNA sense strand
gugaguuguauucgggcua

SEQ ID NO: 2236238 - RNA, 19 nt, Homo sapiens
  misc_RNA (1)...(19): siRNA sense strand
gugcagaagcccaguuacu

SEQ ID NO: 2236239 - RNA, 19 nt, Homo sapiens
  misc_RNA (1)...(19): siRNA sense strand
ucaaggagaagauugcaaa

SEQ ID NO: 2236240 - RNA, 19 nt, Homo sapiens
  misc_RNA (1)...(19): siRNA sense strand
gauugcaaaguaugguaua

SEQ ID NO: 2236241 - RNA, 19 nt, Homo sapiens
  misc_RNA (1)...(19): siRNA sense strand
uuaugacacucuaaagcaa

SEQ ID NO: 2236242 - RNA, 19 nt, Homo sapiens
  misc_RNA (1)...(19): siRNA sense strand
ggggagaggaauuugagaa

SEQ ID NO: 2236243 - RNA, 19 nt, Homo sapiens
  misc_RNA (1)...(19): siRNA sense strand
uuucauugaucaaagccaa

SEQ ID NO: 2236244 - RNA, 19 nt, Homo sapiens
  misc_RNA (1)...(19): siRNA sense strand
aaauccacauaauggcaaa

SEQ ID NO: 2236245 - RNA, 19 nt, Homo sapiens
  misc_RNA (1)...(19): siRNA sense strand
gcagcaauugaaacauaua

SEQ ID NO: 2236246 - RNA, 19 nt, Homo sapiens
  misc_RNA (1)...(19): siRNA sense strand
caguaugauauguggaaug

SEQ ID NO: 2236247 - RNA, 19 nt, Homo sapiens
  misc_RNA (1)...(19): siRNA sense strand
gcagagucuugucaggaga

SEQ ID NO: 2236248 - RNA, 19 nt, Homo sapiens
  misc_RNA (1)...(19): siRNA sense strand
uggcaugaagagaugaaaa

SEQ ID NO: 2236249 - RNA, 19 nt, Homo sapiens
  misc_RNA (1)...(19): siRNA sense strand
ugauggaagaccucuauaa

SEQ ID NO: 2236250 - RNA, 19 nt, Homo sapiens
  misc_RNA (1)...(19): siRNA sense strand
ucacaucagaacacacaua

SEQ ID NO: 2236251 - RNA, 19 nt, Homo sapiens
  misc_RNA (1)...(19): siRNA sense strand
uuuggagaauagagaugaa

SEQ ID NO: 2236252 - RNA, 19 nt, Homo sapiens
  misc_RNA (1)...(19): siRNA sense strand
ucuaacuugcacaaagaaa

SEQ ID NO: 2236253 - RNA, 19 nt, Homo sapiens
  misc_RNA (1)...(19): siRNA sense strand
ugaugcagcaauugaaaca

SEQ ID NO: 2236254 - RNA, 19 nt, Homo sapiens
  misc_RNA (1)...(19): siRNA sense strand
aggaagaagagaaggagag

SEQ ID NO: 2236255 - RNA, 19 nt, Homo sapiens
  misc_RNA (1)...(19): siRNA sense strand
ccaucggaggagagaguaa

SEQ ID NO: 2236256 - RNA, 19 nt, Homo sapiens
  misc_RNA (1)...(19): siRNA sense strand
acauugaguuuguggcaga

SEQ ID NO: 2236257 - RNA, 19 nt, Homo sapiens
  misc_RNA (1)...(19): siRNA sense strand
cggaggagagaguaagaga

SEQ ID NO: 2236258 - RNA, 19 nt, Homo sapiens
  misc_RNA (1)...(19): siRNA sense strand
aagcgauggcauaguaaau

SEQ ID NO: 2236259 - RNA, 19 nt, Homo sapiens
  misc_RNA (1)...(19): siRNA sense strand
gugucaagaagaaggcaga

SEQ ID NO: 2236260 - RNA, 19 nt, Homo sapiens
  misc_RNA (1)...(19): siRNA sense strand
aaaacuugguggagcgauu

SEQ ID NO: 2236261 - RNA, 19 nt, Homo sapiens
  misc_RNA (1)...(19): siRNA sense strand
cugugaagcucauugggau

SEQ ID NO: 2236262 - RNA, 19 nt, Homo sapiens
  misc_RNA (1)...(19): siRNA sense strand
gcucaagaaacgaggacug

SEQ ID NO: 2236263 - RNA, 19 nt, Homo sapiens
  misc_RNA (1)...(19): siRNA sense strand
gucaaguccaacagagaau

SEQ ID NO: 2236264 - RNA, 19 nt, Homo sapiens
  misc_RNA (1)...(19): siRNA sense strand
agagaguaggcgaguauca

SEQ ID NO: 2236265 - RNA, 19 nt, Homo sapiens
  misc_RNA (1)...(19): siRNA sense strand
ccaucgaguaccaugauau

SEQ ID NO: 2236266 - RNA, 19 nt, Homo sapiens
  misc_RNA (1)...(19): siRNA sense strand
uuagcagagaugaggguuu

SEQ ID NO: 2236267 - RNA, 19 nt, Homo sapiens
  misc_RNA (1)...(19): siRNA sense strand
cacuggaaggaaagacuaa

SEQ ID NO: 2236268 - RNA, 19 nt, Homo sapiens
  misc_RNA (1)...(19): siRNA sense strand
agauguauaagaaggcaga

SEQ ID NO: 2236269 - RNA, 19 nt, Homo sapiens
  misc_RNA (1)...(19): siRNA sense strand
ggguuuacacugugauuuu

SEQ ID NO: 2236270 - RNA, 19 nt, Homo sapiens
  misc_RNA (1)...(19): siRNA sense strand
gaucaucacuccagggaca

SEQ ID NO: 2236271 - RNA, 19 nt, Homo sapiens
  misc_RNA (1)...(19): siRNA sense strand
gcaaauauccaauggguac

SEQ ID NO: 2236272 - RNA, 19 nt, Homo sapiens
  misc_RNA (1)...(19): siRNA sense strand
ugcaagaacuccuggaaca

SEQ ID NO: 2236273 - RNA, 19 nt, Homo sapiens
  misc_RNA (1)...(19): siRNA sense strand
uuucaaagggauugguuau

SEQ ID NO: 2236274 - RNA, 19 nt, Homo sapiens
  misc_RNA (1)...(19): siRNA sense strand
ggcaaauauccaaugggua

SEQ ID NO: 2236275 - RNA, 19 nt, Homo sapiens
  misc_RNA (1)...(19): siRNA sense strand
uggugaagcugcuggagga

SEQ ID NO: 2236276 - RNA, 19 nt, Homo sapiens
  misc_RNA (1)...(19): siRNA sense strand
gcgucaagaccucuggcaa

SEQ ID NO: 2236277 - RNA, 19 nt, Homo sapiens
  misc_RNA (1)...(19): siRNA sense strand
cgagcuucguuucgggauu

SEQ ID NO: 2236278 - RNA, 19 nt, Homo sapiens
  misc_RNA (1)...(19): siRNA sense strand
ggggcaagaagguggauuu

SEQ ID NO: 2236279 - RNA, 19 nt, Homo sapiens
  misc_RNA (1)...(19): siRNA sense strand
caucauggccugggcgcua

SEQ ID NO: 2236280 - RNA, 19 nt, Homo sapiens
  misc_RNA (1)...(19): siRNA sense strand
augcagaagcgauagccaa

SEQ ID NO: 2236281 - RNA, 19 nt, Homo sapiens
  misc_RNA (1)...(19): siRNA sense strand
gggugguucuggaggaucu

SEQ ID NO: 2236282 - RNA, 19 nt, Homo sapiens
  misc_RNA (1)...(19): siRNA sense strand
ggaaaggcgucaagaccuc

SEQ ID NO: 2236283 - RNA, 19 nt, Homo sapiens
  misc_RNA (1)...(19): siRNA sense strand
cugcagauccaccggucua

SEQ ID NO: 2236284 - RNA, 19 nt, Homo sapiens
  misc_RNA (1)...(19): siRNA sense strand
gggcaaauauccaaugggu

SEQ ID NO: 2236285 - RNA, 19 nt, Homo sapiens
  misc_RNA (1)...(19): siRNA sense strand
ggcaaggugguguggguga

SEQ ID NO: 2236286 - RNA, 19 nt, Homo sapiens
  misc_RNA (1)...(19): siRNA sense strand
ugaaggaaaugcucggcuu

SEQ ID NO: 2236287 - RNA, 19 nt, Homo sapiens
  misc_RNA (1)...(19): siRNA sense strand
caaaguggaguccgggcaa

SEQ ID NO: 2236288 - RNA, 19 nt, Homo sapiens
  misc_RNA (1)...(19): siRNA sense strand
ggauagaugcagccgcuca

SEQ ID NO: 2236289 - RNA, 19 nt, Homo sapiens
  misc_RNA (1)...(19): siRNA sense strand
cgucaagaccucuggcaag

SEQ ID NO: 2236290 - RNA, 19 nt, Homo sapiens
  misc_RNA (1)...(19): siRNA sense strand
cacguaugcagaagcgaua

SEQ ID NO: 2236291 - RNA, 19 nt, Homo sapiens
  misc_RNA (1)...(19): siRNA sense strand
auauauagcuuaucgguug

SEQ ID NO: 2236292 - RNA, 19 nt, Homo sapiens
  misc_RNA (1)...(19): siRNA sense strand
gggagaagcagcugcacca

SEQ ID NO: 2236293 - RNA, 19 nt, Homo sapiens
  misc_RNA (1)...(19): siRNA sense strand
cugaaugagaccacggaga

SEQ ID NO: 2236294 - RNA, 19 nt, Homo sapiens
  misc_RNA (1)...(19): siRNA sense strand
ggucaaggugagcggcaca

SEQ ID NO: 2236295 - RNA, 19 nt, Homo sapiens
  misc_RNA (1)...(19): siRNA sense strand
gagaagaaggucacccgaa

SEQ ID NO: 2236296 - RNA, 19 nt, Homo sapiens
  misc_RNA (1)...(19): siRNA sense strand
augccaagaugaagaccau

SEQ ID NO: 2236297 - RNA, 19 nt, Homo sapiens
  misc_RNA (1)...(19): siRNA sense strand
gugacaguaagcaggacaa

SEQ ID NO: 2236298 - RNA, 19 nt, Homo sapiens
  misc_RNA (1)...(19): siRNA sense strand
caaaccagacagagccgua

SEQ ID NO: 2236299 - RNA, 19 nt, Homo sapiens
  misc_RNA (1)...(19): siRNA sense strand
aggugaaguccucuggaau

SEQ ID NO: 2236300 - RNA, 19 nt, Homo sapiens
  misc_RNA (1)...(19): siRNA sense strand
cggagaagacugaggagga

SEQ ID NO: 2236301 - RNA, 19 nt, Homo sapiens
  misc_RNA (1)...(19): siRNA sense strand
aggaugaggaggaggagga

SEQ ID NO: 2236302 - RNA, 19 nt, Homo sapiens
  misc_RNA (1)...(19): siRNA sense strand
aggaggaggaugaggagga

SEQ ID NO: 2236303 - RNA, 19 nt, Homo sapiens
  misc_RNA (1)...(19): siRNA sense strand
ggggagaaguccagcacga

SEQ ID NO: 2236304 - RNA, 19 nt, Homo sapiens
  misc_RNA (1)...(19): siRNA sense strand
aggaggaugaggaggagga

SEQ ID NO: 2236305 - RNA, 19 nt, Homo sapiens
  misc_RNA (1)...(19): siRNA sense strand
gcaaggggaaggagaugaa

SEQ ID NO: 2236306 - RNA, 19 nt, Homo sapiens
  misc_RNA (1)...(19): siRNA sense strand
gccaagaugaagacggcua

SEQ ID NO: 2236307 - RNA, 19 nt, Homo sapiens
  misc_RNA (1)...(19): siRNA sense strand
aggaggagccccuggacua

SEQ ID NO: 2236308 - RNA, 19 nt, Homo sapiens
  misc_RNA (1)...(19): siRNA sense strand
acacuuuccugcugggcuu

SEQ ID NO: 2236309 - RNA, 19 nt, Homo sapiens
  misc_RNA (1)...(19): siRNA sense strand
agaugaagaccgucaccaa

SEQ ID NO: 2236310 - RNA, 19 nt, Homo sapiens
  misc_RNA (1)...(19): siRNA sense strand
cggacuaugcggagaagau

SEQ ID NO: 2236311 - RNA, 19 nt, Homo sapiens
  misc_RNA (1)...(19): siRNA sense strand
cagaggagaccguggacuu

SEQ ID NO: 2236312 - RNA, 19 nt, Homo sapiens
  misc_RNA (1)...(19): siRNA sense strand
gagaugaagaagaacccua

SEQ ID NO: 2236313 - RNA, 19 nt, Homo sapiens
  misc_RNA (1)...(19): siRNA sense strand
aagaagaacccuaugacca

SEQ ID NO: 2236314 - RNA, 19 nt, Homo sapiens
  misc_RNA (1)...(19): siRNA sense strand
uaugaagacaugaaggaga

SEQ ID NO: 2236315 - RNA, 19 nt, Homo sapiens
  misc_RNA (1)...(19): siRNA sense strand
agaaguucauggucggaga

SEQ ID NO: 2236316 - RNA, 19 nt, Homo sapiens
  misc_RNA (1)...(19): siRNA sense strand
ggagaaguguccuacggau

SEQ ID NO: 2236317 - RNA, 19 nt, Homo sapiens
  misc_RNA (1)...(19): siRNA sense strand
gagaaguguccuacggauc

SEQ ID NO: 2236318 - RNA, 19 nt, Homo sapiens
  misc_RNA (1)...(19): siRNA sense strand
cggacuaugcggagaagau

SEQ ID NO: 2236319 - RNA, 19 nt, Homo sapiens
  misc_RNA (1)...(19): siRNA sense strand
cagaggagaccguggacuu

SEQ ID NO: 2236320 - RNA, 19 nt, Homo sapiens
  misc_RNA (1)...(19): siRNA sense strand
gagaugaagaagaacccua

SEQ ID NO: 2236321 - RNA, 19 nt, Homo sapiens
  misc_RNA (1)...(19): siRNA sense strand
aagaagaacccuaugacca

SEQ ID NO: 2236322 - RNA, 19 nt, Homo sapiens
  misc_RNA (1)...(19): siRNA sense strand
uaugaagacaugaaggaga

SEQ ID NO: 2236323 - RNA, 19 nt, Homo sapiens
  misc_RNA (1)...(19): siRNA sense strand
agaaguucauggucggaga

SEQ ID NO: 2236324 - RNA, 19 nt, Homo sapiens
  misc_RNA (1)...(19): siRNA sense strand
ggagaaguguccuacggau

SEQ ID NO: 2236325 - RNA, 19 nt, Homo sapiens
  misc_RNA (1)...(19): siRNA sense strand
gagaaguguccuacggauc

SEQ ID NO: 2236326 - RNA, 19 nt, Homo sapiens
  misc_RNA (1)...(19): siRNA sense strand
cggacuaugcggagaagau

SEQ ID NO: 2236327 - RNA, 19 nt, Homo sapiens
  misc_RNA (1)...(19): siRNA sense strand
cagaggagaccguggacuu

SEQ ID NO: 2236328 - RNA, 19 nt, Homo sapiens
  misc_RNA (1)...(19): siRNA sense strand
gagaugaagaagaacccua

SEQ ID NO: 2236329 - RNA, 19 nt, Homo sapiens
  misc_RNA (1)...(19): siRNA sense strand
aagaagaacccuaugacca

SEQ ID NO: 2236330 - RNA, 19 nt, Homo sapiens
  misc_RNA (1)...(19): siRNA sense strand
uaugaagacaugaaggaga

SEQ ID NO: 2236331 - RNA, 19 nt, Homo sapiens
  misc_RNA (1)...(19): siRNA sense strand
agaaguucauggucggaga

SEQ ID NO: 2236332 - RNA, 19 nt, Homo sapiens
  misc_RNA (1)...(19): siRNA sense strand
ggagaaguguccuacggau

SEQ ID NO: 2236333 - RNA, 19 nt, Homo sapiens
  misc_RNA (1)...(19): siRNA sense strand
gagaaguguccuacggauc

SEQ ID NO: 2236334 - RNA, 19 nt, Homo sapiens
  misc_RNA (1)...(19): siRNA sense strand
cggacuaugcggagaagau

SEQ ID NO: 2236335 - RNA, 19 nt, Homo sapiens
  misc_RNA (1)...(19): siRNA sense strand
cagaggagaccguggacuu

SEQ ID NO: 2236336 - RNA, 19 nt, Homo sapiens
  misc_RNA (1)...(19): siRNA sense strand
gagaugaagaagaacccua

SEQ ID NO: 2236337 - RNA, 19 nt, Homo sapiens
  misc_RNA (1)...(19): siRNA sense strand
aagaagaacccuaugacca

SEQ ID NO: 2236338 - RNA, 19 nt, Homo sapiens
  misc_RNA (1)...(19): siRNA sense strand
uaugaagacaugaaggaga

SEQ ID NO: 2236339 - RNA, 19 nt, Homo sapiens
  misc_RNA (1)...(19): siRNA sense strand
agaaguucauggucggaga

SEQ ID NO: 2236340 - RNA, 19 nt, Homo sapiens
  misc_RNA (1)...(19): siRNA sense strand
ggagaaguguccuacggau

SEQ ID NO: 2236341 - RNA, 19 nt, Homo sapiens
  misc_RNA (1)...(19): siRNA sense strand
gagaaguguccuacggauc

SEQ ID NO: 2236342 - RNA, 19 nt, Homo sapiens
  misc_RNA (1)...(19): siRNA sense strand
cggacuaugcggagaagau

SEQ ID NO: 2236343 - RNA, 19 nt, Homo sapiens
  misc_RNA (1)...(19): siRNA sense strand
cagaggagaccguggacuu

SEQ ID NO: 2236344 - RNA, 19 nt, Homo sapiens
  misc_RNA (1)...(19): siRNA sense strand
gagaugaagaagaacccua

SEQ ID NO: 2236345 - RNA, 19 nt, Homo sapiens
  misc_RNA (1)...(19): siRNA sense strand
aagaagaacccuaugacca

SEQ ID NO: 2236346 - RNA, 19 nt, Homo sapiens
  misc_RNA (1)...(19): siRNA sense strand
uaugaagacaugaaggaga

SEQ ID NO: 2236347 - RNA, 19 nt, Homo sapiens
  misc_RNA (1)...(19): siRNA sense strand
agaaguucauggucggaga

SEQ ID NO: 2236348 - RNA, 19 nt, Homo sapiens
  misc_RNA (1)...(19): siRNA sense strand
ggagaaguguccuacggau

SEQ ID NO: 2236349 - RNA, 19 nt, Homo sapiens
  misc_RNA (1)...(19): siRNA sense strand
gagaaguguccuacggauc

SEQ ID NO: 2236350 - RNA, 19 nt, Homo sapiens
  misc_RNA (1)...(19): siRNA sense strand
ccaaaagggagauucaaaa

SEQ ID NO: 2236351 - RNA, 19 nt, Homo sapiens
  misc_RNA (1)...(19): siRNA sense strand
gugcaagaguggugggagc

SEQ ID NO: 2236352 - RNA, 19 nt, Homo sapiens
  misc_RNA (1)...(19): siRNA sense strand
gguaccagcacgugcaaga

SEQ ID NO: 2236353 - RNA, 19 nt, Homo sapiens
  misc_RNA (1)...(19): siRNA sense strand
uaugaagacaugaaggaga

SEQ ID NO: 2236354 - RNA, 19 nt, Homo sapiens
  misc_RNA (1)...(19): siRNA sense strand
cacccugggaccugggaaa

SEQ ID NO: 2236355 - RNA, 19 nt, Homo sapiens
  misc_RNA (1)...(19): siRNA sense strand
acgcaaaggauguggcggu

SEQ ID NO: 2236356 - RNA, 19 nt, Homo sapiens
  misc_RNA (1)...(19): siRNA sense strand
ccaaaagggagauucaaaa

SEQ ID NO: 2236357 - RNA, 19 nt, Homo sapiens
  misc_RNA (1)...(19): siRNA sense strand
gugcaagaguggugggagc

SEQ ID NO: 2236358 - RNA, 19 nt, Homo sapiens
  misc_RNA (1)...(19): siRNA sense strand
gguaccagcacgugcaaga

SEQ ID NO: 2236359 - RNA, 19 nt, Homo sapiens
  misc_RNA (1)...(19): siRNA sense strand
uaugaagacaugaaggaga

SEQ ID NO: 2236360 - RNA, 19 nt, Homo sapiens
  misc_RNA (1)...(19): siRNA sense strand
cacccugggaccugggaaa

SEQ ID NO: 2236361 - RNA, 19 nt, Homo sapiens
  misc_RNA (1)...(19): siRNA sense strand
acgcaaaggauguggcggu

SEQ ID NO: 2236362 - RNA, 19 nt, Homo sapiens
  misc_RNA (1)...(19): siRNA sense strand
agguguugguugagaacuu

SEQ ID NO: 2236363 - RNA, 19 nt, Homo sapiens
  misc_RNA (1)...(19): siRNA sense strand
gagacgaacugaauggcuu

SEQ ID NO: 2236364 - RNA, 19 nt, Homo sapiens
  misc_RNA (1)...(19): siRNA sense strand
ccugaaaagcugaacgaga

SEQ ID NO: 2236365 - RNA, 19 nt, Homo sapiens
  misc_RNA (1)...(19): siRNA sense strand
cugaaaugguacuccacau

SEQ ID NO: 2236366 - RNA, 19 nt, Homo sapiens
  misc_RNA (1)...(19): siRNA sense strand
cgucggguuuggaguucaa

SEQ ID NO: 2236367 - RNA, 19 nt, Homo sapiens
  misc_RNA (1)...(19): siRNA sense strand
ccgaagagaggcggagaga

SEQ ID NO: 2236368 - RNA, 19 nt, Homo sapiens
  misc_RNA (1)...(19): siRNA sense strand
gaagcuucugagagaggua

SEQ ID NO: 2236369 - RNA, 19 nt, Homo sapiens
  misc_RNA (1)...(19): siRNA sense strand
ccgccagcuuucagauuca

SEQ ID NO: 2236370 - RNA, 19 nt, Homo sapiens
  misc_RNA (1)...(19): siRNA sense strand
gggaaagccaaauggagcu

SEQ ID NO: 2236371 - RNA, 19 nt, Homo sapiens
  misc_RNA (1)...(19): siRNA sense strand
gugaaacacugcaagcguu

SEQ ID NO: 2236372 - RNA, 19 nt, Homo sapiens
  misc_RNA (1)...(19): siRNA sense strand
agguguugguugagaacuu

SEQ ID NO: 2236373 - RNA, 19 nt, Homo sapiens
  misc_RNA (1)...(19): siRNA sense strand
gagacgaacugaauggcuu

SEQ ID NO: 2236374 - RNA, 19 nt, Homo sapiens
  misc_RNA (1)...(19): siRNA sense strand
ccugaaaagcugaacgaga

SEQ ID NO: 2236375 - RNA, 19 nt, Homo sapiens
  misc_RNA (1)...(19): siRNA sense strand
cugaaaugguacuccacau

SEQ ID NO: 2236376 - RNA, 19 nt, Homo sapiens
  misc_RNA (1)...(19): siRNA sense strand
cgucggguuuggaguucaa

SEQ ID NO: 2236377 - RNA, 19 nt, Homo sapiens
  misc_RNA (1)...(19): siRNA sense strand
ccgaagagaggcggagaga

SEQ ID NO: 2236378 - RNA, 19 nt, Homo sapiens
  misc_RNA (1)...(19): siRNA sense strand
gaagcuucugagagaggua

SEQ ID NO: 2236379 - RNA, 19 nt, Homo sapiens
  misc_RNA (1)...(19): siRNA sense strand
ccgccagcuuucagauuca

SEQ ID NO: 2236380 - RNA, 19 nt, Homo sapiens
  misc_RNA (1)...(19): siRNA sense strand
gggaaagccaaauggagcu

SEQ ID NO: 2236381 - RNA, 19 nt, Homo sapiens
  misc_RNA (1)...(19): siRNA sense strand
gugaaacacugcaagcguu

SEQ ID NO: 2236382 - RNA, 19 nt, Homo sapiens
  misc_RNA (1)...(19): siRNA sense strand
ggaaauuucucaaggagca

SEQ ID NO: 2236383 - RNA, 19 nt, Homo sapiens
  misc_RNA (1)...(19): siRNA sense strand
augcgagauuugugaggua

SEQ ID NO: 2236384 - RNA, 19 nt, Homo sapiens
  misc_RNA (1)...(19): siRNA sense strand
cccucaaacuuguuggaau

SEQ ID NO: 2236385 - RNA, 19 nt, Homo sapiens
  misc_RNA (1)...(19): siRNA sense strand
uggagaaagcccagaaaau

SEQ ID NO: 2236386 - RNA, 19 nt, Homo sapiens
  misc_RNA (1)...(19): siRNA sense strand
ugacagaaccuacugggaa

SEQ ID NO: 2236387 - RNA, 19 nt, Homo sapiens
  misc_RNA (1)...(19): siRNA sense strand
ugugagaaucaaugaaaca

SEQ ID NO: 2236388 - RNA, 19 nt, Homo sapiens
  misc_RNA (1)...(19): siRNA sense strand
guaguuacguuguccgcaa

SEQ ID NO: 2236389 - RNA, 19 nt, Homo sapiens
  misc_RNA (1)...(19): siRNA sense strand
acuucugaguggaggcgaa

SEQ ID NO: 2236390 - RNA, 19 nt, Homo sapiens
  misc_RNA (1)...(19): siRNA sense strand
cgacaagcuagaaaauaaa

SEQ ID NO: 2236391 - RNA, 19 nt, Homo sapiens
  misc_RNA (1)...(19): siRNA sense strand
ggauauuaacaaagacucu

SEQ ID NO: 2236392 - RNA, 19 nt, Homo sapiens
  misc_RNA (1)...(19): siRNA sense strand
ccucagugugauggagaaa

SEQ ID NO: 2236393 - RNA, 19 nt, Homo sapiens
  misc_RNA (1)...(19): siRNA sense strand
cgucaauuacucugugaga

SEQ ID NO: 2236394 - RNA, 19 nt, Homo sapiens
  misc_RNA (1)...(19): siRNA sense strand
auccaaacccugaugcaaa

SEQ ID NO: 2236395 - RNA, 19 nt, Homo sapiens
  misc_RNA (1)...(19): siRNA sense strand
ugugugaagaagagucuaa

SEQ ID NO: 2236396 - RNA, 19 nt, Homo sapiens
  misc_RNA (1)...(19): siRNA sense strand
aagccaacuaugcgagauu

SEQ ID NO: 2236397 - RNA, 19 nt, Homo sapiens
  misc_RNA (1)...(19): siRNA sense strand
gagccaaggagcugguagu

SEQ ID NO: 2236398 - RNA, 19 nt, Homo sapiens
  misc_RNA (1)...(19): siRNA sense strand
gucguaacgcugaggaaaa

SEQ ID NO: 2236399 - RNA, 19 nt, Homo sapiens
  misc_RNA (1)...(19): siRNA sense strand
aauacagugcucacggaaa

SEQ ID NO: 2236400 - RNA, 19 nt, Homo sapiens
  misc_RNA (1)...(19): siRNA sense strand
cacauuuagcacaggagaa

SEQ ID NO: 2236401 - RNA, 19 nt, Homo sapiens
  misc_RNA (1)...(19): siRNA sense strand
caccaaugucacugugcua

SEQ ID NO: 2236402 - RNA, 19 nt, Homo sapiens
  misc_RNA (1)...(19): siRNA sense strand
caaagcagaugaaggcagu

SEQ ID NO: 2236403 - RNA, 19 nt, Homo sapiens
  misc_RNA (1)...(19): siRNA sense strand
gacagaaccuacugggaac

SEQ ID NO: 2236404 - RNA, 19 nt, Homo sapiens
  misc_RNA (1)...(19): siRNA sense strand
uugugagguaagugaagaa

SEQ ID NO: 2236405 - RNA, 19 nt, Homo sapiens
  misc_RNA (1)...(19): siRNA sense strand
uguuaacaguguagggaaa

SEQ ID NO: 2236406 - RNA, 19 nt, Homo sapiens
  misc_RNA (1)...(19): siRNA sense strand
gggacaaucugaaaggcaa

SEQ ID NO: 2236407 - RNA, 19 nt, Homo sapiens
  misc_RNA (1)...(19): siRNA sense strand
cuguagcaguggugaagaa

SEQ ID NO: 2236408 - RNA, 19 nt, Homo sapiens
  misc_RNA (1)...(19): siRNA sense strand
ccaagauguaccugggcua

SEQ ID NO: 2236409 - RNA, 19 nt, Homo sapiens
  misc_RNA (1)...(19): siRNA sense strand
ccacaagauauuacgucaa

SEQ ID NO: 2236410 - RNA, 19 nt, Homo sapiens
  misc_RNA (1)...(19): siRNA sense strand
ccuugaugguaccaggaaa

SEQ ID NO: 2236411 - RNA, 19 nt, Homo sapiens
  misc_RNA (1)...(19): siRNA sense strand
augucaaggcuguugguaa

SEQ ID NO: 2236412 - RNA, 19 nt, Homo sapiens
  misc_RNA (1)...(19): siRNA sense strand
uugagaaagcaguggccaa

SEQ ID NO: 2236413 - RNA, 19 nt, Homo sapiens
  misc_RNA (1)...(19): siRNA sense strand
caaacaaggcugacaggga

SEQ ID NO: 2236414 - RNA, 19 nt, Homo sapiens
  misc_RNA (1)...(19): siRNA sense strand
gugcagugucggagcauga

SEQ ID NO: 2236415 - RNA, 19 nt, Homo sapiens
  misc_RNA (1)...(19): siRNA sense strand
gggaaaauagaguguguau

SEQ ID NO: 2236416 - RNA, 19 nt, Homo sapiens
  misc_RNA (1)...(19): siRNA sense strand
cuacaauaagagcgauaau

SEQ ID NO: 2236417 - RNA, 19 nt, Homo sapiens
  misc_RNA (1)...(19): siRNA sense strand
aagaauaugucaaggcugu

SEQ ID NO: 2236418 - RNA, 19 nt, Homo sapiens
  misc_RNA (1)...(19): siRNA sense strand
uggcagaaaacuacaauaa

SEQ ID NO: 2236419 - RNA, 19 nt, Homo sapiens
  misc_RNA (1)...(19): siRNA sense strand
ccaagaucaugaauggaga

SEQ ID NO: 2236420 - RNA, 19 nt, Homo sapiens
  misc_RNA (1)...(19): siRNA sense strand
guugguaaccugagaaaau

SEQ ID NO: 2236421 - RNA, 19 nt, Homo sapiens
  misc_RNA (1)...(19): siRNA sense strand
ccaauaaccugaagccugu

SEQ ID NO: 2236422 - RNA, 19 nt, Homo sapiens
  misc_RNA (1)...(19): siRNA sense strand
aacuacaauaagagcgaua

SEQ ID NO: 2236423 - RNA, 19 nt, Homo sapiens
  misc_RNA (1)...(19): siRNA sense strand
gcuguggugaagaaggaua

SEQ ID NO: 2236424 - RNA, 19 nt, Homo sapiens
  misc_RNA (1)...(19): siRNA sense strand
acacaguauguuuggccaa

SEQ ID NO: 2236425 - RNA, 19 nt, Homo sapiens
  misc_RNA (1)...(19): siRNA sense strand
cauccggaaucuacgggaa

SEQ ID NO: 2236426 - RNA, 19 nt, Homo sapiens
  misc_RNA (1)...(19): siRNA sense strand
gcgauaauugugaggauac

SEQ ID NO: 2236427 - RNA, 19 nt, Homo sapiens
  misc_RNA (1)...(19): siRNA sense strand
ggucaaaagaggauccaca

SEQ ID NO: 2236428 - RNA, 19 nt, Homo sapiens
  misc_RNA (1)...(19): siRNA sense strand
gggauguggccuuugucaa

SEQ ID NO: 2236429 - RNA, 19 nt, Homo sapiens
  misc_RNA (1)...(19): siRNA sense strand
guguuaacaguguagggaa

SEQ ID NO: 2236430 - RNA, 19 nt, Homo sapiens
  misc_RNA (1)...(19): siRNA sense strand
cgauaauugugaggauaca

SEQ ID NO: 2236431 - RNA, 19 nt, Homo sapiens
  misc_RNA (1)...(19): siRNA sense strand
uugagaacuuggcaaacaa

SEQ ID NO: 2236432 - RNA, 19 nt, Homo sapiens
  misc_RNA (1)...(19): siRNA sense strand
guagaugaauacaaggacu

SEQ ID NO: 2236433 - RNA, 19 nt, Homo sapiens
  misc_RNA (1)...(19): siRNA sense strand
uaggagaagaauaugucaa

SEQ ID NO: 2236434 - RNA, 19 nt, Homo sapiens
  misc_RNA (1)...(19): siRNA sense strand
cgguagaugaauacaagga

SEQ ID NO: 2236435 - RNA, 19 nt, Homo sapiens
  misc_RNA (1)...(19): siRNA sense strand
gaaucuacgggaaggcaca

SEQ ID NO: 2236436 - RNA, 19 nt, Homo sapiens
  misc_RNA (1)...(19): siRNA sense strand
uugucuacauagcgggcaa

SEQ ID NO: 2236437 - RNA, 19 nt, Homo sapiens
  misc_RNA (1)...(19): siRNA sense strand
cuguugguaaccugagaaa

SEQ ID NO: 2236438 - RNA, 19 nt, Homo sapiens
  misc_RNA (1)...(19): siRNA sense strand
ccauacggcaguuggcaga

SEQ ID NO: 2236439 - RNA, 19 nt, Homo sapiens
  misc_RNA (1)...(19): siRNA sense strand
cuuacuuuacugugacuua

SEQ ID NO: 2236440 - RNA, 19 nt, Homo sapiens
  misc_RNA (1)...(19): siRNA sense strand
ucaaccaggcccaggaaca

SEQ ID NO: 2236441 - RNA, 19 nt, Homo sapiens
  misc_RNA (1)...(19): siRNA sense strand
cuauuuggaagcaacguaa

SEQ ID NO: 2236442 - RNA, 19 nt, Homo sapiens
  misc_RNA (1)...(19): siRNA sense strand
agcgauaauugugaggaua

SEQ ID NO: 2236443 - RNA, 19 nt, Homo sapiens
  misc_RNA (1)...(19): siRNA sense strand
ggaaagauaaggaagcuug

SEQ ID NO: 2236444 - RNA, 19 nt, Homo sapiens
  misc_RNA (1)...(19): siRNA sense strand
caagaucaugaauggagaa

SEQ ID NO: 2236445 - RNA, 19 nt, Homo sapiens
  misc_RNA (1)...(19): siRNA sense strand
acugcagauuugaugaauu

SEQ ID NO: 2236446 - RNA, 19 nt, Homo sapiens
  misc_RNA (1)...(19): siRNA sense strand
uaauaauaggaguggugaa

SEQ ID NO: 2236447 - RNA, 19 nt, Homo sapiens
  misc_RNA (1)...(19): siRNA sense strand
gguacugcgcgcugagcaa

SEQ ID NO: 2236448 - RNA, 19 nt, Homo sapiens
  misc_RNA (1)...(19): siRNA sense strand
ggaaugugccuuucgguca

SEQ ID NO: 2236449 - RNA, 19 nt, Homo sapiens
  misc_RNA (1)...(19): siRNA sense strand
cagaccaggaacugaaaca

SEQ ID NO: 2236450 - RNA, 19 nt, Homo sapiens
  misc_RNA (1)...(19): siRNA sense strand
gcuaaauggaacagauaaa

SEQ ID NO: 2236451 - RNA, 19 nt, Homo sapiens
  misc_RNA (1)...(19): siRNA sense strand
gugcaaagaaagugaagaa

SEQ ID NO: 2236452 - RNA, 19 nt, Homo sapiens
  misc_RNA (1)...(19): siRNA sense strand
agaucaaguuguugguaaa

SEQ ID NO: 2236453 - RNA, 19 nt, Homo sapiens
  misc_RNA (1)...(19): siRNA sense strand
ggaaagaagcacaagaaaa

SEQ ID NO: 2236454 - RNA, 19 nt, Homo sapiens
  misc_RNA (1)...(19): siRNA sense strand
aguagaaggugcaggagaa

SEQ ID NO: 2236455 - RNA, 19 nt, Homo sapiens
  misc_RNA (1)...(19): siRNA sense strand
agagaagauacaagggaaa

SEQ ID NO: 2236456 - RNA, 19 nt, Homo sapiens
  misc_RNA (1)...(19): siRNA sense strand
gguuaaugcugcugacaau

SEQ ID NO: 2236457 - RNA, 19 nt, Homo sapiens
  misc_RNA (1)...(19): siRNA sense strand
cuaugaugaugaugagaaa

SEQ ID NO: 2236458 - RNA, 19 nt, Homo sapiens
  misc_RNA (1)...(19): siRNA sense strand
guguagagccugaguggua

SEQ ID NO: 2236459 - RNA, 19 nt, Homo sapiens
  misc_RNA (1)...(19): siRNA sense strand
uaaugaugcuggugguaaa

SEQ ID NO: 2236460 - RNA, 19 nt, Homo sapiens
  misc_RNA (1)...(19): siRNA sense strand
aggaguggcuugugggaau

SEQ ID NO: 2236461 - RNA, 19 nt, Homo sapiens
  misc_RNA (1)...(19): siRNA sense strand
agaagaugauucagcuaaa

SEQ ID NO: 2236462 - RNA, 19 nt, Homo sapiens
  misc_RNA (1)...(19): siRNA sense strand
ugauauuaacagagggaga

SEQ ID NO: 2236463 - RNA, 19 nt, Homo sapiens
  misc_RNA (1)...(19): siRNA sense strand
agauaaaacaccagcauua

SEQ ID NO: 2236464 - RNA, 19 nt, Homo sapiens
  misc_RNA (1)...(19): siRNA sense strand
ucucagaagaagaggauga

SEQ ID NO: 2236465 - RNA, 19 nt, Homo sapiens
  misc_RNA (1)...(19): siRNA sense strand
gggugaaauuuaaggcuca

SEQ ID NO: 2236466 - RNA, 19 nt, Homo sapiens
  misc_RNA (1)...(19): siRNA sense strand
cugugaaauuuguggugaa

SEQ ID NO: 2236467 - RNA, 19 nt, Homo sapiens
  misc_RNA (1)...(19): siRNA sense strand
gggcuaggaaagaaguaaa

SEQ ID NO: 2236468 - RNA, 19 nt, Homo sapiens
  misc_RNA (1)...(19): siRNA sense strand
aguagaaauuacagagcuu

SEQ ID NO: 2236469 - RNA, 19 nt, Homo sapiens
  misc_RNA (1)...(19): siRNA sense strand
aagaaguguucaucaguaa

SEQ ID NO: 2236470 - RNA, 19 nt, Homo sapiens
  misc_RNA (1)...(19): siRNA sense strand
gggcaaaauucuuaaugua

SEQ ID NO: 2236471 - RNA, 19 nt, Homo sapiens
  misc_RNA (1)...(19): siRNA sense strand
agagaauaggucaaagaaa

SEQ ID NO: 2236472 - RNA, 19 nt, Homo sapiens
  misc_RNA (1)...(19): siRNA sense strand
gaaugauaaacgugaagua

SEQ ID NO: 2236473 - RNA, 19 nt, Homo sapiens
  misc_RNA (1)...(19): siRNA sense strand
cagaagaggaugaaacaca

SEQ ID NO: 2236474 - RNA, 19 nt, Homo sapiens
  misc_RNA (1)...(19): siRNA sense strand
cauaaacagaucauggaaa

SEQ ID NO: 2236475 - RNA, 19 nt, Homo sapiens
  misc_RNA (1)...(19): siRNA sense strand
gcuaaagaagcaaaggaau

SEQ ID NO: 2236476 - RNA, 19 nt, Homo sapiens
  misc_RNA (1)...(19): siRNA sense strand
gcauuuaguaagaagaaga

SEQ ID NO: 2236477 - RNA, 19 nt, Homo sapiens
  misc_RNA (1)...(19): siRNA sense strand
ugaagaagaagaaggguga

SEQ ID NO: 2236478 - RNA, 19 nt, Homo sapiens
  misc_RNA (1)...(19): siRNA sense strand
gaugaauccaagucagaaa

SEQ ID NO: 2236479 - RNA, 19 nt, Homo sapiens
  misc_RNA (1)...(19): siRNA sense strand
cagaaagugauuuggaaga

SEQ ID NO: 2236480 - RNA, 19 nt, Homo sapiens
  misc_RNA (1)...(19): siRNA sense strand
agaagauugaugacagaaa

SEQ ID NO: 2236481 - RNA, 19 nt, Homo sapiens
  misc_RNA (1)...(19): siRNA sense strand
gugcaggagaagaggcauu

SEQ ID NO: 2236482 - RNA, 19 nt, Homo sapiens
  misc_RNA (1)...(19): siRNA sense strand
uagagaagauacaagggaa

SEQ ID NO: 2236483 - RNA, 19 nt, Homo sapiens
  misc_RNA (1)...(19): siRNA sense strand
ugacaguaaugaagaagau

SEQ ID NO: 2236484 - RNA, 19 nt, Homo sapiens
  misc_RNA (1)...(19): siRNA sense strand
ugaaagacaaauuggauga

SEQ ID NO: 2236485 - RNA, 19 nt, Homo sapiens
  misc_RNA (1)...(19): siRNA sense strand
agaaaguaguagaggcugu

SEQ ID NO: 2236486 - RNA, 19 nt, Homo sapiens
  misc_RNA (1)...(19): siRNA sense strand
ggauuaugugguagaucaa

SEQ ID NO: 2236487 - RNA, 19 nt, Homo sapiens
  misc_RNA (1)...(19): siRNA sense strand
cauggaaaaugcugaaaua

SEQ ID NO: 2236488 - RNA, 19 nt, Homo sapiens
  misc_RNA (1)...(19): siRNA sense strand
gggaauguugggagcagaa

SEQ ID NO: 2236489 - RNA, 19 nt, Homo sapiens
  misc_RNA (1)...(19): siRNA sense strand
agaauaggucaaagaaaga

SEQ ID NO: 2236490 - RNA, 19 nt, Homo sapiens
  misc_RNA (1)...(19): siRNA sense strand
ggauaaaguggaaucucaa

SEQ ID NO: 2236491 - RNA, 19 nt, Homo sapiens
  misc_RNA (1)...(19): siRNA sense strand
agaacacaagguagagaaa

SEQ ID NO: 2236492 - RNA, 19 nt, Homo sapiens
  misc_RNA (1)...(19): siRNA sense strand
cagacauggaugaauaaua

SEQ ID NO: 2236493 - RNA, 19 nt, Homo sapiens
  misc_RNA (1)...(19): siRNA sense strand
aggucauguuuaauggaaa

SEQ ID NO: 2236494 - RNA, 19 nt, Homo sapiens
  misc_RNA (1)...(19): siRNA sense strand
uauuuguaguggacagaaa

SEQ ID NO: 2236495 - RNA, 19 nt, Homo sapiens
  misc_RNA (1)...(19): siRNA sense strand
aggaaaacauccaaaacaa

SEQ ID NO: 2236496 - RNA, 19 nt, Homo sapiens
  misc_RNA (1)...(19): siRNA sense strand
acaauaaacagagggauaa

SEQ ID NO: 2236497 - RNA, 19 nt, Homo sapiens
  misc_RNA (1)...(19): siRNA sense strand
ccucaugacuagaagggca

SEQ ID NO: 2236498 - RNA, 19 nt, Homo sapiens
  misc_RNA (1)...(19): siRNA sense strand
acagaaacacaguagaaau

SEQ ID NO: 2236499 - RNA, 19 nt, Homo sapiens
  misc_RNA (1)...(19): siRNA sense strand
gcaaagaaagugaagaaac

SEQ ID NO: 2236500 - RNA, 19 nt, Homo sapiens
  misc_RNA (1)...(19): siRNA sense strand
aaacagagggauaagaaca

SEQ ID NO: 2236501 - RNA, 19 nt, Homo sapiens
  misc_RNA (1)...(19): siRNA sense strand
ugguaaacugauugaagua

SEQ ID NO: 2236502 - RNA, 19 nt, Homo sapiens
  misc_RNA (1)...(19): siRNA sense strand
gcucagaacuuugugggaa

SEQ ID NO: 2236503 - RNA, 19 nt, Homo sapiens
  misc_RNA (1)...(19): siRNA sense strand
caacuaugaugcuagggaa

SEQ ID NO: 2236504 - RNA, 19 nt, Homo sapiens
  misc_RNA (1)...(19): siRNA sense strand
gcaaagaaaaggaaagcau

SEQ ID NO: 2236505 - RNA, 19 nt, Homo sapiens
  misc_RNA (1)...(19): siRNA sense strand
agacacaacuugaacacau

SEQ ID NO: 2236506 - RNA, 19 nt, Homo sapiens
  misc_RNA (1)...(19): siRNA sense strand
aagcauugaugaugacuau

SEQ ID NO: 2236507 - RNA, 19 nt, Homo sapiens
  misc_RNA (1)...(19): siRNA sense strand
gaaauaugaaacugugcaa

SEQ ID NO: 2236508 - RNA, 19 nt, Homo sapiens
  misc_RNA (1)...(19): siRNA sense strand
gaaagaggauuuagcggca

SEQ ID NO: 2236509 - RNA, 19 nt, Homo sapiens
  misc_RNA (1)...(19): siRNA sense strand
agaaagugauuuggaagaa

SEQ ID NO: 2236510 - RNA, 19 nt, Homo sapiens
  misc_RNA (1)...(19): siRNA sense strand
ucccaaagcuggaaggcau

SEQ ID NO: 2236511 - RNA, 19 nt, Homo sapiens
  misc_RNA (1)...(19): siRNA sense strand
ggaaacagcuuggugguga

SEQ ID NO: 2236512 - RNA, 19 nt, Homo sapiens
  misc_RNA (1)...(19): siRNA sense strand
ucaucuuuguggugggaau

SEQ ID NO: 2236513 - RNA, 19 nt, Homo sapiens
  misc_RNA (1)...(19): siRNA sense strand
uggugggaauauuuggaaa

SEQ ID NO: 2236514 - RNA, 19 nt, Homo sapiens
  misc_RNA (1)...(19): siRNA sense strand
cccaaagcuggaaggcaua

SEQ ID NO: 2236515 - RNA, 19 nt, Homo sapiens
  misc_RNA (1)...(19): siRNA sense strand
auucagaagaacaaaccaa

SEQ ID NO: 2236516 - RNA, 19 nt, Homo sapiens
  misc_RNA (1)...(19): siRNA sense strand
gggaauauuuggaaacagc

SEQ ID NO: 2236517 - RNA, 19 nt, Homo sapiens
  misc_RNA (1)...(19): siRNA sense strand
agcuauaauccaucgaaau

SEQ ID NO: 2236518 - RNA, 19 nt, Homo sapiens
  misc_RNA (1)...(19): siRNA sense strand
ucccaaagcuggaaggcau

SEQ ID NO: 2236519 - RNA, 19 nt, Homo sapiens
  misc_RNA (1)...(19): siRNA sense strand
ggaaacagcuuggugguga

SEQ ID NO: 2236520 - RNA, 19 nt, Homo sapiens
  misc_RNA (1)...(19): siRNA sense strand
ucaucuuuguggugggaau

SEQ ID NO: 2236521 - RNA, 19 nt, Homo sapiens
  misc_RNA (1)...(19): siRNA sense strand
uggugggaauauuuggaaa

SEQ ID NO: 2236522 - RNA, 19 nt, Homo sapiens
  misc_RNA (1)...(19): siRNA sense strand
cccaaagcuggaaggcaua

SEQ ID NO: 2236523 - RNA, 19 nt, Homo sapiens
  misc_RNA (1)...(19): siRNA sense strand
auucagaagaacaaaccaa

SEQ ID NO: 2236524 - RNA, 19 nt, Homo sapiens
  misc_RNA (1)...(19): siRNA sense strand
gggaauauuuggaaacagc

SEQ ID NO: 2236525 - RNA, 19 nt, Homo sapiens
  misc_RNA (1)...(19): siRNA sense strand
agcuauaauccaucgaaau

SEQ ID NO: 2236526 - RNA, 19 nt, Homo sapiens
  misc_RNA (1)...(19): siRNA sense strand
ucccaaagcuggaaggcau

SEQ ID NO: 2236527 - RNA, 19 nt, Homo sapiens
  misc_RNA (1)...(19): siRNA sense strand
ggaaacagcuuggugguga

SEQ ID NO: 2236528 - RNA, 19 nt, Homo sapiens
  misc_RNA (1)...(19): siRNA sense strand
ucaucuuuguggugggaau

SEQ ID NO: 2236529 - RNA, 19 nt, Homo sapiens
  misc_RNA (1)...(19): siRNA sense strand
uggugggaauauuuggaaa

SEQ ID NO: 2236530 - RNA, 19 nt, Homo sapiens
  misc_RNA (1)...(19): siRNA sense strand
cccaaagcuggaaggcaua

SEQ ID NO: 2236531 - RNA, 19 nt, Homo sapiens
  misc_RNA (1)...(19): siRNA sense strand
auucagaagaacaaaccaa

SEQ ID NO: 2236532 - RNA, 19 nt, Homo sapiens
  misc_RNA (1)...(19): siRNA sense strand
gggaauauuuggaaacagc

SEQ ID NO: 2236533 - RNA, 19 nt, Homo sapiens
  misc_RNA (1)...(19): siRNA sense strand
agcuauaauccaucgaaau

SEQ ID NO: 2236534 - RNA, 19 nt, Homo sapiens
  misc_RNA (1)...(19): siRNA sense strand
ucccaaagcuggaaggcau

SEQ ID NO: 2236535 - RNA, 19 nt, Homo sapiens
  misc_RNA (1)...(19): siRNA sense strand
ggaaacagcuuggugguga

SEQ ID NO: 2236536 - RNA, 19 nt, Homo sapiens
  misc_RNA (1)...(19): siRNA sense strand
ucaucuuuguggugggaau

SEQ ID NO: 2236537 - RNA, 19 nt, Homo sapiens
  misc_RNA (1)...(19): siRNA sense strand
uggugggaauauuuggaaa

SEQ ID NO: 2236538 - RNA, 19 nt, Homo sapiens
  misc_RNA (1)...(19): siRNA sense strand
cccaaagcuggaaggcaua

SEQ ID NO: 2236539 - RNA, 19 nt, Homo sapiens
  misc_RNA (1)...(19): siRNA sense strand
auucagaagaacaaaccaa

SEQ ID NO: 2236540 - RNA, 19 nt, Homo sapiens
  misc_RNA (1)...(19): siRNA sense strand
gggaauauuuggaaacagc

SEQ ID NO: 2236541 - RNA, 19 nt, Homo sapiens
  misc_RNA (1)...(19): siRNA sense strand
agcuauaauccaucgaaau

SEQ ID NO: 2236542 - RNA, 19 nt, Homo sapiens
  misc_RNA (1)...(19): siRNA sense strand
ucccaaagcuggaaggcau

SEQ ID NO: 2236543 - RNA, 19 nt, Homo sapiens
  misc_RNA (1)...(19): siRNA sense strand
ggaaacagcuuggugguga

SEQ ID NO: 2236544 - RNA, 19 nt, Homo sapiens
  misc_RNA (1)...(19): siRNA sense strand
ucaucuuuguggugggaau

SEQ ID NO: 2236545 - RNA, 19 nt, Homo sapiens
  misc_RNA (1)...(19): siRNA sense strand
uggugggaauauuuggaaa

SEQ ID NO: 2236546 - RNA, 19 nt, Homo sapiens
  misc_RNA (1)...(19): siRNA sense strand
cccaaagcuggaaggcaua

SEQ ID NO: 2236547 - RNA, 19 nt, Homo sapiens
  misc_RNA (1)...(19): siRNA sense strand
auucagaagaacaaaccaa

SEQ ID NO: 2236548 - RNA, 19 nt, Homo sapiens
  misc_RNA (1)...(19): siRNA sense strand
gggaauauuuggaaacagc

SEQ ID NO: 2236549 - RNA, 19 nt, Homo sapiens
  misc_RNA (1)...(19): siRNA sense strand
agcuauaauccaucgaaau

SEQ ID NO: 2236550 - RNA, 19 nt, Homo sapiens
  misc_RNA (1)...(19): siRNA sense strand
ggaaagagauggaaggaga

SEQ ID NO: 2236551 - RNA, 19 nt, Homo sapiens
  misc_RNA (1)...(19): siRNA sense strand
ucaaaauggagaaggaaaa

SEQ ID NO: 2236552 - RNA, 19 nt, Homo sapiens
  misc_RNA (1)...(19): siRNA sense strand
uuguggaggaguugagaaa

SEQ ID NO: 2236553 - RNA, 19 nt, Homo sapiens
  misc_RNA (1)...(19): siRNA sense strand
aggaagagauugaacgugu

SEQ ID NO: 2236554 - RNA, 19 nt, Homo sapiens
  misc_RNA (1)...(19): siRNA sense strand
uggagaaggaaaagcaaaa

SEQ ID NO: 2236555 - RNA, 19 nt, Homo sapiens
  misc_RNA (1)...(19): siRNA sense strand
auauuaaggaugucagcaa

SEQ ID NO: 2236556 - RNA, 19 nt, Homo sapiens
  misc_RNA (1)...(19): siRNA sense strand
caccaagaaucgauggaca

SEQ ID NO: 2236557 - RNA, 19 nt, Homo sapiens
  misc_RNA (1)...(19): siRNA sense strand
acagagacaacaagcacaa

SEQ ID NO: 2236558 - RNA, 19 nt, Homo sapiens
  misc_RNA (1)...(19): siRNA sense strand
ugaaagagcuaacagagga

SEQ ID NO: 2236559 - RNA, 19 nt, Homo sapiens
  misc_RNA (1)...(19): siRNA sense strand
uuacagaacuuuaaccuga

SEQ ID NO: 2236560 - RNA, 19 nt, Homo sapiens
  misc_RNA (1)...(19): siRNA sense strand
cgauuauaaagaucagcaa

SEQ ID NO: 2236561 - RNA, 19 nt, Homo sapiens
  misc_RNA (1)...(19): siRNA sense strand
gaaacuaccucauucccaa

SEQ ID NO: 2236562 - RNA, 19 nt, Homo sapiens
  misc_RNA (1)...(19): siRNA sense strand
auggauaugaaguggugaa

SEQ ID NO: 2236563 - RNA, 19 nt, Homo sapiens
  misc_RNA (1)...(19): siRNA sense strand
uggagaaaguaaaagaaca

SEQ ID NO: 2236564 - RNA, 19 nt, Homo sapiens
  misc_RNA (1)...(19): siRNA sense strand
ugaucaaaauggagaagga

SEQ ID NO: 2236565 - RNA, 19 nt, Homo sapiens
  misc_RNA (1)...(19): siRNA sense strand
cuucugugcuacaugacaa

SEQ ID NO: 2236566 - RNA, 19 nt, Homo sapiens
  misc_RNA (1)...(19): siRNA sense strand
ccacuggcugaaagagcua

SEQ ID NO: 2236567 - RNA, 19 nt, Homo sapiens
  misc_RNA (1)...(19): siRNA sense strand
cuaaaguccaggaagagau

SEQ ID NO: 2236568 - RNA, 19 nt, Homo sapiens
  misc_RNA (1)...(19): siRNA sense strand
accaagaaucgauggacau

SEQ ID NO: 2236569 - RNA, 19 nt, Homo sapiens
  misc_RNA (1)...(19): siRNA sense strand
aggaaaagcaaaaccaaca

SEQ ID NO: 2236570 - RNA, 19 nt, Homo sapiens
  misc_RNA (1)...(19): siRNA sense strand
cccagaggucacagcuaaa

SEQ ID NO: 2236571 - RNA, 19 nt, Homo sapiens
  misc_RNA (1)...(19): siRNA sense strand
cuaacagaggauuuggaau

SEQ ID NO: 2236572 - RNA, 19 nt, Homo sapiens
  misc_RNA (1)...(19): siRNA sense strand
ccaaugaggagguggccaa

SEQ ID NO: 2236573 - RNA, 19 nt, Homo sapiens
  misc_RNA (1)...(19): siRNA sense strand
gcaugaacgccaagcacca

SEQ ID NO: 2236574 - RNA, 19 nt, Homo sapiens
  misc_RNA (1)...(19): siRNA sense strand
caacuauagucgagggagc

SEQ ID NO: 2236575 - RNA, 19 nt, Homo sapiens
  misc_RNA (1)...(19): siRNA sense strand
aggacgagcuguauggcca

SEQ ID NO: 2236576 - RNA, 19 nt, Homo sapiens
  misc_RNA (1)...(19): siRNA sense strand
uggcacaaaggcuggaauu

SEQ ID NO: 2236577 - RNA, 19 nt, Homo sapiens
  misc_RNA (1)...(19): siRNA sense strand
cggugauguuuguagccua

SEQ ID NO: 2236578 - RNA, 19 nt, Homo sapiens
  misc_RNA (1)...(19): siRNA sense strand
cagccauguuugucagcau

SEQ ID NO: 2236579 - RNA, 19 nt, Homo sapiens
  misc_RNA (1)...(19): siRNA sense strand
gcaucuggcugguggcucu

SEQ ID NO: 2236580 - RNA, 19 nt, Homo sapiens
  misc_RNA (1)...(19): siRNA sense strand
ccaaggaagauaagcucga

SEQ ID NO: 2236581 - RNA, 19 nt, Homo sapiens
  misc_RNA (1)...(19): siRNA sense strand
cggaggaugcgcacaguca

SEQ ID NO: 2236582 - RNA, 19 nt, Homo sapiens
  misc_RNA (1)...(19): siRNA sense strand
gcagcuuccaggaggacau

SEQ ID NO: 2236583 - RNA, 19 nt, Homo sapiens
  misc_RNA (1)...(19): siRNA sense strand
ggaaauacauccagcaggu

SEQ ID NO: 2236584 - RNA, 19 nt, Homo sapiens
  misc_RNA (1)...(19): siRNA sense strand
guggacagguauauggcua

SEQ ID NO: 2236585 - RNA, 19 nt, Homo sapiens
  misc_RNA (1)...(19): siRNA sense strand
gaggagaaaucccaggaga

SEQ ID NO: 2236586 - RNA, 19 nt, Homo sapiens
  misc_RNA (1)...(19): siRNA sense strand
aggagaaaucccaggagau

SEQ ID NO: 2236587 - RNA, 19 nt, Homo sapiens
  misc_RNA (1)...(19): siRNA sense strand
agcuaaaggccaaaagaaa

SEQ ID NO: 2236588 - RNA, 19 nt, Homo sapiens
  misc_RNA (1)...(19): siRNA sense strand
cuucauagcgagugguacu

SEQ ID NO: 2236589 - RNA, 19 nt, Homo sapiens
  misc_RNA (1)...(19): siRNA sense strand
caguggcaguuuugggaaa

SEQ ID NO: 2236590 - RNA, 19 nt, Homo sapiens
  misc_RNA (1)...(19): siRNA sense strand
caagauugucauuggaagu

SEQ ID NO: 2236591 - RNA, 19 nt, Homo sapiens
  misc_RNA (1)...(19): siRNA sense strand
augagcagcuaaaggccaa

SEQ ID NO: 2236592 - RNA, 19 nt, Homo sapiens
  misc_RNA (1)...(19): siRNA sense strand
gugcagacgccgugaaccu

SEQ ID NO: 2236593 - RNA, 19 nt, Homo sapiens
  misc_RNA (1)...(19): siRNA sense strand
agucggaagaaaagagcaa

SEQ ID NO: 2236594 - RNA, 19 nt, Homo sapiens
  misc_RNA (1)...(19): siRNA sense strand
ccaaaagaaagguugucaa

SEQ ID NO: 2236595 - RNA, 19 nt, Homo sapiens
  misc_RNA (1)...(19): siRNA sense strand
gcagaaaccuggauagacg

SEQ ID NO: 2236596 - RNA, 19 nt, Homo sapiens
  misc_RNA (1)...(19): siRNA sense strand
agaaagagcugcugguacc

SEQ ID NO: 2236597 - RNA, 19 nt, Homo sapiens
  misc_RNA (1)...(19): siRNA sense strand
agugacagaagcagccaua

SEQ ID NO: 2236598 - RNA, 19 nt, Homo sapiens
  misc_RNA (1)...(19): siRNA sense strand
gagaaagagcugcugguac

SEQ ID NO: 2236599 - RNA, 19 nt, Homo sapiens
  misc_RNA (1)...(19): siRNA sense strand
gaaccaagaccgagggaca

SEQ ID NO: 2236600 - RNA, 19 nt, Homo sapiens
  misc_RNA (1)...(19): siRNA sense strand
cugaagcgguggagagacu

SEQ ID NO: 2236601 - RNA, 19 nt, Homo sapiens
  misc_RNA (1)...(19): siRNA sense strand
gacuauaaccugaacgaca

SEQ ID NO: 2236602 - RNA, 19 nt, Homo sapiens
  misc_RNA (1)...(19): siRNA sense strand
agaaauucacucagagcuu

SEQ ID NO: 2236603 - RNA, 19 nt, Homo sapiens
  misc_RNA (1)...(19): siRNA sense strand
cugcauuaguggagacaag

SEQ ID NO: 2236604 - RNA, 19 nt, Homo sapiens
  misc_RNA (1)...(19): siRNA sense strand
ccagcugggcauugaggaa

SEQ ID NO: 2236605 - RNA, 19 nt, Homo sapiens
  misc_RNA (1)...(19): siRNA sense strand
gagcugaaguacacaggca

SEQ ID NO: 2236606 - RNA, 19 nt, Homo sapiens
  misc_RNA (1)...(19): siRNA sense strand
uggaggaaguggaagccau

SEQ ID NO: 2236607 - RNA, 19 nt, Homo sapiens
  misc_RNA (1)...(19): siRNA sense strand
acaucuucuucaugagcaa

SEQ ID NO: 2236608 - RNA, 19 nt, Homo sapiens
  misc_RNA (1)...(19): siRNA sense strand
gcugaaguacacaggcaau

SEQ ID NO: 2236609 - RNA, 19 nt, Homo sapiens
  misc_RNA (1)...(19): siRNA sense strand
uuuaaagccaaaugggaga

SEQ ID NO: 2236610 - RNA, 19 nt, Homo sapiens
  misc_RNA (1)...(19): siRNA sense strand
ccaaaugggagaugcccuu

SEQ ID NO: 2236611 - RNA, 19 nt, Homo sapiens
  misc_RNA (1)...(19): siRNA sense strand
ccgugguggagcugaagua

SEQ ID NO: 2236612 - RNA, 19 nt, Homo sapiens
  misc_RNA (1)...(19): siRNA sense strand
gggacuauaaccugaacga

SEQ ID NO: 2236613 - RNA, 19 nt, Homo sapiens
  misc_RNA (1)...(19): siRNA sense strand
agaaucugacccaggagaa

SEQ ID NO: 2236614 - RNA, 19 nt, Homo sapiens
  misc_RNA (1)...(19): siRNA sense strand
agauagugcaggagggaau

SEQ ID NO: 2236615 - RNA, 19 nt, Homo sapiens
  misc_RNA (1)...(19): siRNA sense strand
caguauauugaguggcuaa

SEQ ID NO: 2236616 - RNA, 19 nt, Homo sapiens
  misc_RNA (1)...(19): siRNA sense strand
cgguauuucuggagauagu

SEQ ID NO: 2236617 - RNA, 19 nt, Homo sapiens
  misc_RNA (1)...(19): siRNA sense strand
auugaguggcuaaaggaaa

SEQ ID NO: 2236618 - RNA, 19 nt, Homo sapiens
  misc_RNA (1)...(19): siRNA sense strand
uugaguggcuaaaggaaaa

SEQ ID NO: 2236619 - RNA, 19 nt, Homo sapiens
  misc_RNA (1)...(19): siRNA sense strand
gguauaugugccaaagaga

SEQ ID NO: 2236620 - RNA, 19 nt, Homo sapiens
  misc_RNA (1)...(19): siRNA sense strand
ugauguagauuuaccguca

SEQ ID NO: 2236621 - RNA, 19 nt, Homo sapiens
  misc_RNA (1)...(19): siRNA sense strand
cuuaagagaugauggacuc

SEQ ID NO: 2236622 - RNA, 19 nt, Homo sapiens
  misc_RNA (1)...(19): siRNA sense strand
agagaaagucugaagcacu

SEQ ID NO: 2236623 - RNA, 19 nt, Homo sapiens
  misc_RNA (1)...(19): siRNA sense strand
ggcuaaaggaaaaucuaua

SEQ ID NO: 2236624 - RNA, 19 nt, Homo sapiens
  misc_RNA (1)...(19): siRNA sense strand
aggaagaagaggaggaaga

SEQ ID NO: 2236625 - RNA, 19 nt, Homo sapiens
  misc_RNA (1)...(19): siRNA sense strand
aagaggaggaagagggcaa

SEQ ID NO: 2236626 - RNA, 19 nt, Homo sapiens
  misc_RNA (1)...(19): siRNA sense strand
ugaaagggacugaggguca

SEQ ID NO: 2236627 - RNA, 19 nt, Homo sapiens
  misc_RNA (1)...(19): siRNA sense strand
ggaaagucccgaaugguga

SEQ ID NO: 2236628 - RNA, 19 nt, Homo sapiens
  misc_RNA (1)...(19): siRNA sense strand
agauggaagauguggacuu

SEQ ID NO: 2236629 - RNA, 19 nt, Homo sapiens
  misc_RNA (1)...(19): siRNA sense strand
agauguggacuuugaggaa

SEQ ID NO: 2236630 - RNA, 19 nt, Homo sapiens
  misc_RNA (1)...(19): siRNA sense strand
auguggacuuugaggaaga

SEQ ID NO: 2236631 - RNA, 19 nt, Homo sapiens
  misc_RNA (1)...(19): siRNA sense strand
cgguggaguccuugggcuu

SEQ ID NO: 2236632 - RNA, 19 nt, Homo sapiens
  misc_RNA (1)...(19): siRNA sense strand
ccgaauggugacugcaaga

SEQ ID NO: 2236633 - RNA, 19 nt, Homo sapiens
  misc_RNA (1)...(19): siRNA sense strand
aggagaccacaaagcgaaa

SEQ ID NO: 2236634 - RNA, 19 nt, Homo sapiens
  misc_RNA (1)...(19): siRNA sense strand
ugggaagagagcuguggua

SEQ ID NO: 2236635 - RNA, 19 nt, Homo sapiens
  misc_RNA (1)...(19): siRNA sense strand
agagagcugugguaggcua

SEQ ID NO: 2236636 - RNA, 19 nt, Homo sapiens
  misc_RNA (1)...(19): siRNA sense strand
agauuaucgaggugguaga

SEQ ID NO: 2236637 - RNA, 19 nt, Homo sapiens
  misc_RNA (1)...(19): siRNA sense strand
caggagaccacaaagcgaa

SEQ ID NO: 2236638 - RNA, 19 nt, Homo sapiens
  misc_RNA (1)...(19): siRNA sense strand
uugaggaagaagaggagga

SEQ ID NO: 2236639 - RNA, 19 nt, Homo sapiens
  misc_RNA (1)...(19): siRNA sense strand
ccuuugagaucgagcguga

SEQ ID NO: 2236640 - RNA, 19 nt, Homo sapiens
  misc_RNA (1)...(19): siRNA sense strand
aggagagacucaugcagga

SEQ ID NO: 2236641 - RNA, 19 nt, Homo sapiens
  misc_RNA (1)...(19): siRNA sense strand
ccgagaaagcacucagaaa

SEQ ID NO: 2236642 - RNA, 19 nt, Homo sapiens
  misc_RNA (1)...(19): siRNA sense strand
ggugcagagugaagggcaa

SEQ ID NO: 2236643 - RNA, 19 nt, Homo sapiens
  misc_RNA (1)...(19): siRNA sense strand
uggagaaagccaaggaaaa

SEQ ID NO: 2236644 - RNA, 19 nt, Homo sapiens
  misc_RNA (1)...(19): siRNA sense strand
ggaaaaugguggcggcaca

SEQ ID NO: 2236645 - RNA, 19 nt, Homo sapiens
  misc_RNA (1)...(19): siRNA sense strand
gagaaggaaaggaggcuga

SEQ ID NO: 2236646 - RNA, 19 nt, Homo sapiens
  misc_RNA (1)...(19): siRNA sense strand
uggagaagaagcagaaaga

SEQ ID NO: 2236647 - RNA, 19 nt, Homo sapiens
  misc_RNA (1)...(19): siRNA sense strand
gaaaggaggcugaaggagu

SEQ ID NO: 2236648 - RNA, 19 nt, Homo sapiens
  misc_RNA (1)...(19): siRNA sense strand
cuggagaaagccaaggaaa

SEQ ID NO: 2236649 - RNA, 19 nt, Homo sapiens
  misc_RNA (1)...(19): siRNA sense strand
aggcugaccugcugggaga

SEQ ID NO: 2236650 - RNA, 19 nt, Homo sapiens
  misc_RNA (1)...(19): siRNA sense strand
cugccaaggaccaguuuaa

SEQ ID NO: 2236651 - RNA, 19 nt, Homo sapiens
  misc_RNA (1)...(19): siRNA sense strand
gguaacaagcggaagcuga

SEQ ID NO: 2236652 - RNA, 19 nt, Homo sapiens
  misc_RNA (1)...(19): siRNA sense strand
aguuacacacggagaaauu

SEQ ID NO: 2236653 - RNA, 19 nt, Homo sapiens
  misc_RNA (1)...(19): siRNA sense strand
cagggaaggaggaagaaga

SEQ ID NO: 2236654 - RNA, 19 nt, Homo sapiens
  misc_RNA (1)...(19): siRNA sense strand
gcauacagcuggcgcgagu

SEQ ID NO: 2236655 - RNA, 19 nt, Homo sapiens
  misc_RNA (1)...(19): siRNA sense strand
agaaauacggugccggcua

SEQ ID NO: 2236656 - RNA, 19 nt, Homo sapiens
  misc_RNA (1)...(19): siRNA sense strand
ccuucagagaugugggaga

SEQ ID NO: 2236657 - RNA, 19 nt, Homo sapiens
  misc_RNA (1)...(19): siRNA sense strand
ucaucggccuggaggacaa

SEQ ID NO: 2236658 - RNA, 19 nt, Homo sapiens
  misc_RNA (1)...(19): siRNA sense strand
gugcugucgugcaggagaa

SEQ ID NO: 2236659 - RNA, 19 nt, Homo sapiens
  misc_RNA (1)...(19): siRNA sense strand
uugggaaauuugaggcgaa

SEQ ID NO: 2236660 - RNA, 19 nt, Homo sapiens
  misc_RNA (1)...(19): siRNA sense strand
aggaggaagaagacaguga

SEQ ID NO: 2236661 - RNA, 19 nt, Homo sapiens
  misc_RNA (1)...(19): siRNA sense strand
ggaccaagauguagcggac

SEQ ID NO: 2236662 - RNA, 19 nt, Homo sapiens
  misc_RNA (1)...(19): siRNA sense strand
cuguaaaacuggaagaacu

SEQ ID NO: 2236663 - RNA, 19 nt, Homo sapiens
  misc_RNA (1)...(19): siRNA sense strand
ugggaaauuugaggcgaaa

SEQ ID NO: 2236664 - RNA, 19 nt, Homo sapiens
  misc_RNA (1)...(19): siRNA sense strand
uugcagggaaggaggaaga

SEQ ID NO: 2236665 - RNA, 19 nt, Homo sapiens
  misc_RNA (1)...(19): siRNA sense strand
aggcgaaaggcaugggcau

SEQ ID NO: 2236666 - RNA, 19 nt, Homo sapiens
  misc_RNA (1)...(19): siRNA sense strand
gggcauacaucagcgggua

SEQ ID NO: 2236667 - RNA, 19 nt, Homo sapiens
  misc_RNA (1)...(19): siRNA sense strand
agacagugaccccgagaaa

SEQ ID NO: 2236668 - RNA, 19 nt, Homo sapiens
  misc_RNA (1)...(19): siRNA sense strand
agguguucagggugggaaa

SEQ ID NO: 2236669 - RNA, 19 nt, Homo sapiens
  misc_RNA (1)...(19): siRNA sense strand
gagaagaagcagaaagagc

SEQ ID NO: 2236670 - RNA, 19 nt, Homo sapiens
  misc_RNA (1)...(19): siRNA sense strand
cccacuacugcaagaaaua

SEQ ID NO: 2236671 - RNA, 19 nt, Homo sapiens
  misc_RNA (1)...(19): siRNA sense strand
ccggaagggauucgacauu

SEQ ID NO: 2236672 - RNA, 19 nt, Homo sapiens
  misc_RNA (1)...(19): siRNA sense strand
uggaggaguucaaggccuu

SEQ ID NO: 2236673 - RNA, 19 nt, Homo sapiens
  misc_RNA (1)...(19): siRNA sense strand
aggcggacacugacagaau

SEQ ID NO: 2236674 - RNA, 19 nt, Homo sapiens
  misc_RNA (1)...(19): siRNA sense strand
aauuacauguggacccaaa

SEQ ID NO: 2236675 - RNA, 19 nt, Homo sapiens
  misc_RNA (1)...(19): siRNA sense strand
aggccaagcaugugcaguu

SEQ ID NO: 2236676 - RNA, 19 nt, Homo sapiens
  misc_RNA (1)...(19): siRNA sense strand
cccagcaccucaagagcaa

SEQ ID NO: 2236677 - RNA, 19 nt, Homo sapiens
  misc_RNA (1)...(19): siRNA sense strand
agaucaagcaccuguccaa

SEQ ID NO: 2236678 - RNA, 19 nt, Homo sapiens
  misc_RNA (1)...(19): siRNA sense strand
cggagaaauuacaugugga

SEQ ID NO: 2236679 - RNA, 19 nt, Homo sapiens
  misc_RNA (1)...(19): siRNA sense strand
ccucggagcucuucgacga

SEQ ID NO: 2236680 - RNA, 19 nt, Homo sapiens
  misc_RNA (1)...(19): siRNA sense strand
agaacuacacccugcagaa

SEQ ID NO: 2236681 - RNA, 19 nt, Homo sapiens
  misc_RNA (1)...(19): siRNA sense strand
ccaacaagcuggucaggac

SEQ ID NO: 2236682 - RNA, 19 nt, Homo sapiens
  misc_RNA (1)...(19): siRNA sense strand
acuuugaagccgagccaga

SEQ ID NO: 2236683 - RNA, 19 nt, Homo sapiens
  misc_RNA (1)...(19): siRNA sense strand
gcaagaaauauaacaucca

SEQ ID NO: 2236684 - RNA, 19 nt, Homo sapiens
  misc_RNA (1)...(19): siRNA sense strand
aguacggcguggacgacua

SEQ ID NO: 2236685 - RNA, 19 nt, Homo sapiens
  misc_RNA (1)...(19): siRNA sense strand
ccgagaaggacuuugagga

SEQ ID NO: 2236686 - RNA, 19 nt, Homo sapiens
  misc_RNA (1)...(19): siRNA sense strand
acgacauccuguuugacaa

SEQ ID NO: 2236687 - RNA, 19 nt, Homo sapiens
  misc_RNA (1)...(19): siRNA sense strand
aggaaaggaggcugaagga

SEQ ID NO: 2236688 - RNA, 19 nt, Homo sapiens
  misc_RNA (1)...(19): siRNA sense strand
gccuggaggacaaguggaa

SEQ ID NO: 2236689 - RNA, 19 nt, Homo sapiens
  misc_RNA (1)...(19): siRNA sense strand
ggaaggaggaagaagacag

SEQ ID NO: 2236690 - RNA, 19 nt, Homo sapiens
  misc_RNA (1)...(19): siRNA sense strand
augaaauuucccaggacau

SEQ ID NO: 2236691 - RNA, 19 nt, Homo sapiens
  misc_RNA (1)...(19): siRNA sense strand
gcagaaccgucgugcccuu

SEQ ID NO: 2236692 - RNA, 19 nt, Homo sapiens
  misc_RNA (1)...(19): siRNA sense strand
ugaaggaguacaugcgcau

SEQ ID NO: 2236693 - RNA, 19 nt, Homo sapiens
  misc_RNA (1)...(19): siRNA sense strand
ggaaauaaggacagggcgg

SEQ ID NO: 2236694 - RNA, 19 nt, Homo sapiens
  misc_RNA (1)...(19): siRNA sense strand
ugaaggucucuuugcuaaa

SEQ ID NO: 2236695 - RNA, 19 nt, Homo sapiens
  misc_RNA (1)...(19): siRNA sense strand
guggacagcaguauggaca

SEQ ID NO: 2236696 - RNA, 19 nt, Homo sapiens
  misc_RNA (1)...(19): siRNA sense strand
cugccaagccggagaagaa

SEQ ID NO: 2236697 - RNA, 19 nt, Homo sapiens
  misc_RNA (1)...(19): siRNA sense strand
ugaugauggagaagagaaa

SEQ ID NO: 2236698 - RNA, 19 nt, Homo sapiens
  misc_RNA (1)...(19): siRNA sense strand
agaaagggaagaaggacaa

SEQ ID NO: 2236699 - RNA, 19 nt, Homo sapiens
  misc_RNA (1)...(19): siRNA sense strand
guaugagaagcaagagaaa

SEQ ID NO: 2236700 - RNA, 19 nt, Homo sapiens
  misc_RNA (1)...(19): siRNA sense strand
gagaagagaaagagcucau

SEQ ID NO: 2236701 - RNA, 19 nt, Homo sapiens
  misc_RNA (1)...(19): siRNA sense strand
ggaaaggaagagaagucaa

SEQ ID NO: 2236702 - RNA, 19 nt, Homo sapiens
  misc_RNA (1)...(19): siRNA sense strand
ccaccaagcaggcggaaaa

SEQ ID NO: 2236703 - RNA, 19 nt, Homo sapiens
  misc_RNA (1)...(19): siRNA sense strand
aagaaagggaagaaggaca

SEQ ID NO: 2236704 - RNA, 19 nt, Homo sapiens
  misc_RNA (1)...(19): siRNA sense strand
ggagagagcacgagcccau

SEQ ID NO: 2236705 - RNA, 19 nt, Homo sapiens
  misc_RNA (1)...(19): siRNA sense strand
cagaaaugccgacggaaaa

SEQ ID NO: 2236706 - RNA, 19 nt, Homo sapiens
  misc_RNA (1)...(19): siRNA sense strand
aagaagagaaagugcucaa

SEQ ID NO: 2236707 - RNA, 19 nt, Homo sapiens
  misc_RNA (1)...(19): siRNA sense strand
caucagacaaaguggugaa

SEQ ID NO: 2236708 - RNA, 19 nt, Homo sapiens
  misc_RNA (1)...(19): siRNA sense strand
agucaaaagggaaggcuaa

SEQ ID NO: 2236709 - RNA, 19 nt, Homo sapiens
  misc_RNA (1)...(19): siRNA sense strand
gggaaaugagaaagaacca

SEQ ID NO: 2236710 - RNA, 19 nt, Homo sapiens
  misc_RNA (1)...(19): siRNA sense strand
gagaaagugcucaaggaga

SEQ ID NO: 2236711 - RNA, 19 nt, Homo sapiens
  misc_RNA (1)...(19): siRNA sense strand
augaagaggaggauaaaga

SEQ ID NO: 2236712 - RNA, 19 nt, Homo sapiens
  misc_RNA (1)...(19): siRNA sense strand
agaagguguaugaggaauu

SEQ ID NO: 2236713 - RNA, 19 nt, Homo sapiens
  misc_RNA (1)...(19): siRNA sense strand
cagcagaagcagaaagaac

SEQ ID NO: 2236714 - RNA, 19 nt, Homo sapiens
  misc_RNA (1)...(19): siRNA sense strand
cgccaagccauguuagaaa

SEQ ID NO: 2236715 - RNA, 19 nt, Homo sapiens
  misc_RNA (1)...(19): siRNA sense strand
cgaaaaggcaggcggaaga

SEQ ID NO: 2236716 - RNA, 19 nt, Homo sapiens
  misc_RNA (1)...(19): siRNA sense strand
agagaagguguaugaggaa

SEQ ID NO: 2236717 - RNA, 19 nt, Homo sapiens
  misc_RNA (1)...(19): siRNA sense strand
gugaggaagaggaggagga

SEQ ID NO: 2236718 - RNA, 19 nt, Homo sapiens
  misc_RNA (1)...(19): siRNA sense strand
gcuucggccuggagaguca

SEQ ID NO: 2236719 - RNA, 19 nt, Homo sapiens
  misc_RNA (1)...(19): siRNA sense strand
agaaagaaccaccggcuga

SEQ ID NO: 2236720 - RNA, 19 nt, Homo sapiens
  misc_RNA (1)...(19): siRNA sense strand
agaaggacaagaagaucaa

SEQ ID NO: 2236721 - RNA, 19 nt, Homo sapiens
  misc_RNA (1)...(19): siRNA sense strand
ggagcagaguguuagccaa

SEQ ID NO: 2236722 - RNA, 19 nt, Homo sapiens
  misc_RNA (1)...(19): siRNA sense strand
aagaggaggaggaagaaaa

SEQ ID NO: 2236723 - RNA, 19 nt, Homo sapiens
  misc_RNA (1)...(19): siRNA sense strand
ccggagaagaaucggauca

SEQ ID NO: 2236724 - RNA, 19 nt, Homo sapiens
  misc_RNA (1)...(19): siRNA sense strand
ugaaacaguaugagaagca

SEQ ID NO: 2236725 - RNA, 19 nt, Homo sapiens
  misc_RNA (1)...(19): siRNA sense strand
aagaaggacaagaagauca

SEQ ID NO: 2236726 - RNA, 19 nt, Homo sapiens
  misc_RNA (1)...(19): siRNA sense strand
gcuggcaguagaagauaaa

SEQ ID NO: 2236727 - RNA, 19 nt, Homo sapiens
  misc_RNA (1)...(19): siRNA sense strand
ugguaggacccaauggcaa

SEQ ID NO: 2236728 - RNA, 19 nt, Homo sapiens
  misc_RNA (1)...(19): siRNA sense strand
caguaugagaagcaagaga

SEQ ID NO: 2236729 - RNA, 19 nt, Homo sapiens
  misc_RNA (1)...(19): siRNA sense strand
aagggaaggagaaggccaa

SEQ ID NO: 2236730 - RNA, 19 nt, Homo sapiens
  misc_RNA (1)...(19): siRNA sense strand
uggcaguagaagauaaaca

SEQ ID NO: 2236731 - RNA, 19 nt, Homo sapiens
  misc_RNA (1)...(19): siRNA sense strand
augauggagaagagaaaga

SEQ ID NO: 2236732 - RNA, 19 nt, Homo sapiens
  misc_RNA (1)...(19): siRNA sense strand
gaagagaagucaaaaggga

SEQ ID NO: 2236733 - RNA, 19 nt, Homo sapiens
  misc_RNA (1)...(19): siRNA sense strand
uagagaagguguaugagga

SEQ ID NO: 2236734 - RNA, 19 nt, Homo sapiens
  misc_RNA (1)...(19): siRNA sense strand
cuggagaaguucagcaucu

SEQ ID NO: 2236735 - RNA, 19 nt, Homo sapiens
  misc_RNA (1)...(19): siRNA sense strand
aguaugagaagcaagagaa

SEQ ID NO: 2236736 - RNA, 19 nt, Homo sapiens
  misc_RNA (1)...(19): siRNA sense strand
gggucugcauggugugaca

SEQ ID NO: 2236737 - RNA, 19 nt, Homo sapiens
  misc_RNA (1)...(19): siRNA sense strand
uguggaugaugauggagaa

SEQ ID NO: 2236738 - RNA, 19 nt, Homo sapiens
  misc_RNA (1)...(19): siRNA sense strand
aggaucagagugaggaaga

SEQ ID NO: 2236739 - RNA, 19 nt, Homo sapiens
  misc_RNA (1)...(19): siRNA sense strand
agagugaggaagaggagga

SEQ ID NO: 2236740 - RNA, 19 nt, Homo sapiens
  misc_RNA (1)...(19): siRNA sense strand
agggaaaggaagagaaguc

SEQ ID NO: 2236741 - RNA, 19 nt, Homo sapiens
  misc_RNA (1)...(19): siRNA sense strand
aagaggaggauaaagaaga

SEQ ID NO: 2236742 - RNA, 19 nt, Homo sapiens
  misc_RNA (1)...(19): siRNA sense strand
cugagaggcuagagaaggu

SEQ ID NO: 2236743 - RNA, 19 nt, Homo sapiens
  misc_RNA (1)...(19): siRNA sense strand
cagcagaaaugccgacgga

SEQ ID NO: 2236744 - RNA, 19 nt, Homo sapiens
  misc_RNA (1)...(19): siRNA sense strand
gacccaauggcaagggcaa

SEQ ID NO: 2236745 - RNA, 19 nt, Homo sapiens
  misc_RNA (1)...(19): siRNA sense strand
aagggaagaaggacaagaa

SEQ ID NO: 2236746 - RNA, 19 nt, Homo sapiens
  misc_RNA (1)...(19): siRNA sense strand
agauaaacaggcuggggaa

SEQ ID NO: 2236747 - RNA, 19 nt, Homo sapiens
  misc_RNA (1)...(19): siRNA sense strand
uguuggaggcccuggguga

SEQ ID NO: 2236748 - RNA, 19 nt, Homo sapiens
  misc_RNA (1)...(19): siRNA sense strand
aggccguaucugaggaaca

SEQ ID NO: 2236749 - RNA, 19 nt, Homo sapiens
  misc_RNA (1)...(19): siRNA sense strand
ggauaaaggugaaaggcau

SEQ ID NO: 2236750 - RNA, 19 nt, Homo sapiens
  misc_RNA (1)...(19): siRNA sense strand
gcuucaggcuggagggcaa

SEQ ID NO: 2236751 - RNA, 19 nt, Homo sapiens
  misc_RNA (1)...(19): siRNA sense strand
ggaaguaugcagauggaga

SEQ ID NO: 2236752 - RNA, 19 nt, Homo sapiens
  misc_RNA (1)...(19): siRNA sense strand
cugcagaugaagcuagaaa

SEQ ID NO: 2236753 - RNA, 19 nt, Homo sapiens
  misc_RNA (1)...(19): siRNA sense strand
agaugaagcuagaaaacau

SEQ ID NO: 2236754 - RNA, 19 nt, Homo sapiens
  misc_RNA (1)...(19): siRNA sense strand
cagaggaacuggcucggaa

SEQ ID NO: 2236755 - RNA, 19 nt, Homo sapiens
  misc_RNA (1)...(19): siRNA sense strand
guuucuggauaaaggugaa

SEQ ID NO: 2236756 - RNA, 19 nt, Homo sapiens
  misc_RNA (1)...(19): siRNA sense strand
caacgagaacauugaaaau

SEQ ID NO: 2236757 - RNA, 19 nt, Homo sapiens
  misc_RNA (1)...(19): siRNA sense strand
accaagagcugaaggcagu

SEQ ID NO: 2236758 - RNA, 19 nt, Homo sapiens
  misc_RNA (1)...(19): siRNA sense strand
ccaagaaggagcugaggcu

SEQ ID NO: 2236759 - RNA, 19 nt, Homo sapiens
  misc_RNA (1)...(19): siRNA sense strand
ucgagaugcugcugcccaa

SEQ ID NO: 2236760 - RNA, 19 nt, Homo sapiens
  misc_RNA (1)...(19): siRNA sense strand
uggauaaaggugaaaggca

SEQ ID NO: 2236761 - RNA, 19 nt, Homo sapiens
  misc_RNA (1)...(19): siRNA sense strand
gcggagagcgcauugccua

SEQ ID NO: 2236762 - RNA, 19 nt, Homo sapiens
  misc_RNA (1)...(19): siRNA sense strand
ggcuuaucauacagcgcua

SEQ ID NO: 2236763 - RNA, 19 nt, Homo sapiens
  misc_RNA (1)...(19): siRNA sense strand
cuaugaggucagcgugcaa

SEQ ID NO: 2236764 - RNA, 19 nt, Homo sapiens
  misc_RNA (1)...(19): siRNA sense strand
ucgcagaacucaagcggaa

SEQ ID NO: 2236765 - RNA, 19 nt, Homo sapiens
  misc_RNA (1)...(19): siRNA sense strand
uggacaagaucaugggcaa

SEQ ID NO: 2236766 - RNA, 19 nt, Homo sapiens
  misc_RNA (1)...(19): siRNA sense strand
ccagaagaucucagaggaa

SEQ ID NO: 2236767 - RNA, 19 nt, Homo sapiens
  misc_RNA (1)...(19): siRNA sense strand
gugaaauccagaaggagaa

SEQ ID NO: 2236768 - RNA, 19 nt, Homo sapiens
  misc_RNA (1)...(19): siRNA sense strand
ggacaagaucaugggcaaa

SEQ ID NO: 2236769 - RNA, 19 nt, Homo sapiens
  misc_RNA (1)...(19): siRNA sense strand
cggacgugauugagaugaa

SEQ ID NO: 2236770 - RNA, 19 nt, Homo sapiens
  misc_RNA (1)...(19): siRNA sense strand
guguggaggagguggagaa

SEQ ID NO: 2236771 - RNA, 19 nt, Homo sapiens
  misc_RNA (1)...(19): siRNA sense strand
agaggaacucaaagugaaa

SEQ ID NO: 2236772 - RNA, 19 nt, Homo sapiens
  misc_RNA (1)...(19): siRNA sense strand
agugaaauccagaaggaga

SEQ ID NO: 2236773 - RNA, 19 nt, Homo sapiens
  misc_RNA (1)...(19): siRNA sense strand
ucuacaagauccaggacau

SEQ ID NO: 2236774 - RNA, 19 nt, Homo sapiens
  misc_RNA (1)...(19): siRNA sense strand
accaugagcuggaggacau

SEQ ID NO: 2236775 - RNA, 19 nt, Homo sapiens
  misc_RNA (1)...(19): siRNA sense strand
agaucagcguggugacgaa

SEQ ID NO: 2236776 - RNA, 19 nt, Homo sapiens
  misc_RNA (1)...(19): siRNA sense strand
gauaugagccugaagagga

SEQ ID NO: 2236777 - RNA, 19 nt, Homo sapiens
  misc_RNA (1)...(19): siRNA sense strand
ccaaggucaacaaggacaa

SEQ ID NO: 2236778 - RNA, 19 nt, Homo sapiens
  misc_RNA (1)...(19): siRNA sense strand
cccaaggacuccaaggaca

SEQ ID NO: 2236779 - RNA, 19 nt, Homo sapiens
  misc_RNA (1)...(19): siRNA sense strand
ccauggaagcucugcucua

SEQ ID NO: 2236780 - RNA, 19 nt, Homo sapiens
  misc_RNA (1)...(19): siRNA sense strand
cagccuucauggagggcau

SEQ ID NO: 2236781 - RNA, 19 nt, Homo sapiens
  misc_RNA (1)...(19): siRNA sense strand
aggucagaguggagagaag

SEQ ID NO: 2236782 - RNA, 19 nt, Homo sapiens
  misc_RNA (1)...(19): siRNA sense strand
augaggaguuugagaucga

SEQ ID NO: 2236783 - RNA, 19 nt, Homo sapiens
  misc_RNA (1)...(19): siRNA sense strand
agaaggagaaagccaacaa

SEQ ID NO: 2236784 - RNA, 19 nt, Homo sapiens
  misc_RNA (1)...(19): siRNA sense strand
aggucaacaaggacaacaa

SEQ ID NO: 2236785 - RNA, 19 nt, Homo sapiens
  misc_RNA (1)...(19): siRNA sense strand
cugcugaugcugagugaca

SEQ ID NO: 2236786 - RNA, 19 nt, Homo sapiens
  misc_RNA (1)...(19): siRNA sense strand
ugccaagggauuuaagcaa

SEQ ID NO: 2236787 - RNA, 19 nt, Homo sapiens
  misc_RNA (1)...(19): siRNA sense strand
augagaagugcuaugacaa

SEQ ID NO: 2236788 - RNA, 19 nt, Homo sapiens
  misc_RNA (1)...(19): siRNA sense strand
ugauugagaugaacgggau

SEQ ID NO: 2236789 - RNA, 19 nt, Homo sapiens
  misc_RNA (1)...(19): siRNA sense strand
uggccagcgaagagaucua

SEQ ID NO: 2236790 - RNA, 19 nt, Homo sapiens
  misc_RNA (1)...(19): siRNA sense strand
cuggaggacaugaagauga

SEQ ID NO: 2236791 - RNA, 19 nt, Homo sapiens
  misc_RNA (1)...(19): siRNA sense strand
agaagaucucagaggaacu

SEQ ID NO: 2236792 - RNA, 19 nt, Homo sapiens
  misc_RNA (1)...(19): siRNA sense strand
caaucggaauggaaagagu

SEQ ID NO: 2236793 - RNA, 19 nt, Homo sapiens
  misc_RNA (1)...(19): siRNA sense strand
ccgagaaggagcccaucaa

SEQ ID NO: 2236794 - RNA, 19 nt, Homo sapiens
  misc_RNA (1)...(19): siRNA sense strand
agaaacuacagaagaagga

SEQ ID NO: 2236795 - RNA, 19 nt, Homo sapiens
  misc_RNA (1)...(19): siRNA sense strand
ggaugaggaguuugagauc

SEQ ID NO: 2236796 - RNA, 19 nt, Homo sapiens
  misc_RNA (1)...(19): siRNA sense strand
aguuugagaucgagcugga

SEQ ID NO: 2236797 - RNA, 19 nt, Homo sapiens
  misc_RNA (1)...(19): siRNA sense strand
guaucgaggagguuggcau

SEQ ID NO: 2236798 - RNA, 19 nt, Homo sapiens
  misc_RNA (1)...(19): siRNA sense strand
gaggacaugaagaugaaga

SEQ ID NO: 2236799 - RNA, 19 nt, Homo sapiens
  misc_RNA (1)...(19): siRNA sense strand
gaucaugggcaaaggacag

SEQ ID NO: 2236800 - RNA, 19 nt, Homo sapiens
  misc_RNA (1)...(19): siRNA sense strand
ucgcagaacucaagcggaa

SEQ ID NO: 2236801 - RNA, 19 nt, Homo sapiens
  misc_RNA (1)...(19): siRNA sense strand
uggacaagaucaugggcaa

SEQ ID NO: 2236802 - RNA, 19 nt, Homo sapiens
  misc_RNA (1)...(19): siRNA sense strand
ccagaagaucucagaggaa

SEQ ID NO: 2236803 - RNA, 19 nt, Homo sapiens
  misc_RNA (1)...(19): siRNA sense strand
gugaaauccagaaggagaa

SEQ ID NO: 2236804 - RNA, 19 nt, Homo sapiens
  misc_RNA (1)...(19): siRNA sense strand
ggacaagaucaugggcaaa

SEQ ID NO: 2236805 - RNA, 19 nt, Homo sapiens
  misc_RNA (1)...(19): siRNA sense strand
cggacgugauugagaugaa

SEQ ID NO: 2236806 - RNA, 19 nt, Homo sapiens
  misc_RNA (1)...(19): siRNA sense strand
guguggaggagguggagaa

SEQ ID NO: 2236807 - RNA, 19 nt, Homo sapiens
  misc_RNA (1)...(19): siRNA sense strand
agaggaacucaaagugaaa

SEQ ID NO: 2236808 - RNA, 19 nt, Homo sapiens
  misc_RNA (1)...(19): siRNA sense strand
agugaaauccagaaggaga

SEQ ID NO: 2236809 - RNA, 19 nt, Homo sapiens
  misc_RNA (1)...(19): siRNA sense strand
ucuacaagauccaggacau

SEQ ID NO: 2236810 - RNA, 19 nt, Homo sapiens
  misc_RNA (1)...(19): siRNA sense strand
accaugagcuggaggacau

SEQ ID NO: 2236811 - RNA, 19 nt, Homo sapiens
  misc_RNA (1)...(19): siRNA sense strand
agaucagcguggugacgaa

SEQ ID NO: 2236812 - RNA, 19 nt, Homo sapiens
  misc_RNA (1)...(19): siRNA sense strand
gauaugagccugaagagga

SEQ ID NO: 2236813 - RNA, 19 nt, Homo sapiens
  misc_RNA (1)...(19): siRNA sense strand
ccaaggucaacaaggacaa

SEQ ID NO: 2236814 - RNA, 19 nt, Homo sapiens
  misc_RNA (1)...(19): siRNA sense strand
cccaaggacuccaaggaca

SEQ ID NO: 2236815 - RNA, 19 nt, Homo sapiens
  misc_RNA (1)...(19): siRNA sense strand
ccauggaagcucugcucua

SEQ ID NO: 2236816 - RNA, 19 nt, Homo sapiens
  misc_RNA (1)...(19): siRNA sense strand
cagccuucauggagggcau

SEQ ID NO: 2236817 - RNA, 19 nt, Homo sapiens
  misc_RNA (1)...(19): siRNA sense strand
aggucagaguggagagaag

SEQ ID NO: 2236818 - RNA, 19 nt, Homo sapiens
  misc_RNA (1)...(19): siRNA sense strand
augaggaguuugagaucga

SEQ ID NO: 2236819 - RNA, 19 nt, Homo sapiens
  misc_RNA (1)...(19): siRNA sense strand
agaaggagaaagccaacaa

SEQ ID NO: 2236820 - RNA, 19 nt, Homo sapiens
  misc_RNA (1)...(19): siRNA sense strand
aggucaacaaggacaacaa

SEQ ID NO: 2236821 - RNA, 19 nt, Homo sapiens
  misc_RNA (1)...(19): siRNA sense strand
cugcugaugcugagugaca

SEQ ID NO: 2236822 - RNA, 19 nt, Homo sapiens
  misc_RNA (1)...(19): siRNA sense strand
ugccaagggauuuaagcaa

SEQ ID NO: 2236823 - RNA, 19 nt, Homo sapiens
  misc_RNA (1)...(19): siRNA sense strand
augagaagugcuaugacaa

SEQ ID NO: 2236824 - RNA, 19 nt, Homo sapiens
  misc_RNA (1)...(19): siRNA sense strand
ugauugagaugaacgggau

SEQ ID NO: 2236825 - RNA, 19 nt, Homo sapiens
  misc_RNA (1)...(19): siRNA sense strand
uggccagcgaagagaucua

SEQ ID NO: 2236826 - RNA, 19 nt, Homo sapiens
  misc_RNA (1)...(19): siRNA sense strand
cuggaggacaugaagauga

SEQ ID NO: 2236827 - RNA, 19 nt, Homo sapiens
  misc_RNA (1)...(19): siRNA sense strand
agaagaucucagaggaacu

SEQ ID NO: 2236828 - RNA, 19 nt, Homo sapiens
  misc_RNA (1)...(19): siRNA sense strand
caaucggaauggaaagagu

SEQ ID NO: 2236829 - RNA, 19 nt, Homo sapiens
  misc_RNA (1)...(19): siRNA sense strand
ccgagaaggagcccaucaa

SEQ ID NO: 2236830 - RNA, 19 nt, Homo sapiens
  misc_RNA (1)...(19): siRNA sense strand
agaaacuacagaagaagga

SEQ ID NO: 2236831 - RNA, 19 nt, Homo sapiens
  misc_RNA (1)...(19): siRNA sense strand
ggaugaggaguuugagauc

SEQ ID NO: 2236832 - RNA, 19 nt, Homo sapiens
  misc_RNA (1)...(19): siRNA sense strand
aguuugagaucgagcugga

SEQ ID NO: 2236833 - RNA, 19 nt, Homo sapiens
  misc_RNA (1)...(19): siRNA sense strand
guaucgaggagguuggcau

SEQ ID NO: 2236834 - RNA, 19 nt, Homo sapiens
  misc_RNA (1)...(19): siRNA sense strand
gaggacaugaagaugaaga

SEQ ID NO: 2236835 - RNA, 19 nt, Homo sapiens
  misc_RNA (1)...(19): siRNA sense strand
gaucaugggcaaaggacag

SEQ ID NO: 2236836 - RNA, 19 nt, Homo sapiens
  misc_RNA (1)...(19): siRNA sense strand
gugcagggacaguggaaua

SEQ ID NO: 2236837 - RNA, 19 nt, Homo sapiens
  misc_RNA (1)...(19): siRNA sense strand
ccuauaugccaaaggauaa

SEQ ID NO: 2236838 - RNA, 19 nt, Homo sapiens
  misc_RNA (1)...(19): siRNA sense strand
gggagacaccgcagagaaa

SEQ ID NO: 2236839 - RNA, 19 nt, Homo sapiens
  misc_RNA (1)...(19): siRNA sense strand
gggaagggaauccgggaaa

SEQ ID NO: 2236840 - RNA, 19 nt, Homo sapiens
  misc_RNA (1)...(19): siRNA sense strand
gguuuaagacccaggagua

SEQ ID NO: 2236841 - RNA, 19 nt, Homo sapiens
  misc_RNA (1)...(19): siRNA sense strand
aggcugaggucaagaucaa

SEQ ID NO: 2236842 - RNA, 19 nt, Homo sapiens
  misc_RNA (1)...(19): siRNA sense strand
ccaaagaagacaagaagca

SEQ ID NO: 2236843 - RNA, 19 nt, Homo sapiens
  misc_RNA (1)...(19): siRNA sense strand
cgaacauggugguggcuuu

SEQ ID NO: 2236844 - RNA, 19 nt, Homo sapiens
  misc_RNA (1)...(19): siRNA sense strand
gcauaaagcugaaggagug

SEQ ID NO: 2236845 - RNA, 19 nt, Homo sapiens
  misc_RNA (1)...(19): siRNA sense strand
aggcaaacaucaagaggca

SEQ ID NO: 2236846 - RNA, 19 nt, Homo sapiens
  misc_RNA (1)...(19): siRNA sense strand
acgacaagugugugauaaa

SEQ ID NO: 2236847 - RNA, 19 nt, Homo sapiens
  misc_RNA (1)...(19): siRNA sense strand
cugauaaaguccaugagaa

SEQ ID NO: 2236848 - RNA, 19 nt, Homo sapiens
  misc_RNA (1)...(19): siRNA sense strand
uggccaagaccgugggcua

SEQ ID NO: 2236849 - RNA, 19 nt, Homo sapiens
  misc_RNA (1)...(19): siRNA sense strand
gcuacaugguuaugcgcua

SEQ ID NO: 2236850 - RNA, 19 nt, Homo sapiens
  misc_RNA (1)...(19): siRNA sense strand
ccgaggaccuuaaggccaa

SEQ ID NO: 2236851 - RNA, 19 nt, Homo sapiens
  misc_RNA (1)...(19): siRNA sense strand
ccgagagcuuccagaacaa

SEQ ID NO: 2236852 - RNA, 19 nt, Homo sapiens
  misc_RNA (1)...(19): siRNA sense strand
aagacaagaagcaggcaaa

SEQ ID NO: 2236853 - RNA, 19 nt, Homo sapiens
  misc_RNA (1)...(19): siRNA sense strand
agaguaaaucagaagcaaa

SEQ ID NO: 2236854 - RNA, 19 nt, Homo sapiens
  misc_RNA (1)...(19): siRNA sense strand
gcacagaaaugauugcuga

SEQ ID NO: 2236855 - RNA, 19 nt, Homo sapiens
  misc_RNA (1)...(19): siRNA sense strand
guggaaacuccgugugcua

SEQ ID NO: 2236856 - RNA, 19 nt, Homo sapiens
  misc_RNA (1)...(19): siRNA sense strand
ccuccaaagaagacaagaa

SEQ ID NO: 2236857 - RNA, 19 nt, Homo sapiens
  misc_RNA (1)...(19): siRNA sense strand
acaugaaggaagagguuga

SEQ ID NO: 2236858 - RNA, 19 nt, Homo sapiens
  misc_RNA (1)...(19): siRNA sense strand
gcgugaaagacguagauga

SEQ ID NO: 2236859 - RNA, 19 nt, Homo sapiens
  misc_RNA (1)...(19): siRNA sense strand
guggaaaugaggugggcau

SEQ ID NO: 2236860 - RNA, 19 nt, Homo sapiens
  misc_RNA (1)...(19): siRNA sense strand
cuguaaacacaucgaggaa

SEQ ID NO: 2236861 - RNA, 19 nt, Homo sapiens
  misc_RNA (1)...(19): siRNA sense strand
agacaaguacagagugaga

SEQ ID NO: 2236862 - RNA, 19 nt, Homo sapiens
  misc_RNA (1)...(19): siRNA sense strand
ucagaagaucguugaggaa

SEQ ID NO: 2236863 - RNA, 19 nt, Homo sapiens
  misc_RNA (1)...(19): siRNA sense strand
agauggaggugaugaagau

SEQ ID NO: 2236864 - RNA, 19 nt, Homo sapiens
  misc_RNA (1)...(19): siRNA sense strand
cuaugugagugcagggaca

SEQ ID NO: 2236865 - RNA, 19 nt, Homo sapiens
  misc_RNA (1)...(19): siRNA sense strand
cggaccaccuggaggauga

SEQ ID NO: 2236866 - RNA, 19 nt, Homo sapiens
  misc_RNA (1)...(19): siRNA sense strand
cugccgagccauugggauu

SEQ ID NO: 2236867 - RNA, 19 nt, Homo sapiens
  misc_RNA (1)...(19): siRNA sense strand
ccaacaagaucgaggaguc

SEQ ID NO: 2236868 - RNA, 19 nt, Homo sapiens
  misc_RNA (1)...(19): siRNA sense strand
gugauaaaccucagggaac

SEQ ID NO: 2236869 - RNA, 19 nt, Homo sapiens
  misc_RNA (1)...(19): siRNA sense strand
ugauaaaguccaugagaag

SEQ ID NO: 2236870 - RNA, 19 nt, Homo sapiens
  misc_RNA (1)...(19): siRNA sense strand
ccuaugagauguuccgcaa

SEQ ID NO: 2236871 - RNA, 19 nt, Homo sapiens
  misc_RNA (1)...(19): siRNA sense strand
gguaugaagugacggacca

SEQ ID NO: 2236872 - RNA, 19 nt, Homo sapiens
  misc_RNA (1)...(19): siRNA sense strand
cugacauccuggaguggaa

SEQ ID NO: 2236873 - RNA, 19 nt, Homo sapiens
  misc_RNA (1)...(19): siRNA sense strand
ugauaaaccucagggaaca

SEQ ID NO: 2236874 - RNA, 19 nt, Homo sapiens
  misc_RNA (1)...(19): siRNA sense strand
ugagaaagugcaaaagaaa

SEQ ID NO: 2236875 - RNA, 19 nt, Homo sapiens
  misc_RNA (1)...(19): siRNA sense strand
gggcagaggcgauucccaa

SEQ ID NO: 2236876 - RNA, 19 nt, Homo sapiens
  misc_RNA (1)...(19): siRNA sense strand
gcugaaagauauccggcuu

SEQ ID NO: 2236877 - RNA, 19 nt, Homo sapiens
  misc_RNA (1)...(19): siRNA sense strand
cccuauacuccgaggauga

SEQ ID NO: 2236878 - RNA, 19 nt, Homo sapiens
  misc_RNA (1)...(19): siRNA sense strand
gcuaaaggcucgcgaggac

SEQ ID NO: 2236879 - RNA, 19 nt, Homo sapiens
  misc_RNA (1)...(19): siRNA sense strand
ccguggacugugugauaua

SEQ ID NO: 2236880 - RNA, 19 nt, Homo sapiens
  misc_RNA (1)...(19): siRNA sense strand
ggacaguggaauaccucua

SEQ ID NO: 2236881 - RNA, 19 nt, Homo sapiens
  misc_RNA (1)...(19): siRNA sense strand
acgcugagauggaggugau

SEQ ID NO: 2236882 - RNA, 19 nt, Homo sapiens
  misc_RNA (1)...(19): siRNA sense strand
agauacaugaucacggaua

SEQ ID NO: 2236883 - RNA, 19 nt, Homo sapiens
  misc_RNA (1)...(19): siRNA sense strand
gcuucuguauggagaguca

SEQ ID NO: 2236884 - RNA, 19 nt, Homo sapiens
  misc_RNA (1)...(19): siRNA sense strand
cagaacaacuacaucgaca

SEQ ID NO: 2236885 - RNA, 19 nt, Homo sapiens
  misc_RNA (1)...(19): siRNA sense strand
cugagauggaggugaugaa

SEQ ID NO: 2236886 - RNA, 19 nt, Homo sapiens
  misc_RNA (1)...(19): siRNA sense strand
ggaacguggcagagcggau

SEQ ID NO: 2236887 - RNA, 19 nt, Homo sapiens
  misc_RNA (1)...(19): siRNA sense strand
gugcaaaagaaaccgaaua

SEQ ID NO: 2236888 - RNA, 19 nt, Homo sapiens
  misc_RNA (1)...(19): siRNA sense strand
caagagaugcugaugccaa

SEQ ID NO: 2236889 - RNA, 19 nt, Homo sapiens
  misc_RNA (1)...(19): siRNA sense strand
ucgaggaguccgugcgcua

SEQ ID NO: 2236890 - RNA, 19 nt, Homo sapiens
  misc_RNA (1)...(19): siRNA sense strand
ucaacaagguccugggaag

SEQ ID NO: 2236891 - RNA, 19 nt, Homo sapiens
  misc_RNA (1)...(19): siRNA sense strand
ggccguggacugugugaua

SEQ ID NO: 2236892 - RNA, 19 nt, Homo sapiens
  misc_RNA (1)...(19): siRNA sense strand
cugagaaagugcaaaagaa

SEQ ID NO: 2236893 - RNA, 19 nt, Homo sapiens
  misc_RNA (1)...(19): siRNA sense strand
gaaagaaacugcacagggu

SEQ ID NO: 2236894 - RNA, 19 nt, Homo sapiens
  misc_RNA (1)...(19): siRNA sense strand
ugaaagacauguaugacca

SEQ ID NO: 2236895 - RNA, 19 nt, Homo sapiens
  misc_RNA (1)...(19): siRNA sense strand
gaagacaagaagcaggcaa

SEQ ID NO: 2236896 - RNA, 19 nt, Homo sapiens
  misc_RNA (1)...(19): siRNA sense strand
ggaauuaauuuacgagggu

SEQ ID NO: 2236897 - RNA, 19 nt, Homo sapiens
  misc_RNA (1)...(19): siRNA sense strand
gaguaaaucagaagcaaac

SEQ ID NO: 2236898 - RNA, 19 nt, Homo sapiens
  misc_RNA (1)...(19): siRNA sense strand
ucguagauguggaauuaau

SEQ ID NO: 2236899 - RNA, 19 nt, Homo sapiens
  misc_RNA (1)...(19): siRNA sense strand
caacaagguccugggaaga

SEQ ID NO: 2236900 - RNA, 19 nt, Homo sapiens
  misc_RNA (1)...(19): siRNA sense strand
agacacaacccgugcgaga

SEQ ID NO: 2236901 - RNA, 19 nt, Homo sapiens
  misc_RNA (1)...(19): siRNA sense strand
uggaaaucaugcuggacau

SEQ ID NO: 2236902 - RNA, 19 nt, Homo sapiens
  misc_RNA (1)...(19): siRNA sense strand
uggacuuccugguggagaa

SEQ ID NO: 2236903 - RNA, 19 nt, Homo sapiens
  misc_RNA (1)...(19): siRNA sense strand
cagcaaagccucagccaag

SEQ ID NO: 2236904 - RNA, 19 nt, Homo sapiens
  misc_RNA (1)...(19): siRNA sense strand
agaccauugaacagaagaa

SEQ ID NO: 2236905 - RNA, 19 nt, Homo sapiens
  misc_RNA (1)...(19): siRNA sense strand
uggccaagaaguucaacaa

SEQ ID NO: 2236906 - RNA, 19 nt, Homo sapiens
  misc_RNA (1)...(19): siRNA sense strand
cgggcaaugggcuggaaau

SEQ ID NO: 2236907 - RNA, 19 nt, Homo sapiens
  misc_RNA (1)...(19): siRNA sense strand
acgccuacgaggucauuaa

SEQ ID NO: 2236908 - RNA, 19 nt, Homo sapiens
  misc_RNA (1)...(19): siRNA sense strand
acgaggucauuaagcacaa

SEQ ID NO: 2236909 - RNA, 19 nt, Homo sapiens
  misc_RNA (1)...(19): siRNA sense strand
gaugaaaagcagcuggaga

SEQ ID NO: 2236910 - RNA, 19 nt, Homo sapiens
  misc_RNA (1)...(19): siRNA sense strand
uugaacagaagaaggccua

SEQ ID NO: 2236911 - RNA, 19 nt, Homo sapiens
  misc_RNA (1)...(19): siRNA sense strand
augaaaagcagcuggagau

SEQ ID NO: 2236912 - RNA, 19 nt, Homo sapiens
  misc_RNA (1)...(19): siRNA sense strand
cugcaaagcuguuaccaug

SEQ ID NO: 2236913 - RNA, 19 nt, Homo sapiens
  misc_RNA (1)...(19): siRNA sense strand
agacacaacccgugcgaga

SEQ ID NO: 2236914 - RNA, 19 nt, Homo sapiens
  misc_RNA (1)...(19): siRNA sense strand
uggaaaucaugcuggacau

SEQ ID NO: 2236915 - RNA, 19 nt, Homo sapiens
  misc_RNA (1)...(19): siRNA sense strand
uggacuuccugguggagaa

SEQ ID NO: 2236916 - RNA, 19 nt, Homo sapiens
  misc_RNA (1)...(19): siRNA sense strand
cagcaaagccucagccaag

SEQ ID NO: 2236917 - RNA, 19 nt, Homo sapiens
  misc_RNA (1)...(19): siRNA sense strand
agaccauugaacagaagaa

SEQ ID NO: 2236918 - RNA, 19 nt, Homo sapiens
  misc_RNA (1)...(19): siRNA sense strand
uggccaagaaguucaacaa

SEQ ID NO: 2236919 - RNA, 19 nt, Homo sapiens
  misc_RNA (1)...(19): siRNA sense strand
cgggcaaugggcuggaaau

SEQ ID NO: 2236920 - RNA, 19 nt, Homo sapiens
  misc_RNA (1)...(19): siRNA sense strand
acgccuacgaggucauuaa

SEQ ID NO: 2236921 - RNA, 19 nt, Homo sapiens
  misc_RNA (1)...(19): siRNA sense strand
acgaggucauuaagcacaa

SEQ ID NO: 2236922 - RNA, 19 nt, Homo sapiens
  misc_RNA (1)...(19): siRNA sense strand
gaugaaaagcagcuggaga

SEQ ID NO: 2236923 - RNA, 19 nt, Homo sapiens
  misc_RNA (1)...(19): siRNA sense strand
uugaacagaagaaggccua

SEQ ID NO: 2236924 - RNA, 19 nt, Homo sapiens
  misc_RNA (1)...(19): siRNA sense strand
augaaaagcagcuggagau

SEQ ID NO: 2236925 - RNA, 19 nt, Homo sapiens
  misc_RNA (1)...(19): siRNA sense strand
cugcaaagcuguuaccaug

SEQ ID NO: 2236926 - RNA, 19 nt, Homo sapiens
  misc_RNA (1)...(19): siRNA sense strand
ccugaagacaagaaagaaa

SEQ ID NO: 2236927 - RNA, 19 nt, Homo sapiens
  misc_RNA (1)...(19): siRNA sense strand
agaugaagaaggaagggaa

SEQ ID NO: 2236928 - RNA, 19 nt, Homo sapiens
  misc_RNA (1)...(19): siRNA sense strand
caucauagcugaaggcauc

SEQ ID NO: 2236929 - RNA, 19 nt, Homo sapiens
  misc_RNA (1)...(19): siRNA sense strand
gcuuacgggugaugggaga

SEQ ID NO: 2236930 - RNA, 19 nt, Homo sapiens
  misc_RNA (1)...(19): siRNA sense strand
ccaacuaucaggagggcuu

SEQ ID NO: 2236931 - RNA, 19 nt, Homo sapiens
  misc_RNA (1)...(19): siRNA sense strand
ccucaugacccgagagaag

SEQ ID NO: 2236932 - RNA, 19 nt, Homo sapiens
  misc_RNA (1)...(19): siRNA sense strand
gggcaucgugagagcaauu

SEQ ID NO: 2236933 - RNA, 19 nt, Homo sapiens
  misc_RNA (1)...(19): siRNA sense strand
cugaagacaagaaagaaau

SEQ ID NO: 2236934 - RNA, 19 nt, Homo sapiens
  misc_RNA (1)...(19): siRNA sense strand
gugucaacgagcuggcaaa

SEQ ID NO: 2236935 - RNA, 19 nt, Homo sapiens
  misc_RNA (1)...(19): siRNA sense strand
uugcagaccucgaugccaa

SEQ ID NO: 2236936 - RNA, 19 nt, Homo sapiens
  misc_RNA (1)...(19): siRNA sense strand
guucaagggcaucgugaga

SEQ ID NO: 2236937 - RNA, 19 nt, Homo sapiens
  misc_RNA (1)...(19): siRNA sense strand
acgagaaagcugaucaaga

SEQ ID NO: 2236938 - RNA, 19 nt, Homo sapiens
  misc_RNA (1)...(19): siRNA sense strand
uuucagagcagacgggcaa

SEQ ID NO: 2236939 - RNA, 19 nt, Homo sapiens
  misc_RNA (1)...(19): siRNA sense strand
cacuggaaguagagaagau

SEQ ID NO: 2236940 - RNA, 19 nt, Homo sapiens
  misc_RNA (1)...(19): siRNA sense strand
caggagggcuuacggguga

SEQ ID NO: 2236941 - RNA, 19 nt, Homo sapiens
  misc_RNA (1)...(19): siRNA sense strand
ggaagcugaucaugggcau

SEQ ID NO: 2236942 - RNA, 19 nt, Homo sapiens
  misc_RNA (1)...(19): siRNA sense strand
gccagaacuugguagucaa

SEQ ID NO: 2236943 - RNA, 19 nt, Homo sapiens
  misc_RNA (1)...(19): siRNA sense strand
ucaaggaagagaugggcau

SEQ ID NO: 2236944 - RNA, 19 nt, Homo sapiens
  misc_RNA (1)...(19): siRNA sense strand
ccaucauagcugaaggcau

SEQ ID NO: 2236945 - RNA, 19 nt, Homo sapiens
  misc_RNA (1)...(19): siRNA sense strand
cugcaguagccaagaacca

SEQ ID NO: 2236946 - RNA, 19 nt, Homo sapiens
  misc_RNA (1)...(19): siRNA sense strand
ugugguucuuggagagauu

SEQ ID NO: 2236947 - RNA, 19 nt, Homo sapiens
  misc_RNA (1)...(19): siRNA sense strand
ccuaaguacucuugccagu

SEQ ID NO: 2236948 - RNA, 19 nt, Homo sapiens
  misc_RNA (1)...(19): siRNA sense strand
cuggaaguagagaagauua

SEQ ID NO: 2236949 - RNA, 19 nt, Homo sapiens
  misc_RNA (1)...(19): siRNA sense strand
gagaugugucugaugguga

SEQ ID NO: 2236950 - RNA, 19 nt, Homo sapiens
  misc_RNA (1)...(19): siRNA sense strand
cgggaagaccacugggauc

SEQ ID NO: 2236951 - RNA, 19 nt, Homo sapiens
  misc_RNA (1)...(19): siRNA sense strand
cgauaaacaacccagacau

SEQ ID NO: 2236952 - RNA, 19 nt, Homo sapiens
  misc_RNA (1)...(19): siRNA sense strand
agaagcacccagauggcaa

SEQ ID NO: 2236953 - RNA, 19 nt, Homo sapiens
  misc_RNA (1)...(19): siRNA sense strand
cgugagagcaauucgagau

SEQ ID NO: 2236954 - RNA, 19 nt, Homo sapiens
  misc_RNA (1)...(19): siRNA sense strand
gugggaugcuggacaacau

SEQ ID NO: 2236955 - RNA, 19 nt, Homo sapiens
  misc_RNA (1)...(19): siRNA sense strand
cgauaccaucugugaucua

SEQ ID NO: 2236956 - RNA, 19 nt, Homo sapiens
  misc_RNA (1)...(19): siRNA sense strand
cgauuaugcacuggaagua

SEQ ID NO: 2236957 - RNA, 19 nt, Homo sapiens
  misc_RNA (1)...(19): siRNA sense strand
ugaugagcuuggagagauc

SEQ ID NO: 2236958 - RNA, 19 nt, Homo sapiens
  misc_RNA (1)...(19): siRNA sense strand
gggccagggagcuugguuu

SEQ ID NO: 2236959 - RNA, 19 nt, Homo sapiens
  misc_RNA (1)...(19): siRNA sense strand
gugagagcaauucgagauu

SEQ ID NO: 2236960 - RNA, 19 nt, Homo sapiens
  misc_RNA (1)...(19): siRNA sense strand
ggagaagucgggaagacca

SEQ ID NO: 2236961 - RNA, 19 nt, Homo sapiens
  misc_RNA (1)...(19): siRNA sense strand
cuuuaagauuggcaacaca

SEQ ID NO: 2236962 - RNA, 19 nt, Homo sapiens
  misc_RNA (1)...(19): siRNA sense strand
ucacgagaaagcugaucaa

SEQ ID NO: 2236963 - RNA, 19 nt, Homo sapiens
  misc_RNA (1)...(19): siRNA sense strand
agccagaccagcugaucaa

SEQ ID NO: 2236964 - RNA, 19 nt, Homo sapiens
  misc_RNA (1)...(19): siRNA sense strand
aggcauauccagaggaagc

SEQ ID NO: 2236965 - RNA, 19 nt, Homo sapiens
  misc_RNA (1)...(19): siRNA sense strand
gcuuagaaacugugggucc

SEQ ID NO: 2236966 - RNA, 19 nt, Homo sapiens
  misc_RNA (1)...(19): siRNA sense strand
ccugaagacaagaaagaaa

SEQ ID NO: 2236967 - RNA, 19 nt, Homo sapiens
  misc_RNA (1)...(19): siRNA sense strand
agaugaagaaggaagggaa

SEQ ID NO: 2236968 - RNA, 19 nt, Homo sapiens
  misc_RNA (1)...(19): siRNA sense strand
caucauagcugaaggcauc

SEQ ID NO: 2236969 - RNA, 19 nt, Homo sapiens
  misc_RNA (1)...(19): siRNA sense strand
gcuuacgggugaugggaga

SEQ ID NO: 2236970 - RNA, 19 nt, Homo sapiens
  misc_RNA (1)...(19): siRNA sense strand
ccaacuaucaggagggcuu

SEQ ID NO: 2236971 - RNA, 19 nt, Homo sapiens
  misc_RNA (1)...(19): siRNA sense strand
ccucaugacccgagagaag

SEQ ID NO: 2236972 - RNA, 19 nt, Homo sapiens
  misc_RNA (1)...(19): siRNA sense strand
gggcaucgugagagcaauu

SEQ ID NO: 2236973 - RNA, 19 nt, Homo sapiens
  misc_RNA (1)...(19): siRNA sense strand
cugaagacaagaaagaaau

SEQ ID NO: 2236974 - RNA, 19 nt, Homo sapiens
  misc_RNA (1)...(19): siRNA sense strand
gugucaacgagcuggcaaa

SEQ ID NO: 2236975 - RNA, 19 nt, Homo sapiens
  misc_RNA (1)...(19): siRNA sense strand
uugcagaccucgaugccaa

SEQ ID NO: 2236976 - RNA, 19 nt, Homo sapiens
  misc_RNA (1)...(19): siRNA sense strand
guucaagggcaucgugaga

SEQ ID NO: 2236977 - RNA, 19 nt, Homo sapiens
  misc_RNA (1)...(19): siRNA sense strand
acgagaaagcugaucaaga

SEQ ID NO: 2236978 - RNA, 19 nt, Homo sapiens
  misc_RNA (1)...(19): siRNA sense strand
uuucagagcagacgggcaa

SEQ ID NO: 2236979 - RNA, 19 nt, Homo sapiens
  misc_RNA (1)...(19): siRNA sense strand
cacuggaaguagagaagau

SEQ ID NO: 2236980 - RNA, 19 nt, Homo sapiens
  misc_RNA (1)...(19): siRNA sense strand
caggagggcuuacggguga

SEQ ID NO: 2236981 - RNA, 19 nt, Homo sapiens
  misc_RNA (1)...(19): siRNA sense strand
ggaagcugaucaugggcau

SEQ ID NO: 2236982 - RNA, 19 nt, Homo sapiens
  misc_RNA (1)...(19): siRNA sense strand
gccagaacuugguagucaa

SEQ ID NO: 2236983 - RNA, 19 nt, Homo sapiens
  misc_RNA (1)...(19): siRNA sense strand
ucaaggaagagaugggcau

SEQ ID NO: 2236984 - RNA, 19 nt, Homo sapiens
  misc_RNA (1)...(19): siRNA sense strand
ccaucauagcugaaggcau

SEQ ID NO: 2236985 - RNA, 19 nt, Homo sapiens
  misc_RNA (1)...(19): siRNA sense strand
cugcaguagccaagaacca

SEQ ID NO: 2236986 - RNA, 19 nt, Homo sapiens
  misc_RNA (1)...(19): siRNA sense strand
ugugguucuuggagagauu

SEQ ID NO: 2236987 - RNA, 19 nt, Homo sapiens
  misc_RNA (1)...(19): siRNA sense strand
ccuaaguacucuugccagu

SEQ ID NO: 2236988 - RNA, 19 nt, Homo sapiens
  misc_RNA (1)...(19): siRNA sense strand
cuggaaguagagaagauua

SEQ ID NO: 2236989 - RNA, 19 nt, Homo sapiens
  misc_RNA (1)...(19): siRNA sense strand
gagaugugucugaugguga

SEQ ID NO: 2236990 - RNA, 19 nt, Homo sapiens
  misc_RNA (1)...(19): siRNA sense strand
cgggaagaccacugggauc

SEQ ID NO: 2236991 - RNA, 19 nt, Homo sapiens
  misc_RNA (1)...(19): siRNA sense strand
cgauaaacaacccagacau

SEQ ID NO: 2236992 - RNA, 19 nt, Homo sapiens
  misc_RNA (1)...(19): siRNA sense strand
agaagcacccagauggcaa

SEQ ID NO: 2236993 - RNA, 19 nt, Homo sapiens
  misc_RNA (1)...(19): siRNA sense strand
cgugagagcaauucgagau

SEQ ID NO: 2236994 - RNA, 19 nt, Homo sapiens
  misc_RNA (1)...(19): siRNA sense strand
gugggaugcuggacaacau

SEQ ID NO: 2236995 - RNA, 19 nt, Homo sapiens
  misc_RNA (1)...(19): siRNA sense strand
cgauaccaucugugaucua

SEQ ID NO: 2236996 - RNA, 19 nt, Homo sapiens
  misc_RNA (1)...(19): siRNA sense strand
cgauuaugcacuggaagua

SEQ ID NO: 2236997 - RNA, 19 nt, Homo sapiens
  misc_RNA (1)...(19): siRNA sense strand
ugaugagcuuggagagauc

SEQ ID NO: 2236998 - RNA, 19 nt, Homo sapiens
  misc_RNA (1)...(19): siRNA sense strand
gggccagggagcuugguuu

SEQ ID NO: 2236999 - RNA, 19 nt, Homo sapiens
  misc_RNA (1)...(19): siRNA sense strand
gugagagcaauucgagauu

SEQ ID NO: 2237000 - RNA, 19 nt, Homo sapiens
  misc_RNA (1)...(19): siRNA sense strand
ggagaagucgggaagacca

SEQ ID NO: 2237001 - RNA, 19 nt, Homo sapiens
  misc_RNA (1)...(19): siRNA sense strand
cuuuaagauuggcaacaca

SEQ ID NO: 2237002 - RNA, 19 nt, Homo sapiens
  misc_RNA (1)...(19): siRNA sense strand
ucacgagaaagcugaucaa

SEQ ID NO: 2237003 - RNA, 19 nt, Homo sapiens
  misc_RNA (1)...(19): siRNA sense strand
agccagaccagcugaucaa

SEQ ID NO: 2237004 - RNA, 19 nt, Homo sapiens
  misc_RNA (1)...(19): siRNA sense strand
aggcauauccagaggaagc

SEQ ID NO: 2237005 - RNA, 19 nt, Homo sapiens
  misc_RNA (1)...(19): siRNA sense strand
gcuuagaaacugugggucc

SEQ ID NO: 2237006 - RNA, 19 nt, Homo sapiens
  misc_RNA (1)...(19): siRNA sense strand
ggaaauuacauaugggaac

SEQ ID NO: 2237007 - RNA, 19 nt, Homo sapiens
  misc_RNA (1)...(19): siRNA sense strand
ugcaaagacagcaaggaaa

SEQ ID NO: 2237008 - RNA, 19 nt, Homo sapiens
  misc_RNA (1)...(19): siRNA sense strand
aagagagauauguggagaa

SEQ ID NO: 2237009 - RNA, 19 nt, Homo sapiens
  misc_RNA (1)...(19): siRNA sense strand
aggaaauuacauaugggaa

SEQ ID NO: 2237010 - RNA, 19 nt, Homo sapiens
  misc_RNA (1)...(19): siRNA sense strand
cagcaaggaaagcgccuau

SEQ ID NO: 2237011 - RNA, 19 nt, Homo sapiens
  misc_RNA (1)...(19): siRNA sense strand
caagagagauauguggaga

SEQ ID NO: 2237012 - RNA, 19 nt, Homo sapiens
  misc_RNA (1)...(19): siRNA sense strand
ccgugguugcuaaagauaa

SEQ ID NO: 2237013 - RNA, 19 nt, Homo sapiens
  misc_RNA (1)...(19): siRNA sense strand
ucaucaaggucaaagggaa

SEQ ID NO: 2237014 - RNA, 19 nt, Homo sapiens
  misc_RNA (1)...(19): siRNA sense strand
guuuauaauuuccuggcaa

SEQ ID NO: 2237015 - RNA, 19 nt, Homo sapiens
  misc_RNA (1)...(19): siRNA sense strand
gagaagaacacaaucguca

SEQ ID NO: 2237016 - RNA, 19 nt, Homo sapiens
  misc_RNA (1)...(19): siRNA sense strand
ccauugagcgggacggcua

SEQ ID NO: 2237017 - RNA, 19 nt, Homo sapiens
  misc_RNA (1)...(19): siRNA sense strand
gcaaggaccuggaggaccu

SEQ ID NO: 2237018 - RNA, 19 nt, Homo sapiens
  misc_RNA (1)...(19): siRNA sense strand
ccuuacaaccacaggauga

SEQ ID NO: 2237019 - RNA, 19 nt, Homo sapiens
  misc_RNA (1)...(19): siRNA sense strand
cugcuagagaagaacauua

SEQ ID NO: 2237020 - RNA, 19 nt, Homo sapiens
  misc_RNA (1)...(19): siRNA sense strand
aggccaacuccgugcgcaa

SEQ ID NO: 2237021 - RNA, 19 nt, Homo sapiens
  misc_RNA (1)...(19): siRNA sense strand
ggaaauugagcgaggcaag

SEQ ID NO: 2237022 - RNA, 19 nt, Homo sapiens
  misc_RNA (1)...(19): siRNA sense strand
gggacaggaaggacaucaa

SEQ ID NO: 2237023 - RNA, 19 nt, Homo sapiens
  misc_RNA (1)...(19): siRNA sense strand
agaagauuguguauggaca

SEQ ID NO: 2237024 - RNA, 19 nt, Homo sapiens
  misc_RNA (1)...(19): siRNA sense strand
gggcaagguggcagagaag

SEQ ID NO: 2237025 - RNA, 19 nt, Homo sapiens
  misc_RNA (1)...(19): siRNA sense strand
caucaaggucaaagggaag

SEQ ID NO: 2237026 - RNA, 19 nt, Homo sapiens
  misc_RNA (1)...(19): siRNA sense strand
agauucacccuguggacaa

SEQ ID NO: 2237027 - RNA, 19 nt, Homo sapiens
  misc_RNA (1)...(19): siRNA sense strand
ccaggauccacgagaccaa

SEQ ID NO: 2237028 - RNA, 19 nt, Homo sapiens
  misc_RNA (1)...(19): siRNA sense strand
augcacagaucuugaggga

SEQ ID NO: 2237029 - RNA, 19 nt, Homo sapiens
  misc_RNA (1)...(19): siRNA sense strand
augaccugcuagagaagaa

SEQ ID NO: 2237030 - RNA, 19 nt, Homo sapiens
  misc_RNA (1)...(19): siRNA sense strand
gggccaaggacaucaacca

SEQ ID NO: 2237031 - RNA, 19 nt, Homo sapiens
  misc_RNA (1)...(19): siRNA sense strand
uggcagagaaggaaggaug

SEQ ID NO: 2237032 - RNA, 19 nt, Homo sapiens
  misc_RNA (1)...(19): siRNA sense strand
uugacaagugggauggcaa

SEQ ID NO: 2237033 - RNA, 19 nt, Homo sapiens
  misc_RNA (1)...(19): siRNA sense strand
acuuugagcccaacgagua

SEQ ID NO: 2237034 - RNA, 19 nt, Homo sapiens
  misc_RNA (1)...(19): siRNA sense strand
gcugaugaauucaaggauc

SEQ ID NO: 2237035 - RNA, 19 nt, Homo sapiens
  misc_RNA (1)...(19): siRNA sense strand
cagugggacaggaaggaca

SEQ ID NO: 2237036 - RNA, 19 nt, Homo sapiens
  misc_RNA (1)...(19): siRNA sense strand
ggugaaagguggcacaggu

SEQ ID NO: 2237037 - RNA, 19 nt, Homo sapiens
  misc_RNA (1)...(19): siRNA sense strand
ccaucaucaccaagagcuu

SEQ ID NO: 2237038 - RNA, 19 nt, Homo sapiens
  misc_RNA (1)...(19): siRNA sense strand
ggaaggaccuguaugccaa

SEQ ID NO: 2237039 - RNA, 19 nt, Homo sapiens
  misc_RNA (1)...(19): siRNA sense strand
ggucgguaugggucagaaa

SEQ ID NO: 2237040 - RNA, 19 nt, Homo sapiens
  misc_RNA (1)...(19): siRNA sense strand
agaucauguuugagaccuu

SEQ ID NO: 2237041 - RNA, 19 nt, Homo sapiens
  misc_RNA (1)...(19): siRNA sense strand
cagcagauguggaucacca

SEQ ID NO: 2237042 - RNA, 19 nt, Homo sapiens
  misc_RNA (1)...(19): siRNA sense strand
gagaagaucuggcaccaca

SEQ ID NO: 2237043 - RNA, 19 nt, Homo sapiens
  misc_RNA (1)...(19): siRNA sense strand
aggccaaccgcgagaagau

SEQ ID NO: 2237044 - RNA, 19 nt, Homo sapiens
  misc_RNA (1)...(19): siRNA sense strand
gcccagagcaagagaggca

SEQ ID NO: 2237045 - RNA, 19 nt, Homo sapiens
  misc_RNA (1)...(19): siRNA sense strand
gcaaguacuccguguggau

SEQ ID NO: 2237046 - RNA, 19 nt, Homo sapiens
  misc_RNA (1)...(19): siRNA sense strand
agaucauguuugagaccuu

SEQ ID NO: 2237047 - RNA, 19 nt, Homo sapiens
  misc_RNA (1)...(19): siRNA sense strand
aggccaaccgcgagaagau

SEQ ID NO: 2237048 - RNA, 19 nt, Homo sapiens
  misc_RNA (1)...(19): siRNA sense strand
cgggaaaucgugcgugaca

SEQ ID NO: 2237049 - RNA, 19 nt, Homo sapiens
  misc_RNA (1)...(19): siRNA sense strand
cagcagauguggaucagca

SEQ ID NO: 2237050 - RNA, 19 nt, Homo sapiens
  misc_RNA (1)...(19): siRNA sense strand
gugcgugacauuaaggaga

SEQ ID NO: 2237051 - RNA, 19 nt, Homo sapiens
  misc_RNA (1)...(19): siRNA sense strand
ggcaugggucagaaggauu

SEQ ID NO: 2237052 - RNA, 19 nt, Homo sapiens
  misc_RNA (1)...(19): siRNA sense strand
caguaauagugauggaaua

SEQ ID NO: 2237053 - RNA, 19 nt, Homo sapiens
  misc_RNA (1)...(19): siRNA sense strand
cuuacaagcuugaaggaaa

SEQ ID NO: 2237054 - RNA, 19 nt, Homo sapiens
  misc_RNA (1)...(19): siRNA sense strand
gugaacagaugcaaggaaa

SEQ ID NO: 2237055 - RNA, 19 nt, Homo sapiens
  misc_RNA (1)...(19): siRNA sense strand
gaagaaaugugauggguca

SEQ ID NO: 2237056 - RNA, 19 nt, Homo sapiens
  misc_RNA (1)...(19): siRNA sense strand
aauaaugagcugaaggaua

SEQ ID NO: 2237057 - RNA, 19 nt, Homo sapiens
  misc_RNA (1)...(19): siRNA sense strand
cuguagaacuuguaaagaa

SEQ ID NO: 2237058 - RNA, 19 nt, Homo sapiens
  misc_RNA (1)...(19): siRNA sense strand
gcgcaaaggcaguuguauu

SEQ ID NO: 2237059 - RNA, 19 nt, Homo sapiens
  misc_RNA (1)...(19): siRNA sense strand
ggaaggucuaugugagaaa

SEQ ID NO: 2237060 - RNA, 19 nt, Homo sapiens
  misc_RNA (1)...(19): siRNA sense strand
cagcagaauucuuguaaca

SEQ ID NO: 2237061 - RNA, 19 nt, Homo sapiens
  misc_RNA (1)...(19): siRNA sense strand
caacugaaacucaaggaaa

SEQ ID NO: 2237062 - RNA, 19 nt, Homo sapiens
  misc_RNA (1)...(19): siRNA sense strand
cuuugaaguuccagaaauu

SEQ ID NO: 2237063 - RNA, 19 nt, Homo sapiens
  misc_RNA (1)...(19): siRNA sense strand
agaaauggauacugaccaa

SEQ ID NO: 2237064 - RNA, 19 nt, Homo sapiens
  misc_RNA (1)...(19): siRNA sense strand
cauaaauacccaagacauu

SEQ ID NO: 2237065 - RNA, 19 nt, Homo sapiens
  misc_RNA (1)...(19): siRNA sense strand
caaaagaugaccugagaaa

SEQ ID NO: 2237066 - RNA, 19 nt, Homo sapiens
  misc_RNA (1)...(19): siRNA sense strand
cauucgaacuuuaggaaaa

SEQ ID NO: 2237067 - RNA, 19 nt, Homo sapiens
  misc_RNA (1)...(19): siRNA sense strand
cugaagaaugaaacagaaa

SEQ ID NO: 2237068 - RNA, 19 nt, Homo sapiens
  misc_RNA (1)...(19): siRNA sense strand
uagaugaacacaugggaua

SEQ ID NO: 2237069 - RNA, 19 nt, Homo sapiens
  misc_RNA (1)...(19): siRNA sense strand
auuuaugacuguagagaga

SEQ ID NO: 2237070 - RNA, 19 nt, Homo sapiens
  misc_RNA (1)...(19): siRNA sense strand
gggaaauacuagaaccuca

SEQ ID NO: 2237071 - RNA, 19 nt, Homo sapiens
  misc_RNA (1)...(19): siRNA sense strand
ugauaauagccgagcucaa

SEQ ID NO: 2237072 - RNA, 19 nt, Homo sapiens
  misc_RNA (1)...(19): siRNA sense strand
gaaacuagugagagcagaa

SEQ ID NO: 2237073 - RNA, 19 nt, Homo sapiens
  misc_RNA (1)...(19): siRNA sense strand
gugccacaccagaggaaua

SEQ ID NO: 2237074 - RNA, 19 nt, Homo sapiens
  misc_RNA (1)...(19): siRNA sense strand
uggaaaucauugaggagau

SEQ ID NO: 2237075 - RNA, 19 nt, Homo sapiens
  misc_RNA (1)...(19): siRNA sense strand
aaucaagacucgaaauaga

SEQ ID NO: 2237076 - RNA, 19 nt, Homo sapiens
  misc_RNA (1)...(19): siRNA sense strand
ccuaaagaauccuguuauu

SEQ ID NO: 2237077 - RNA, 19 nt, Homo sapiens
  misc_RNA (1)...(19): siRNA sense strand
caacaagcaauguggauga

SEQ ID NO: 2237078 - RNA, 19 nt, Homo sapiens
  misc_RNA (1)...(19): siRNA sense strand
gaauugagguagaugcaga

SEQ ID NO: 2237079 - RNA, 19 nt, Homo sapiens
  misc_RNA (1)...(19): siRNA sense strand
caaugaaaugguuggagaa

SEQ ID NO: 2237080 - RNA, 19 nt, Homo sapiens
  misc_RNA (1)...(19): siRNA sense strand
ugaggaaugauuuggguaa

SEQ ID NO: 2237081 - RNA, 19 nt, Homo sapiens
  misc_RNA (1)...(19): siRNA sense strand
caaaacagacugaggaaau

SEQ ID NO: 2237082 - RNA, 19 nt, Homo sapiens
  misc_RNA (1)...(19): siRNA sense strand
ucgaagagcaugugaaguu

SEQ ID NO: 2237083 - RNA, 19 nt, Homo sapiens
  misc_RNA (1)...(19): siRNA sense strand
gugccaggguagcuagaaa

SEQ ID NO: 2237084 - RNA, 19 nt, Homo sapiens
  misc_RNA (1)...(19): siRNA sense strand
gaggaaugauuuggguaaa

SEQ ID NO: 2237085 - RNA, 19 nt, Homo sapiens
  misc_RNA (1)...(19): siRNA sense strand
uuaaauaugcugcuggaaa

SEQ ID NO: 2237086 - RNA, 19 nt, Homo sapiens
  misc_RNA (1)...(19): siRNA sense strand
caagaaauaaugagcugaa

SEQ ID NO: 2237087 - RNA, 19 nt, Homo sapiens
  misc_RNA (1)...(19): siRNA sense strand
uggcauugaagauaagaaa

SEQ ID NO: 2237088 - RNA, 19 nt, Homo sapiens
  misc_RNA (1)...(19): siRNA sense strand
ggguaguaacuuugcagaa

SEQ ID NO: 2237089 - RNA, 19 nt, Homo sapiens
  misc_RNA (1)...(19): siRNA sense strand
gauggaaauaauagccaaa

SEQ ID NO: 2237090 - RNA, 19 nt, Homo sapiens
  misc_RNA (1)...(19): siRNA sense strand
gaagacuaucagaguguaa

SEQ ID NO: 2237091 - RNA, 19 nt, Homo sapiens
  misc_RNA (1)...(19): siRNA sense strand
acaaugaaaugguuggaga

SEQ ID NO: 2237092 - RNA, 19 nt, Homo sapiens
  misc_RNA (1)...(19): siRNA sense strand
uaaauaugcugcuggaaaa

SEQ ID NO: 2237093 - RNA, 19 nt, Homo sapiens
  misc_RNA (1)...(19): siRNA sense strand
ggagcagcauacacagaaa

SEQ ID NO: 2237094 - RNA, 19 nt, Homo sapiens
  misc_RNA (1)...(19): siRNA sense strand
ucucagaagucaaccgauu

SEQ ID NO: 2237095 - RNA, 19 nt, Homo sapiens
  misc_RNA (1)...(19): siRNA sense strand
cagaauuccuacagagcca

SEQ ID NO: 2237096 - RNA, 19 nt, Homo sapiens
  misc_RNA (1)...(19): siRNA sense strand
cuggagaaguugucaauga

SEQ ID NO: 2237097 - RNA, 19 nt, Homo sapiens
  misc_RNA (1)...(19): siRNA sense strand
uugauaagguggugaaaau

SEQ ID NO: 2237098 - RNA, 19 nt, Homo sapiens
  misc_RNA (1)...(19): siRNA sense strand
uguaaauguuguugcugua

SEQ ID NO: 2237099 - RNA, 19 nt, Homo sapiens
  misc_RNA (1)...(19): siRNA sense strand
gggauuugguggaaaacua

SEQ ID NO: 2237100 - RNA, 19 nt, Homo sapiens
  misc_RNA (1)...(19): siRNA sense strand
agaccagauuacaaugaaa

SEQ ID NO: 2237101 - RNA, 19 nt, Homo sapiens
  misc_RNA (1)...(19): siRNA sense strand
uagagaaguuuguuggaga

SEQ ID NO: 2237102 - RNA, 19 nt, Homo sapiens
  misc_RNA (1)...(19): siRNA sense strand
gaguguauaugacaggaaa

SEQ ID NO: 2237103 - RNA, 19 nt, Homo sapiens
  misc_RNA (1)...(19): siRNA sense strand
uugaaggacaugugcauua

SEQ ID NO: 2237104 - RNA, 19 nt, Homo sapiens
  misc_RNA (1)...(19): siRNA sense strand
guggaagccaugagcgcaa

SEQ ID NO: 2237105 - RNA, 19 nt, Homo sapiens
  misc_RNA (1)...(19): siRNA sense strand
cuauuuagcuccauaucaa

SEQ ID NO: 2237106 - RNA, 19 nt, Homo sapiens
  misc_RNA (1)...(19): siRNA sense strand
gagaaguugucaaugaaaa

SEQ ID NO: 2237107 - RNA, 19 nt, Homo sapiens
  misc_RNA (1)...(19): siRNA sense strand
guggaaauaucaagcacau

SEQ ID NO: 2237108 - RNA, 19 nt, Homo sapiens
  misc_RNA (1)...(19): siRNA sense strand
cgauuagauuucucaacaa

SEQ ID NO: 2237109 - RNA, 19 nt, Homo sapiens
  misc_RNA (1)...(19): siRNA sense strand
acagcaaaucaaacagaaa

SEQ ID NO: 2237110 - RNA, 19 nt, Homo sapiens
  misc_RNA (1)...(19): siRNA sense strand
ccaaguacuaugacaaauu

SEQ ID NO: 2237111 - RNA, 19 nt, Homo sapiens
  misc_RNA (1)...(19): siRNA sense strand
caacaaaauggaaaagcaa

SEQ ID NO: 2237112 - RNA, 19 nt, Homo sapiens
  misc_RNA (1)...(19): siRNA sense strand
ccaaaguauuucuagccua

SEQ ID NO: 2237113 - RNA, 19 nt, Homo sapiens
  misc_RNA (1)...(19): siRNA sense strand
auacaguggccuaaagaau

SEQ ID NO: 2237114 - RNA, 19 nt, Homo sapiens
  misc_RNA (1)...(19): siRNA sense strand
aagcuuugccuauggauua

SEQ ID NO: 2237115 - RNA, 19 nt, Homo sapiens
  misc_RNA (1)...(19): siRNA sense strand
aagaucagcaggagguuua

SEQ ID NO: 2237116 - RNA, 19 nt, Homo sapiens
  misc_RNA (1)...(19): siRNA sense strand
gcuauuauuaucagccaaa

SEQ ID NO: 2237117 - RNA, 19 nt, Homo sapiens
  misc_RNA (1)...(19): siRNA sense strand
augccaaacucaacaggaa

SEQ ID NO: 2237118 - RNA, 19 nt, Homo sapiens
  misc_RNA (1)...(19): siRNA sense strand
guguuggcauugaagauaa

SEQ ID NO: 2237119 - RNA, 19 nt, Homo sapiens
  misc_RNA (1)...(19): siRNA sense strand
caaugaggcugaugcguga

SEQ ID NO: 2237120 - RNA, 19 nt, Homo sapiens
  misc_RNA (1)...(19): siRNA sense strand
aagaaaucguggaugggaa

SEQ ID NO: 2237121 - RNA, 19 nt, Homo sapiens
  misc_RNA (1)...(19): siRNA sense strand
gcagagaaguuccggcaga

SEQ ID NO: 2237122 - RNA, 19 nt, Homo sapiens
  misc_RNA (1)...(19): siRNA sense strand
gcaagaugagagugcacaa

SEQ ID NO: 2237123 - RNA, 19 nt, Homo sapiens
  misc_RNA (1)...(19): siRNA sense strand
agaaagacauucacggcau

SEQ ID NO: 2237124 - RNA, 19 nt, Homo sapiens
  misc_RNA (1)...(19): siRNA sense strand
gcagagaaguaccuggaca

SEQ ID NO: 2237125 - RNA, 19 nt, Homo sapiens
  misc_RNA (1)...(19): siRNA sense strand
gcgucaaacugguguccau

SEQ ID NO: 2237126 - RNA, 19 nt, Homo sapiens
  misc_RNA (1)...(19): siRNA sense strand
ucaagaagcaugaggccuu

SEQ ID NO: 2237127 - RNA, 19 nt, Homo sapiens
  misc_RNA (1)...(19): siRNA sense strand
cagagaaguaccuggacau

SEQ ID NO: 2237128 - RNA, 19 nt, Homo sapiens
  misc_RNA (1)...(19): siRNA sense strand
acuacaagccaaagauuga

SEQ ID NO: 2237129 - RNA, 19 nt, Homo sapiens
  misc_RNA (1)...(19): siRNA sense strand
ggaccaucaaugagguaga

SEQ ID NO: 2237130 - RNA, 19 nt, Homo sapiens
  misc_RNA (1)...(19): siRNA sense strand
ccaucaaugagguagagaa

SEQ ID NO: 2237131 - RNA, 19 nt, Homo sapiens
  misc_RNA (1)...(19): siRNA sense strand
ccgaagacaucguuggaac

SEQ ID NO: 2237132 - RNA, 19 nt, Homo sapiens
  misc_RNA (1)...(19): siRNA sense strand
agaaaucguggaugggaau

SEQ ID NO: 2237133 - RNA, 19 nt, Homo sapiens
  misc_RNA (1)...(19): siRNA sense strand
gagaagugccagcuggaga

SEQ ID NO: 2237134 - RNA, 19 nt, Homo sapiens
  misc_RNA (1)...(19): siRNA sense strand
acucagaagcgaagggaag

SEQ ID NO: 2237135 - RNA, 19 nt, Homo sapiens
  misc_RNA (1)...(19): siRNA sense strand
ccgaagaaaucguggaugg

SEQ ID NO: 2237136 - RNA, 19 nt, Homo sapiens
  misc_RNA (1)...(19): siRNA sense strand
ccgucaaccaggagaacga

SEQ ID NO: 2237137 - RNA, 19 nt, Homo sapiens
  misc_RNA (1)...(19): siRNA sense strand
caucaaugagguagagaac

SEQ ID NO: 2237138 - RNA, 19 nt, Homo sapiens
  misc_RNA (1)...(19): siRNA sense strand
agugccagcuggagaucaa

SEQ ID NO: 2237139 - RNA, 19 nt, Homo sapiens
  misc_RNA (1)...(19): siRNA sense strand
agaacaucgaagaggacuu

SEQ ID NO: 2237140 - RNA, 19 nt, Homo sapiens
  misc_RNA (1)...(19): siRNA sense strand
ccaagaugcuggaugccga

SEQ ID NO: 2237141 - RNA, 19 nt, Homo sapiens
  misc_RNA (1)...(19): siRNA sense strand
ccgagaaacugcuggagac

SEQ ID NO: 2237142 - RNA, 19 nt, Homo sapiens
  misc_RNA (1)...(19): siRNA sense strand
ugggagaagcagcagagaa

SEQ ID NO: 2237143 - RNA, 19 nt, Homo sapiens
  misc_RNA (1)...(19): siRNA sense strand
cuguggugucagagaaaga

SEQ ID NO: 2237144 - RNA, 19 nt, Homo sapiens
  misc_RNA (1)...(19): siRNA sense strand
cgggauggccugaagcuca

SEQ ID NO: 2237145 - RNA, 19 nt, Homo sapiens
  misc_RNA (1)...(19): siRNA sense strand
ggaccaucauccugcgcuu

SEQ ID NO: 2237146 - RNA, 19 nt, Homo sapiens
  misc_RNA (1)...(19): siRNA sense strand
aggacaucuccguggaaga

SEQ ID NO: 2237147 - RNA, 19 nt, Homo sapiens
  misc_RNA (1)...(19): siRNA sense strand
cacauaagcuggaaggaug

SEQ ID NO: 2237148 - RNA, 19 nt, Homo sapiens
  misc_RNA (1)...(19): siRNA sense strand
aggagaacgagcagcuuau

SEQ ID NO: 2237149 - RNA, 19 nt, Homo sapiens
  misc_RNA (1)...(19): siRNA sense strand
ugaagaugacccugggcau

SEQ ID NO: 2237150 - RNA, 19 nt, Homo sapiens
  misc_RNA (1)...(19): siRNA sense strand
uugacguggcagagaagua

SEQ ID NO: 2237151 - RNA, 19 nt, Homo sapiens
  misc_RNA (1)...(19): siRNA sense strand
ggcaguaugagaagagcau

SEQ ID NO: 2237152 - RNA, 19 nt, Homo sapiens
  misc_RNA (1)...(19): siRNA sense strand
uugaucagcuggagggcga

SEQ ID NO: 2237153 - RNA, 19 nt, Homo sapiens
  misc_RNA (1)...(19): siRNA sense strand
guagagaaccagauccuga

SEQ ID NO: 2237154 - RNA, 19 nt, Homo sapiens
  misc_RNA (1)...(19): siRNA sense strand
ucaggagaucaauggcaaa

SEQ ID NO: 2237155 - RNA, 19 nt, Homo sapiens
  misc_RNA (1)...(19): siRNA sense strand
ggguuaugauauuggcaac

SEQ ID NO: 2237156 - RNA, 19 nt, Homo sapiens
  misc_RNA (1)...(19): siRNA sense strand
caggugaacgcuuggccaa

SEQ ID NO: 2237157 - RNA, 19 nt, Homo sapiens
  misc_RNA (1)...(19): siRNA sense strand
aggccuggacugacggcaa

SEQ ID NO: 2237158 - RNA, 19 nt, Homo sapiens
  misc_RNA (1)...(19): siRNA sense strand
cucaggagaucaauggcaa

SEQ ID NO: 2237159 - RNA, 19 nt, Homo sapiens
  misc_RNA (1)...(19): siRNA sense strand
acgauuacaugcagccaga

SEQ ID NO: 2237160 - RNA, 19 nt, Homo sapiens
  misc_RNA (1)...(19): siRNA sense strand
agaugagagugcacaagau

SEQ ID NO: 2237161 - RNA, 19 nt, Homo sapiens
  misc_RNA (1)...(19): siRNA sense strand
uugaggagauccagggacu

SEQ ID NO: 2237162 - RNA, 19 nt, Homo sapiens
  misc_RNA (1)...(19): siRNA sense strand
ggagaagggcuaugaggag

SEQ ID NO: 2237163 - RNA, 19 nt, Homo sapiens
  misc_RNA (1)...(19): siRNA sense strand
ucgucaacuacaagccaaa

SEQ ID NO: 2237164 - RNA, 19 nt, Homo sapiens
  misc_RNA (1)...(19): siRNA sense strand
aagcagaauuugcccgcau

SEQ ID NO: 2237165 - RNA, 19 nt, Homo sapiens
  misc_RNA (1)...(19): siRNA sense strand
cgcuguacggcgagaguga

SEQ ID NO: 2237166 - RNA, 19 nt, Homo sapiens
  misc_RNA (1)...(19): siRNA sense strand
cacaagaucuccaacguca

SEQ ID NO: 2237167 - RNA, 19 nt, Homo sapiens
  misc_RNA (1)...(19): siRNA sense strand
gcaucagccaggagcagau

SEQ ID NO: 2237168 - RNA, 19 nt, Homo sapiens
  misc_RNA (1)...(19): siRNA sense strand
ucgacaagcuggagggaga

SEQ ID NO: 2237169 - RNA, 19 nt, Homo sapiens
  misc_RNA (1)...(19): siRNA sense strand
aagaaauuguugauggcaa

SEQ ID NO: 2237170 - RNA, 19 nt, Homo sapiens
  misc_RNA (1)...(19): siRNA sense strand
uugagaacaucgaggaaga

SEQ ID NO: 2237171 - RNA, 19 nt, Homo sapiens
  misc_RNA (1)...(19): siRNA sense strand
gggugaaacugguguccau

SEQ ID NO: 2237172 - RNA, 19 nt, Homo sapiens
  misc_RNA (1)...(19): siRNA sense strand
cugagaagcaccuggauau

SEQ ID NO: 2237173 - RNA, 19 nt, Homo sapiens
  misc_RNA (1)...(19): siRNA sense strand
gagaaaugccagcuggaga

SEQ ID NO: 2237174 - RNA, 19 nt, Homo sapiens
  misc_RNA (1)...(19): siRNA sense strand
acucagaagaggagagaag

SEQ ID NO: 2237175 - RNA, 19 nt, Homo sapiens
  misc_RNA (1)...(19): siRNA sense strand
ccaagugggacaaggugaa

SEQ ID NO: 2237176 - RNA, 19 nt, Homo sapiens
  misc_RNA (1)...(19): siRNA sense strand
cugugaaucaagagaauga

SEQ ID NO: 2237177 - RNA, 19 nt, Homo sapiens
  misc_RNA (1)...(19): siRNA sense strand
caagagaaugagaggcuga

SEQ ID NO: 2237178 - RNA, 19 nt, Homo sapiens
  misc_RNA (1)...(19): siRNA sense strand
cccuaaacccgaugaaaga

SEQ ID NO: 2237179 - RNA, 19 nt, Homo sapiens
  misc_RNA (1)...(19): siRNA sense strand
ccuagagagaauggagaaa

SEQ ID NO: 2237180 - RNA, 19 nt, Homo sapiens
  misc_RNA (1)...(19): siRNA sense strand
augagaggcugauggaaga

SEQ ID NO: 2237181 - RNA, 19 nt, Homo sapiens
  misc_RNA (1)...(19): siRNA sense strand
uguugauggcaaugugaaa

SEQ ID NO: 2237182 - RNA, 19 nt, Homo sapiens
  misc_RNA (1)...(19): siRNA sense strand
uggaaaucgcugagaagca

SEQ ID NO: 2237183 - RNA, 19 nt, Homo sapiens
  misc_RNA (1)...(19): siRNA sense strand
agacuugggcuuauggcaa

SEQ ID NO: 2237184 - RNA, 19 nt, Homo sapiens
  misc_RNA (1)...(19): siRNA sense strand
gguagaucccaacgggcaa

SEQ ID NO: 2237185 - RNA, 19 nt, Homo sapiens
  misc_RNA (1)...(19): siRNA sense strand
acguguacgacgaggauga

SEQ ID NO: 2237186 - RNA, 19 nt, Homo sapiens
  misc_RNA (1)...(19): siRNA sense strand
ggaagaauaugagaggcua

SEQ ID NO: 2237187 - RNA, 19 nt, Homo sapiens
  misc_RNA (1)...(19): siRNA sense strand
augagaggcuagcgaguga

SEQ ID NO: 2237188 - RNA, 19 nt, Homo sapiens
  misc_RNA (1)...(19): siRNA sense strand
cuggaggacuuccgggauu

SEQ ID NO: 2237189 - RNA, 19 nt, Homo sapiens
  misc_RNA (1)...(19): siRNA sense strand
gaagaggagagaagcccua

SEQ ID NO: 2237190 - RNA, 19 nt, Homo sapiens
  misc_RNA (1)...(19): siRNA sense strand
gcauuaugacccugguaga

SEQ ID NO: 2237191 - RNA, 19 nt, Homo sapiens
  misc_RNA (1)...(19): siRNA sense strand
gauugagaacaucgaggaa

SEQ ID NO: 2237192 - RNA, 19 nt, Homo sapiens
  misc_RNA (1)...(19): siRNA sense strand
ugaagcaguaugagcacaa

SEQ ID NO: 2237193 - RNA, 19 nt, Homo sapiens
  misc_RNA (1)...(19): siRNA sense strand
uggaagaauaugagaggcu

SEQ ID NO: 2237194 - RNA, 19 nt, Homo sapiens
  misc_RNA (1)...(19): siRNA sense strand
uggauuacauagccagcaa

SEQ ID NO: 2237195 - RNA, 19 nt, Homo sapiens
  misc_RNA (1)...(19): siRNA sense strand
gaggcuagcgagugagcuu

SEQ ID NO: 2237196 - RNA, 19 nt, Homo sapiens
  misc_RNA (1)...(19): siRNA sense strand
agaaaugccagcuggagau

SEQ ID NO: 2237197 - RNA, 19 nt, Homo sapiens
  misc_RNA (1)...(19): siRNA sense strand
cccuagagagaauggagaa

SEQ ID NO: 2237198 - RNA, 19 nt, Homo sapiens
  misc_RNA (1)...(19): siRNA sense strand
uggaagaccagaugaacca

SEQ ID NO: 2237199 - RNA, 19 nt, Homo sapiens
  misc_RNA (1)...(19): siRNA sense strand
aggaauggccuuaagcuca

SEQ ID NO: 2237200 - RNA, 19 nt, Homo sapiens
  misc_RNA (1)...(19): siRNA sense strand
gagaagaccaugcaagcca

SEQ ID NO: 2237201 - RNA, 19 nt, Homo sapiens
  misc_RNA (1)...(19): siRNA sense strand
gcuaaugucaacaaagcuu

SEQ ID NO: 2237202 - RNA, 19 nt, Homo sapiens
  misc_RNA (1)...(19): siRNA sense strand
acgacgaggaugaguacau

SEQ ID NO: 2237203 - RNA, 19 nt, Homo sapiens
  misc_RNA (1)...(19): siRNA sense strand
aaugccagcuggagaucaa

SEQ ID NO: 2237204 - RNA, 19 nt, Homo sapiens
  misc_RNA (1)...(19): siRNA sense strand
agaucuugcugcagaagga

SEQ ID NO: 2237205 - RNA, 19 nt, Homo sapiens
  misc_RNA (1)...(19): siRNA sense strand
cuauggaggaucugcaaga

SEQ ID NO: 2237206 - RNA, 19 nt, Homo sapiens
  misc_RNA (1)...(19): siRNA sense strand
ugaccugggugaagccgaa

SEQ ID NO: 2237207 - RNA, 19 nt, Homo sapiens
  misc_RNA (1)...(19): siRNA sense strand
gcuuggaacaccuggcuga

SEQ ID NO: 2237208 - RNA, 19 nt, Homo sapiens
  misc_RNA (1)...(19): siRNA sense strand
aguacaugauccaggagga

SEQ ID NO: 2237209 - RNA, 19 nt, Homo sapiens
  misc_RNA (1)...(19): siRNA sense strand
ggaaagauggccuuggacu

SEQ ID NO: 2237210 - RNA, 19 nt, Homo sapiens
  misc_RNA (1)...(19): siRNA sense strand
caaugaucggugccagaaa

SEQ ID NO: 2237211 - RNA, 19 nt, Homo sapiens
  misc_RNA (1)...(19): siRNA sense strand
ccaucggcgcugaagaaau

SEQ ID NO: 2237212 - RNA, 19 nt, Homo sapiens
  misc_RNA (1)...(19): siRNA sense strand
cuuuggugucagaggaaaa

SEQ ID NO: 2237213 - RNA, 19 nt, Homo sapiens
  misc_RNA (1)...(19): siRNA sense strand
cuaaaauguuggaugcuga

SEQ ID NO: 2237214 - RNA, 19 nt, Homo sapiens
  misc_RNA (1)...(19): siRNA sense strand
acaacuacguguacgacga

SEQ ID NO: 2237215 - RNA, 19 nt, Homo sapiens
  misc_RNA (1)...(19): siRNA sense strand
agguggagaaggugauuca

SEQ ID NO: 2237216 - RNA, 19 nt, Homo sapiens
  misc_RNA (1)...(19): siRNA sense strand
uauaagaacaacaucgaca

SEQ ID NO: 2237217 - RNA, 19 nt, Homo sapiens
  misc_RNA (1)...(19): siRNA sense strand
cuucaugacuagagagacg

SEQ ID NO: 2237218 - RNA, 19 nt, Homo sapiens
  misc_RNA (1)...(19): siRNA sense strand
ugcugugaaucaagagaau

SEQ ID NO: 2237219 - RNA, 19 nt, Homo sapiens
  misc_RNA (1)...(19): siRNA sense strand
gaauaugagaggcuagcga

SEQ ID NO: 2237220 - RNA, 19 nt, Homo sapiens
  misc_RNA (1)...(19): siRNA sense strand
cgaacuacacgauggagca

SEQ ID NO: 2237221 - RNA, 19 nt, Homo sapiens
  misc_RNA (1)...(19): siRNA sense strand
gcucaaugaacuggacuau

SEQ ID NO: 2237222 - RNA, 19 nt, Homo sapiens
  misc_RNA (1)...(19): siRNA sense strand
aggaugaccccauaggaaa

SEQ ID NO: 2237223 - RNA, 19 nt, Homo sapiens
  misc_RNA (1)...(19): siRNA sense strand
gggagaagcagcagcggaa

SEQ ID NO: 2237224 - RNA, 19 nt, Homo sapiens
  misc_RNA (1)...(19): siRNA sense strand
cuucaugacccgagagaca

SEQ ID NO: 2237225 - RNA, 19 nt, Homo sapiens
  misc_RNA (1)...(19): siRNA sense strand
ccaucaaugaaguggagaa

SEQ ID NO: 2237226 - RNA, 19 nt, Homo sapiens
  misc_RNA (1)...(19): siRNA sense strand
uggcaggagacaagaacua

SEQ ID NO: 2237227 - RNA, 19 nt, Homo sapiens
  misc_RNA (1)...(19): siRNA sense strand
uugagguggcagagaaaua

SEQ ID NO: 2237228 - RNA, 19 nt, Homo sapiens
  misc_RNA (1)...(19): siRNA sense strand
acgagaagcugauggagga

SEQ ID NO: 2237229 - RNA, 19 nt, Homo sapiens
  misc_RNA (1)...(19): siRNA sense strand
gcugagaaguuccggcaga

SEQ ID NO: 2237230 - RNA, 19 nt, Homo sapiens
  misc_RNA (1)...(19): siRNA sense strand
cuuugagguggcagagaaa

SEQ ID NO: 2237231 - RNA, 19 nt, Homo sapiens
  misc_RNA (1)...(19): siRNA sense strand
cagagaaauaccuggacau

SEQ ID NO: 2237232 - RNA, 19 nt, Homo sapiens
  misc_RNA (1)...(19): siRNA sense strand
gcagagaaauaccuggaca

SEQ ID NO: 2237233 - RNA, 19 nt, Homo sapiens
  misc_RNA (1)...(19): siRNA sense strand
gagaagcagcagcggaaaa

SEQ ID NO: 2237234 - RNA, 19 nt, Homo sapiens
  misc_RNA (1)...(19): siRNA sense strand
ggaaaggaggagaugcuga

SEQ ID NO: 2237235 - RNA, 19 nt, Homo sapiens
  misc_RNA (1)...(19): siRNA sense strand
uggagaaccguguggguga

SEQ ID NO: 2237236 - RNA, 19 nt, Homo sapiens
  misc_RNA (1)...(19): siRNA sense strand
uggcacggcagcagguaaa

SEQ ID NO: 2237237 - RNA, 19 nt, Homo sapiens
  misc_RNA (1)...(19): siRNA sense strand
aagagauuguugacgggaa

SEQ ID NO: 2237238 - RNA, 19 nt, Homo sapiens
  misc_RNA (1)...(19): siRNA sense strand
uggcagugaaccaggaaaa

SEQ ID NO: 2237239 - RNA, 19 nt, Homo sapiens
  misc_RNA (1)...(19): siRNA sense strand
ggcuggagcagguggaaaa

SEQ ID NO: 2237240 - RNA, 19 nt, Homo sapiens
  misc_RNA (1)...(19): siRNA sense strand
aggaggagaugcugagcca

SEQ ID NO: 2237241 - RNA, 19 nt, Homo sapiens
  misc_RNA (1)...(19): siRNA sense strand
caacacugcccgaggcuga

SEQ ID NO: 2237242 - RNA, 19 nt, Homo sapiens
  misc_RNA (1)...(19): siRNA sense strand
cuguggugccagaggaaga

SEQ ID NO: 2237243 - RNA, 19 nt, Homo sapiens
  misc_RNA (1)...(19): siRNA sense strand
acauggaacaggaggagga

SEQ ID NO: 2237244 - RNA, 19 nt, Homo sapiens
  misc_RNA (1)...(19): siRNA sense strand
agugccagcuggagaucaa

SEQ ID NO: 2237245 - RNA, 19 nt, Homo sapiens
  misc_RNA (1)...(19): siRNA sense strand
ggaagaaaccucagccaag

SEQ ID NO: 2237246 - RNA, 19 nt, Homo sapiens
  misc_RNA (1)...(19): siRNA sense strand
aucaacaccaagugggaua

SEQ ID NO: 2237247 - RNA, 19 nt, Homo sapiens
  misc_RNA (1)...(19): siRNA sense strand
ccccaaagccggaugagaa

SEQ ID NO: 2237248 - RNA, 19 nt, Homo sapiens
  misc_RNA (1)...(19): siRNA sense strand
agcgcaaacuagaggacuu

SEQ ID NO: 2237249 - RNA, 19 nt, Homo sapiens
  misc_RNA (1)...(19): siRNA sense strand
ggagcagauggcugggcua

SEQ ID NO: 2237250 - RNA, 19 nt, Homo sapiens
  misc_RNA (1)...(19): siRNA sense strand
uuaacaaggcccuggacuu

SEQ ID NO: 2237251 - RNA, 19 nt, Homo sapiens
  misc_RNA (1)...(19): siRNA sense strand
gcgaguacauggaacagga

SEQ ID NO: 2237252 - RNA, 19 nt, Homo sapiens
  misc_RNA (1)...(19): siRNA sense strand
agaacaucgaggaagauuu

SEQ ID NO: 2237253 - RNA, 19 nt, Homo sapiens
  misc_RNA (1)...(19): siRNA sense strand
uggaagaaaccucagccaa

SEQ ID NO: 2237254 - RNA, 19 nt, Homo sapiens
  misc_RNA (1)...(19): siRNA sense strand
aggacaucucuguggaaga

SEQ ID NO: 2237255 - RNA, 19 nt, Homo sapiens
  misc_RNA (1)...(19): siRNA sense strand
ugaagaugacccugggcau

SEQ ID NO: 2237256 - RNA, 19 nt, Homo sapiens
  misc_RNA (1)...(19): siRNA sense strand
gcggcgaguacauggaaca

SEQ ID NO: 2237257 - RNA, 19 nt, Homo sapiens
  misc_RNA (1)...(19): siRNA sense strand
gcaacucacaccugcgcaa

SEQ ID NO: 2237258 - RNA, 19 nt, Homo sapiens
  misc_RNA (1)...(19): siRNA sense strand
gggcuggagcagguggaaa

SEQ ID NO: 2237259 - RNA, 19 nt, Homo sapiens
  misc_RNA (1)...(19): siRNA sense strand
gaagaggcgggaugcgcua

SEQ ID NO: 2237260 - RNA, 19 nt, Homo sapiens
  misc_RNA (1)...(19): siRNA sense strand
agacagcaccguaccgcaa

SEQ ID NO: 2237261 - RNA, 19 nt, Homo sapiens
  misc_RNA (1)...(19): siRNA sense strand
cuagaggacuuucgggacu

SEQ ID NO: 2237262 - RNA, 19 nt, Homo sapiens
  misc_RNA (1)...(19): siRNA sense strand
cgccaaacugcgaaaggau

SEQ ID NO: 2237263 - RNA, 19 nt, Homo sapiens
  misc_RNA (1)...(19): siRNA sense strand
cugagaaguuccggcagaa

SEQ ID NO: 2237264 - RNA, 19 nt, Homo sapiens
  misc_RNA (1)...(19): siRNA sense strand
acaaaaucgccaacguuaa

SEQ ID NO: 2237265 - RNA, 19 nt, Homo sapiens
  misc_RNA (1)...(19): siRNA sense strand
augcagaagacauugugaa

SEQ ID NO: 2237266 - RNA, 19 nt, Homo sapiens
  misc_RNA (1)...(19): siRNA sense strand
ggauaugguccgaaagcug

SEQ ID NO: 2237267 - RNA, 19 nt, Homo sapiens
  misc_RNA (1)...(19): siRNA sense strand
aagucaugguucagggaaa

SEQ ID NO: 2237268 - RNA, 19 nt, Homo sapiens
  misc_RNA (1)...(19): siRNA sense strand
augguauaguggaggauua

SEQ ID NO: 2237269 - RNA, 19 nt, Homo sapiens
  misc_RNA (1)...(19): siRNA sense strand
agguuuaugagcagggaaa

SEQ ID NO: 2237270 - RNA, 19 nt, Homo sapiens
  misc_RNA (1)...(19): siRNA sense strand
acauuugcacauagagaua

SEQ ID NO: 2237271 - RNA, 19 nt, Homo sapiens
  misc_RNA (1)...(19): siRNA sense strand
augagaagcccaaggucaa

SEQ ID NO: 2237272 - RNA, 19 nt, Homo sapiens
  misc_RNA (1)...(19): siRNA sense strand
gaugagaagcccaagguca

SEQ ID NO: 2237273 - RNA, 19 nt, Homo sapiens
  misc_RNA (1)...(19): siRNA sense strand
guauaguggaggauuacaa

SEQ ID NO: 2237274 - RNA, 19 nt, Homo sapiens
  misc_RNA (1)...(19): siRNA sense strand
cgagauuuaaagagcaaaa

SEQ ID NO: 2237275 - RNA, 19 nt, Homo sapiens
  misc_RNA (1)...(19): siRNA sense strand
uggaagaugagaagcccaa

SEQ ID NO: 2237276 - RNA, 19 nt, Homo sapiens
  misc_RNA (1)...(19): siRNA sense strand
gagcaaugguauaguggag

SEQ ID NO: 2237277 - RNA, 19 nt, Homo sapiens
  misc_RNA (1)...(19): siRNA sense strand
gcaaugguauaguggagga

SEQ ID NO: 2237278 - RNA, 19 nt, Homo sapiens
  misc_RNA (1)...(19): siRNA sense strand
ggaaaggcagguaugguga

SEQ ID NO: 2237279 - RNA, 19 nt, Homo sapiens
  misc_RNA (1)...(19): siRNA sense strand
gguucagggaaacggaauu

SEQ ID NO: 2237280 - RNA, 19 nt, Homo sapiens
  misc_RNA (1)...(19): siRNA sense strand
gcuucagacaugacaucaa

SEQ ID NO: 2237281 - RNA, 19 nt, Homo sapiens
  misc_RNA (1)...(19): siRNA sense strand
guuuaugagcagggaaaga

SEQ ID NO: 2237282 - RNA, 19 nt, Homo sapiens
  misc_RNA (1)...(19): siRNA sense strand
ccgaaguucuagaugaaac

SEQ ID NO: 2237283 - RNA, 19 nt, Homo sapiens
  misc_RNA (1)...(19): siRNA sense strand
gaagauaugaggaagguag

SEQ ID NO: 2237284 - RNA, 19 nt, Homo sapiens
  misc_RNA (1)...(19): siRNA sense strand
aggaaguggcucuggucuu

SEQ ID NO: 2237285 - RNA, 19 nt, Homo sapiens
  misc_RNA (1)...(19): siRNA sense strand
aucgagauuuaaagagcaa

SEQ ID NO: 2237286 - RNA, 19 nt, Homo sapiens
  misc_RNA (1)...(19): siRNA sense strand
cuaguauggaagaugagaa

SEQ ID NO: 2237287 - RNA, 19 nt, Homo sapiens
  misc_RNA (1)...(19): siRNA sense strand
ccccgaaguucuagaugaa

SEQ ID NO: 2237288 - RNA, 19 nt, Homo sapiens
  misc_RNA (1)...(19): siRNA sense strand
ugguuaagaagaauggaca

SEQ ID NO: 2237289 - RNA, 19 nt, Homo sapiens
  misc_RNA (1)...(19): siRNA sense strand
gggacugguguaacaggaa

SEQ ID NO: 2237290 - RNA, 19 nt, Homo sapiens
  misc_RNA (1)...(19): siRNA sense strand
cagcacuuuagcagauuua

SEQ ID NO: 2237291 - RNA, 19 nt, Homo sapiens
  misc_RNA (1)...(19): siRNA sense strand
ggauacaguuagcugccuu

SEQ ID NO: 2237292 - RNA, 19 nt, Homo sapiens
  misc_RNA (1)...(19): siRNA sense strand
guuuugaagauaugaggaa

SEQ ID NO: 2237293 - RNA, 19 nt, Homo sapiens
  misc_RNA (1)...(19): siRNA sense strand
gcgaaggcgagcaggacaa

SEQ ID NO: 2237294 - RNA, 19 nt, Homo sapiens
  misc_RNA (1)...(19): siRNA sense strand
cggauuaccucaaggggaa

SEQ ID NO: 2237295 - RNA, 19 nt, Homo sapiens
  misc_RNA (1)...(19): siRNA sense strand
aggaggugguggugcacaa

SEQ ID NO: 2237296 - RNA, 19 nt, Homo sapiens
  misc_RNA (1)...(19): siRNA sense strand
gaagaagggcugcuggcua

SEQ ID NO: 2237297 - RNA, 19 nt, Homo sapiens
  misc_RNA (1)...(19): siRNA sense strand
ucgauuugagccagggaaa

SEQ ID NO: 2237298 - RNA, 19 nt, Homo sapiens
  misc_RNA (1)...(19): siRNA sense strand
auguauugcugaagagcga

SEQ ID NO: 2237299 - RNA, 19 nt, Homo sapiens
  misc_RNA (1)...(19): siRNA sense strand
gacaagcagucguggcaga

SEQ ID NO: 2237300 - RNA, 19 nt, Homo sapiens
  misc_RNA (1)...(19): siRNA sense strand
cacaagaagaugaggccca

SEQ ID NO: 2237301 - RNA, 19 nt, Homo sapiens
  misc_RNA (1)...(19): siRNA sense strand
ggaccaugaugcagaggcu

SEQ ID NO: 2237302 - RNA, 19 nt, Homo sapiens
  misc_RNA (1)...(19): siRNA sense strand
guacauggcuccugaggug

SEQ ID NO: 2237303 - RNA, 19 nt, Homo sapiens
  misc_RNA (1)...(19): siRNA sense strand
aggugguggugcacaagaa

SEQ ID NO: 2237304 - RNA, 19 nt, Homo sapiens
  misc_RNA (1)...(19): siRNA sense strand
auuaaagaucacugguuga

SEQ ID NO: 2237305 - RNA, 19 nt, Homo sapiens
  misc_RNA (1)...(19): siRNA sense strand
uggaggagcugcaggaggu

SEQ ID NO: 2237306 - RNA, 19 nt, Homo sapiens
  misc_RNA (1)...(19): siRNA sense strand
gcaucaucgucuaccgcaa

SEQ ID NO: 2237307 - RNA, 19 nt, Homo sapiens
  misc_RNA (1)...(19): siRNA sense strand
ccggcuacacagagaccua

SEQ ID NO: 2237308 - RNA, 19 nt, Homo sapiens
  misc_RNA (1)...(19): siRNA sense strand
cguaugaaccagugcccga

SEQ ID NO: 2237309 - RNA, 19 nt, Homo sapiens
  misc_RNA (1)...(19): siRNA sense strand
gcucaggggcugugaacca

SEQ ID NO: 2237310 - RNA, 19 nt, Homo sapiens
  misc_RNA (1)...(19): siRNA sense strand
aggugaagccggcugguga

SEQ ID NO: 2237311 - RNA, 19 nt, Homo sapiens
  misc_RNA (1)...(19): siRNA sense strand
cuugagaagaagagaaaca

SEQ ID NO: 2237312 - RNA, 19 nt, Homo sapiens
  misc_RNA (1)...(19): siRNA sense strand
caaacugaaaccugggaaa

SEQ ID NO: 2237313 - RNA, 19 nt, Homo sapiens
  misc_RNA (1)...(19): siRNA sense strand
cuacgaaugaagagggaca

SEQ ID NO: 2237314 - RNA, 19 nt, Homo sapiens
  misc_RNA (1)...(19): siRNA sense strand
cugaauggauuguggcuca

SEQ ID NO: 2237315 - RNA, 19 nt, Homo sapiens
  misc_RNA (1)...(19): siRNA sense strand
agaggaaguaacacagaua

SEQ ID NO: 2237316 - RNA, 19 nt, Homo sapiens
  misc_RNA (1)...(19): siRNA sense strand
uguuaaagcgauugauaca

SEQ ID NO: 2237317 - RNA, 19 nt, Homo sapiens
  misc_RNA (1)...(19): siRNA sense strand
gcagauuaguagaugcuga

SEQ ID NO: 2237318 - RNA, 19 nt, Homo sapiens
  misc_RNA (1)...(19): siRNA sense strand
auggaagauuugaaggauu

SEQ ID NO: 2237319 - RNA, 19 nt, Homo sapiens
  misc_RNA (1)...(19): siRNA sense strand
gagccagcagagagauaua

SEQ ID NO: 2237320 - RNA, 19 nt, Homo sapiens
  misc_RNA (1)...(19): siRNA sense strand
caaauauugguguggagaa

SEQ ID NO: 2237321 - RNA, 19 nt, Homo sapiens
  misc_RNA (1)...(19): siRNA sense strand
aaauggaaugguagaacaa

SEQ ID NO: 2237322 - RNA, 19 nt, Homo sapiens
  misc_RNA (1)...(19): siRNA sense strand
cagucauguuaaagcgauu

SEQ ID NO: 2237323 - RNA, 19 nt, Homo sapiens
  misc_RNA (1)...(19): siRNA sense strand
ggcaaagaugauaaagaau

SEQ ID NO: 2237324 - RNA, 19 nt, Homo sapiens
  misc_RNA (1)...(19): siRNA sense strand
aaucuaagaauuuggguca

SEQ ID NO: 2237325 - RNA, 19 nt, Homo sapiens
  misc_RNA (1)...(19): siRNA sense strand
gagauauauuaaagaccga

SEQ ID NO: 2237326 - RNA, 19 nt, Homo sapiens
  misc_RNA (1)...(19): siRNA sense strand
auucagaugguaagaagaa

SEQ ID NO: 2237327 - RNA, 19 nt, Homo sapiens
  misc_RNA (1)...(19): siRNA sense strand
ugaccaguguaaagaugaa

SEQ ID NO: 2237328 - RNA, 19 nt, Homo sapiens
  misc_RNA (1)...(19): siRNA sense strand
cugugcaagggaaggaaua

SEQ ID NO: 2237329 - RNA, 19 nt, Homo sapiens
  misc_RNA (1)...(19): siRNA sense strand
gggucugugcaguggagua

SEQ ID NO: 2237330 - RNA, 19 nt, Homo sapiens
  misc_RNA (1)...(19): siRNA sense strand
agucaaagucugagaagug

SEQ ID NO: 2237331 - RNA, 19 nt, Homo sapiens
  misc_RNA (1)...(19): siRNA sense strand
ugcuaaugguccagaacuu

SEQ ID NO: 2237332 - RNA, 19 nt, Homo sapiens
  misc_RNA (1)...(19): siRNA sense strand
ggugaaacgcauaagaauc

SEQ ID NO: 2237333 - RNA, 19 nt, Homo sapiens
  misc_RNA (1)...(19): siRNA sense strand
gcaucugacccuaaaccaa

SEQ ID NO: 2237334 - RNA, 19 nt, Homo sapiens
  misc_RNA (1)...(19): siRNA sense strand
uggugaaacgcauaagaau

SEQ ID NO: 2237335 - RNA, 19 nt, Homo sapiens
  misc_RNA (1)...(19): siRNA sense strand
guggaaauggaaugguaga

SEQ ID NO: 2237336 - RNA, 19 nt, Homo sapiens
  misc_RNA (1)...(19): siRNA sense strand
caaaucaaccagagggaag

SEQ ID NO: 2237337 - RNA, 19 nt, Homo sapiens
  misc_RNA (1)...(19): siRNA sense strand
aggaauauguaauggcuuc

SEQ ID NO: 2237338 - RNA, 19 nt, Homo sapiens
  misc_RNA (1)...(19): siRNA sense strand
gguguugcugagaguguua

SEQ ID NO: 2237339 - RNA, 19 nt, Homo sapiens
  misc_RNA (1)...(19): siRNA sense strand
cugugagaaauauggcuua

SEQ ID NO: 2237340 - RNA, 19 nt, Homo sapiens
  misc_RNA (1)...(19): siRNA sense strand
ugacugguguagaggaagu

SEQ ID NO: 2237341 - RNA, 19 nt, Homo sapiens
  misc_RNA (1)...(19): siRNA sense strand
cauguaugcaagagcaaca

SEQ ID NO: 2237342 - RNA, 19 nt, Homo sapiens
  misc_RNA (1)...(19): siRNA sense strand
gggaggucaguaugggaau

SEQ ID NO: 2237343 - RNA, 19 nt, Homo sapiens
  misc_RNA (1)...(19): siRNA sense strand
acgcauaagaaucaauaca

SEQ ID NO: 2237344 - RNA, 19 nt, Homo sapiens
  misc_RNA (1)...(19): siRNA sense strand
guccuuaaacacuggaauu

SEQ ID NO: 2237345 - RNA, 19 nt, Homo sapiens
  misc_RNA (1)...(19): siRNA sense strand
gugcacaccaggagaaucu

SEQ ID NO: 2237346 - RNA, 19 nt, Homo sapiens
  misc_RNA (1)...(19): siRNA sense strand
gaaauauggcuuagaggag

SEQ ID NO: 2237347 - RNA, 19 nt, Homo sapiens
  misc_RNA (1)...(19): siRNA sense strand
aguccagagcucuaugaaa

SEQ ID NO: 2237348 - RNA, 19 nt, Homo sapiens
  misc_RNA (1)...(19): siRNA sense strand
agaguuaucaaaugggaca

SEQ ID NO: 2237349 - RNA, 19 nt, Homo sapiens
  misc_RNA (1)...(19): siRNA sense strand
ugauggaagauuugaagga

SEQ ID NO: 2237350 - RNA, 19 nt, Homo sapiens
  misc_RNA (1)...(19): siRNA sense strand
agaaauauggcuuagagga

SEQ ID NO: 2237351 - RNA, 19 nt, Homo sapiens
  misc_RNA (1)...(19): siRNA sense strand
uauuuauggugaagaagga

SEQ ID NO: 2237352 - RNA, 19 nt, Homo sapiens
  misc_RNA (1)...(19): siRNA sense strand
cugauggcaaagaugauaa

SEQ ID NO: 2237353 - RNA, 19 nt, Homo sapiens
  misc_RNA (1)...(19): siRNA sense strand
ccagacucgugguggcaca

SEQ ID NO: 2237354 - RNA, 19 nt, Homo sapiens
  misc_RNA (1)...(19): siRNA sense strand
cccacaugauucuggaaca

SEQ ID NO: 2237355 - RNA, 19 nt, Homo sapiens
  misc_RNA (1)...(19): siRNA sense strand
uuguggaaauggaauggua

SEQ ID NO: 2237356 - RNA, 19 nt, Homo sapiens
  misc_RNA (1)...(19): siRNA sense strand
gcugaugguccucuagcua

SEQ ID NO: 2237357 - RNA, 19 nt, Homo sapiens
  misc_RNA (1)...(19): siRNA sense strand
cgcauaagaaucaauacaa

SEQ ID NO: 2237358 - RNA, 19 nt, Homo sapiens
  misc_RNA (1)...(19): siRNA sense strand
gagcagucucacaugaaga

SEQ ID NO: 2237359 - RNA, 19 nt, Homo sapiens
  misc_RNA (1)...(19): siRNA sense strand
gaaugguagaacaagguga

SEQ ID NO: 2237360 - RNA, 19 nt, Homo sapiens
  misc_RNA (1)...(19): siRNA sense strand
aggugaagaaugugauugu

SEQ ID NO: 2237361 - RNA, 19 nt, Homo sapiens
  misc_RNA (1)...(19): siRNA sense strand
caaccagagggaagaaaau

SEQ ID NO: 2237362 - RNA, 19 nt, Homo sapiens
  misc_RNA (1)...(19): siRNA sense strand
cugaagaaaaggaggaaaa

SEQ ID NO: 2237363 - RNA, 19 nt, Homo sapiens
  misc_RNA (1)...(19): siRNA sense strand
ggguuuaggcugaaggaga

SEQ ID NO: 2237364 - RNA, 19 nt, Homo sapiens
  misc_RNA (1)...(19): siRNA sense strand
gcuggaacguggugggcau

SEQ ID NO: 2237365 - RNA, 19 nt, Homo sapiens
  misc_RNA (1)...(19): siRNA sense strand
cgucaugacaacaggcaca

SEQ ID NO: 2237366 - RNA, 19 nt, Homo sapiens
  misc_RNA (1)...(19): siRNA sense strand
cccaaaucguaaagcaaga

SEQ ID NO: 2237367 - RNA, 19 nt, Homo sapiens
  misc_RNA (1)...(19): siRNA sense strand
ccgugaugaucuugaacga

SEQ ID NO: 2237368 - RNA, 19 nt, Homo sapiens
  misc_RNA (1)...(19): siRNA sense strand
ggugaauacaugagugauc

SEQ ID NO: 2237369 - RNA, 19 nt, Homo sapiens
  misc_RNA (1)...(19): siRNA sense strand
guuaaagaugccaagguga

SEQ ID NO: 2237370 - RNA, 19 nt, Homo sapiens
  misc_RNA (1)...(19): siRNA sense strand
ucguaaagcaagaggacag

SEQ ID NO: 2237371 - RNA, 19 nt, Homo sapiens
  misc_RNA (1)...(19): siRNA sense strand
caugagugaucguggccuu

SEQ ID NO: 2237372 - RNA, 19 nt, Homo sapiens
  misc_RNA (1)...(19): siRNA sense strand
cacccaaaucguaaagcaa

SEQ ID NO: 2237373 - RNA, 19 nt, Homo sapiens
  misc_RNA (1)...(19): siRNA sense strand
gcucaguggcaucagcaau

SEQ ID NO: 2237374 - RNA, 19 nt, Homo sapiens
  misc_RNA (1)...(19): siRNA sense strand
acguguaccaugaguccaa

SEQ ID NO: 2237375 - RNA, 19 nt, Homo sapiens
  misc_RNA (1)...(19): siRNA sense strand
gcacagauguuaaagaugc

SEQ ID NO: 2237376 - RNA, 19 nt, Homo sapiens
  misc_RNA (1)...(19): siRNA sense strand
cugaagaaaaggaggaaaa

SEQ ID NO: 2237377 - RNA, 19 nt, Homo sapiens
  misc_RNA (1)...(19): siRNA sense strand
ggguuuaggcugaaggaga

SEQ ID NO: 2237378 - RNA, 19 nt, Homo sapiens
  misc_RNA (1)...(19): siRNA sense strand
gcuggaacguggugggcau

SEQ ID NO: 2237379 - RNA, 19 nt, Homo sapiens
  misc_RNA (1)...(19): siRNA sense strand
cgucaugacaacaggcaca

SEQ ID NO: 2237380 - RNA, 19 nt, Homo sapiens
  misc_RNA (1)...(19): siRNA sense strand
cccaaaucguaaagcaaga

SEQ ID NO: 2237381 - RNA, 19 nt, Homo sapiens
  misc_RNA (1)...(19): siRNA sense strand
ccgugaugaucuugaacga

SEQ ID NO: 2237382 - RNA, 19 nt, Homo sapiens
  misc_RNA (1)...(19): siRNA sense strand
ggugaauacaugagugauc

SEQ ID NO: 2237383 - RNA, 19 nt, Homo sapiens
  misc_RNA (1)...(19): siRNA sense strand
guuaaagaugccaagguga

SEQ ID NO: 2237384 - RNA, 19 nt, Homo sapiens
  misc_RNA (1)...(19): siRNA sense strand
ucguaaagcaagaggacag

SEQ ID NO: 2237385 - RNA, 19 nt, Homo sapiens
  misc_RNA (1)...(19): siRNA sense strand
caugagugaucguggccuu

SEQ ID NO: 2237386 - RNA, 19 nt, Homo sapiens
  misc_RNA (1)...(19): siRNA sense strand
cacccaaaucguaaagcaa

SEQ ID NO: 2237387 - RNA, 19 nt, Homo sapiens
  misc_RNA (1)...(19): siRNA sense strand
gcucaguggcaucagcaau

SEQ ID NO: 2237388 - RNA, 19 nt, Homo sapiens
  misc_RNA (1)...(19): siRNA sense strand
ccaagauuaccaagcccaa

SEQ ID NO: 2237389 - RNA, 19 nt, Homo sapiens
  misc_RNA (1)...(19): siRNA sense strand
acguguaccaugaguccaa

SEQ ID NO: 2237390 - RNA, 19 nt, Homo sapiens
  misc_RNA (1)...(19): siRNA sense strand
gcacagauguuaaagaugc

SEQ ID NO: 2237391 - RNA, 19 nt, Homo sapiens
  misc_RNA (1)...(19): siRNA sense strand
cugaagaaaaggaggaaaa

SEQ ID NO: 2237392 - RNA, 19 nt, Homo sapiens
  misc_RNA (1)...(19): siRNA sense strand
ggguuuaggcugaaggaga

SEQ ID NO: 2237393 - RNA, 19 nt, Homo sapiens
  misc_RNA (1)...(19): siRNA sense strand
gcuggaacguggugggcau

SEQ ID NO: 2237394 - RNA, 19 nt, Homo sapiens
  misc_RNA (1)...(19): siRNA sense strand
cgucaugacaacaggcaca

SEQ ID NO: 2237395 - RNA, 19 nt, Homo sapiens
  misc_RNA (1)...(19): siRNA sense strand
cccaaaucguaaagcaaga

SEQ ID NO: 2237396 - RNA, 19 nt, Homo sapiens
  misc_RNA (1)...(19): siRNA sense strand
ccgugaugaucuugaacga

SEQ ID NO: 2237397 - RNA, 19 nt, Homo sapiens
  misc_RNA (1)...(19): siRNA sense strand
ggugaauacaugagugauc

SEQ ID NO: 2237398 - RNA, 19 nt, Homo sapiens
  misc_RNA (1)...(19): siRNA sense strand
guuaaagaugccaagguga

SEQ ID NO: 2237399 - RNA, 19 nt, Homo sapiens
  misc_RNA (1)...(19): siRNA sense strand
ucguaaagcaagaggacag

SEQ ID NO: 2237400 - RNA, 19 nt, Homo sapiens
  misc_RNA (1)...(19): siRNA sense strand
caugagugaucguggccuu

SEQ ID NO: 2237401 - RNA, 19 nt, Homo sapiens
  misc_RNA (1)...(19): siRNA sense strand
cacccaaaucguaaagcaa

SEQ ID NO: 2237402 - RNA, 19 nt, Homo sapiens
  misc_RNA (1)...(19): siRNA sense strand
gcucaguggcaucagcaau

SEQ ID NO: 2237403 - RNA, 19 nt, Homo sapiens
  misc_RNA (1)...(19): siRNA sense strand
acguguaccaugaguccaa

SEQ ID NO: 2237404 - RNA, 19 nt, Homo sapiens
  misc_RNA (1)...(19): siRNA sense strand
gcacagauguuaaagaugc

SEQ ID NO: 2237405 - RNA, 19 nt, Homo sapiens
  misc_RNA (1)...(19): siRNA sense strand
gugugaagccauaaagaaa

SEQ ID NO: 2237406 - RNA, 19 nt, Homo sapiens
  misc_RNA (1)...(19): siRNA sense strand
ccauaaagaaagugaggga

SEQ ID NO: 2237407 - RNA, 19 nt, Homo sapiens
  misc_RNA (1)...(19): siRNA sense strand
agauagagaccauggagaa

SEQ ID NO: 2237408 - RNA, 19 nt, Homo sapiens
  misc_RNA (1)...(19): siRNA sense strand
aggaauaaucaacgugaaa

SEQ ID NO: 2237409 - RNA, 19 nt, Homo sapiens
  misc_RNA (1)...(19): siRNA sense strand
ggguaaacuaugagcugaa

SEQ ID NO: 2237410 - RNA, 19 nt, Homo sapiens
  misc_RNA (1)...(19): siRNA sense strand
gcacagaagcaauggcuca

SEQ ID NO: 2237411 - RNA, 19 nt, Homo sapiens
  misc_RNA (1)...(19): siRNA sense strand
auaaaguggaggagggaga

SEQ ID NO: 2237412 - RNA, 19 nt, Homo sapiens
  misc_RNA (1)...(19): siRNA sense strand
ucaaauugcgaguggguau

SEQ ID NO: 2237413 - RNA, 19 nt, Homo sapiens
  misc_RNA (1)...(19): siRNA sense strand
ggguagacagaaugaauau

SEQ ID NO: 2237414 - RNA, 19 nt, Homo sapiens
  misc_RNA (1)...(19): siRNA sense strand
cagcaaacauaucaggaca

SEQ ID NO: 2237415 - RNA, 19 nt, Homo sapiens
  misc_RNA (1)...(19): siRNA sense strand
agaaugaaugcaugagaau

SEQ ID NO: 2237416 - RNA, 19 nt, Homo sapiens
  misc_RNA (1)...(19): siRNA sense strand
cagaauccgacgugaacaa

SEQ ID NO: 2237417 - RNA, 19 nt, Homo sapiens
  misc_RNA (1)...(19): siRNA sense strand
gaucaaauugcaaaggaga

SEQ ID NO: 2237418 - RNA, 19 nt, Homo sapiens
  misc_RNA (1)...(19): siRNA sense strand
ugccaagaacugugugaaa

SEQ ID NO: 2237419 - RNA, 19 nt, Homo sapiens
  misc_RNA (1)...(19): siRNA sense strand
gagaccaggcauuuggaaa

SEQ ID NO: 2237420 - RNA, 19 nt, Homo sapiens
  misc_RNA (1)...(19): siRNA sense strand
cgggagaacuaguccacau

SEQ ID NO: 2237421 - RNA, 19 nt, Homo sapiens
  misc_RNA (1)...(19): siRNA sense strand
ggauuaaugcacagaagca

SEQ ID NO: 2237422 - RNA, 19 nt, Homo sapiens
  misc_RNA (1)...(19): siRNA sense strand
auacagaauccgacgugaa

SEQ ID NO: 2237423 - RNA, 19 nt, Homo sapiens
  misc_RNA (1)...(19): siRNA sense strand
cagauggagaacacaaaua

SEQ ID NO: 2237424 - RNA, 19 nt, Homo sapiens
  misc_RNA (1)...(19): siRNA sense strand
ggauaugccuuguugccau

SEQ ID NO: 2237425 - RNA, 19 nt, Homo sapiens
  misc_RNA (1)...(19): siRNA sense strand
cagcaugaccacagagaac

SEQ ID NO: 2237426 - RNA, 19 nt, Homo sapiens
  misc_RNA (1)...(19): siRNA sense strand
uggaaagaccugaagacca

SEQ ID NO: 2237427 - RNA, 19 nt, Homo sapiens
  misc_RNA (1)...(19): siRNA sense strand
acacaaauaacuuccacaa

SEQ ID NO: 2237428 - RNA, 19 nt, Homo sapiens
  misc_RNA (1)...(19): siRNA sense strand
caaauaaucagguggcgau

SEQ ID NO: 2237429 - RNA, 19 nt, Homo sapiens
  misc_RNA (1)...(19): siRNA sense strand
uaaccauggaccugugaua

SEQ ID NO: 2237430 - RNA, 19 nt, Homo sapiens
  misc_RNA (1)...(19): siRNA sense strand
ccaagaacugugugaaaau

SEQ ID NO: 2237431 - RNA, 19 nt, Homo sapiens
  misc_RNA (1)...(19): siRNA sense strand
auaaagaaagugagggaug

SEQ ID NO: 2237432 - RNA, 19 nt, Homo sapiens
  misc_RNA (1)...(19): siRNA sense strand
gagauagagaccauggaga

SEQ ID NO: 2237433 - RNA, 19 nt, Homo sapiens
  misc_RNA (1)...(19): siRNA sense strand
ccugaagaaugaggagcua

SEQ ID NO: 2237434 - RNA, 19 nt, Homo sapiens
  misc_RNA (1)...(19): siRNA sense strand
uuaagaaccaagucacaaa

SEQ ID NO: 2237435 - RNA, 19 nt, Homo sapiens
  misc_RNA (1)...(19): siRNA sense strand
cuugaauggcgcuuauaaa

SEQ ID NO: 2237436 - RNA, 19 nt, Homo sapiens
  misc_RNA (1)...(19): siRNA sense strand
cacccuugauggagccaaa

SEQ ID NO: 2237437 - RNA, 19 nt, Homo sapiens
  misc_RNA (1)...(19): siRNA sense strand
acgugaacaaggagggcuu

SEQ ID NO: 2237438 - RNA, 19 nt, Homo sapiens
  misc_RNA (1)...(19): siRNA sense strand
ccuuaagaaccaagucaca

SEQ ID NO: 2237439 - RNA, 19 nt, Homo sapiens
  misc_RNA (1)...(19): siRNA sense strand
ucaaauugcaaaggagaau

SEQ ID NO: 2237440 - RNA, 19 nt, Homo sapiens
  misc_RNA (1)...(19): siRNA sense strand
gaaccaagucacaaaagaa

SEQ ID NO: 2237441 - RNA, 19 nt, Homo sapiens
  misc_RNA (1)...(19): siRNA sense strand
ggccagauggagaacacaa

SEQ ID NO: 2237442 - RNA, 19 nt, Homo sapiens
  misc_RNA (1)...(19): siRNA sense strand
gcgcuuauaaaguggagga

SEQ ID NO: 2237443 - RNA, 19 nt, Homo sapiens
  misc_RNA (1)...(19): siRNA sense strand
gcacauacauggcagcaac

SEQ ID NO: 2237444 - RNA, 19 nt, Homo sapiens
  misc_RNA (1)...(19): siRNA sense strand
cauacaaacgugagcaucu

SEQ ID NO: 2237445 - RNA, 19 nt, Homo sapiens
  misc_RNA (1)...(19): siRNA sense strand
ggcuggaaguugaagacca

SEQ ID NO: 2237446 - RNA, 19 nt, Homo sapiens
  misc_RNA (1)...(19): siRNA sense strand
cugcauucugggacugaua

SEQ ID NO: 2237447 - RNA, 19 nt, Homo sapiens
  misc_RNA (1)...(19): siRNA sense strand
ccuucaacgacuucaaauu

SEQ ID NO: 2237448 - RNA, 19 nt, Homo sapiens
  misc_RNA (1)...(19): siRNA sense strand
gcgaguggguauuaaccau

SEQ ID NO: 2237449 - RNA, 19 nt, Homo sapiens
  misc_RNA (1)...(19): siRNA sense strand
caucacagggacagcauga

SEQ ID NO: 2237450 - RNA, 19 nt, Homo sapiens
  misc_RNA (1)...(19): siRNA sense strand
aagcaauugaugggauuaa

SEQ ID NO: 2237451 - RNA, 19 nt, Homo sapiens
  misc_RNA (1)...(19): siRNA sense strand
uggguagacagaaugaaua

SEQ ID NO: 2237452 - RNA, 19 nt, Homo sapiens
  misc_RNA (1)...(19): siRNA sense strand
caguggaguugaaaagauu

SEQ ID NO: 2237453 - RNA, 19 nt, Homo sapiens
  misc_RNA (1)...(19): siRNA sense strand
ucaucaucuucguggugua

SEQ ID NO: 2237454 - RNA, 19 nt, Homo sapiens
  misc_RNA (1)...(19): siRNA sense strand
gauuaaugcacagaagcaa

SEQ ID NO: 2237455 - RNA, 19 nt, Homo sapiens
  misc_RNA (1)...(19): siRNA sense strand
ggucugcagaaguggcaau

SEQ ID NO: 2237456 - RNA, 19 nt, Homo sapiens
  misc_RNA (1)...(19): siRNA sense strand
uggaggagggagaugguga

SEQ ID NO: 2237457 - RNA, 19 nt, Homo sapiens
  misc_RNA (1)...(19): siRNA sense strand
acagagaacggcaagauca

SEQ ID NO: 2237458 - RNA, 19 nt, Homo sapiens
  misc_RNA (1)...(19): siRNA sense strand
agucacaaaagaagagauu

SEQ ID NO: 2237459 - RNA, 19 nt, Homo sapiens
  misc_RNA (1)...(19): siRNA sense strand
uaaugauggccguguucaa

SEQ ID NO: 2237460 - RNA, 19 nt, Homo sapiens
  misc_RNA (1)...(19): siRNA sense strand
gccagauggagaacacaaa

SEQ ID NO: 2237461 - RNA, 19 nt, Homo sapiens
  misc_RNA (1)...(19): siRNA sense strand
cugaaugagcucuuuggaa

SEQ ID NO: 2237462 - RNA, 19 nt, Homo sapiens
  misc_RNA (1)...(19): siRNA sense strand
ugaucaugaugguggccuu

SEQ ID NO: 2237463 - RNA, 19 nt, Homo sapiens
  misc_RNA (1)...(19): siRNA sense strand
gagcgggaggagauagaga

SEQ ID NO: 2237464 - RNA, 19 nt, Homo sapiens
  misc_RNA (1)...(19): siRNA sense strand
gccuuguugccaugggaua

SEQ ID NO: 2237465 - RNA, 19 nt, Homo sapiens
  misc_RNA (1)...(19): siRNA sense strand
augugaagcggcauacaaa

SEQ ID NO: 2237466 - RNA, 19 nt, Homo sapiens
  misc_RNA (1)...(19): siRNA sense strand
cagccaagcccuuugcaca

SEQ ID NO: 2237467 - RNA, 19 nt, Homo sapiens
  misc_RNA (1)...(19): siRNA sense strand
cuggguagacagaaugaau

SEQ ID NO: 2237468 - RNA, 19 nt, Homo sapiens
  misc_RNA (1)...(19): siRNA sense strand
gccaagaacugugugaaaa

SEQ ID NO: 2237469 - RNA, 19 nt, Homo sapiens
  misc_RNA (1)...(19): siRNA sense strand
gguaaagagaggaaugaau

SEQ ID NO: 2237470 - RNA, 19 nt, Homo sapiens
  misc_RNA (1)...(19): siRNA sense strand
aggccaaagaggagaucaa

SEQ ID NO: 2237471 - RNA, 19 nt, Homo sapiens
  misc_RNA (1)...(19): siRNA sense strand
uggaagagggccaugguaa

SEQ ID NO: 2237472 - RNA, 19 nt, Homo sapiens
  misc_RNA (1)...(19): siRNA sense strand
agaucuaugugaaggguau

SEQ ID NO: 2237473 - RNA, 19 nt, Homo sapiens
  misc_RNA (1)...(19): siRNA sense strand
agagaaggaccgagacaau

SEQ ID NO: 2237474 - RNA, 19 nt, Homo sapiens
  misc_RNA (1)...(19): siRNA sense strand
ggucuugggauguggauau

SEQ ID NO: 2237475 - RNA, 19 nt, Homo sapiens
  misc_RNA (1)...(19): siRNA sense strand
gggaacacaaugagaacau

SEQ ID NO: 2237476 - RNA, 19 nt, Homo sapiens
  misc_RNA (1)...(19): siRNA sense strand
cagaaagcauacaggagau

SEQ ID NO: 2237477 - RNA, 19 nt, Homo sapiens
  misc_RNA (1)...(19): siRNA sense strand
ucagugaacaggaaggaaa

SEQ ID NO: 2237478 - RNA, 19 nt, Homo sapiens
  misc_RNA (1)...(19): siRNA sense strand
agacagagaaccaaagaca

SEQ ID NO: 2237479 - RNA, 19 nt, Homo sapiens
  misc_RNA (1)...(19): siRNA sense strand
cguuaucggcgcuaagaaa

SEQ ID NO: 2237480 - RNA, 19 nt, Homo sapiens
  misc_RNA (1)...(19): siRNA sense strand
cuucaagagugaugccaau

SEQ ID NO: 2237481 - RNA, 19 nt, Homo sapiens
  misc_RNA (1)...(19): siRNA sense strand
ccuuacaggcagcgaggaa

SEQ ID NO: 2237482 - RNA, 19 nt, Homo sapiens
  misc_RNA (1)...(19): siRNA sense strand
caggaaucaucaaggguca

SEQ ID NO: 2237483 - RNA, 19 nt, Homo sapiens
  misc_RNA (1)...(19): siRNA sense strand
agucugggccugaggaaau

SEQ ID NO: 2237484 - RNA, 19 nt, Homo sapiens
  misc_RNA (1)...(19): siRNA sense strand
ucaccacagcagaggauua

SEQ ID NO: 2237485 - RNA, 19 nt, Homo sapiens
  misc_RNA (1)...(19): siRNA sense strand
agucgauacccuugaagaa

SEQ ID NO: 2237486 - RNA, 19 nt, Homo sapiens
  misc_RNA (1)...(19): siRNA sense strand
gagacaaugaggagcugua

SEQ ID NO: 2237487 - RNA, 19 nt, Homo sapiens
  misc_RNA (1)...(19): siRNA sense strand
gguuuguuguccuggaaau

SEQ ID NO: 2237488 - RNA, 19 nt, Homo sapiens
  misc_RNA (1)...(19): siRNA sense strand
gaggaaauuaacaagagaa

SEQ ID NO: 2237489 - RNA, 19 nt, Homo sapiens
  misc_RNA (1)...(19): siRNA sense strand
uggaaaugaucaacgacau

SEQ ID NO: 2237490 - RNA, 19 nt, Homo sapiens
  misc_RNA (1)...(19): siRNA sense strand
cggaaguggugaugaacgu

SEQ ID NO: 2237491 - RNA, 19 nt, Homo sapiens
  misc_RNA (1)...(19): siRNA sense strand
gcaaaucggaaguggugau

SEQ ID NO: 2237492 - RNA, 19 nt, Homo sapiens
  misc_RNA (1)...(19): siRNA sense strand
cuggaaucuucaucaguua

SEQ ID NO: 2237493 - RNA, 19 nt, Homo sapiens
  misc_RNA (1)...(19): siRNA sense strand
gugacuauaacguggaaga

SEQ ID NO: 2237494 - RNA, 19 nt, Homo sapiens
  misc_RNA (1)...(19): siRNA sense strand
uaaauugagaagagagcau

SEQ ID NO: 2237495 - RNA, 19 nt, Homo sapiens
  misc_RNA (1)...(19): siRNA sense strand
cucaauaggcaaaggcaga

SEQ ID NO: 2237496 - RNA, 19 nt, Homo sapiens
  misc_RNA (1)...(19): siRNA sense strand
ggcugaaggcaccgacaaa

SEQ ID NO: 2237497 - RNA, 19 nt, Homo sapiens
  misc_RNA (1)...(19): siRNA sense strand
gaucaaaaccaucagguau

SEQ ID NO: 2237498 - RNA, 19 nt, Homo sapiens
  misc_RNA (1)...(19): siRNA sense strand
acucgaaucuggaggaauc

SEQ ID NO: 2237499 - RNA, 19 nt, Homo sapiens
  misc_RNA (1)...(19): siRNA sense strand
gggauguggauauugcaaa

SEQ ID NO: 2237500 - RNA, 19 nt, Homo sapiens
  misc_RNA (1)...(19): siRNA sense strand
acagaaagcauacaggaga

SEQ ID NO: 2237501 - RNA, 19 nt, Homo sapiens
  misc_RNA (1)...(19): siRNA sense strand
agaugaaggagcugaggga

SEQ ID NO: 2237502 - RNA, 19 nt, Homo sapiens
  misc_RNA (1)...(19): siRNA sense strand
cugaacugcccuuugauaa

SEQ ID NO: 2237503 - RNA, 19 nt, Homo sapiens
  misc_RNA (1)...(19): siRNA sense strand
ccuugaagaaccugacuuu

SEQ ID NO: 2237504 - RNA, 19 nt, Homo sapiens
  misc_RNA (1)...(19): siRNA sense strand
cagugaacaggaaggaaaa

SEQ ID NO: 2237505 - RNA, 19 nt, Homo sapiens
  misc_RNA (1)...(19): siRNA sense strand
gcuccuacccagaguacuu

SEQ ID NO: 2237506 - RNA, 19 nt, Homo sapiens
  misc_RNA (1)...(19): siRNA sense strand
aggagaucaaugagaugaa

SEQ ID NO: 2237507 - RNA, 19 nt, Homo sapiens
  misc_RNA (1)...(19): siRNA sense strand
aaagcauacaggagaucaa

SEQ ID NO: 2237508 - RNA, 19 nt, Homo sapiens
  misc_RNA (1)...(19): siRNA sense strand
ccaaaggcgcaaaucggaa

SEQ ID NO: 2237509 - RNA, 19 nt, Homo sapiens
  misc_RNA (1)...(19): siRNA sense strand
augaaggagcugagggaac

SEQ ID NO: 2237510 - RNA, 19 nt, Homo sapiens
  misc_RNA (1)...(19): siRNA sense strand
ugaucaacgacaugaccaa

SEQ ID NO: 2237511 - RNA, 19 nt, Homo sapiens
  misc_RNA (1)...(19): siRNA sense strand
aggaagcauaauaucgaaa

SEQ ID NO: 2237512 - RNA, 19 nt, Homo sapiens
  misc_RNA (1)...(19): siRNA sense strand
cuugcggaguggcgauaaa

SEQ ID NO: 2237513 - RNA, 19 nt, Homo sapiens
  misc_RNA (1)...(19): siRNA sense strand
cuagagaaggaccgagaca

SEQ ID NO: 2237514 - RNA, 19 nt, Homo sapiens
  misc_RNA (1)...(19): siRNA sense strand
gaguggaggcucgggcaaa

SEQ ID NO: 2237515 - RNA, 19 nt, Homo sapiens
  misc_RNA (1)...(19): siRNA sense strand
ggauguggauauugcaaac

SEQ ID NO: 2237516 - RNA, 19 nt, Homo sapiens
  misc_RNA (1)...(19): siRNA sense strand
agaacaugcuccggaauau

SEQ ID NO: 2237517 - RNA, 19 nt, Homo sapiens
  misc_RNA (1)...(19): siRNA sense strand
guaugaacacagcuggaau

SEQ ID NO: 2237518 - RNA, 19 nt, Homo sapiens
  misc_RNA (1)...(19): siRNA sense strand
ugcagauguuaaaggauuu

SEQ ID NO: 2237519 - RNA, 19 nt, Homo sapiens
  misc_RNA (1)...(19): siRNA sense strand
uguggauauugcaaacaaa

SEQ ID NO: 2237520 - RNA, 19 nt, Homo sapiens
  misc_RNA (1)...(19): siRNA sense strand
ugaggaaauuaacaagaga

SEQ ID NO: 2237521 - RNA, 19 nt, Homo sapiens
  misc_RNA (1)...(19): siRNA sense strand
ugagaagagagcauaucaa

SEQ ID NO: 2237522 - RNA, 19 nt, Homo sapiens
  misc_RNA (1)...(19): siRNA sense strand
ugaacugcccuuugauaau

SEQ ID NO: 2237523 - RNA, 19 nt, Homo sapiens
  misc_RNA (1)...(19): siRNA sense strand
gaguacaggccaaagagga

SEQ ID NO: 2237524 - RNA, 19 nt, Homo sapiens
  misc_RNA (1)...(19): siRNA sense strand
agaaggaccgagacaauga

SEQ ID NO: 2237525 - RNA, 19 nt, Homo sapiens
  misc_RNA (1)...(19): siRNA sense strand
uguccuugccugaagauau

SEQ ID NO: 2237526 - RNA, 19 nt, Homo sapiens
  misc_RNA (1)...(19): siRNA sense strand
gaagauaucgucaaggagu

SEQ ID NO: 2237527 - RNA, 19 nt, Homo sapiens
  misc_RNA (1)...(19): siRNA sense strand
ggccugaggaaauuaacaa

SEQ ID NO: 2237528 - RNA, 19 nt, Homo sapiens
  misc_RNA (1)...(19): siRNA sense strand
ucgaugaguugcuugguga

SEQ ID NO: 2237529 - RNA, 19 nt, Homo sapiens
  misc_RNA (1)...(19): siRNA sense strand
gcaccaaagucuucccgga

SEQ ID NO: 2237530 - RNA, 19 nt, Homo sapiens
  misc_RNA (1)...(19): siRNA sense strand
cgcuaagaaaccacaguau

SEQ ID NO: 2237531 - RNA, 19 nt, Homo sapiens
  misc_RNA (1)...(19): siRNA sense strand
ugugaaggguaucagugaa

SEQ ID NO: 2237532 - RNA, 19 nt, Homo sapiens
  misc_RNA (1)...(19): siRNA sense strand
gagaagaaggagaugguga

SEQ ID NO: 2237533 - RNA, 19 nt, Homo sapiens
  misc_RNA (1)...(19): siRNA sense strand
agaagaaggagauggugaa

SEQ ID NO: 2237534 - RNA, 19 nt, Homo sapiens
  misc_RNA (1)...(19): siRNA sense strand
ggagaugaggagagugaga

SEQ ID NO: 2237535 - RNA, 19 nt, Homo sapiens
  misc_RNA (1)...(19): siRNA sense strand
acgaaauggaagaugggaa

SEQ ID NO: 2237536 - RNA, 19 nt, Homo sapiens
  misc_RNA (1)...(19): siRNA sense strand
agggagaugaggagaguga

SEQ ID NO: 2237537 - RNA, 19 nt, Homo sapiens
  misc_RNA (1)...(19): siRNA sense strand
gcgaauuugaagucagcua

SEQ ID NO: 2237538 - RNA, 19 nt, Homo sapiens
  misc_RNA (1)...(19): siRNA sense strand
gugagaucuugcaggagaa

SEQ ID NO: 2237539 - RNA, 19 nt, Homo sapiens
  misc_RNA (1)...(19): siRNA sense strand
ccuccgaauaugagaccaa

SEQ ID NO: 2237540 - RNA, 19 nt, Homo sapiens
  misc_RNA (1)...(19): siRNA sense strand
acuuaaugaagcagggaga

SEQ ID NO: 2237541 - RNA, 19 nt, Homo sapiens
  misc_RNA (1)...(19): siRNA sense strand
ccgugaaugucaaggggaa

SEQ ID NO: 2237542 - RNA, 19 nt, Homo sapiens
  misc_RNA (1)...(19): siRNA sense strand
agaugaggagagugagaau

SEQ ID NO: 2237543 - RNA, 19 nt, Homo sapiens
  misc_RNA (1)...(19): siRNA sense strand
uugaaagguuugaagacau

SEQ ID NO: 2237544 - RNA, 19 nt, Homo sapiens
  misc_RNA (1)...(19): siRNA sense strand
uugcagauaucgugggcuu

SEQ ID NO: 2237545 - RNA, 19 nt, Homo sapiens
  misc_RNA (1)...(19): siRNA sense strand
aggugagcgaagagagcua

SEQ ID NO: 2237546 - RNA, 19 nt, Homo sapiens
  misc_RNA (1)...(19): siRNA sense strand
ggaaggaccuggaagugga

SEQ ID NO: 2237547 - RNA, 19 nt, Homo sapiens
  misc_RNA (1)...(19): siRNA sense strand
caagaacauccgggagaaa

SEQ ID NO: 2237548 - RNA, 19 nt, Homo sapiens
  misc_RNA (1)...(19): siRNA sense strand
gcugccaagacgagcauaa

SEQ ID NO: 2237549 - RNA, 19 nt, Homo sapiens
  misc_RNA (1)...(19): siRNA sense strand
agaccaagugugagaaaau

SEQ ID NO: 2237550 - RNA, 19 nt, Homo sapiens
  misc_RNA (1)...(19): siRNA sense strand
ggaccagcuaucaggaaga

SEQ ID NO: 2237551 - RNA, 19 nt, Homo sapiens
  misc_RNA (1)...(19): siRNA sense strand
auggaagaugggaaaguua

SEQ ID NO: 2237552 - RNA, 19 nt, Homo sapiens
  misc_RNA (1)...(19): siRNA sense strand
cuacagagggaccgugaau

SEQ ID NO: 2237553 - RNA, 19 nt, Homo sapiens
  misc_RNA (1)...(19): siRNA sense strand
ggucagagagccaaggagu

SEQ ID NO: 2237554 - RNA, 19 nt, Homo sapiens
  misc_RNA (1)...(19): siRNA sense strand
ccacagacgagauugccaa

SEQ ID NO: 2237555 - RNA, 19 nt, Homo sapiens
  misc_RNA (1)...(19): siRNA sense strand
gcuaccgcgucuugagcaa

SEQ ID NO: 2237556 - RNA, 19 nt, Homo sapiens
  misc_RNA (1)...(19): siRNA sense strand
agaucgaagaagucaguau

SEQ ID NO: 2237557 - RNA, 19 nt, Homo sapiens
  misc_RNA (1)...(19): siRNA sense strand
gaagagagcuaccgcgucu

SEQ ID NO: 2237558 - RNA, 19 nt, Homo sapiens
  misc_RNA (1)...(19): siRNA sense strand
caggugagguccaggagca

SEQ ID NO: 2237559 - RNA, 19 nt, Homo sapiens
  misc_RNA (1)...(19): siRNA sense strand
ccgcaaaauacuuagauga

SEQ ID NO: 2237560 - RNA, 19 nt, Homo sapiens
  misc_RNA (1)...(19): siRNA sense strand
gcuaucaggaagaggucau

SEQ ID NO: 2237561 - RNA, 19 nt, Homo sapiens
  misc_RNA (1)...(19): siRNA sense strand
ggaagaggucauaaagaac

SEQ ID NO: 2237562 - RNA, 19 nt, Homo sapiens
  misc_RNA (1)...(19): siRNA sense strand
caccaaggcuucuggagga

SEQ ID NO: 2237563 - RNA, 19 nt, Homo sapiens
  misc_RNA (1)...(19): siRNA sense strand
uggacgacuucaacaacaa

SEQ ID NO: 2237564 - RNA, 19 nt, Homo sapiens
  misc_RNA (1)...(19): siRNA sense strand
ccgaugacuuaaugaagca

SEQ ID NO: 2237565 - RNA, 19 nt, Homo sapiens
  misc_RNA (1)...(19): siRNA sense strand
aagaagacagccugaugaa

SEQ ID NO: 2237566 - RNA, 19 nt, Homo sapiens
  misc_RNA (1)...(19): siRNA sense strand
ugugagaucuugcaggaga

SEQ ID NO: 2237567 - RNA, 19 nt, Homo sapiens
  misc_RNA (1)...(19): siRNA sense strand
ggacagcgucaucagggaa

SEQ ID NO: 2237568 - RNA, 19 nt, Homo sapiens
  misc_RNA (1)...(19): siRNA sense strand
gcagcaucgagaagaucaa

SEQ ID NO: 2237569 - RNA, 19 nt, Homo sapiens
  misc_RNA (1)...(19): siRNA sense strand
gccugaacuuccuggauca

SEQ ID NO: 2237570 - RNA, 19 nt, Homo sapiens
  misc_RNA (1)...(19): siRNA sense strand
caggaagaggucauaaaga

SEQ ID NO: 2237571 - RNA, 19 nt, Homo sapiens
  misc_RNA (1)...(19): siRNA sense strand
ccaaggagaugaugcgcgu

SEQ ID NO: 2237572 - RNA, 19 nt, Homo sapiens
  misc_RNA (1)...(19): siRNA sense strand
cggcauuacgcguggaccu

SEQ ID NO: 2237573 - RNA, 19 nt, Homo sapiens
  misc_RNA (1)...(19): siRNA sense strand
gguccaacgaugugaaccu

SEQ ID NO: 2237574 - RNA, 19 nt, Homo sapiens
  misc_RNA (1)...(19): siRNA sense strand
uggccaaucucauggagca

SEQ ID NO: 2237575 - RNA, 19 nt, Homo sapiens
  misc_RNA (1)...(19): siRNA sense strand
ccaagaugagugccaacaa

SEQ ID NO: 2237576 - RNA, 19 nt, Homo sapiens
  misc_RNA (1)...(19): siRNA sense strand
uggaagaugggaaaguuau

SEQ ID NO: 2237577 - RNA, 19 nt, Homo sapiens
  misc_RNA (1)...(19): siRNA sense strand
cugaccaguugaaagguuu

SEQ ID NO: 2237578 - RNA, 19 nt, Homo sapiens
  misc_RNA (1)...(19): siRNA sense strand
acagcagcaucgagaagau

SEQ ID NO: 2237579 - RNA, 19 nt, Homo sapiens
  misc_RNA (1)...(19): siRNA sense strand
gcgugcgcgucaagaucaa

SEQ ID NO: 2237580 - RNA, 19 nt, Homo sapiens
  misc_RNA (1)...(19): siRNA sense strand
gccaagaaucauagccgau

SEQ ID NO: 2237581 - RNA, 19 nt, Homo sapiens
  misc_RNA (1)...(19): siRNA sense strand
acaaauggcugucaagaaa

SEQ ID NO: 2237582 - RNA, 19 nt, Homo sapiens
  misc_RNA (1)...(19): siRNA sense strand
guccuagggaagagguaua

SEQ ID NO: 2237583 - RNA, 19 nt, Homo sapiens
  misc_RNA (1)...(19): siRNA sense strand
aaauggcugucaagaaaua

SEQ ID NO: 2237584 - RNA, 19 nt, Homo sapiens
  misc_RNA (1)...(19): siRNA sense strand
ccugcuggucuaugggaua

SEQ ID NO: 2237585 - RNA, 19 nt, Homo sapiens
  misc_RNA (1)...(19): siRNA sense strand
cgggaucaggccagaggaa

SEQ ID NO: 2237586 - RNA, 19 nt, Homo sapiens
  misc_RNA (1)...(19): siRNA sense strand
ggaucuucacggacagcua

SEQ ID NO: 2237587 - RNA, 19 nt, Homo sapiens
  misc_RNA (1)...(19): siRNA sense strand
agggaagagguauaaacaa

SEQ ID NO: 2237588 - RNA, 19 nt, Homo sapiens
  misc_RNA (1)...(19): siRNA sense strand
ccagaguacuugagggaga

SEQ ID NO: 2237589 - RNA, 19 nt, Homo sapiens
  misc_RNA (1)...(19): siRNA sense strand
ggacuaaagaggauggaca

SEQ ID NO: 2237590 - RNA, 19 nt, Homo sapiens
  misc_RNA (1)...(19): siRNA sense strand
gagcagaauuuacaggaca

SEQ ID NO: 2237591 - RNA, 19 nt, Homo sapiens
  misc_RNA (1)...(19): siRNA sense strand
gagcaaaagaagagggugu

SEQ ID NO: 2237592 - RNA, 19 nt, Homo sapiens
  misc_RNA (1)...(19): siRNA sense strand
cugaagaagagcaagaaga

SEQ ID NO: 2237593 - RNA, 19 nt, Homo sapiens
  misc_RNA (1)...(19): siRNA sense strand
ucaacaugauggagcaaaa

SEQ ID NO: 2237594 - RNA, 19 nt, Homo sapiens
  misc_RNA (1)...(19): siRNA sense strand
gaacaagauccgagagcag

SEQ ID NO: 2237595 - RNA, 19 nt, Homo sapiens
  misc_RNA (1)...(19): siRNA sense strand
cuagagaacagaaagaaaa

SEQ ID NO: 2237596 - RNA, 19 nt, Homo sapiens
  misc_RNA (1)...(19): siRNA sense strand
ccugagaaguacaaagcca

SEQ ID NO: 2237597 - RNA, 19 nt, Homo sapiens
  misc_RNA (1)...(19): siRNA sense strand
gagaagacaagauggcuga

SEQ ID NO: 2237598 - RNA, 19 nt, Homo sapiens
  misc_RNA (1)...(19): siRNA sense strand
agagcaagaagaagaguga

SEQ ID NO: 2237599 - RNA, 19 nt, Homo sapiens
  misc_RNA (1)...(19): siRNA sense strand
guguaaauuggcagcguuu

SEQ ID NO: 2237600 - RNA, 19 nt, Homo sapiens
  misc_RNA (1)...(19): siRNA sense strand
aggcuagagaacagaaaga

SEQ ID NO: 2237601 - RNA, 19 nt, Homo sapiens
  misc_RNA (1)...(19): siRNA sense strand
cagaagcagcagcgggaga

SEQ ID NO: 2237602 - RNA, 19 nt, Homo sapiens
  misc_RNA (1)...(19): siRNA sense strand
guccaggagaugaggaaca

SEQ ID NO: 2237603 - RNA, 19 nt, Homo sapiens
  misc_RNA (1)...(19): siRNA sense strand
aguacuugagggagaggaa

SEQ ID NO: 2237604 - RNA, 19 nt, Homo sapiens
  misc_RNA (1)...(19): siRNA sense strand
ugguugaugaagaggaaaa

SEQ ID NO: 2237605 - RNA, 19 nt, Homo sapiens
  misc_RNA (1)...(19): siRNA sense strand
gacuaaagaggauggacau

SEQ ID NO: 2237606 - RNA, 19 nt, Homo sapiens
  misc_RNA (1)...(19): siRNA sense strand
augacaaaggagagaaguu

SEQ ID NO: 2237607 - RNA, 19 nt, Homo sapiens
  misc_RNA (1)...(19): siRNA sense strand
cugagaaguacaaagccaa

SEQ ID NO: 2237608 - RNA, 19 nt, Homo sapiens
  misc_RNA (1)...(19): siRNA sense strand
cagcagcgggagaagacaa

SEQ ID NO: 2237609 - RNA, 19 nt, Homo sapiens
  misc_RNA (1)...(19): siRNA sense strand
gugaacgaucuuagaggau

SEQ ID NO: 2237610 - RNA, 19 nt, Homo sapiens
  misc_RNA (1)...(19): siRNA sense strand
ucugguugaugaagaggaa

SEQ ID NO: 2237611 - RNA, 19 nt, Homo sapiens
  misc_RNA (1)...(19): siRNA sense strand
ccauugaacacuaacccaa

SEQ ID NO: 2237612 - RNA, 19 nt, Homo sapiens
  misc_RNA (1)...(19): siRNA sense strand
ucccaauguuagagaagga

SEQ ID NO: 2237613 - RNA, 19 nt, Homo sapiens
  misc_RNA (1)...(19): siRNA sense strand
gcguaugacaaaggagaga

SEQ ID NO: 2237614 - RNA, 19 nt, Homo sapiens
  misc_RNA (1)...(19): siRNA sense strand
ugcugaauccugagaagua

SEQ ID NO: 2237615 - RNA, 19 nt, Homo sapiens
  misc_RNA (1)...(19): siRNA sense strand
acuaaagaggauggacaua

SEQ ID NO: 2237616 - RNA, 19 nt, Homo sapiens
  misc_RNA (1)...(19): siRNA sense strand
acaagauccgagagcagaa

SEQ ID NO: 2237617 - RNA, 19 nt, Homo sapiens
  misc_RNA (1)...(19): siRNA sense strand
accgaguagaugagaacaa

SEQ ID NO: 2237618 - RNA, 19 nt, Homo sapiens
  misc_RNA (1)...(19): siRNA sense strand
acaacuuaguccugcugaa

SEQ ID NO: 2237619 - RNA, 19 nt, Homo sapiens
  misc_RNA (1)...(19): siRNA sense strand
aagaagaagaaguuccgua

SEQ ID NO: 2237620 - RNA, 19 nt, Homo sapiens
  misc_RNA (1)...(19): siRNA sense strand
cgaccgaguagaugagaac

SEQ ID NO: 2237621 - RNA, 19 nt, Homo sapiens
  misc_RNA (1)...(19): siRNA sense strand
agcaagaagaagagugacu

SEQ ID NO: 2237622 - RNA, 19 nt, Homo sapiens
  misc_RNA (1)...(19): siRNA sense strand
caggaggaccagacaacuu

SEQ ID NO: 2237623 - RNA, 19 nt, Homo sapiens
  misc_RNA (1)...(19): siRNA sense strand
cauugaacacuaacccaaa

SEQ ID NO: 2237624 - RNA, 19 nt, Homo sapiens
  misc_RNA (1)...(19): siRNA sense strand
agguggagaggaagcagaa

SEQ ID NO: 2237625 - RNA, 19 nt, Homo sapiens
  misc_RNA (1)...(19): siRNA sense strand
agcagaauuuacaggacau

SEQ ID NO: 2237626 - RNA, 19 nt, Homo sapiens
  misc_RNA (1)...(19): siRNA sense strand
ccagaguacuugagggaga

SEQ ID NO: 2237627 - RNA, 19 nt, Homo sapiens
  misc_RNA (1)...(19): siRNA sense strand
ggacuaaagaggauggaca

SEQ ID NO: 2237628 - RNA, 19 nt, Homo sapiens
  misc_RNA (1)...(19): siRNA sense strand
gagcagaauuuacaggaca

SEQ ID NO: 2237629 - RNA, 19 nt, Homo sapiens
  misc_RNA (1)...(19): siRNA sense strand
gagcaaaagaagagggugu

SEQ ID NO: 2237630 - RNA, 19 nt, Homo sapiens
  misc_RNA (1)...(19): siRNA sense strand
cugaagaagagcaagaaga

SEQ ID NO: 2237631 - RNA, 19 nt, Homo sapiens
  misc_RNA (1)...(19): siRNA sense strand
ucaacaugauggagcaaaa

SEQ ID NO: 2237632 - RNA, 19 nt, Homo sapiens
  misc_RNA (1)...(19): siRNA sense strand
gaacaagauccgagagcag

SEQ ID NO: 2237633 - RNA, 19 nt, Homo sapiens
  misc_RNA (1)...(19): siRNA sense strand
cuagagaacagaaagaaaa

SEQ ID NO: 2237634 - RNA, 19 nt, Homo sapiens
  misc_RNA (1)...(19): siRNA sense strand
ccugagaaguacaaagcca

SEQ ID NO: 2237635 - RNA, 19 nt, Homo sapiens
  misc_RNA (1)...(19): siRNA sense strand
gagaagacaagauggcuga

SEQ ID NO: 2237636 - RNA, 19 nt, Homo sapiens
  misc_RNA (1)...(19): siRNA sense strand
agagcaagaagaagaguga

SEQ ID NO: 2237637 - RNA, 19 nt, Homo sapiens
  misc_RNA (1)...(19): siRNA sense strand
guguaaauuggcagcguuu

SEQ ID NO: 2237638 - RNA, 19 nt, Homo sapiens
  misc_RNA (1)...(19): siRNA sense strand
aggcuagagaacagaaaga

SEQ ID NO: 2237639 - RNA, 19 nt, Homo sapiens
  misc_RNA (1)...(19): siRNA sense strand
cagaagcagcagcgggaga

SEQ ID NO: 2237640 - RNA, 19 nt, Homo sapiens
  misc_RNA (1)...(19): siRNA sense strand
guccaggagaugaggaaca

SEQ ID NO: 2237641 - RNA, 19 nt, Homo sapiens
  misc_RNA (1)...(19): siRNA sense strand
aguacuugagggagaggaa

SEQ ID NO: 2237642 - RNA, 19 nt, Homo sapiens
  misc_RNA (1)...(19): siRNA sense strand
ugguugaugaagaggaaaa

SEQ ID NO: 2237643 - RNA, 19 nt, Homo sapiens
  misc_RNA (1)...(19): siRNA sense strand
gacuaaagaggauggacau

SEQ ID NO: 2237644 - RNA, 19 nt, Homo sapiens
  misc_RNA (1)...(19): siRNA sense strand
augacaaaggagagaaguu

SEQ ID NO: 2237645 - RNA, 19 nt, Homo sapiens
  misc_RNA (1)...(19): siRNA sense strand
cugagaaguacaaagccaa

SEQ ID NO: 2237646 - RNA, 19 nt, Homo sapiens
  misc_RNA (1)...(19): siRNA sense strand
cagcagcgggagaagacaa

SEQ ID NO: 2237647 - RNA, 19 nt, Homo sapiens
  misc_RNA (1)...(19): siRNA sense strand
gugaacgaucuuagaggau

SEQ ID NO: 2237648 - RNA, 19 nt, Homo sapiens
  misc_RNA (1)...(19): siRNA sense strand
ucugguugaugaagaggaa

SEQ ID NO: 2237649 - RNA, 19 nt, Homo sapiens
  misc_RNA (1)...(19): siRNA sense strand
ccauugaacacuaacccaa

SEQ ID NO: 2237650 - RNA, 19 nt, Homo sapiens
  misc_RNA (1)...(19): siRNA sense strand
ucccaauguuagagaagga

SEQ ID NO: 2237651 - RNA, 19 nt, Homo sapiens
  misc_RNA (1)...(19): siRNA sense strand
gcguaugacaaaggagaga

SEQ ID NO: 2237652 - RNA, 19 nt, Homo sapiens
  misc_RNA (1)...(19): siRNA sense strand
ugcugaauccugagaagua

SEQ ID NO: 2237653 - RNA, 19 nt, Homo sapiens
  misc_RNA (1)...(19): siRNA sense strand
acuaaagaggauggacaua

SEQ ID NO: 2237654 - RNA, 19 nt, Homo sapiens
  misc_RNA (1)...(19): siRNA sense strand
acaagauccgagagcagaa

SEQ ID NO: 2237655 - RNA, 19 nt, Homo sapiens
  misc_RNA (1)...(19): siRNA sense strand
accgaguagaugagaacaa

SEQ ID NO: 2237656 - RNA, 19 nt, Homo sapiens
  misc_RNA (1)...(19): siRNA sense strand
acaacuuaguccugcugaa

SEQ ID NO: 2237657 - RNA, 19 nt, Homo sapiens
  misc_RNA (1)...(19): siRNA sense strand
aagaagaagaaguuccgua

SEQ ID NO: 2237658 - RNA, 19 nt, Homo sapiens
  misc_RNA (1)...(19): siRNA sense strand
cgaccgaguagaugagaac

SEQ ID NO: 2237659 - RNA, 19 nt, Homo sapiens
  misc_RNA (1)...(19): siRNA sense strand
agcaagaagaagagugacu

SEQ ID NO: 2237660 - RNA, 19 nt, Homo sapiens
  misc_RNA (1)...(19): siRNA sense strand
caggaggaccagacaacuu

SEQ ID NO: 2237661 - RNA, 19 nt, Homo sapiens
  misc_RNA (1)...(19): siRNA sense strand
cauugaacacuaacccaaa

SEQ ID NO: 2237662 - RNA, 19 nt, Homo sapiens
  misc_RNA (1)...(19): siRNA sense strand
agguggagaggaagcagaa

SEQ ID NO: 2237663 - RNA, 19 nt, Homo sapiens
  misc_RNA (1)...(19): siRNA sense strand
agcagaauuuacaggacau

SEQ ID NO: 2237664 - RNA, 19 nt, Homo sapiens
  misc_RNA (1)...(19): siRNA sense strand
ccagaguacuugagggaga

SEQ ID NO: 2237665 - RNA, 19 nt, Homo sapiens
  misc_RNA (1)...(19): siRNA sense strand
ggacuaaagaggauggaca

SEQ ID NO: 2237666 - RNA, 19 nt, Homo sapiens
  misc_RNA (1)...(19): siRNA sense strand
gagcagaauuuacaggaca

SEQ ID NO: 2237667 - RNA, 19 nt, Homo sapiens
  misc_RNA (1)...(19): siRNA sense strand
gagcaaaagaagagggugu

SEQ ID NO: 2237668 - RNA, 19 nt, Homo sapiens
  misc_RNA (1)...(19): siRNA sense strand
ucaacaugauggagcaaaa

SEQ ID NO: 2237669 - RNA, 19 nt, Homo sapiens
  misc_RNA (1)...(19): siRNA sense strand
gaacaagauccgagagcag

SEQ ID NO: 2237670 - RNA, 19 nt, Homo sapiens
  misc_RNA (1)...(19): siRNA sense strand
cuagagaacagaaagaaaa

SEQ ID NO: 2237671 - RNA, 19 nt, Homo sapiens
  misc_RNA (1)...(19): siRNA sense strand
ccugagaaguacaaagcca

SEQ ID NO: 2237672 - RNA, 19 nt, Homo sapiens
  misc_RNA (1)...(19): siRNA sense strand
gagaagacaagauggcuga

SEQ ID NO: 2237673 - RNA, 19 nt, Homo sapiens
  misc_RNA (1)...(19): siRNA sense strand
guguaaauuggcagcguuu

SEQ ID NO: 2237674 - RNA, 19 nt, Homo sapiens
  misc_RNA (1)...(19): siRNA sense strand
aggcuagagaacagaaaga

SEQ ID NO: 2237675 - RNA, 19 nt, Homo sapiens
  misc_RNA (1)...(19): siRNA sense strand
cagaagcagcagcgggaga

SEQ ID NO: 2237676 - RNA, 19 nt, Homo sapiens
  misc_RNA (1)...(19): siRNA sense strand
guccaggagaugaggaaca

SEQ ID NO: 2237677 - RNA, 19 nt, Homo sapiens
  misc_RNA (1)...(19): siRNA sense strand
aguacuugagggagaggaa

SEQ ID NO: 2237678 - RNA, 19 nt, Homo sapiens
  misc_RNA (1)...(19): siRNA sense strand
ugguugaugaagaggaaaa

SEQ ID NO: 2237679 - RNA, 19 nt, Homo sapiens
  misc_RNA (1)...(19): siRNA sense strand
gacuaaagaggauggacau

SEQ ID NO: 2237680 - RNA, 19 nt, Homo sapiens
  misc_RNA (1)...(19): siRNA sense strand
augacaaaggagagaaguu

SEQ ID NO: 2237681 - RNA, 19 nt, Homo sapiens
  misc_RNA (1)...(19): siRNA sense strand
cugagaaguacaaagccaa

SEQ ID NO: 2237682 - RNA, 19 nt, Homo sapiens
  misc_RNA (1)...(19): siRNA sense strand
cagcagcgggagaagacaa

SEQ ID NO: 2237683 - RNA, 19 nt, Homo sapiens
  misc_RNA (1)...(19): siRNA sense strand
gugaacgaucuuagaggau

SEQ ID NO: 2237684 - RNA, 19 nt, Homo sapiens
  misc_RNA (1)...(19): siRNA sense strand
ucugguugaugaagaggaa

SEQ ID NO: 2237685 - RNA, 19 nt, Homo sapiens
  misc_RNA (1)...(19): siRNA sense strand
ccauugaacacuaacccaa

SEQ ID NO: 2237686 - RNA, 19 nt, Homo sapiens
  misc_RNA (1)...(19): siRNA sense strand
gcguaugacaaaggagaga

SEQ ID NO: 2237687 - RNA, 19 nt, Homo sapiens
  misc_RNA (1)...(19): siRNA sense strand
ugcugaauccugagaagua

SEQ ID NO: 2237688 - RNA, 19 nt, Homo sapiens
  misc_RNA (1)...(19): siRNA sense strand
acuaaagaggauggacaua

SEQ ID NO: 2237689 - RNA, 19 nt, Homo sapiens
  misc_RNA (1)...(19): siRNA sense strand
acaagauccgagagcagaa

SEQ ID NO: 2237690 - RNA, 19 nt, Homo sapiens
  misc_RNA (1)...(19): siRNA sense strand
acaacuuaguccugcugaa

SEQ ID NO: 2237691 - RNA, 19 nt, Homo sapiens
  misc_RNA (1)...(19): siRNA sense strand
accgaguagaugagaacaa

SEQ ID NO: 2237692 - RNA, 19 nt, Homo sapiens
  misc_RNA (1)...(19): siRNA sense strand
cgaccgaguagaugagaac

SEQ ID NO: 2237693 - RNA, 19 nt, Homo sapiens
  misc_RNA (1)...(19): siRNA sense strand
caggaggaccagacaacuu

SEQ ID NO: 2237694 - RNA, 19 nt, Homo sapiens
  misc_RNA (1)...(19): siRNA sense strand
cauugaacacuaacccaaa

SEQ ID NO: 2237695 - RNA, 19 nt, Homo sapiens
  misc_RNA (1)...(19): siRNA sense strand
agguggagaggaagcagaa

SEQ ID NO: 2237696 - RNA, 19 nt, Homo sapiens
  misc_RNA (1)...(19): siRNA sense strand
agcagaauuuacaggacau

SEQ ID NO: 2237697 - RNA, 19 nt, Homo sapiens
  misc_RNA (1)...(19): siRNA sense strand
ccagaguacuugagggaga

SEQ ID NO: 2237698 - RNA, 19 nt, Homo sapiens
  misc_RNA (1)...(19): siRNA sense strand
ggacuaaagaggauggaca

SEQ ID NO: 2237699 - RNA, 19 nt, Homo sapiens
  misc_RNA (1)...(19): siRNA sense strand
gagcaaaagaagagggugu

SEQ ID NO: 2237700 - RNA, 19 nt, Homo sapiens
  misc_RNA (1)...(19): siRNA sense strand
ucaacaugauggagcaaaa

SEQ ID NO: 2237701 - RNA, 19 nt, Homo sapiens
  misc_RNA (1)...(19): siRNA sense strand
gaacaagauccgagagcag

SEQ ID NO: 2237702 - RNA, 19 nt, Homo sapiens
  misc_RNA (1)...(19): siRNA sense strand
cuagagaacagaaagaaaa

SEQ ID NO: 2237703 - RNA, 19 nt, Homo sapiens
  misc_RNA (1)...(19): siRNA sense strand
ccugagaaguacaaagcca

SEQ ID NO: 2237704 - RNA, 19 nt, Homo sapiens
  misc_RNA (1)...(19): siRNA sense strand
gagaagacaagauggcuga

SEQ ID NO: 2237705 - RNA, 19 nt, Homo sapiens
  misc_RNA (1)...(19): siRNA sense strand
guguaaauuggcagcguuu

SEQ ID NO: 2237706 - RNA, 19 nt, Homo sapiens
  misc_RNA (1)...(19): siRNA sense strand
aggcuagagaacagaaaga

SEQ ID NO: 2237707 - RNA, 19 nt, Homo sapiens
  misc_RNA (1)...(19): siRNA sense strand
cagaagcagcagcgggaga

SEQ ID NO: 2237708 - RNA, 19 nt, Homo sapiens
  misc_RNA (1)...(19): siRNA sense strand
guccaggagaugaggaaca

SEQ ID NO: 2237709 - RNA, 19 nt, Homo sapiens
  misc_RNA (1)...(19): siRNA sense strand
aguacuugagggagaggaa

SEQ ID NO: 2237710 - RNA, 19 nt, Homo sapiens
  misc_RNA (1)...(19): siRNA sense strand
ugguugaugaagaggaaaa

SEQ ID NO: 2237711 - RNA, 19 nt, Homo sapiens
  misc_RNA (1)...(19): siRNA sense strand
gacuaaagaggauggacau

SEQ ID NO: 2237712 - RNA, 19 nt, Homo sapiens
  misc_RNA (1)...(19): siRNA sense strand
augacaaaggagagaaguu

SEQ ID NO: 2237713 - RNA, 19 nt, Homo sapiens
  misc_RNA (1)...(19): siRNA sense strand
cugagaaguacaaagccaa

SEQ ID NO: 2237714 - RNA, 19 nt, Homo sapiens
  misc_RNA (1)...(19): siRNA sense strand
cagcagcgggagaagacaa

SEQ ID NO: 2237715 - RNA, 19 nt, Homo sapiens
  misc_RNA (1)...(19): siRNA sense strand
gugaacgaucuuagaggau

SEQ ID NO: 2237716 - RNA, 19 nt, Homo sapiens
  misc_RNA (1)...(19): siRNA sense strand
ucugguugaugaagaggaa

SEQ ID NO: 2237717 - RNA, 19 nt, Homo sapiens
  misc_RNA (1)...(19): siRNA sense strand
ccauugaacacuaacccaa

SEQ ID NO: 2237718 - RNA, 19 nt, Homo sapiens
  misc_RNA (1)...(19): siRNA sense strand
gcguaugacaaaggagaga

SEQ ID NO: 2237719 - RNA, 19 nt, Homo sapiens
  misc_RNA (1)...(19): siRNA sense strand
ugcugaauccugagaagua

SEQ ID NO: 2237720 - RNA, 19 nt, Homo sapiens
  misc_RNA (1)...(19): siRNA sense strand
acuaaagaggauggacaua

SEQ ID NO: 2237721 - RNA, 19 nt, Homo sapiens
  misc_RNA (1)...(19): siRNA sense strand
accgaguagaugagaacaa

SEQ ID NO: 2237722 - RNA, 19 nt, Homo sapiens
  misc_RNA (1)...(19): siRNA sense strand
acaacuuaguccugcugaa

SEQ ID NO: 2237723 - RNA, 19 nt, Homo sapiens
  misc_RNA (1)...(19): siRNA sense strand
cgaccgaguagaugagaac

SEQ ID NO: 2237724 - RNA, 19 nt, Homo sapiens
  misc_RNA (1)...(19): siRNA sense strand
caggaggaccagacaacuu

SEQ ID NO: 2237725 - RNA, 19 nt, Homo sapiens
  misc_RNA (1)...(19): siRNA sense strand
cauugaacacuaacccaaa

SEQ ID NO: 2237726 - RNA, 19 nt, Homo sapiens
  misc_RNA (1)...(19): siRNA sense strand
agguggagaggaagcagaa

SEQ ID NO: 2237727 - RNA, 19 nt, Homo sapiens
  misc_RNA (1)...(19): siRNA sense strand
caucauaauuagacggacu

SEQ ID NO: 2237728 - RNA, 19 nt, Homo sapiens
  misc_RNA (1)...(19): siRNA sense strand
augcauugggauagauaaa

SEQ ID NO: 2237729 - RNA, 19 nt, Homo sapiens
  misc_RNA (1)...(19): siRNA sense strand
acucaaagaggcagcgaau

SEQ ID NO: 2237730 - RNA, 19 nt, Homo sapiens
  misc_RNA (1)...(19): siRNA sense strand
guuugaugaacuugugaaa

SEQ ID NO: 2237731 - RNA, 19 nt, Homo sapiens
  misc_RNA (1)...(19): siRNA sense strand
acaucuugaucuggagaaa

SEQ ID NO: 2237732 - RNA, 19 nt, Homo sapiens
  misc_RNA (1)...(19): siRNA sense strand
cugcuguaguggacaaaga

SEQ ID NO: 2237733 - RNA, 19 nt, Homo sapiens
  misc_RNA (1)...(19): siRNA sense strand
caguauuaaagguggcuca

SEQ ID NO: 2237734 - RNA, 19 nt, Homo sapiens
  misc_RNA (1)...(19): siRNA sense strand
ucugaaaccaaaugaccaa

SEQ ID NO: 2237735 - RNA, 19 nt, Homo sapiens
  misc_RNA (1)...(19): siRNA sense strand
ggggagauccugaagagaa

SEQ ID NO: 2237736 - RNA, 19 nt, Homo sapiens
  misc_RNA (1)...(19): siRNA sense strand
gagcagaaugagcagccaa

SEQ ID NO: 2237737 - RNA, 19 nt, Homo sapiens
  misc_RNA (1)...(19): siRNA sense strand
gaucuucacccaagggaga

SEQ ID NO: 2237738 - RNA, 19 nt, Homo sapiens
  misc_RNA (1)...(19): siRNA sense strand
aagacaaacacaaggaacu

SEQ ID NO: 2237739 - RNA, 19 nt, Homo sapiens
  misc_RNA (1)...(19): siRNA sense strand
agagcaaggcuuugagacu

SEQ ID NO: 2237740 - RNA, 19 nt, Homo sapiens
  misc_RNA (1)...(19): siRNA sense strand
cugccaaagaugaacucaa

SEQ ID NO: 2237741 - RNA, 19 nt, Homo sapiens
  misc_RNA (1)...(19): siRNA sense strand
acauuaaagagauagccaa

SEQ ID NO: 2237742 - RNA, 19 nt, Homo sapiens
  misc_RNA (1)...(19): siRNA sense strand
cuguaguggacaaagauuu

SEQ ID NO: 2237743 - RNA, 19 nt, Homo sapiens
  misc_RNA (1)...(19): siRNA sense strand
uggaucaagaccagaaaga

SEQ ID NO: 2237744 - RNA, 19 nt, Homo sapiens
  misc_RNA (1)...(19): siRNA sense strand
ucugaaaacaacaggauuu

SEQ ID NO: 2237745 - RNA, 19 nt, Homo sapiens
  misc_RNA (1)...(19): siRNA sense strand
uggcugaagacaaacacaa

SEQ ID NO: 2237746 - RNA, 19 nt, Homo sapiens
  misc_RNA (1)...(19): siRNA sense strand
agaugaacucaaagaggca

SEQ ID NO: 2237747 - RNA, 19 nt, Homo sapiens
  misc_RNA (1)...(19): siRNA sense strand
caucauaauuagacggacu

SEQ ID NO: 2237748 - RNA, 19 nt, Homo sapiens
  misc_RNA (1)...(19): siRNA sense strand
augcauugggauagauaaa

SEQ ID NO: 2237749 - RNA, 19 nt, Homo sapiens
  misc_RNA (1)...(19): siRNA sense strand
acucaaagaggcagcgaau

SEQ ID NO: 2237750 - RNA, 19 nt, Homo sapiens
  misc_RNA (1)...(19): siRNA sense strand
guuugaugaacuugugaaa

SEQ ID NO: 2237751 - RNA, 19 nt, Homo sapiens
  misc_RNA (1)...(19): siRNA sense strand
acaucuugaucuggagaaa

SEQ ID NO: 2237752 - RNA, 19 nt, Homo sapiens
  misc_RNA (1)...(19): siRNA sense strand
cugcuguaguggacaaaga

SEQ ID NO: 2237753 - RNA, 19 nt, Homo sapiens
  misc_RNA (1)...(19): siRNA sense strand
caguauuaaagguggcuca

SEQ ID NO: 2237754 - RNA, 19 nt, Homo sapiens
  misc_RNA (1)...(19): siRNA sense strand
ucugaaaccaaaugaccaa

SEQ ID NO: 2237755 - RNA, 19 nt, Homo sapiens
  misc_RNA (1)...(19): siRNA sense strand
ggggagauccugaagagaa

SEQ ID NO: 2237756 - RNA, 19 nt, Homo sapiens
  misc_RNA (1)...(19): siRNA sense strand
gagcagaaugagcagccaa

SEQ ID NO: 2237757 - RNA, 19 nt, Homo sapiens
  misc_RNA (1)...(19): siRNA sense strand
gaucuucacccaagggaga

SEQ ID NO: 2237758 - RNA, 19 nt, Homo sapiens
  misc_RNA (1)...(19): siRNA sense strand
aagacaaacacaaggaacu

SEQ ID NO: 2237759 - RNA, 19 nt, Homo sapiens
  misc_RNA (1)...(19): siRNA sense strand
agagcaaggcuuugagacu

SEQ ID NO: 2237760 - RNA, 19 nt, Homo sapiens
  misc_RNA (1)...(19): siRNA sense strand
cugccaaagaugaacucaa

SEQ ID NO: 2237761 - RNA, 19 nt, Homo sapiens
  misc_RNA (1)...(19): siRNA sense strand
acauuaaagagauagccaa

SEQ ID NO: 2237762 - RNA, 19 nt, Homo sapiens
  misc_RNA (1)...(19): siRNA sense strand
cuguaguggacaaagauuu

SEQ ID NO: 2237763 - RNA, 19 nt, Homo sapiens
  misc_RNA (1)...(19): siRNA sense strand
uggaucaagaccagaaaga

SEQ ID NO: 2237764 - RNA, 19 nt, Homo sapiens
  misc_RNA (1)...(19): siRNA sense strand
ucugaaaacaacaggauuu

SEQ ID NO: 2237765 - RNA, 19 nt, Homo sapiens
  misc_RNA (1)...(19): siRNA sense strand
uggcugaagacaaacacaa

SEQ ID NO: 2237766 - RNA, 19 nt, Homo sapiens
  misc_RNA (1)...(19): siRNA sense strand
agaugaacucaaagaggca

SEQ ID NO: 2237767 - RNA, 19 nt, Homo sapiens
  misc_RNA (1)...(19): siRNA sense strand
uuucgaaagaaguggaaua

SEQ ID NO: 2237768 - RNA, 19 nt, Homo sapiens
  misc_RNA (1)...(19): siRNA sense strand
acagauaaggacaaggaca

SEQ ID NO: 2237769 - RNA, 19 nt, Homo sapiens
  misc_RNA (1)...(19): siRNA sense strand
ggaagagggaacugcggau

SEQ ID NO: 2237770 - RNA, 19 nt, Homo sapiens
  misc_RNA (1)...(19): siRNA sense strand
gcauccgagucaagcgcua

SEQ ID NO: 2237771 - RNA, 19 nt, Homo sapiens
  misc_RNA (1)...(19): siRNA sense strand
cuucuaagccacaagcaca

SEQ ID NO: 2237772 - RNA, 19 nt, Homo sapiens
  misc_RNA (1)...(19): siRNA sense strand
aguucacagauaaggacaa

SEQ ID NO: 2237773 - RNA, 19 nt, Homo sapiens
  misc_RNA (1)...(19): siRNA sense strand
gaagagacagcuagggcuu

SEQ ID NO: 2237774 - RNA, 19 nt, Homo sapiens
  misc_RNA (1)...(19): siRNA sense strand
gggagaagauacaccggca

SEQ ID NO: 2237775 - RNA, 19 nt, Homo sapiens
  misc_RNA (1)...(19): siRNA sense strand
ucuuguggaagcugggaaa

SEQ ID NO: 2237776 - RNA, 19 nt, Homo sapiens
  misc_RNA (1)...(19): siRNA sense strand
ccuccaacuaugagaaacu

SEQ ID NO: 2237777 - RNA, 19 nt, Homo sapiens
  misc_RNA (1)...(19): siRNA sense strand
ggugugaaggagagggauc

SEQ ID NO: 2237778 - RNA, 19 nt, Homo sapiens
  misc_RNA (1)...(19): siRNA sense strand
aggagagggaucaguucua

SEQ ID NO: 2237779 - RNA, 19 nt, Homo sapiens
  misc_RNA (1)...(19): siRNA sense strand
ccaagugagcaucgagagu

SEQ ID NO: 2237780 - RNA, 19 nt, Homo sapiens
  misc_RNA (1)...(19): siRNA sense strand
ggucaaaagaagacacugu

SEQ ID NO: 2237781 - RNA, 19 nt, Homo sapiens
  misc_RNA (1)...(19): siRNA sense strand
cugugaaggugcugaugaa

SEQ ID NO: 2237782 - RNA, 19 nt, Homo sapiens
  misc_RNA (1)...(19): siRNA sense strand
ccaacaaguaugagagugu

SEQ ID NO: 2237783 - RNA, 19 nt, Homo sapiens
  misc_RNA (1)...(19): siRNA sense strand
caacagaaguggaugugga

SEQ ID NO: 2237784 - RNA, 19 nt, Homo sapiens
  misc_RNA (1)...(19): siRNA sense strand
caucgaugaccgugggcaa

SEQ ID NO: 2237785 - RNA, 19 nt, Homo sapiens
  misc_RNA (1)...(19): siRNA sense strand
gggagaucuucgagcugaa

SEQ ID NO: 2237786 - RNA, 19 nt, Homo sapiens
  misc_RNA (1)...(19): siRNA sense strand
ggaagugccugaaggacga

SEQ ID NO: 2237787 - RNA, 19 nt, Homo sapiens
  misc_RNA (1)...(19): siRNA sense strand
agaggaacguggagggcca

SEQ ID NO: 2237788 - RNA, 19 nt, Homo sapiens
  misc_RNA (1)...(19): siRNA sense strand
agaagaagaaggaggcagu

SEQ ID NO: 2237789 - RNA, 19 nt, Homo sapiens
  misc_RNA (1)...(19): siRNA sense strand
gcacacagguccagcugca

SEQ ID NO: 2237790 - RNA, 19 nt, Homo sapiens
  misc_RNA (1)...(19): siRNA sense strand
agaagaaggaggcagugaa

SEQ ID NO: 2237791 - RNA, 19 nt, Homo sapiens
  misc_RNA (1)...(19): siRNA sense strand
ccaaugagaaugaggccca

SEQ ID NO: 2237792 - RNA, 19 nt, Homo sapiens
  misc_RNA (1)...(19): siRNA sense strand
cagaaauugccgagucuca

SEQ ID NO: 2237793 - RNA, 19 nt, Homo sapiens
  misc_RNA (1)...(19): siRNA sense strand
cagccaaggaggugguguu

SEQ ID NO: 2237794 - RNA, 19 nt, Homo sapiens
  misc_RNA (1)...(19): siRNA sense strand
ccugaagugucgagcacca

SEQ ID NO: 2237795 - RNA, 19 nt, Homo sapiens
  misc_RNA (1)...(19): siRNA sense strand
caacagagacccaggagcu

SEQ ID NO: 2237796 - RNA, 19 nt, Homo sapiens
  misc_RNA (1)...(19): siRNA sense strand
uggccaagcuccacgacau

SEQ ID NO: 2237797 - RNA, 19 nt, Homo sapiens
  misc_RNA (1)...(19): siRNA sense strand
ugacaagaucacagaguac

SEQ ID NO: 2237798 - RNA, 19 nt, Homo sapiens
  misc_RNA (1)...(19): siRNA sense strand
gagcugaaagaguacgcaa

SEQ ID NO: 2237799 - RNA, 19 nt, Homo sapiens
  misc_RNA (1)...(19): siRNA sense strand
gugaagaaagugauugcau

SEQ ID NO: 2237800 - RNA, 19 nt, Homo sapiens
  misc_RNA (1)...(19): siRNA sense strand
gggaagauggaccggcaga

SEQ ID NO: 2237801 - RNA, 19 nt, Homo sapiens
  misc_RNA (1)...(19): siRNA sense strand
aggaggugguguuggcuga

SEQ ID NO: 2237802 - RNA, 19 nt, Homo sapiens
  misc_RNA (1)...(19): siRNA sense strand
accucuacuugaugaauua

SEQ ID NO: 2237803 - RNA, 19 nt, Homo sapiens
  misc_RNA (1)...(19): siRNA sense strand
ugaucuggauugugggcga

SEQ ID NO: 2237804 - RNA, 19 nt, Homo sapiens
  misc_RNA (1)...(19): siRNA sense strand
gcgaguacgcggaacggau

SEQ ID NO: 2237805 - RNA, 19 nt, Homo sapiens
  misc_RNA (1)...(19): siRNA sense strand
agagcuuccucgagggcuu

SEQ ID NO: 2237806 - RNA, 19 nt, Homo sapiens
  misc_RNA (1)...(19): siRNA sense strand
uccugaagcaugagaugaa

SEQ ID NO: 2237807 - RNA, 19 nt, Homo sapiens
  misc_RNA (1)...(19): siRNA sense strand
ccaaccagacaguggagau

SEQ ID NO: 2237808 - RNA, 19 nt, Homo sapiens
  misc_RNA (1)...(19): siRNA sense strand
ucacugucgccaagaggaa

SEQ ID NO: 2237809 - RNA, 19 nt, Homo sapiens
  misc_RNA (1)...(19): siRNA sense strand
cuggccacauggaaggaua

SEQ ID NO: 2237810 - RNA, 19 nt, Homo sapiens
  misc_RNA (1)...(19): siRNA sense strand
acuauaugcccaaggacga

SEQ ID NO: 2237811 - RNA, 19 nt, Homo sapiens
  misc_RNA (1)...(19): siRNA sense strand
aguauguggcccugcgcaa

SEQ ID NO: 2237812 - RNA, 19 nt, Homo sapiens
  misc_RNA (1)...(19): siRNA sense strand
ucaaggacaucuuccgcaa

SEQ ID NO: 2237813 - RNA, 19 nt, Homo sapiens
  misc_RNA (1)...(19): siRNA sense strand
cgcagagagcccugagaca

SEQ ID NO: 2237814 - RNA, 19 nt, Homo sapiens
  misc_RNA (1)...(19): siRNA sense strand
agguguuggcagagcugaa

SEQ ID NO: 2237815 - RNA, 19 nt, Homo sapiens
  misc_RNA (1)...(19): siRNA sense strand
acagugacaagaaggagaa

SEQ ID NO: 2237816 - RNA, 19 nt, Homo sapiens
  misc_RNA (1)...(19): siRNA sense strand
aagcaugagaugaaggugu

SEQ ID NO: 2237817 - RNA, 19 nt, Homo sapiens
  misc_RNA (1)...(19): siRNA sense strand
cggaaggcugugcgugcua

SEQ ID NO: 2237818 - RNA, 19 nt, Homo sapiens
  misc_RNA (1)...(19): siRNA sense strand
cugaagagacggaccucau

SEQ ID NO: 2237819 - RNA, 19 nt, Homo sapiens
  misc_RNA (1)...(19): siRNA sense strand
ucaugaagauggagccucu

SEQ ID NO: 2237820 - RNA, 19 nt, Homo sapiens
  misc_RNA (1)...(19): siRNA sense strand
agguggccgugaagaacaa

SEQ ID NO: 2237821 - RNA, 19 nt, Homo sapiens
  misc_RNA (1)...(19): siRNA sense strand
agauguugucuaaggacuu

SEQ ID NO: 2237822 - RNA, 19 nt, Homo sapiens
  misc_RNA (1)...(19): siRNA sense strand
aggccaucguggucaucaa

SEQ ID NO: 2237823 - RNA, 19 nt, Homo sapiens
  misc_RNA (1)...(19): siRNA sense strand
ccauccaguucaaccgcaa

SEQ ID NO: 2237824 - RNA, 19 nt, Homo sapiens
  misc_RNA (1)...(19): siRNA sense strand
cugugaaggugcugaugaa

SEQ ID NO: 2237825 - RNA, 19 nt, Homo sapiens
  misc_RNA (1)...(19): siRNA sense strand
ccaacaaguaugagagugu

SEQ ID NO: 2237826 - RNA, 19 nt, Homo sapiens
  misc_RNA (1)...(19): siRNA sense strand
caacagaaguggaugugga

SEQ ID NO: 2237827 - RNA, 19 nt, Homo sapiens
  misc_RNA (1)...(19): siRNA sense strand
caucgaugaccgugggcaa

SEQ ID NO: 2237828 - RNA, 19 nt, Homo sapiens
  misc_RNA (1)...(19): siRNA sense strand
gggagaucuucgagcugaa

SEQ ID NO: 2237829 - RNA, 19 nt, Homo sapiens
  misc_RNA (1)...(19): siRNA sense strand
ggaagugccugaaggacga

SEQ ID NO: 2237830 - RNA, 19 nt, Homo sapiens
  misc_RNA (1)...(19): siRNA sense strand
agaggaacguggagggcca

SEQ ID NO: 2237831 - RNA, 19 nt, Homo sapiens
  misc_RNA (1)...(19): siRNA sense strand
agaagaagaaggaggcagu

SEQ ID NO: 2237832 - RNA, 19 nt, Homo sapiens
  misc_RNA (1)...(19): siRNA sense strand
gcacacagguccagcugca

SEQ ID NO: 2237833 - RNA, 19 nt, Homo sapiens
  misc_RNA (1)...(19): siRNA sense strand
agaagaaggaggcagugaa

SEQ ID NO: 2237834 - RNA, 19 nt, Homo sapiens
  misc_RNA (1)...(19): siRNA sense strand
ccaaugagaaugaggccca

SEQ ID NO: 2237835 - RNA, 19 nt, Homo sapiens
  misc_RNA (1)...(19): siRNA sense strand
cagaaauugccgagucuca

SEQ ID NO: 2237836 - RNA, 19 nt, Homo sapiens
  misc_RNA (1)...(19): siRNA sense strand
cagccaaggaggugguguu

SEQ ID NO: 2237837 - RNA, 19 nt, Homo sapiens
  misc_RNA (1)...(19): siRNA sense strand
ccugaagugucgagcacca

SEQ ID NO: 2237838 - RNA, 19 nt, Homo sapiens
  misc_RNA (1)...(19): siRNA sense strand
caacagagacccaggagcu

SEQ ID NO: 2237839 - RNA, 19 nt, Homo sapiens
  misc_RNA (1)...(19): siRNA sense strand
uggccaagcuccacgacau

SEQ ID NO: 2237840 - RNA, 19 nt, Homo sapiens
  misc_RNA (1)...(19): siRNA sense strand
ugacaagaucacagaguac

SEQ ID NO: 2237841 - RNA, 19 nt, Homo sapiens
  misc_RNA (1)...(19): siRNA sense strand
gagcugaaagaguacgcaa

SEQ ID NO: 2237842 - RNA, 19 nt, Homo sapiens
  misc_RNA (1)...(19): siRNA sense strand
gugaagaaagugauugcau

SEQ ID NO: 2237843 - RNA, 19 nt, Homo sapiens
  misc_RNA (1)...(19): siRNA sense strand
gggaagauggaccggcaga

SEQ ID NO: 2237844 - RNA, 19 nt, Homo sapiens
  misc_RNA (1)...(19): siRNA sense strand
aggaggugguguuggcuga

SEQ ID NO: 2237845 - RNA, 19 nt, Homo sapiens
  misc_RNA (1)...(19): siRNA sense strand
accucuacuugaugaauua

SEQ ID NO: 2237846 - RNA, 19 nt, Homo sapiens
  misc_RNA (1)...(19): siRNA sense strand
ugaucuggauugugggcga

SEQ ID NO: 2237847 - RNA, 19 nt, Homo sapiens
  misc_RNA (1)...(19): siRNA sense strand
gcgaguacgcggaacggau

SEQ ID NO: 2237848 - RNA, 19 nt, Homo sapiens
  misc_RNA (1)...(19): siRNA sense strand
agagcuuccucgagggcuu

SEQ ID NO: 2237849 - RNA, 19 nt, Homo sapiens
  misc_RNA (1)...(19): siRNA sense strand
uccugaagcaugagaugaa

SEQ ID NO: 2237850 - RNA, 19 nt, Homo sapiens
  misc_RNA (1)...(19): siRNA sense strand
ccaaccagacaguggagau

SEQ ID NO: 2237851 - RNA, 19 nt, Homo sapiens
  misc_RNA (1)...(19): siRNA sense strand
ucacugucgccaagaggaa

SEQ ID NO: 2237852 - RNA, 19 nt, Homo sapiens
  misc_RNA (1)...(19): siRNA sense strand
cuggccacauggaaggaua

SEQ ID NO: 2237853 - RNA, 19 nt, Homo sapiens
  misc_RNA (1)...(19): siRNA sense strand
acuauaugcccaaggacga

SEQ ID NO: 2237854 - RNA, 19 nt, Homo sapiens
  misc_RNA (1)...(19): siRNA sense strand
aguauguggcccugcgcaa

SEQ ID NO: 2237855 - RNA, 19 nt, Homo sapiens
  misc_RNA (1)...(19): siRNA sense strand
ucaaggacaucuuccgcaa

SEQ ID NO: 2237856 - RNA, 19 nt, Homo sapiens
  misc_RNA (1)...(19): siRNA sense strand
cgcagagagcccugagaca

SEQ ID NO: 2237857 - RNA, 19 nt, Homo sapiens
  misc_RNA (1)...(19): siRNA sense strand
agguguuggcagagcugaa

SEQ ID NO: 2237858 - RNA, 19 nt, Homo sapiens
  misc_RNA (1)...(19): siRNA sense strand
acagugacaagaaggagaa

SEQ ID NO: 2237859 - RNA, 19 nt, Homo sapiens
  misc_RNA (1)...(19): siRNA sense strand
aagcaugagaugaaggugu

SEQ ID NO: 2237860 - RNA, 19 nt, Homo sapiens
  misc_RNA (1)...(19): siRNA sense strand
cggaaggcugugcgugcua

SEQ ID NO: 2237861 - RNA, 19 nt, Homo sapiens
  misc_RNA (1)...(19): siRNA sense strand
cugaagagacggaccucau

SEQ ID NO: 2237862 - RNA, 19 nt, Homo sapiens
  misc_RNA (1)...(19): siRNA sense strand
ucaugaagauggagccucu

SEQ ID NO: 2237863 - RNA, 19 nt, Homo sapiens
  misc_RNA (1)...(19): siRNA sense strand
agguggccgugaagaacaa

SEQ ID NO: 2237864 - RNA, 19 nt, Homo sapiens
  misc_RNA (1)...(19): siRNA sense strand
agauguugucuaaggacuu

SEQ ID NO: 2237865 - RNA, 19 nt, Homo sapiens
  misc_RNA (1)...(19): siRNA sense strand
aggccaucguggucaucaa

SEQ ID NO: 2237866 - RNA, 19 nt, Homo sapiens
  misc_RNA (1)...(19): siRNA sense strand
ccauccaguucaaccgcaa

SEQ ID NO: 2237867 - RNA, 19 nt, Homo sapiens
  misc_RNA (1)...(19): siRNA sense strand
gcaguaagguugaugcuca

SEQ ID NO: 2237868 - RNA, 19 nt, Homo sapiens
  misc_RNA (1)...(19): siRNA sense strand
aaacaaagaugauagacca

SEQ ID NO: 2237869 - RNA, 19 nt, Homo sapiens
  misc_RNA (1)...(19): siRNA sense strand
aucaaagagugcugugaaa

SEQ ID NO: 2237870 - RNA, 19 nt, Homo sapiens
  misc_RNA (1)...(19): siRNA sense strand
gcaugaacucacagaugaa

SEQ ID NO: 2237871 - RNA, 19 nt, Homo sapiens
  misc_RNA (1)...(19): siRNA sense strand
ccuggaucccgaagagaaa

SEQ ID NO: 2237872 - RNA, 19 nt, Homo sapiens
  misc_RNA (1)...(19): siRNA sense strand
gggcaauaccugucacaca

SEQ ID NO: 2237873 - RNA, 19 nt, Homo sapiens
  misc_RNA (1)...(19): siRNA sense strand
aagagaaaugccaggcuua

SEQ ID NO: 2237874 - RNA, 19 nt, Homo sapiens
  misc_RNA (1)...(19): siRNA sense strand
gaguuugaaagcugauaaa

SEQ ID NO: 2237875 - RNA, 19 nt, Homo sapiens
  misc_RNA (1)...(19): siRNA sense strand
ccucaagaugguacaacaa

SEQ ID NO: 2237876 - RNA, 19 nt, Homo sapiens
  misc_RNA (1)...(19): siRNA sense strand
caagaaaucugauguggga

SEQ ID NO: 2237877 - RNA, 19 nt, Homo sapiens
  misc_RNA (1)...(19): siRNA sense strand
ccuuugaagaaauggaaaa

SEQ ID NO: 2237878 - RNA, 19 nt, Homo sapiens
  misc_RNA (1)...(19): siRNA sense strand
gggaaggaugguuugaaau

SEQ ID NO: 2237879 - RNA, 19 nt, Homo sapiens
  misc_RNA (1)...(19): siRNA sense strand
aagacaugguagaauacaa

SEQ ID NO: 2237880 - RNA, 19 nt, Homo sapiens
  misc_RNA (1)...(19): siRNA sense strand
gaagagaaaugccaggcuu

SEQ ID NO: 2237881 - RNA, 19 nt, Homo sapiens
  misc_RNA (1)...(19): siRNA sense strand
augauagaccaaaggauuu

SEQ ID NO: 2237882 - RNA, 19 nt, Homo sapiens
  misc_RNA (1)...(19): siRNA sense strand
acuacuugcuguacgcuaa

SEQ ID NO: 2237883 - RNA, 19 nt, Homo sapiens
  misc_RNA (1)...(19): siRNA sense strand
ggcccugcuuugagaguuu

SEQ ID NO: 2237884 - RNA, 19 nt, Homo sapiens
  misc_RNA (1)...(19): siRNA sense strand
uggugaaagacaugguaga

SEQ ID NO: 2237885 - RNA, 19 nt, Homo sapiens
  misc_RNA (1)...(19): siRNA sense strand
ccguuacgcggaagacaaa

SEQ ID NO: 2237886 - RNA, 19 nt, Homo sapiens
  misc_RNA (1)...(19): siRNA sense strand
ucaacuuagugaagcugaa

SEQ ID NO: 2237887 - RNA, 19 nt, Homo sapiens
  misc_RNA (1)...(19): siRNA sense strand
gugaaagacaugguagaau

SEQ ID NO: 2237888 - RNA, 19 nt, Homo sapiens
  misc_RNA (1)...(19): siRNA sense strand
cugcuuuaaugaagagagu

SEQ ID NO: 2237889 - RNA, 19 nt, Homo sapiens
  misc_RNA (1)...(19): siRNA sense strand
gagaaaauggugacagcuu

SEQ ID NO: 2237890 - RNA, 19 nt, Homo sapiens
  misc_RNA (1)...(19): siRNA sense strand
uggagaguuauguggagua

SEQ ID NO: 2237891 - RNA, 19 nt, Homo sapiens
  misc_RNA (1)...(19): siRNA sense strand
gggauauagagaacuucaa

SEQ ID NO: 2237892 - RNA, 19 nt, Homo sapiens
  misc_RNA (1)...(19): siRNA sense strand
agaggaagacagacagguu

SEQ ID NO: 2237893 - RNA, 19 nt, Homo sapiens
  misc_RNA (1)...(19): siRNA sense strand
agaacgagaugcugaccca

SEQ ID NO: 2237894 - RNA, 19 nt, Homo sapiens
  misc_RNA (1)...(19): siRNA sense strand
gccucaagaugguacaaca

SEQ ID NO: 2237895 - RNA, 19 nt, Homo sapiens
  misc_RNA (1)...(19): siRNA sense strand
aaucaaagagugcugugaa

SEQ ID NO: 2237896 - RNA, 19 nt, Homo sapiens
  misc_RNA (1)...(19): siRNA sense strand
agauugaauuuaaggagcu

SEQ ID NO: 2237897 - RNA, 19 nt, Homo sapiens
  misc_RNA (1)...(19): siRNA sense strand
aacaaagaugauagaccaa

SEQ ID NO: 2237898 - RNA, 19 nt, Homo sapiens
  misc_RNA (1)...(19): siRNA sense strand
ccaagauaaaggagaagaa

SEQ ID NO: 2237899 - RNA, 19 nt, Homo sapiens
  misc_RNA (1)...(19): siRNA sense strand
cagccaaagugaagaggga

SEQ ID NO: 2237900 - RNA, 19 nt, Homo sapiens
  misc_RNA (1)...(19): siRNA sense strand
augccaagauaaaggagaa

SEQ ID NO: 2237901 - RNA, 19 nt, Homo sapiens
  misc_RNA (1)...(19): siRNA sense strand
agaacuuugccaugagaaa

SEQ ID NO: 2237902 - RNA, 19 nt, Homo sapiens
  misc_RNA (1)...(19): siRNA sense strand
cugugaagcauaugaagaa

SEQ ID NO: 2237903 - RNA, 19 nt, Homo sapiens
  misc_RNA (1)...(19): siRNA sense strand
cacaaauaacagaggaaca

SEQ ID NO: 2237904 - RNA, 19 nt, Homo sapiens
  misc_RNA (1)...(19): siRNA sense strand
agugaagagggaagacaua

SEQ ID NO: 2237905 - RNA, 19 nt, Homo sapiens
  misc_RNA (1)...(19): siRNA sense strand
ugagauagcaagaaggcau

SEQ ID NO: 2237906 - RNA, 19 nt, Homo sapiens
  misc_RNA (1)...(19): siRNA sense strand
cauuauuaucggacacuua

SEQ ID NO: 2237907 - RNA, 19 nt, Homo sapiens
  misc_RNA (1)...(19): siRNA sense strand
ucuucaggguguuuagaaa

SEQ ID NO: 2237908 - RNA, 19 nt, Homo sapiens
  misc_RNA (1)...(19): siRNA sense strand
aagaagacagggagacauu

SEQ ID NO: 2237909 - RNA, 19 nt, Homo sapiens
  misc_RNA (1)...(19): siRNA sense strand
aagauaaaggagaagaaga

SEQ ID NO: 2237910 - RNA, 19 nt, Homo sapiens
  misc_RNA (1)...(19): siRNA sense strand
gccacaaauaacagaggaa

SEQ ID NO: 2237911 - RNA, 19 nt, Homo sapiens
  misc_RNA (1)...(19): siRNA sense strand
aggaacaacuugaggcugu

SEQ ID NO: 2237912 - RNA, 19 nt, Homo sapiens
  misc_RNA (1)...(19): siRNA sense strand
aguuauuggagaaguguuu

SEQ ID NO: 2237913 - RNA, 19 nt, Homo sapiens
  misc_RNA (1)...(19): siRNA sense strand
aagcaaaagccacaaauaa

SEQ ID NO: 2237914 - RNA, 19 nt, Homo sapiens
  misc_RNA (1)...(19): siRNA sense strand
ugagaaacccacuggagau

SEQ ID NO: 2237915 - RNA, 19 nt, Homo sapiens
  misc_RNA (1)...(19): siRNA sense strand
ccaaacaaaggcagcaaca

SEQ ID NO: 2237916 - RNA, 19 nt, Homo sapiens
  misc_RNA (1)...(19): siRNA sense strand
accaggaguuauuggagaa

SEQ ID NO: 2237917 - RNA, 19 nt, Homo sapiens
  misc_RNA (1)...(19): siRNA sense strand
cuaaaggauaccaggaguu

SEQ ID NO: 2237918 - RNA, 19 nt, Homo sapiens
  misc_RNA (1)...(19): siRNA sense strand
cagaaauacauccaggaga

SEQ ID NO: 2237919 - RNA, 19 nt, Homo sapiens
  misc_RNA (1)...(19): siRNA sense strand
cuuccagaaacuaggagaa

SEQ ID NO: 2237920 - RNA, 19 nt, Homo sapiens
  misc_RNA (1)...(19): siRNA sense strand
ugaagaagacagggagaca

SEQ ID NO: 2237921 - RNA, 19 nt, Homo sapiens
  misc_RNA (1)...(19): siRNA sense strand
ccaauuuucuucaggggaa

SEQ ID NO: 2237922 - RNA, 19 nt, Homo sapiens
  misc_RNA (1)...(19): siRNA sense strand
agaaauacauccaggagag

SEQ ID NO: 2237923 - RNA, 19 nt, Homo sapiens
  misc_RNA (1)...(19): siRNA sense strand
cugcauucucugaugacaa

SEQ ID NO: 2237924 - RNA, 19 nt, Homo sapiens
  misc_RNA (1)...(19): siRNA sense strand
gcacuguugcagaggagau

SEQ ID NO: 2237925 - RNA, 19 nt, Homo sapiens
  misc_RNA (1)...(19): siRNA sense strand
gcuaaaggauaccaggagu

SEQ ID NO: 2237926 - RNA, 19 nt, Homo sapiens
  misc_RNA (1)...(19): siRNA sense strand
cugcuuugcugaagaggga

SEQ ID NO: 2237927 - RNA, 19 nt, Homo sapiens
  misc_RNA (1)...(19): siRNA sense strand
gcugugaagcauaugaaga

SEQ ID NO: 2237928 - RNA, 19 nt, Homo sapiens
  misc_RNA (1)...(19): siRNA sense strand
gugaagcauaugaagaaga

SEQ ID NO: 2237929 - RNA, 19 nt, Homo sapiens
  misc_RNA (1)...(19): siRNA sense strand
agggagacauucaugaaca

SEQ ID NO: 2237930 - RNA, 19 nt, Homo sapiens
  misc_RNA (1)...(19): siRNA sense strand
agaaacuaguccuggaugu

SEQ ID NO: 2237931 - RNA, 19 nt, Homo sapiens
  misc_RNA (1)...(19): siRNA sense strand
cauaugaagaagacaggga

SEQ ID NO: 2237932 - RNA, 19 nt, Homo sapiens
  misc_RNA (1)...(19): siRNA sense strand
gagacauucaugaacaaau

SEQ ID NO: 2237933 - RNA, 19 nt, Homo sapiens
  misc_RNA (1)...(19): siRNA sense strand
aggucuaucuccaaaucua

SEQ ID NO: 2237934 - RNA, 19 nt, Homo sapiens
  misc_RNA (1)...(19): siRNA sense strand
augaaaugacuccaguaaa

SEQ ID NO: 2237935 - RNA, 19 nt, Homo sapiens
  misc_RNA (1)...(19): siRNA sense strand
aggcagcaacaguuacaaa

SEQ ID NO: 2237936 - RNA, 19 nt, Homo sapiens
  misc_RNA (1)...(19): siRNA sense strand
uggugguggaugaaacaua

SEQ ID NO: 2237937 - RNA, 19 nt, Homo sapiens
  misc_RNA (1)...(19): siRNA sense strand
gagaaagaaauuuuggaga

SEQ ID NO: 2237938 - RNA, 19 nt, Homo sapiens
  misc_RNA (1)...(19): siRNA sense strand
ccaaagugaagagggaaga

SEQ ID NO: 2237939 - RNA, 19 nt, Homo sapiens
  misc_RNA (1)...(19): siRNA sense strand
agagauaaguuuagcugac

SEQ ID NO: 2237940 - RNA, 19 nt, Homo sapiens
  misc_RNA (1)...(19): siRNA sense strand
gccaaagugaagagggaag

SEQ ID NO: 2237941 - RNA, 19 nt, Homo sapiens
  misc_RNA (1)...(19): siRNA sense strand
uaugaagaagacagggaga

SEQ ID NO: 2237942 - RNA, 19 nt, Homo sapiens
  misc_RNA (1)...(19): siRNA sense strand
ccgaacuuuccaagccaua

SEQ ID NO: 2237943 - RNA, 19 nt, Homo sapiens
  misc_RNA (1)...(19): siRNA sense strand
ccauaaggaucugugccaa

SEQ ID NO: 2237944 - RNA, 19 nt, Homo sapiens
  misc_RNA (1)...(19): siRNA sense strand
aauaacagaaugcugcaaa

SEQ ID NO: 2237945 - RNA, 19 nt, Homo sapiens
  misc_RNA (1)...(19): siRNA sense strand
ccgaggagauggaggguga

SEQ ID NO: 2237946 - RNA, 19 nt, Homo sapiens
  misc_RNA (1)...(19): siRNA sense strand
caguggugcaggagaaaua

SEQ ID NO: 2237947 - RNA, 19 nt, Homo sapiens
  misc_RNA (1)...(19): siRNA sense strand
uggauuuaguggugaguau

SEQ ID NO: 2237948 - RNA, 19 nt, Homo sapiens
  misc_RNA (1)...(19): siRNA sense strand
ccagaaaaccagacagaau

SEQ ID NO: 2237949 - RNA, 19 nt, Homo sapiens
  misc_RNA (1)...(19): siRNA sense strand
ggaacaaguaccagggcca

SEQ ID NO: 2237950 - RNA, 19 nt, Homo sapiens
  misc_RNA (1)...(19): siRNA sense strand
ugaucugaguggagaaaca

SEQ ID NO: 2237951 - RNA, 19 nt, Homo sapiens
  misc_RNA (1)...(19): siRNA sense strand
gagacuuggacuugggcaa

SEQ ID NO: 2237952 - RNA, 19 nt, Homo sapiens
  misc_RNA (1)...(19): siRNA sense strand
agaagaaggcuuagggucu

SEQ ID NO: 2237953 - RNA, 19 nt, Homo sapiens
  misc_RNA (1)...(19): siRNA sense strand
acgagaagggcgaguggaa

SEQ ID NO: 2237954 - RNA, 19 nt, Homo sapiens
  misc_RNA (1)...(19): siRNA sense strand
aggcagaucugucaggcaa

SEQ ID NO: 2237955 - RNA, 19 nt, Homo sapiens
  misc_RNA (1)...(19): siRNA sense strand
uuaaagaagaagaaggcuu

SEQ ID NO: 2237956 - RNA, 19 nt, Homo sapiens
  misc_RNA (1)...(19): siRNA sense strand
ggacagaggcaccaggcuu

SEQ ID NO: 2237957 - RNA, 19 nt, Homo sapiens
  misc_RNA (1)...(19): siRNA sense strand
ccguagaagaggagacaac

SEQ ID NO: 2237958 - RNA, 19 nt, Homo sapiens
  misc_RNA (1)...(19): siRNA sense strand
uggccuaccaaguggcaua

SEQ ID NO: 2237959 - RNA, 19 nt, Homo sapiens
  misc_RNA (1)...(19): siRNA sense strand
caccaauguaaguggagaa

SEQ ID NO: 2237960 - RNA, 19 nt, Homo sapiens
  misc_RNA (1)...(19): siRNA sense strand
agaagaagaggguggcaca

SEQ ID NO: 2237961 - RNA, 19 nt, Homo sapiens
  misc_RNA (1)...(19): siRNA sense strand
ugggcagccuucaggguua

SEQ ID NO: 2237962 - RNA, 19 nt, Homo sapiens
  misc_RNA (1)...(19): siRNA sense strand
cugcauuccacgaagcuaa

SEQ ID NO: 2237963 - RNA, 19 nt, Homo sapiens
  misc_RNA (1)...(19): siRNA sense strand
gcuauggagacaaggauga

SEQ ID NO: 2237964 - RNA, 19 nt, Homo sapiens
  misc_RNA (1)...(19): siRNA sense strand
cccuggaagucguggugaa

SEQ ID NO: 2237965 - RNA, 19 nt, Homo sapiens
  misc_RNA (1)...(19): siRNA sense strand
ccaaggagaaggagguagu

SEQ ID NO: 2237966 - RNA, 19 nt, Homo sapiens
  misc_RNA (1)...(19): siRNA sense strand
cggucuaccucuacccuaa

SEQ ID NO: 2237967 - RNA, 19 nt, Homo sapiens
  misc_RNA (1)...(19): siRNA sense strand
uagucaacccuuuggcaua

SEQ ID NO: 2237968 - RNA, 19 nt, Homo sapiens
  misc_RNA (1)...(19): siRNA sense strand
uggagagguuguagagacu

SEQ ID NO: 2237969 - RNA, 19 nt, Homo sapiens
  misc_RNA (1)...(19): siRNA sense strand
cccagaagugaguggagaa

SEQ ID NO: 2237970 - RNA, 19 nt, Homo sapiens
  misc_RNA (1)...(19): siRNA sense strand
acaacaaugcccaagacua

SEQ ID NO: 2237971 - RNA, 19 nt, Homo sapiens
  misc_RNA (1)...(19): siRNA sense strand
cuucacaggcaguggagau

SEQ ID NO: 2237972 - RNA, 19 nt, Homo sapiens
  misc_RNA (1)...(19): siRNA sense strand
gcuggacauuagugggaga

SEQ ID NO: 2237973 - RNA, 19 nt, Homo sapiens
  misc_RNA (1)...(19): siRNA sense strand
gcuuagggucuguggaacu

SEQ ID NO: 2237974 - RNA, 19 nt, Homo sapiens
  misc_RNA (1)...(19): siRNA sense strand
uggagaagcaucuggaguu

SEQ ID NO: 2237975 - RNA, 19 nt, Homo sapiens
  misc_RNA (1)...(19): siRNA sense strand
acucaggagaagagacuca

SEQ ID NO: 2237976 - RNA, 19 nt, Homo sapiens
  misc_RNA (1)...(19): siRNA sense strand
gcgccgaaacagaggaaag

SEQ ID NO: 2237977 - RNA, 19 nt, Homo sapiens
  misc_RNA (1)...(19): siRNA sense strand
guggaggaguggaucguga

SEQ ID NO: 2237978 - RNA, 19 nt, Homo sapiens
  misc_RNA (1)...(19): siRNA sense strand
agaugagaucagugggcuu

SEQ ID NO: 2237979 - RNA, 19 nt, Homo sapiens
  misc_RNA (1)...(19): siRNA sense strand
agucgauuccaguggguuu

SEQ ID NO: 2237980 - RNA, 19 nt, Homo sapiens
  misc_RNA (1)...(19): siRNA sense strand
gggaaggcugcuauggaga

SEQ ID NO: 2237981 - RNA, 19 nt, Homo sapiens
  misc_RNA (1)...(19): siRNA sense strand
guggagauguuucaggaca

SEQ ID NO: 2237982 - RNA, 19 nt, Homo sapiens
  misc_RNA (1)...(19): siRNA sense strand
aggcuuagggucuguggaa

SEQ ID NO: 2237983 - RNA, 19 nt, Homo sapiens
  misc_RNA (1)...(19): siRNA sense strand
auggaaacgugaaucagaa

SEQ ID NO: 2237984 - RNA, 19 nt, Homo sapiens
  misc_RNA (1)...(19): siRNA sense strand
agauggagggugaggucuu

SEQ ID NO: 2237985 - RNA, 19 nt, Homo sapiens
  misc_RNA (1)...(19): siRNA sense strand
ggacagggcaaguggacug

SEQ ID NO: 2237986 - RNA, 19 nt, Homo sapiens
  misc_RNA (1)...(19): siRNA sense strand
ggaaaguggacuacccuca

SEQ ID NO: 2237987 - RNA, 19 nt, Homo sapiens
  misc_RNA (1)...(19): siRNA sense strand
ccggaauggaaacgugaau

SEQ ID NO: 2237988 - RNA, 19 nt, Homo sapiens
  misc_RNA (1)...(19): siRNA sense strand
cgaaacagaggaaaguaca

SEQ ID NO: 2237989 - RNA, 19 nt, Homo sapiens
  misc_RNA (1)...(19): siRNA sense strand
cugaguucguggagggugu

SEQ ID NO: 2237990 - RNA, 19 nt, Homo sapiens
  misc_RNA (1)...(19): siRNA sense strand
ccagaaucuagcagugaga

SEQ ID NO: 2237991 - RNA, 19 nt, Homo sapiens
  misc_RNA (1)...(19): siRNA sense strand
ugggagagcuaguggacuc

SEQ ID NO: 2237992 - RNA, 19 nt, Homo sapiens
  misc_RNA (1)...(19): siRNA sense strand
uggagaggccucaggacuu

SEQ ID NO: 2237993 - RNA, 19 nt, Homo sapiens
  misc_RNA (1)...(19): siRNA sense strand
gcccaucaacagagaccua

SEQ ID NO: 2237994 - RNA, 19 nt, Homo sapiens
  misc_RNA (1)...(19): siRNA sense strand
aacucuaggaagugggcaa

SEQ ID NO: 2237995 - RNA, 19 nt, Homo sapiens
  misc_RNA (1)...(19): siRNA sense strand
acguauggcauccgagaca

SEQ ID NO: 2237996 - RNA, 19 nt, Homo sapiens
  misc_RNA (1)...(19): siRNA sense strand
ccuggaagucguggugaaa

SEQ ID NO: 2237997 - RNA, 19 nt, Homo sapiens
  misc_RNA (1)...(19): siRNA sense strand
ccgucuacgugcaugccaa

SEQ ID NO: 2237998 - RNA, 19 nt, Homo sapiens
  misc_RNA (1)...(19): siRNA sense strand
ggugaagacuuuguggaca

SEQ ID NO: 2237999 - RNA, 19 nt, Homo sapiens
  misc_RNA (1)...(19): siRNA sense strand
ggaaaguacagaaggcccu

SEQ ID NO: 2238000 - RNA, 19 nt, Homo sapiens
  misc_RNA (1)...(19): siRNA sense strand
gaacuggaagggaggggaa

SEQ ID NO: 2238001 - RNA, 19 nt, Homo sapiens
  misc_RNA (1)...(19): siRNA sense strand
ccgaaacagaggaaaguac

SEQ ID NO: 2238002 - RNA, 19 nt, Homo sapiens
  misc_RNA (1)...(19): siRNA sense strand
uggacagccaucaggguuu

SEQ ID NO: 2238003 - RNA, 19 nt, Homo sapiens
  misc_RNA (1)...(19): siRNA sense strand
ccagaagugaguggagaau

SEQ ID NO: 2238004 - RNA, 19 nt, Homo sapiens
  misc_RNA (1)...(19): siRNA sense strand
agaccuggguggaugcuga

SEQ ID NO: 2238005 - RNA, 19 nt, Homo sapiens
  misc_RNA (1)...(19): siRNA sense strand
gugaugaucuggcacgaga

SEQ ID NO: 2238006 - RNA, 19 nt, Homo sapiens
  misc_RNA (1)...(19): siRNA sense strand
agaggaugucagugaacuu

SEQ ID NO: 2238007 - RNA, 19 nt, Homo sapiens
  misc_RNA (1)...(19): siRNA sense strand
uggcaucaguggugcagga

SEQ ID NO: 2238008 - RNA, 19 nt, Homo sapiens
  misc_RNA (1)...(19): siRNA sense strand
ggggaaacaucuggaguga

SEQ ID NO: 2238009 - RNA, 19 nt, Homo sapiens
  misc_RNA (1)...(19): siRNA sense strand
ggaggguguuacugaacca

SEQ ID NO: 2238010 - RNA, 19 nt, Homo sapiens
  misc_RNA (1)...(19): siRNA sense strand
gugaggagggcuggaacaa

SEQ ID NO: 2238011 - RNA, 19 nt, Homo sapiens
  misc_RNA (1)...(19): siRNA sense strand
aggaguggaucgugaccca

SEQ ID NO: 2238012 - RNA, 19 nt, Homo sapiens
  misc_RNA (1)...(19): siRNA sense strand
aaaccagacagaaugggaa

SEQ ID NO: 2238013 - RNA, 19 nt, Homo sapiens
  misc_RNA (1)...(19): siRNA sense strand
ggaccuuggaaguggccca

SEQ ID NO: 2238014 - RNA, 19 nt, Homo sapiens
  misc_RNA (1)...(19): siRNA sense strand
ugacauuucaagaaggcga

SEQ ID NO: 2238015 - RNA, 19 nt, Homo sapiens
  misc_RNA (1)...(19): siRNA sense strand
ccgaggagauggaggguga

SEQ ID NO: 2238016 - RNA, 19 nt, Homo sapiens
  misc_RNA (1)...(19): siRNA sense strand
caguggugcaggagaaaua

SEQ ID NO: 2238017 - RNA, 19 nt, Homo sapiens
  misc_RNA (1)...(19): siRNA sense strand
uggauuuaguggugaguau

SEQ ID NO: 2238018 - RNA, 19 nt, Homo sapiens
  misc_RNA (1)...(19): siRNA sense strand
ccagaaaaccagacagaau

SEQ ID NO: 2238019 - RNA, 19 nt, Homo sapiens
  misc_RNA (1)...(19): siRNA sense strand
ggaacaaguaccagggcca

SEQ ID NO: 2238020 - RNA, 19 nt, Homo sapiens
  misc_RNA (1)...(19): siRNA sense strand
ugaucugaguggagaaaca

SEQ ID NO: 2238021 - RNA, 19 nt, Homo sapiens
  misc_RNA (1)...(19): siRNA sense strand
gagacuuggacuugggcaa

SEQ ID NO: 2238022 - RNA, 19 nt, Homo sapiens
  misc_RNA (1)...(19): siRNA sense strand
agaagaaggcuuagggucu

SEQ ID NO: 2238023 - RNA, 19 nt, Homo sapiens
  misc_RNA (1)...(19): siRNA sense strand
acgagaagggcgaguggaa

SEQ ID NO: 2238024 - RNA, 19 nt, Homo sapiens
  misc_RNA (1)...(19): siRNA sense strand
aggcagaucugucaggcaa

SEQ ID NO: 2238025 - RNA, 19 nt, Homo sapiens
  misc_RNA (1)...(19): siRNA sense strand
uuaaagaagaagaaggcuu

SEQ ID NO: 2238026 - RNA, 19 nt, Homo sapiens
  misc_RNA (1)...(19): siRNA sense strand
ggacagaggcaccaggcuu

SEQ ID NO: 2238027 - RNA, 19 nt, Homo sapiens
  misc_RNA (1)...(19): siRNA sense strand
ccguagaagaggagacaac

SEQ ID NO: 2238028 - RNA, 19 nt, Homo sapiens
  misc_RNA (1)...(19): siRNA sense strand
uggccuaccaaguggcaua

SEQ ID NO: 2238029 - RNA, 19 nt, Homo sapiens
  misc_RNA (1)...(19): siRNA sense strand
caccaauguaaguggagaa

SEQ ID NO: 2238030 - RNA, 19 nt, Homo sapiens
  misc_RNA (1)...(19): siRNA sense strand
agaagaagaggguggcaca

SEQ ID NO: 2238031 - RNA, 19 nt, Homo sapiens
  misc_RNA (1)...(19): siRNA sense strand
ugggcagccuucaggguua

SEQ ID NO: 2238032 - RNA, 19 nt, Homo sapiens
  misc_RNA (1)...(19): siRNA sense strand
cugcauuccacgaagcuaa

SEQ ID NO: 2238033 - RNA, 19 nt, Homo sapiens
  misc_RNA (1)...(19): siRNA sense strand
gcuauggagacaaggauga

SEQ ID NO: 2238034 - RNA, 19 nt, Homo sapiens
  misc_RNA (1)...(19): siRNA sense strand
cccuggaagucguggugaa

SEQ ID NO: 2238035 - RNA, 19 nt, Homo sapiens
  misc_RNA (1)...(19): siRNA sense strand
ccaaggagaaggagguagu

SEQ ID NO: 2238036 - RNA, 19 nt, Homo sapiens
  misc_RNA (1)...(19): siRNA sense strand
cggucuaccucuacccuaa

SEQ ID NO: 2238037 - RNA, 19 nt, Homo sapiens
  misc_RNA (1)...(19): siRNA sense strand
uagucaacccuuuggcaua

SEQ ID NO: 2238038 - RNA, 19 nt, Homo sapiens
  misc_RNA (1)...(19): siRNA sense strand
uggagagguuguagagacu

SEQ ID NO: 2238039 - RNA, 19 nt, Homo sapiens
  misc_RNA (1)...(19): siRNA sense strand
cccagaagugaguggagaa

SEQ ID NO: 2238040 - RNA, 19 nt, Homo sapiens
  misc_RNA (1)...(19): siRNA sense strand
acaacaaugcccaagacua

SEQ ID NO: 2238041 - RNA, 19 nt, Homo sapiens
  misc_RNA (1)...(19): siRNA sense strand
cuucacaggcaguggagau

SEQ ID NO: 2238042 - RNA, 19 nt, Homo sapiens
  misc_RNA (1)...(19): siRNA sense strand
gcuggacauuagugggaga

SEQ ID NO: 2238043 - RNA, 19 nt, Homo sapiens
  misc_RNA (1)...(19): siRNA sense strand
gcuuagggucuguggaacu

SEQ ID NO: 2238044 - RNA, 19 nt, Homo sapiens
  misc_RNA (1)...(19): siRNA sense strand
uggagaagcaucuggaguu

SEQ ID NO: 2238045 - RNA, 19 nt, Homo sapiens
  misc_RNA (1)...(19): siRNA sense strand
acucaggagaagagacuca

SEQ ID NO: 2238046 - RNA, 19 nt, Homo sapiens
  misc_RNA (1)...(19): siRNA sense strand
gcgccgaaacagaggaaag

SEQ ID NO: 2238047 - RNA, 19 nt, Homo sapiens
  misc_RNA (1)...(19): siRNA sense strand
guggaggaguggaucguga

SEQ ID NO: 2238048 - RNA, 19 nt, Homo sapiens
  misc_RNA (1)...(19): siRNA sense strand
agaugagaucagugggcuu

SEQ ID NO: 2238049 - RNA, 19 nt, Homo sapiens
  misc_RNA (1)...(19): siRNA sense strand
agucgauuccaguggguuu

SEQ ID NO: 2238050 - RNA, 19 nt, Homo sapiens
  misc_RNA (1)...(19): siRNA sense strand
gggaaggcugcuauggaga

SEQ ID NO: 2238051 - RNA, 19 nt, Homo sapiens
  misc_RNA (1)...(19): siRNA sense strand
guggagauguuucaggaca

SEQ ID NO: 2238052 - RNA, 19 nt, Homo sapiens
  misc_RNA (1)...(19): siRNA sense strand
aggcuuagggucuguggaa

SEQ ID NO: 2238053 - RNA, 19 nt, Homo sapiens
  misc_RNA (1)...(19): siRNA sense strand
auggaaacgugaaucagaa

SEQ ID NO: 2238054 - RNA, 19 nt, Homo sapiens
  misc_RNA (1)...(19): siRNA sense strand
agauggagggugaggucuu

SEQ ID NO: 2238055 - RNA, 19 nt, Homo sapiens
  misc_RNA (1)...(19): siRNA sense strand
ggacagggcaaguggacug

SEQ ID NO: 2238056 - RNA, 19 nt, Homo sapiens
  misc_RNA (1)...(19): siRNA sense strand
ggaaaguggacuacccuca

SEQ ID NO: 2238057 - RNA, 19 nt, Homo sapiens
  misc_RNA (1)...(19): siRNA sense strand
ccggaauggaaacgugaau

SEQ ID NO: 2238058 - RNA, 19 nt, Homo sapiens
  misc_RNA (1)...(19): siRNA sense strand
cgaaacagaggaaaguaca

SEQ ID NO: 2238059 - RNA, 19 nt, Homo sapiens
  misc_RNA (1)...(19): siRNA sense strand
cugaguucguggagggugu

SEQ ID NO: 2238060 - RNA, 19 nt, Homo sapiens
  misc_RNA (1)...(19): siRNA sense strand
ccagaaucuagcagugaga

SEQ ID NO: 2238061 - RNA, 19 nt, Homo sapiens
  misc_RNA (1)...(19): siRNA sense strand
ugggagagcuaguggacuc

SEQ ID NO: 2238062 - RNA, 19 nt, Homo sapiens
  misc_RNA (1)...(19): siRNA sense strand
uggagaggccucaggacuu

SEQ ID NO: 2238063 - RNA, 19 nt, Homo sapiens
  misc_RNA (1)...(19): siRNA sense strand
gcccaucaacagagaccua

SEQ ID NO: 2238064 - RNA, 19 nt, Homo sapiens
  misc_RNA (1)...(19): siRNA sense strand
aacucuaggaagugggcaa

SEQ ID NO: 2238065 - RNA, 19 nt, Homo sapiens
  misc_RNA (1)...(19): siRNA sense strand
acguauggcauccgagaca

SEQ ID NO: 2238066 - RNA, 19 nt, Homo sapiens
  misc_RNA (1)...(19): siRNA sense strand
ccuggaagucguggugaaa

SEQ ID NO: 2238067 - RNA, 19 nt, Homo sapiens
  misc_RNA (1)...(19): siRNA sense strand
ccgucuacgugcaugccaa

SEQ ID NO: 2238068 - RNA, 19 nt, Homo sapiens
  misc_RNA (1)...(19): siRNA sense strand
ggugaagacuuuguggaca

SEQ ID NO: 2238069 - RNA, 19 nt, Homo sapiens
  misc_RNA (1)...(19): siRNA sense strand
ggaaaguacagaaggcccu

SEQ ID NO: 2238070 - RNA, 19 nt, Homo sapiens
  misc_RNA (1)...(19): siRNA sense strand
gaacuggaagggaggggaa

SEQ ID NO: 2238071 - RNA, 19 nt, Homo sapiens
  misc_RNA (1)...(19): siRNA sense strand
ccgaaacagaggaaaguac

SEQ ID NO: 2238072 - RNA, 19 nt, Homo sapiens
  misc_RNA (1)...(19): siRNA sense strand
uggacagccaucaggguuu

SEQ ID NO: 2238073 - RNA, 19 nt, Homo sapiens
  misc_RNA (1)...(19): siRNA sense strand
ccagaagugaguggagaau

SEQ ID NO: 2238074 - RNA, 19 nt, Homo sapiens
  misc_RNA (1)...(19): siRNA sense strand
agaccuggguggaugcuga

SEQ ID NO: 2238075 - RNA, 19 nt, Homo sapiens
  misc_RNA (1)...(19): siRNA sense strand
gugaugaucuggcacgaga

SEQ ID NO: 2238076 - RNA, 19 nt, Homo sapiens
  misc_RNA (1)...(19): siRNA sense strand
agaggaugucagugaacuu

SEQ ID NO: 2238077 - RNA, 19 nt, Homo sapiens
  misc_RNA (1)...(19): siRNA sense strand
uggcaucaguggugcagga

SEQ ID NO: 2238078 - RNA, 19 nt, Homo sapiens
  misc_RNA (1)...(19): siRNA sense strand
ggggaaacaucuggaguga

SEQ ID NO: 2238079 - RNA, 19 nt, Homo sapiens
  misc_RNA (1)...(19): siRNA sense strand
ggaggguguuacugaacca

SEQ ID NO: 2238080 - RNA, 19 nt, Homo sapiens
  misc_RNA (1)...(19): siRNA sense strand
gugaggagggcuggaacaa

SEQ ID NO: 2238081 - RNA, 19 nt, Homo sapiens
  misc_RNA (1)...(19): siRNA sense strand
aggaguggaucgugaccca

SEQ ID NO: 2238082 - RNA, 19 nt, Homo sapiens
  misc_RNA (1)...(19): siRNA sense strand
aaaccagacagaaugggaa

SEQ ID NO: 2238083 - RNA, 19 nt, Homo sapiens
  misc_RNA (1)...(19): siRNA sense strand
ggaccuuggaaguggccca

SEQ ID NO: 2238084 - RNA, 19 nt, Homo sapiens
  misc_RNA (1)...(19): siRNA sense strand
ugacauuucaagaaggcga

SEQ ID NO: 2238085 - RNA, 19 nt, Homo sapiens
  misc_RNA (1)...(19): siRNA sense strand
agaacaggcagaagaggau

SEQ ID NO: 2238086 - RNA, 19 nt, Homo sapiens
  misc_RNA (1)...(19): siRNA sense strand
cagaacaggcagaagagga

SEQ ID NO: 2238087 - RNA, 19 nt, Homo sapiens
  misc_RNA (1)...(19): siRNA sense strand
agaacaggcagaagaggau

SEQ ID NO: 2238088 - RNA, 19 nt, Homo sapiens
  misc_RNA (1)...(19): siRNA sense strand
cagaacaggcagaagagga

SEQ ID NO: 2238089 - RNA, 19 nt, Homo sapiens
  misc_RNA (1)...(19): siRNA sense strand
cugaguugauacagaggaa

SEQ ID NO: 2238090 - RNA, 19 nt, Homo sapiens
  misc_RNA (1)...(19): siRNA sense strand
gggacugguugcuggccaa

SEQ ID NO: 2238091 - RNA, 19 nt, Homo sapiens
  misc_RNA (1)...(19): siRNA sense strand
gaguugauacagaggaaca

SEQ ID NO: 2238092 - RNA, 19 nt, Homo sapiens
  misc_RNA (1)...(19): siRNA sense strand
augaaaagacaguggaaga

SEQ ID NO: 2238093 - RNA, 19 nt, Homo sapiens
  misc_RNA (1)...(19): siRNA sense strand
agaugaaaaucaagggguu

SEQ ID NO: 2238094 - RNA, 19 nt, Homo sapiens
  misc_RNA (1)...(19): siRNA sense strand
acaaagugucugucagcau

SEQ ID NO: 2238095 - RNA, 19 nt, Homo sapiens
  misc_RNA (1)...(19): siRNA sense strand
aggagauguaccaguggaa

SEQ ID NO: 2238096 - RNA, 19 nt, Homo sapiens
  misc_RNA (1)...(19): siRNA sense strand
ggaugaaaagacaguggaa

SEQ ID NO: 2238097 - RNA, 19 nt, Homo sapiens
  misc_RNA (1)...(19): siRNA sense strand
gaggaggacuuccagguga

SEQ ID NO: 2238098 - RNA, 19 nt, Homo sapiens
  misc_RNA (1)...(19): siRNA sense strand
gcuugcaggcugagcuaga

SEQ ID NO: 2238099 - RNA, 19 nt, Homo sapiens
  misc_RNA (1)...(19): siRNA sense strand
uugaagacaucccaggcua

SEQ ID NO: 2238100 - RNA, 19 nt, Homo sapiens
  misc_RNA (1)...(19): siRNA sense strand
gcaucggcauugaaggcuu

SEQ ID NO: 2238101 - RNA, 19 nt, Homo sapiens
  misc_RNA (1)...(19): siRNA sense strand
ccaagaugacagagagcuc

SEQ ID NO: 2238102 - RNA, 19 nt, Homo sapiens
  misc_RNA (1)...(19): siRNA sense strand
ccuuugaagugguaccaga

SEQ ID NO: 2238103 - RNA, 19 nt, Homo sapiens
  misc_RNA (1)...(19): siRNA sense strand
cagacaagaccaagcagga

SEQ ID NO: 2238104 - RNA, 19 nt, Homo sapiens
  misc_RNA (1)...(19): siRNA sense strand
ugaagugguaccagagcau

SEQ ID NO: 2238105 - RNA, 19 nt, Homo sapiens
  misc_RNA (1)...(19): siRNA sense strand
cagcaauccaugacuccaa

SEQ ID NO: 2238106 - RNA, 19 nt, Homo sapiens
  misc_RNA (1)...(19): siRNA sense strand
gugaaaacaagaauggaaa

SEQ ID NO: 2238107 - RNA, 19 nt, Homo sapiens
  misc_RNA (1)...(19): siRNA sense strand
acacauuuauucauggcaa

SEQ ID NO: 2238108 - RNA, 19 nt, Homo sapiens
  misc_RNA (1)...(19): siRNA sense strand
uguuguugcuugugaaaau

SEQ ID NO: 2238109 - RNA, 19 nt, Homo sapiens
  misc_RNA (1)...(19): siRNA sense strand
auggaaacccucacagaga

SEQ ID NO: 2238110 - RNA, 19 nt, Homo sapiens
  misc_RNA (1)...(19): siRNA sense strand
ccuaagaauaagcaagucu

SEQ ID NO: 2238111 - RNA, 19 nt, Homo sapiens
  misc_RNA (1)...(19): siRNA sense strand
cagaagagaucaaggccua

SEQ ID NO: 2238112 - RNA, 19 nt, Homo sapiens
  misc_RNA (1)...(19): siRNA sense strand
cgacaaacaaauuggaaaa

SEQ ID NO: 2238113 - RNA, 19 nt, Homo sapiens
  misc_RNA (1)...(19): siRNA sense strand
aagaaaugguagagauaca

SEQ ID NO: 2238114 - RNA, 19 nt, Homo sapiens
  misc_RNA (1)...(19): siRNA sense strand
gaugauagaaauagggaca

SEQ ID NO: 2238115 - RNA, 19 nt, Homo sapiens
  misc_RNA (1)...(19): siRNA sense strand
gcuaaugaagcuugagaau

SEQ ID NO: 2238116 - RNA, 19 nt, Homo sapiens
  misc_RNA (1)...(19): siRNA sense strand
ugguagagauacagcagaa

SEQ ID NO: 2238117 - RNA, 19 nt, Homo sapiens
  misc_RNA (1)...(19): siRNA sense strand
caaauaaguucaacggcau

SEQ ID NO: 2238118 - RNA, 19 nt, Homo sapiens
  misc_RNA (1)...(19): siRNA sense strand
ggagaauauuggcugggaa

SEQ ID NO: 2238119 - RNA, 19 nt, Homo sapiens
  misc_RNA (1)...(19): siRNA sense strand
cuggagaacaucauggaaa

SEQ ID NO: 2238120 - RNA, 19 nt, Homo sapiens
  misc_RNA (1)...(19): siRNA sense strand
cuggaaaggcucaggcuau

SEQ ID NO: 2238121 - RNA, 19 nt, Homo sapiens
  misc_RNA (1)...(19): siRNA sense strand
uggagaacaucauggaaaa

SEQ ID NO: 2238122 - RNA, 19 nt, Homo sapiens
  misc_RNA (1)...(19): siRNA sense strand
ucgacaaacaaauuggaaa

SEQ ID NO: 2238123 - RNA, 19 nt, Homo sapiens
  misc_RNA (1)...(19): siRNA sense strand
ugaagaaagaaaugguaga

SEQ ID NO: 2238124 - RNA, 19 nt, Homo sapiens
  misc_RNA (1)...(19): siRNA sense strand
acaaauaaguucaacggca

SEQ ID NO: 2238125 - RNA, 19 nt, Homo sapiens
  misc_RNA (1)...(19): siRNA sense strand
gaaagaauauaaaguggga

SEQ ID NO: 2238126 - RNA, 19 nt, Homo sapiens
  misc_RNA (1)...(19): siRNA sense strand
ugguaacccuucaggagaa

SEQ ID NO: 2238127 - RNA, 19 nt, Homo sapiens
  misc_RNA (1)...(19): siRNA sense strand
ugcaagugcuggagaacau

SEQ ID NO: 2238128 - RNA, 19 nt, Homo sapiens
  misc_RNA (1)...(19): siRNA sense strand
uaaaggacuuacagggaca

SEQ ID NO: 2238129 - RNA, 19 nt, Homo sapiens
  misc_RNA (1)...(19): siRNA sense strand
auaaagugggauuugguaa

SEQ ID NO: 2238130 - RNA, 19 nt, Homo sapiens
  misc_RNA (1)...(19): siRNA sense strand
cggcugugaugauagaaau

SEQ ID NO: 2238131 - RNA, 19 nt, Homo sapiens
  misc_RNA (1)...(19): siRNA sense strand
ggcugugaugauagaaaua

SEQ ID NO: 2238132 - RNA, 19 nt, Homo sapiens
  misc_RNA (1)...(19): siRNA sense strand
cagcauaggaaagaagcaa

SEQ ID NO: 2238133 - RNA, 19 nt, Homo sapiens
  misc_RNA (1)...(19): siRNA sense strand
uuaaagacugggaagggaa

SEQ ID NO: 2238134 - RNA, 19 nt, Homo sapiens
  misc_RNA (1)...(19): siRNA sense strand
cacuguugcuaaagaagaa

SEQ ID NO: 2238135 - RNA, 19 nt, Homo sapiens
  misc_RNA (1)...(19): siRNA sense strand
gaccagugaaauaaacaaa

SEQ ID NO: 2238136 - RNA, 19 nt, Homo sapiens
  misc_RNA (1)...(19): siRNA sense strand
guguuaguauccaagcaaa

SEQ ID NO: 2238137 - RNA, 19 nt, Homo sapiens
  misc_RNA (1)...(19): siRNA sense strand
aagaagaacaaaucagcuu

SEQ ID NO: 2238138 - RNA, 19 nt, Homo sapiens
  misc_RNA (1)...(19): siRNA sense strand
cacaaaggauggagacaac

SEQ ID NO: 2238139 - RNA, 19 nt, Homo sapiens
  misc_RNA (1)...(19): siRNA sense strand
aagagaaagaucagcuaca

SEQ ID NO: 2238140 - RNA, 19 nt, Homo sapiens
  misc_RNA (1)...(19): siRNA sense strand
gcagaaugcaguacagaac

SEQ ID NO: 2238141 - RNA, 19 nt, Homo sapiens
  misc_RNA (1)...(19): siRNA sense strand
ggcugcaagugcuggagaa

SEQ ID NO: 2238142 - RNA, 19 nt, Homo sapiens
  misc_RNA (1)...(19): siRNA sense strand
cagcugagcaaacgcggaa

SEQ ID NO: 2238143 - RNA, 19 nt, Homo sapiens
  misc_RNA (1)...(19): siRNA sense strand
agaagagaaagaucagcua

SEQ ID NO: 2238144 - RNA, 19 nt, Homo sapiens
  misc_RNA (1)...(19): siRNA sense strand
agaucaaggccuacuguga

SEQ ID NO: 2238145 - RNA, 19 nt, Homo sapiens
  misc_RNA (1)...(19): siRNA sense strand
gcaucagccaaccaggaaa

SEQ ID NO: 2238146 - RNA, 19 nt, Homo sapiens
  misc_RNA (1)...(19): siRNA sense strand
gagaauuauauccaggaca

SEQ ID NO: 2238147 - RNA, 19 nt, Homo sapiens
  misc_RNA (1)...(19): siRNA sense strand
cuauggaagacaagcacau

SEQ ID NO: 2238148 - RNA, 19 nt, Homo sapiens
  misc_RNA (1)...(19): siRNA sense strand
ugacuaaucagcaacgcua

SEQ ID NO: 2238149 - RNA, 19 nt, Homo sapiens
  misc_RNA (1)...(19): siRNA sense strand
uguuaguauccaagcaaaa

SEQ ID NO: 2238150 - RNA, 19 nt, Homo sapiens
  misc_RNA (1)...(19): siRNA sense strand
cuuaaaggacuuacaggga

SEQ ID NO: 2238151 - RNA, 19 nt, Homo sapiens
  misc_RNA (1)...(19): siRNA sense strand
guacagaaccagacggcug

SEQ ID NO: 2238152 - RNA, 19 nt, Homo sapiens
  misc_RNA (1)...(19): siRNA sense strand
caucagccaaccaggaaau

SEQ ID NO: 2238153 - RNA, 19 nt, Homo sapiens
  misc_RNA (1)...(19): siRNA sense strand
agaacaucauggaaaacaa

SEQ ID NO: 2238154 - RNA, 19 nt, Homo sapiens
  misc_RNA (1)...(19): siRNA sense strand
agauaagaacaguuuccua

SEQ ID NO: 2238155 - RNA, 19 nt, Homo sapiens
  misc_RNA (1)...(19): siRNA sense strand
ccuauaacaacuuucggaa

SEQ ID NO: 2238156 - RNA, 19 nt, Homo sapiens
  misc_RNA (1)...(19): siRNA sense strand
guauuaaaucagaccacga

SEQ ID NO: 2238157 - RNA, 19 nt, Homo sapiens
  misc_RNA (1)...(19): siRNA sense strand
gguguuaguauccaagcaa

SEQ ID NO: 2238158 - RNA, 19 nt, Homo sapiens
  misc_RNA (1)...(19): siRNA sense strand
gagacugugcugaaguauu

SEQ ID NO: 2238159 - RNA, 19 nt, Homo sapiens
  misc_RNA (1)...(19): siRNA sense strand
ugacauggaagcuggagga

SEQ ID NO: 2238160 - RNA, 19 nt, Homo sapiens
  misc_RNA (1)...(19): siRNA sense strand
cagaggcagaacacaaaua

SEQ ID NO: 2238161 - RNA, 19 nt, Homo sapiens
  misc_RNA (1)...(19): siRNA sense strand
aggauggagacaacgacaa

SEQ ID NO: 2238162 - RNA, 19 nt, Homo sapiens
  misc_RNA (1)...(19): siRNA sense strand
aggcagaacacaaauaagu

SEQ ID NO: 2238163 - RNA, 19 nt, Homo sapiens
  misc_RNA (1)...(19): siRNA sense strand
gcauauugccgcuaggaaa

SEQ ID NO: 2238164 - RNA, 19 nt, Homo sapiens
  misc_RNA (1)...(19): siRNA sense strand
ccaagaagucugacagcaa

SEQ ID NO: 2238165 - RNA, 19 nt, Homo sapiens
  misc_RNA (1)...(19): siRNA sense strand
cagagaaagaagagauuau

SEQ ID NO: 2238166 - RNA, 19 nt, Homo sapiens
  misc_RNA (1)...(19): siRNA sense strand
ccaaggaggcagaaaggaa

SEQ ID NO: 2238167 - RNA, 19 nt, Homo sapiens
  misc_RNA (1)...(19): siRNA sense strand
agauuauggugcagggaau

SEQ ID NO: 2238168 - RNA, 19 nt, Homo sapiens
  misc_RNA (1)...(19): siRNA sense strand
gaaugacaccaaagggaaa

SEQ ID NO: 2238169 - RNA, 19 nt, Homo sapiens
  misc_RNA (1)...(19): siRNA sense strand
gcuagagagggaugggaaa

SEQ ID NO: 2238170 - RNA, 19 nt, Homo sapiens
  misc_RNA (1)...(19): siRNA sense strand
cagcaagacaccugaggaa

SEQ ID NO: 2238171 - RNA, 19 nt, Homo sapiens
  misc_RNA (1)...(19): siRNA sense strand
aaagaagguuacuaggaaa

SEQ ID NO: 2238172 - RNA, 19 nt, Homo sapiens
  misc_RNA (1)...(19): siRNA sense strand
gggaaacaugcuacagaua

SEQ ID NO: 2238173 - RNA, 19 nt, Homo sapiens
  misc_RNA (1)...(19): siRNA sense strand
gcaucaaagucauggaacu

SEQ ID NO: 2238174 - RNA, 19 nt, Homo sapiens
  misc_RNA (1)...(19): siRNA sense strand
cgaagaugcagcucagaaa

SEQ ID NO: 2238175 - RNA, 19 nt, Homo sapiens
  misc_RNA (1)...(19): siRNA sense strand
guaucaaacaggacagcaa

SEQ ID NO: 2238176 - RNA, 19 nt, Homo sapiens
  misc_RNA (1)...(19): siRNA sense strand
uggagguguuagaaggaaa

SEQ ID NO: 2238177 - RNA, 19 nt, Homo sapiens
  misc_RNA (1)...(19): siRNA sense strand
agaaacagucacagaagaa

SEQ ID NO: 2238178 - RNA, 19 nt, Homo sapiens
  misc_RNA (1)...(19): siRNA sense strand
ggcaguagucagaggagaa

SEQ ID NO: 2238179 - RNA, 19 nt, Homo sapiens
  misc_RNA (1)...(19): siRNA sense strand
ggaaauacaaacaugguga

SEQ ID NO: 2238180 - RNA, 19 nt, Homo sapiens
  misc_RNA (1)...(19): siRNA sense strand
gaacuauggagcagagaca

SEQ ID NO: 2238181 - RNA, 19 nt, Homo sapiens
  misc_RNA (1)...(19): siRNA sense strand
cagaagaccuagaaaagaa

SEQ ID NO: 2238182 - RNA, 19 nt, Homo sapiens
  misc_RNA (1)...(19): siRNA sense strand
caucacaaguauacagaga

SEQ ID NO: 2238183 - RNA, 19 nt, Homo sapiens
  misc_RNA (1)...(19): siRNA sense strand
ggaagauauuacaggaacu

SEQ ID NO: 2238184 - RNA, 19 nt, Homo sapiens
  misc_RNA (1)...(19): siRNA sense strand
cugaugauaaaguggauaa

SEQ ID NO: 2238185 - RNA, 19 nt, Homo sapiens
  misc_RNA (1)...(19): siRNA sense strand
acuauggagcagagacaaa

SEQ ID NO: 2238186 - RNA, 19 nt, Homo sapiens
  misc_RNA (1)...(19): siRNA sense strand
ccacuuaaugagggagaaa

SEQ ID NO: 2238187 - RNA, 19 nt, Homo sapiens
  misc_RNA (1)...(19): siRNA sense strand
cugaagaugaauugaauga

SEQ ID NO: 2238188 - RNA, 19 nt, Homo sapiens
  misc_RNA (1)...(19): siRNA sense strand
ccgagcagucagaggacaa

SEQ ID NO: 2238189 - RNA, 19 nt, Homo sapiens
  misc_RNA (1)...(19): siRNA sense strand
guaugaauuaccugcgaua

SEQ ID NO: 2238190 - RNA, 19 nt, Homo sapiens
  misc_RNA (1)...(19): siRNA sense strand
gugaauaggacaacugaga

SEQ ID NO: 2238191 - RNA, 19 nt, Homo sapiens
  misc_RNA (1)...(19): siRNA sense strand
gugacaaagcaaggaguaa

SEQ ID NO: 2238192 - RNA, 19 nt, Homo sapiens
  misc_RNA (1)...(19): siRNA sense strand
uuaagaagauccuaggcaa

SEQ ID NO: 2238193 - RNA, 19 nt, Homo sapiens
  misc_RNA (1)...(19): siRNA sense strand
agacgauaugccugaaaua

SEQ ID NO: 2238194 - RNA, 19 nt, Homo sapiens
  misc_RNA (1)...(19): siRNA sense strand
aggaaggagccaauauuaa

SEQ ID NO: 2238195 - RNA, 19 nt, Homo sapiens
  misc_RNA (1)...(19): siRNA sense strand
gguccugcgcagugagaau

SEQ ID NO: 2238196 - RNA, 19 nt, Homo sapiens
  misc_RNA (1)...(19): siRNA sense strand
cagaagaagaauacauuga

SEQ ID NO: 2238197 - RNA, 19 nt, Homo sapiens
  misc_RNA (1)...(19): siRNA sense strand
cugaaggcacagagaaaga

SEQ ID NO: 2238198 - RNA, 19 nt, Homo sapiens
  misc_RNA (1)...(19): siRNA sense strand
aagcagaaguugucaaagu

SEQ ID NO: 2238199 - RNA, 19 nt, Homo sapiens
  misc_RNA (1)...(19): siRNA sense strand
aauccaagaugauggugaa

SEQ ID NO: 2238200 - RNA, 19 nt, Homo sapiens
  misc_RNA (1)...(19): siRNA sense strand
agugaauguugcugauauu

SEQ ID NO: 2238201 - RNA, 19 nt, Homo sapiens
  misc_RNA (1)...(19): siRNA sense strand
cauuuaugaaggagccaaa

SEQ ID NO: 2238202 - RNA, 19 nt, Homo sapiens
  misc_RNA (1)...(19): siRNA sense strand
ggagagaaguucaacggca

SEQ ID NO: 2238203 - RNA, 19 nt, Homo sapiens
  misc_RNA (1)...(19): siRNA sense strand
gggcacacagauaugguua

SEQ ID NO: 2238204 - RNA, 19 nt, Homo sapiens
  misc_RNA (1)...(19): siRNA sense strand
aucaagaacaggaggaaga

SEQ ID NO: 2238205 - RNA, 19 nt, Homo sapiens
  misc_RNA (1)...(19): siRNA sense strand
ucauggaacugcuggugaa

SEQ ID NO: 2238206 - RNA, 19 nt, Homo sapiens
  misc_RNA (1)...(19): siRNA sense strand
uagcaagagaacuggauuu

SEQ ID NO: 2238207 - RNA, 19 nt, Homo sapiens
  misc_RNA (1)...(19): siRNA sense strand
ggaucauagugaaggguuc

SEQ ID NO: 2238208 - RNA, 19 nt, Homo sapiens
  misc_RNA (1)...(19): siRNA sense strand
agucagaggacaacaauga

SEQ ID NO: 2238209 - RNA, 19 nt, Homo sapiens
  misc_RNA (1)...(19): siRNA sense strand
ugaagagggugaugacaca

SEQ ID NO: 2238210 - RNA, 19 nt, Homo sapiens
  misc_RNA (1)...(19): siRNA sense strand
gaaccuagaagaagaaaau

SEQ ID NO: 2238211 - RNA, 19 nt, Homo sapiens
  misc_RNA (1)...(19): siRNA sense strand
ugugacaacuccaggaaca

SEQ ID NO: 2238212 - RNA, 19 nt, Homo sapiens
  misc_RNA (1)...(19): siRNA sense strand
caaaggaaucagagucaga

SEQ ID NO: 2238213 - RNA, 19 nt, Homo sapiens
  misc_RNA (1)...(19): siRNA sense strand
ccgaauggauauuguucau

SEQ ID NO: 2238214 - RNA, 19 nt, Homo sapiens
  misc_RNA (1)...(19): siRNA sense strand
gaauaggacaacugagagu

SEQ ID NO: 2238215 - RNA, 19 nt, Homo sapiens
  misc_RNA (1)...(19): siRNA sense strand
ggcuauacuccguuacaua

SEQ ID NO: 2238216 - RNA, 19 nt, Homo sapiens
  misc_RNA (1)...(19): siRNA sense strand
aaucaaaugcagauagcuu

SEQ ID NO: 2238217 - RNA, 19 nt, Homo sapiens
  misc_RNA (1)...(19): siRNA sense strand
cccugaagguugugacuga

SEQ ID NO: 2238218 - RNA, 19 nt, Homo sapiens
  misc_RNA (1)...(19): siRNA sense strand
ggaaucagagucagaucaa

SEQ ID NO: 2238219 - RNA, 19 nt, Homo sapiens
  misc_RNA (1)...(19): siRNA sense strand
aguacuggcuagagaggga

SEQ ID NO: 2238220 - RNA, 19 nt, Homo sapiens
  misc_RNA (1)...(19): siRNA sense strand
ucaccaagaucaaccgaau

SEQ ID NO: 2238221 - RNA, 19 nt, Homo sapiens
  misc_RNA (1)...(19): siRNA sense strand
cagaaacaucagagacuca

SEQ ID NO: 2238222 - RNA, 19 nt, Homo sapiens
  misc_RNA (1)...(19): siRNA sense strand
gcaagacaccugaggaagu

SEQ ID NO: 2238223 - RNA, 19 nt, Homo sapiens
  misc_RNA (1)...(19): siRNA sense strand
ugaaagacucgaugaagau

SEQ ID NO: 2238224 - RNA, 19 nt, Homo sapiens
  misc_RNA (1)...(19): siRNA sense strand
cagccugagaccugugaaa

SEQ ID NO: 2238225 - RNA, 19 nt, Homo sapiens
  misc_RNA (1)...(19): siRNA sense strand
aagaagagauuauggugca

SEQ ID NO: 2238226 - RNA, 19 nt, Homo sapiens
  misc_RNA (1)...(19): siRNA sense strand
guguuguauugaagaguga

SEQ ID NO: 2238227 - RNA, 19 nt, Homo sapiens
  misc_RNA (1)...(19): siRNA sense strand
caaaguucuuguuaaggaa

SEQ ID NO: 2238228 - RNA, 19 nt, Homo sapiens
  misc_RNA (1)...(19): siRNA sense strand
uggccauccucuuggagaa

SEQ ID NO: 2238229 - RNA, 19 nt, Homo sapiens
  misc_RNA (1)...(19): siRNA sense strand
ucagagacucagaaggcua

SEQ ID NO: 2238230 - RNA, 19 nt, Homo sapiens
  misc_RNA (1)...(19): siRNA sense strand
aggaauucuuaucgccuaa

SEQ ID NO: 2238231 - RNA, 19 nt, Homo sapiens
  misc_RNA (1)...(19): siRNA sense strand
gcauauugccgcuaggaaa

SEQ ID NO: 2238232 - RNA, 19 nt, Homo sapiens
  misc_RNA (1)...(19): siRNA sense strand
ccaagaagucugacagcaa

SEQ ID NO: 2238233 - RNA, 19 nt, Homo sapiens
  misc_RNA (1)...(19): siRNA sense strand
cagagaaagaagagauuau

SEQ ID NO: 2238234 - RNA, 19 nt, Homo sapiens
  misc_RNA (1)...(19): siRNA sense strand
ccaaggaggcagaaaggaa

SEQ ID NO: 2238235 - RNA, 19 nt, Homo sapiens
  misc_RNA (1)...(19): siRNA sense strand
agauuauggugcagggaau

SEQ ID NO: 2238236 - RNA, 19 nt, Homo sapiens
  misc_RNA (1)...(19): siRNA sense strand
gaaugacaccaaagggaaa

SEQ ID NO: 2238237 - RNA, 19 nt, Homo sapiens
  misc_RNA (1)...(19): siRNA sense strand
gcuagagagggaugggaaa

SEQ ID NO: 2238238 - RNA, 19 nt, Homo sapiens
  misc_RNA (1)...(19): siRNA sense strand
cagcaagacaccugaggaa

SEQ ID NO: 2238239 - RNA, 19 nt, Homo sapiens
  misc_RNA (1)...(19): siRNA sense strand
aaagaagguuacuaggaaa

SEQ ID NO: 2238240 - RNA, 19 nt, Homo sapiens
  misc_RNA (1)...(19): siRNA sense strand
gggaaacaugcuacagaua

SEQ ID NO: 2238241 - RNA, 19 nt, Homo sapiens
  misc_RNA (1)...(19): siRNA sense strand
gcaucaaagucauggaacu

SEQ ID NO: 2238242 - RNA, 19 nt, Homo sapiens
  misc_RNA (1)...(19): siRNA sense strand
cgaagaugcagcucagaaa

SEQ ID NO: 2238243 - RNA, 19 nt, Homo sapiens
  misc_RNA (1)...(19): siRNA sense strand
guaucaaacaggacagcaa

SEQ ID NO: 2238244 - RNA, 19 nt, Homo sapiens
  misc_RNA (1)...(19): siRNA sense strand
uggagguguuagaaggaaa

SEQ ID NO: 2238245 - RNA, 19 nt, Homo sapiens
  misc_RNA (1)...(19): siRNA sense strand
agaaacagucacagaagaa

SEQ ID NO: 2238246 - RNA, 19 nt, Homo sapiens
  misc_RNA (1)...(19): siRNA sense strand
ggcaguagucagaggagaa

SEQ ID NO: 2238247 - RNA, 19 nt, Homo sapiens
  misc_RNA (1)...(19): siRNA sense strand
ggaaauacaaacaugguga

SEQ ID NO: 2238248 - RNA, 19 nt, Homo sapiens
  misc_RNA (1)...(19): siRNA sense strand
gaacuauggagcagagaca

SEQ ID NO: 2238249 - RNA, 19 nt, Homo sapiens
  misc_RNA (1)...(19): siRNA sense strand
cagaagaccuagaaaagaa

SEQ ID NO: 2238250 - RNA, 19 nt, Homo sapiens
  misc_RNA (1)...(19): siRNA sense strand
caucacaaguauacagaga

SEQ ID NO: 2238251 - RNA, 19 nt, Homo sapiens
  misc_RNA (1)...(19): siRNA sense strand
ggaagauauuacaggaacu

SEQ ID NO: 2238252 - RNA, 19 nt, Homo sapiens
  misc_RNA (1)...(19): siRNA sense strand
cugaugauaaaguggauaa

SEQ ID NO: 2238253 - RNA, 19 nt, Homo sapiens
  misc_RNA (1)...(19): siRNA sense strand
acuauggagcagagacaaa

SEQ ID NO: 2238254 - RNA, 19 nt, Homo sapiens
  misc_RNA (1)...(19): siRNA sense strand
ccacuuaaugagggagaaa

SEQ ID NO: 2238255 - RNA, 19 nt, Homo sapiens
  misc_RNA (1)...(19): siRNA sense strand
cugaagaugaauugaauga

SEQ ID NO: 2238256 - RNA, 19 nt, Homo sapiens
  misc_RNA (1)...(19): siRNA sense strand
ccgagcagucagaggacaa

SEQ ID NO: 2238257 - RNA, 19 nt, Homo sapiens
  misc_RNA (1)...(19): siRNA sense strand
guaugaauuaccugcgaua

SEQ ID NO: 2238258 - RNA, 19 nt, Homo sapiens
  misc_RNA (1)...(19): siRNA sense strand
gugaauaggacaacugaga

SEQ ID NO: 2238259 - RNA, 19 nt, Homo sapiens
  misc_RNA (1)...(19): siRNA sense strand
gugacaaagcaaggaguaa

SEQ ID NO: 2238260 - RNA, 19 nt, Homo sapiens
  misc_RNA (1)...(19): siRNA sense strand
uuaagaagauccuaggcaa

SEQ ID NO: 2238261 - RNA, 19 nt, Homo sapiens
  misc_RNA (1)...(19): siRNA sense strand
agacgauaugccugaaaua

SEQ ID NO: 2238262 - RNA, 19 nt, Homo sapiens
  misc_RNA (1)...(19): siRNA sense strand
aggaaggagccaauauuaa

SEQ ID NO: 2238263 - RNA, 19 nt, Homo sapiens
  misc_RNA (1)...(19): siRNA sense strand
gguccugcgcagugagaau

SEQ ID NO: 2238264 - RNA, 19 nt, Homo sapiens
  misc_RNA (1)...(19): siRNA sense strand
cagaagaagaauacauuga

SEQ ID NO: 2238265 - RNA, 19 nt, Homo sapiens
  misc_RNA (1)...(19): siRNA sense strand
cugaaggcacagagaaaga

SEQ ID NO: 2238266 - RNA, 19 nt, Homo sapiens
  misc_RNA (1)...(19): siRNA sense strand
aagcagaaguugucaaagu

SEQ ID NO: 2238267 - RNA, 19 nt, Homo sapiens
  misc_RNA (1)...(19): siRNA sense strand
aauccaagaugauggugaa

SEQ ID NO: 2238268 - RNA, 19 nt, Homo sapiens
  misc_RNA (1)...(19): siRNA sense strand
agugaauguugcugauauu

SEQ ID NO: 2238269 - RNA, 19 nt, Homo sapiens
  misc_RNA (1)...(19): siRNA sense strand
cauuuaugaaggagccaaa

SEQ ID NO: 2238270 - RNA, 19 nt, Homo sapiens
  misc_RNA (1)...(19): siRNA sense strand
ggagagaaguucaacggca

SEQ ID NO: 2238271 - RNA, 19 nt, Homo sapiens
  misc_RNA (1)...(19): siRNA sense strand
gggcacacagauaugguua

SEQ ID NO: 2238272 - RNA, 19 nt, Homo sapiens
  misc_RNA (1)...(19): siRNA sense strand
aucaagaacaggaggaaga

SEQ ID NO: 2238273 - RNA, 19 nt, Homo sapiens
  misc_RNA (1)...(19): siRNA sense strand
ucauggaacugcuggugaa

SEQ ID NO: 2238274 - RNA, 19 nt, Homo sapiens
  misc_RNA (1)...(19): siRNA sense strand
uagcaagagaacuggauuu

SEQ ID NO: 2238275 - RNA, 19 nt, Homo sapiens
  misc_RNA (1)...(19): siRNA sense strand
ggaucauagugaaggguuc

SEQ ID NO: 2238276 - RNA, 19 nt, Homo sapiens
  misc_RNA (1)...(19): siRNA sense strand
agucagaggacaacaauga

SEQ ID NO: 2238277 - RNA, 19 nt, Homo sapiens
  misc_RNA (1)...(19): siRNA sense strand
ugaagagggugaugacaca

SEQ ID NO: 2238278 - RNA, 19 nt, Homo sapiens
  misc_RNA (1)...(19): siRNA sense strand
gaaccuagaagaagaaaau

SEQ ID NO: 2238279 - RNA, 19 nt, Homo sapiens
  misc_RNA (1)...(19): siRNA sense strand
ugugacaacuccaggaaca

SEQ ID NO: 2238280 - RNA, 19 nt, Homo sapiens
  misc_RNA (1)...(19): siRNA sense strand
caaaggaaucagagucaga

SEQ ID NO: 2238281 - RNA, 19 nt, Homo sapiens
  misc_RNA (1)...(19): siRNA sense strand
ccgaauggauauuguucau

SEQ ID NO: 2238282 - RNA, 19 nt, Homo sapiens
  misc_RNA (1)...(19): siRNA sense strand
gaauaggacaacugagagu

SEQ ID NO: 2238283 - RNA, 19 nt, Homo sapiens
  misc_RNA (1)...(19): siRNA sense strand
ggcuauacuccguuacaua

SEQ ID NO: 2238284 - RNA, 19 nt, Homo sapiens
  misc_RNA (1)...(19): siRNA sense strand
aaucaaaugcagauagcuu

SEQ ID NO: 2238285 - RNA, 19 nt, Homo sapiens
  misc_RNA (1)...(19): siRNA sense strand
cccugaagguugugacuga

SEQ ID NO: 2238286 - RNA, 19 nt, Homo sapiens
  misc_RNA (1)...(19): siRNA sense strand
ggaaucagagucagaucaa

SEQ ID NO: 2238287 - RNA, 19 nt, Homo sapiens
  misc_RNA (1)...(19): siRNA sense strand
aguacuggcuagagaggga

SEQ ID NO: 2238288 - RNA, 19 nt, Homo sapiens
  misc_RNA (1)...(19): siRNA sense strand
ucaccaagaucaaccgaau

SEQ ID NO: 2238289 - RNA, 19 nt, Homo sapiens
  misc_RNA (1)...(19): siRNA sense strand
cagaaacaucagagacuca

SEQ ID NO: 2238290 - RNA, 19 nt, Homo sapiens
  misc_RNA (1)...(19): siRNA sense strand
gcaagacaccugaggaagu

SEQ ID NO: 2238291 - RNA, 19 nt, Homo sapiens
  misc_RNA (1)...(19): siRNA sense strand
ugaaagacucgaugaagau

SEQ ID NO: 2238292 - RNA, 19 nt, Homo sapiens
  misc_RNA (1)...(19): siRNA sense strand
cagccugagaccugugaaa

SEQ ID NO: 2238293 - RNA, 19 nt, Homo sapiens
  misc_RNA (1)...(19): siRNA sense strand
aagaagagauuauggugca

SEQ ID NO: 2238294 - RNA, 19 nt, Homo sapiens
  misc_RNA (1)...(19): siRNA sense strand
guguuguauugaagaguga

SEQ ID NO: 2238295 - RNA, 19 nt, Homo sapiens
  misc_RNA (1)...(19): siRNA sense strand
caaaguucuuguuaaggaa

SEQ ID NO: 2238296 - RNA, 19 nt, Homo sapiens
  misc_RNA (1)...(19): siRNA sense strand
uggccauccucuuggagaa

SEQ ID NO: 2238297 - RNA, 19 nt, Homo sapiens
  misc_RNA (1)...(19): siRNA sense strand
ucagagacucagaaggcua

SEQ ID NO: 2238298 - RNA, 19 nt, Homo sapiens
  misc_RNA (1)...(19): siRNA sense strand
aggaauucuuaucgccuaa

SEQ ID NO: 2238299 - RNA, 19 nt, Homo sapiens
  misc_RNA (1)...(19): siRNA sense strand
gugaaaacgaagaaagaaa

SEQ ID NO: 2238300 - RNA, 19 nt, Homo sapiens
  misc_RNA (1)...(19): siRNA sense strand
ggaaccaagaagacggaaa

SEQ ID NO: 2238301 - RNA, 19 nt, Homo sapiens
  misc_RNA (1)...(19): siRNA sense strand
agacaaauaucuugggcca

SEQ ID NO: 2238302 - RNA, 19 nt, Homo sapiens
  misc_RNA (1)...(19): siRNA sense strand
ggacagaacuggcaaggga

SEQ ID NO: 2238303 - RNA, 19 nt, Homo sapiens
  misc_RNA (1)...(19): siRNA sense strand
cccagaagaguuagggaaa

SEQ ID NO: 2238304 - RNA, 19 nt, Homo sapiens
  misc_RNA (1)...(19): siRNA sense strand
cugcaugacagaugacaaa

SEQ ID NO: 2238305 - RNA, 19 nt, Homo sapiens
  misc_RNA (1)...(19): siRNA sense strand
cgcaagaagcaaagauauu

SEQ ID NO: 2238306 - RNA, 19 nt, Homo sapiens
  misc_RNA (1)...(19): siRNA sense strand
cuccagaagcaaagacaaa

SEQ ID NO: 2238307 - RNA, 19 nt, Homo sapiens
  misc_RNA (1)...(19): siRNA sense strand
gcuuauaauagaagagacu

SEQ ID NO: 2238308 - RNA, 19 nt, Homo sapiens
  misc_RNA (1)...(19): siRNA sense strand
ccaugugaacggacagaua

SEQ ID NO: 2238309 - RNA, 19 nt, Homo sapiens
  misc_RNA (1)...(19): siRNA sense strand
cugaaagaaccaaagacaa

SEQ ID NO: 2238310 - RNA, 19 nt, Homo sapiens
  misc_RNA (1)...(19): siRNA sense strand
caaucaaauacguguggaa

SEQ ID NO: 2238311 - RNA, 19 nt, Homo sapiens
  misc_RNA (1)...(19): siRNA sense strand
acgcaacuguacagagaau

SEQ ID NO: 2238312 - RNA, 19 nt, Homo sapiens
  misc_RNA (1)...(19): siRNA sense strand
cagaugacaaaguggacaa

SEQ ID NO: 2238313 - RNA, 19 nt, Homo sapiens
  misc_RNA (1)...(19): siRNA sense strand
cagcaugaugauugaagaa

SEQ ID NO: 2238314 - RNA, 19 nt, Homo sapiens
  misc_RNA (1)...(19): siRNA sense strand
uggcaagggaacugaauuu

SEQ ID NO: 2238315 - RNA, 19 nt, Homo sapiens
  misc_RNA (1)...(19): siRNA sense strand
cgcucaagcucgaagagua

SEQ ID NO: 2238316 - RNA, 19 nt, Homo sapiens
  misc_RNA (1)...(19): siRNA sense strand
ugguggaaggagagggauu

SEQ ID NO: 2238317 - RNA, 19 nt, Homo sapiens
  misc_RNA (1)...(19): siRNA sense strand
aggauuaucacgaaagauu

SEQ ID NO: 2238318 - RNA, 19 nt, Homo sapiens
  misc_RNA (1)...(19): siRNA sense strand
acagauaucaggauggcaa

SEQ ID NO: 2238319 - RNA, 19 nt, Homo sapiens
  misc_RNA (1)...(19): siRNA sense strand
cuuuagagcaacaagagaa

SEQ ID NO: 2238320 - RNA, 19 nt, Homo sapiens
  misc_RNA (1)...(19): siRNA sense strand
uaccaaaggaggacagcaa

SEQ ID NO: 2238321 - RNA, 19 nt, Homo sapiens
  misc_RNA (1)...(19): siRNA sense strand
gcccagaagaguuagggaa

SEQ ID NO: 2238322 - RNA, 19 nt, Homo sapiens
  misc_RNA (1)...(19): siRNA sense strand
aggagaagguguauccaau

SEQ ID NO: 2238323 - RNA, 19 nt, Homo sapiens
  misc_RNA (1)...(19): siRNA sense strand
ggagaagguuuuaagguga

SEQ ID NO: 2238324 - RNA, 19 nt, Homo sapiens
  misc_RNA (1)...(19): siRNA sense strand
cugcaggauuaucacgaaa

SEQ ID NO: 2238325 - RNA, 19 nt, Homo sapiens
  misc_RNA (1)...(19): siRNA sense strand
cugcagacaccuuagacaa

SEQ ID NO: 2238326 - RNA, 19 nt, Homo sapiens
  misc_RNA (1)...(19): siRNA sense strand
ggaagacaucacaggaaca

SEQ ID NO: 2238327 - RNA, 19 nt, Homo sapiens
  misc_RNA (1)...(19): siRNA sense strand
gcaugaugauugaagaacu

SEQ ID NO: 2238328 - RNA, 19 nt, Homo sapiens
  misc_RNA (1)...(19): siRNA sense strand
ugaaagaaccaaagacaac

SEQ ID NO: 2238329 - RNA, 19 nt, Homo sapiens
  misc_RNA (1)...(19): siRNA sense strand
cccaaaaugauguaggaaa

SEQ ID NO: 2238330 - RNA, 19 nt, Homo sapiens
  misc_RNA (1)...(19): siRNA sense strand
ccagaagaguuagggaaaa

SEQ ID NO: 2238331 - RNA, 19 nt, Homo sapiens
  misc_RNA (1)...(19): siRNA sense strand
acaagagaauuuugaggaa

SEQ ID NO: 2238332 - RNA, 19 nt, Homo sapiens
  misc_RNA (1)...(19): siRNA sense strand
uugagguucuggaaggaaa

SEQ ID NO: 2238333 - RNA, 19 nt, Homo sapiens
  misc_RNA (1)...(19): siRNA sense strand
uggcagaaugagacaucaa

SEQ ID NO: 2238334 - RNA, 19 nt, Homo sapiens
  misc_RNA (1)...(19): siRNA sense strand
cguuugguaaagagacaua

SEQ ID NO: 2238335 - RNA, 19 nt, Homo sapiens
  misc_RNA (1)...(19): siRNA sense strand
agaagaaaccagcaagcuu

SEQ ID NO: 2238336 - RNA, 19 nt, Homo sapiens
  misc_RNA (1)...(19): siRNA sense strand
caugagaggaaaagagaga

SEQ ID NO: 2238337 - RNA, 19 nt, Homo sapiens
  misc_RNA (1)...(19): siRNA sense strand
uggcaauaguagccgauca

SEQ ID NO: 2238338 - RNA, 19 nt, Homo sapiens
  misc_RNA (1)...(19): siRNA sense strand
ccugaccaguguagagauu

SEQ ID NO: 2238339 - RNA, 19 nt, Homo sapiens
  misc_RNA (1)...(19): siRNA sense strand
aaggaaacucugaaaccaa

SEQ ID NO: 2238340 - RNA, 19 nt, Homo sapiens
  misc_RNA (1)...(19): siRNA sense strand
uagagcaacaagagaauuu

SEQ ID NO: 2238341 - RNA, 19 nt, Homo sapiens
  misc_RNA (1)...(19): siRNA sense strand
ucugaaagaaccaaagaca

SEQ ID NO: 2238342 - RNA, 19 nt, Homo sapiens
  misc_RNA (1)...(19): siRNA sense strand
gaagaaagaaauccggcau

SEQ ID NO: 2238343 - RNA, 19 nt, Homo sapiens
  misc_RNA (1)...(19): siRNA sense strand
ccgaguuacuuaauggcau

SEQ ID NO: 2238344 - RNA, 19 nt, Homo sapiens
  misc_RNA (1)...(19): siRNA sense strand
gggaagacaucacaggaac

SEQ ID NO: 2238345 - RNA, 19 nt, Homo sapiens
  misc_RNA (1)...(19): siRNA sense strand
cagauagacgacagagcuu

SEQ ID NO: 2238346 - RNA, 19 nt, Homo sapiens
  misc_RNA (1)...(19): siRNA sense strand
gagaagguuuuaaggugaa

SEQ ID NO: 2238347 - RNA, 19 nt, Homo sapiens
  misc_RNA (1)...(19): siRNA sense strand
ucaaaggagaagcuggcaa

SEQ ID NO: 2238348 - RNA, 19 nt, Homo sapiens
  misc_RNA (1)...(19): siRNA sense strand
cagaaaucucuagaagaaa

SEQ ID NO: 2238349 - RNA, 19 nt, Homo sapiens
  misc_RNA (1)...(19): siRNA sense strand
cauccuuagcuuuacguaa

SEQ ID NO: 2238350 - RNA, 19 nt, Homo sapiens
  misc_RNA (1)...(19): siRNA sense strand
ucaaauacguguggaaaau

SEQ ID NO: 2238351 - RNA, 19 nt, Homo sapiens
  misc_RNA (1)...(19): siRNA sense strand
ugggaagacaucacaggaa

SEQ ID NO: 2238352 - RNA, 19 nt, Homo sapiens
  misc_RNA (1)...(19): siRNA sense strand
ucuuacaccuugaacagaa

SEQ ID NO: 2238353 - RNA, 19 nt, Homo sapiens
  misc_RNA (1)...(19): siRNA sense strand
gccguuugguaaagagaca

SEQ ID NO: 2238354 - RNA, 19 nt, Homo sapiens
  misc_RNA (1)...(19): siRNA sense strand
gcccugucauaguggaaau

SEQ ID NO: 2238355 - RNA, 19 nt, Homo sapiens
  misc_RNA (1)...(19): siRNA sense strand
acaaauaucuugggccaca

SEQ ID NO: 2238356 - RNA, 19 nt, Homo sapiens
  misc_RNA (1)...(19): siRNA sense strand
aaucaaauacguguggaaa

SEQ ID NO: 2238357 - RNA, 19 nt, Homo sapiens
  misc_RNA (1)...(19): siRNA sense strand
ggguuaccagagacggaaa

SEQ ID NO: 2238358 - RNA, 19 nt, Homo sapiens
  misc_RNA (1)...(19): siRNA sense strand
gugaaaacgaagaaagaaa

SEQ ID NO: 2238359 - RNA, 19 nt, Homo sapiens
  misc_RNA (1)...(19): siRNA sense strand
ggaaccaagaagacggaaa

SEQ ID NO: 2238360 - RNA, 19 nt, Homo sapiens
  misc_RNA (1)...(19): siRNA sense strand
agacaaauaucuugggcca

SEQ ID NO: 2238361 - RNA, 19 nt, Homo sapiens
  misc_RNA (1)...(19): siRNA sense strand
ggacagaacuggcaaggga

SEQ ID NO: 2238362 - RNA, 19 nt, Homo sapiens
  misc_RNA (1)...(19): siRNA sense strand
cccagaagaguuagggaaa

SEQ ID NO: 2238363 - RNA, 19 nt, Homo sapiens
  misc_RNA (1)...(19): siRNA sense strand
cugcaugacagaugacaaa

SEQ ID NO: 2238364 - RNA, 19 nt, Homo sapiens
  misc_RNA (1)...(19): siRNA sense strand
cgcaagaagcaaagauauu

SEQ ID NO: 2238365 - RNA, 19 nt, Homo sapiens
  misc_RNA (1)...(19): siRNA sense strand
cuccagaagcaaagacaaa

SEQ ID NO: 2238366 - RNA, 19 nt, Homo sapiens
  misc_RNA (1)...(19): siRNA sense strand
gcuuauaauagaagagacu

SEQ ID NO: 2238367 - RNA, 19 nt, Homo sapiens
  misc_RNA (1)...(19): siRNA sense strand
ccaugugaacggacagaua

SEQ ID NO: 2238368 - RNA, 19 nt, Homo sapiens
  misc_RNA (1)...(19): siRNA sense strand
cugaaagaaccaaagacaa

SEQ ID NO: 2238369 - RNA, 19 nt, Homo sapiens
  misc_RNA (1)...(19): siRNA sense strand
caaucaaauacguguggaa

SEQ ID NO: 2238370 - RNA, 19 nt, Homo sapiens
  misc_RNA (1)...(19): siRNA sense strand
acgcaacuguacagagaau

SEQ ID NO: 2238371 - RNA, 19 nt, Homo sapiens
  misc_RNA (1)...(19): siRNA sense strand
cagaugacaaaguggacaa

SEQ ID NO: 2238372 - RNA, 19 nt, Homo sapiens
  misc_RNA (1)...(19): siRNA sense strand
cagcaugaugauugaagaa

SEQ ID NO: 2238373 - RNA, 19 nt, Homo sapiens
  misc_RNA (1)...(19): siRNA sense strand
uggcaagggaacugaauuu

SEQ ID NO: 2238374 - RNA, 19 nt, Homo sapiens
  misc_RNA (1)...(19): siRNA sense strand
cgcucaagcucgaagagua

SEQ ID NO: 2238375 - RNA, 19 nt, Homo sapiens
  misc_RNA (1)...(19): siRNA sense strand
ugguggaaggagagggauu

SEQ ID NO: 2238376 - RNA, 19 nt, Homo sapiens
  misc_RNA (1)...(19): siRNA sense strand
aggauuaucacgaaagauu

SEQ ID NO: 2238377 - RNA, 19 nt, Homo sapiens
  misc_RNA (1)...(19): siRNA sense strand
acagauaucaggauggcaa

SEQ ID NO: 2238378 - RNA, 19 nt, Homo sapiens
  misc_RNA (1)...(19): siRNA sense strand
cuuuagagcaacaagagaa

SEQ ID NO: 2238379 - RNA, 19 nt, Homo sapiens
  misc_RNA (1)...(19): siRNA sense strand
uaccaaaggaggacagcaa

SEQ ID NO: 2238380 - RNA, 19 nt, Homo sapiens
  misc_RNA (1)...(19): siRNA sense strand
gcccagaagaguuagggaa

SEQ ID NO: 2238381 - RNA, 19 nt, Homo sapiens
  misc_RNA (1)...(19): siRNA sense strand
aggagaagguguauccaau

SEQ ID NO: 2238382 - RNA, 19 nt, Homo sapiens
  misc_RNA (1)...(19): siRNA sense strand
ggagaagguuuuaagguga

SEQ ID NO: 2238383 - RNA, 19 nt, Homo sapiens
  misc_RNA (1)...(19): siRNA sense strand
cugcaggauuaucacgaaa

SEQ ID NO: 2238384 - RNA, 19 nt, Homo sapiens
  misc_RNA (1)...(19): siRNA sense strand
cugcagacaccuuagacaa

SEQ ID NO: 2238385 - RNA, 19 nt, Homo sapiens
  misc_RNA (1)...(19): siRNA sense strand
ggaagacaucacaggaaca

SEQ ID NO: 2238386 - RNA, 19 nt, Homo sapiens
  misc_RNA (1)...(19): siRNA sense strand
gcaugaugauugaagaacu

SEQ ID NO: 2238387 - RNA, 19 nt, Homo sapiens
  misc_RNA (1)...(19): siRNA sense strand
ugaaagaaccaaagacaac

SEQ ID NO: 2238388 - RNA, 19 nt, Homo sapiens
  misc_RNA (1)...(19): siRNA sense strand
cccaaaaugauguaggaaa

SEQ ID NO: 2238389 - RNA, 19 nt, Homo sapiens
  misc_RNA (1)...(19): siRNA sense strand
ccagaagaguuagggaaaa

SEQ ID NO: 2238390 - RNA, 19 nt, Homo sapiens
  misc_RNA (1)...(19): siRNA sense strand
acaagagaauuuugaggaa

SEQ ID NO: 2238391 - RNA, 19 nt, Homo sapiens
  misc_RNA (1)...(19): siRNA sense strand
uugagguucuggaaggaaa

SEQ ID NO: 2238392 - RNA, 19 nt, Homo sapiens
  misc_RNA (1)...(19): siRNA sense strand
uggcagaaugagacaucaa

SEQ ID NO: 2238393 - RNA, 19 nt, Homo sapiens
  misc_RNA (1)...(19): siRNA sense strand
cguuugguaaagagacaua

SEQ ID NO: 2238394 - RNA, 19 nt, Homo sapiens
  misc_RNA (1)...(19): siRNA sense strand
agaagaaaccagcaagcuu

SEQ ID NO: 2238395 - RNA, 19 nt, Homo sapiens
  misc_RNA (1)...(19): siRNA sense strand
caugagaggaaaagagaga

SEQ ID NO: 2238396 - RNA, 19 nt, Homo sapiens
  misc_RNA (1)...(19): siRNA sense strand
uggcaauaguagccgauca

SEQ ID NO: 2238397 - RNA, 19 nt, Homo sapiens
  misc_RNA (1)...(19): siRNA sense strand
ccugaccaguguagagauu

SEQ ID NO: 2238398 - RNA, 19 nt, Homo sapiens
  misc_RNA (1)...(19): siRNA sense strand
aaggaaacucugaaaccaa

SEQ ID NO: 2238399 - RNA, 19 nt, Homo sapiens
  misc_RNA (1)...(19): siRNA sense strand
uagagcaacaagagaauuu

SEQ ID NO: 2238400 - RNA, 19 nt, Homo sapiens
  misc_RNA (1)...(19): siRNA sense strand
ucugaaagaaccaaagaca

SEQ ID NO: 2238401 - RNA, 19 nt, Homo sapiens
  misc_RNA (1)...(19): siRNA sense strand
gaagaaagaaauccggcau

SEQ ID NO: 2238402 - RNA, 19 nt, Homo sapiens
  misc_RNA (1)...(19): siRNA sense strand
ccgaguuacuuaauggcau

SEQ ID NO: 2238403 - RNA, 19 nt, Homo sapiens
  misc_RNA (1)...(19): siRNA sense strand
gggaagacaucacaggaac

SEQ ID NO: 2238404 - RNA, 19 nt, Homo sapiens
  misc_RNA (1)...(19): siRNA sense strand
cagauagacgacagagcuu

SEQ ID NO: 2238405 - RNA, 19 nt, Homo sapiens
  misc_RNA (1)...(19): siRNA sense strand
gagaagguuuuaaggugaa

SEQ ID NO: 2238406 - RNA, 19 nt, Homo sapiens
  misc_RNA (1)...(19): siRNA sense strand
ucaaaggagaagcuggcaa

SEQ ID NO: 2238407 - RNA, 19 nt, Homo sapiens
  misc_RNA (1)...(19): siRNA sense strand
cagaaaucucuagaagaaa

SEQ ID NO: 2238408 - RNA, 19 nt, Homo sapiens
  misc_RNA (1)...(19): siRNA sense strand
cauccuuagcuuuacguaa

SEQ ID NO: 2238409 - RNA, 19 nt, Homo sapiens
  misc_RNA (1)...(19): siRNA sense strand
ucaaauacguguggaaaau

SEQ ID NO: 2238410 - RNA, 19 nt, Homo sapiens
  misc_RNA (1)...(19): siRNA sense strand
ugggaagacaucacaggaa

SEQ ID NO: 2238411 - RNA, 19 nt, Homo sapiens
  misc_RNA (1)...(19): siRNA sense strand
ucuuacaccuugaacagaa

SEQ ID NO: 2238412 - RNA, 19 nt, Homo sapiens
  misc_RNA (1)...(19): siRNA sense strand
gccguuugguaaagagaca

SEQ ID NO: 2238413 - RNA, 19 nt, Homo sapiens
  misc_RNA (1)...(19): siRNA sense strand
gcccugucauaguggaaau

SEQ ID NO: 2238414 - RNA, 19 nt, Homo sapiens
  misc_RNA (1)...(19): siRNA sense strand
acaaauaucuugggccaca

SEQ ID NO: 2238415 - RNA, 19 nt, Homo sapiens
  misc_RNA (1)...(19): siRNA sense strand
aaucaaauacguguggaaa

SEQ ID NO: 2238416 - RNA, 19 nt, Homo sapiens
  misc_RNA (1)...(19): siRNA sense strand
ggguuaccagagacggaaa

SEQ ID NO: 2238417 - RNA, 19 nt, Homo sapiens
  misc_RNA (1)...(19): siRNA sense strand
gcgaguacauggagggcaa

SEQ ID NO: 2238418 - RNA, 19 nt, Homo sapiens
  misc_RNA (1)...(19): siRNA sense strand
caacaacgucauugggcaa

SEQ ID NO: 2238419 - RNA, 19 nt, Homo sapiens
  misc_RNA (1)...(19): siRNA sense strand
accaacaacuggagggaga

SEQ ID NO: 2238420 - RNA, 19 nt, Homo sapiens
  misc_RNA (1)...(19): siRNA sense strand
gagaagaacaagaacgcca

SEQ ID NO: 2238421 - RNA, 19 nt, Homo sapiens
  misc_RNA (1)...(19): siRNA sense strand
uggaaugaccuguggcuga

SEQ ID NO: 2238422 - RNA, 19 nt, Homo sapiens
  misc_RNA (1)...(19): siRNA sense strand
ggaaacaggcuucggcuca

SEQ ID NO: 2238423 - RNA, 19 nt, Homo sapiens
  misc_RNA (1)...(19): siRNA sense strand
gggugaacuacgacgaaga

SEQ ID NO: 2238424 - RNA, 19 nt, Homo sapiens
  misc_RNA (1)...(19): siRNA sense strand
cagaaaaccugauggacca

SEQ ID NO: 2238425 - RNA, 19 nt, Homo sapiens
  misc_RNA (1)...(19): siRNA sense strand
ugaacuacgacgaagagaa

SEQ ID NO: 2238426 - RNA, 19 nt, Homo sapiens
  misc_RNA (1)...(19): siRNA sense strand
gagcaguucaagaaggaca

SEQ ID NO: 2238427 - RNA, 19 nt, Homo sapiens
  misc_RNA (1)...(19): siRNA sense strand
ugcaggaggcugugaacaa

SEQ ID NO: 2238428 - RNA, 19 nt, Homo sapiens
  misc_RNA (1)...(19): siRNA sense strand
aguaugagauggacagcga

SEQ ID NO: 2238429 - RNA, 19 nt, Homo sapiens
  misc_RNA (1)...(19): siRNA sense strand
acgaagagaacuggaggaa

SEQ ID NO: 2238430 - RNA, 19 nt, Homo sapiens
  misc_RNA (1)...(19): siRNA sense strand
ccgaguaccugguggugca

SEQ ID NO: 2238431 - RNA, 19 nt, Homo sapiens
  misc_RNA (1)...(19): siRNA sense strand
ucgacuacguggagaagca

SEQ ID NO: 2238432 - RNA, 19 nt, Homo sapiens
  misc_RNA (1)...(19): siRNA sense strand
uggagaagacgaaagccaa

SEQ ID NO: 2238433 - RNA, 19 nt, Homo sapiens
  misc_RNA (1)...(19): siRNA sense strand
gauuaugcccugaacguga

SEQ ID NO: 2238434 - RNA, 19 nt, Homo sapiens
  misc_RNA (1)...(19): siRNA sense strand
gcagcaaagaguuguggau

SEQ ID NO: 2238435 - RNA, 19 nt, Homo sapiens
  misc_RNA (1)...(19): siRNA sense strand
ccugggagcaguuccgaaa

SEQ ID NO: 2238436 - RNA, 19 nt, Homo sapiens
  misc_RNA (1)...(19): siRNA sense strand
cuggagaagacgaaagcca

SEQ ID NO: 2238437 - RNA, 19 nt, Homo sapiens
  misc_RNA (1)...(19): siRNA sense strand
gggugaaggagaacaagga

SEQ ID NO: 2238438 - RNA, 19 nt, Homo sapiens
  misc_RNA (1)...(19): siRNA sense strand
auguaagagcccagaacga

SEQ ID NO: 2238439 - RNA, 19 nt, Homo sapiens
  misc_RNA (1)...(19): siRNA sense strand
ccacguacuugcuggccuu

SEQ ID NO: 2238440 - RNA, 19 nt, Homo sapiens
  misc_RNA (1)...(19): siRNA sense strand
ccaugaagaacuaccugaa

SEQ ID NO: 2238441 - RNA, 19 nt, Homo sapiens
  misc_RNA (1)...(19): siRNA sense strand
gccaacaucaaguggguga

SEQ ID NO: 2238442 - RNA, 19 nt, Homo sapiens
  misc_RNA (1)...(19): siRNA sense strand
ggaccaaaguaaagcgugg

SEQ ID NO: 2238443 - RNA, 19 nt, Homo sapiens
  misc_RNA (1)...(19): siRNA sense strand
aguucgacuacguggagaa

SEQ ID NO: 2238444 - RNA, 19 nt, Homo sapiens
  misc_RNA (1)...(19): siRNA sense strand
agugggugaaggagaacaa

SEQ ID NO: 2238445 - RNA, 19 nt, Homo sapiens
  misc_RNA (1)...(19): siRNA sense strand
agaaggacaacgaggaaac

SEQ ID NO: 2238446 - RNA, 19 nt, Homo sapiens
  misc_RNA (1)...(19): siRNA sense strand
uggagcaagcccuggagaa

SEQ ID NO: 2238447 - RNA, 19 nt, Homo sapiens
  misc_RNA (1)...(19): siRNA sense strand
agaagaacaagaacgccaa

SEQ ID NO: 2238448 - RNA, 19 nt, Homo sapiens
  misc_RNA (1)...(19): siRNA sense strand
cuucauugucagugaguuc

SEQ ID NO: 2238449 - RNA, 19 nt, Homo sapiens
  misc_RNA (1)...(19): siRNA sense strand
uggagggcaaugucagaaa

SEQ ID NO: 2238450 - RNA, 19 nt, Homo sapiens
  misc_RNA (1)...(19): siRNA sense strand
ugaaagaccucauggugcu

SEQ ID NO: 2238451 - RNA, 19 nt, Homo sapiens
  misc_RNA (1)...(19): siRNA sense strand
accaguacagcgagguuaa

SEQ ID NO: 2238452 - RNA, 19 nt, Homo sapiens
  misc_RNA (1)...(19): siRNA sense strand
acaucaagugggugaagga

SEQ ID NO: 2238453 - RNA, 19 nt, Homo sapiens
  misc_RNA (1)...(19): siRNA sense strand
uaguaaagugcaugaggaa

SEQ ID NO: 2238454 - RNA, 19 nt, Homo sapiens
  misc_RNA (1)...(19): siRNA sense strand
gugggagggaugaaggaaa

SEQ ID NO: 2238455 - RNA, 19 nt, Homo sapiens
  misc_RNA (1)...(19): siRNA sense strand
cuguggaggagaugauuaa

SEQ ID NO: 2238456 - RNA, 19 nt, Homo sapiens
  misc_RNA (1)...(19): siRNA sense strand
aggauauugaacagaguau

SEQ ID NO: 2238457 - RNA, 19 nt, Homo sapiens
  misc_RNA (1)...(19): siRNA sense strand
uggcuauaguaaagugcau

SEQ ID NO: 2238458 - RNA, 19 nt, Homo sapiens
  misc_RNA (1)...(19): siRNA sense strand
gcuugggcaccgaugauaa

SEQ ID NO: 2238459 - RNA, 19 nt, Homo sapiens
  misc_RNA (1)...(19): siRNA sense strand
ugacauucgcucugacaca

SEQ ID NO: 2238460 - RNA, 19 nt, Homo sapiens
  misc_RNA (1)...(19): siRNA sense strand
acucguucaucaaggguga

SEQ ID NO: 2238461 - RNA, 19 nt, Homo sapiens
  misc_RNA (1)...(19): siRNA sense strand
caucuggagacuacaggaa

SEQ ID NO: 2238462 - RNA, 19 nt, Homo sapiens
  misc_RNA (1)...(19): siRNA sense strand
cguucauguuccagcgagu

SEQ ID NO: 2238463 - RNA, 19 nt, Homo sapiens
  misc_RNA (1)...(19): siRNA sense strand
gaagaugcucugcuggcua

SEQ ID NO: 2238464 - RNA, 19 nt, Homo sapiens
  misc_RNA (1)...(19): siRNA sense strand
aauuauugcuucaaggaca

SEQ ID NO: 2238465 - RNA, 19 nt, Homo sapiens
  misc_RNA (1)...(19): siRNA sense strand
ccugaagaacugagagcca

SEQ ID NO: 2238466 - RNA, 19 nt, Homo sapiens
  misc_RNA (1)...(19): siRNA sense strand
cuguggagaagaugacuaa

SEQ ID NO: 2238467 - RNA, 19 nt, Homo sapiens
  misc_RNA (1)...(19): siRNA sense strand
auuccaugauuaagggaga

SEQ ID NO: 2238468 - RNA, 19 nt, Homo sapiens
  misc_RNA (1)...(19): siRNA sense strand
guacaugacuauaucagga

SEQ ID NO: 2238469 - RNA, 19 nt, Homo sapiens
  misc_RNA (1)...(19): siRNA sense strand
ugaagaagaauauggcuca

SEQ ID NO: 2238470 - RNA, 19 nt, Homo sapiens
  misc_RNA (1)...(19): siRNA sense strand
auuucaggcuggagaacuu

SEQ ID NO: 2238471 - RNA, 19 nt, Homo sapiens
  misc_RNA (1)...(19): siRNA sense strand
cuugaagggagcuggaaca

SEQ ID NO: 2238472 - RNA, 19 nt, Homo sapiens
  misc_RNA (1)...(19): siRNA sense strand
caugauuaagggagauaca

SEQ ID NO: 2238473 - RNA, 19 nt, Homo sapiens
  misc_RNA (1)...(19): siRNA sense strand
gcacagguucucagaggca

SEQ ID NO: 2238474 - RNA, 19 nt, Homo sapiens
  misc_RNA (1)...(19): siRNA sense strand
gaagaaaaguuuaucacca

SEQ ID NO: 2238475 - RNA, 19 nt, Homo sapiens
  misc_RNA (1)...(19): siRNA sense strand
gaugaaacccucucggcuu

SEQ ID NO: 2238476 - RNA, 19 nt, Homo sapiens
  misc_RNA (1)...(19): siRNA sense strand
uaugaagggagcugggaca

SEQ ID NO: 2238477 - RNA, 19 nt, Homo sapiens
  misc_RNA (1)...(19): siRNA sense strand
gaacaagaugcucaggcuu

SEQ ID NO: 2238478 - RNA, 19 nt, Homo sapiens
  misc_RNA (1)...(19): siRNA sense strand
gaaguaaugcucagcgcca

SEQ ID NO: 2238479 - RNA, 19 nt, Homo sapiens
  misc_RNA (1)...(19): siRNA sense strand
gaguagagcugaagggaac

SEQ ID NO: 2238480 - RNA, 19 nt, Homo sapiens
  misc_RNA (1)...(19): siRNA sense strand
aguaugaauugacgggcaa

SEQ ID NO: 2238481 - RNA, 19 nt, Homo sapiens
  misc_RNA (1)...(19): siRNA sense strand
cgaguagagcugaagggaa

SEQ ID NO: 2238482 - RNA, 19 nt, Homo sapiens
  misc_RNA (1)...(19): siRNA sense strand
aggaugacguagugagcga

SEQ ID NO: 2238483 - RNA, 19 nt, Homo sapiens
  misc_RNA (1)...(19): siRNA sense strand
augccaagcaguugaagaa

SEQ ID NO: 2238484 - RNA, 19 nt, Homo sapiens
  misc_RNA (1)...(19): siRNA sense strand
aggccuauaaggaggacua

SEQ ID NO: 2238485 - RNA, 19 nt, Homo sapiens
  misc_RNA (1)...(19): siRNA sense strand
ggaaagccaugaagggacu

SEQ ID NO: 2238486 - RNA, 19 nt, Homo sapiens
  misc_RNA (1)...(19): siRNA sense strand
cucaacauccggagggaau

SEQ ID NO: 2238487 - RNA, 19 nt, Homo sapiens
  misc_RNA (1)...(19): siRNA sense strand
cgggcaaguuugaacgguu

SEQ ID NO: 2238488 - RNA, 19 nt, Homo sapiens
  misc_RNA (1)...(19): siRNA sense strand
ccaacuaugacguggagca

SEQ ID NO: 2238489 - RNA, 19 nt, Homo sapiens
  misc_RNA (1)...(19): siRNA sense strand
ccaccaagccauugagggu

SEQ ID NO: 2238490 - RNA, 19 nt, Homo sapiens
  misc_RNA (1)...(19): siRNA sense strand
ccaaagaaauuaaagaugc

SEQ ID NO: 2238491 - RNA, 19 nt, Homo sapiens
  misc_RNA (1)...(19): siRNA sense strand
augccaaagcgcugcggaa

SEQ ID NO: 2238492 - RNA, 19 nt, Homo sapiens
  misc_RNA (1)...(19): siRNA sense strand
ucacggagcaacaggcaga

SEQ ID NO: 2238493 - RNA, 19 nt, Homo sapiens
  misc_RNA (1)...(19): siRNA sense strand
uugugaugccaaagaaauu

SEQ ID NO: 2238494 - RNA, 19 nt, Homo sapiens
  misc_RNA (1)...(19): siRNA sense strand
ggaccaaugagcagaugca

SEQ ID NO: 2238495 - RNA, 19 nt, Homo sapiens
  misc_RNA (1)...(19): siRNA sense strand
ccaaugagcagaugcacca

SEQ ID NO: 2238496 - RNA, 19 nt, Homo sapiens
  misc_RNA (1)...(19): siRNA sense strand
gggaggaggaugacguagu

SEQ ID NO: 2238497 - RNA, 19 nt, Homo sapiens
  misc_RNA (1)...(19): siRNA sense strand
uggccguagugaaguguau

SEQ ID NO: 2238498 - RNA, 19 nt, Homo sapiens
  misc_RNA (1)...(19): siRNA sense strand
gaaaggcucuucaaggcua

SEQ ID NO: 2238499 - RNA, 19 nt, Homo sapiens
  misc_RNA (1)...(19): siRNA sense strand
gcagcaauguccagcggca

SEQ ID NO: 2238500 - RNA, 19 nt, Homo sapiens
  misc_RNA (1)...(19): siRNA sense strand
ucgugaggagggaggagaa

SEQ ID NO: 2238501 - RNA, 19 nt, Homo sapiens
  misc_RNA (1)...(19): siRNA sense strand
cgugaggagggaggagaaa

SEQ ID NO: 2238502 - RNA, 19 nt, Homo sapiens
  misc_RNA (1)...(19): siRNA sense strand
cgggagaucuuccggacca

SEQ ID NO: 2238503 - RNA, 19 nt, Homo sapiens
  misc_RNA (1)...(19): siRNA sense strand
aaguaugaauugacgggca

SEQ ID NO: 2238504 - RNA, 19 nt, Homo sapiens
  misc_RNA (1)...(19): siRNA sense strand
auaaggaggacuaucacaa

SEQ ID NO: 2238505 - RNA, 19 nt, Homo sapiens
  misc_RNA (1)...(19): siRNA sense strand
gggaugcauuuguggccau

SEQ ID NO: 2238506 - RNA, 19 nt, Homo sapiens
  misc_RNA (1)...(19): siRNA sense strand
gagaagacucugaccagga

SEQ ID NO: 2238507 - RNA, 19 nt, Homo sapiens
  misc_RNA (1)...(19): siRNA sense strand
agaagaugcuugugguccu

SEQ ID NO: 2238508 - RNA, 19 nt, Homo sapiens
  misc_RNA (1)...(19): siRNA sense strand
acaagucccucuacggcaa

SEQ ID NO: 2238509 - RNA, 19 nt, Homo sapiens
  misc_RNA (1)...(19): siRNA sense strand
gcagugacaaggaggccau

SEQ ID NO: 2238510 - RNA, 19 nt, Homo sapiens
  misc_RNA (1)...(19): siRNA sense strand
gggcaaguuugaacgguug

SEQ ID NO: 2238511 - RNA, 19 nt, Homo sapiens
  misc_RNA (1)...(19): siRNA sense strand
gaguagagcugaagggaac

SEQ ID NO: 2238512 - RNA, 19 nt, Homo sapiens
  misc_RNA (1)...(19): siRNA sense strand
aguaugaauugacgggcaa

SEQ ID NO: 2238513 - RNA, 19 nt, Homo sapiens
  misc_RNA (1)...(19): siRNA sense strand
cgaguagagcugaagggaa

SEQ ID NO: 2238514 - RNA, 19 nt, Homo sapiens
  misc_RNA (1)...(19): siRNA sense strand
aggaugacguagugagcga

SEQ ID NO: 2238515 - RNA, 19 nt, Homo sapiens
  misc_RNA (1)...(19): siRNA sense strand
augccaagcaguugaagaa

SEQ ID NO: 2238516 - RNA, 19 nt, Homo sapiens
  misc_RNA (1)...(19): siRNA sense strand
aggccuauaaggaggacua

SEQ ID NO: 2238517 - RNA, 19 nt, Homo sapiens
  misc_RNA (1)...(19): siRNA sense strand
ggaaagccaugaagggacu

SEQ ID NO: 2238518 - RNA, 19 nt, Homo sapiens
  misc_RNA (1)...(19): siRNA sense strand
cucaacauccggagggaau

SEQ ID NO: 2238519 - RNA, 19 nt, Homo sapiens
  misc_RNA (1)...(19): siRNA sense strand
cgggcaaguuugaacgguu

SEQ ID NO: 2238520 - RNA, 19 nt, Homo sapiens
  misc_RNA (1)...(19): siRNA sense strand
ccaacuaugacguggagca

SEQ ID NO: 2238521 - RNA, 19 nt, Homo sapiens
  misc_RNA (1)...(19): siRNA sense strand
ccaccaagccauugagggu

SEQ ID NO: 2238522 - RNA, 19 nt, Homo sapiens
  misc_RNA (1)...(19): siRNA sense strand
cacaccuaguggagacaaa

SEQ ID NO: 2238523 - RNA, 19 nt, Homo sapiens
  misc_RNA (1)...(19): siRNA sense strand
ccaaagaaauuaaagaugc

SEQ ID NO: 2238524 - RNA, 19 nt, Homo sapiens
  misc_RNA (1)...(19): siRNA sense strand
augccaaagcgcugcggaa

SEQ ID NO: 2238525 - RNA, 19 nt, Homo sapiens
  misc_RNA (1)...(19): siRNA sense strand
ucacggagcaacaggcaga

SEQ ID NO: 2238526 - RNA, 19 nt, Homo sapiens
  misc_RNA (1)...(19): siRNA sense strand
uugugaugccaaagaaauu

SEQ ID NO: 2238527 - RNA, 19 nt, Homo sapiens
  misc_RNA (1)...(19): siRNA sense strand
ggaccaaugagcagaugca

SEQ ID NO: 2238528 - RNA, 19 nt, Homo sapiens
  misc_RNA (1)...(19): siRNA sense strand
ccaaugagcagaugcacca

SEQ ID NO: 2238529 - RNA, 19 nt, Homo sapiens
  misc_RNA (1)...(19): siRNA sense strand
gggaggaggaugacguagu

SEQ ID NO: 2238530 - RNA, 19 nt, Homo sapiens
  misc_RNA (1)...(19): siRNA sense strand
uggccguagugaaguguau

SEQ ID NO: 2238531 - RNA, 19 nt, Homo sapiens
  misc_RNA (1)...(19): siRNA sense strand
gaaaggcucuucaaggcua

SEQ ID NO: 2238532 - RNA, 19 nt, Homo sapiens
  misc_RNA (1)...(19): siRNA sense strand
gcagcaauguccagcggca

SEQ ID NO: 2238533 - RNA, 19 nt, Homo sapiens
  misc_RNA (1)...(19): siRNA sense strand
ucgugaggagggaggagaa

SEQ ID NO: 2238534 - RNA, 19 nt, Homo sapiens
  misc_RNA (1)...(19): siRNA sense strand
cgugaggagggaggagaaa

SEQ ID NO: 2238535 - RNA, 19 nt, Homo sapiens
  misc_RNA (1)...(19): siRNA sense strand
cgggagaucuuccggacca

SEQ ID NO: 2238536 - RNA, 19 nt, Homo sapiens
  misc_RNA (1)...(19): siRNA sense strand
aaguaugaauugacgggca

SEQ ID NO: 2238537 - RNA, 19 nt, Homo sapiens
  misc_RNA (1)...(19): siRNA sense strand
auaaggaggacuaucacaa

SEQ ID NO: 2238538 - RNA, 19 nt, Homo sapiens
  misc_RNA (1)...(19): siRNA sense strand
gggaugcauuuguggccau

SEQ ID NO: 2238539 - RNA, 19 nt, Homo sapiens
  misc_RNA (1)...(19): siRNA sense strand
gagaagacucugaccagga

SEQ ID NO: 2238540 - RNA, 19 nt, Homo sapiens
  misc_RNA (1)...(19): siRNA sense strand
agaagaugcuugugguccu

SEQ ID NO: 2238541 - RNA, 19 nt, Homo sapiens
  misc_RNA (1)...(19): siRNA sense strand
acaagucccucuacggcaa

SEQ ID NO: 2238542 - RNA, 19 nt, Homo sapiens
  misc_RNA (1)...(19): siRNA sense strand
gcagugacaaggaggccau

SEQ ID NO: 2238543 - RNA, 19 nt, Homo sapiens
  misc_RNA (1)...(19): siRNA sense strand
gggcaaguuugaacgguug

SEQ ID NO: 2238544 - RNA, 19 nt, Homo sapiens
  misc_RNA (1)...(19): siRNA sense strand
cagugugagccgugaguuu

SEQ ID NO: 2238545 - RNA, 19 nt, Homo sapiens
  misc_RNA (1)...(19): siRNA sense strand
aaucaggaaauccgagaaa

SEQ ID NO: 2238546 - RNA, 19 nt, Homo sapiens
  misc_RNA (1)...(19): siRNA sense strand
cuauaagagaugcagaaau

SEQ ID NO: 2238547 - RNA, 19 nt, Homo sapiens
  misc_RNA (1)...(19): siRNA sense strand
uccaaugaucagaggcaaa

SEQ ID NO: 2238548 - RNA, 19 nt, Homo sapiens
  misc_RNA (1)...(19): siRNA sense strand
acaagaacaaaucaggaaa

SEQ ID NO: 2238549 - RNA, 19 nt, Homo sapiens
  misc_RNA (1)...(19): siRNA sense strand
agauugaccuuguacaaau

SEQ ID NO: 2238550 - RNA, 19 nt, Homo sapiens
  misc_RNA (1)...(19): siRNA sense strand
uguccaugugccagggaaa

SEQ ID NO: 2238551 - RNA, 19 nt, Homo sapiens
  misc_RNA (1)...(19): siRNA sense strand
gcuuauucuaggauggcua

SEQ ID NO: 2238552 - RNA, 19 nt, Homo sapiens
  misc_RNA (1)...(19): siRNA sense strand
agggaaaucgugaugagaa

SEQ ID NO: 2238553 - RNA, 19 nt, Homo sapiens
  misc_RNA (1)...(19): siRNA sense strand
accaaauggcucaggaaga

SEQ ID NO: 2238554 - RNA, 19 nt, Homo sapiens
  misc_RNA (1)...(19): siRNA sense strand
gauugaccuuguacaaaua

SEQ ID NO: 2238555 - RNA, 19 nt, Homo sapiens
  misc_RNA (1)...(19): siRNA sense strand
ugagauugaccuuguacaa

SEQ ID NO: 2238556 - RNA, 19 nt, Homo sapiens
  misc_RNA (1)...(19): siRNA sense strand
ggucagauacaucaggaca

SEQ ID NO: 2238557 - RNA, 19 nt, Homo sapiens
  misc_RNA (1)...(19): siRNA sense strand
agaauuuggacgagaccuu

SEQ ID NO: 2238558 - RNA, 19 nt, Homo sapiens
  misc_RNA (1)...(19): siRNA sense strand
agaucucaaaucagaguua

SEQ ID NO: 2238559 - RNA, 19 nt, Homo sapiens
  misc_RNA (1)...(19): siRNA sense strand
aaugaaggguuuugggaca

SEQ ID NO: 2238560 - RNA, 19 nt, Homo sapiens
  misc_RNA (1)...(19): siRNA sense strand
ccaccaaauggcucaggaa

SEQ ID NO: 2238561 - RNA, 19 nt, Homo sapiens
  misc_RNA (1)...(19): siRNA sense strand
guuaaguggaaauauggaa

SEQ ID NO: 2238562 - RNA, 19 nt, Homo sapiens
  misc_RNA (1)...(19): siRNA sense strand
cguaaggcaaugaaggguu

SEQ ID NO: 2238563 - RNA, 19 nt, Homo sapiens
  misc_RNA (1)...(19): siRNA sense strand
uuguggaugugguggccaa

SEQ ID NO: 2238564 - RNA, 19 nt, Homo sapiens
  misc_RNA (1)...(19): siRNA sense strand
gggagcaggaacucaggaa

SEQ ID NO: 2238565 - RNA, 19 nt, Homo sapiens
  misc_RNA (1)...(19): siRNA sense strand
agauguuaucagucagaau

SEQ ID NO: 2238566 - RNA, 19 nt, Homo sapiens
  misc_RNA (1)...(19): siRNA sense strand
gggacagaugagcaggcaa

SEQ ID NO: 2238567 - RNA, 19 nt, Homo sapiens
  misc_RNA (1)...(19): siRNA sense strand
gcacaagaacaaaucagga

SEQ ID NO: 2238568 - RNA, 19 nt, Homo sapiens
  misc_RNA (1)...(19): siRNA sense strand
agucagaauuuggacgaga

SEQ ID NO: 2238569 - RNA, 19 nt, Homo sapiens
  misc_RNA (1)...(19): siRNA sense strand
aggaagaugcucagcgucu

SEQ ID NO: 2238570 - RNA, 19 nt, Homo sapiens
  misc_RNA (1)...(19): siRNA sense strand
aggaacguguauugauuga

SEQ ID NO: 2238571 - RNA, 19 nt, Homo sapiens
  misc_RNA (1)...(19): siRNA sense strand
ggaaagcaaugcagggagc

SEQ ID NO: 2238572 - RNA, 19 nt, Homo sapiens
  misc_RNA (1)...(19): siRNA sense strand
acguguauugauugagauu

SEQ ID NO: 2238573 - RNA, 19 nt, Homo sapiens
  misc_RNA (1)...(19): siRNA sense strand
gaaauucuucguaaggcaa

SEQ ID NO: 2238574 - RNA, 19 nt, Homo sapiens
  misc_RNA (1)...(19): siRNA sense strand
aaguggaaauauggaagaa

SEQ ID NO: 2238575 - RNA, 19 nt, Homo sapiens
  misc_RNA (1)...(19): siRNA sense strand
cagugugagccgugaguuu

SEQ ID NO: 2238576 - RNA, 19 nt, Homo sapiens
  misc_RNA (1)...(19): siRNA sense strand
aaucaggaaauccgagaaa

SEQ ID NO: 2238577 - RNA, 19 nt, Homo sapiens
  misc_RNA (1)...(19): siRNA sense strand
cuauaagagaugcagaaau

SEQ ID NO: 2238578 - RNA, 19 nt, Homo sapiens
  misc_RNA (1)...(19): siRNA sense strand
uccaaugaucagaggcaaa

SEQ ID NO: 2238579 - RNA, 19 nt, Homo sapiens
  misc_RNA (1)...(19): siRNA sense strand
acaagaacaaaucaggaaa

SEQ ID NO: 2238580 - RNA, 19 nt, Homo sapiens
  misc_RNA (1)...(19): siRNA sense strand
agauugaccuuguacaaau

SEQ ID NO: 2238581 - RNA, 19 nt, Homo sapiens
  misc_RNA (1)...(19): siRNA sense strand
uguccaugugccagggaaa

SEQ ID NO: 2238582 - RNA, 19 nt, Homo sapiens
  misc_RNA (1)...(19): siRNA sense strand
gcuuauucuaggauggcua

SEQ ID NO: 2238583 - RNA, 19 nt, Homo sapiens
  misc_RNA (1)...(19): siRNA sense strand
agggaaaucgugaugagaa

SEQ ID NO: 2238584 - RNA, 19 nt, Homo sapiens
  misc_RNA (1)...(19): siRNA sense strand
accaaauggcucaggaaga

SEQ ID NO: 2238585 - RNA, 19 nt, Homo sapiens
  misc_RNA (1)...(19): siRNA sense strand
gauugaccuuguacaaaua

SEQ ID NO: 2238586 - RNA, 19 nt, Homo sapiens
  misc_RNA (1)...(19): siRNA sense strand
ugagauugaccuuguacaa

SEQ ID NO: 2238587 - RNA, 19 nt, Homo sapiens
  misc_RNA (1)...(19): siRNA sense strand
ggucagauacaucaggaca

SEQ ID NO: 2238588 - RNA, 19 nt, Homo sapiens
  misc_RNA (1)...(19): siRNA sense strand
agaauuuggacgagaccuu

SEQ ID NO: 2238589 - RNA, 19 nt, Homo sapiens
  misc_RNA (1)...(19): siRNA sense strand
agaucucaaaucagaguua

SEQ ID NO: 2238590 - RNA, 19 nt, Homo sapiens
  misc_RNA (1)...(19): siRNA sense strand
aaugaaggguuuugggaca

SEQ ID NO: 2238591 - RNA, 19 nt, Homo sapiens
  misc_RNA (1)...(19): siRNA sense strand
ccaccaaauggcucaggaa

SEQ ID NO: 2238592 - RNA, 19 nt, Homo sapiens
  misc_RNA (1)...(19): siRNA sense strand
guuaaguggaaauauggaa

SEQ ID NO: 2238593 - RNA, 19 nt, Homo sapiens
  misc_RNA (1)...(19): siRNA sense strand
cguaaggcaaugaaggguu

SEQ ID NO: 2238594 - RNA, 19 nt, Homo sapiens
  misc_RNA (1)...(19): siRNA sense strand
uuguggaugugguggccaa

SEQ ID NO: 2238595 - RNA, 19 nt, Homo sapiens
  misc_RNA (1)...(19): siRNA sense strand
gggagcaggaacucaggaa

SEQ ID NO: 2238596 - RNA, 19 nt, Homo sapiens
  misc_RNA (1)...(19): siRNA sense strand
agauguuaucagucagaau

SEQ ID NO: 2238597 - RNA, 19 nt, Homo sapiens
  misc_RNA (1)...(19): siRNA sense strand
gggacagaugagcaggcaa

SEQ ID NO: 2238598 - RNA, 19 nt, Homo sapiens
  misc_RNA (1)...(19): siRNA sense strand
gcacaagaacaaaucagga

SEQ ID NO: 2238599 - RNA, 19 nt, Homo sapiens
  misc_RNA (1)...(19): siRNA sense strand
agucagaauuuggacgaga

SEQ ID NO: 2238600 - RNA, 19 nt, Homo sapiens
  misc_RNA (1)...(19): siRNA sense strand
aggaagaugcucagcgucu

SEQ ID NO: 2238601 - RNA, 19 nt, Homo sapiens
  misc_RNA (1)...(19): siRNA sense strand
aggaacguguauugauuga

SEQ ID NO: 2238602 - RNA, 19 nt, Homo sapiens
  misc_RNA (1)...(19): siRNA sense strand
ggaaagcaaugcagggagc

SEQ ID NO: 2238603 - RNA, 19 nt, Homo sapiens
  misc_RNA (1)...(19): siRNA sense strand
acguguauugauugagauu

SEQ ID NO: 2238604 - RNA, 19 nt, Homo sapiens
  misc_RNA (1)...(19): siRNA sense strand
gaaauucuucguaaggcaa

SEQ ID NO: 2238605 - RNA, 19 nt, Homo sapiens
  misc_RNA (1)...(19): siRNA sense strand
aaguggaaauauggaagaa

SEQ ID NO: 2238606 - RNA, 19 nt, Homo sapiens
  misc_RNA (1)...(19): siRNA sense strand
agauaaaggaagccaucaa

SEQ ID NO: 2238607 - RNA, 19 nt, Homo sapiens
  misc_RNA (1)...(19): siRNA sense strand
gaucagaguauaagcggau

SEQ ID NO: 2238608 - RNA, 19 nt, Homo sapiens
  misc_RNA (1)...(19): siRNA sense strand
acaucagaucagaguauaa

SEQ ID NO: 2238609 - RNA, 19 nt, Homo sapiens
  misc_RNA (1)...(19): siRNA sense strand
ccuacaaagcagaauucaa

SEQ ID NO: 2238610 - RNA, 19 nt, Homo sapiens
  misc_RNA (1)...(19): siRNA sense strand
gggagauacuucaggggau

SEQ ID NO: 2238611 - RNA, 19 nt, Homo sapiens
  misc_RNA (1)...(19): siRNA sense strand
gcaaugagcacauccgaga

SEQ ID NO: 2238612 - RNA, 19 nt, Homo sapiens
  misc_RNA (1)...(19): siRNA sense strand
gggacauugagaagagcau

SEQ ID NO: 2238613 - RNA, 19 nt, Homo sapiens
  misc_RNA (1)...(19): siRNA sense strand
acggcaaggauuugaucaa

SEQ ID NO: 2238614 - RNA, 19 nt, Homo sapiens
  misc_RNA (1)...(19): siRNA sense strand
augccgagguccugcggaa

SEQ ID NO: 2238615 - RNA, 19 nt, Homo sapiens
  misc_RNA (1)...(19): siRNA sense strand
ggaaacuuugagaagacaa

SEQ ID NO: 2238616 - RNA, 19 nt, Homo sapiens
  misc_RNA (1)...(19): siRNA sense strand
ggacggaugagcaggccau

SEQ ID NO: 2238617 - RNA, 19 nt, Homo sapiens
  misc_RNA (1)...(19): siRNA sense strand
caaucuuggcucugaugaa

SEQ ID NO: 2238618 - RNA, 19 nt, Homo sapiens
  misc_RNA (1)...(19): siRNA sense strand
gcaugcuggccguggugaa

SEQ ID NO: 2238619 - RNA, 19 nt, Homo sapiens
  misc_RNA (1)...(19): siRNA sense strand
ucaagacggcuuacggcaa

SEQ ID NO: 2238620 - RNA, 19 nt, Homo sapiens
  misc_RNA (1)...(19): siRNA sense strand
agauaaaggaagccaucaa

SEQ ID NO: 2238621 - RNA, 19 nt, Homo sapiens
  misc_RNA (1)...(19): siRNA sense strand
gaucagaguauaagcggau

SEQ ID NO: 2238622 - RNA, 19 nt, Homo sapiens
  misc_RNA (1)...(19): siRNA sense strand
acaucagaucagaguauaa

SEQ ID NO: 2238623 - RNA, 19 nt, Homo sapiens
  misc_RNA (1)...(19): siRNA sense strand
ccuacaaagcagaauucaa

SEQ ID NO: 2238624 - RNA, 19 nt, Homo sapiens
  misc_RNA (1)...(19): siRNA sense strand
gggagauacuucaggggau

SEQ ID NO: 2238625 - RNA, 19 nt, Homo sapiens
  misc_RNA (1)...(19): siRNA sense strand
gcaaugagcacauccgaga

SEQ ID NO: 2238626 - RNA, 19 nt, Homo sapiens
  misc_RNA (1)...(19): siRNA sense strand
gggacauugagaagagcau

SEQ ID NO: 2238627 - RNA, 19 nt, Homo sapiens
  misc_RNA (1)...(19): siRNA sense strand
acggcaaggauuugaucaa

SEQ ID NO: 2238628 - RNA, 19 nt, Homo sapiens
  misc_RNA (1)...(19): siRNA sense strand
augccgagguccugcggaa

SEQ ID NO: 2238629 - RNA, 19 nt, Homo sapiens
  misc_RNA (1)...(19): siRNA sense strand
ggaaacuuugagaagacaa

SEQ ID NO: 2238630 - RNA, 19 nt, Homo sapiens
  misc_RNA (1)...(19): siRNA sense strand
ggacggaugagcaggccau

SEQ ID NO: 2238631 - RNA, 19 nt, Homo sapiens
  misc_RNA (1)...(19): siRNA sense strand
caaucuuggcucugaugaa

SEQ ID NO: 2238632 - RNA, 19 nt, Homo sapiens
  misc_RNA (1)...(19): siRNA sense strand
gcaugcuggccguggugaa

SEQ ID NO: 2238633 - RNA, 19 nt, Homo sapiens
  misc_RNA (1)...(19): siRNA sense strand
ucaagacggcuuacggcaa

SEQ ID NO: 2238634 - RNA, 19 nt, Homo sapiens
  misc_RNA (1)...(19): siRNA sense strand
agauaaaggaagccaucaa

SEQ ID NO: 2238635 - RNA, 19 nt, Homo sapiens
  misc_RNA (1)...(19): siRNA sense strand
gaucagaguauaagcggau

SEQ ID NO: 2238636 - RNA, 19 nt, Homo sapiens
  misc_RNA (1)...(19): siRNA sense strand
acaucagaucagaguauaa

SEQ ID NO: 2238637 - RNA, 19 nt, Homo sapiens
  misc_RNA (1)...(19): siRNA sense strand
ccuacaaagcagaauucaa

SEQ ID NO: 2238638 - RNA, 19 nt, Homo sapiens
  misc_RNA (1)...(19): siRNA sense strand
gggagauacuucaggggau

SEQ ID NO: 2238639 - RNA, 19 nt, Homo sapiens
  misc_RNA (1)...(19): siRNA sense strand
gcaaugagcacauccgaga

SEQ ID NO: 2238640 - RNA, 19 nt, Homo sapiens
  misc_RNA (1)...(19): siRNA sense strand
gggacauugagaagagcau

SEQ ID NO: 2238641 - RNA, 19 nt, Homo sapiens
  misc_RNA (1)...(19): siRNA sense strand
acggcaaggauuugaucaa

SEQ ID NO: 2238642 - RNA, 19 nt, Homo sapiens
  misc_RNA (1)...(19): siRNA sense strand
augccgagguccugcggaa

SEQ ID NO: 2238643 - RNA, 19 nt, Homo sapiens
  misc_RNA (1)...(19): siRNA sense strand
ggaaacuuugagaagacaa

SEQ ID NO: 2238644 - RNA, 19 nt, Homo sapiens
  misc_RNA (1)...(19): siRNA sense strand
ggacggaugagcaggccau

SEQ ID NO: 2238645 - RNA, 19 nt, Homo sapiens
  misc_RNA (1)...(19): siRNA sense strand
caaucuuggcucugaugaa

SEQ ID NO: 2238646 - RNA, 19 nt, Homo sapiens
  misc_RNA (1)...(19): siRNA sense strand
gcaugcuggccguggugaa

SEQ ID NO: 2238647 - RNA, 19 nt, Homo sapiens
  misc_RNA (1)...(19): siRNA sense strand
ucaagacggcuuacggcaa

SEQ ID NO: 2238648 - RNA, 19 nt, Homo sapiens
  misc_RNA (1)...(19): siRNA sense strand
gggaaagagugcugggaac

SEQ ID NO: 2238649 - RNA, 19 nt, Homo sapiens
  misc_RNA (1)...(19): siRNA sense strand
aguacagugugcaaggaaa

SEQ ID NO: 2238650 - RNA, 19 nt, Homo sapiens
  misc_RNA (1)...(19): siRNA sense strand
aguuggaacgggaguuuaa

SEQ ID NO: 2238651 - RNA, 19 nt, Homo sapiens
  misc_RNA (1)...(19): siRNA sense strand
ccauauauuagugggcaaa

SEQ ID NO: 2238652 - RNA, 19 nt, Homo sapiens
  misc_RNA (1)...(19): siRNA sense strand
uccauauauuagugggcaa

SEQ ID NO: 2238653 - RNA, 19 nt, Homo sapiens
  misc_RNA (1)...(19): siRNA sense strand
agagaaaggaggaggaguc

SEQ ID NO: 2238654 - RNA, 19 nt, Homo sapiens
  misc_RNA (1)...(19): siRNA sense strand
gguuccagggugagcgaau

SEQ ID NO: 2238655 - RNA, 19 nt, Homo sapiens
  misc_RNA (1)...(19): siRNA sense strand
uuguggugacccagagaaa

SEQ ID NO: 2238656 - RNA, 19 nt, Homo sapiens
  misc_RNA (1)...(19): siRNA sense strand
ggugcugagagcugaguuu

SEQ ID NO: 2238657 - RNA, 19 nt, Homo sapiens
  misc_RNA (1)...(19): siRNA sense strand
ggguccaugccacggguua

SEQ ID NO: 2238658 - RNA, 19 nt, Homo sapiens
  misc_RNA (1)...(19): siRNA sense strand
uggcuagcaaccagacuaa

SEQ ID NO: 2238659 - RNA, 19 nt, Homo sapiens
  misc_RNA (1)...(19): siRNA sense strand
augaaacccucuuaggaga

SEQ ID NO: 2238660 - RNA, 19 nt, Homo sapiens
  misc_RNA (1)...(19): siRNA sense strand
guacagugugcaaggaaac

SEQ ID NO: 2238661 - RNA, 19 nt, Homo sapiens
  misc_RNA (1)...(19): siRNA sense strand
ucaagauaguccuggcguu

SEQ ID NO: 2238662 - RNA, 19 nt, Homo sapiens
  misc_RNA (1)...(19): siRNA sense strand
acacagugacucuggggaa

SEQ ID NO: 2238663 - RNA, 19 nt, Homo sapiens
  misc_RNA (1)...(19): siRNA sense strand
gggaaagagugcugggaac

SEQ ID NO: 2238664 - RNA, 19 nt, Homo sapiens
  misc_RNA (1)...(19): siRNA sense strand
aguacagugugcaaggaaa

SEQ ID NO: 2238665 - RNA, 19 nt, Homo sapiens
  misc_RNA (1)...(19): siRNA sense strand
aguuggaacgggaguuuaa

SEQ ID NO: 2238666 - RNA, 19 nt, Homo sapiens
  misc_RNA (1)...(19): siRNA sense strand
ccauauauuagugggcaaa

SEQ ID NO: 2238667 - RNA, 19 nt, Homo sapiens
  misc_RNA (1)...(19): siRNA sense strand
uccauauauuagugggcaa

SEQ ID NO: 2238668 - RNA, 19 nt, Homo sapiens
  misc_RNA (1)...(19): siRNA sense strand
agagaaaggaggaggaguc

SEQ ID NO: 2238669 - RNA, 19 nt, Homo sapiens
  misc_RNA (1)...(19): siRNA sense strand
gguuccagggugagcgaau

SEQ ID NO: 2238670 - RNA, 19 nt, Homo sapiens
  misc_RNA (1)...(19): siRNA sense strand
uuguggugacccagagaaa

SEQ ID NO: 2238671 - RNA, 19 nt, Homo sapiens
  misc_RNA (1)...(19): siRNA sense strand
ggugcugagagcugaguuu

SEQ ID NO: 2238672 - RNA, 19 nt, Homo sapiens
  misc_RNA (1)...(19): siRNA sense strand
ggguccaugccacggguua

SEQ ID NO: 2238673 - RNA, 19 nt, Homo sapiens
  misc_RNA (1)...(19): siRNA sense strand
uggcuagcaaccagacuaa

SEQ ID NO: 2238674 - RNA, 19 nt, Homo sapiens
  misc_RNA (1)...(19): siRNA sense strand
augaaacccucuuaggaga

SEQ ID NO: 2238675 - RNA, 19 nt, Homo sapiens
  misc_RNA (1)...(19): siRNA sense strand
guacagugugcaaggaaac

SEQ ID NO: 2238676 - RNA, 19 nt, Homo sapiens
  misc_RNA (1)...(19): siRNA sense strand
ucaagauaguccuggcguu

SEQ ID NO: 2238677 - RNA, 19 nt, Homo sapiens
  misc_RNA (1)...(19): siRNA sense strand
acacagugacucuggggaa

SEQ ID NO: 2238678 - RNA, 19 nt, Homo sapiens
  misc_RNA (1)...(19): siRNA sense strand
caauaucagaagaggaaaa

SEQ ID NO: 2238679 - RNA, 19 nt, Homo sapiens
  misc_RNA (1)...(19): siRNA sense strand
ucuccaaauugaaagguga

SEQ ID NO: 2238680 - RNA, 19 nt, Homo sapiens
  misc_RNA (1)...(19): siRNA sense strand
ggaaccaaucuuaagaaaa

SEQ ID NO: 2238681 - RNA, 19 nt, Homo sapiens
  misc_RNA (1)...(19): siRNA sense strand
accagagacaagaguguua

SEQ ID NO: 2238682 - RNA, 19 nt, Homo sapiens
  misc_RNA (1)...(19): siRNA sense strand
aguugggaaacaagacaaa

SEQ ID NO: 2238683 - RNA, 19 nt, Homo sapiens
  misc_RNA (1)...(19): siRNA sense strand
cuucuuacaaccagagaca

SEQ ID NO: 2238684 - RNA, 19 nt, Homo sapiens
  misc_RNA (1)...(19): siRNA sense strand
uaacaauaucagaagagga

SEQ ID NO: 2238685 - RNA, 19 nt, Homo sapiens
  misc_RNA (1)...(19): siRNA sense strand
uguggauaaucuugguauu

SEQ ID NO: 2238686 - RNA, 19 nt, Homo sapiens
  misc_RNA (1)...(19): siRNA sense strand
acuuaauauugaagaggcu

SEQ ID NO: 2238687 - RNA, 19 nt, Homo sapiens
  misc_RNA (1)...(19): siRNA sense strand
ccugugugaagguggagua

SEQ ID NO: 2238688 - RNA, 19 nt, Homo sapiens
  misc_RNA (1)...(19): siRNA sense strand
agaagcuguuagagaucau

SEQ ID NO: 2238689 - RNA, 19 nt, Homo sapiens
  misc_RNA (1)...(19): siRNA sense strand
guuugggacucuugggugu

SEQ ID NO: 2238690 - RNA, 19 nt, Homo sapiens
  misc_RNA (1)...(19): siRNA sense strand
caauaucagaagaggaaaa

SEQ ID NO: 2238691 - RNA, 19 nt, Homo sapiens
  misc_RNA (1)...(19): siRNA sense strand
ucuccaaauugaaagguga

SEQ ID NO: 2238692 - RNA, 19 nt, Homo sapiens
  misc_RNA (1)...(19): siRNA sense strand
ggaaccaaucuuaagaaaa

SEQ ID NO: 2238693 - RNA, 19 nt, Homo sapiens
  misc_RNA (1)...(19): siRNA sense strand
accagagacaagaguguua

SEQ ID NO: 2238694 - RNA, 19 nt, Homo sapiens
  misc_RNA (1)...(19): siRNA sense strand
aguugggaaacaagacaaa

SEQ ID NO: 2238695 - RNA, 19 nt, Homo sapiens
  misc_RNA (1)...(19): siRNA sense strand
cuucuuacaaccagagaca

SEQ ID NO: 2238696 - RNA, 19 nt, Homo sapiens
  misc_RNA (1)...(19): siRNA sense strand
uaacaauaucagaagagga

SEQ ID NO: 2238697 - RNA, 19 nt, Homo sapiens
  misc_RNA (1)...(19): siRNA sense strand
uguggauaaucuugguauu

SEQ ID NO: 2238698 - RNA, 19 nt, Homo sapiens
  misc_RNA (1)...(19): siRNA sense strand
acuuaauauugaagaggcu

SEQ ID NO: 2238699 - RNA, 19 nt, Homo sapiens
  misc_RNA (1)...(19): siRNA sense strand
ccugugugaagguggagua

SEQ ID NO: 2238700 - RNA, 19 nt, Homo sapiens
  misc_RNA (1)...(19): siRNA sense strand
agaagcuguuagagaucau

SEQ ID NO: 2238701 - RNA, 19 nt, Homo sapiens
  misc_RNA (1)...(19): siRNA sense strand
guuugggacucuugggugu

SEQ ID NO: 2238702 - RNA, 19 nt, Homo sapiens
  misc_RNA (1)...(19): siRNA sense strand
caauaucagaagaggaaaa

SEQ ID NO: 2238703 - RNA, 19 nt, Homo sapiens
  misc_RNA (1)...(19): siRNA sense strand
ucuccaaauugaaagguga

SEQ ID NO: 2238704 - RNA, 19 nt, Homo sapiens
  misc_RNA (1)...(19): siRNA sense strand
ggaaccaaucuuaagaaaa

SEQ ID NO: 2238705 - RNA, 19 nt, Homo sapiens
  misc_RNA (1)...(19): siRNA sense strand
accagagacaagaguguua

SEQ ID NO: 2238706 - RNA, 19 nt, Homo sapiens
  misc_RNA (1)...(19): siRNA sense strand
aguugggaaacaagacaaa

SEQ ID NO: 2238707 - RNA, 19 nt, Homo sapiens
  misc_RNA (1)...(19): siRNA sense strand
cuucuuacaaccagagaca

SEQ ID NO: 2238708 - RNA, 19 nt, Homo sapiens
  misc_RNA (1)...(19): siRNA sense strand
uaacaauaucagaagagga

SEQ ID NO: 2238709 - RNA, 19 nt, Homo sapiens
  misc_RNA (1)...(19): siRNA sense strand
uguggauaaucuugguauu

SEQ ID NO: 2238710 - RNA, 19 nt, Homo sapiens
  misc_RNA (1)...(19): siRNA sense strand
acuuaauauugaagaggcu

SEQ ID NO: 2238711 - RNA, 19 nt, Homo sapiens
  misc_RNA (1)...(19): siRNA sense strand
ccugugugaagguggagua

SEQ ID NO: 2238712 - RNA, 19 nt, Homo sapiens
  misc_RNA (1)...(19): siRNA sense strand
agaagcuguuagagaucau

SEQ ID NO: 2238713 - RNA, 19 nt, Homo sapiens
  misc_RNA (1)...(19): siRNA sense strand
guuugggacucuugggugu

SEQ ID NO: 2238714 - RNA, 19 nt, Homo sapiens
  misc_RNA (1)...(19): siRNA sense strand
caauaucagaagaggaaaa

SEQ ID NO: 2238715 - RNA, 19 nt, Homo sapiens
  misc_RNA (1)...(19): siRNA sense strand
ucuccaaauugaaagguga

SEQ ID NO: 2238716 - RNA, 19 nt, Homo sapiens
  misc_RNA (1)...(19): siRNA sense strand
ggaaccaaucuuaagaaaa

SEQ ID NO: 2238717 - RNA, 19 nt, Homo sapiens
  misc_RNA (1)...(19): siRNA sense strand
accagagacaagaguguua

SEQ ID NO: 2238718 - RNA, 19 nt, Homo sapiens
  misc_RNA (1)...(19): siRNA sense strand
aguugggaaacaagacaaa

SEQ ID NO: 2238719 - RNA, 19 nt, Homo sapiens
  misc_RNA (1)...(19): siRNA sense strand
cuucuuacaaccagagaca

SEQ ID NO: 2238720 - RNA, 19 nt, Homo sapiens
  misc_RNA (1)...(19): siRNA sense strand
uaacaauaucagaagagga

SEQ ID NO: 2238721 - RNA, 19 nt, Homo sapiens
  misc_RNA (1)...(19): siRNA sense strand
uguggauaaucuugguauu

SEQ ID NO: 2238722 - RNA, 19 nt, Homo sapiens
  misc_RNA (1)...(19): siRNA sense strand
acuuaauauugaagaggcu

SEQ ID NO: 2238723 - RNA, 19 nt, Homo sapiens
  misc_RNA (1)...(19): siRNA sense strand
ccugugugaagguggagua

SEQ ID NO: 2238724 - RNA, 19 nt, Homo sapiens
  misc_RNA (1)...(19): siRNA sense strand
agaagcuguuagagaucau

SEQ ID NO: 2238725 - RNA, 19 nt, Homo sapiens
  misc_RNA (1)...(19): siRNA sense strand
guuugggacucuugggugu

SEQ ID NO: 2238726 - RNA, 19 nt, Homo sapiens
  misc_RNA (1)...(19): siRNA sense strand
caauaucagaagaggaaaa

SEQ ID NO: 2238727 - RNA, 19 nt, Homo sapiens
  misc_RNA (1)...(19): siRNA sense strand
ucuccaaauugaaagguga

SEQ ID NO: 2238728 - RNA, 19 nt, Homo sapiens
  misc_RNA (1)...(19): siRNA sense strand
accagagacaagaguguua

SEQ ID NO: 2238729 - RNA, 19 nt, Homo sapiens
  misc_RNA (1)...(19): siRNA sense strand
aguugggaaacaagacaaa

SEQ ID NO: 2238730 - RNA, 19 nt, Homo sapiens
  misc_RNA (1)...(19): siRNA sense strand
cuucuuacaaccagagaca

SEQ ID NO: 2238731 - RNA, 19 nt, Homo sapiens
  misc_RNA (1)...(19): siRNA sense strand
uaacaauaucagaagagga

SEQ ID NO: 2238732 - RNA, 19 nt, Homo sapiens
  misc_RNA (1)...(19): siRNA sense strand
acuuaauauugaagaggcu

SEQ ID NO: 2238733 - RNA, 19 nt, Homo sapiens
  misc_RNA (1)...(19): siRNA sense strand
ccugugugaagguggagua

SEQ ID NO: 2238734 - RNA, 19 nt, Homo sapiens
  misc_RNA (1)...(19): siRNA sense strand
agaagcuguuagagaucau

SEQ ID NO: 2238735 - RNA, 19 nt, Homo sapiens
  misc_RNA (1)...(19): siRNA sense strand
guuugggacucuugggugu

SEQ ID NO: 2238736 - RNA, 19 nt, Homo sapiens
  misc_RNA (1)...(19): siRNA sense strand
aggacuaugacguggagau

SEQ ID NO: 2238737 - RNA, 19 nt, Homo sapiens
  misc_RNA (1)...(19): siRNA sense strand
uucccaaaguggacaacaa

SEQ ID NO: 2238738 - RNA, 19 nt, Homo sapiens
  misc_RNA (1)...(19): siRNA sense strand
uguggaaccaggagaggau

SEQ ID NO: 2238739 - RNA, 19 nt, Homo sapiens
  misc_RNA (1)...(19): siRNA sense strand
gaagaugccucauucccaa

SEQ ID NO: 2238740 - RNA, 19 nt, Homo sapiens
  misc_RNA (1)...(19): siRNA sense strand
uggccaggaacaagccuaa

SEQ ID NO: 2238741 - RNA, 19 nt, Homo sapiens
  misc_RNA (1)...(19): siRNA sense strand
aggacuaugacguggagau

SEQ ID NO: 2238742 - RNA, 19 nt, Homo sapiens
  misc_RNA (1)...(19): siRNA sense strand
uucccaaaguggacaacaa

SEQ ID NO: 2238743 - RNA, 19 nt, Homo sapiens
  misc_RNA (1)...(19): siRNA sense strand
uguggaaccaggagaggau

SEQ ID NO: 2238744 - RNA, 19 nt, Homo sapiens
  misc_RNA (1)...(19): siRNA sense strand
gaagaugccucauucccaa

SEQ ID NO: 2238745 - RNA, 19 nt, Homo sapiens
  misc_RNA (1)...(19): siRNA sense strand
uggccaggaacaagccuaa

SEQ ID NO: 2238746 - RNA, 19 nt, Homo sapiens
  misc_RNA (1)...(19): siRNA sense strand
aggacuaugacguggagau

SEQ ID NO: 2238747 - RNA, 19 nt, Homo sapiens
  misc_RNA (1)...(19): siRNA sense strand
uucccaaaguggacaacaa

SEQ ID NO: 2238748 - RNA, 19 nt, Homo sapiens
  misc_RNA (1)...(19): siRNA sense strand
uguggaaccaggagaggau

SEQ ID NO: 2238749 - RNA, 19 nt, Homo sapiens
  misc_RNA (1)...(19): siRNA sense strand
gaagaugccucauucccaa

SEQ ID NO: 2238750 - RNA, 19 nt, Homo sapiens
  misc_RNA (1)...(19): siRNA sense strand
uggccaggaacaagccuaa

SEQ ID NO: 2238751 - RNA, 19 nt, Homo sapiens
  misc_RNA (1)...(19): siRNA sense strand
aggaggaggaggaggauga

SEQ ID NO: 2238752 - RNA, 19 nt, Homo sapiens
  misc_RNA (1)...(19): siRNA sense strand
augaagaggaggaggagga

SEQ ID NO: 2238753 - RNA, 19 nt, Homo sapiens
  misc_RNA (1)...(19): siRNA sense strand
gaacacagcaagagugcca

SEQ ID NO: 2238754 - RNA, 19 nt, Homo sapiens
  misc_RNA (1)...(19): siRNA sense strand
gcucuaagaucauggccga

SEQ ID NO: 2238755 - RNA, 19 nt, Homo sapiens
  misc_RNA (1)...(19): siRNA sense strand
aagaggaggaggaggacuu

SEQ ID NO: 2238756 - RNA, 19 nt, Homo sapiens
  misc_RNA (1)...(19): siRNA sense strand
cgugauaagcugacccaga

SEQ ID NO: 2238757 - RNA, 19 nt, Homo sapiens
  misc_RNA (1)...(19): siRNA sense strand
ggguagagaugaccgagga

SEQ ID NO: 2238758 - RNA, 19 nt, Homo sapiens
  misc_RNA (1)...(19): siRNA sense strand
cagaggcagugcugggaga

SEQ ID NO: 2238759 - RNA, 19 nt, Homo sapiens
  misc_RNA (1)...(19): siRNA sense strand
uggaauucccagcgccuaa

SEQ ID NO: 2238760 - RNA, 19 nt, Homo sapiens
  misc_RNA (1)...(19): siRNA sense strand
cugcaugagaucugcucua

SEQ ID NO: 2238761 - RNA, 19 nt, Homo sapiens
  misc_RNA (1)...(19): siRNA sense strand
ugcuaaaccuguuggggua

SEQ ID NO: 2238762 - RNA, 19 nt, Homo sapiens
  misc_RNA (1)...(19): siRNA sense strand
aggaugaugaugaugaaga

SEQ ID NO: 2238763 - RNA, 19 nt, Homo sapiens
  misc_RNA (1)...(19): siRNA sense strand
augaugaagaggaggagga

SEQ ID NO: 2238764 - RNA, 19 nt, Homo sapiens
  misc_RNA (1)...(19): siRNA sense strand
cccaagaggaggagaagcu

SEQ ID NO: 2238765 - RNA, 19 nt, Homo sapiens
  misc_RNA (1)...(19): siRNA sense strand
cuccagcagccgugaacaa

SEQ ID NO: 2238766 - RNA, 19 nt, Homo sapiens
  misc_RNA (1)...(19): siRNA sense strand
aggaggaugaugaugauga

SEQ ID NO: 2238767 - RNA, 19 nt, Homo sapiens
  misc_RNA (1)...(19): siRNA sense strand
agguuuugcucauggagaa

SEQ ID NO: 2238768 - RNA, 19 nt, Homo sapiens
  misc_RNA (1)...(19): siRNA sense strand
aggaggaggaggaggauga

SEQ ID NO: 2238769 - RNA, 19 nt, Homo sapiens
  misc_RNA (1)...(19): siRNA sense strand
augaagaggaggaggagga

SEQ ID NO: 2238770 - RNA, 19 nt, Homo sapiens
  misc_RNA (1)...(19): siRNA sense strand
gaacacagcaagagugcca

SEQ ID NO: 2238771 - RNA, 19 nt, Homo sapiens
  misc_RNA (1)...(19): siRNA sense strand
gcucuaagaucauggccga

SEQ ID NO: 2238772 - RNA, 19 nt, Homo sapiens
  misc_RNA (1)...(19): siRNA sense strand
aagaggaggaggaggacuu

SEQ ID NO: 2238773 - RNA, 19 nt, Homo sapiens
  misc_RNA (1)...(19): siRNA sense strand
cgugauaagcugacccaga

SEQ ID NO: 2238774 - RNA, 19 nt, Homo sapiens
  misc_RNA (1)...(19): siRNA sense strand
ggguagagaugaccgagga

SEQ ID NO: 2238775 - RNA, 19 nt, Homo sapiens
  misc_RNA (1)...(19): siRNA sense strand
cagaggcagugcugggaga

SEQ ID NO: 2238776 - RNA, 19 nt, Homo sapiens
  misc_RNA (1)...(19): siRNA sense strand
uggaauucccagcgccuaa

SEQ ID NO: 2238777 - RNA, 19 nt, Homo sapiens
  misc_RNA (1)...(19): siRNA sense strand
cugcaugagaucugcucua

SEQ ID NO: 2238778 - RNA, 19 nt, Homo sapiens
  misc_RNA (1)...(19): siRNA sense strand
ugcuaaaccuguuggggua

SEQ ID NO: 2238779 - RNA, 19 nt, Homo sapiens
  misc_RNA (1)...(19): siRNA sense strand
aggaugaugaugaugaaga

SEQ ID NO: 2238780 - RNA, 19 nt, Homo sapiens
  misc_RNA (1)...(19): siRNA sense strand
augaugaagaggaggagga

SEQ ID NO: 2238781 - RNA, 19 nt, Homo sapiens
  misc_RNA (1)...(19): siRNA sense strand
cccaagaggaggagaagcu

SEQ ID NO: 2238782 - RNA, 19 nt, Homo sapiens
  misc_RNA (1)...(19): siRNA sense strand
cuccagcagccgugaacaa

SEQ ID NO: 2238783 - RNA, 19 nt, Homo sapiens
  misc_RNA (1)...(19): siRNA sense strand
aggaggaugaugaugauga

SEQ ID NO: 2238784 - RNA, 19 nt, Homo sapiens
  misc_RNA (1)...(19): siRNA sense strand
agguuuugcucauggagaa

SEQ ID NO: 2238785 - RNA, 19 nt, Homo sapiens
  misc_RNA (1)...(19): siRNA sense strand
gagaagaggagaaggaaaa

SEQ ID NO: 2238786 - RNA, 19 nt, Homo sapiens
  misc_RNA (1)...(19): siRNA sense strand
agagaagaggagaaggaaa

SEQ ID NO: 2238787 - RNA, 19 nt, Homo sapiens
  misc_RNA (1)...(19): siRNA sense strand
ggcuugagguguugggaau

SEQ ID NO: 2238788 - RNA, 19 nt, Homo sapiens
  misc_RNA (1)...(19): siRNA sense strand
guaaaguguguauggacaa

SEQ ID NO: 2238789 - RNA, 19 nt, Homo sapiens
  misc_RNA (1)...(19): siRNA sense strand
ccauuuugguuaaaggaaa

SEQ ID NO: 2238790 - RNA, 19 nt, Homo sapiens
  misc_RNA (1)...(19): siRNA sense strand
aaagagaagaggagaagga

SEQ ID NO: 2238791 - RNA, 19 nt, Homo sapiens
  misc_RNA (1)...(19): siRNA sense strand
ccugacaacuggagagaac

SEQ ID NO: 2238792 - RNA, 19 nt, Homo sapiens
  misc_RNA (1)...(19): siRNA sense strand
ugcaaugaguacugaagaa

SEQ ID NO: 2238793 - RNA, 19 nt, Homo sapiens
  misc_RNA (1)...(19): siRNA sense strand
uguaaaguguguauggaca

SEQ ID NO: 2238794 - RNA, 19 nt, Homo sapiens
  misc_RNA (1)...(19): siRNA sense strand
ugacaacuggagagaacua

SEQ ID NO: 2238795 - RNA, 19 nt, Homo sapiens
  misc_RNA (1)...(19): siRNA sense strand
agaagaacgaacuuguaaa

SEQ ID NO: 2238796 - RNA, 19 nt, Homo sapiens
  misc_RNA (1)...(19): siRNA sense strand
ugaugagauucaagguaga

SEQ ID NO: 2238797 - RNA, 19 nt, Homo sapiens
  misc_RNA (1)...(19): siRNA sense strand
guucuugauacgaaugaaa

SEQ ID NO: 2238798 - RNA, 19 nt, Homo sapiens
  misc_RNA (1)...(19): siRNA sense strand
guuaaaucugccuuggaaa

SEQ ID NO: 2238799 - RNA, 19 nt, Homo sapiens
  misc_RNA (1)...(19): siRNA sense strand
guguauggacaaagaaguu

SEQ ID NO: 2238800 - RNA, 19 nt, Homo sapiens
  misc_RNA (1)...(19): siRNA sense strand
uuauauaggaccuggagau

SEQ ID NO: 2238801 - RNA, 19 nt, Homo sapiens
  misc_RNA (1)...(19): siRNA sense strand
gauacgaaugaaaggccaa

SEQ ID NO: 2238802 - RNA, 19 nt, Homo sapiens
  misc_RNA (1)...(19): siRNA sense strand
guauauuccaacagaagau

SEQ ID NO: 2238803 - RNA, 19 nt, Homo sapiens
  misc_RNA (1)...(19): siRNA sense strand
aaggaaaugcugcggccaa

SEQ ID NO: 2238804 - RNA, 19 nt, Homo sapiens
  misc_RNA (1)...(19): siRNA sense strand
ucuuaauucuagagcaguu

SEQ ID NO: 2238805 - RNA, 19 nt, Homo sapiens
  misc_RNA (1)...(19): siRNA sense strand
gaagaacaauugaggaggu

SEQ ID NO: 2238806 - RNA, 19 nt, Homo sapiens
  misc_RNA (1)...(19): siRNA sense strand
cagauuggacaaacagcaa

SEQ ID NO: 2238807 - RNA, 19 nt, Homo sapiens
  misc_RNA (1)...(19): siRNA sense strand
gguucuuacuccagccuuu

SEQ ID NO: 2238808 - RNA, 19 nt, Homo sapiens
  misc_RNA (1)...(19): siRNA sense strand
gcacaaaacugccucccaa

SEQ ID NO: 2238809 - RNA, 19 nt, Homo sapiens
  misc_RNA (1)...(19): siRNA sense strand
guggauaagaauaugaagu

SEQ ID NO: 2238810 - RNA, 19 nt, Homo sapiens
  misc_RNA (1)...(19): siRNA sense strand
aaccaaaggaugaugcuau

SEQ ID NO: 2238811 - RNA, 19 nt, Homo sapiens
  misc_RNA (1)...(19): siRNA sense strand
ucauuaauucggaagaaca

SEQ ID NO: 2238812 - RNA, 19 nt, Homo sapiens
  misc_RNA (1)...(19): siRNA sense strand
uuaaaucugccuuggaaau

SEQ ID NO: 2238813 - RNA, 19 nt, Homo sapiens
  misc_RNA (1)...(19): siRNA sense strand
ugucauuaauucggaagaa

SEQ ID NO: 2238814 - RNA, 19 nt, Homo sapiens
  misc_RNA (1)...(19): siRNA sense strand
cagaagauguuucaggucu

SEQ ID NO: 2238815 - RNA, 19 nt, Homo sapiens
  misc_RNA (1)...(19): siRNA sense strand
gaggagguugcaagaagaa

SEQ ID NO: 2238816 - RNA, 19 nt, Homo sapiens
  misc_RNA (1)...(19): siRNA sense strand
ucaaaagcauaaacagcua

SEQ ID NO: 2238817 - RNA, 19 nt, Homo sapiens
  misc_RNA (1)...(19): siRNA sense strand
cuagagcaguugaagacau

SEQ ID NO: 2238818 - RNA, 19 nt, Homo sapiens
  misc_RNA (1)...(19): siRNA sense strand
ggagaugauccauggguag

SEQ ID NO: 2238819 - RNA, 19 nt, Homo sapiens
  misc_RNA (1)...(19): siRNA sense strand
acugggaaccaaaggauga

SEQ ID NO: 2238820 - RNA, 19 nt, Homo sapiens
  misc_RNA (1)...(19): siRNA sense strand
auuuauuccuuguggucau

SEQ ID NO: 2238821 - RNA, 19 nt, Homo sapiens
  misc_RNA (1)...(19): siRNA sense strand
cuggaaacuaggagacagu

SEQ ID NO: 2238822 - RNA, 19 nt, Homo sapiens
  misc_RNA (1)...(19): siRNA sense strand
acaauugacaugugugcuu

SEQ ID NO: 2238823 - RNA, 19 nt, Homo sapiens
  misc_RNA (1)...(19): siRNA sense strand
gguaagaacuacugagaaa

SEQ ID NO: 2238824 - RNA, 19 nt, Homo sapiens
  misc_RNA (1)...(19): siRNA sense strand
caucaauaaggaagaagaa

SEQ ID NO: 2238825 - RNA, 19 nt, Homo sapiens
  misc_RNA (1)...(19): siRNA sense strand
cuauaaaucacuugagguu

SEQ ID NO: 2238826 - RNA, 19 nt, Homo sapiens
  misc_RNA (1)...(19): siRNA sense strand
agugaagaagcuagauuaa

SEQ ID NO: 2238827 - RNA, 19 nt, Homo sapiens
  misc_RNA (1)...(19): siRNA sense strand
ugggcagguuguagauaua

SEQ ID NO: 2238828 - RNA, 19 nt, Homo sapiens
  misc_RNA (1)...(19): siRNA sense strand
ucacuguggaggagggcua

SEQ ID NO: 2238829 - RNA, 19 nt, Homo sapiens
  misc_RNA (1)...(19): siRNA sense strand
gugaaggugauaaaguaaa

SEQ ID NO: 2238830 - RNA, 19 nt, Homo sapiens
  misc_RNA (1)...(19): siRNA sense strand
gaaagagauuaguacugaa

SEQ ID NO: 2238831 - RNA, 19 nt, Homo sapiens
  misc_RNA (1)...(19): siRNA sense strand
gugaaugcucagaaagaca

SEQ ID NO: 2238832 - RNA, 19 nt, Homo sapiens
  misc_RNA (1)...(19): siRNA sense strand
aggaagaagaauuuguaga

SEQ ID NO: 2238833 - RNA, 19 nt, Homo sapiens
  misc_RNA (1)...(19): siRNA sense strand
agacaggccaucugagaca

SEQ ID NO: 2238834 - RNA, 19 nt, Homo sapiens
  misc_RNA (1)...(19): siRNA sense strand
cuugaggagugucugguaa

SEQ ID NO: 2238835 - RNA, 19 nt, Homo sapiens
  misc_RNA (1)...(19): siRNA sense strand
agacuucauuacagaaaga

SEQ ID NO: 2238836 - RNA, 19 nt, Homo sapiens
  misc_RNA (1)...(19): siRNA sense strand
guacaagaagcuauacgaa

SEQ ID NO: 2238837 - RNA, 19 nt, Homo sapiens
  misc_RNA (1)...(19): siRNA sense strand
ggguucaguuucaaggaca

SEQ ID NO: 2238838 - RNA, 19 nt, Homo sapiens
  misc_RNA (1)...(19): siRNA sense strand
agcuguagauagauggcaa

SEQ ID NO: 2238839 - RNA, 19 nt, Homo sapiens
  misc_RNA (1)...(19): siRNA sense strand
gaucuuuacuuuugggaca

SEQ ID NO: 2238840 - RNA, 19 nt, Homo sapiens
  misc_RNA (1)...(19): siRNA sense strand
cagugaagacccuugggaa

SEQ ID NO: 2238841 - RNA, 19 nt, Homo sapiens
  misc_RNA (1)...(19): siRNA sense strand
gguucaguuucaaggacau

SEQ ID NO: 2238842 - RNA, 19 nt, Homo sapiens
  misc_RNA (1)...(19): siRNA sense strand
aguuggaagacacaggaaa

SEQ ID NO: 2238843 - RNA, 19 nt, Homo sapiens
  misc_RNA (1)...(19): siRNA sense strand
ggucagaacacaggcgaca

SEQ ID NO: 2238844 - RNA, 19 nt, Homo sapiens
  misc_RNA (1)...(19): siRNA sense strand
uagugaaugcucagaaaga

SEQ ID NO: 2238845 - RNA, 19 nt, Homo sapiens
  misc_RNA (1)...(19): siRNA sense strand
guuucaaggacauuaagaa

SEQ ID NO: 2238846 - RNA, 19 nt, Homo sapiens
  misc_RNA (1)...(19): siRNA sense strand
gauuaguacugaagagcag

SEQ ID NO: 2238847 - RNA, 19 nt, Homo sapiens
  misc_RNA (1)...(19): siRNA sense strand
cugcaagaggagaagcuuu

SEQ ID NO: 2238848 - RNA, 19 nt, Homo sapiens
  misc_RNA (1)...(19): siRNA sense strand
gugaagacccuugggaaca

SEQ ID NO: 2238849 - RNA, 19 nt, Homo sapiens
  misc_RNA (1)...(19): siRNA sense strand
guauagugaagaagcuaga

SEQ ID NO: 2238850 - RNA, 19 nt, Homo sapiens
  misc_RNA (1)...(19): siRNA sense strand
aacagaagggacaagaaua

SEQ ID NO: 2238851 - RNA, 19 nt, Homo sapiens
  misc_RNA (1)...(19): siRNA sense strand
ucuuuauacuggugaagga

SEQ ID NO: 2238852 - RNA, 19 nt, Homo sapiens
  misc_RNA (1)...(19): siRNA sense strand
gcagauuuaucaacggcuu

SEQ ID NO: 2238853 - RNA, 19 nt, Homo sapiens
  misc_RNA (1)...(19): siRNA sense strand
guugaaaacuaucugggaa

SEQ ID NO: 2238854 - RNA, 19 nt, Homo sapiens
  misc_RNA (1)...(19): siRNA sense strand
auaaaucacuugagguucu

SEQ ID NO: 2238855 - RNA, 19 nt, Homo sapiens
  misc_RNA (1)...(19): siRNA sense strand
agaacagaagggacaagaa

SEQ ID NO: 2238856 - RNA, 19 nt, Homo sapiens
  misc_RNA (1)...(19): siRNA sense strand
cagacaucaauaaggaaga

SEQ ID NO: 2238857 - RNA, 19 nt, Homo sapiens
  misc_RNA (1)...(19): siRNA sense strand
acaucuagucacuuguaaa

SEQ ID NO: 2238858 - RNA, 19 nt, Homo sapiens
  misc_RNA (1)...(19): siRNA sense strand
acaucaauaaggaagaaga

SEQ ID NO: 2238859 - RNA, 19 nt, Homo sapiens
  misc_RNA (1)...(19): siRNA sense strand
gcuugcaagagcuggauuu

SEQ ID NO: 2238860 - RNA, 19 nt, Homo sapiens
  misc_RNA (1)...(19): siRNA sense strand
agugaagacccuugggaac

SEQ ID NO: 2238861 - RNA, 19 nt, Homo sapiens
  misc_RNA (1)...(19): siRNA sense strand
gugaguucugauaggaauu

SEQ ID NO: 2238862 - RNA, 19 nt, Homo sapiens
  misc_RNA (1)...(19): siRNA sense strand
gugaccaagugcagugcuu

SEQ ID NO: 2238863 - RNA, 19 nt, Homo sapiens
  misc_RNA (1)...(19): siRNA sense strand
ggacagagaaagagccaag

SEQ ID NO: 2238864 - RNA, 19 nt, Homo sapiens
  misc_RNA (1)...(19): siRNA sense strand
ccacugagaacgagccaga

SEQ ID NO: 2238865 - RNA, 19 nt, Homo sapiens
  misc_RNA (1)...(19): siRNA sense strand
uugaaacuggacagagaaa

SEQ ID NO: 2238866 - RNA, 19 nt, Homo sapiens
  misc_RNA (1)...(19): siRNA sense strand
uugcaaaggaaaccaacaa

SEQ ID NO: 2238867 - RNA, 19 nt, Homo sapiens
  misc_RNA (1)...(19): siRNA sense strand
agaagaaagaauuugagga

SEQ ID NO: 2238868 - RNA, 19 nt, Homo sapiens
  misc_RNA (1)...(19): siRNA sense strand
gaauaucagugguggacac

SEQ ID NO: 2238869 - RNA, 19 nt, Homo sapiens
  misc_RNA (1)...(19): siRNA sense strand
cguugguggcagagaucau

SEQ ID NO: 2238870 - RNA, 19 nt, Homo sapiens
  misc_RNA (1)...(19): siRNA sense strand
cugaauuuggcaaugacaa

SEQ ID NO: 2238871 - RNA, 19 nt, Homo sapiens
  misc_RNA (1)...(19): siRNA sense strand
agaggaagauggugcgaga

SEQ ID NO: 2238872 - RNA, 19 nt, Homo sapiens
  misc_RNA (1)...(19): siRNA sense strand
ggauaaccguauugcccaa

SEQ ID NO: 2238873 - RNA, 19 nt, Homo sapiens
  misc_RNA (1)...(19): siRNA sense strand
uggcaugaacacaggauau

SEQ ID NO: 2238874 - RNA, 19 nt, Homo sapiens
  misc_RNA (1)...(19): siRNA sense strand
cugaaugaggcguggcuga

SEQ ID NO: 2238875 - RNA, 19 nt, Homo sapiens
  misc_RNA (1)...(19): siRNA sense strand
ccaucacggaccaggagaa

SEQ ID NO: 2238876 - RNA, 19 nt, Homo sapiens
  misc_RNA (1)...(19): siRNA sense strand
aggaagauggugcgagagu

SEQ ID NO: 2238877 - RNA, 19 nt, Homo sapiens
  misc_RNA (1)...(19): siRNA sense strand
cccugaaauuggaggauuc

SEQ ID NO: 2238878 - RNA, 19 nt, Homo sapiens
  misc_RNA (1)...(19): siRNA sense strand
cguaugaagaccacgggau

SEQ ID NO: 2238879 - RNA, 19 nt, Homo sapiens
  misc_RNA (1)...(19): siRNA sense strand
agcaaagauccaggaaaua

SEQ ID NO: 2238880 - RNA, 19 nt, Homo sapiens
  misc_RNA (1)...(19): siRNA sense strand
auagcaaagauccaggaaa

SEQ ID NO: 2238881 - RNA, 19 nt, Homo sapiens
  misc_RNA (1)...(19): siRNA sense strand
ggaacagaggcgcugguga

SEQ ID NO: 2238882 - RNA, 19 nt, Homo sapiens
  misc_RNA (1)...(19): siRNA sense strand
uggaggauucuguggcgua

SEQ ID NO: 2238883 - RNA, 19 nt, Homo sapiens
  misc_RNA (1)...(19): siRNA sense strand
cugauuggcaagagacaaa

SEQ ID NO: 2238884 - RNA, 19 nt, Homo sapiens
  misc_RNA (1)...(19): siRNA sense strand
gacaagagaaggagggcau

SEQ ID NO: 2238885 - RNA, 19 nt, Homo sapiens
  misc_RNA (1)...(19): siRNA sense strand
caggaaaucuccauggaca

SEQ ID NO: 2238886 - RNA, 19 nt, Homo sapiens
  misc_RNA (1)...(19): siRNA sense strand
uguauauugcugaggaaau

SEQ ID NO: 2238887 - RNA, 19 nt, Homo sapiens
  misc_RNA (1)...(19): siRNA sense strand
ucacaagggcagaaaagaa

SEQ ID NO: 2238888 - RNA, 19 nt, Homo sapiens
  misc_RNA (1)...(19): siRNA sense strand
gagcugugucagauggcua

SEQ ID NO: 2238889 - RNA, 19 nt, Homo sapiens
  misc_RNA (1)...(19): siRNA sense strand
aggaagaggcgaagacuac

SEQ ID NO: 2238890 - RNA, 19 nt, Homo sapiens
  misc_RNA (1)...(19): siRNA sense strand
acuuuggagauuugaguuu

SEQ ID NO: 2238891 - RNA, 19 nt, Homo sapiens
  misc_RNA (1)...(19): siRNA sense strand
cacaagggcagaaaagaaa

SEQ ID NO: 2238892 - RNA, 19 nt, Homo sapiens
  misc_RNA (1)...(19): siRNA sense strand
uggcaagagacaaagacca

SEQ ID NO: 2238893 - RNA, 19 nt, Homo sapiens
  misc_RNA (1)...(19): siRNA sense strand
agaacuagcaaaugagaua

SEQ ID NO: 2238894 - RNA, 19 nt, Homo sapiens
  misc_RNA (1)...(19): siRNA sense strand
gcucaaaagcagaugaaua

SEQ ID NO: 2238895 - RNA, 19 nt, Homo sapiens
  misc_RNA (1)...(19): siRNA sense strand
acacguagaaauugggaaa

SEQ ID NO: 2238896 - RNA, 19 nt, Homo sapiens
  misc_RNA (1)...(19): siRNA sense strand
ugguacaaauguuggauaa

SEQ ID NO: 2238897 - RNA, 19 nt, Homo sapiens
  misc_RNA (1)...(19): siRNA sense strand
ggguggaaaugaaggaaaa

SEQ ID NO: 2238898 - RNA, 19 nt, Homo sapiens
  misc_RNA (1)...(19): siRNA sense strand
cggaaagcuucgaugggaa

SEQ ID NO: 2238899 - RNA, 19 nt, Homo sapiens
  misc_RNA (1)...(19): siRNA sense strand
ccacaaagugaaagaagau

SEQ ID NO: 2238900 - RNA, 19 nt, Homo sapiens
  misc_RNA (1)...(19): siRNA sense strand
gugcagacugugagagauu

SEQ ID NO: 2238901 - RNA, 19 nt, Homo sapiens
  misc_RNA (1)...(19): siRNA sense strand
aggaugaagccuacaaaua

SEQ ID NO: 2238902 - RNA, 19 nt, Homo sapiens
  misc_RNA (1)...(19): siRNA sense strand
agugaagaaccuagauaua

SEQ ID NO: 2238903 - RNA, 19 nt, Homo sapiens
  misc_RNA (1)...(19): siRNA sense strand
ccaccaacacguagaaauu

SEQ ID NO: 2238904 - RNA, 19 nt, Homo sapiens
  misc_RNA (1)...(19): siRNA sense strand
gcaaagagguauaugguag

SEQ ID NO: 2238905 - RNA, 19 nt, Homo sapiens
  misc_RNA (1)...(19): siRNA sense strand
gagaagaggaggguggaaa

SEQ ID NO: 2238906 - RNA, 19 nt, Homo sapiens
  misc_RNA (1)...(19): siRNA sense strand
acauuaaaguggagcaguu

SEQ ID NO: 2238907 - RNA, 19 nt, Homo sapiens
  misc_RNA (1)...(19): siRNA sense strand
aggaagacaucguggaagu

SEQ ID NO: 2238908 - RNA, 19 nt, Homo sapiens
  misc_RNA (1)...(19): siRNA sense strand
gaugauaagaagaugaaga

SEQ ID NO: 2238909 - RNA, 19 nt, Homo sapiens
  misc_RNA (1)...(19): siRNA sense strand
uagugaagauggaguagaa

SEQ ID NO: 2238910 - RNA, 19 nt, Homo sapiens
  misc_RNA (1)...(19): siRNA sense strand
gcaaaugccugaagggaag

SEQ ID NO: 2238911 - RNA, 19 nt, Homo sapiens
  misc_RNA (1)...(19): siRNA sense strand
ccauugagucauugaguuu

SEQ ID NO: 2238912 - RNA, 19 nt, Homo sapiens
  misc_RNA (1)...(19): siRNA sense strand
aaacaggguuagucagcaa

SEQ ID NO: 2238913 - RNA, 19 nt, Homo sapiens
  misc_RNA (1)...(19): siRNA sense strand
ucugauaauacaagggaau

SEQ ID NO: 2238914 - RNA, 19 nt, Homo sapiens
  misc_RNA (1)...(19): siRNA sense strand
guggaaacacucagcgcaa

SEQ ID NO: 2238915 - RNA, 19 nt, Homo sapiens
  misc_RNA (1)...(19): siRNA sense strand
cuucaauuggaguaagaaa

SEQ ID NO: 2238916 - RNA, 19 nt, Homo sapiens
  misc_RNA (1)...(19): siRNA sense strand
agaacaacuuaaacaggaa

SEQ ID NO: 2238917 - RNA, 19 nt, Homo sapiens
  misc_RNA (1)...(19): siRNA sense strand
ucagcuaggcuuagaacaa

SEQ ID NO: 2238918 - RNA, 19 nt, Homo sapiens
  misc_RNA (1)...(19): siRNA sense strand
ucacugaggcugauagcaa

SEQ ID NO: 2238919 - RNA, 19 nt, Homo sapiens
  misc_RNA (1)...(19): siRNA sense strand
aguuaaugacugaaggaga

SEQ ID NO: 2238920 - RNA, 19 nt, Homo sapiens
  misc_RNA (1)...(19): siRNA sense strand
gcaacagauaaguuugaaa

SEQ ID NO: 2238921 - RNA, 19 nt, Homo sapiens
  misc_RNA (1)...(19): siRNA sense strand
agaagaggaggguggaaau

SEQ ID NO: 2238922 - RNA, 19 nt, Homo sapiens
  misc_RNA (1)...(19): siRNA sense strand
cugauagcaaagagguaua

SEQ ID NO: 2238923 - RNA, 19 nt, Homo sapiens
  misc_RNA (1)...(19): siRNA sense strand
aagucuuguuugugcaaua

SEQ ID NO: 2238924 - RNA, 19 nt, Homo sapiens
  misc_RNA (1)...(19): siRNA sense strand
ggucauuaucuuagagaag

SEQ ID NO: 2238925 - RNA, 19 nt, Homo sapiens
  misc_RNA (1)...(19): siRNA sense strand
gggaugaaacugaccauau

SEQ ID NO: 2238926 - RNA, 19 nt, Homo sapiens
  misc_RNA (1)...(19): siRNA sense strand
accacuauuuguugagaaa

SEQ ID NO: 2238927 - RNA, 19 nt, Homo sapiens
  misc_RNA (1)...(19): siRNA sense strand
ccaaaauuguacagacauu

SEQ ID NO: 2238928 - RNA, 19 nt, Homo sapiens
  misc_RNA (1)...(19): siRNA sense strand
ggaaagcuucgaugggaau

SEQ ID NO: 2238929 - RNA, 19 nt, Homo sapiens
  misc_RNA (1)...(19): siRNA sense strand
ugaagcugguauugguaaa

SEQ ID NO: 2238930 - RNA, 19 nt, Homo sapiens
  misc_RNA (1)...(19): siRNA sense strand
aagaaaggccagaaauaca

SEQ ID NO: 2238931 - RNA, 19 nt, Homo sapiens
  misc_RNA (1)...(19): siRNA sense strand
gguaggcaucagcgagaaa

SEQ ID NO: 2238932 - RNA, 19 nt, Homo sapiens
  misc_RNA (1)...(19): siRNA sense strand
agcaaaugccugaagggaa

SEQ ID NO: 2238933 - RNA, 19 nt, Homo sapiens
  misc_RNA (1)...(19): siRNA sense strand
gaggacgaguaguaaacaa

SEQ ID NO: 2238934 - RNA, 19 nt, Homo sapiens
  misc_RNA (1)...(19): siRNA sense strand
gcucaacguagauggauuu

SEQ ID NO: 2238935 - RNA, 19 nt, Homo sapiens
  misc_RNA (1)...(19): siRNA sense strand
gaaccuucuuguaguggaa

SEQ ID NO: 2238936 - RNA, 19 nt, Homo sapiens
  misc_RNA (1)...(19): siRNA sense strand
acuuagagggaacaagaaa

SEQ ID NO: 2238937 - RNA, 19 nt, Homo sapiens
  misc_RNA (1)...(19): siRNA sense strand
agagagauuccauuaguaa

SEQ ID NO: 2238938 - RNA, 19 nt, Homo sapiens
  misc_RNA (1)...(19): siRNA sense strand
uggaaaggugguauugaua

SEQ ID NO: 2238939 - RNA, 19 nt, Homo sapiens
  misc_RNA (1)...(19): siRNA sense strand
accaggaguuagaugauaa

SEQ ID NO: 2238940 - RNA, 19 nt, Homo sapiens
  misc_RNA (1)...(19): siRNA sense strand
gguuauguaccgagagacu

SEQ ID NO: 2238941 - RNA, 19 nt, Homo sapiens
  misc_RNA (1)...(19): siRNA sense strand
aguaaaugcuguagcugga

SEQ ID NO: 2238942 - RNA, 19 nt, Homo sapiens
  misc_RNA (1)...(19): siRNA sense strand
gguacaaauguuggauaaa

SEQ ID NO: 2238943 - RNA, 19 nt, Homo sapiens
  misc_RNA (1)...(19): siRNA sense strand
gaguauuggaaucaguuaa

SEQ ID NO: 2238944 - RNA, 19 nt, Homo sapiens
  misc_RNA (1)...(19): siRNA sense strand
cguagaaauugggaaagua

SEQ ID NO: 2238945 - RNA, 19 nt, Homo sapiens
  misc_RNA (1)...(19): siRNA sense strand
gugaugaaugcguggguca

SEQ ID NO: 2238946 - RNA, 19 nt, Homo sapiens
  misc_RNA (1)...(19): siRNA sense strand
ggccaaaauuguacagaca

SEQ ID NO: 2238947 - RNA, 19 nt, Homo sapiens
  misc_RNA (1)...(19): siRNA sense strand
cccacaaagugaaagaaga

SEQ ID NO: 2238948 - RNA, 19 nt, Homo sapiens
  misc_RNA (1)...(19): siRNA sense strand
agaggaggguggaaaugaa

SEQ ID NO: 2238949 - RNA, 19 nt, Homo sapiens
  misc_RNA (1)...(19): siRNA sense strand
gcuuuguuauggaggauga

SEQ ID NO: 2238950 - RNA, 19 nt, Homo sapiens
  misc_RNA (1)...(19): siRNA sense strand
uugagaaauguguggaauu

SEQ ID NO: 2238951 - RNA, 19 nt, Homo sapiens
  misc_RNA (1)...(19): siRNA sense strand
acacaucuaaacaggguua

SEQ ID NO: 2238952 - RNA, 19 nt, Homo sapiens
  misc_RNA (1)...(19): siRNA sense strand
aaauagugaagauggagua

SEQ ID NO: 2238953 - RNA, 19 nt, Homo sapiens
  misc_RNA (1)...(19): siRNA sense strand
gagugaagaaccuagauau

SEQ ID NO: 2238954 - RNA, 19 nt, Homo sapiens
  misc_RNA (1)...(19): siRNA sense strand
ugaaagaguuccugaggga

SEQ ID NO: 2238955 - RNA, 19 nt, Homo sapiens
  misc_RNA (1)...(19): siRNA sense strand
gugcaaaagaugauugaaa

SEQ ID NO: 2238956 - RNA, 19 nt, Homo sapiens
  misc_RNA (1)...(19): siRNA sense strand
ccuauaaacucaagcagga

SEQ ID NO: 2238957 - RNA, 19 nt, Homo sapiens
  misc_RNA (1)...(19): siRNA sense strand
ggcaagaggucacugggaa

SEQ ID NO: 2238958 - RNA, 19 nt, Homo sapiens
  misc_RNA (1)...(19): siRNA sense strand
uggacaaaagagaaagaaa

SEQ ID NO: 2238959 - RNA, 19 nt, Homo sapiens
  misc_RNA (1)...(19): siRNA sense strand
aaagaguuccugagggaca

SEQ ID NO: 2238960 - RNA, 19 nt, Homo sapiens
  misc_RNA (1)...(19): siRNA sense strand
acaaagaauucaucccaca

SEQ ID NO: 2238961 - RNA, 19 nt, Homo sapiens
  misc_RNA (1)...(19): siRNA sense strand
aagauggacaaaagagaaa

SEQ ID NO: 2238962 - RNA, 19 nt, Homo sapiens
  misc_RNA (1)...(19): siRNA sense strand
auccugaugucguggacua

SEQ ID NO: 2238963 - RNA, 19 nt, Homo sapiens
  misc_RNA (1)...(19): siRNA sense strand
ucgacuacuagaagcuuua

SEQ ID NO: 2238964 - RNA, 19 nt, Homo sapiens
  misc_RNA (1)...(19): siRNA sense strand
ucgucaaagucaagggaaa

SEQ ID NO: 2238965 - RNA, 19 nt, Homo sapiens
  misc_RNA (1)...(19): siRNA sense strand
ugaaagaguuccugaggga

SEQ ID NO: 2238966 - RNA, 19 nt, Homo sapiens
  misc_RNA (1)...(19): siRNA sense strand
gugcaaaagaugauugaaa

SEQ ID NO: 2238967 - RNA, 19 nt, Homo sapiens
  misc_RNA (1)...(19): siRNA sense strand
ccuauaaacucaagcagga

SEQ ID NO: 2238968 - RNA, 19 nt, Homo sapiens
  misc_RNA (1)...(19): siRNA sense strand
ggaaaguucuccuggacca

SEQ ID NO: 2238969 - RNA, 19 nt, Homo sapiens
  misc_RNA (1)...(19): siRNA sense strand
ggcaagaggucacugggaa

SEQ ID NO: 2238970 - RNA, 19 nt, Homo sapiens
  misc_RNA (1)...(19): siRNA sense strand
aguuuaugcuggugggcca

SEQ ID NO: 2238971 - RNA, 19 nt, Homo sapiens
  misc_RNA (1)...(19): siRNA sense strand
uggacaaaagagaaagaaa

SEQ ID NO: 2238972 - RNA, 19 nt, Homo sapiens
  misc_RNA (1)...(19): siRNA sense strand
aaagaguuccugagggaca

SEQ ID NO: 2238973 - RNA, 19 nt, Homo sapiens
  misc_RNA (1)...(19): siRNA sense strand
acaaagaauucaucccaca

SEQ ID NO: 2238974 - RNA, 19 nt, Homo sapiens
  misc_RNA (1)...(19): siRNA sense strand
aagauggacaaaagagaaa

SEQ ID NO: 2238975 - RNA, 19 nt, Homo sapiens
  misc_RNA (1)...(19): siRNA sense strand
auccugaugucguggacua

SEQ ID NO: 2238976 - RNA, 19 nt, Homo sapiens
  misc_RNA (1)...(19): siRNA sense strand
ucgacuacuagaagcuuua

SEQ ID NO: 2238977 - RNA, 19 nt, Homo sapiens
  misc_RNA (1)...(19): siRNA sense strand
aggcauucaucuacagacu

SEQ ID NO: 2238978 - RNA, 19 nt, Homo sapiens
  misc_RNA (1)...(19): siRNA sense strand
ucgucaaagucaagggaaa

SEQ ID NO: 2238979 - RNA, 19 nt, Homo sapiens
  misc_RNA (1)...(19): siRNA sense strand
ugaaagaguuccugaggga

SEQ ID NO: 2238980 - RNA, 19 nt, Homo sapiens
  misc_RNA (1)...(19): siRNA sense strand
gugcaaaagaugauugaaa

SEQ ID NO: 2238981 - RNA, 19 nt, Homo sapiens
  misc_RNA (1)...(19): siRNA sense strand
ccuauaaacucaagcagga

SEQ ID NO: 2238982 - RNA, 19 nt, Homo sapiens
  misc_RNA (1)...(19): siRNA sense strand
ggaaaguucuccuggacca

SEQ ID NO: 2238983 - RNA, 19 nt, Homo sapiens
  misc_RNA (1)...(19): siRNA sense strand
ggcaagaggucacugggaa

SEQ ID NO: 2238984 - RNA, 19 nt, Homo sapiens
  misc_RNA (1)...(19): siRNA sense strand
aguuuaugcuggugggcca

SEQ ID NO: 2238985 - RNA, 19 nt, Homo sapiens
  misc_RNA (1)...(19): siRNA sense strand
uggacaaaagagaaagaaa

SEQ ID NO: 2238986 - RNA, 19 nt, Homo sapiens
  misc_RNA (1)...(19): siRNA sense strand
aaagaguuccugagggaca

SEQ ID NO: 2238987 - RNA, 19 nt, Homo sapiens
  misc_RNA (1)...(19): siRNA sense strand
acaaagaauucaucccaca

SEQ ID NO: 2238988 - RNA, 19 nt, Homo sapiens
  misc_RNA (1)...(19): siRNA sense strand
aagauggacaaaagagaaa

SEQ ID NO: 2238989 - RNA, 19 nt, Homo sapiens
  misc_RNA (1)...(19): siRNA sense strand
auccugaugucguggacua

SEQ ID NO: 2238990 - RNA, 19 nt, Homo sapiens
  misc_RNA (1)...(19): siRNA sense strand
ucgacuacuagaagcuuua

SEQ ID NO: 2238991 - RNA, 19 nt, Homo sapiens
  misc_RNA (1)...(19): siRNA sense strand
aggcauucaucuacagacu

SEQ ID NO: 2238992 - RNA, 19 nt, Homo sapiens
  misc_RNA (1)...(19): siRNA sense strand
ucgucaaagucaagggaaa

SEQ ID NO: 2238993 - RNA, 19 nt, Homo sapiens
  misc_RNA (1)...(19): siRNA sense strand
ugaaagaguuccugaggga

SEQ ID NO: 2238994 - RNA, 19 nt, Homo sapiens
  misc_RNA (1)...(19): siRNA sense strand
gugcaaaagaugauugaaa

SEQ ID NO: 2238995 - RNA, 19 nt, Homo sapiens
  misc_RNA (1)...(19): siRNA sense strand
ccuauaaacucaagcagga

SEQ ID NO: 2238996 - RNA, 19 nt, Homo sapiens
  misc_RNA (1)...(19): siRNA sense strand
ggaaaguucuccuggacca

SEQ ID NO: 2238997 - RNA, 19 nt, Homo sapiens
  misc_RNA (1)...(19): siRNA sense strand
ggcaagaggucacugggaa

SEQ ID NO: 2238998 - RNA, 19 nt, Homo sapiens
  misc_RNA (1)...(19): siRNA sense strand
aguuuaugcuggugggcca

SEQ ID NO: 2238999 - RNA, 19 nt, Homo sapiens
  misc_RNA (1)...(19): siRNA sense strand
uggacaaaagagaaagaaa

SEQ ID NO: 2239000 - RNA, 19 nt, Homo sapiens
  misc_RNA (1)...(19): siRNA sense strand
aaagaguuccugagggaca

SEQ ID NO: 2239001 - RNA, 19 nt, Homo sapiens
  misc_RNA (1)...(19): siRNA sense strand
acaaagaauucaucccaca

SEQ ID NO: 2239002 - RNA, 19 nt, Homo sapiens
  misc_RNA (1)...(19): siRNA sense strand
aagauggacaaaagagaaa

SEQ ID NO: 2239003 - RNA, 19 nt, Homo sapiens
  misc_RNA (1)...(19): siRNA sense strand
auccugaugucguggacua

SEQ ID NO: 2239004 - RNA, 19 nt, Homo sapiens
  misc_RNA (1)...(19): siRNA sense strand
ucgacuacuagaagcuuua

SEQ ID NO: 2239005 - RNA, 19 nt, Homo sapiens
  misc_RNA (1)...(19): siRNA sense strand
aggcauucaucuacagacu

SEQ ID NO: 2239006 - RNA, 19 nt, Homo sapiens
  misc_RNA (1)...(19): siRNA sense strand
ucgucaaagucaagggaaa

SEQ ID NO: 2239007 - RNA, 19 nt, Homo sapiens
  misc_RNA (1)...(19): siRNA sense strand
ugaaagaguuccugaggga

SEQ ID NO: 2239008 - RNA, 19 nt, Homo sapiens
  misc_RNA (1)...(19): siRNA sense strand
gugcaaaagaugauugaaa

SEQ ID NO: 2239009 - RNA, 19 nt, Homo sapiens
  misc_RNA (1)...(19): siRNA sense strand
ccuauaaacucaagcagga

SEQ ID NO: 2239010 - RNA, 19 nt, Homo sapiens
  misc_RNA (1)...(19): siRNA sense strand
ggaaaguucuccuggacca

SEQ ID NO: 2239011 - RNA, 19 nt, Homo sapiens
  misc_RNA (1)...(19): siRNA sense strand
ggcaagaggucacugggaa

SEQ ID NO: 2239012 - RNA, 19 nt, Homo sapiens
  misc_RNA (1)...(19): siRNA sense strand
aguuuaugcuggugggcca

SEQ ID NO: 2239013 - RNA, 19 nt, Homo sapiens
  misc_RNA (1)...(19): siRNA sense strand
uggacaaaagagaaagaaa

SEQ ID NO: 2239014 - RNA, 19 nt, Homo sapiens
  misc_RNA (1)...(19): siRNA sense strand
aaagaguuccugagggaca

SEQ ID NO: 2239015 - RNA, 19 nt, Homo sapiens
  misc_RNA (1)...(19): siRNA sense strand
acaaagaauucaucccaca

SEQ ID NO: 2239016 - RNA, 19 nt, Homo sapiens
  misc_RNA (1)...(19): siRNA sense strand
aagauggacaaaagagaaa

SEQ ID NO: 2239017 - RNA, 19 nt, Homo sapiens
  misc_RNA (1)...(19): siRNA sense strand
auccugaugucguggacua

SEQ ID NO: 2239018 - RNA, 19 nt, Homo sapiens
  misc_RNA (1)...(19): siRNA sense strand
ucgacuacuagaagcuuua

SEQ ID NO: 2239019 - RNA, 19 nt, Homo sapiens
  misc_RNA (1)...(19): siRNA sense strand
aggcauucaucuacagacu

SEQ ID NO: 2239020 - RNA, 19 nt, Homo sapiens
  misc_RNA (1)...(19): siRNA sense strand
ccgcugggugugugagaaa

SEQ ID NO: 2239021 - RNA, 19 nt, Homo sapiens
  misc_RNA (1)...(19): siRNA sense strand
ggaaauggguggauggcac

SEQ ID NO: 2239022 - RNA, 19 nt, Homo sapiens
  misc_RNA (1)...(19): siRNA sense strand
cagugauggcucuuggaaa

SEQ ID NO: 2239023 - RNA, 19 nt, Homo sapiens
  misc_RNA (1)...(19): siRNA sense strand
ggcacagacuauaggcaca

SEQ ID NO: 2239024 - RNA, 19 nt, Homo sapiens
  misc_RNA (1)...(19): siRNA sense strand
gagaaaaggcggaaugcca

SEQ ID NO: 2239025 - RNA, 19 nt, Homo sapiens
  misc_RNA (1)...(19): siRNA sense strand
gguggauggcacagacuau

SEQ ID NO: 2239026 - RNA, 19 nt, Homo sapiens
  misc_RNA (1)...(19): siRNA sense strand
aggcacaacuacaagaacu

SEQ ID NO: 2239027 - RNA, 19 nt, Homo sapiens
  misc_RNA (1)...(19): siRNA sense strand
uggagaaacagcagcagga

SEQ ID NO: 2239028 - RNA, 19 nt, Homo sapiens
  misc_RNA (1)...(19): siRNA sense strand
ccgcugggugugugagaaa

SEQ ID NO: 2239029 - RNA, 19 nt, Homo sapiens
  misc_RNA (1)...(19): siRNA sense strand
ggaaauggguggauggcac

SEQ ID NO: 2239030 - RNA, 19 nt, Homo sapiens
  misc_RNA (1)...(19): siRNA sense strand
cagugauggcucuuggaaa

SEQ ID NO: 2239031 - RNA, 19 nt, Homo sapiens
  misc_RNA (1)...(19): siRNA sense strand
ggcacagacuauaggcaca

SEQ ID NO: 2239032 - RNA, 19 nt, Homo sapiens
  misc_RNA (1)...(19): siRNA sense strand
gagaaaaggcggaaugcca

SEQ ID NO: 2239033 - RNA, 19 nt, Homo sapiens
  misc_RNA (1)...(19): siRNA sense strand
gguggauggcacagacuau

SEQ ID NO: 2239034 - RNA, 19 nt, Homo sapiens
  misc_RNA (1)...(19): siRNA sense strand
aggcacaacuacaagaacu

SEQ ID NO: 2239035 - RNA, 19 nt, Homo sapiens
  misc_RNA (1)...(19): siRNA sense strand
uggagaaacagcagcagga

SEQ ID NO: 2239036 - RNA, 19 nt, Homo sapiens
  misc_RNA (1)...(19): siRNA sense strand
ccgcugggugugugagaaa

SEQ ID NO: 2239037 - RNA, 19 nt, Homo sapiens
  misc_RNA (1)...(19): siRNA sense strand
ggaaauggguggauggcac

SEQ ID NO: 2239038 - RNA, 19 nt, Homo sapiens
  misc_RNA (1)...(19): siRNA sense strand
cagugauggcucuuggaaa

SEQ ID NO: 2239039 - RNA, 19 nt, Homo sapiens
  misc_RNA (1)...(19): siRNA sense strand
ggcacagacuauaggcaca

SEQ ID NO: 2239040 - RNA, 19 nt, Homo sapiens
  misc_RNA (1)...(19): siRNA sense strand
gagaaaaggcggaaugcca

SEQ ID NO: 2239041 - RNA, 19 nt, Homo sapiens
  misc_RNA (1)...(19): siRNA sense strand
gguggauggcacagacuau

SEQ ID NO: 2239042 - RNA, 19 nt, Homo sapiens
  misc_RNA (1)...(19): siRNA sense strand
aggcacaacuacaagaacu

SEQ ID NO: 2239043 - RNA, 19 nt, Homo sapiens
  misc_RNA (1)...(19): siRNA sense strand
uggagaaacagcagcagga

SEQ ID NO: 2239044 - RNA, 19 nt, Homo sapiens
  misc_RNA (1)...(19): siRNA sense strand
ccgcugggugugugagaaa

SEQ ID NO: 2239045 - RNA, 19 nt, Homo sapiens
  misc_RNA (1)...(19): siRNA sense strand
ggaaauggguggauggcac

SEQ ID NO: 2239046 - RNA, 19 nt, Homo sapiens
  misc_RNA (1)...(19): siRNA sense strand
cagugauggcucuuggaaa

SEQ ID NO: 2239047 - RNA, 19 nt, Homo sapiens
  misc_RNA (1)...(19): siRNA sense strand
ggcacagacuauaggcaca

SEQ ID NO: 2239048 - RNA, 19 nt, Homo sapiens
  misc_RNA (1)...(19): siRNA sense strand
gagaaaaggcggaaugcca

SEQ ID NO: 2239049 - RNA, 19 nt, Homo sapiens
  misc_RNA (1)...(19): siRNA sense strand
gguggauggcacagacuau

SEQ ID NO: 2239050 - RNA, 19 nt, Homo sapiens
  misc_RNA (1)...(19): siRNA sense strand
aggcacaacuacaagaacu

SEQ ID NO: 2239051 - RNA, 19 nt, Homo sapiens
  misc_RNA (1)...(19): siRNA sense strand
uggagaaacagcagcagga

SEQ ID NO: 2239052 - RNA, 19 nt, Homo sapiens
  misc_RNA (1)...(19): siRNA sense strand
gagcaguggaagaagcaaa

SEQ ID NO: 2239053 - RNA, 19 nt, Homo sapiens
  misc_RNA (1)...(19): siRNA sense strand
ucacaaagauaauagccaa

SEQ ID NO: 2239054 - RNA, 19 nt, Homo sapiens
  misc_RNA (1)...(19): siRNA sense strand
ggggaaaaucuuaguggaa

SEQ ID NO: 2239055 - RNA, 19 nt, Homo sapiens
  misc_RNA (1)...(19): siRNA sense strand
aaagaaagaagguggcaca

SEQ ID NO: 2239056 - RNA, 19 nt, Homo sapiens
  misc_RNA (1)...(19): siRNA sense strand
ccguaggccugguuggaau

SEQ ID NO: 2239057 - RNA, 19 nt, Homo sapiens
  misc_RNA (1)...(19): siRNA sense strand
cgccaugaucuguggaaau

SEQ ID NO: 2239058 - RNA, 19 nt, Homo sapiens
  misc_RNA (1)...(19): siRNA sense strand
aguggaagaagcaaagaaa

SEQ ID NO: 2239059 - RNA, 19 nt, Homo sapiens
  misc_RNA (1)...(19): siRNA sense strand
uccaaaacgaggagaaaua

SEQ ID NO: 2239060 - RNA, 19 nt, Homo sapiens
  misc_RNA (1)...(19): siRNA sense strand
agcaagagaagcauggaaa

SEQ ID NO: 2239061 - RNA, 19 nt, Homo sapiens
  misc_RNA (1)...(19): siRNA sense strand
cuguaaagaaagcaagaga

SEQ ID NO: 2239062 - RNA, 19 nt, Homo sapiens
  misc_RNA (1)...(19): siRNA sense strand
ggaacuuggaggaaacaau

SEQ ID NO: 2239063 - RNA, 19 nt, Homo sapiens
  misc_RNA (1)...(19): siRNA sense strand
gcaagagaagcauggaaaa

SEQ ID NO: 2239064 - RNA, 19 nt, Homo sapiens
  misc_RNA (1)...(19): siRNA sense strand
ccaagcaggcagugagcau

SEQ ID NO: 2239065 - RNA, 19 nt, Homo sapiens
  misc_RNA (1)...(19): siRNA sense strand
gggagaagauccaaguacu

SEQ ID NO: 2239066 - RNA, 19 nt, Homo sapiens
  misc_RNA (1)...(19): siRNA sense strand
ccgcuaacaacgagccaau

SEQ ID NO: 2239067 - RNA, 19 nt, Homo sapiens
  misc_RNA (1)...(19): siRNA sense strand
uguaaagaaagcaagagaa

SEQ ID NO: 2239068 - RNA, 19 nt, Homo sapiens
  misc_RNA (1)...(19): siRNA sense strand
gagcauguuucuuggagca

SEQ ID NO: 2239069 - RNA, 19 nt, Homo sapiens
  misc_RNA (1)...(19): siRNA sense strand
gcaggagagguuugggaga

SEQ ID NO: 2239070 - RNA, 19 nt, Homo sapiens
  misc_RNA (1)...(19): siRNA sense strand
uguuggaacuuggaggaaa

SEQ ID NO: 2239071 - RNA, 19 nt, Homo sapiens
  misc_RNA (1)...(19): siRNA sense strand
gggagaagucuguuggaac

SEQ ID NO: 2239072 - RNA, 19 nt, Homo sapiens
  misc_RNA (1)...(19): siRNA sense strand
agcaauggccaaagaugaa

SEQ ID NO: 2239073 - RNA, 19 nt, Homo sapiens
  misc_RNA (1)...(19): siRNA sense strand
acgaggagaaauaguaaga

SEQ ID NO: 2239074 - RNA, 19 nt, Homo sapiens
  misc_RNA (1)...(19): siRNA sense strand
agauaauagccaagguucu

SEQ ID NO: 2239075 - RNA, 19 nt, Homo sapiens
  misc_RNA (1)...(19): siRNA sense strand
uagccaagguucuggagga

SEQ ID NO: 2239076 - RNA, 19 nt, Homo sapiens
  misc_RNA (1)...(19): siRNA sense strand
caguacaugagaaggucua

SEQ ID NO: 2239077 - RNA, 19 nt, Homo sapiens
  misc_RNA (1)...(19): siRNA sense strand
aggaaucaaguuucaguaa

SEQ ID NO: 2239078 - RNA, 19 nt, Homo sapiens
  misc_RNA (1)...(19): siRNA sense strand
agacuguggcauuguaaau

SEQ ID NO: 2239079 - RNA, 19 nt, Homo sapiens
  misc_RNA (1)...(19): siRNA sense strand
gccaauagcaagaguccga

SEQ ID NO: 2239080 - RNA, 19 nt, Homo sapiens
  misc_RNA (1)...(19): siRNA sense strand
guuggaacuuggaggaaac

SEQ ID NO: 2239081 - RNA, 19 nt, Homo sapiens
  misc_RNA (1)...(19): siRNA sense strand
gcauggaauaaugaaguaa

SEQ ID NO: 2239082 - RNA, 19 nt, Homo sapiens
  misc_RNA (1)...(19): siRNA sense strand
caguggaagaagcaaagaa

SEQ ID NO: 2239083 - RNA, 19 nt, Homo sapiens
  misc_RNA (1)...(19): siRNA sense strand
uaguggaagguguggguga

SEQ ID NO: 2239084 - RNA, 19 nt, Homo sapiens
  misc_RNA (1)...(19): siRNA sense strand
aaaacgagggcguguauaa

SEQ ID NO: 2239085 - RNA, 19 nt, Homo sapiens
  misc_RNA (1)...(19): siRNA sense strand
aggaucagacuguggcauu

SEQ ID NO: 2239086 - RNA, 19 nt, Homo sapiens
  misc_RNA (1)...(19): siRNA sense strand
caaagaugaacgagugaac

SEQ ID NO: 2239087 - RNA, 19 nt, Homo sapiens
  misc_RNA (1)...(19): siRNA sense strand
ugauggugcaggagagguu

SEQ ID NO: 2239088 - RNA, 19 nt, Homo sapiens
  misc_RNA (1)...(19): siRNA sense strand
aaacaguacaugagaaggu

SEQ ID NO: 2239089 - RNA, 19 nt, Homo sapiens
  misc_RNA (1)...(19): siRNA sense strand
ugagauuggaggugccuuu

SEQ ID NO: 2239090 - RNA, 19 nt, Homo sapiens
  misc_RNA (1)...(19): siRNA sense strand
aagcaagagaagcauggaa

SEQ ID NO: 2239091 - RNA, 19 nt, Homo sapiens
  misc_RNA (1)...(19): siRNA sense strand
gaaaggagcuccaaccacu

SEQ ID NO: 2239092 - RNA, 19 nt, Homo sapiens
  misc_RNA (1)...(19): siRNA sense strand
acagcuggccagaggugua

SEQ ID NO: 2239093 - RNA, 19 nt, Homo sapiens
  misc_RNA (1)...(19): siRNA sense strand
cgacaauugugacaggucu

SEQ ID NO: 2239094 - RNA, 19 nt, Homo sapiens
  misc_RNA (1)...(19): siRNA sense strand
guggcagacuaugaagaaa

SEQ ID NO: 2239095 - RNA, 19 nt, Homo sapiens
  misc_RNA (1)...(19): siRNA sense strand
agauauuccugcuccaaaa

SEQ ID NO: 2239096 - RNA, 19 nt, Homo sapiens
  misc_RNA (1)...(19): siRNA sense strand
ccaaagaccuagaggagga

SEQ ID NO: 2239097 - RNA, 19 nt, Homo sapiens
  misc_RNA (1)...(19): siRNA sense strand
gcuuuaaccaccagcgcua

SEQ ID NO: 2239098 - RNA, 19 nt, Homo sapiens
  misc_RNA (1)...(19): siRNA sense strand
gcgaggagaacgagagcag

SEQ ID NO: 2239099 - RNA, 19 nt, Homo sapiens
  misc_RNA (1)...(19): siRNA sense strand
uaaaggugcuggugcgcga

SEQ ID NO: 2239100 - RNA, 19 nt, Homo sapiens
  misc_RNA (1)...(19): siRNA sense strand
cagaaaggauacagcugga

SEQ ID NO: 2239101 - RNA, 19 nt, Homo sapiens
  misc_RNA (1)...(19): siRNA sense strand
uuguggaacucuaugggaa

SEQ ID NO: 2239102 - RNA, 19 nt, Homo sapiens
  misc_RNA (1)...(19): siRNA sense strand
aguuuagugauguggaaga

SEQ ID NO: 2239103 - RNA, 19 nt, Homo sapiens
  misc_RNA (1)...(19): siRNA sense strand
ccacaucaccccagggaca

SEQ ID NO: 2239104 - RNA, 19 nt, Homo sapiens
  misc_RNA (1)...(19): siRNA sense strand
cagaaaggauacagcugga

SEQ ID NO: 2239105 - RNA, 19 nt, Homo sapiens
  misc_RNA (1)...(19): siRNA sense strand
uuguggaacucuaugggaa

SEQ ID NO: 2239106 - RNA, 19 nt, Homo sapiens
  misc_RNA (1)...(19): siRNA sense strand
aguuuagugauguggaaga

SEQ ID NO: 2239107 - RNA, 19 nt, Homo sapiens
  misc_RNA (1)...(19): siRNA sense strand
ccacaucaccccagggaca

SEQ ID NO: 2239108 - RNA, 19 nt, Homo sapiens
  misc_RNA (1)...(19): siRNA sense strand
ugaaauuauucuuccgaga

SEQ ID NO: 2239109 - RNA, 19 nt, Homo sapiens
  misc_RNA (1)...(19): siRNA sense strand
gcuuugagugcuacggaga

SEQ ID NO: 2239110 - RNA, 19 nt, Homo sapiens
  misc_RNA (1)...(19): siRNA sense strand
agagcaaaccgaaggucga

SEQ ID NO: 2239111 - RNA, 19 nt, Homo sapiens
  misc_RNA (1)...(19): siRNA sense strand
gagaagauuuccacggaga

SEQ ID NO: 2239112 - RNA, 19 nt, Homo sapiens
  misc_RNA (1)...(19): siRNA sense strand
agaaugagcuggaccggua

SEQ ID NO: 2239113 - RNA, 19 nt, Homo sapiens
  misc_RNA (1)...(19): siRNA sense strand
aagagaaacgugaggguga

SEQ ID NO: 2239114 - RNA, 19 nt, Homo sapiens
  misc_RNA (1)...(19): siRNA sense strand
caagaauguuccaaggaga

SEQ ID NO: 2239115 - RNA, 19 nt, Homo sapiens
  misc_RNA (1)...(19): siRNA sense strand
ucaucgagauugaaggcaa

SEQ ID NO: 2239116 - RNA, 19 nt, Homo sapiens
  misc_RNA (1)...(19): siRNA sense strand
gaguggagcugcaggcaca

SEQ ID NO: 2239117 - RNA, 19 nt, Homo sapiens
  misc_RNA (1)...(19): siRNA sense strand
acaaggagauugagccaga

SEQ ID NO: 2239118 - RNA, 19 nt, Homo sapiens
  misc_RNA (1)...(19): siRNA sense strand
ccuauaagacaguggaagu

SEQ ID NO: 2239119 - RNA, 19 nt, Homo sapiens
  misc_RNA (1)...(19): siRNA sense strand
aggagaaagaagauggaca

SEQ ID NO: 2239120 - RNA, 19 nt, Homo sapiens
  misc_RNA (1)...(19): siRNA sense strand
cggcaaaggacaggcacaa

SEQ ID NO: 2239121 - RNA, 19 nt, Homo sapiens
  misc_RNA (1)...(19): siRNA sense strand
cuuaaagaggaaagugaau

SEQ ID NO: 2239122 - RNA, 19 nt, Homo sapiens
  misc_RNA (1)...(19): siRNA sense strand
gcaaggagauugaggagac

SEQ ID NO: 2239123 - RNA, 19 nt, Homo sapiens
  misc_RNA (1)...(19): siRNA sense strand
aggacaggcacaagaagaa

SEQ ID NO: 2239124 - RNA, 19 nt, Homo sapiens
  misc_RNA (1)...(19): siRNA sense strand
gcagcaaaaccaagacaaa

SEQ ID NO: 2239125 - RNA, 19 nt, Homo sapiens
  misc_RNA (1)...(19): siRNA sense strand
cauuaaaagguuuggaaga

SEQ ID NO: 2239126 - RNA, 19 nt, Homo sapiens
  misc_RNA (1)...(19): siRNA sense strand
cacuggauccggugggaaa

SEQ ID NO: 2239127 - RNA, 19 nt, Homo sapiens
  misc_RNA (1)...(19): siRNA sense strand
aagaauguuccaaggagaa

SEQ ID NO: 2239128 - RNA, 19 nt, Homo sapiens
  misc_RNA (1)...(19): siRNA sense strand
guguuaugacgaugagauu

SEQ ID NO: 2239129 - RNA, 19 nt, Homo sapiens
  misc_RNA (1)...(19): siRNA sense strand
caggaaggucaaggagaaa

SEQ ID NO: 2239130 - RNA, 19 nt, Homo sapiens
  misc_RNA (1)...(19): siRNA sense strand
ccaugauuggaaagacaaa

SEQ ID NO: 2239131 - RNA, 19 nt, Homo sapiens
  misc_RNA (1)...(19): siRNA sense strand
agacaacaacucuggaaca

SEQ ID NO: 2239132 - RNA, 19 nt, Homo sapiens
  misc_RNA (1)...(19): siRNA sense strand
agauugagacacugcgcaa

SEQ ID NO: 2239133 - RNA, 19 nt, Homo sapiens
  misc_RNA (1)...(19): siRNA sense strand
acacaaagcugguacaggu

SEQ ID NO: 2239134 - RNA, 19 nt, Homo sapiens
  misc_RNA (1)...(19): siRNA sense strand
agacaaggagauugagcca

SEQ ID NO: 2239135 - RNA, 19 nt, Homo sapiens
  misc_RNA (1)...(19): siRNA sense strand
ccaacggagcucuggaaga

SEQ ID NO: 2239136 - RNA, 19 nt, Homo sapiens
  misc_RNA (1)...(19): siRNA sense strand
agaaaugcuugaacggcuu

SEQ ID NO: 2239137 - RNA, 19 nt, Homo sapiens
  misc_RNA (1)...(19): siRNA sense strand
ugggaaagaucuuaccaga

SEQ ID NO: 2239138 - RNA, 19 nt, Homo sapiens
  misc_RNA (1)...(19): siRNA sense strand
aaacuauacaggaagguca

SEQ ID NO: 2239139 - RNA, 19 nt, Homo sapiens
  misc_RNA (1)...(19): siRNA sense strand
ggaaggucaaggagaaagu

SEQ ID NO: 2239140 - RNA, 19 nt, Homo sapiens
  misc_RNA (1)...(19): siRNA sense strand
gugggaugagggaggagaa

SEQ ID NO: 2239141 - RNA, 19 nt, Homo sapiens
  misc_RNA (1)...(19): siRNA sense strand
cugcaggcacagacaacaa

SEQ ID NO: 2239142 - RNA, 19 nt, Homo sapiens
  misc_RNA (1)...(19): siRNA sense strand
cccgccaagucgagagcaa

SEQ ID NO: 2239143 - RNA, 19 nt, Homo sapiens
  misc_RNA (1)...(19): siRNA sense strand
gcaaggagcaguacgagca

SEQ ID NO: 2239144 - RNA, 19 nt, Homo sapiens
  misc_RNA (1)...(19): siRNA sense strand
aggugggucugcaggagaa

SEQ ID NO: 2239145 - RNA, 19 nt, Homo sapiens
  misc_RNA (1)...(19): siRNA sense strand
acaagaagaaaucaggaga

SEQ ID NO: 2239146 - RNA, 19 nt, Homo sapiens
  misc_RNA (1)...(19): siRNA sense strand
ggaugagggaggagaagcu

SEQ ID NO: 2239147 - RNA, 19 nt, Homo sapiens
  misc_RNA (1)...(19): siRNA sense strand
agacaguggaaguggugga

SEQ ID NO: 2239148 - RNA, 19 nt, Homo sapiens
  misc_RNA (1)...(19): siRNA sense strand
aggauauaacagcagcaaa

SEQ ID NO: 2239149 - RNA, 19 nt, Homo sapiens
  misc_RNA (1)...(19): siRNA sense strand
aggagauugaggagacaga

SEQ ID NO: 2239150 - RNA, 19 nt, Homo sapiens
  misc_RNA (1)...(19): siRNA sense strand
aagucagacaagaagaaau

SEQ ID NO: 2239151 - RNA, 19 nt, Homo sapiens
  misc_RNA (1)...(19): siRNA sense strand
gcggcaaaggacaggcaca

SEQ ID NO: 2239152 - RNA, 19 nt, Homo sapiens
  misc_RNA (1)...(19): siRNA sense strand
gccuauagacaaggagauu

SEQ ID NO: 2239153 - RNA, 19 nt, Homo sapiens
  misc_RNA (1)...(19): siRNA sense strand
cugugaucguggagaccau

SEQ ID NO: 2239154 - RNA, 19 nt, Homo sapiens
  misc_RNA (1)...(19): siRNA sense strand
agaagaaaucaggagagaa

SEQ ID NO: 2239155 - RNA, 19 nt, Homo sapiens
  misc_RNA (1)...(19): siRNA sense strand
agaagauggacaaccaauu

SEQ ID NO: 2239156 - RNA, 19 nt, Homo sapiens
  misc_RNA (1)...(19): siRNA sense strand
agucagacaagaagaaauc

SEQ ID NO: 2239157 - RNA, 19 nt, Homo sapiens
  misc_RNA (1)...(19): siRNA sense strand
guucagaccuauaucagca

SEQ ID NO: 2239158 - RNA, 19 nt, Homo sapiens
  misc_RNA (1)...(19): siRNA sense strand
ucaaggagaaagugagaag

SEQ ID NO: 2239159 - RNA, 19 nt, Homo sapiens
  misc_RNA (1)...(19): siRNA sense strand
cugagaagcccgaggucau

SEQ ID NO: 2239160 - RNA, 19 nt, Homo sapiens
  misc_RNA (1)...(19): siRNA sense strand
ucuuugagacagagggcaa

SEQ ID NO: 2239161 - RNA, 19 nt, Homo sapiens
  misc_RNA (1)...(19): siRNA sense strand
acuccaagcugcauggcaa

SEQ ID NO: 2239162 - RNA, 19 nt, Homo sapiens
  misc_RNA (1)...(19): siRNA sense strand
cgagauggcuucuggagga

SEQ ID NO: 2239163 - RNA, 19 nt, Homo sapiens
  misc_RNA (1)...(19): siRNA sense strand
ccuuugagauugagcgcca

SEQ ID NO: 2239164 - RNA, 19 nt, Homo sapiens
  misc_RNA (1)...(19): siRNA sense strand
gccaugaggcacugggaga

SEQ ID NO: 2239165 - RNA, 19 nt, Homo sapiens
  misc_RNA (1)...(19): siRNA sense strand
cggcaagaacugugacaag

SEQ ID NO: 2239166 - RNA, 19 nt, Homo sapiens
  misc_RNA (1)...(19): siRNA sense strand
gaagaggaccugagggccu

SEQ ID NO: 2239167 - RNA, 19 nt, Homo sapiens
  misc_RNA (1)...(19): siRNA sense strand
ggccaaaggacacggcuca

SEQ ID NO: 2239168 - RNA, 19 nt, Homo sapiens
  misc_RNA (1)...(19): siRNA sense strand
ccuaugaccuggcggagga

SEQ ID NO: 2239169 - RNA, 19 nt, Homo sapiens
  misc_RNA (1)...(19): siRNA sense strand
augagaagccugaugacau

SEQ ID NO: 2239170 - RNA, 19 nt, Homo sapiens
  misc_RNA (1)...(19): siRNA sense strand
ugggagauggagagguaga

SEQ ID NO: 2239171 - RNA, 19 nt, Homo sapiens
  misc_RNA (1)...(19): siRNA sense strand
cugaauaccccaauggcua

SEQ ID NO: 2239172 - RNA, 19 nt, Homo sapiens
  misc_RNA (1)...(19): siRNA sense strand
agggcaaugaugugugcaa

SEQ ID NO: 2239173 - RNA, 19 nt, Homo sapiens
  misc_RNA (1)...(19): siRNA sense strand
gggcacagugagagcagca

SEQ ID NO: 2239174 - RNA, 19 nt, Homo sapiens
  misc_RNA (1)...(19): siRNA sense strand
ucaaagagguggacgagug

SEQ ID NO: 2239175 - RNA, 19 nt, Homo sapiens
  misc_RNA (1)...(19): siRNA sense strand
acaacaugcgcguggaguu

SEQ ID NO: 2239176 - RNA, 19 nt, Homo sapiens
  misc_RNA (1)...(19): siRNA sense strand
gcguggaguucaaguccga

SEQ ID NO: 2239177 - RNA, 19 nt, Homo sapiens
  misc_RNA (1)...(19): siRNA sense strand
cugagaagcccgaggucau

SEQ ID NO: 2239178 - RNA, 19 nt, Homo sapiens
  misc_RNA (1)...(19): siRNA sense strand
ucuuugagacagagggcaa

SEQ ID NO: 2239179 - RNA, 19 nt, Homo sapiens
  misc_RNA (1)...(19): siRNA sense strand
acuccaagcugcauggcaa

SEQ ID NO: 2239180 - RNA, 19 nt, Homo sapiens
  misc_RNA (1)...(19): siRNA sense strand
cgagauggcuucuggagga

SEQ ID NO: 2239181 - RNA, 19 nt, Homo sapiens
  misc_RNA (1)...(19): siRNA sense strand
ccuuugagauugagcgcca

SEQ ID NO: 2239182 - RNA, 19 nt, Homo sapiens
  misc_RNA (1)...(19): siRNA sense strand
gccaugaggcacugggaga

SEQ ID NO: 2239183 - RNA, 19 nt, Homo sapiens
  misc_RNA (1)...(19): siRNA sense strand
cggcaagaacugugacaag

SEQ ID NO: 2239184 - RNA, 19 nt, Homo sapiens
  misc_RNA (1)...(19): siRNA sense strand
gaagaggaccugagggccu

SEQ ID NO: 2239185 - RNA, 19 nt, Homo sapiens
  misc_RNA (1)...(19): siRNA sense strand
ggccaaaggacacggcuca

SEQ ID NO: 2239186 - RNA, 19 nt, Homo sapiens
  misc_RNA (1)...(19): siRNA sense strand
ccuaugaccuggcggagga

SEQ ID NO: 2239187 - RNA, 19 nt, Homo sapiens
  misc_RNA (1)...(19): siRNA sense strand
augagaagccugaugacau

SEQ ID NO: 2239188 - RNA, 19 nt, Homo sapiens
  misc_RNA (1)...(19): siRNA sense strand
ugggagauggagagguaga

SEQ ID NO: 2239189 - RNA, 19 nt, Homo sapiens
  misc_RNA (1)...(19): siRNA sense strand
cugaauaccccaauggcua

SEQ ID NO: 2239190 - RNA, 19 nt, Homo sapiens
  misc_RNA (1)...(19): siRNA sense strand
agggcaaugaugugugcaa

SEQ ID NO: 2239191 - RNA, 19 nt, Homo sapiens
  misc_RNA (1)...(19): siRNA sense strand
gggcacagugagagcagca

SEQ ID NO: 2239192 - RNA, 19 nt, Homo sapiens
  misc_RNA (1)...(19): siRNA sense strand
ucaaagagguggacgagug

SEQ ID NO: 2239193 - RNA, 19 nt, Homo sapiens
  misc_RNA (1)...(19): siRNA sense strand
acaacaugcgcguggaguu

SEQ ID NO: 2239194 - RNA, 19 nt, Homo sapiens
  misc_RNA (1)...(19): siRNA sense strand
gcguggaguucaaguccga

SEQ ID NO: 2239195 - RNA, 19 nt, Homo sapiens
  misc_RNA (1)...(19): siRNA sense strand
cugagaagcccgaggucau

SEQ ID NO: 2239196 - RNA, 19 nt, Homo sapiens
  misc_RNA (1)...(19): siRNA sense strand
ucuuugagacagagggcaa

SEQ ID NO: 2239197 - RNA, 19 nt, Homo sapiens
  misc_RNA (1)...(19): siRNA sense strand
acuccaagcugcauggcaa

SEQ ID NO: 2239198 - RNA, 19 nt, Homo sapiens
  misc_RNA (1)...(19): siRNA sense strand
cgagauggcuucuggagga

SEQ ID NO: 2239199 - RNA, 19 nt, Homo sapiens
  misc_RNA (1)...(19): siRNA sense strand
ccuuugagauugagcgcca

SEQ ID NO: 2239200 - RNA, 19 nt, Homo sapiens
  misc_RNA (1)...(19): siRNA sense strand
gccaugaggcacugggaga

SEQ ID NO: 2239201 - RNA, 19 nt, Homo sapiens
  misc_RNA (1)...(19): siRNA sense strand
cggcaagaacugugacaag

SEQ ID NO: 2239202 - RNA, 19 nt, Homo sapiens
  misc_RNA (1)...(19): siRNA sense strand
gaagaggaccugagggccu

SEQ ID NO: 2239203 - RNA, 19 nt, Homo sapiens
  misc_RNA (1)...(19): siRNA sense strand
ggccaaaggacacggcuca

SEQ ID NO: 2239204 - RNA, 19 nt, Homo sapiens
  misc_RNA (1)...(19): siRNA sense strand
ccuaugaccuggcggagga

SEQ ID NO: 2239205 - RNA, 19 nt, Homo sapiens
  misc_RNA (1)...(19): siRNA sense strand
augagaagccugaugacau

SEQ ID NO: 2239206 - RNA, 19 nt, Homo sapiens
  misc_RNA (1)...(19): siRNA sense strand
ugggagauggagagguaga

SEQ ID NO: 2239207 - RNA, 19 nt, Homo sapiens
  misc_RNA (1)...(19): siRNA sense strand
cugaauaccccaauggcua

SEQ ID NO: 2239208 - RNA, 19 nt, Homo sapiens
  misc_RNA (1)...(19): siRNA sense strand
agggcaaugaugugugcaa

SEQ ID NO: 2239209 - RNA, 19 nt, Homo sapiens
  misc_RNA (1)...(19): siRNA sense strand
gggcacagugagagcagca

SEQ ID NO: 2239210 - RNA, 19 nt, Homo sapiens
  misc_RNA (1)...(19): siRNA sense strand
ucaaagagguggacgagug

SEQ ID NO: 2239211 - RNA, 19 nt, Homo sapiens
  misc_RNA (1)...(19): siRNA sense strand
acaacaugcgcguggaguu

SEQ ID NO: 2239212 - RNA, 19 nt, Homo sapiens
  misc_RNA (1)...(19): siRNA sense strand
gcguggaguucaaguccga

SEQ ID NO: 2239213 - RNA, 19 nt, Homo sapiens
  misc_RNA (1)...(19): siRNA sense strand
cugagaagcccgaggucau

SEQ ID NO: 2239214 - RNA, 19 nt, Homo sapiens
  misc_RNA (1)...(19): siRNA sense strand
ucuuugagacagagggcaa

SEQ ID NO: 2239215 - RNA, 19 nt, Homo sapiens
  misc_RNA (1)...(19): siRNA sense strand
acuccaagcugcauggcaa

SEQ ID NO: 2239216 - RNA, 19 nt, Homo sapiens
  misc_RNA (1)...(19): siRNA sense strand
cgagauggcuucuggagga

SEQ ID NO: 2239217 - RNA, 19 nt, Homo sapiens
  misc_RNA (1)...(19): siRNA sense strand
ccuuugagauugagcgcca

SEQ ID NO: 2239218 - RNA, 19 nt, Homo sapiens
  misc_RNA (1)...(19): siRNA sense strand
gccaugaggcacugggaga

SEQ ID NO: 2239219 - RNA, 19 nt, Homo sapiens
  misc_RNA (1)...(19): siRNA sense strand
cggcaagaacugugacaag

SEQ ID NO: 2239220 - RNA, 19 nt, Homo sapiens
  misc_RNA (1)...(19): siRNA sense strand
gaagaggaccugagggccu

SEQ ID NO: 2239221 - RNA, 19 nt, Homo sapiens
  misc_RNA (1)...(19): siRNA sense strand
ggccaaaggacacggcuca

SEQ ID NO: 2239222 - RNA, 19 nt, Homo sapiens
  misc_RNA (1)...(19): siRNA sense strand
ccuaugaccuggcggagga

SEQ ID NO: 2239223 - RNA, 19 nt, Homo sapiens
  misc_RNA (1)...(19): siRNA sense strand
augagaagccugaugacau

SEQ ID NO: 2239224 - RNA, 19 nt, Homo sapiens
  misc_RNA (1)...(19): siRNA sense strand
ugggagauggagagguaga

SEQ ID NO: 2239225 - RNA, 19 nt, Homo sapiens
  misc_RNA (1)...(19): siRNA sense strand
cugaauaccccaauggcua

SEQ ID NO: 2239226 - RNA, 19 nt, Homo sapiens
  misc_RNA (1)...(19): siRNA sense strand
agggcaaugaugugugcaa

SEQ ID NO: 2239227 - RNA, 19 nt, Homo sapiens
  misc_RNA (1)...(19): siRNA sense strand
gggcacagugagagcagca

SEQ ID NO: 2239228 - RNA, 19 nt, Homo sapiens
  misc_RNA (1)...(19): siRNA sense strand
ucaaagagguggacgagug

SEQ ID NO: 2239229 - RNA, 19 nt, Homo sapiens
  misc_RNA (1)...(19): siRNA sense strand
acaacaugcgcguggaguu

SEQ ID NO: 2239230 - RNA, 19 nt, Homo sapiens
  misc_RNA (1)...(19): siRNA sense strand
gcguggaguucaaguccga

SEQ ID NO: 2239231 - RNA, 19 nt, Homo sapiens
  misc_RNA (1)...(19): siRNA sense strand
cgagauggcuucuggagga

SEQ ID NO: 2239232 - RNA, 19 nt, Homo sapiens
  misc_RNA (1)...(19): siRNA sense strand
ccuuugagauugagcgcca

SEQ ID NO: 2239233 - RNA, 19 nt, Homo sapiens
  misc_RNA (1)...(19): siRNA sense strand
gccaugaggcacugggaga

SEQ ID NO: 2239234 - RNA, 19 nt, Homo sapiens
  misc_RNA (1)...(19): siRNA sense strand
cggcaagaacugugacaag

SEQ ID NO: 2239235 - RNA, 19 nt, Homo sapiens
  misc_RNA (1)...(19): siRNA sense strand
gaagaggaccugagggccu

SEQ ID NO: 2239236 - RNA, 19 nt, Homo sapiens
  misc_RNA (1)...(19): siRNA sense strand
ggccaaaggacacggcuca

SEQ ID NO: 2239237 - RNA, 19 nt, Homo sapiens
  misc_RNA (1)...(19): siRNA sense strand
ccuaugaccuggcggagga

SEQ ID NO: 2239238 - RNA, 19 nt, Homo sapiens
  misc_RNA (1)...(19): siRNA sense strand
augagaagccugaugacau

SEQ ID NO: 2239239 - RNA, 19 nt, Homo sapiens
  misc_RNA (1)...(19): siRNA sense strand
ugggagauggagagguaga

SEQ ID NO: 2239240 - RNA, 19 nt, Homo sapiens
  misc_RNA (1)...(19): siRNA sense strand
cugaauaccccaauggcua

SEQ ID NO: 2239241 - RNA, 19 nt, Homo sapiens
  misc_RNA (1)...(19): siRNA sense strand
gggcacagugagagcagca

SEQ ID NO: 2239242 - RNA, 19 nt, Homo sapiens
  misc_RNA (1)...(19): siRNA sense strand
ucaaagagguggacgagug

SEQ ID NO: 2239243 - RNA, 19 nt, Homo sapiens
  misc_RNA (1)...(19): siRNA sense strand
gccaugaggcacugggaga

SEQ ID NO: 2239244 - RNA, 19 nt, Homo sapiens
  misc_RNA (1)...(19): siRNA sense strand
cggcaagaacugugacaag

SEQ ID NO: 2239245 - RNA, 19 nt, Homo sapiens
  misc_RNA (1)...(19): siRNA sense strand
gaagaggaccugagggccu

SEQ ID NO: 2239246 - RNA, 19 nt, Homo sapiens
  misc_RNA (1)...(19): siRNA sense strand
ccuaugaccuggcggagga

SEQ ID NO: 2239247 - RNA, 19 nt, Homo sapiens
  misc_RNA (1)...(19): siRNA sense strand
ugggagauggagagguaga

SEQ ID NO: 2239248 - RNA, 19 nt, Homo sapiens
  misc_RNA (1)...(19): siRNA sense strand
aaugcaagcaggugggaaa

SEQ ID NO: 2239249 - RNA, 19 nt, Homo sapiens
  misc_RNA (1)...(19): siRNA sense strand
accagaaacgagugggaaa

SEQ ID NO: 2239250 - RNA, 19 nt, Homo sapiens
  misc_RNA (1)...(19): siRNA sense strand
uuaaagaacuaucaggaca

SEQ ID NO: 2239251 - RNA, 19 nt, Homo sapiens
  misc_RNA (1)...(19): siRNA sense strand
ccaaacacaaacagcggaa

SEQ ID NO: 2239252 - RNA, 19 nt, Homo sapiens
  misc_RNA (1)...(19): siRNA sense strand
acgucaagccaaacacaaa

SEQ ID NO: 2239253 - RNA, 19 nt, Homo sapiens
  misc_RNA (1)...(19): siRNA sense strand
cugacgagguccugagcga

SEQ ID NO: 2239254 - RNA, 19 nt, Homo sapiens
  misc_RNA (1)...(19): siRNA sense strand
ccgacagaacucagugcua

SEQ ID NO: 2239255 - RNA, 19 nt, Homo sapiens
  misc_RNA (1)...(19): siRNA sense strand
ccagaaacgagugggaaaa

SEQ ID NO: 2239256 - RNA, 19 nt, Homo sapiens
  misc_RNA (1)...(19): siRNA sense strand
gcuaguaacuuuuggccau

SEQ ID NO: 2239257 - RNA, 19 nt, Homo sapiens
  misc_RNA (1)...(19): siRNA sense strand
uggcccacuuggaggagaa

SEQ ID NO: 2239258 - RNA, 19 nt, Homo sapiens
  misc_RNA (1)...(19): siRNA sense strand
agauaaggccauugcuagu

SEQ ID NO: 2239259 - RNA, 19 nt, Homo sapiens
  misc_RNA (1)...(19): siRNA sense strand
ucuaagauuccuaaggcau

SEQ ID NO: 2239260 - RNA, 19 nt, Homo sapiens
  misc_RNA (1)...(19): siRNA sense strand
cccacuuggaggagaaaca

SEQ ID NO: 2239261 - RNA, 19 nt, Homo sapiens
  misc_RNA (1)...(19): siRNA sense strand
aggugugggaggagagaaa

SEQ ID NO: 2239262 - RNA, 19 nt, Homo sapiens
  misc_RNA (1)...(19): siRNA sense strand
ccugaaaagaguaagaaua

SEQ ID NO: 2239263 - RNA, 19 nt, Homo sapiens
  misc_RNA (1)...(19): siRNA sense strand
cggaauugcgccaggagau

SEQ ID NO: 2239264 - RNA, 19 nt, Homo sapiens
  misc_RNA (1)...(19): siRNA sense strand
uaucaagcuuacagggaca

SEQ ID NO: 2239265 - RNA, 19 nt, Homo sapiens
  misc_RNA (1)...(19): siRNA sense strand
uuucuguauuggagagcua

SEQ ID NO: 2239266 - RNA, 19 nt, Homo sapiens
  misc_RNA (1)...(19): siRNA sense strand
guauuggagagcuaggaaa

SEQ ID NO: 2239267 - RNA, 19 nt, Homo sapiens
  misc_RNA (1)...(19): siRNA sense strand
uugaggaaggccaaagaaa

SEQ ID NO: 2239268 - RNA, 19 nt, Homo sapiens
  misc_RNA (1)...(19): siRNA sense strand
ccaucaugcucagaggaaa

SEQ ID NO: 2239269 - RNA, 19 nt, Homo sapiens
  misc_RNA (1)...(19): siRNA sense strand
cggaggaagaagcgcucua

SEQ ID NO: 2239270 - RNA, 19 nt, Homo sapiens
  misc_RNA (1)...(19): siRNA sense strand
ugaggaaggccaaagaaaa

SEQ ID NO: 2239271 - RNA, 19 nt, Homo sapiens
  misc_RNA (1)...(19): siRNA sense strand
aggagaaagcaguggauug

SEQ ID NO: 2239272 - RNA, 19 nt, Homo sapiens
  misc_RNA (1)...(19): siRNA sense strand
ggcuggagugaauggauua

SEQ ID NO: 2239273 - RNA, 19 nt, Homo sapiens
  misc_RNA (1)...(19): siRNA sense strand
ugucaguggauauggccaa

SEQ ID NO: 2239274 - RNA, 19 nt, Homo sapiens
  misc_RNA (1)...(19): siRNA sense strand
caucaugcucagaggaaac

SEQ ID NO: 2239275 - RNA, 19 nt, Homo sapiens
  misc_RNA (1)...(19): siRNA sense strand
ggauuuaacauuacgucca

SEQ ID NO: 2239276 - RNA, 19 nt, Homo sapiens
  misc_RNA (1)...(19): siRNA sense strand
ccucaucggaagagccaga

SEQ ID NO: 2239277 - RNA, 19 nt, Homo sapiens
  misc_RNA (1)...(19): siRNA sense strand
gauauuauguccuggcugu

SEQ ID NO: 2239278 - RNA, 19 nt, Homo sapiens
  misc_RNA (1)...(19): siRNA sense strand
acaguagagucuugcgcuu

SEQ ID NO: 2239279 - RNA, 19 nt, Homo sapiens
  misc_RNA (1)...(19): siRNA sense strand
ugaaagaaaaggacuguau

SEQ ID NO: 2239280 - RNA, 19 nt, Homo sapiens
  misc_RNA (1)...(19): siRNA sense strand
ugcuuaaaguauacccuaa

SEQ ID NO: 2239281 - RNA, 19 nt, Homo sapiens
  misc_RNA (1)...(19): siRNA sense strand
uggauugaaccucggaauu

SEQ ID NO: 2239282 - RNA, 19 nt, Homo sapiens
  misc_RNA (1)...(19): siRNA sense strand
ggagaugguaguagaggga

SEQ ID NO: 2239283 - RNA, 19 nt, Homo sapiens
  misc_RNA (1)...(19): siRNA sense strand
aaugugacacggugggaaa

SEQ ID NO: 2239284 - RNA, 19 nt, Homo sapiens
  misc_RNA (1)...(19): siRNA sense strand
aggaagaagaauaagaacu

SEQ ID NO: 2239285 - RNA, 19 nt, Homo sapiens
  misc_RNA (1)...(19): siRNA sense strand
gggaggaggaggaagagca

SEQ ID NO: 2239286 - RNA, 19 nt, Homo sapiens
  misc_RNA (1)...(19): siRNA sense strand
cgggccaggaagaagaaua

SEQ ID NO: 2239287 - RNA, 19 nt, Homo sapiens
  misc_RNA (1)...(19): siRNA sense strand
ccucaagggagugggaauu

SEQ ID NO: 2239288 - RNA, 19 nt, Homo sapiens
  misc_RNA (1)...(19): siRNA sense strand
aggaggaggaagagcagau

SEQ ID NO: 2239289 - RNA, 19 nt, Homo sapiens
  misc_RNA (1)...(19): siRNA sense strand
ccugagacggggaagaaaa

SEQ ID NO: 2239290 - RNA, 19 nt, Homo sapiens
  misc_RNA (1)...(19): siRNA sense strand
agaugguaguagagggaug

SEQ ID NO: 2239291 - RNA, 19 nt, Homo sapiens
  misc_RNA (1)...(19): siRNA sense strand
ucgccgagauucagggcca

SEQ ID NO: 2239292 - RNA, 19 nt, Homo sapiens
  misc_RNA (1)...(19): siRNA sense strand
accucaagggagugggaau

SEQ ID NO: 2239293 - RNA, 19 nt, Homo sapiens
  misc_RNA (1)...(19): siRNA sense strand
gaggaagagcagauccaca

SEQ ID NO: 2239294 - RNA, 19 nt, Homo sapiens
  misc_RNA (1)...(19): siRNA sense strand
ggagaugguaguagaggga

SEQ ID NO: 2239295 - RNA, 19 nt, Homo sapiens
  misc_RNA (1)...(19): siRNA sense strand
aaugugacacggugggaaa

SEQ ID NO: 2239296 - RNA, 19 nt, Homo sapiens
  misc_RNA (1)...(19): siRNA sense strand
aggaagaagaauaagaacu

SEQ ID NO: 2239297 - RNA, 19 nt, Homo sapiens
  misc_RNA (1)...(19): siRNA sense strand
gggaggaggaggaagagca

SEQ ID NO: 2239298 - RNA, 19 nt, Homo sapiens
  misc_RNA (1)...(19): siRNA sense strand
cgggccaggaagaagaaua

SEQ ID NO: 2239299 - RNA, 19 nt, Homo sapiens
  misc_RNA (1)...(19): siRNA sense strand
ccucaagggagugggaauu

SEQ ID NO: 2239300 - RNA, 19 nt, Homo sapiens
  misc_RNA (1)...(19): siRNA sense strand
aggaggaggaagagcagau

SEQ ID NO: 2239301 - RNA, 19 nt, Homo sapiens
  misc_RNA (1)...(19): siRNA sense strand
ccugagacggggaagaaaa

SEQ ID NO: 2239302 - RNA, 19 nt, Homo sapiens
  misc_RNA (1)...(19): siRNA sense strand
agaugguaguagagggaug

SEQ ID NO: 2239303 - RNA, 19 nt, Homo sapiens
  misc_RNA (1)...(19): siRNA sense strand
ucgccgagauucagggcca

SEQ ID NO: 2239304 - RNA, 19 nt, Homo sapiens
  misc_RNA (1)...(19): siRNA sense strand
accucaagggagugggaau

SEQ ID NO: 2239305 - RNA, 19 nt, Homo sapiens
  misc_RNA (1)...(19): siRNA sense strand
gaggaagagcagauccaca

SEQ ID NO: 2239306 - RNA, 19 nt, Homo sapiens
  misc_RNA (1)...(19): siRNA sense strand
ggagaugguaguagaggga

SEQ ID NO: 2239307 - RNA, 19 nt, Homo sapiens
  misc_RNA (1)...(19): siRNA sense strand
aaugugacacggugggaaa

SEQ ID NO: 2239308 - RNA, 19 nt, Homo sapiens
  misc_RNA (1)...(19): siRNA sense strand
aggaagaagaauaagaacu

SEQ ID NO: 2239309 - RNA, 19 nt, Homo sapiens
  misc_RNA (1)...(19): siRNA sense strand
gggaggaggaggaagagca

SEQ ID NO: 2239310 - RNA, 19 nt, Homo sapiens
  misc_RNA (1)...(19): siRNA sense strand
cgggccaggaagaagaaua

SEQ ID NO: 2239311 - RNA, 19 nt, Homo sapiens
  misc_RNA (1)...(19): siRNA sense strand
ccucaagggagugggaauu

SEQ ID NO: 2239312 - RNA, 19 nt, Homo sapiens
  misc_RNA (1)...(19): siRNA sense strand
aggaggaggaagagcagau

SEQ ID NO: 2239313 - RNA, 19 nt, Homo sapiens
  misc_RNA (1)...(19): siRNA sense strand
ccugagacggggaagaaaa

SEQ ID NO: 2239314 - RNA, 19 nt, Homo sapiens
  misc_RNA (1)...(19): siRNA sense strand
agaugguaguagagggaug

SEQ ID NO: 2239315 - RNA, 19 nt, Homo sapiens
  misc_RNA (1)...(19): siRNA sense strand
ucgccgagauucagggcca

SEQ ID NO: 2239316 - RNA, 19 nt, Homo sapiens
  misc_RNA (1)...(19): siRNA sense strand
accucaagggagugggaau

SEQ ID NO: 2239317 - RNA, 19 nt, Homo sapiens
  misc_RNA (1)...(19): siRNA sense strand
gaggaagagcagauccaca

SEQ ID NO: 2239318 - RNA, 19 nt, Homo sapiens
  misc_RNA (1)...(19): siRNA sense strand
cuuuaguacucaaggcaaa

SEQ ID NO: 2239319 - RNA, 19 nt, Homo sapiens
  misc_RNA (1)...(19): siRNA sense strand
gggaaguuuggaugggaaa

SEQ ID NO: 2239320 - RNA, 19 nt, Homo sapiens
  misc_RNA (1)...(19): siRNA sense strand
ccaagaaagaggaugguga

SEQ ID NO: 2239321 - RNA, 19 nt, Homo sapiens
  misc_RNA (1)...(19): siRNA sense strand
cgaugauagaagaggauga

SEQ ID NO: 2239322 - RNA, 19 nt, Homo sapiens
  misc_RNA (1)...(19): siRNA sense strand
gucuaaggcagaugggaaa

SEQ ID NO: 2239323 - RNA, 19 nt, Homo sapiens
  misc_RNA (1)...(19): siRNA sense strand
cgaaaagguagcugugaaa

SEQ ID NO: 2239324 - RNA, 19 nt, Homo sapiens
  misc_RNA (1)...(19): siRNA sense strand
ggagaaucccugagagacu

SEQ ID NO: 2239325 - RNA, 19 nt, Homo sapiens
  misc_RNA (1)...(19): siRNA sense strand
gggaaaguggcguggcgaa

SEQ ID NO: 2239326 - RNA, 19 nt, Homo sapiens
  misc_RNA (1)...(19): siRNA sense strand
ggugaaacagauuggaaaa

SEQ ID NO: 2239327 - RNA, 19 nt, Homo sapiens
  misc_RNA (1)...(19): siRNA sense strand
ugucuaaggcagaugggaa

SEQ ID NO: 2239328 - RNA, 19 nt, Homo sapiens
  misc_RNA (1)...(19): siRNA sense strand
uggugaaacagauuggaaa

SEQ ID NO: 2239329 - RNA, 19 nt, Homo sapiens
  misc_RNA (1)...(19): siRNA sense strand
acgagagcuugaacagaaa

SEQ ID NO: 2239330 - RNA, 19 nt, Homo sapiens
  misc_RNA (1)...(19): siRNA sense strand
cuggagaaucccugagaga

SEQ ID NO: 2239331 - RNA, 19 nt, Homo sapiens
  misc_RNA (1)...(19): siRNA sense strand
gguuagaacaggaugaaac

SEQ ID NO: 2239332 - RNA, 19 nt, Homo sapiens
  misc_RNA (1)...(19): siRNA sense strand
auguguaucaggagguaua

SEQ ID NO: 2239333 - RNA, 19 nt, Homo sapiens
  misc_RNA (1)...(19): siRNA sense strand
caacaauauuugcagcaca

SEQ ID NO: 2239334 - RNA, 19 nt, Homo sapiens
  misc_RNA (1)...(19): siRNA sense strand
ggacuauagcuaagcagau

SEQ ID NO: 2239335 - RNA, 19 nt, Homo sapiens
  misc_RNA (1)...(19): siRNA sense strand
cgguauaaaagacaagaaa

SEQ ID NO: 2239336 - RNA, 19 nt, Homo sapiens
  misc_RNA (1)...(19): siRNA sense strand
ucgauacagcauuggguua

SEQ ID NO: 2239337 - RNA, 19 nt, Homo sapiens
  misc_RNA (1)...(19): siRNA sense strand
agacaguguugaugaggca

SEQ ID NO: 2239338 - RNA, 19 nt, Homo sapiens
  misc_RNA (1)...(19): siRNA sense strand
guaccuaaucacagacuau

SEQ ID NO: 2239339 - RNA, 19 nt, Homo sapiens
  misc_RNA (1)...(19): siRNA sense strand
cugacagcccugcggguua

SEQ ID NO: 2239340 - RNA, 19 nt, Homo sapiens
  misc_RNA (1)...(19): siRNA sense strand
ugucauuuacacacagaaa

SEQ ID NO: 2239341 - RNA, 19 nt, Homo sapiens
  misc_RNA (1)...(19): siRNA sense strand
uaugaggacaugagggaga

SEQ ID NO: 2239342 - RNA, 19 nt, Homo sapiens
  misc_RNA (1)...(19): siRNA sense strand
ccucaucaaagaagaucaa

SEQ ID NO: 2239343 - RNA, 19 nt, Homo sapiens
  misc_RNA (1)...(19): siRNA sense strand
gagcucaggaaguggauca

SEQ ID NO: 2239344 - RNA, 19 nt, Homo sapiens
  misc_RNA (1)...(19): siRNA sense strand
uaagaaaacacuugccaaa

SEQ ID NO: 2239345 - RNA, 19 nt, Homo sapiens
  misc_RNA (1)...(19): siRNA sense strand
ugggaaaacucaugacaga

SEQ ID NO: 2239346 - RNA, 19 nt, Homo sapiens
  misc_RNA (1)...(19): siRNA sense strand
agaaaggaacgaauguaau

SEQ ID NO: 2239347 - RNA, 19 nt, Homo sapiens
  misc_RNA (1)...(19): siRNA sense strand
cagaaauauaucagacagu

SEQ ID NO: 2239348 - RNA, 19 nt, Homo sapiens
  misc_RNA (1)...(19): siRNA sense strand
aagcagauucagaugguga

SEQ ID NO: 2239349 - RNA, 19 nt, Homo sapiens
  misc_RNA (1)...(19): siRNA sense strand
guccaaaggucuugcguug

SEQ ID NO: 2239350 - RNA, 19 nt, Homo sapiens
  misc_RNA (1)...(19): siRNA sense strand
ggggaaguuuggaugggaa

SEQ ID NO: 2239351 - RNA, 19 nt, Homo sapiens
  misc_RNA (1)...(19): siRNA sense strand
gaugagugucuaaggcaga

SEQ ID NO: 2239352 - RNA, 19 nt, Homo sapiens
  misc_RNA (1)...(19): siRNA sense strand
guucuucaccacagaggaa

SEQ ID NO: 2239353 - RNA, 19 nt, Homo sapiens
  misc_RNA (1)...(19): siRNA sense strand
cagcugguucagagagaca

SEQ ID NO: 2239354 - RNA, 19 nt, Homo sapiens
  misc_RNA (1)...(19): siRNA sense strand
acgcuaaaucaaugcugaa

SEQ ID NO: 2239355 - RNA, 19 nt, Homo sapiens
  misc_RNA (1)...(19): siRNA sense strand
agucuuacaucauggcuga

SEQ ID NO: 2239356 - RNA, 19 nt, Homo sapiens
  misc_RNA (1)...(19): siRNA sense strand
aucaggagguauaguggaa

SEQ ID NO: 2239357 - RNA, 19 nt, Homo sapiens
  misc_RNA (1)...(19): siRNA sense strand
aaguguuggacgagagcuu

SEQ ID NO: 2239358 - RNA, 19 nt, Homo sapiens
  misc_RNA (1)...(19): siRNA sense strand
ugguucagagagacagaaa

SEQ ID NO: 2239359 - RNA, 19 nt, Homo sapiens
  misc_RNA (1)...(19): siRNA sense strand
acucaaggcaaaccagcaa

SEQ ID NO: 2239360 - RNA, 19 nt, Homo sapiens
  misc_RNA (1)...(19): siRNA sense strand
cuuaugaggacaugaggga

SEQ ID NO: 2239361 - RNA, 19 nt, Homo sapiens
  misc_RNA (1)...(19): siRNA sense strand
aaaugugggcaccaagaaa

SEQ ID NO: 2239362 - RNA, 19 nt, Homo sapiens
  misc_RNA (1)...(19): siRNA sense strand
ucacagacuaucaugaaaa

SEQ ID NO: 2239363 - RNA, 19 nt, Homo sapiens
  misc_RNA (1)...(19): siRNA sense strand
ggucacuucugguugccua

SEQ ID NO: 2239364 - RNA, 19 nt, Homo sapiens
  misc_RNA (1)...(19): siRNA sense strand
uuugcgaagugcaggaaaa

SEQ ID NO: 2239365 - RNA, 19 nt, Homo sapiens
  misc_RNA (1)...(19): siRNA sense strand
ucacgaugauagaagagga

SEQ ID NO: 2239366 - RNA, 19 nt, Homo sapiens
  misc_RNA (1)...(19): siRNA sense strand
acuagaaggcucagauuuu

SEQ ID NO: 2239367 - RNA, 19 nt, Homo sapiens
  misc_RNA (1)...(19): siRNA sense strand
ccuauacaccacagggcuu

SEQ ID NO: 2239368 - RNA, 19 nt, Homo sapiens
  misc_RNA (1)...(19): siRNA sense strand
cagcaauugcccaucgaga

SEQ ID NO: 2239369 - RNA, 19 nt, Homo sapiens
  misc_RNA (1)...(19): siRNA sense strand
guguugaugaggcaugaaa

SEQ ID NO: 2239370 - RNA, 19 nt, Homo sapiens
  misc_RNA (1)...(19): siRNA sense strand
uggcuaaagagcaagacaa

SEQ ID NO: 2239371 - RNA, 19 nt, Homo sapiens
  misc_RNA (1)...(19): siRNA sense strand
aggaaaaccaccaaagaga

SEQ ID NO: 2239372 - RNA, 19 nt, Homo sapiens
  misc_RNA (1)...(19): siRNA sense strand
ccaaagagagccuggccca

SEQ ID NO: 2239373 - RNA, 19 nt, Homo sapiens
  misc_RNA (1)...(19): siRNA sense strand
ccuggaugcaaaugaagaa

SEQ ID NO: 2239374 - RNA, 19 nt, Homo sapiens
  misc_RNA (1)...(19): siRNA sense strand
aggaaguggagaaucacaa

SEQ ID NO: 2239375 - RNA, 19 nt, Homo sapiens
  misc_RNA (1)...(19): siRNA sense strand
aagacaaagaaucagagaa

SEQ ID NO: 2239376 - RNA, 19 nt, Homo sapiens
  misc_RNA (1)...(19): siRNA sense strand
uggcuaaagagcaagacaa

SEQ ID NO: 2239377 - RNA, 19 nt, Homo sapiens
  misc_RNA (1)...(19): siRNA sense strand
aggaaaaccaccaaagaga

SEQ ID NO: 2239378 - RNA, 19 nt, Homo sapiens
  misc_RNA (1)...(19): siRNA sense strand
ccaaagagagccuggccca

SEQ ID NO: 2239379 - RNA, 19 nt, Homo sapiens
  misc_RNA (1)...(19): siRNA sense strand
ccuggaugcaaaugaagaa

SEQ ID NO: 2239380 - RNA, 19 nt, Homo sapiens
  misc_RNA (1)...(19): siRNA sense strand
aggaaguggagaaucacaa

SEQ ID NO: 2239381 - RNA, 19 nt, Homo sapiens
  misc_RNA (1)...(19): siRNA sense strand
aagacaaagaaucagagaa

SEQ ID NO: 2239382 - RNA, 19 nt, Homo sapiens
  misc_RNA (1)...(19): siRNA sense strand
uggcuaaagagcaagacaa

SEQ ID NO: 2239383 - RNA, 19 nt, Homo sapiens
  misc_RNA (1)...(19): siRNA sense strand
aggaaaaccaccaaagaga

SEQ ID NO: 2239384 - RNA, 19 nt, Homo sapiens
  misc_RNA (1)...(19): siRNA sense strand
ccaaagagagccuggccca

SEQ ID NO: 2239385 - RNA, 19 nt, Homo sapiens
  misc_RNA (1)...(19): siRNA sense strand
ccuggaugcaaaugaagaa

SEQ ID NO: 2239386 - RNA, 19 nt, Homo sapiens
  misc_RNA (1)...(19): siRNA sense strand
aggaaguggagaaucacaa

SEQ ID NO: 2239387 - RNA, 19 nt, Homo sapiens
  misc_RNA (1)...(19): siRNA sense strand
aagacaaagaaucagagaa

SEQ ID NO: 2239388 - RNA, 19 nt, Homo sapiens
  misc_RNA (1)...(19): siRNA sense strand
uggcuaaagagcaagacaa

SEQ ID NO: 2239389 - RNA, 19 nt, Homo sapiens
  misc_RNA (1)...(19): siRNA sense strand
aggaaaaccaccaaagaga

SEQ ID NO: 2239390 - RNA, 19 nt, Homo sapiens
  misc_RNA (1)...(19): siRNA sense strand
ccaaagagagccuggccca

SEQ ID NO: 2239391 - RNA, 19 nt, Homo sapiens
  misc_RNA (1)...(19): siRNA sense strand
ccuggaugcaaaugaagaa

SEQ ID NO: 2239392 - RNA, 19 nt, Homo sapiens
  misc_RNA (1)...(19): siRNA sense strand
aggaaguggagaaucacaa

SEQ ID NO: 2239393 - RNA, 19 nt, Homo sapiens
  misc_RNA (1)...(19): siRNA sense strand
aagacaaagaaucagagaa

SEQ ID NO: 2239394 - RNA, 19 nt, Homo sapiens
  misc_RNA (1)...(19): siRNA sense strand
ugggaaagucuauggaaaa

SEQ ID NO: 2239395 - RNA, 19 nt, Homo sapiens
  misc_RNA (1)...(19): siRNA sense strand
ugaccaaggagcacgguga

SEQ ID NO: 2239396 - RNA, 19 nt, Homo sapiens
  misc_RNA (1)...(19): siRNA sense strand
cagaugaggauaugggauc

SEQ ID NO: 2239397 - RNA, 19 nt, Homo sapiens
  misc_RNA (1)...(19): siRNA sense strand
cuuaaagaaauuaggggua

SEQ ID NO: 2239398 - RNA, 19 nt, Homo sapiens
  misc_RNA (1)...(19): siRNA sense strand
ggaacugcucacaggaaaa

SEQ ID NO: 2239399 - RNA, 19 nt, Homo sapiens
  misc_RNA (1)...(19): siRNA sense strand
guuuacacaccaaggaaca

SEQ ID NO: 2239400 - RNA, 19 nt, Homo sapiens
  misc_RNA (1)...(19): siRNA sense strand
agaaauuagggguaaacaa

SEQ ID NO: 2239401 - RNA, 19 nt, Homo sapiens
  misc_RNA (1)...(19): siRNA sense strand
caggccaugcugagacaaa

SEQ ID NO: 2239402 - RNA, 19 nt, Homo sapiens
  misc_RNA (1)...(19): siRNA sense strand
aagcgaaauuagugcggaa

SEQ ID NO: 2239403 - RNA, 19 nt, Homo sapiens
  misc_RNA (1)...(19): siRNA sense strand
gugaugaaauuaaggagga

SEQ ID NO: 2239404 - RNA, 19 nt, Homo sapiens
  misc_RNA (1)...(19): siRNA sense strand
uaaagaaugaugauggcaa

SEQ ID NO: 2239405 - RNA, 19 nt, Homo sapiens
  misc_RNA (1)...(19): siRNA sense strand
ugaugaaauuaaggaggaa

SEQ ID NO: 2239406 - RNA, 19 nt, Homo sapiens
  misc_RNA (1)...(19): siRNA sense strand
agaggaugagguuggacaa

SEQ ID NO: 2239407 - RNA, 19 nt, Homo sapiens
  misc_RNA (1)...(19): siRNA sense strand
cagaggaugagguuggaca

SEQ ID NO: 2239408 - RNA, 19 nt, Homo sapiens
  misc_RNA (1)...(19): siRNA sense strand
ccuuauaugaccaccuaau

SEQ ID NO: 2239409 - RNA, 19 nt, Homo sapiens
  misc_RNA (1)...(19): siRNA sense strand
gcuggaacugaaugggaca

SEQ ID NO: 2239410 - RNA, 19 nt, Homo sapiens
  misc_RNA (1)...(19): siRNA sense strand
ggacaaagaacaacccuga

SEQ ID NO: 2239411 - RNA, 19 nt, Homo sapiens
  misc_RNA (1)...(19): siRNA sense strand
cagccuucguugaggugaa

SEQ ID NO: 2239412 - RNA, 19 nt, Homo sapiens
  misc_RNA (1)...(19): siRNA sense strand
ccuacauaagauugaggaa

SEQ ID NO: 2239413 - RNA, 19 nt, Homo sapiens
  misc_RNA (1)...(19): siRNA sense strand
ugacaguggcugacggcau

SEQ ID NO: 2239414 - RNA, 19 nt, Homo sapiens
  misc_RNA (1)...(19): siRNA sense strand
ggaauacacucuaggcucu

SEQ ID NO: 2239415 - RNA, 19 nt, Homo sapiens
  misc_RNA (1)...(19): siRNA sense strand
ggccagagacagucgccua

SEQ ID NO: 2239416 - RNA, 19 nt, Homo sapiens
  misc_RNA (1)...(19): siRNA sense strand
gccuugacguucaggacau

SEQ ID NO: 2239417 - RNA, 19 nt, Homo sapiens
  misc_RNA (1)...(19): siRNA sense strand
cagacaugugaucgagauu

SEQ ID NO: 2239418 - RNA, 19 nt, Homo sapiens
  misc_RNA (1)...(19): siRNA sense strand
agguuuggaagcuggagaa

SEQ ID NO: 2239419 - RNA, 19 nt, Homo sapiens
  misc_RNA (1)...(19): siRNA sense strand
aauaaugcccacagggaca

SEQ ID NO: 2239420 - RNA, 19 nt, Homo sapiens
  misc_RNA (1)...(19): siRNA sense strand
ggaucuaccuggagaggag

SEQ ID NO: 2239421 - RNA, 19 nt, Homo sapiens
  misc_RNA (1)...(19): siRNA sense strand
ggaucuaccuggagaggag

SEQ ID NO: 2239422 - RNA, 19 nt, Homo sapiens
  misc_RNA (1)...(19): siRNA sense strand
cagcugaacuuccgagcga

SEQ ID NO: 2239423 - RNA, 19 nt, Homo sapiens
  misc_RNA (1)...(19): siRNA sense strand
cccugaaguuagaggaucu

SEQ ID NO: 2239424 - RNA, 19 nt, Homo sapiens
  misc_RNA (1)...(19): siRNA sense strand
aaucagaagaagagggcuc

SEQ ID NO: 2239425 - RNA, 19 nt, Homo sapiens
  misc_RNA (1)...(19): siRNA sense strand
uggaagaaaucgcugagga

SEQ ID NO: 2239426 - RNA, 19 nt, Homo sapiens
  misc_RNA (1)...(19): siRNA sense strand
aggaaggcucagagacuca

SEQ ID NO: 2239427 - RNA, 19 nt, Homo sapiens
  misc_RNA (1)...(19): siRNA sense strand
agccuaaaucagaagaaga

SEQ ID NO: 2239428 - RNA, 19 nt, Homo sapiens
  misc_RNA (1)...(19): siRNA sense strand
uuugaaugggcgagugauu

SEQ ID NO: 2239429 - RNA, 19 nt, Homo sapiens
  misc_RNA (1)...(19): siRNA sense strand
ccgagauccacgugguuca

SEQ ID NO: 2239430 - RNA, 19 nt, Homo sapiens
  misc_RNA (1)...(19): siRNA sense strand
cccuggaacuccugggcuu

SEQ ID NO: 2239431 - RNA, 19 nt, Homo sapiens
  misc_RNA (1)...(19): siRNA sense strand
ccuuugaaugggcgaguga

SEQ ID NO: 2239432 - RNA, 19 nt, Homo sapiens
  misc_RNA (1)...(19): siRNA sense strand
aggaucuaccugaaguuaa

SEQ ID NO: 2239433 - RNA, 19 nt, Homo sapiens
  misc_RNA (1)...(19): siRNA sense strand
ccucaagaaccccagaaua

SEQ ID NO: 2239434 - RNA, 19 nt, Homo sapiens
  misc_RNA (1)...(19): siRNA sense strand
ccuacaagaaugaugccua

SEQ ID NO: 2239435 - RNA, 19 nt, Homo sapiens
  misc_RNA (1)...(19): siRNA sense strand
agaucaaccaccagggcuu

SEQ ID NO: 2239436 - RNA, 19 nt, Homo sapiens
  misc_RNA (1)...(19): siRNA sense strand
ccaggaacucuacgggaau

SEQ ID NO: 2239437 - RNA, 19 nt, Homo sapiens
  misc_RNA (1)...(19): siRNA sense strand
accaggaacucuacgggaa

SEQ ID NO: 2239438 - RNA, 19 nt, Homo sapiens
  misc_RNA (1)...(19): siRNA sense strand
gcucagcacuggaggagag

SEQ ID NO: 2239439 - RNA, 19 nt, Homo sapiens
  misc_RNA (1)...(19): siRNA sense strand
gcaacaagucagaaggccu

SEQ ID NO: 2239440 - RNA, 19 nt, Homo sapiens
  misc_RNA (1)...(19): siRNA sense strand
gcuacaaucugucugccaa

SEQ ID NO: 2239441 - RNA, 19 nt, Homo sapiens
  misc_RNA (1)...(19): siRNA sense strand
ccgcugaauauuaccgcua

SEQ ID NO: 2239442 - RNA, 19 nt, Homo sapiens
  misc_RNA (1)...(19): siRNA sense strand
agaaggaagaguaucaaaa

SEQ ID NO: 2239443 - RNA, 19 nt, Homo sapiens
  misc_RNA (1)...(19): siRNA sense strand
uggugaucuuaaaggaaca

SEQ ID NO: 2239444 - RNA, 19 nt, Homo sapiens
  misc_RNA (1)...(19): siRNA sense strand
agauggagacugaggccca

SEQ ID NO: 2239445 - RNA, 19 nt, Homo sapiens
  misc_RNA (1)...(19): siRNA sense strand
cccucgaguuccaaggcua

SEQ ID NO: 2239446 - RNA, 19 nt, Homo sapiens
  misc_RNA (1)...(19): siRNA sense strand
ccauuauaacucagaccuu

SEQ ID NO: 2239447 - RNA, 19 nt, Homo sapiens
  misc_RNA (1)...(19): siRNA sense strand
cguccuaugacaagaucuu

SEQ ID NO: 2239448 - RNA, 19 nt, Homo sapiens
  misc_RNA (1)...(19): siRNA sense strand
gcaacaagucagaaggccu

SEQ ID NO: 2239449 - RNA, 19 nt, Homo sapiens
  misc_RNA (1)...(19): siRNA sense strand
gcuacaaucugucugccaa

SEQ ID NO: 2239450 - RNA, 19 nt, Homo sapiens
  misc_RNA (1)...(19): siRNA sense strand
ccgcugaauauuaccgcua

SEQ ID NO: 2239451 - RNA, 19 nt, Homo sapiens
  misc_RNA (1)...(19): siRNA sense strand
agaaggaagaguaucaaaa

SEQ ID NO: 2239452 - RNA, 19 nt, Homo sapiens
  misc_RNA (1)...(19): siRNA sense strand
uggugaucuuaaaggaaca

SEQ ID NO: 2239453 - RNA, 19 nt, Homo sapiens
  misc_RNA (1)...(19): siRNA sense strand
agauggagacugaggccca

SEQ ID NO: 2239454 - RNA, 19 nt, Homo sapiens
  misc_RNA (1)...(19): siRNA sense strand
cccucgaguuccaaggcua

SEQ ID NO: 2239455 - RNA, 19 nt, Homo sapiens
  misc_RNA (1)...(19): siRNA sense strand
ccauuauaacucagaccuu

SEQ ID NO: 2239456 - RNA, 19 nt, Homo sapiens
  misc_RNA (1)...(19): siRNA sense strand
cguccuaugacaagaucuu

SEQ ID NO: 2239457 - RNA, 19 nt, Homo sapiens
  misc_RNA (1)...(19): siRNA sense strand
ggguaaagacagagcgaga

SEQ ID NO: 2239458 - RNA, 19 nt, Homo sapiens
  misc_RNA (1)...(19): siRNA sense strand
uggacaaggaagagaccaa

SEQ ID NO: 2239459 - RNA, 19 nt, Homo sapiens
  misc_RNA (1)...(19): siRNA sense strand
cugaagaagcaaagaccuu

SEQ ID NO: 2239460 - RNA, 19 nt, Homo sapiens
  misc_RNA (1)...(19): siRNA sense strand
acgaggauguagagcgaca

SEQ ID NO: 2239461 - RNA, 19 nt, Homo sapiens
  misc_RNA (1)...(19): siRNA sense strand
gguuuaaaauggcagacaa

SEQ ID NO: 2239462 - RNA, 19 nt, Homo sapiens
  misc_RNA (1)...(19): siRNA sense strand
ugggaauacugaugagcca

SEQ ID NO: 2239463 - RNA, 19 nt, Homo sapiens
  misc_RNA (1)...(19): siRNA sense strand
cgugaugggaagauggaca

SEQ ID NO: 2239464 - RNA, 19 nt, Homo sapiens
  misc_RNA (1)...(19): siRNA sense strand
ugacaccagaagagagcaa

SEQ ID NO: 2239465 - RNA, 19 nt, Homo sapiens
  misc_RNA (1)...(19): siRNA sense strand
uggcagacaaggauggaga

SEQ ID NO: 2239466 - RNA, 19 nt, Homo sapiens
  misc_RNA (1)...(19): siRNA sense strand
auguagagcgacaguggaa

SEQ ID NO: 2239467 - RNA, 19 nt, Homo sapiens
  misc_RNA (1)...(19): siRNA sense strand
agacaaggauggagaccuc

SEQ ID NO: 2239468 - RNA, 19 nt, Homo sapiens
  misc_RNA (1)...(19): siRNA sense strand
gugaugggaagauggacaa

SEQ ID NO: 2239469 - RNA, 19 nt, Homo sapiens
  misc_RNA (1)...(19): siRNA sense strand
uuacgaggauguagagcga

SEQ ID NO: 2239470 - RNA, 19 nt, Homo sapiens
  misc_RNA (1)...(19): siRNA sense strand
auaagaaccgugaugggaa

SEQ ID NO: 2239471 - RNA, 19 nt, Homo sapiens
  misc_RNA (1)...(19): siRNA sense strand
auauaguaguacaggaaac

SEQ ID NO: 2239472 - RNA, 19 nt, Homo sapiens
  misc_RNA (1)...(19): siRNA sense strand
cuggauuaaauuugcacaa

SEQ ID NO: 2239473 - RNA, 19 nt, Homo sapiens
  misc_RNA (1)...(19): siRNA sense strand
aguaugacuacaugaaaga

SEQ ID NO: 2239474 - RNA, 19 nt, Homo sapiens
  misc_RNA (1)...(19): siRNA sense strand
aggcuuggaaagauuguaa

SEQ ID NO: 2239475 - RNA, 19 nt, Homo sapiens
  misc_RNA (1)...(19): siRNA sense strand
uagaagaguauauugguga

SEQ ID NO: 2239476 - RNA, 19 nt, Homo sapiens
  misc_RNA (1)...(19): siRNA sense strand
cauugaucuagaagaguau

SEQ ID NO: 2239477 - RNA, 19 nt, Homo sapiens
  misc_RNA (1)...(19): siRNA sense strand
gguuugucacuguggauga

SEQ ID NO: 2239478 - RNA, 19 nt, Homo sapiens
  misc_RNA (1)...(19): siRNA sense strand
uaguaguacaggaaacaau

SEQ ID NO: 2239479 - RNA, 19 nt, Homo sapiens
  misc_RNA (1)...(19): siRNA sense strand
ucacuguggaugagcucaa

SEQ ID NO: 2239480 - RNA, 19 nt, Homo sapiens
  misc_RNA (1)...(19): siRNA sense strand
ggaauacugaugagccaga

SEQ ID NO: 2239481 - RNA, 19 nt, Homo sapiens
  misc_RNA (1)...(19): siRNA sense strand
gggaagauggacaaggaag

SEQ ID NO: 2239482 - RNA, 19 nt, Homo sapiens
  misc_RNA (1)...(19): siRNA sense strand
aggaguaugacuacaugaa

SEQ ID NO: 2239483 - RNA, 19 nt, Homo sapiens
  misc_RNA (1)...(19): siRNA sense strand
ugugaaagcacgaaagcaa

SEQ ID NO: 2239484 - RNA, 19 nt, Homo sapiens
  misc_RNA (1)...(19): siRNA sense strand
auggaaagccaguggauau

SEQ ID NO: 2239485 - RNA, 19 nt, Homo sapiens
  misc_RNA (1)...(19): siRNA sense strand
gcauaucagaagagggcuu

SEQ ID NO: 2239486 - RNA, 19 nt, Homo sapiens
  misc_RNA (1)...(19): siRNA sense strand
guaauuuaguggaagggau

SEQ ID NO: 2239487 - RNA, 19 nt, Homo sapiens
  misc_RNA (1)...(19): siRNA sense strand
guggaaugccaaagacaau

SEQ ID NO: 2239488 - RNA, 19 nt, Homo sapiens
  misc_RNA (1)...(19): siRNA sense strand
cguaaagauccuuauggaa

SEQ ID NO: 2239489 - RNA, 19 nt, Homo sapiens
  misc_RNA (1)...(19): siRNA sense strand
aaccugaagcuuuggguaa

SEQ ID NO: 2239490 - RNA, 19 nt, Homo sapiens
  misc_RNA (1)...(19): siRNA sense strand
accugaagccugagaauuu

SEQ ID NO: 2239491 - RNA, 19 nt, Homo sapiens
  misc_RNA (1)...(19): siRNA sense strand
cuguagacugcuugaagaa

SEQ ID NO: 2239492 - RNA, 19 nt, Homo sapiens
  misc_RNA (1)...(19): siRNA sense strand
aucagaaacuagaaagaga

SEQ ID NO: 2239493 - RNA, 19 nt, Homo sapiens
  misc_RNA (1)...(19): siRNA sense strand
uuuaguuacuggaggugaa

SEQ ID NO: 2239494 - RNA, 19 nt, Homo sapiens
  misc_RNA (1)...(19): siRNA sense strand
ugaagaaaccagauggagu

SEQ ID NO: 2239495 - RNA, 19 nt, Homo sapiens
  misc_RNA (1)...(19): siRNA sense strand
ucagaaacuagaaagagaa

SEQ ID NO: 2239496 - RNA, 19 nt, Homo sapiens
  misc_RNA (1)...(19): siRNA sense strand
uagaaagagaagcuagaau

SEQ ID NO: 2239497 - RNA, 19 nt, Homo sapiens
  misc_RNA (1)...(19): siRNA sense strand
gugaacuguuugaagacau

SEQ ID NO: 2239498 - RNA, 19 nt, Homo sapiens
  misc_RNA (1)...(19): siRNA sense strand
agggagcagcugugaaauu

SEQ ID NO: 2239499 - RNA, 19 nt, Homo sapiens
  misc_RNA (1)...(19): siRNA sense strand
ugcuagggaucaucagaaa

SEQ ID NO: 2239500 - RNA, 19 nt, Homo sapiens
  misc_RNA (1)...(19): siRNA sense strand
ccauagaaguucaagggga

SEQ ID NO: 2239501 - RNA, 19 nt, Homo sapiens
  misc_RNA (1)...(19): siRNA sense strand
ucaucagaaacuagaaaga

SEQ ID NO: 2239502 - RNA, 19 nt, Homo sapiens
  misc_RNA (1)...(19): siRNA sense strand
ugaggaugaagaugugaaa

SEQ ID NO: 2239503 - RNA, 19 nt, Homo sapiens
  misc_RNA (1)...(19): siRNA sense strand
agagaauacuacagugaag

SEQ ID NO: 2239504 - RNA, 19 nt, Homo sapiens
  misc_RNA (1)...(19): siRNA sense strand
ucucagcagccaagaguuu

SEQ ID NO: 2239505 - RNA, 19 nt, Homo sapiens
  misc_RNA (1)...(19): siRNA sense strand
aagacauaguggcaagaga

SEQ ID NO: 2239506 - RNA, 19 nt, Homo sapiens
  misc_RNA (1)...(19): siRNA sense strand
uguuaaucauugucaccua

SEQ ID NO: 2239507 - RNA, 19 nt, Homo sapiens
  misc_RNA (1)...(19): siRNA sense strand
gcaccagguucacggacga

SEQ ID NO: 2239508 - RNA, 19 nt, Homo sapiens
  misc_RNA (1)...(19): siRNA sense strand
cagugaagcugaugccagu

SEQ ID NO: 2239509 - RNA, 19 nt, Homo sapiens
  misc_RNA (1)...(19): siRNA sense strand
cuccagaaguuuuacguaa

SEQ ID NO: 2239510 - RNA, 19 nt, Homo sapiens
  misc_RNA (1)...(19): siRNA sense strand
ccagaaugggacacgguga

SEQ ID NO: 2239511 - RNA, 19 nt, Homo sapiens
  misc_RNA (1)...(19): siRNA sense strand
ccaaaauuaucaacaccaa

SEQ ID NO: 2239512 - RNA, 19 nt, Homo sapiens
  misc_RNA (1)...(19): siRNA sense strand
cagccaagaguuuguugaa

SEQ ID NO: 2239513 - RNA, 19 nt, Homo sapiens
  misc_RNA (1)...(19): siRNA sense strand
acagcagauucuagaaagu

SEQ ID NO: 2239514 - RNA, 19 nt, Homo sapiens
  misc_RNA (1)...(19): siRNA sense strand
cugugaaauuggcagacuu

SEQ ID NO: 2239515 - RNA, 19 nt, Homo sapiens
  misc_RNA (1)...(19): siRNA sense strand
gagaguucaaauacaacaa

SEQ ID NO: 2239516 - RNA, 19 nt, Homo sapiens
  misc_RNA (1)...(19): siRNA sense strand
aguggaaugccaaagacaa

SEQ ID NO: 2239517 - RNA, 19 nt, Homo sapiens
  misc_RNA (1)...(19): siRNA sense strand
cauaguggcaagagaauac

SEQ ID NO: 2239518 - RNA, 19 nt, Homo sapiens
  misc_RNA (1)...(19): siRNA sense strand
gaagaaaacuaaagggugc

SEQ ID NO: 2239519 - RNA, 19 nt, Homo sapiens
  misc_RNA (1)...(19): siRNA sense strand
acuacuugguguuugauuu

SEQ ID NO: 2239520 - RNA, 19 nt, Homo sapiens
  misc_RNA (1)...(19): siRNA sense strand
guuugaagacauaguggca

SEQ ID NO: 2239521 - RNA, 19 nt, Homo sapiens
  misc_RNA (1)...(19): siRNA sense strand
gacauaguggcaagagaau

SEQ ID NO: 2239522 - RNA, 19 nt, Homo sapiens
  misc_RNA (1)...(19): siRNA sense strand
ugugaaagcacgaaagcaa

SEQ ID NO: 2239523 - RNA, 19 nt, Homo sapiens
  misc_RNA (1)...(19): siRNA sense strand
auggaaagccaguggauau

SEQ ID NO: 2239524 - RNA, 19 nt, Homo sapiens
  misc_RNA (1)...(19): siRNA sense strand
gcauaucagaagagggcuu

SEQ ID NO: 2239525 - RNA, 19 nt, Homo sapiens
  misc_RNA (1)...(19): siRNA sense strand
guaauuuaguggaagggau

SEQ ID NO: 2239526 - RNA, 19 nt, Homo sapiens
  misc_RNA (1)...(19): siRNA sense strand
guggaaugccaaagacaau

SEQ ID NO: 2239527 - RNA, 19 nt, Homo sapiens
  misc_RNA (1)...(19): siRNA sense strand
cguaaagauccuuauggaa

SEQ ID NO: 2239528 - RNA, 19 nt, Homo sapiens
  misc_RNA (1)...(19): siRNA sense strand
aaccugaagcuuuggguaa

SEQ ID NO: 2239529 - RNA, 19 nt, Homo sapiens
  misc_RNA (1)...(19): siRNA sense strand
accugaagccugagaauuu

SEQ ID NO: 2239530 - RNA, 19 nt, Homo sapiens
  misc_RNA (1)...(19): siRNA sense strand
cuguagacugcuugaagaa

SEQ ID NO: 2239531 - RNA, 19 nt, Homo sapiens
  misc_RNA (1)...(19): siRNA sense strand
aucagaaacuagaaagaga

SEQ ID NO: 2239532 - RNA, 19 nt, Homo sapiens
  misc_RNA (1)...(19): siRNA sense strand
uuuaguuacuggaggugaa

SEQ ID NO: 2239533 - RNA, 19 nt, Homo sapiens
  misc_RNA (1)...(19): siRNA sense strand
ugaagaaaccagauggagu

SEQ ID NO: 2239534 - RNA, 19 nt, Homo sapiens
  misc_RNA (1)...(19): siRNA sense strand
ucagaaacuagaaagagaa

SEQ ID NO: 2239535 - RNA, 19 nt, Homo sapiens
  misc_RNA (1)...(19): siRNA sense strand
uagaaagagaagcuagaau

SEQ ID NO: 2239536 - RNA, 19 nt, Homo sapiens
  misc_RNA (1)...(19): siRNA sense strand
gugaacuguuugaagacau

SEQ ID NO: 2239537 - RNA, 19 nt, Homo sapiens
  misc_RNA (1)...(19): siRNA sense strand
agggagcagcugugaaauu

SEQ ID NO: 2239538 - RNA, 19 nt, Homo sapiens
  misc_RNA (1)...(19): siRNA sense strand
ugcuagggaucaucagaaa

SEQ ID NO: 2239539 - RNA, 19 nt, Homo sapiens
  misc_RNA (1)...(19): siRNA sense strand
ccauagaaguucaagggga

SEQ ID NO: 2239540 - RNA, 19 nt, Homo sapiens
  misc_RNA (1)...(19): siRNA sense strand
ucaucagaaacuagaaaga

SEQ ID NO: 2239541 - RNA, 19 nt, Homo sapiens
  misc_RNA (1)...(19): siRNA sense strand
ugaggaugaagaugugaaa

SEQ ID NO: 2239542 - RNA, 19 nt, Homo sapiens
  misc_RNA (1)...(19): siRNA sense strand
agagaauacuacagugaag

SEQ ID NO: 2239543 - RNA, 19 nt, Homo sapiens
  misc_RNA (1)...(19): siRNA sense strand
ucucagcagccaagaguuu

SEQ ID NO: 2239544 - RNA, 19 nt, Homo sapiens
  misc_RNA (1)...(19): siRNA sense strand
aagacauaguggcaagaga

SEQ ID NO: 2239545 - RNA, 19 nt, Homo sapiens
  misc_RNA (1)...(19): siRNA sense strand
uguuaaucauugucaccua

SEQ ID NO: 2239546 - RNA, 19 nt, Homo sapiens
  misc_RNA (1)...(19): siRNA sense strand
gcaccagguucacggacga

SEQ ID NO: 2239547 - RNA, 19 nt, Homo sapiens
  misc_RNA (1)...(19): siRNA sense strand
cagugaagcugaugccagu

SEQ ID NO: 2239548 - RNA, 19 nt, Homo sapiens
  misc_RNA (1)...(19): siRNA sense strand
cuccagaaguuuuacguaa

SEQ ID NO: 2239549 - RNA, 19 nt, Homo sapiens
  misc_RNA (1)...(19): siRNA sense strand
ccagaaugggacacgguga

SEQ ID NO: 2239550 - RNA, 19 nt, Homo sapiens
  misc_RNA (1)...(19): siRNA sense strand
ccaaaauuaucaacaccaa

SEQ ID NO: 2239551 - RNA, 19 nt, Homo sapiens
  misc_RNA (1)...(19): siRNA sense strand
cagccaagaguuuguugaa

SEQ ID NO: 2239552 - RNA, 19 nt, Homo sapiens
  misc_RNA (1)...(19): siRNA sense strand
acagcagauucuagaaagu

SEQ ID NO: 2239553 - RNA, 19 nt, Homo sapiens
  misc_RNA (1)...(19): siRNA sense strand
cugugaaauuggcagacuu

SEQ ID NO: 2239554 - RNA, 19 nt, Homo sapiens
  misc_RNA (1)...(19): siRNA sense strand
gagaguucaaauacaacaa

SEQ ID NO: 2239555 - RNA, 19 nt, Homo sapiens
  misc_RNA (1)...(19): siRNA sense strand
aguggaaugccaaagacaa

SEQ ID NO: 2239556 - RNA, 19 nt, Homo sapiens
  misc_RNA (1)...(19): siRNA sense strand
cauaguggcaagagaauac

SEQ ID NO: 2239557 - RNA, 19 nt, Homo sapiens
  misc_RNA (1)...(19): siRNA sense strand
gaagaaaacuaaagggugc

SEQ ID NO: 2239558 - RNA, 19 nt, Homo sapiens
  misc_RNA (1)...(19): siRNA sense strand
acuacuugguguuugauuu

SEQ ID NO: 2239559 - RNA, 19 nt, Homo sapiens
  misc_RNA (1)...(19): siRNA sense strand
guuugaagacauaguggca

SEQ ID NO: 2239560 - RNA, 19 nt, Homo sapiens
  misc_RNA (1)...(19): siRNA sense strand
gacauaguggcaagagaau

SEQ ID NO: 2239561 - RNA, 19 nt, Homo sapiens
  misc_RNA (1)...(19): siRNA sense strand
ugugaaagcacgaaagcaa

SEQ ID NO: 2239562 - RNA, 19 nt, Homo sapiens
  misc_RNA (1)...(19): siRNA sense strand
auggaaagccaguggauau

SEQ ID NO: 2239563 - RNA, 19 nt, Homo sapiens
  misc_RNA (1)...(19): siRNA sense strand
gcauaucagaagagggcuu

SEQ ID NO: 2239564 - RNA, 19 nt, Homo sapiens
  misc_RNA (1)...(19): siRNA sense strand
guaauuuaguggaagggau

SEQ ID NO: 2239565 - RNA, 19 nt, Homo sapiens
  misc_RNA (1)...(19): siRNA sense strand
guggaaugccaaagacaau

SEQ ID NO: 2239566 - RNA, 19 nt, Homo sapiens
  misc_RNA (1)...(19): siRNA sense strand
cguaaagauccuuauggaa

SEQ ID NO: 2239567 - RNA, 19 nt, Homo sapiens
  misc_RNA (1)...(19): siRNA sense strand
aaccugaagcuuuggguaa

SEQ ID NO: 2239568 - RNA, 19 nt, Homo sapiens
  misc_RNA (1)...(19): siRNA sense strand
accugaagccugagaauuu

SEQ ID NO: 2239569 - RNA, 19 nt, Homo sapiens
  misc_RNA (1)...(19): siRNA sense strand
cuguagacugcuugaagaa

SEQ ID NO: 2239570 - RNA, 19 nt, Homo sapiens
  misc_RNA (1)...(19): siRNA sense strand
aucagaaacuagaaagaga

SEQ ID NO: 2239571 - RNA, 19 nt, Homo sapiens
  misc_RNA (1)...(19): siRNA sense strand
uuuaguuacuggaggugaa

SEQ ID NO: 2239572 - RNA, 19 nt, Homo sapiens
  misc_RNA (1)...(19): siRNA sense strand
ugaagaaaccagauggagu

SEQ ID NO: 2239573 - RNA, 19 nt, Homo sapiens
  misc_RNA (1)...(19): siRNA sense strand
ucagaaacuagaaagagaa

SEQ ID NO: 2239574 - RNA, 19 nt, Homo sapiens
  misc_RNA (1)...(19): siRNA sense strand
uagaaagagaagcuagaau

SEQ ID NO: 2239575 - RNA, 19 nt, Homo sapiens
  misc_RNA (1)...(19): siRNA sense strand
gugaacuguuugaagacau

SEQ ID NO: 2239576 - RNA, 19 nt, Homo sapiens
  misc_RNA (1)...(19): siRNA sense strand
agggagcagcugugaaauu

SEQ ID NO: 2239577 - RNA, 19 nt, Homo sapiens
  misc_RNA (1)...(19): siRNA sense strand
ugcuagggaucaucagaaa

SEQ ID NO: 2239578 - RNA, 19 nt, Homo sapiens
  misc_RNA (1)...(19): siRNA sense strand
ccauagaaguucaagggga

SEQ ID NO: 2239579 - RNA, 19 nt, Homo sapiens
  misc_RNA (1)...(19): siRNA sense strand
ucaucagaaacuagaaaga

SEQ ID NO: 2239580 - RNA, 19 nt, Homo sapiens
  misc_RNA (1)...(19): siRNA sense strand
ugaggaugaagaugugaaa

SEQ ID NO: 2239581 - RNA, 19 nt, Homo sapiens
  misc_RNA (1)...(19): siRNA sense strand
agagaauacuacagugaag

SEQ ID NO: 2239582 - RNA, 19 nt, Homo sapiens
  misc_RNA (1)...(19): siRNA sense strand
ucucagcagccaagaguuu

SEQ ID NO: 2239583 - RNA, 19 nt, Homo sapiens
  misc_RNA (1)...(19): siRNA sense strand
aagacauaguggcaagaga

SEQ ID NO: 2239584 - RNA, 19 nt, Homo sapiens
  misc_RNA (1)...(19): siRNA sense strand
uguuaaucauugucaccua

SEQ ID NO: 2239585 - RNA, 19 nt, Homo sapiens
  misc_RNA (1)...(19): siRNA sense strand
gcaccagguucacggacga

SEQ ID NO: 2239586 - RNA, 19 nt, Homo sapiens
  misc_RNA (1)...(19): siRNA sense strand
cagugaagcugaugccagu

SEQ ID NO: 2239587 - RNA, 19 nt, Homo sapiens
  misc_RNA (1)...(19): siRNA sense strand
cuccagaaguuuuacguaa

SEQ ID NO: 2239588 - RNA, 19 nt, Homo sapiens
  misc_RNA (1)...(19): siRNA sense strand
ccagaaugggacacgguga

SEQ ID NO: 2239589 - RNA, 19 nt, Homo sapiens
  misc_RNA (1)...(19): siRNA sense strand
ccaaaauuaucaacaccaa

SEQ ID NO: 2239590 - RNA, 19 nt, Homo sapiens
  misc_RNA (1)...(19): siRNA sense strand
cagccaagaguuuguugaa

SEQ ID NO: 2239591 - RNA, 19 nt, Homo sapiens
  misc_RNA (1)...(19): siRNA sense strand
acagcagauucuagaaagu

SEQ ID NO: 2239592 - RNA, 19 nt, Homo sapiens
  misc_RNA (1)...(19): siRNA sense strand
cugugaaauuggcagacuu

SEQ ID NO: 2239593 - RNA, 19 nt, Homo sapiens
  misc_RNA (1)...(19): siRNA sense strand
gagaguucaaauacaacaa

SEQ ID NO: 2239594 - RNA, 19 nt, Homo sapiens
  misc_RNA (1)...(19): siRNA sense strand
aguggaaugccaaagacaa

SEQ ID NO: 2239595 - RNA, 19 nt, Homo sapiens
  misc_RNA (1)...(19): siRNA sense strand
cauaguggcaagagaauac

SEQ ID NO: 2239596 - RNA, 19 nt, Homo sapiens
  misc_RNA (1)...(19): siRNA sense strand
gaagaaaacuaaagggugc

SEQ ID NO: 2239597 - RNA, 19 nt, Homo sapiens
  misc_RNA (1)...(19): siRNA sense strand
acuacuugguguuugauuu

SEQ ID NO: 2239598 - RNA, 19 nt, Homo sapiens
  misc_RNA (1)...(19): siRNA sense strand
guuugaagacauaguggca

SEQ ID NO: 2239599 - RNA, 19 nt, Homo sapiens
  misc_RNA (1)...(19): siRNA sense strand
gacauaguggcaagagaau

SEQ ID NO: 2239600 - RNA, 19 nt, Homo sapiens
  misc_RNA (1)...(19): siRNA sense strand
ugugaaagcacgaaagcaa

SEQ ID NO: 2239601 - RNA, 19 nt, Homo sapiens
  misc_RNA (1)...(19): siRNA sense strand
auggaaagccaguggauau

SEQ ID NO: 2239602 - RNA, 19 nt, Homo sapiens
  misc_RNA (1)...(19): siRNA sense strand
gcauaucagaagagggcuu

SEQ ID NO: 2239603 - RNA, 19 nt, Homo sapiens
  misc_RNA (1)...(19): siRNA sense strand
guaauuuaguggaagggau

SEQ ID NO: 2239604 - RNA, 19 nt, Homo sapiens
  misc_RNA (1)...(19): siRNA sense strand
guggaaugccaaagacaau

SEQ ID NO: 2239605 - RNA, 19 nt, Homo sapiens
  misc_RNA (1)...(19): siRNA sense strand
cguaaagauccuuauggaa

SEQ ID NO: 2239606 - RNA, 19 nt, Homo sapiens
  misc_RNA (1)...(19): siRNA sense strand
aaccugaagcuuuggguaa

SEQ ID NO: 2239607 - RNA, 19 nt, Homo sapiens
  misc_RNA (1)...(19): siRNA sense strand
accugaagccugagaauuu

SEQ ID NO: 2239608 - RNA, 19 nt, Homo sapiens
  misc_RNA (1)...(19): siRNA sense strand
cuguagacugcuugaagaa

SEQ ID NO: 2239609 - RNA, 19 nt, Homo sapiens
  misc_RNA (1)...(19): siRNA sense strand
aucagaaacuagaaagaga

SEQ ID NO: 2239610 - RNA, 19 nt, Homo sapiens
  misc_RNA (1)...(19): siRNA sense strand
uuuaguuacuggaggugaa

SEQ ID NO: 2239611 - RNA, 19 nt, Homo sapiens
  misc_RNA (1)...(19): siRNA sense strand
ugaagaaaccagauggagu

SEQ ID NO: 2239612 - RNA, 19 nt, Homo sapiens
  misc_RNA (1)...(19): siRNA sense strand
ucagaaacuagaaagagaa

SEQ ID NO: 2239613 - RNA, 19 nt, Homo sapiens
  misc_RNA (1)...(19): siRNA sense strand
uagaaagagaagcuagaau

SEQ ID NO: 2239614 - RNA, 19 nt, Homo sapiens
  misc_RNA (1)...(19): siRNA sense strand
gugaacuguuugaagacau

SEQ ID NO: 2239615 - RNA, 19 nt, Homo sapiens
  misc_RNA (1)...(19): siRNA sense strand
agggagcagcugugaaauu

SEQ ID NO: 2239616 - RNA, 19 nt, Homo sapiens
  misc_RNA (1)...(19): siRNA sense strand
ugcuagggaucaucagaaa

SEQ ID NO: 2239617 - RNA, 19 nt, Homo sapiens
  misc_RNA (1)...(19): siRNA sense strand
ccauagaaguucaagggga

SEQ ID NO: 2239618 - RNA, 19 nt, Homo sapiens
  misc_RNA (1)...(19): siRNA sense strand
ucaucagaaacuagaaaga

SEQ ID NO: 2239619 - RNA, 19 nt, Homo sapiens
  misc_RNA (1)...(19): siRNA sense strand
ugaggaugaagaugugaaa

SEQ ID NO: 2239620 - RNA, 19 nt, Homo sapiens
  misc_RNA (1)...(19): siRNA sense strand
agagaauacuacagugaag

SEQ ID NO: 2239621 - RNA, 19 nt, Homo sapiens
  misc_RNA (1)...(19): siRNA sense strand
ucucagcagccaagaguuu

SEQ ID NO: 2239622 - RNA, 19 nt, Homo sapiens
  misc_RNA (1)...(19): siRNA sense strand
aagacauaguggcaagaga

SEQ ID NO: 2239623 - RNA, 19 nt, Homo sapiens
  misc_RNA (1)...(19): siRNA sense strand
uguuaaucauugucaccua

SEQ ID NO: 2239624 - RNA, 19 nt, Homo sapiens
  misc_RNA (1)...(19): siRNA sense strand
gcaccagguucacggacga

SEQ ID NO: 2239625 - RNA, 19 nt, Homo sapiens
  misc_RNA (1)...(19): siRNA sense strand
cagugaagcugaugccagu

SEQ ID NO: 2239626 - RNA, 19 nt, Homo sapiens
  misc_RNA (1)...(19): siRNA sense strand
cuccagaaguuuuacguaa

SEQ ID NO: 2239627 - RNA, 19 nt, Homo sapiens
  misc_RNA (1)...(19): siRNA sense strand
ccagaaugggacacgguga

SEQ ID NO: 2239628 - RNA, 19 nt, Homo sapiens
  misc_RNA (1)...(19): siRNA sense strand
ccaaaauuaucaacaccaa

SEQ ID NO: 2239629 - RNA, 19 nt, Homo sapiens
  misc_RNA (1)...(19): siRNA sense strand
cagccaagaguuuguugaa

SEQ ID NO: 2239630 - RNA, 19 nt, Homo sapiens
  misc_RNA (1)...(19): siRNA sense strand
acagcagauucuagaaagu

SEQ ID NO: 2239631 - RNA, 19 nt, Homo sapiens
  misc_RNA (1)...(19): siRNA sense strand
cugugaaauuggcagacuu

SEQ ID NO: 2239632 - RNA, 19 nt, Homo sapiens
  misc_RNA (1)...(19): siRNA sense strand
gagaguucaaauacaacaa

SEQ ID NO: 2239633 - RNA, 19 nt, Homo sapiens
  misc_RNA (1)...(19): siRNA sense strand
aguggaaugccaaagacaa

SEQ ID NO: 2239634 - RNA, 19 nt, Homo sapiens
  misc_RNA (1)...(19): siRNA sense strand
cauaguggcaagagaauac

SEQ ID NO: 2239635 - RNA, 19 nt, Homo sapiens
  misc_RNA (1)...(19): siRNA sense strand
gaagaaaacuaaagggugc

SEQ ID NO: 2239636 - RNA, 19 nt, Homo sapiens
  misc_RNA (1)...(19): siRNA sense strand
acuacuugguguuugauuu

SEQ ID NO: 2239637 - RNA, 19 nt, Homo sapiens
  misc_RNA (1)...(19): siRNA sense strand
guuugaagacauaguggca

SEQ ID NO: 2239638 - RNA, 19 nt, Homo sapiens
  misc_RNA (1)...(19): siRNA sense strand
gacauaguggcaagagaau

SEQ ID NO: 2239639 - RNA, 19 nt, Homo sapiens
  misc_RNA (1)...(19): siRNA sense strand
uggaagacucauugaacau

SEQ ID NO: 2239640 - RNA, 19 nt, Homo sapiens
  misc_RNA (1)...(19): siRNA sense strand
uggaagacucauugaacau

SEQ ID NO: 2239641 - RNA, 19 nt, Homo sapiens
  misc_RNA (1)...(19): siRNA sense strand
uggaagacucauugaacau

SEQ ID NO: 2239642 - RNA, 19 nt, Homo sapiens
  misc_RNA (1)...(19): siRNA sense strand
uggaagacucauugaacau

SEQ ID NO: 2239643 - RNA, 19 nt, Homo sapiens
  misc_RNA (1)...(19): siRNA sense strand
uggaagacucauugaacau

SEQ ID NO: 2239644 - RNA, 19 nt, Homo sapiens
  misc_RNA (1)...(19): siRNA sense strand
aggaaaugcaagagaaacu

SEQ ID NO: 2239645 - RNA, 19 nt, Homo sapiens
  misc_RNA (1)...(19): siRNA sense strand
ucuucaagcuuuugggcua

SEQ ID NO: 2239646 - RNA, 19 nt, Homo sapiens
  misc_RNA (1)...(19): siRNA sense strand
cuaugguguggaugggaaa

SEQ ID NO: 2239647 - RNA, 19 nt, Homo sapiens
  misc_RNA (1)...(19): siRNA sense strand
ccgaguggugcuagccaaa

SEQ ID NO: 2239648 - RNA, 19 nt, Homo sapiens
  misc_RNA (1)...(19): siRNA sense strand
ggaaacugcuccagcucca

SEQ ID NO: 2239649 - RNA, 19 nt, Homo sapiens
  misc_RNA (1)...(19): siRNA sense strand
gggcaguuucagccagaau

SEQ ID NO: 2239650 - RNA, 19 nt, Homo sapiens
  misc_RNA (1)...(19): siRNA sense strand
gcauauagguugcagucuc

SEQ ID NO: 2239651 - RNA, 19 nt, Homo sapiens
  misc_RNA (1)...(19): siRNA sense strand
acaucaucaccuuggaaau

SEQ ID NO: 2239652 - RNA, 19 nt, Homo sapiens
  misc_RNA (1)...(19): siRNA sense strand
gggagcucauccaggccaa

SEQ ID NO: 2239653 - RNA, 19 nt, Homo sapiens
  misc_RNA (1)...(19): siRNA sense strand
ucuaugguguggaugggaa

SEQ ID NO: 2239654 - RNA, 19 nt, Homo sapiens
  misc_RNA (1)...(19): siRNA sense strand
aggaaaugcaagagaaacu

SEQ ID NO: 2239655 - RNA, 19 nt, Homo sapiens
  misc_RNA (1)...(19): siRNA sense strand
ucuucaagcuuuugggcua

SEQ ID NO: 2239656 - RNA, 19 nt, Homo sapiens
  misc_RNA (1)...(19): siRNA sense strand
agugaugccgguaaagaaa

SEQ ID NO: 2239657 - RNA, 19 nt, Homo sapiens
  misc_RNA (1)...(19): siRNA sense strand
cuaugguguggaugggaaa

SEQ ID NO: 2239658 - RNA, 19 nt, Homo sapiens
  misc_RNA (1)...(19): siRNA sense strand
ccgaguggugcuagccaaa

SEQ ID NO: 2239659 - RNA, 19 nt, Homo sapiens
  misc_RNA (1)...(19): siRNA sense strand
agacaugauaugcggcuau

SEQ ID NO: 2239660 - RNA, 19 nt, Homo sapiens
  misc_RNA (1)...(19): siRNA sense strand
ggaaacugcuccagcucca

SEQ ID NO: 2239661 - RNA, 19 nt, Homo sapiens
  misc_RNA (1)...(19): siRNA sense strand
agguuaugcuccuggcaca

SEQ ID NO: 2239662 - RNA, 19 nt, Homo sapiens
  misc_RNA (1)...(19): siRNA sense strand
guaaagaaaaguugccgaa

SEQ ID NO: 2239663 - RNA, 19 nt, Homo sapiens
  misc_RNA (1)...(19): siRNA sense strand
gggcaguuucagccagaau

SEQ ID NO: 2239664 - RNA, 19 nt, Homo sapiens
  misc_RNA (1)...(19): siRNA sense strand
gcauauagguugcagucuc

SEQ ID NO: 2239665 - RNA, 19 nt, Homo sapiens
  misc_RNA (1)...(19): siRNA sense strand
acaucaucaccuuggaaau

SEQ ID NO: 2239666 - RNA, 19 nt, Homo sapiens
  misc_RNA (1)...(19): siRNA sense strand
uugaccaacaagauggaaa

SEQ ID NO: 2239667 - RNA, 19 nt, Homo sapiens
  misc_RNA (1)...(19): siRNA sense strand
gggagcucauccaggccaa

SEQ ID NO: 2239668 - RNA, 19 nt, Homo sapiens
  misc_RNA (1)...(19): siRNA sense strand
ucuaugguguggaugggaa

SEQ ID NO: 2239669 - RNA, 19 nt, Homo sapiens
  misc_RNA (1)...(19): siRNA sense strand
aggagagugaugccgguaa

SEQ ID NO: 2239670 - RNA, 19 nt, Homo sapiens
  misc_RNA (1)...(19): siRNA sense strand
gugauaugcacguggccga

SEQ ID NO: 2239671 - RNA, 19 nt, Homo sapiens
  misc_RNA (1)...(19): siRNA sense strand
ccgaguggugcuagccaaa

SEQ ID NO: 2239672 - RNA, 19 nt, Homo sapiens
  misc_RNA (1)...(19): siRNA sense strand
gggcaguuucagccagaau

SEQ ID NO: 2239673 - RNA, 19 nt, Homo sapiens
  misc_RNA (1)...(19): siRNA sense strand
acaucaucaccuuggaaau

SEQ ID NO: 2239674 - RNA, 19 nt, Homo sapiens
  misc_RNA (1)...(19): siRNA sense strand
gggagcucauccaggccaa

SEQ ID NO: 2239675 - RNA, 19 nt, Homo sapiens
  misc_RNA (1)...(19): siRNA sense strand
ccgaguggugcuagccaaa

SEQ ID NO: 2239676 - RNA, 19 nt, Homo sapiens
  misc_RNA (1)...(19): siRNA sense strand
gggcaguuucagccagaau

SEQ ID NO: 2239677 - RNA, 19 nt, Homo sapiens
  misc_RNA (1)...(19): siRNA sense strand
acaucaucaccuuggaaau

SEQ ID NO: 2239678 - RNA, 19 nt, Homo sapiens
  misc_RNA (1)...(19): siRNA sense strand
gggagcucauccaggccaa

SEQ ID NO: 2239679 - RNA, 19 nt, Homo sapiens
  misc_RNA (1)...(19): siRNA sense strand
auccaauaaaggagagaaa

SEQ ID NO: 2239680 - RNA, 19 nt, Homo sapiens
  misc_RNA (1)...(19): siRNA sense strand
auguaaagaaagagcugaa

SEQ ID NO: 2239681 - RNA, 19 nt, Homo sapiens
  misc_RNA (1)...(19): siRNA sense strand
cuaccagaccagagcacaa

SEQ ID NO: 2239682 - RNA, 19 nt, Homo sapiens
  misc_RNA (1)...(19): siRNA sense strand
acuggaaggaagaggaaaa

SEQ ID NO: 2239683 - RNA, 19 nt, Homo sapiens
  misc_RNA (1)...(19): siRNA sense strand
augaagaauuccugagacu

SEQ ID NO: 2239684 - RNA, 19 nt, Homo sapiens
  misc_RNA (1)...(19): siRNA sense strand
guacugaacuggaaggaag

SEQ ID NO: 2239685 - RNA, 19 nt, Homo sapiens
  misc_RNA (1)...(19): siRNA sense strand
aagaaagagcugaagagau

SEQ ID NO: 2239686 - RNA, 19 nt, Homo sapiens
  misc_RNA (1)...(19): siRNA sense strand
gaagagaaucugacagcca

SEQ ID NO: 2239687 - RNA, 19 nt, Homo sapiens
  misc_RNA (1)...(19): siRNA sense strand
uguagauguagaagagaau

SEQ ID NO: 2239688 - RNA, 19 nt, Homo sapiens
  misc_RNA (1)...(19): siRNA sense strand
aggacaaacccaaggucau

SEQ ID NO: 2239689 - RNA, 19 nt, Homo sapiens
  misc_RNA (1)...(19): siRNA sense strand
gcaacguauggcaggacaa

SEQ ID NO: 2239690 - RNA, 19 nt, Homo sapiens
  misc_RNA (1)...(19): siRNA sense strand
auggcauccuggagggaau

SEQ ID NO: 2239691 - RNA, 19 nt, Homo sapiens
  misc_RNA (1)...(19): siRNA sense strand
uggcagacucuaugcaaga

SEQ ID NO: 2239692 - RNA, 19 nt, Homo sapiens
  misc_RNA (1)...(19): siRNA sense strand
uagaggaaguauuucggaa

SEQ ID NO: 2239693 - RNA, 19 nt, Homo sapiens
  misc_RNA (1)...(19): siRNA sense strand
cuauaguguagauguagaa

SEQ ID NO: 2239694 - RNA, 19 nt, Homo sapiens
  misc_RNA (1)...(19): siRNA sense strand
gaauauggaggcuggacca

SEQ ID NO: 2239695 - RNA, 19 nt, Homo sapiens
  misc_RNA (1)...(19): siRNA sense strand
gggaacugugggucagaga

SEQ ID NO: 2239696 - RNA, 19 nt, Homo sapiens
  misc_RNA (1)...(19): siRNA sense strand
ccauagaacgacuguccau

SEQ ID NO: 2239697 - RNA, 19 nt, Homo sapiens
  misc_RNA (1)...(19): siRNA sense strand
aacugugcaugaugagaaa

SEQ ID NO: 2239698 - RNA, 19 nt, Homo sapiens
  misc_RNA (1)...(19): siRNA sense strand
auccaauaaaggagagaaa

SEQ ID NO: 2239699 - RNA, 19 nt, Homo sapiens
  misc_RNA (1)...(19): siRNA sense strand
auguaaagaaagagcugaa

SEQ ID NO: 2239700 - RNA, 19 nt, Homo sapiens
  misc_RNA (1)...(19): siRNA sense strand
cuaccagaccagagcacaa

SEQ ID NO: 2239701 - RNA, 19 nt, Homo sapiens
  misc_RNA (1)...(19): siRNA sense strand
augaagaauuccugagacu

SEQ ID NO: 2239702 - RNA, 19 nt, Homo sapiens
  misc_RNA (1)...(19): siRNA sense strand
aagaaagagcugaagagau

SEQ ID NO: 2239703 - RNA, 19 nt, Homo sapiens
  misc_RNA (1)...(19): siRNA sense strand
gaagagaaucugacagcca

SEQ ID NO: 2239704 - RNA, 19 nt, Homo sapiens
  misc_RNA (1)...(19): siRNA sense strand
uguagauguagaagagaau

SEQ ID NO: 2239705 - RNA, 19 nt, Homo sapiens
  misc_RNA (1)...(19): siRNA sense strand
aggacaaacccaaggucau

SEQ ID NO: 2239706 - RNA, 19 nt, Homo sapiens
  misc_RNA (1)...(19): siRNA sense strand
gcaacguauggcaggacaa

SEQ ID NO: 2239707 - RNA, 19 nt, Homo sapiens
  misc_RNA (1)...(19): siRNA sense strand
auggcauccuggagggaau

SEQ ID NO: 2239708 - RNA, 19 nt, Homo sapiens
  misc_RNA (1)...(19): siRNA sense strand
uagaggaaguauuucggaa

SEQ ID NO: 2239709 - RNA, 19 nt, Homo sapiens
  misc_RNA (1)...(19): siRNA sense strand
cuauaguguagauguagaa

SEQ ID NO: 2239710 - RNA, 19 nt, Homo sapiens
  misc_RNA (1)...(19): siRNA sense strand
gaauauggaggcuggacca

SEQ ID NO: 2239711 - RNA, 19 nt, Homo sapiens
  misc_RNA (1)...(19): siRNA sense strand
gggaacugugggucagaga

SEQ ID NO: 2239712 - RNA, 19 nt, Homo sapiens
  misc_RNA (1)...(19): siRNA sense strand
ccauagaacgacuguccau

SEQ ID NO: 2239713 - RNA, 19 nt, Homo sapiens
  misc_RNA (1)...(19): siRNA sense strand
aacugugcaugaugagaaa

SEQ ID NO: 2239714 - RNA, 19 nt, Homo sapiens
  misc_RNA (1)...(19): siRNA sense strand
auccaauaaaggagagaaa

SEQ ID NO: 2239715 - RNA, 19 nt, Homo sapiens
  misc_RNA (1)...(19): siRNA sense strand
auguaaagaaagagcugaa

SEQ ID NO: 2239716 - RNA, 19 nt, Homo sapiens
  misc_RNA (1)...(19): siRNA sense strand
cuaccagaccagagcacaa

SEQ ID NO: 2239717 - RNA, 19 nt, Homo sapiens
  misc_RNA (1)...(19): siRNA sense strand
augaagaauuccugagacu

SEQ ID NO: 2239718 - RNA, 19 nt, Homo sapiens
  misc_RNA (1)...(19): siRNA sense strand
aagaaagagcugaagagau

SEQ ID NO: 2239719 - RNA, 19 nt, Homo sapiens
  misc_RNA (1)...(19): siRNA sense strand
gaagagaaucugacagcca

SEQ ID NO: 2239720 - RNA, 19 nt, Homo sapiens
  misc_RNA (1)...(19): siRNA sense strand
uguagauguagaagagaau

SEQ ID NO: 2239721 - RNA, 19 nt, Homo sapiens
  misc_RNA (1)...(19): siRNA sense strand
aggacaaacccaaggucau

SEQ ID NO: 2239722 - RNA, 19 nt, Homo sapiens
  misc_RNA (1)...(19): siRNA sense strand
auggcauccuggagggaau

SEQ ID NO: 2239723 - RNA, 19 nt, Homo sapiens
  misc_RNA (1)...(19): siRNA sense strand
uagaggaaguauuucggaa

SEQ ID NO: 2239724 - RNA, 19 nt, Homo sapiens
  misc_RNA (1)...(19): siRNA sense strand
cuauaguguagauguagaa

SEQ ID NO: 2239725 - RNA, 19 nt, Homo sapiens
  misc_RNA (1)...(19): siRNA sense strand
gggaacugugggucagaga

SEQ ID NO: 2239726 - RNA, 19 nt, Homo sapiens
  misc_RNA (1)...(19): siRNA sense strand
ccauagaacgacuguccau

SEQ ID NO: 2239727 - RNA, 19 nt, Homo sapiens
  misc_RNA (1)...(19): siRNA sense strand
aacugugcaugaugagaaa

SEQ ID NO: 2239728 - RNA, 19 nt, Homo sapiens
  misc_RNA (1)...(19): siRNA sense strand
gagccauggcgaaggcaau

SEQ ID NO: 2239729 - RNA, 19 nt, Homo sapiens
  misc_RNA (1)...(19): siRNA sense strand
ccaacauaacugaggugga

SEQ ID NO: 2239730 - RNA, 19 nt, Homo sapiens
  misc_RNA (1)...(19): siRNA sense strand
uauuauucucaccgggaaa

SEQ ID NO: 2239731 - RNA, 19 nt, Homo sapiens
  misc_RNA (1)...(19): siRNA sense strand
gagccauggcgaaggcaau

SEQ ID NO: 2239732 - RNA, 19 nt, Homo sapiens
  misc_RNA (1)...(19): siRNA sense strand
ccaacauaacugaggugga

SEQ ID NO: 2239733 - RNA, 19 nt, Homo sapiens
  misc_RNA (1)...(19): siRNA sense strand
uauuauucucaccgggaaa

SEQ ID NO: 2239734 - RNA, 19 nt, Homo sapiens
  misc_RNA (1)...(19): siRNA sense strand
ggcuauuacucguggagga

SEQ ID NO: 2239735 - RNA, 19 nt, Homo sapiens
  misc_RNA (1)...(19): siRNA sense strand
gaaaagaccuggaaaucau

SEQ ID NO: 2239736 - RNA, 19 nt, Homo sapiens
  misc_RNA (1)...(19): siRNA sense strand
auacaagaucccaguggaa

SEQ ID NO: 2239737 - RNA, 19 nt, Homo sapiens
  misc_RNA (1)...(19): siRNA sense strand
guggaggagcccaggaaga

SEQ ID NO: 2239738 - RNA, 19 nt, Homo sapiens
  misc_RNA (1)...(19): siRNA sense strand
acggaaaagaccuggaaau

SEQ ID NO: 2239739 - RNA, 19 nt, Homo sapiens
  misc_RNA (1)...(19): siRNA sense strand
gaacagacaaagaugccga

SEQ ID NO: 2239740 - RNA, 19 nt, Homo sapiens
  misc_RNA (1)...(19): siRNA sense strand
cagguaugggcguucgaaa

SEQ ID NO: 2239741 - RNA, 19 nt, Homo sapiens
  misc_RNA (1)...(19): siRNA sense strand
ugauaaagugacagguaug

SEQ ID NO: 2239742 - RNA, 19 nt, Homo sapiens
  misc_RNA (1)...(19): siRNA sense strand
auacaagaucccaguggaa

SEQ ID NO: 2239743 - RNA, 19 nt, Homo sapiens
  misc_RNA (1)...(19): siRNA sense strand
gaacagacaaagaugccga

SEQ ID NO: 2239744 - RNA, 19 nt, Homo sapiens
  misc_RNA (1)...(19): siRNA sense strand
cagguaugggcguucgaaa

SEQ ID NO: 2239745 - RNA, 19 nt, Homo sapiens
  misc_RNA (1)...(19): siRNA sense strand
ugauaaagugacagguaug

SEQ ID NO: 2239746 - RNA, 19 nt, Homo sapiens
  misc_RNA (1)...(19): siRNA sense strand
ggcuauuacucguggagga

SEQ ID NO: 2239747 - RNA, 19 nt, Homo sapiens
  misc_RNA (1)...(19): siRNA sense strand
gaaaagaccuggaaaucau

SEQ ID NO: 2239748 - RNA, 19 nt, Homo sapiens
  misc_RNA (1)...(19): siRNA sense strand
auacaagaucccaguggaa

SEQ ID NO: 2239749 - RNA, 19 nt, Homo sapiens
  misc_RNA (1)...(19): siRNA sense strand
guggaggagcccaggaaga

SEQ ID NO: 2239750 - RNA, 19 nt, Homo sapiens
  misc_RNA (1)...(19): siRNA sense strand
acggaaaagaccuggaaau

SEQ ID NO: 2239751 - RNA, 19 nt, Homo sapiens
  misc_RNA (1)...(19): siRNA sense strand
gaacagacaaagaugccga

SEQ ID NO: 2239752 - RNA, 19 nt, Homo sapiens
  misc_RNA (1)...(19): siRNA sense strand
cagguaugggcguucgaaa

SEQ ID NO: 2239753 - RNA, 19 nt, Homo sapiens
  misc_RNA (1)...(19): siRNA sense strand
ugauaaagugacagguaug

SEQ ID NO: 2239754 - RNA, 19 nt, Homo sapiens
  misc_RNA (1)...(19): siRNA sense strand
auacaagaucccaguggaa

SEQ ID NO: 2239755 - RNA, 19 nt, Homo sapiens
  misc_RNA (1)...(19): siRNA sense strand
gaacagacaaagaugccga

SEQ ID NO: 2239756 - RNA, 19 nt, Homo sapiens
  misc_RNA (1)...(19): siRNA sense strand
cagguaugggcguucgaaa

SEQ ID NO: 2239757 - RNA, 19 nt, Homo sapiens
  misc_RNA (1)...(19): siRNA sense strand
ugauaaagugacagguaug

SEQ ID NO: 2239758 - RNA, 19 nt, Homo sapiens
  misc_RNA (1)...(19): siRNA sense strand
agaaaggaggagauggaaa

SEQ ID NO: 2239759 - RNA, 19 nt, Homo sapiens
  misc_RNA (1)...(19): siRNA sense strand
gagauggagaagaggguca

SEQ ID NO: 2239760 - RNA, 19 nt, Homo sapiens
  misc_RNA (1)...(19): siRNA sense strand
cuucacagcauuagggaca

SEQ ID NO: 2239761 - RNA, 19 nt, Homo sapiens
  misc_RNA (1)...(19): siRNA sense strand
ggagaaggaaaguuggaca

SEQ ID NO: 2239762 - RNA, 19 nt, Homo sapiens
  misc_RNA (1)...(19): siRNA sense strand
gaaaagagucugugcccaa

SEQ ID NO: 2239763 - RNA, 19 nt, Homo sapiens
  misc_RNA (1)...(19): siRNA sense strand
aggaggagauggaaaggga

SEQ ID NO: 2239764 - RNA, 19 nt, Homo sapiens
  misc_RNA (1)...(19): siRNA sense strand
ccgcaaaggaagcaagaac

SEQ ID NO: 2239765 - RNA, 19 nt, Homo sapiens
  misc_RNA (1)...(19): siRNA sense strand
agaucagaauugaggucuu

SEQ ID NO: 2239766 - RNA, 19 nt, Homo sapiens
  misc_RNA (1)...(19): siRNA sense strand
acacuagaaaggaggagau

SEQ ID NO: 2239767 - RNA, 19 nt, Homo sapiens
  misc_RNA (1)...(19): siRNA sense strand
aggaaaucuccaaaugcaa

SEQ ID NO: 2239768 - RNA, 19 nt, Homo sapiens
  misc_RNA (1)...(19): siRNA sense strand
ugcaaaagcacgggagaaa

SEQ ID NO: 2239769 - RNA, 19 nt, Homo sapiens
  misc_RNA (1)...(19): siRNA sense strand
agaagugagcagaucagaa

SEQ ID NO: 2239770 - RNA, 19 nt, Homo sapiens
  misc_RNA (1)...(19): siRNA sense strand
ggaggagauggaaagggaa

SEQ ID NO: 2239771 - RNA, 19 nt, Homo sapiens
  misc_RNA (1)...(19): siRNA sense strand
ggacaggaauggaacacac

SEQ ID NO: 2239772 - RNA, 19 nt, Homo sapiens
  misc_RNA (1)...(19): siRNA sense strand
uccagagacuccaggaaaa

SEQ ID NO: 2239773 - RNA, 19 nt, Homo sapiens
  misc_RNA (1)...(19): siRNA sense strand
cagcauuagggacaggaau

SEQ ID NO: 2239774 - RNA, 19 nt, Homo sapiens
  misc_RNA (1)...(19): siRNA sense strand
ugauguuauuccagagacu

SEQ ID NO: 2239775 - RNA, 19 nt, Homo sapiens
  misc_RNA (1)...(19): siRNA sense strand
gaggagauggaaagggaac

SEQ ID NO: 2239776 - RNA, 19 nt, Homo sapiens
  misc_RNA (1)...(19): siRNA sense strand
agaagaagugagcagauca

SEQ ID NO: 2239777 - RNA, 19 nt, Homo sapiens
  misc_RNA (1)...(19): siRNA sense strand
agaaaggaggagauggaaa

SEQ ID NO: 2239778 - RNA, 19 nt, Homo sapiens
  misc_RNA (1)...(19): siRNA sense strand
gagauggagaagaggguca

SEQ ID NO: 2239779 - RNA, 19 nt, Homo sapiens
  misc_RNA (1)...(19): siRNA sense strand
cuucacagcauuagggaca

SEQ ID NO: 2239780 - RNA, 19 nt, Homo sapiens
  misc_RNA (1)...(19): siRNA sense strand
ggagaaggaaaguuggaca

SEQ ID NO: 2239781 - RNA, 19 nt, Homo sapiens
  misc_RNA (1)...(19): siRNA sense strand
gaaaagagucugugcccaa

SEQ ID NO: 2239782 - RNA, 19 nt, Homo sapiens
  misc_RNA (1)...(19): siRNA sense strand
aggaggagauggaaaggga

SEQ ID NO: 2239783 - RNA, 19 nt, Homo sapiens
  misc_RNA (1)...(19): siRNA sense strand
ccgcaaaggaagcaagaac

SEQ ID NO: 2239784 - RNA, 19 nt, Homo sapiens
  misc_RNA (1)...(19): siRNA sense strand
agaucagaauugaggucuu

SEQ ID NO: 2239785 - RNA, 19 nt, Homo sapiens
  misc_RNA (1)...(19): siRNA sense strand
acacuagaaaggaggagau

SEQ ID NO: 2239786 - RNA, 19 nt, Homo sapiens
  misc_RNA (1)...(19): siRNA sense strand
aggaaaucuccaaaugcaa

SEQ ID NO: 2239787 - RNA, 19 nt, Homo sapiens
  misc_RNA (1)...(19): siRNA sense strand
ugcaaaagcacgggagaaa

SEQ ID NO: 2239788 - RNA, 19 nt, Homo sapiens
  misc_RNA (1)...(19): siRNA sense strand
agaagugagcagaucagaa

SEQ ID NO: 2239789 - RNA, 19 nt, Homo sapiens
  misc_RNA (1)...(19): siRNA sense strand
ggaggagauggaaagggaa

SEQ ID NO: 2239790 - RNA, 19 nt, Homo sapiens
  misc_RNA (1)...(19): siRNA sense strand
ggacaggaauggaacacac

SEQ ID NO: 2239791 - RNA, 19 nt, Homo sapiens
  misc_RNA (1)...(19): siRNA sense strand
uccagagacuccaggaaaa

SEQ ID NO: 2239792 - RNA, 19 nt, Homo sapiens
  misc_RNA (1)...(19): siRNA sense strand
cagcauuagggacaggaau

SEQ ID NO: 2239793 - RNA, 19 nt, Homo sapiens
  misc_RNA (1)...(19): siRNA sense strand
ugauguuauuccagagacu

SEQ ID NO: 2239794 - RNA, 19 nt, Homo sapiens
  misc_RNA (1)...(19): siRNA sense strand
gaggagauggaaagggaac

SEQ ID NO: 2239795 - RNA, 19 nt, Homo sapiens
  misc_RNA (1)...(19): siRNA sense strand
agaagaagugagcagauca

SEQ ID NO: 2239796 - RNA, 19 nt, Homo sapiens
  misc_RNA (1)...(19): siRNA sense strand
agaaaggaggagauggaaa

SEQ ID NO: 2239797 - RNA, 19 nt, Homo sapiens
  misc_RNA (1)...(19): siRNA sense strand
gagauggagaagaggguca

SEQ ID NO: 2239798 - RNA, 19 nt, Homo sapiens
  misc_RNA (1)...(19): siRNA sense strand
cuucacagcauuagggaca

SEQ ID NO: 2239799 - RNA, 19 nt, Homo sapiens
  misc_RNA (1)...(19): siRNA sense strand
ggagaaggaaaguuggaca

SEQ ID NO: 2239800 - RNA, 19 nt, Homo sapiens
  misc_RNA (1)...(19): siRNA sense strand
gaaaagagucugugcccaa

SEQ ID NO: 2239801 - RNA, 19 nt, Homo sapiens
  misc_RNA (1)...(19): siRNA sense strand
aggaggagauggaaaggga

SEQ ID NO: 2239802 - RNA, 19 nt, Homo sapiens
  misc_RNA (1)...(19): siRNA sense strand
ccgcaaaggaagcaagaac

SEQ ID NO: 2239803 - RNA, 19 nt, Homo sapiens
  misc_RNA (1)...(19): siRNA sense strand
agaucagaauugaggucuu

SEQ ID NO: 2239804 - RNA, 19 nt, Homo sapiens
  misc_RNA (1)...(19): siRNA sense strand
acacuagaaaggaggagau

SEQ ID NO: 2239805 - RNA, 19 nt, Homo sapiens
  misc_RNA (1)...(19): siRNA sense strand
aggaaaucuccaaaugcaa

SEQ ID NO: 2239806 - RNA, 19 nt, Homo sapiens
  misc_RNA (1)...(19): siRNA sense strand
ugcaaaagcacgggagaaa

SEQ ID NO: 2239807 - RNA, 19 nt, Homo sapiens
  misc_RNA (1)...(19): siRNA sense strand
agaagugagcagaucagaa

SEQ ID NO: 2239808 - RNA, 19 nt, Homo sapiens
  misc_RNA (1)...(19): siRNA sense strand
ggaggagauggaaagggaa

SEQ ID NO: 2239809 - RNA, 19 nt, Homo sapiens
  misc_RNA (1)...(19): siRNA sense strand
ggacaggaauggaacacac

SEQ ID NO: 2239810 - RNA, 19 nt, Homo sapiens
  misc_RNA (1)...(19): siRNA sense strand
uccagagacuccaggaaaa

SEQ ID NO: 2239811 - RNA, 19 nt, Homo sapiens
  misc_RNA (1)...(19): siRNA sense strand
cagcauuagggacaggaau

SEQ ID NO: 2239812 - RNA, 19 nt, Homo sapiens
  misc_RNA (1)...(19): siRNA sense strand
ugauguuauuccagagacu

SEQ ID NO: 2239813 - RNA, 19 nt, Homo sapiens
  misc_RNA (1)...(19): siRNA sense strand
gaggagauggaaagggaac

SEQ ID NO: 2239814 - RNA, 19 nt, Homo sapiens
  misc_RNA (1)...(19): siRNA sense strand
agaagaagugagcagauca

SEQ ID NO: 2239815 - RNA, 19 nt, Homo sapiens
  misc_RNA (1)...(19): siRNA sense strand
agaaaggaggagauggaaa

SEQ ID NO: 2239816 - RNA, 19 nt, Homo sapiens
  misc_RNA (1)...(19): siRNA sense strand
gagauggagaagaggguca

SEQ ID NO: 2239817 - RNA, 19 nt, Homo sapiens
  misc_RNA (1)...(19): siRNA sense strand
cuucacagcauuagggaca

SEQ ID NO: 2239818 - RNA, 19 nt, Homo sapiens
  misc_RNA (1)...(19): siRNA sense strand
ggagaaggaaaguuggaca

SEQ ID NO: 2239819 - RNA, 19 nt, Homo sapiens
  misc_RNA (1)...(19): siRNA sense strand
gaaaagagucugugcccaa

SEQ ID NO: 2239820 - RNA, 19 nt, Homo sapiens
  misc_RNA (1)...(19): siRNA sense strand
aggaggagauggaaaggga

SEQ ID NO: 2239821 - RNA, 19 nt, Homo sapiens
  misc_RNA (1)...(19): siRNA sense strand
ccgcaaaggaagcaagaac

SEQ ID NO: 2239822 - RNA, 19 nt, Homo sapiens
  misc_RNA (1)...(19): siRNA sense strand
agaucagaauugaggucuu

SEQ ID NO: 2239823 - RNA, 19 nt, Homo sapiens
  misc_RNA (1)...(19): siRNA sense strand
acacuagaaaggaggagau

SEQ ID NO: 2239824 - RNA, 19 nt, Homo sapiens
  misc_RNA (1)...(19): siRNA sense strand
aggaaaucuccaaaugcaa

SEQ ID NO: 2239825 - RNA, 19 nt, Homo sapiens
  misc_RNA (1)...(19): siRNA sense strand
ugcaaaagcacgggagaaa

SEQ ID NO: 2239826 - RNA, 19 nt, Homo sapiens
  misc_RNA (1)...(19): siRNA sense strand
agaagugagcagaucagaa

SEQ ID NO: 2239827 - RNA, 19 nt, Homo sapiens
  misc_RNA (1)...(19): siRNA sense strand
ggaggagauggaaagggaa

SEQ ID NO: 2239828 - RNA, 19 nt, Homo sapiens
  misc_RNA (1)...(19): siRNA sense strand
ggacaggaauggaacacac

SEQ ID NO: 2239829 - RNA, 19 nt, Homo sapiens
  misc_RNA (1)...(19): siRNA sense strand
uccagagacuccaggaaaa

SEQ ID NO: 2239830 - RNA, 19 nt, Homo sapiens
  misc_RNA (1)...(19): siRNA sense strand
cagcauuagggacaggaau

SEQ ID NO: 2239831 - RNA, 19 nt, Homo sapiens
  misc_RNA (1)...(19): siRNA sense strand
ugauguuauuccagagacu

SEQ ID NO: 2239832 - RNA, 19 nt, Homo sapiens
  misc_RNA (1)...(19): siRNA sense strand
gaggagauggaaagggaac

SEQ ID NO: 2239833 - RNA, 19 nt, Homo sapiens
  misc_RNA (1)...(19): siRNA sense strand
agaagaagugagcagauca

SEQ ID NO: 2239834 - RNA, 19 nt, Homo sapiens
  misc_RNA (1)...(19): siRNA sense strand
agaaaggaggagauggaaa

SEQ ID NO: 2239835 - RNA, 19 nt, Homo sapiens
  misc_RNA (1)...(19): siRNA sense strand
gagauggagaagaggguca

SEQ ID NO: 2239836 - RNA, 19 nt, Homo sapiens
  misc_RNA (1)...(19): siRNA sense strand
ggagaaggaaaguuggaca

SEQ ID NO: 2239837 - RNA, 19 nt, Homo sapiens
  misc_RNA (1)...(19): siRNA sense strand
gaaaagagucugugcccaa

SEQ ID NO: 2239838 - RNA, 19 nt, Homo sapiens
  misc_RNA (1)...(19): siRNA sense strand
aggaggagauggaaaggga

SEQ ID NO: 2239839 - RNA, 19 nt, Homo sapiens
  misc_RNA (1)...(19): siRNA sense strand
ccgcaaaggaagcaagaac

SEQ ID NO: 2239840 - RNA, 19 nt, Homo sapiens
  misc_RNA (1)...(19): siRNA sense strand
agaucagaauugaggucuu

SEQ ID NO: 2239841 - RNA, 19 nt, Homo sapiens
  misc_RNA (1)...(19): siRNA sense strand
acacuagaaaggaggagau

SEQ ID NO: 2239842 - RNA, 19 nt, Homo sapiens
  misc_RNA (1)...(19): siRNA sense strand
aggaaaucuccaaaugcaa

SEQ ID NO: 2239843 - RNA, 19 nt, Homo sapiens
  misc_RNA (1)...(19): siRNA sense strand
ugcaaaagcacgggagaaa

SEQ ID NO: 2239844 - RNA, 19 nt, Homo sapiens
  misc_RNA (1)...(19): siRNA sense strand
agaagugagcagaucagaa

SEQ ID NO: 2239845 - RNA, 19 nt, Homo sapiens
  misc_RNA (1)...(19): siRNA sense strand
ggaggagauggaaagggaa

SEQ ID NO: 2239846 - RNA, 19 nt, Homo sapiens
  misc_RNA (1)...(19): siRNA sense strand
uccagagacuccaggaaaa

SEQ ID NO: 2239847 - RNA, 19 nt, Homo sapiens
  misc_RNA (1)...(19): siRNA sense strand
ugauguuauuccagagacu

SEQ ID NO: 2239848 - RNA, 19 nt, Homo sapiens
  misc_RNA (1)...(19): siRNA sense strand
gaggagauggaaagggaac

SEQ ID NO: 2239849 - RNA, 19 nt, Homo sapiens
  misc_RNA (1)...(19): siRNA sense strand
agaagaagugagcagauca

SEQ ID NO: 2239850 - RNA, 19 nt, Homo sapiens
  misc_RNA (1)...(19): siRNA sense strand
ucagagaacuuaaaggaca

SEQ ID NO: 2239851 - RNA, 19 nt, Homo sapiens
  misc_RNA (1)...(19): siRNA sense strand
gagaaauacaaaagagaga

SEQ ID NO: 2239852 - RNA, 19 nt, Homo sapiens
  misc_RNA (1)...(19): siRNA sense strand
cgaaaguggaaauggagau

SEQ ID NO: 2239853 - RNA, 19 nt, Homo sapiens
  misc_RNA (1)...(19): siRNA sense strand
acuuaaaggacaugaucuu

SEQ ID NO: 2239854 - RNA, 19 nt, Homo sapiens
  misc_RNA (1)...(19): siRNA sense strand
ucuagagaaacaagguaaa

SEQ ID NO: 2239855 - RNA, 19 nt, Homo sapiens
  misc_RNA (1)...(19): siRNA sense strand
cguaucaaggagaggaaga

SEQ ID NO: 2239856 - RNA, 19 nt, Homo sapiens
  misc_RNA (1)...(19): siRNA sense strand
aagaggaaguggagcgacu

SEQ ID NO: 2239857 - RNA, 19 nt, Homo sapiens
  misc_RNA (1)...(19): siRNA sense strand
ugguauuccaguucagaua

SEQ ID NO: 2239858 - RNA, 19 nt, Homo sapiens
  misc_RNA (1)...(19): siRNA sense strand
ggaucugcugagugaggaa

SEQ ID NO: 2239859 - RNA, 19 nt, Homo sapiens
  misc_RNA (1)...(19): siRNA sense strand
ugacaugccuggaggaccu

SEQ ID NO: 2239860 - RNA, 19 nt, Homo sapiens
  misc_RNA (1)...(19): siRNA sense strand
ggacagacaaggaacccau

SEQ ID NO: 2239861 - RNA, 19 nt, Homo sapiens
  misc_RNA (1)...(19): siRNA sense strand
gcuucugauuauugauuca

SEQ ID NO: 2239862 - RNA, 19 nt, Homo sapiens
  misc_RNA (1)...(19): siRNA sense strand
aggcauugacucagagaac

SEQ ID NO: 2239863 - RNA, 19 nt, Homo sapiens
  misc_RNA (1)...(19): siRNA sense strand
agacauucuuggaagccuu

SEQ ID NO: 2239864 - RNA, 19 nt, Homo sapiens
  misc_RNA (1)...(19): siRNA sense strand
guaucaaggagaggaagaa

SEQ ID NO: 2239865 - RNA, 19 nt, Homo sapiens
  misc_RNA (1)...(19): siRNA sense strand
guaccaaagaggaagugga

SEQ ID NO: 2239866 - RNA, 19 nt, Homo sapiens
  misc_RNA (1)...(19): siRNA sense strand
gccaaggugaagagauaca

SEQ ID NO: 2239867 - RNA, 19 nt, Homo sapiens
  misc_RNA (1)...(19): siRNA sense strand
cugaaggacagacaaggaa

SEQ ID NO: 2239868 - RNA, 19 nt, Homo sapiens
  misc_RNA (1)...(19): siRNA sense strand
ucagagaacuuaaaggaca

SEQ ID NO: 2239869 - RNA, 19 nt, Homo sapiens
  misc_RNA (1)...(19): siRNA sense strand
gagaaauacaaaagagaga

SEQ ID NO: 2239870 - RNA, 19 nt, Homo sapiens
  misc_RNA (1)...(19): siRNA sense strand
cgaaaguggaaauggagau

SEQ ID NO: 2239871 - RNA, 19 nt, Homo sapiens
  misc_RNA (1)...(19): siRNA sense strand
acuuaaaggacaugaucuu

SEQ ID NO: 2239872 - RNA, 19 nt, Homo sapiens
  misc_RNA (1)...(19): siRNA sense strand
ucuagagaaacaagguaaa

SEQ ID NO: 2239873 - RNA, 19 nt, Homo sapiens
  misc_RNA (1)...(19): siRNA sense strand
cguaucaaggagaggaaga

SEQ ID NO: 2239874 - RNA, 19 nt, Homo sapiens
  misc_RNA (1)...(19): siRNA sense strand
aagaggaaguggagcgacu

SEQ ID NO: 2239875 - RNA, 19 nt, Homo sapiens
  misc_RNA (1)...(19): siRNA sense strand
ugguauuccaguucagaua

SEQ ID NO: 2239876 - RNA, 19 nt, Homo sapiens
  misc_RNA (1)...(19): siRNA sense strand
ggaucugcugagugaggaa

SEQ ID NO: 2239877 - RNA, 19 nt, Homo sapiens
  misc_RNA (1)...(19): siRNA sense strand
ugacaugccuggaggaccu

SEQ ID NO: 2239878 - RNA, 19 nt, Homo sapiens
  misc_RNA (1)...(19): siRNA sense strand
ggacagacaaggaacccau

SEQ ID NO: 2239879 - RNA, 19 nt, Homo sapiens
  misc_RNA (1)...(19): siRNA sense strand
gcuucugauuauugauuca

SEQ ID NO: 2239880 - RNA, 19 nt, Homo sapiens
  misc_RNA (1)...(19): siRNA sense strand
aggcauugacucagagaac

SEQ ID NO: 2239881 - RNA, 19 nt, Homo sapiens
  misc_RNA (1)...(19): siRNA sense strand
agacauucuuggaagccuu

SEQ ID NO: 2239882 - RNA, 19 nt, Homo sapiens
  misc_RNA (1)...(19): siRNA sense strand
guaucaaggagaggaagaa

SEQ ID NO: 2239883 - RNA, 19 nt, Homo sapiens
  misc_RNA (1)...(19): siRNA sense strand
guaccaaagaggaagugga

SEQ ID NO: 2239884 - RNA, 19 nt, Homo sapiens
  misc_RNA (1)...(19): siRNA sense strand
gccaaggugaagagauaca

SEQ ID NO: 2239885 - RNA, 19 nt, Homo sapiens
  misc_RNA (1)...(19): siRNA sense strand
cugaaggacagacaaggaa

SEQ ID NO: 2239886 - RNA, 19 nt, Homo sapiens
  misc_RNA (1)...(19): siRNA sense strand
ucagagaacuuaaaggaca

SEQ ID NO: 2239887 - RNA, 19 nt, Homo sapiens
  misc_RNA (1)...(19): siRNA sense strand
gagaaauacaaaagagaga

SEQ ID NO: 2239888 - RNA, 19 nt, Homo sapiens
  misc_RNA (1)...(19): siRNA sense strand
acuuaaaggacaugaucuu

SEQ ID NO: 2239889 - RNA, 19 nt, Homo sapiens
  misc_RNA (1)...(19): siRNA sense strand
ucuagagaaacaagguaaa

SEQ ID NO: 2239890 - RNA, 19 nt, Homo sapiens
  misc_RNA (1)...(19): siRNA sense strand
cguaucaaggagaggaaga

SEQ ID NO: 2239891 - RNA, 19 nt, Homo sapiens
  misc_RNA (1)...(19): siRNA sense strand
aagaggaaguggagcgacu

SEQ ID NO: 2239892 - RNA, 19 nt, Homo sapiens
  misc_RNA (1)...(19): siRNA sense strand
ugguauuccaguucagaua

SEQ ID NO: 2239893 - RNA, 19 nt, Homo sapiens
  misc_RNA (1)...(19): siRNA sense strand
ggaucugcugagugaggaa

SEQ ID NO: 2239894 - RNA, 19 nt, Homo sapiens
  misc_RNA (1)...(19): siRNA sense strand
ugacaugccuggaggaccu

SEQ ID NO: 2239895 - RNA, 19 nt, Homo sapiens
  misc_RNA (1)...(19): siRNA sense strand
ggacagacaaggaacccau

SEQ ID NO: 2239896 - RNA, 19 nt, Homo sapiens
  misc_RNA (1)...(19): siRNA sense strand
gcuucugauuauugauuca

SEQ ID NO: 2239897 - RNA, 19 nt, Homo sapiens
  misc_RNA (1)...(19): siRNA sense strand
aggcauugacucagagaac

SEQ ID NO: 2239898 - RNA, 19 nt, Homo sapiens
  misc_RNA (1)...(19): siRNA sense strand
agacauucuuggaagccuu

SEQ ID NO: 2239899 - RNA, 19 nt, Homo sapiens
  misc_RNA (1)...(19): siRNA sense strand
guaucaaggagaggaagaa

SEQ ID NO: 2239900 - RNA, 19 nt, Homo sapiens
  misc_RNA (1)...(19): siRNA sense strand
guaccaaagaggaagugga

SEQ ID NO: 2239901 - RNA, 19 nt, Homo sapiens
  misc_RNA (1)...(19): siRNA sense strand
cugaaggacagacaaggaa

SEQ ID NO: 2239902 - RNA, 19 nt, Homo sapiens
  misc_RNA (1)...(19): siRNA sense strand
ucagagaacuuaaaggaca

SEQ ID NO: 2239903 - RNA, 19 nt, Homo sapiens
  misc_RNA (1)...(19): siRNA sense strand
gagaaauacaaaagagaga

SEQ ID NO: 2239904 - RNA, 19 nt, Homo sapiens
  misc_RNA (1)...(19): siRNA sense strand
cgaaaguggaaauggagau

SEQ ID NO: 2239905 - RNA, 19 nt, Homo sapiens
  misc_RNA (1)...(19): siRNA sense strand
acuuaaaggacaugaucuu

SEQ ID NO: 2239906 - RNA, 19 nt, Homo sapiens
  misc_RNA (1)...(19): siRNA sense strand
ucuagagaaacaagguaaa

SEQ ID NO: 2239907 - RNA, 19 nt, Homo sapiens
  misc_RNA (1)...(19): siRNA sense strand
cguaucaaggagaggaaga

SEQ ID NO: 2239908 - RNA, 19 nt, Homo sapiens
  misc_RNA (1)...(19): siRNA sense strand
aagaggaaguggagcgacu

SEQ ID NO: 2239909 - RNA, 19 nt, Homo sapiens
  misc_RNA (1)...(19): siRNA sense strand
ugguauuccaguucagaua

SEQ ID NO: 2239910 - RNA, 19 nt, Homo sapiens
  misc_RNA (1)...(19): siRNA sense strand
ggaucugcugagugaggaa

SEQ ID NO: 2239911 - RNA, 19 nt, Homo sapiens
  misc_RNA (1)...(19): siRNA sense strand
ugacaugccuggaggaccu

SEQ ID NO: 2239912 - RNA, 19 nt, Homo sapiens
  misc_RNA (1)...(19): siRNA sense strand
ggacagacaaggaacccau

SEQ ID NO: 2239913 - RNA, 19 nt, Homo sapiens
  misc_RNA (1)...(19): siRNA sense strand
gcuucugauuauugauuca

SEQ ID NO: 2239914 - RNA, 19 nt, Homo sapiens
  misc_RNA (1)...(19): siRNA sense strand
aggcauugacucagagaac

SEQ ID NO: 2239915 - RNA, 19 nt, Homo sapiens
  misc_RNA (1)...(19): siRNA sense strand
agacauucuuggaagccuu

SEQ ID NO: 2239916 - RNA, 19 nt, Homo sapiens
  misc_RNA (1)...(19): siRNA sense strand
guaucaaggagaggaagaa

SEQ ID NO: 2239917 - RNA, 19 nt, Homo sapiens
  misc_RNA (1)...(19): siRNA sense strand
guaccaaagaggaagugga

SEQ ID NO: 2239918 - RNA, 19 nt, Homo sapiens
  misc_RNA (1)...(19): siRNA sense strand
gccaaggugaagagauaca

SEQ ID NO: 2239919 - RNA, 19 nt, Homo sapiens
  misc_RNA (1)...(19): siRNA sense strand
cugaaggacagacaaggaa

SEQ ID NO: 2239920 - RNA, 19 nt, Homo sapiens
  misc_RNA (1)...(19): siRNA sense strand
uggaauugauugaagguga

SEQ ID NO: 2239921 - RNA, 19 nt, Homo sapiens
  misc_RNA (1)...(19): siRNA sense strand
agaucaaacucauuggcua

SEQ ID NO: 2239922 - RNA, 19 nt, Homo sapiens
  misc_RNA (1)...(19): siRNA sense strand
gcaaagaagcugacccuga

SEQ ID NO: 2239923 - RNA, 19 nt, Homo sapiens
  misc_RNA (1)...(19): siRNA sense strand
cccaaguccuagaagacaa

SEQ ID NO: 2239924 - RNA, 19 nt, Homo sapiens
  misc_RNA (1)...(19): siRNA sense strand
aacugaagccggagaguau

SEQ ID NO: 2239925 - RNA, 19 nt, Homo sapiens
  misc_RNA (1)...(19): siRNA sense strand
acacagaggacgaugacga

SEQ ID NO: 2239926 - RNA, 19 nt, Homo sapiens
  misc_RNA (1)...(19): siRNA sense strand
uguauguauucaagggaga

SEQ ID NO: 2239927 - RNA, 19 nt, Homo sapiens
  misc_RNA (1)...(19): siRNA sense strand
ccaauagcgaagaggagau

SEQ ID NO: 2239928 - RNA, 19 nt, Homo sapiens
  misc_RNA (1)...(19): siRNA sense strand
cuucaagagcaaagacuca

SEQ ID NO: 2239929 - RNA, 19 nt, Homo sapiens
  misc_RNA (1)...(19): siRNA sense strand
agacaaggguguuggcuuc

SEQ ID NO: 2239930 - RNA, 19 nt, Homo sapiens
  misc_RNA (1)...(19): siRNA sense strand
guuugagaauauugaggau

SEQ ID NO: 2239931 - RNA, 19 nt, Homo sapiens
  misc_RNA (1)...(19): siRNA sense strand
aggacuggcuggaggaugu

SEQ ID NO: 2239932 - RNA, 19 nt, Homo sapiens
  misc_RNA (1)...(19): siRNA sense strand
ugguagacucugagaagga

SEQ ID NO: 2239933 - RNA, 19 nt, Homo sapiens
  misc_RNA (1)...(19): siRNA sense strand
aggcuguggcccaagauaa

SEQ ID NO: 2239934 - RNA, 19 nt, Homo sapiens
  misc_RNA (1)...(19): siRNA sense strand
acuacaagaauguguucaa

SEQ ID NO: 2239935 - RNA, 19 nt, Homo sapiens
  misc_RNA (1)...(19): siRNA sense strand
gcugcaggcguuugagaau

SEQ ID NO: 2239936 - RNA, 19 nt, Homo sapiens
  misc_RNA (1)...(19): siRNA sense strand
agaucaacacagaggacga

SEQ ID NO: 2239937 - RNA, 19 nt, Homo sapiens
  misc_RNA (1)...(19): siRNA sense strand
augucaaugcaaagaacua

SEQ ID NO: 2239938 - RNA, 19 nt, Homo sapiens
  misc_RNA (1)...(19): siRNA sense strand
agaucaacccugaggaaac

SEQ ID NO: 2239939 - RNA, 19 nt, Homo sapiens
  misc_RNA (1)...(19): siRNA sense strand
gcccaagauaacacugaaa

SEQ ID NO: 2239940 - RNA, 19 nt, Homo sapiens
  misc_RNA (1)...(19): siRNA sense strand
ccggagaguauguaugaga

SEQ ID NO: 2239941 - RNA, 19 nt, Homo sapiens
  misc_RNA (1)...(19): siRNA sense strand
cagacaagcccaauagcga

SEQ ID NO: 2239942 - RNA, 19 nt, Homo sapiens
  misc_RNA (1)...(19): siRNA sense strand
ccuagaggacccuguggaa

SEQ ID NO: 2239943 - RNA, 19 nt, Homo sapiens
  misc_RNA (1)...(19): siRNA sense strand
guguggaccgugugaucaa

SEQ ID NO: 2239944 - RNA, 19 nt, Homo sapiens
  misc_RNA (1)...(19): siRNA sense strand
caauguuacugaugcggau

SEQ ID NO: 2239945 - RNA, 19 nt, Homo sapiens
  misc_RNA (1)...(19): siRNA sense strand
uggaaauggacgaugagga

SEQ ID NO: 2239946 - RNA, 19 nt, Homo sapiens
  misc_RNA (1)...(19): siRNA sense strand
acgaugaugaugaugacua

SEQ ID NO: 2239947 - RNA, 19 nt, Homo sapiens
  misc_RNA (1)...(19): siRNA sense strand
gaucaaacucauuggcuac

SEQ ID NO: 2239948 - RNA, 19 nt, Homo sapiens
  misc_RNA (1)...(19): siRNA sense strand
ccugaagcugaaugagauu

SEQ ID NO: 2239949 - RNA, 19 nt, Homo sapiens
  misc_RNA (1)...(19): siRNA sense strand
ggaaauggacgaugaggag

SEQ ID NO: 2239950 - RNA, 19 nt, Homo sapiens
  misc_RNA (1)...(19): siRNA sense strand
uuggcuacuucaagagcaa

SEQ ID NO: 2239951 - RNA, 19 nt, Homo sapiens
  misc_RNA (1)...(19): siRNA sense strand
ucgacagcaagguggcaaa

SEQ ID NO: 2239952 - RNA, 19 nt, Homo sapiens
  misc_RNA (1)...(19): siRNA sense strand
cugaggagcuggaggacug

SEQ ID NO: 2239953 - RNA, 19 nt, Homo sapiens
  misc_RNA (1)...(19): siRNA sense strand
agacaagcccaauagcgaa

SEQ ID NO: 2239954 - RNA, 19 nt, Homo sapiens
  misc_RNA (1)...(19): siRNA sense strand
agaccugggaggaugauau

SEQ ID NO: 2239955 - RNA, 19 nt, Homo sapiens
  misc_RNA (1)...(19): siRNA sense strand
guggaggagcacaggagau

SEQ ID NO: 2239956 - RNA, 19 nt, Homo sapiens
  misc_RNA (1)...(19): siRNA sense strand
ugauugaaggugaacgaga

SEQ ID NO: 2239957 - RNA, 19 nt, Homo sapiens
  misc_RNA (1)...(19): siRNA sense strand
ucaacuucguggaggagca

SEQ ID NO: 2239958 - RNA, 19 nt, Homo sapiens
  misc_RNA (1)...(19): siRNA sense strand
gaucaaugucaaugcaaag

SEQ ID NO: 2239959 - RNA, 19 nt, Homo sapiens
  misc_RNA (1)...(19): siRNA sense strand
aaauggacgaugaggagga

SEQ ID NO: 2239960 - RNA, 19 nt, Homo sapiens
  misc_RNA (1)...(19): siRNA sense strand
caauagaguuugauggcga

SEQ ID NO: 2239961 - RNA, 19 nt, Homo sapiens
  misc_RNA (1)...(19): siRNA sense strand
auucugaugaagaggauaa

SEQ ID NO: 2239962 - RNA, 19 nt, Homo sapiens
  misc_RNA (1)...(19): siRNA sense strand
ggaucuaauugaagaccca

SEQ ID NO: 2239963 - RNA, 19 nt, Homo sapiens
  misc_RNA (1)...(19): siRNA sense strand
cugaagaugaugaugaaga

SEQ ID NO: 2239964 - RNA, 19 nt, Homo sapiens
  misc_RNA (1)...(19): siRNA sense strand
ugggaaggaccgaguggua

SEQ ID NO: 2239965 - RNA, 19 nt, Homo sapiens
  misc_RNA (1)...(19): siRNA sense strand
uguauauucuuaaggguga

SEQ ID NO: 2239966 - RNA, 19 nt, Homo sapiens
  misc_RNA (1)...(19): siRNA sense strand
aggauaaugaugacaguga

SEQ ID NO: 2239967 - RNA, 19 nt, Homo sapiens
  misc_RNA (1)...(19): siRNA sense strand
cagaagaggagcuggugga

SEQ ID NO: 2239968 - RNA, 19 nt, Homo sapiens
  misc_RNA (1)...(19): siRNA sense strand
ugaagaugaaugagguuga

SEQ ID NO: 2239969 - RNA, 19 nt, Homo sapiens
  misc_RNA (1)...(19): siRNA sense strand
cugaugaagaggauaauga

SEQ ID NO: 2239970 - RNA, 19 nt, Homo sapiens
  misc_RNA (1)...(19): siRNA sense strand
uugaagacccaguggagau

SEQ ID NO: 2239971 - RNA, 19 nt, Homo sapiens
  misc_RNA (1)...(19): siRNA sense strand
ucagaauacuacaaggcuu

SEQ ID NO: 2239972 - RNA, 19 nt, Homo sapiens
  misc_RNA (1)...(19): siRNA sense strand
ugguggaguuugugaagga

SEQ ID NO: 2239973 - RNA, 19 nt, Homo sapiens
  misc_RNA (1)...(19): siRNA sense strand
augaagaggauaaugauga

SEQ ID NO: 2239974 - RNA, 19 nt, Homo sapiens
  misc_RNA (1)...(19): siRNA sense strand
uggaguuugugaaggaaca

SEQ ID NO: 2239975 - RNA, 19 nt, Homo sapiens
  misc_RNA (1)...(19): siRNA sense strand
gaagaugauuugaauggga

SEQ ID NO: 2239976 - RNA, 19 nt, Homo sapiens
  misc_RNA (1)...(19): siRNA sense strand
acaucaaacucauuggcuu

SEQ ID NO: 2239977 - RNA, 19 nt, Homo sapiens
  misc_RNA (1)...(19): siRNA sense strand
aggacuggauugaggaugu

SEQ ID NO: 2239978 - RNA, 19 nt, Homo sapiens
  misc_RNA (1)...(19): siRNA sense strand
agaugaugaugaagaugau

SEQ ID NO: 2239979 - RNA, 19 nt, Homo sapiens
  misc_RNA (1)...(19): siRNA sense strand
augacgaugaugaugaaua

SEQ ID NO: 2239980 - RNA, 19 nt, Homo sapiens
  misc_RNA (1)...(19): siRNA sense strand
augaagaugaugaugauga

SEQ ID NO: 2239981 - RNA, 19 nt, Homo sapiens
  misc_RNA (1)...(19): siRNA sense strand
ugguggaugccaagaaaga

SEQ ID NO: 2239982 - RNA, 19 nt, Homo sapiens
  misc_RNA (1)...(19): siRNA sense strand
gggcagaagaggggcuuaa

SEQ ID NO: 2239983 - RNA, 19 nt, Homo sapiens
  misc_RNA (1)...(19): siRNA sense strand
ggaucgacccggacgacuu

SEQ ID NO: 2239984 - RNA, 19 nt, Homo sapiens
  misc_RNA (1)...(19): siRNA sense strand
cugaggagcuggaggacug

SEQ ID NO: 2239985 - RNA, 19 nt, Homo sapiens
  misc_RNA (1)...(19): siRNA sense strand
agagugauccagauggcua

SEQ ID NO: 2239986 - RNA, 19 nt, Homo sapiens
  misc_RNA (1)...(19): siRNA sense strand
agaaaucgugcuugagcuu

SEQ ID NO: 2239987 - RNA, 19 nt, Homo sapiens
  misc_RNA (1)...(19): siRNA sense strand
ccuacugggagaagacuuu

SEQ ID NO: 2239988 - RNA, 19 nt, Homo sapiens
  misc_RNA (1)...(19): siRNA sense strand
gaacauaaagcuauaggcu

SEQ ID NO: 2239989 - RNA, 19 nt, Homo sapiens
  misc_RNA (1)...(19): siRNA sense strand
cagcugaugucuuggugga

SEQ ID NO: 2239990 - RNA, 19 nt, Homo sapiens
  misc_RNA (1)...(19): siRNA sense strand
augaugaagaugaugauga

SEQ ID NO: 2239991 - RNA, 19 nt, Homo sapiens
  misc_RNA (1)...(19): siRNA sense strand
uugaagaagcagcugaaca

SEQ ID NO: 2239992 - RNA, 19 nt, Homo sapiens
  misc_RNA (1)...(19): siRNA sense strand
augccaagaaagaagccaa

SEQ ID NO: 2239993 - RNA, 19 nt, Homo sapiens
  misc_RNA (1)...(19): siRNA sense strand
acgaauuccuggagauccu

SEQ ID NO: 2239994 - RNA, 19 nt, Homo sapiens
  misc_RNA (1)...(19): siRNA sense strand
gguaagucuuuccgagaag

SEQ ID NO: 2239995 - RNA, 19 nt, Homo sapiens
  misc_RNA (1)...(19): siRNA sense strand
ucagauaaggucacgccaa

SEQ ID NO: 2239996 - RNA, 19 nt, Homo sapiens
  misc_RNA (1)...(19): siRNA sense strand
gcguguggaaggugagcua

SEQ ID NO: 2239997 - RNA, 19 nt, Homo sapiens
  misc_RNA (1)...(19): siRNA sense strand
acauagucaagguggauuu

SEQ ID NO: 2239998 - RNA, 19 nt, Homo sapiens
  misc_RNA (1)...(19): siRNA sense strand
cccagaucgucaaggauau

SEQ ID NO: 2239999 - RNA, 19 nt, Homo sapiens
  misc_RNA (1)...(19): siRNA sense strand
ucaagguggugcugcggaa

SEQ ID NO: 2240000 - RNA, 19 nt, Homo sapiens
  misc_RNA (1)...(19): siRNA sense strand
gcuuugacggcguguggaa

SEQ ID NO: 2240001 - RNA, 19 nt, Homo sapiens
  misc_RNA (1)...(19): siRNA sense strand
uggcagaagagcacacaga

SEQ ID NO: 2240002 - RNA, 19 nt, Homo sapiens
  misc_RNA (1)...(19): siRNA sense strand
aggacauagucaaggugga

SEQ ID NO: 2240003 - RNA, 19 nt, Homo sapiens
  misc_RNA (1)...(19): siRNA sense strand
guguggaaggugagcuaca

SEQ ID NO: 2240004 - RNA, 19 nt, Homo sapiens
  misc_RNA (1)...(19): siRNA sense strand
gcguguggaaggugagcua

SEQ ID NO: 2240005 - RNA, 19 nt, Homo sapiens
  misc_RNA (1)...(19): siRNA sense strand
acauagucaagguggauuu

SEQ ID NO: 2240006 - RNA, 19 nt, Homo sapiens
  misc_RNA (1)...(19): siRNA sense strand
cccagaucgucaaggauau

SEQ ID NO: 2240007 - RNA, 19 nt, Homo sapiens
  misc_RNA (1)...(19): siRNA sense strand
ucaagguggugcugcggaa

SEQ ID NO: 2240008 - RNA, 19 nt, Homo sapiens
  misc_RNA (1)...(19): siRNA sense strand
gcuuugacggcguguggaa

SEQ ID NO: 2240009 - RNA, 19 nt, Homo sapiens
  misc_RNA (1)...(19): siRNA sense strand
uggcagaagagcacacaga

SEQ ID NO: 2240010 - RNA, 19 nt, Homo sapiens
  misc_RNA (1)...(19): siRNA sense strand
aggacauagucaaggugga

SEQ ID NO: 2240011 - RNA, 19 nt, Homo sapiens
  misc_RNA (1)...(19): siRNA sense strand
guguggaaggugagcuaca

SEQ ID NO: 2240012 - RNA, 19 nt, Homo sapiens
  misc_RNA (1)...(19): siRNA sense strand
gaagaaaccugcagccgca

SEQ ID NO: 2240013 - RNA, 19 nt, Homo sapiens
  misc_RNA (1)...(19): siRNA sense strand
aggaccaggcaguggagaa

SEQ ID NO: 2240014 - RNA, 19 nt, Homo sapiens
  misc_RNA (1)...(19): siRNA sense strand
augagaaauuccaccacaa

SEQ ID NO: 2240015 - RNA, 19 nt, Homo sapiens
  misc_RNA (1)...(19): siRNA sense strand
aggccauugacaagaacaa

SEQ ID NO: 2240016 - RNA, 19 nt, Homo sapiens
  misc_RNA (1)...(19): siRNA sense strand
agaagaaggcuguugccau

SEQ ID NO: 2240017 - RNA, 19 nt, Homo sapiens
  misc_RNA (1)...(19): siRNA sense strand
gaagaaggcuguugccauc

SEQ ID NO: 2240018 - RNA, 19 nt, Homo sapiens
  misc_RNA (1)...(19): siRNA sense strand
uggggaagaugcagaagaa

SEQ ID NO: 2240019 - RNA, 19 nt, Homo sapiens
  misc_RNA (1)...(19): siRNA sense strand
acgacgacgagaaggaaaa

SEQ ID NO: 2240020 - RNA, 19 nt, Homo sapiens
  misc_RNA (1)...(19): siRNA sense strand
gcgagcacuccaagaucaa

SEQ ID NO: 2240021 - RNA, 19 nt, Homo sapiens
  misc_RNA (1)...(19): siRNA sense strand
acuacuacgacgacgagaa

SEQ ID NO: 2240022 - RNA, 19 nt, Homo sapiens
  misc_RNA (1)...(19): siRNA sense strand
aguuggacacagauggcaa

SEQ ID NO: 2240023 - RNA, 19 nt, Homo sapiens
  misc_RNA (1)...(19): siRNA sense strand
gcggagaaguugagcccca

SEQ ID NO: 2240024 - RNA, 19 nt, Homo sapiens
  misc_RNA (1)...(19): siRNA sense strand
ccuuugaccaggacaucua

SEQ ID NO: 2240025 - RNA, 19 nt, Homo sapiens
  misc_RNA (1)...(19): siRNA sense strand
agaugcgagacgaguuaua

SEQ ID NO: 2240026 - RNA, 19 nt, Homo sapiens
  misc_RNA (1)...(19): siRNA sense strand
agugaagaucugcaggaaa

SEQ ID NO: 2240027 - RNA, 19 nt, Homo sapiens
  misc_RNA (1)...(19): siRNA sense strand
cuucaagagugaugaucca

SEQ ID NO: 2240028 - RNA, 19 nt, Homo sapiens
  misc_RNA (1)...(19): siRNA sense strand
augggagaguggugaauau

SEQ ID NO: 2240029 - RNA, 19 nt, Homo sapiens
  misc_RNA (1)...(19): siRNA sense strand
ggcucaacguacuggucaa

SEQ ID NO: 2240030 - RNA, 19 nt, Homo sapiens
  misc_RNA (1)...(19): siRNA sense strand
uugcaguguuuaagggcuu

SEQ ID NO: 2240031 - RNA, 19 nt, Homo sapiens
  misc_RNA (1)...(19): siRNA sense strand
agaggaaagcugacaggau

SEQ ID NO: 2240032 - RNA, 19 nt, Homo sapiens
  misc_RNA (1)...(19): siRNA sense strand
gcaacgaguuacugccgau

SEQ ID NO: 2240033 - RNA, 19 nt, Homo sapiens
  misc_RNA (1)...(19): siRNA sense strand
ucgacgacuugcagagcau

SEQ ID NO: 2240034 - RNA, 19 nt, Homo sapiens
  misc_RNA (1)...(19): siRNA sense strand
ccacugagccacaaggcca

SEQ ID NO: 2240035 - RNA, 19 nt, Homo sapiens
  misc_RNA (1)...(19): siRNA sense strand
aguaguuugcaguguuuaa

SEQ ID NO: 2240036 - RNA, 19 nt, Homo sapiens
  misc_RNA (1)...(19): siRNA sense strand
aguugaaguaggagaagaa

SEQ ID NO: 2240037 - RNA, 19 nt, Homo sapiens
  misc_RNA (1)...(19): siRNA sense strand
acuaacaguaugagagcua

SEQ ID NO: 2240038 - RNA, 19 nt, Homo sapiens
  misc_RNA (1)...(19): siRNA sense strand
cacacauaccuuagggaaa

SEQ ID NO: 2240039 - RNA, 19 nt, Homo sapiens
  misc_RNA (1)...(19): siRNA sense strand
ccucaaagcaccacagcau

SEQ ID NO: 2240040 - RNA, 19 nt, Homo sapiens
  misc_RNA (1)...(19): siRNA sense strand
cagcagaggccgaagacga

SEQ ID NO: 2240041 - RNA, 19 nt, Homo sapiens
  misc_RNA (1)...(19): siRNA sense strand
cuuggaaagcaaacaguaa

SEQ ID NO: 2240042 - RNA, 19 nt, Homo sapiens
  misc_RNA (1)...(19): siRNA sense strand
uugaaguaggagaagaaua

SEQ ID NO: 2240043 - RNA, 19 nt, Homo sapiens
  misc_RNA (1)...(19): siRNA sense strand
agugaguguuaaugaagua

SEQ ID NO: 2240044 - RNA, 19 nt, Homo sapiens
  misc_RNA (1)...(19): siRNA sense strand
guuaguugaaguaggagaa

SEQ ID NO: 2240045 - RNA, 19 nt, Homo sapiens
  misc_RNA (1)...(19): siRNA sense strand
uccaagaggaccaggagaa

SEQ ID NO: 2240046 - RNA, 19 nt, Homo sapiens
  misc_RNA (1)...(19): siRNA sense strand
cccagaaguagcagaguuu

SEQ ID NO: 2240047 - RNA, 19 nt, Homo sapiens
  misc_RNA (1)...(19): siRNA sense strand
gguuaguugaaguaggaga

SEQ ID NO: 2240048 - RNA, 19 nt, Homo sapiens
  misc_RNA (1)...(19): siRNA sense strand
cuguaaaugaugagcaugu

SEQ ID NO: 2240049 - RNA, 19 nt, Homo sapiens
  misc_RNA (1)...(19): siRNA sense strand
ccucaacccaccagagaca

SEQ ID NO: 2240050 - RNA, 19 nt, Homo sapiens
  misc_RNA (1)...(19): siRNA sense strand
ggaugguaguuuugaguca

SEQ ID NO: 2240051 - RNA, 19 nt, Homo sapiens
  misc_RNA (1)...(19): siRNA sense strand
aguugaaaguuuagcaaug

SEQ ID NO: 2240052 - RNA, 19 nt, Homo sapiens
  misc_RNA (1)...(19): siRNA sense strand
auacgaaagacuggauaua

SEQ ID NO: 2240053 - RNA, 19 nt, Homo sapiens
  misc_RNA (1)...(19): siRNA sense strand
augaaaagccagugagugu

SEQ ID NO: 2240054 - RNA, 19 nt, Homo sapiens
  misc_RNA (1)...(19): siRNA sense strand
aaguauuugccaucaguua

SEQ ID NO: 2240055 - RNA, 19 nt, Homo sapiens
  misc_RNA (1)...(19): siRNA sense strand
uuggaaagcaaacaguaaa

SEQ ID NO: 2240056 - RNA, 19 nt, Homo sapiens
  misc_RNA (1)...(19): siRNA sense strand
ccaagaggaccaggagaau

SEQ ID NO: 2240057 - RNA, 19 nt, Homo sapiens
  misc_RNA (1)...(19): siRNA sense strand
augaagaaacagccagaca

SEQ ID NO: 2240058 - RNA, 19 nt, Homo sapiens
  misc_RNA (1)...(19): siRNA sense strand
auaccuacaccaagaaaca

SEQ ID NO: 2240059 - RNA, 19 nt, Homo sapiens
  misc_RNA (1)...(19): siRNA sense strand
ugcauuuggcugugaacua

SEQ ID NO: 2240060 - RNA, 19 nt, Homo sapiens
  misc_RNA (1)...(19): siRNA sense strand
cagaaguagcagaguuugu

SEQ ID NO: 2240061 - RNA, 19 nt, Homo sapiens
  misc_RNA (1)...(19): siRNA sense strand
acaugaagaaacagccaga

SEQ ID NO: 2240062 - RNA, 19 nt, Homo sapiens
  misc_RNA (1)...(19): siRNA sense strand
cuggaaagucuuaagccuu

SEQ ID NO: 2240063 - RNA, 19 nt, Homo sapiens
  misc_RNA (1)...(19): siRNA sense strand
ggagaauaucaacccggaa

SEQ ID NO: 2240064 - RNA, 19 nt, Homo sapiens
  misc_RNA (1)...(19): siRNA sense strand
gguuaauggagguguguga

SEQ ID NO: 2240065 - RNA, 19 nt, Homo sapiens
  misc_RNA (1)...(19): siRNA sense strand
ggguaucaguggugcgaca

SEQ ID NO: 2240066 - RNA, 19 nt, Homo sapiens
  misc_RNA (1)...(19): siRNA sense strand
cagaugaagaaauggccaa

SEQ ID NO: 2240067 - RNA, 19 nt, Homo sapiens
  misc_RNA (1)...(19): siRNA sense strand
cugggcaaauagagaggaa

SEQ ID NO: 2240068 - RNA, 19 nt, Homo sapiens
  misc_RNA (1)...(19): siRNA sense strand
cugacaaagaagaugauga

SEQ ID NO: 2240069 - RNA, 19 nt, Homo sapiens
  misc_RNA (1)...(19): siRNA sense strand
ucuauaaacuucacaggga

SEQ ID NO: 2240070 - RNA, 19 nt, Homo sapiens
  misc_RNA (1)...(19): siRNA sense strand
aagacauacuuaagggauc

SEQ ID NO: 2240071 - RNA, 19 nt, Homo sapiens
  misc_RNA (1)...(19): siRNA sense strand
acgugcaagccucggauua

SEQ ID NO: 2240072 - RNA, 19 nt, Homo sapiens
  misc_RNA (1)...(19): siRNA sense strand
acuuaagggaucagcacuu

SEQ ID NO: 2240073 - RNA, 19 nt, Homo sapiens
  misc_RNA (1)...(19): siRNA sense strand
auagagaggaagucuggaa

SEQ ID NO: 2240074 - RNA, 19 nt, Homo sapiens
  misc_RNA (1)...(19): siRNA sense strand
uuuacagcuuauugggauu

SEQ ID NO: 2240075 - RNA, 19 nt, Homo sapiens
  misc_RNA (1)...(19): siRNA sense strand
augaagaaauggccaaaau

SEQ ID NO: 2240076 - RNA, 19 nt, Homo sapiens
  misc_RNA (1)...(19): siRNA sense strand
agaugaagaaauggccaaa

SEQ ID NO: 2240077 - RNA, 19 nt, Homo sapiens
  misc_RNA (1)...(19): siRNA sense strand
agagaggaagucuggaaaa

SEQ ID NO: 2240078 - RNA, 19 nt, Homo sapiens
  misc_RNA (1)...(19): siRNA sense strand
gguuaauggagguguguga

SEQ ID NO: 2240079 - RNA, 19 nt, Homo sapiens
  misc_RNA (1)...(19): siRNA sense strand
ggguaucaguggugcgaca

SEQ ID NO: 2240080 - RNA, 19 nt, Homo sapiens
  misc_RNA (1)...(19): siRNA sense strand
cagaugaagaaauggccaa

SEQ ID NO: 2240081 - RNA, 19 nt, Homo sapiens
  misc_RNA (1)...(19): siRNA sense strand
cugggcaaauagagaggaa

SEQ ID NO: 2240082 - RNA, 19 nt, Homo sapiens
  misc_RNA (1)...(19): siRNA sense strand
cugacaaagaagaugauga

SEQ ID NO: 2240083 - RNA, 19 nt, Homo sapiens
  misc_RNA (1)...(19): siRNA sense strand
ucuauaaacuucacaggga

SEQ ID NO: 2240084 - RNA, 19 nt, Homo sapiens
  misc_RNA (1)...(19): siRNA sense strand
aagacauacuuaagggauc

SEQ ID NO: 2240085 - RNA, 19 nt, Homo sapiens
  misc_RNA (1)...(19): siRNA sense strand
acgugcaagccucggauua

SEQ ID NO: 2240086 - RNA, 19 nt, Homo sapiens
  misc_RNA (1)...(19): siRNA sense strand
acuuaagggaucagcacuu

SEQ ID NO: 2240087 - RNA, 19 nt, Homo sapiens
  misc_RNA (1)...(19): siRNA sense strand
auagagaggaagucuggaa

SEQ ID NO: 2240088 - RNA, 19 nt, Homo sapiens
  misc_RNA (1)...(19): siRNA sense strand
uuuacagcuuauugggauu

SEQ ID NO: 2240089 - RNA, 19 nt, Homo sapiens
  misc_RNA (1)...(19): siRNA sense strand
augaagaaauggccaaaau

SEQ ID NO: 2240090 - RNA, 19 nt, Homo sapiens
  misc_RNA (1)...(19): siRNA sense strand
agagaggaagucuggaaaa

SEQ ID NO: 2240091 - RNA, 19 nt, Homo sapiens
  misc_RNA (1)...(19): siRNA sense strand
agaugaagaaauggccaaa

SEQ ID NO: 2240092 - RNA, 19 nt, Homo sapiens
  misc_RNA (1)...(19): siRNA sense strand
cgaagaagaggaaaggcua

SEQ ID NO: 2240093 - RNA, 19 nt, Homo sapiens
  misc_RNA (1)...(19): siRNA sense strand
gaugcaaagccguggccaa

SEQ ID NO: 2240094 - RNA, 19 nt, Homo sapiens
  misc_RNA (1)...(19): siRNA sense strand
cugaaagagaacagaacuu

SEQ ID NO: 2240095 - RNA, 19 nt, Homo sapiens
  misc_RNA (1)...(19): siRNA sense strand
gcuggaauuacuauggaaa

SEQ ID NO: 2240096 - RNA, 19 nt, Homo sapiens
  misc_RNA (1)...(19): siRNA sense strand
augaaaagcaugagaaacu

SEQ ID NO: 2240097 - RNA, 19 nt, Homo sapiens
  misc_RNA (1)...(19): siRNA sense strand
aauccaaacaugaggagga

SEQ ID NO: 2240098 - RNA, 19 nt, Homo sapiens
  misc_RNA (1)...(19): siRNA sense strand
agucugaugcugaaagaga

SEQ ID NO: 2240099 - RNA, 19 nt, Homo sapiens
  misc_RNA (1)...(19): siRNA sense strand
agaggaaaggcuaugaaga

SEQ ID NO: 2240100 - RNA, 19 nt, Homo sapiens
  misc_RNA (1)...(19): siRNA sense strand
aguaaagaaguaugaacca

SEQ ID NO: 2240101 - RNA, 19 nt, Homo sapiens
  misc_RNA (1)...(19): siRNA sense strand
guuauuuaucagagagucu

SEQ ID NO: 2240102 - RNA, 19 nt, Homo sapiens
  misc_RNA (1)...(19): siRNA sense strand
ccacaauccuuacagacca

SEQ ID NO: 2240103 - RNA, 19 nt, Homo sapiens
  misc_RNA (1)...(19): siRNA sense strand
auccagagauuuugaggaa

SEQ ID NO: 2240104 - RNA, 19 nt, Homo sapiens
  misc_RNA (1)...(19): siRNA sense strand
acgaagaagaggaaaggcu

SEQ ID NO: 2240105 - RNA, 19 nt, Homo sapiens
  misc_RNA (1)...(19): siRNA sense strand
aagaauggacugaugacga

SEQ ID NO: 2240106 - RNA, 19 nt, Homo sapiens
  misc_RNA (1)...(19): siRNA sense strand
uggaauuacuauggaaagu

SEQ ID NO: 2240107 - RNA, 19 nt, Homo sapiens
  misc_RNA (1)...(19): siRNA sense strand
cagcuaaaguggaggagca

SEQ ID NO: 2240108 - RNA, 19 nt, Homo sapiens
  misc_RNA (1)...(19): siRNA sense strand
gggaagcacuggugggagu

SEQ ID NO: 2240109 - RNA, 19 nt, Homo sapiens
  misc_RNA (1)...(19): siRNA sense strand
aguggcagguggagauaaa

SEQ ID NO: 2240110 - RNA, 19 nt, Homo sapiens
  misc_RNA (1)...(19): siRNA sense strand
agggagagaggaagaacaa

SEQ ID NO: 2240111 - RNA, 19 nt, Homo sapiens
  misc_RNA (1)...(19): siRNA sense strand
ccgaagagucauccagcaa

SEQ ID NO: 2240112 - RNA, 19 nt, Homo sapiens
  misc_RNA (1)...(19): siRNA sense strand
ucaucggacuagugagaau

SEQ ID NO: 2240113 - RNA, 19 nt, Homo sapiens
  misc_RNA (1)...(19): siRNA sense strand
cuucaaaaccagaggagau

SEQ ID NO: 2240114 - RNA, 19 nt, Homo sapiens
  misc_RNA (1)...(19): siRNA sense strand
agaagaggcaacuggagaa

SEQ ID NO: 2240115 - RNA, 19 nt, Homo sapiens
  misc_RNA (1)...(19): siRNA sense strand
gcacaauucuguagaggac

SEQ ID NO: 2240116 - RNA, 19 nt, Homo sapiens
  misc_RNA (1)...(19): siRNA sense strand
uggagaacauggaagccaa

SEQ ID NO: 2240117 - RNA, 19 nt, Homo sapiens
  misc_RNA (1)...(19): siRNA sense strand
caaagagccgagagcacaa

SEQ ID NO: 2240118 - RNA, 19 nt, Homo sapiens
  misc_RNA (1)...(19): siRNA sense strand
uggcguggacccagauaaa

SEQ ID NO: 2240119 - RNA, 19 nt, Homo sapiens
  misc_RNA (1)...(19): siRNA sense strand
cagaagaggcaacuggaga

SEQ ID NO: 2240120 - RNA, 19 nt, Homo sapiens
  misc_RNA (1)...(19): siRNA sense strand
auuuggaauuggagggcau

SEQ ID NO: 2240121 - RNA, 19 nt, Homo sapiens
  misc_RNA (1)...(19): siRNA sense strand
agaggcaacuggagaacau

SEQ ID NO: 2240122 - RNA, 19 nt, Homo sapiens
  misc_RNA (1)...(19): siRNA sense strand
ccauagaggguucagaaaa

SEQ ID NO: 2240123 - RNA, 19 nt, Homo sapiens
  misc_RNA (1)...(19): siRNA sense strand
cuaucaagacacugugaau

SEQ ID NO: 2240124 - RNA, 19 nt, Homo sapiens
  misc_RNA (1)...(19): siRNA sense strand
auacuagaagugaggcuua

SEQ ID NO: 2240125 - RNA, 19 nt, Homo sapiens
  misc_RNA (1)...(19): siRNA sense strand
ugaccgaggaacagaugaa

SEQ ID NO: 2240126 - RNA, 19 nt, Homo sapiens
  misc_RNA (1)...(19): siRNA sense strand
cgcgaagcaugcagaagaa

SEQ ID NO: 2240127 - RNA, 19 nt, Homo sapiens
  misc_RNA (1)...(19): siRNA sense strand
cgaagcaugcagaagaauu

SEQ ID NO: 2240128 - RNA, 19 nt, Homo sapiens
  misc_RNA (1)...(19): siRNA sense strand
gcguggacccagauaaaga

SEQ ID NO: 2240129 - RNA, 19 nt, Homo sapiens
  misc_RNA (1)...(19): siRNA sense strand
agaggaagaacaacaacaa

SEQ ID NO: 2240130 - RNA, 19 nt, Homo sapiens
  misc_RNA (1)...(19): siRNA sense strand
ccaacaggcucaaacgcau

SEQ ID NO: 2240131 - RNA, 19 nt, Homo sapiens
  misc_RNA (1)...(19): siRNA sense strand
ggaacaugucaucaaggua

SEQ ID NO: 2240132 - RNA, 19 nt, Homo sapiens
  misc_RNA (1)...(19): siRNA sense strand
gcauaauuuugcagacuuu

SEQ ID NO: 2240133 - RNA, 19 nt, Homo sapiens
  misc_RNA (1)...(19): siRNA sense strand
cagaagcagaauaguaaga

SEQ ID NO: 2240134 - RNA, 19 nt, Homo sapiens
  misc_RNA (1)...(19): siRNA sense strand
aagaaaagcacaagacuca

SEQ ID NO: 2240135 - RNA, 19 nt, Homo sapiens
  misc_RNA (1)...(19): siRNA sense strand
ccucauucgaaacuggaua

SEQ ID NO: 2240136 - RNA, 19 nt, Homo sapiens
  misc_RNA (1)...(19): siRNA sense strand
gguuuaaugagcaugucaa

SEQ ID NO: 2240137 - RNA, 19 nt, Homo sapiens
  misc_RNA (1)...(19): siRNA sense strand
acucagggucaucggacua

SEQ ID NO: 2240138 - RNA, 19 nt, Homo sapiens
  misc_RNA (1)...(19): siRNA sense strand
gagugugccaucagcuaaa

SEQ ID NO: 2240139 - RNA, 19 nt, Homo sapiens
  misc_RNA (1)...(19): siRNA sense strand
caaaaccagaggagauaaa

SEQ ID NO: 2240140 - RNA, 19 nt, Homo sapiens
  misc_RNA (1)...(19): siRNA sense strand
gagaggaagaacaacaaca

SEQ ID NO: 2240141 - RNA, 19 nt, Homo sapiens
  misc_RNA (1)...(19): siRNA sense strand
gagggagagaggaagaaca

SEQ ID NO: 2240142 - RNA, 19 nt, Homo sapiens
  misc_RNA (1)...(19): siRNA sense strand
acaugaguuucuacagauu

SEQ ID NO: 2240143 - RNA, 19 nt, Homo sapiens
  misc_RNA (1)...(19): siRNA sense strand
aucaagacacugugaauau

SEQ ID NO: 2240144 - RNA, 19 nt, Homo sapiens
  misc_RNA (1)...(19): siRNA sense strand
agccgagagcacaaagaaa

SEQ ID NO: 2240145 - RNA, 19 nt, Homo sapiens
  misc_RNA (1)...(19): siRNA sense strand
ggaacaaacguccugguga

SEQ ID NO: 2240146 - RNA, 19 nt, Homo sapiens
  misc_RNA (1)...(19): siRNA sense strand
caagaaaacaaaagcagau

SEQ ID NO: 2240147 - RNA, 19 nt, Homo sapiens
  misc_RNA (1)...(19): siRNA sense strand
gccgagagcacaaagaaaa

SEQ ID NO: 2240148 - RNA, 19 nt, Homo sapiens
  misc_RNA (1)...(19): siRNA sense strand
acucgagaacagcuggaaa

SEQ ID NO: 2240149 - RNA, 19 nt, Homo sapiens
  misc_RNA (1)...(19): siRNA sense strand
cugcauuugaccacauuua

SEQ ID NO: 2240150 - RNA, 19 nt, Homo sapiens
  misc_RNA (1)...(19): siRNA sense strand
cauaaaaccuauagcuugu

SEQ ID NO: 2240151 - RNA, 19 nt, Homo sapiens
  misc_RNA (1)...(19): siRNA sense strand
cccauagaggguucagaaa

SEQ ID NO: 2240152 - RNA, 19 nt, Homo sapiens
  misc_RNA (1)...(19): siRNA sense strand
ccacauuuagccugcagua

SEQ ID NO: 2240153 - RNA, 19 nt, Homo sapiens
  misc_RNA (1)...(19): siRNA sense strand
agcagaugaccgaggaaca

SEQ ID NO: 2240154 - RNA, 19 nt, Homo sapiens
  misc_RNA (1)...(19): siRNA sense strand
ugacaaaacagcucucaaa

SEQ ID NO: 2240155 - RNA, 19 nt, Homo sapiens
  misc_RNA (1)...(19): siRNA sense strand
aagauugccaagaguacua

SEQ ID NO: 2240156 - RNA, 19 nt, Homo sapiens
  misc_RNA (1)...(19): siRNA sense strand
acuucuuacuucauggcaa

SEQ ID NO: 2240157 - RNA, 19 nt, Homo sapiens
  misc_RNA (1)...(19): siRNA sense strand
gaauaguaagagugugcca

SEQ ID NO: 2240158 - RNA, 19 nt, Homo sapiens
  misc_RNA (1)...(19): siRNA sense strand
cagaagaauuggcugccca

SEQ ID NO: 2240159 - RNA, 19 nt, Homo sapiens
  misc_RNA (1)...(19): siRNA sense strand
ggagaacauggaagccaau

SEQ ID NO: 2240160 - RNA, 19 nt, Homo sapiens
  misc_RNA (1)...(19): siRNA sense strand
uggaaaaggcugacaaaac

SEQ ID NO: 2240161 - RNA, 19 nt, Homo sapiens
  misc_RNA (1)...(19): siRNA sense strand
caggaugguucaaaugcau

SEQ ID NO: 2240162 - RNA, 19 nt, Homo sapiens
  misc_RNA (1)...(19): siRNA sense strand
cgacccagacaauagacua

SEQ ID NO: 2240163 - RNA, 19 nt, Homo sapiens
  misc_RNA (1)...(19): siRNA sense strand
ugaugaaggcagugggaaa

SEQ ID NO: 2240164 - RNA, 19 nt, Homo sapiens
  misc_RNA (1)...(19): siRNA sense strand
auucgaaacuggagggcua

SEQ ID NO: 2240165 - RNA, 19 nt, Homo sapiens
  misc_RNA (1)...(19): siRNA sense strand
gcggaguggaggcggauaa

SEQ ID NO: 2240166 - RNA, 19 nt, Homo sapiens
  misc_RNA (1)...(19): siRNA sense strand
cugcaaaaguggaagaaca

SEQ ID NO: 2240167 - RNA, 19 nt, Homo sapiens
  misc_RNA (1)...(19): siRNA sense strand
agguagaacagcagcacaa

SEQ ID NO: 2240168 - RNA, 19 nt, Homo sapiens
  misc_RNA (1)...(19): siRNA sense strand
uggaagaacaggcucgaaa

SEQ ID NO: 2240169 - RNA, 19 nt, Homo sapiens
  misc_RNA (1)...(19): siRNA sense strand
gguugaagaagauucgaaa

SEQ ID NO: 2240170 - RNA, 19 nt, Homo sapiens
  misc_RNA (1)...(19): siRNA sense strand
cauaaagcagggagcagua

SEQ ID NO: 2240171 - RNA, 19 nt, Homo sapiens
  misc_RNA (1)...(19): siRNA sense strand
acauauuagcagagaccau

SEQ ID NO: 2240172 - RNA, 19 nt, Homo sapiens
  misc_RNA (1)...(19): siRNA sense strand
caguaaacaccaugggcca

SEQ ID NO: 2240173 - RNA, 19 nt, Homo sapiens
  misc_RNA (1)...(19): siRNA sense strand
aggagaagcacaaggagca

SEQ ID NO: 2240174 - RNA, 19 nt, Homo sapiens
  misc_RNA (1)...(19): siRNA sense strand
caagcaaggauuuggcaca

SEQ ID NO: 2240175 - RNA, 19 nt, Homo sapiens
  misc_RNA (1)...(19): siRNA sense strand
acuugaaaccauaaugcua

SEQ ID NO: 2240176 - RNA, 19 nt, Homo sapiens
  misc_RNA (1)...(19): siRNA sense strand
aguaagagcaagcaaggau

SEQ ID NO: 2240177 - RNA, 19 nt, Homo sapiens
  misc_RNA (1)...(19): siRNA sense strand
ccauaaugcuacaaacucu

SEQ ID NO: 2240178 - RNA, 19 nt, Homo sapiens
  misc_RNA (1)...(19): siRNA sense strand
gggaauauguggauccuac

SEQ ID NO: 2240179 - RNA, 19 nt, Homo sapiens
  misc_RNA (1)...(19): siRNA sense strand
accucuaaauucaggaaau

SEQ ID NO: 2240180 - RNA, 19 nt, Homo sapiens
  misc_RNA (1)...(19): siRNA sense strand
uaaucaggcagcuaggaaa

SEQ ID NO: 2240181 - RNA, 19 nt, Homo sapiens
  misc_RNA (1)...(19): siRNA sense strand
ugauaaaagcgccaguaaa

SEQ ID NO: 2240182 - RNA, 19 nt, Homo sapiens
  misc_RNA (1)...(19): siRNA sense strand
accauaaggagaagcacaa

SEQ ID NO: 2240183 - RNA, 19 nt, Homo sapiens
  misc_RNA (1)...(19): siRNA sense strand
aggaagaggcugcauguca

SEQ ID NO: 2240184 - RNA, 19 nt, Homo sapiens
  misc_RNA (1)...(19): siRNA sense strand
cagccauacaucugauaau

SEQ ID NO: 2240185 - RNA, 19 nt, Homo sapiens
  misc_RNA (1)...(19): siRNA sense strand
ggaagaacaggcucgaaaa

SEQ ID NO: 2240186 - RNA, 19 nt, Homo sapiens
  misc_RNA (1)...(19): siRNA sense strand
ugaaaauaccuaucgcaaa

SEQ ID NO: 2240187 - RNA, 19 nt, Homo sapiens
  misc_RNA (1)...(19): siRNA sense strand
gaccauaaggagaagcaca

SEQ ID NO: 2240188 - RNA, 19 nt, Homo sapiens
  misc_RNA (1)...(19): siRNA sense strand
aaccaaaaguagauggaca

SEQ ID NO: 2240189 - RNA, 19 nt, Homo sapiens
  misc_RNA (1)...(19): siRNA sense strand
uacaauaaacacugcgauu

SEQ ID NO: 2240190 - RNA, 19 nt, Homo sapiens
  misc_RNA (1)...(19): siRNA sense strand
uggacagguaucagagaca

SEQ ID NO: 2240191 - RNA, 19 nt, Homo sapiens
  misc_RNA (1)...(19): siRNA sense strand
caguacaaaccaacaguga

SEQ ID NO: 2240192 - RNA, 19 nt, Homo sapiens
  misc_RNA (1)...(19): siRNA sense strand
ccugagcagugauggcauu

SEQ ID NO: 2240193 - RNA, 19 nt, Homo sapiens
  misc_RNA (1)...(19): siRNA sense strand
ccuucugucuucaguacaa

SEQ ID NO: 2240194 - RNA, 19 nt, Homo sapiens
  misc_RNA (1)...(19): siRNA sense strand
aggaauggccucaacauca

SEQ ID NO: 2240195 - RNA, 19 nt, Homo sapiens
  misc_RNA (1)...(19): siRNA sense strand
agaagccaguggagaccaa

SEQ ID NO: 2240196 - RNA, 19 nt, Homo sapiens
  misc_RNA (1)...(19): siRNA sense strand
guaagagcaagcaaggauu

SEQ ID NO: 2240197 - RNA, 19 nt, Homo sapiens
  misc_RNA (1)...(19): siRNA sense strand
acaagaagccaguggagac

SEQ ID NO: 2240198 - RNA, 19 nt, Homo sapiens
  misc_RNA (1)...(19): siRNA sense strand
agcuauauucacagaaaca

SEQ ID NO: 2240199 - RNA, 19 nt, Homo sapiens
  misc_RNA (1)...(19): siRNA sense strand
cgauguaagggaucauuau

SEQ ID NO: 2240200 - RNA, 19 nt, Homo sapiens
  misc_RNA (1)...(19): siRNA sense strand
ucucagcacccucgugaaa

SEQ ID NO: 2240201 - RNA, 19 nt, Homo sapiens
  misc_RNA (1)...(19): siRNA sense strand
gcaaaugguccaauuggga

SEQ ID NO: 2240202 - RNA, 19 nt, Homo sapiens
  misc_RNA (1)...(19): siRNA sense strand
acaucacagaccugacaaa

SEQ ID NO: 2240203 - RNA, 19 nt, Homo sapiens
  misc_RNA (1)...(19): siRNA sense strand
gaugaaggcagugggaaaa

SEQ ID NO: 2240204 - RNA, 19 nt, Homo sapiens
  misc_RNA (1)...(19): siRNA sense strand
gggaaaagcaaacauucaa

SEQ ID NO: 2240205 - RNA, 19 nt, Homo sapiens
  misc_RNA (1)...(19): siRNA sense strand
aagcaaacauucaagccca

SEQ ID NO: 2240206 - RNA, 19 nt, Homo sapiens
  misc_RNA (1)...(19): siRNA sense strand
guuuauaugcacagguuuu

SEQ ID NO: 2240207 - RNA, 19 nt, Homo sapiens
  misc_RNA (1)...(19): siRNA sense strand
agaacaggcucgaaaacuu

SEQ ID NO: 2240208 - RNA, 19 nt, Homo sapiens
  misc_RNA (1)...(19): siRNA sense strand
ccaaguacuucauacgguu

SEQ ID NO: 2240209 - RNA, 19 nt, Homo sapiens
  misc_RNA (1)...(19): siRNA sense strand
agaaaagcguaaacuagaa

SEQ ID NO: 2240210 - RNA, 19 nt, Homo sapiens
  misc_RNA (1)...(19): siRNA sense strand
ugaugaaggcagugggaaa

SEQ ID NO: 2240211 - RNA, 19 nt, Homo sapiens
  misc_RNA (1)...(19): siRNA sense strand
auucgaaacuggagggcua

SEQ ID NO: 2240212 - RNA, 19 nt, Homo sapiens
  misc_RNA (1)...(19): siRNA sense strand
gcggaguggaggcggauaa

SEQ ID NO: 2240213 - RNA, 19 nt, Homo sapiens
  misc_RNA (1)...(19): siRNA sense strand
cugcaaaaguggaagaaca

SEQ ID NO: 2240214 - RNA, 19 nt, Homo sapiens
  misc_RNA (1)...(19): siRNA sense strand
agguagaacagcagcacaa

SEQ ID NO: 2240215 - RNA, 19 nt, Homo sapiens
  misc_RNA (1)...(19): siRNA sense strand
uggaagaacaggcucgaaa

SEQ ID NO: 2240216 - RNA, 19 nt, Homo sapiens
  misc_RNA (1)...(19): siRNA sense strand
gguugaagaagauucgaaa

SEQ ID NO: 2240217 - RNA, 19 nt, Homo sapiens
  misc_RNA (1)...(19): siRNA sense strand
cauaaagcagggagcagua

SEQ ID NO: 2240218 - RNA, 19 nt, Homo sapiens
  misc_RNA (1)...(19): siRNA sense strand
acauauuagcagagaccau

SEQ ID NO: 2240219 - RNA, 19 nt, Homo sapiens
  misc_RNA (1)...(19): siRNA sense strand
caguaaacaccaugggcca

SEQ ID NO: 2240220 - RNA, 19 nt, Homo sapiens
  misc_RNA (1)...(19): siRNA sense strand
aggagaagcacaaggagca

SEQ ID NO: 2240221 - RNA, 19 nt, Homo sapiens
  misc_RNA (1)...(19): siRNA sense strand
caagcaaggauuuggcaca

SEQ ID NO: 2240222 - RNA, 19 nt, Homo sapiens
  misc_RNA (1)...(19): siRNA sense strand
acuugaaaccauaaugcua

SEQ ID NO: 2240223 - RNA, 19 nt, Homo sapiens
  misc_RNA (1)...(19): siRNA sense strand
aguaagagcaagcaaggau

SEQ ID NO: 2240224 - RNA, 19 nt, Homo sapiens
  misc_RNA (1)...(19): siRNA sense strand
ccauaaugcuacaaacucu

SEQ ID NO: 2240225 - RNA, 19 nt, Homo sapiens
  misc_RNA (1)...(19): siRNA sense strand
gggaauauguggauccuac

SEQ ID NO: 2240226 - RNA, 19 nt, Homo sapiens
  misc_RNA (1)...(19): siRNA sense strand
accucuaaauucaggaaau

SEQ ID NO: 2240227 - RNA, 19 nt, Homo sapiens
  misc_RNA (1)...(19): siRNA sense strand
uaaucaggcagcuaggaaa

SEQ ID NO: 2240228 - RNA, 19 nt, Homo sapiens
  misc_RNA (1)...(19): siRNA sense strand
ugauaaaagcgccaguaaa

SEQ ID NO: 2240229 - RNA, 19 nt, Homo sapiens
  misc_RNA (1)...(19): siRNA sense strand
accauaaggagaagcacaa

SEQ ID NO: 2240230 - RNA, 19 nt, Homo sapiens
  misc_RNA (1)...(19): siRNA sense strand
aggaagaggcugcauguca

SEQ ID NO: 2240231 - RNA, 19 nt, Homo sapiens
  misc_RNA (1)...(19): siRNA sense strand
uguuaagugcccaaggaau

SEQ ID NO: 2240232 - RNA, 19 nt, Homo sapiens
  misc_RNA (1)...(19): siRNA sense strand
cagccauacaucugauaau

SEQ ID NO: 2240233 - RNA, 19 nt, Homo sapiens
  misc_RNA (1)...(19): siRNA sense strand
ggaagaacaggcucgaaaa

SEQ ID NO: 2240234 - RNA, 19 nt, Homo sapiens
  misc_RNA (1)...(19): siRNA sense strand
ugaaaauaccuaucgcaaa

SEQ ID NO: 2240235 - RNA, 19 nt, Homo sapiens
  misc_RNA (1)...(19): siRNA sense strand
gaccauaaggagaagcaca

SEQ ID NO: 2240236 - RNA, 19 nt, Homo sapiens
  misc_RNA (1)...(19): siRNA sense strand
guuaagugcccaaggaaug

SEQ ID NO: 2240237 - RNA, 19 nt, Homo sapiens
  misc_RNA (1)...(19): siRNA sense strand
aaccaaaaguagauggaca

SEQ ID NO: 2240238 - RNA, 19 nt, Homo sapiens
  misc_RNA (1)...(19): siRNA sense strand
uacaauaaacacugcgauu

SEQ ID NO: 2240239 - RNA, 19 nt, Homo sapiens
  misc_RNA (1)...(19): siRNA sense strand
uggacagguaucagagaca

SEQ ID NO: 2240240 - RNA, 19 nt, Homo sapiens
  misc_RNA (1)...(19): siRNA sense strand
caguacaaaccaacaguga

SEQ ID NO: 2240241 - RNA, 19 nt, Homo sapiens
  misc_RNA (1)...(19): siRNA sense strand
ccugagcagugauggcauu

SEQ ID NO: 2240242 - RNA, 19 nt, Homo sapiens
  misc_RNA (1)...(19): siRNA sense strand
aguacaagcagccagcaua

SEQ ID NO: 2240243 - RNA, 19 nt, Homo sapiens
  misc_RNA (1)...(19): siRNA sense strand
acaaagacacauucgacau

SEQ ID NO: 2240244 - RNA, 19 nt, Homo sapiens
  misc_RNA (1)...(19): siRNA sense strand
ccuucugucuucaguacaa

SEQ ID NO: 2240245 - RNA, 19 nt, Homo sapiens
  misc_RNA (1)...(19): siRNA sense strand
aggaauggccucaacauca

SEQ ID NO: 2240246 - RNA, 19 nt, Homo sapiens
  misc_RNA (1)...(19): siRNA sense strand
agaagccaguggagaccaa

SEQ ID NO: 2240247 - RNA, 19 nt, Homo sapiens
  misc_RNA (1)...(19): siRNA sense strand
guaagagcaagcaaggauu

SEQ ID NO: 2240248 - RNA, 19 nt, Homo sapiens
  misc_RNA (1)...(19): siRNA sense strand
acaagaagccaguggagac

SEQ ID NO: 2240249 - RNA, 19 nt, Homo sapiens
  misc_RNA (1)...(19): siRNA sense strand
agcuauauucacagaaaca

SEQ ID NO: 2240250 - RNA, 19 nt, Homo sapiens
  misc_RNA (1)...(19): siRNA sense strand
cgauguaagggaucauuau

SEQ ID NO: 2240251 - RNA, 19 nt, Homo sapiens
  misc_RNA (1)...(19): siRNA sense strand
ucucagcacccucgugaaa

SEQ ID NO: 2240252 - RNA, 19 nt, Homo sapiens
  misc_RNA (1)...(19): siRNA sense strand
ccaaggaaugaacauguaa

SEQ ID NO: 2240253 - RNA, 19 nt, Homo sapiens
  misc_RNA (1)...(19): siRNA sense strand
gcaaaugguccaauuggga

SEQ ID NO: 2240254 - RNA, 19 nt, Homo sapiens
  misc_RNA (1)...(19): siRNA sense strand
acaucacagaccugacaaa

SEQ ID NO: 2240255 - RNA, 19 nt, Homo sapiens
  misc_RNA (1)...(19): siRNA sense strand
gaugaaggcagugggaaaa

SEQ ID NO: 2240256 - RNA, 19 nt, Homo sapiens
  misc_RNA (1)...(19): siRNA sense strand
gggaaaagcaaacauucaa

SEQ ID NO: 2240257 - RNA, 19 nt, Homo sapiens
  misc_RNA (1)...(19): siRNA sense strand
aagcaaacauucaagccca

SEQ ID NO: 2240258 - RNA, 19 nt, Homo sapiens
  misc_RNA (1)...(19): siRNA sense strand
guuuauaugcacagguuuu

SEQ ID NO: 2240259 - RNA, 19 nt, Homo sapiens
  misc_RNA (1)...(19): siRNA sense strand
agaacaggcucgaaaacuu

SEQ ID NO: 2240260 - RNA, 19 nt, Homo sapiens
  misc_RNA (1)...(19): siRNA sense strand
ccaaguacuucauacgguu

SEQ ID NO: 2240261 - RNA, 19 nt, Homo sapiens
  misc_RNA (1)...(19): siRNA sense strand
agaaaagcguaaacuagaa

SEQ ID NO: 2240262 - RNA, 19 nt, Homo sapiens
  misc_RNA (1)...(19): siRNA sense strand
aguggaagaggaagggaaa

SEQ ID NO: 2240263 - RNA, 19 nt, Homo sapiens
  misc_RNA (1)...(19): siRNA sense strand
caguggaagaggaagggaa

SEQ ID NO: 2240264 - RNA, 19 nt, Homo sapiens
  misc_RNA (1)...(19): siRNA sense strand
uggaagaggaagggaaaga

SEQ ID NO: 2240265 - RNA, 19 nt, Homo sapiens
  misc_RNA (1)...(19): siRNA sense strand
cagccuaccuggagagccu

SEQ ID NO: 2240266 - RNA, 19 nt, Homo sapiens
  misc_RNA (1)...(19): siRNA sense strand
cggaagagcgaggguuaau

SEQ ID NO: 2240267 - RNA, 19 nt, Homo sapiens
  misc_RNA (1)...(19): siRNA sense strand
agacccaggaggagcucaa

SEQ ID NO: 2240268 - RNA, 19 nt, Homo sapiens
  misc_RNA (1)...(19): siRNA sense strand
ugucaugcucucaguggaa

SEQ ID NO: 2240269 - RNA, 19 nt, Homo sapiens
  misc_RNA (1)...(19): siRNA sense strand
ugacagaacccgucgcgga

SEQ ID NO: 2240270 - RNA, 19 nt, Homo sapiens
  misc_RNA (1)...(19): siRNA sense strand
aguggaagaggaagggaaa

SEQ ID NO: 2240271 - RNA, 19 nt, Homo sapiens
  misc_RNA (1)...(19): siRNA sense strand
caguggaagaggaagggaa

SEQ ID NO: 2240272 - RNA, 19 nt, Homo sapiens
  misc_RNA (1)...(19): siRNA sense strand
uggaagaggaagggaaaga

SEQ ID NO: 2240273 - RNA, 19 nt, Homo sapiens
  misc_RNA (1)...(19): siRNA sense strand
cagccuaccuggagagccu

SEQ ID NO: 2240274 - RNA, 19 nt, Homo sapiens
  misc_RNA (1)...(19): siRNA sense strand
ugucaugcucucaguggaa

SEQ ID NO: 2240275 - RNA, 19 nt, Homo sapiens
  misc_RNA (1)...(19): siRNA sense strand
ucagauaucaggaugggaa

SEQ ID NO: 2240276 - RNA, 19 nt, Homo sapiens
  misc_RNA (1)...(19): siRNA sense strand
cagcaagcacucaacggaa

SEQ ID NO: 2240277 - RNA, 19 nt, Homo sapiens
  misc_RNA (1)...(19): siRNA sense strand
cagauaucaggaugggaau

SEQ ID NO: 2240278 - RNA, 19 nt, Homo sapiens
  misc_RNA (1)...(19): siRNA sense strand
cuggaaugcaaacgaaaca

SEQ ID NO: 2240279 - RNA, 19 nt, Homo sapiens
  misc_RNA (1)...(19): siRNA sense strand
cggcagacaaggagaacga

SEQ ID NO: 2240280 - RNA, 19 nt, Homo sapiens
  misc_RNA (1)...(19): siRNA sense strand
gcagacaaggagaacgaca

SEQ ID NO: 2240281 - RNA, 19 nt, Homo sapiens
  misc_RNA (1)...(19): siRNA sense strand
cggcagacaaggagaacga

SEQ ID NO: 2240282 - RNA, 19 nt, Homo sapiens
  misc_RNA (1)...(19): siRNA sense strand
gcagacaaggagaacgaca

SEQ ID NO: 2240283 - RNA, 19 nt, Homo sapiens
  misc_RNA (1)...(19): siRNA sense strand
cggaacagaugaaggcguu

SEQ ID NO: 2240284 - RNA, 19 nt, Homo sapiens
  misc_RNA (1)...(19): siRNA sense strand
gcugaagcucacucggaaa

SEQ ID NO: 2240285 - RNA, 19 nt, Homo sapiens
  misc_RNA (1)...(19): siRNA sense strand
acagaagaguccagccuca

SEQ ID NO: 2240286 - RNA, 19 nt, Homo sapiens
  misc_RNA (1)...(19): siRNA sense strand
ggguggcgaagguggcaua

SEQ ID NO: 2240287 - RNA, 19 nt, Homo sapiens
  misc_RNA (1)...(19): siRNA sense strand
gaaaagagcgcucagggaa

SEQ ID NO: 2240288 - RNA, 19 nt, Homo sapiens
  misc_RNA (1)...(19): siRNA sense strand
gcaaagugcugaagcucac

SEQ ID NO: 2240289 - RNA, 19 nt, Homo sapiens
  misc_RNA (1)...(19): siRNA sense strand
cguuaugaaacuuccagaa

SEQ ID NO: 2240290 - RNA, 19 nt, Homo sapiens
  misc_RNA (1)...(19): siRNA sense strand
guacaggguuucagggcag

SEQ ID NO: 2240291 - RNA, 19 nt, Homo sapiens
  misc_RNA (1)...(19): siRNA sense strand
gauggaaaggaguugguca

SEQ ID NO: 2240292 - RNA, 19 nt, Homo sapiens
  misc_RNA (1)...(19): siRNA sense strand
gcagcacgguccuuggcaa

SEQ ID NO: 2240293 - RNA, 19 nt, Homo sapiens
  misc_RNA (1)...(19): siRNA sense strand
gggcagaaagcagcggcaa

SEQ ID NO: 2240294 - RNA, 19 nt, Homo sapiens
  misc_RNA (1)...(19): siRNA sense strand
ccgccaaccaugugagcaa

SEQ ID NO: 2240295 - RNA, 19 nt, Homo sapiens
  misc_RNA (1)...(19): siRNA sense strand
uggucuugcuugugaguau

SEQ ID NO: 2240296 - RNA, 19 nt, Homo sapiens
  misc_RNA (1)...(19): siRNA sense strand
gccaaagauuaaagggcca

SEQ ID NO: 2240297 - RNA, 19 nt, Homo sapiens
  misc_RNA (1)...(19): siRNA sense strand
gaucugaacaccagcgaca

SEQ ID NO: 2240298 - RNA, 19 nt, Homo sapiens
  misc_RNA (1)...(19): siRNA sense strand
gggaauagcagcauagccu

SEQ ID NO: 2240299 - RNA, 19 nt, Homo sapiens
  misc_RNA (1)...(19): siRNA sense strand
augaaguccuugaaagcau

SEQ ID NO: 2240300 - RNA, 19 nt, Homo sapiens
  misc_RNA (1)...(19): siRNA sense strand
ccccaaauuugaugaggua

SEQ ID NO: 2240301 - RNA, 19 nt, Homo sapiens
  misc_RNA (1)...(19): siRNA sense strand
guaucaauggccagcagaa

SEQ ID NO: 2240302 - RNA, 19 nt, Homo sapiens
  misc_RNA (1)...(19): siRNA sense strand
gaauaauaccggagugguc

SEQ ID NO: 2240303 - RNA, 19 nt, Homo sapiens
  misc_RNA (1)...(19): siRNA sense strand
ccaaauauccuucguggca

SEQ ID NO: 2240304 - RNA, 19 nt, Homo sapiens
  misc_RNA (1)...(19): siRNA sense strand
ccucgggauuauagcauca

SEQ ID NO: 2240305 - RNA, 19 nt, Homo sapiens
  misc_RNA (1)...(19): siRNA sense strand
ccacagucuacguguauca

SEQ ID NO: 2240306 - RNA, 19 nt, Homo sapiens
  misc_RNA (1)...(19): siRNA sense strand
gagccuuugaggaguguau

SEQ ID NO: 2240307 - RNA, 19 nt, Homo sapiens
  misc_RNA (1)...(19): siRNA sense strand
acuuguuugugaacgguua

SEQ ID NO: 2240308 - RNA, 19 nt, Homo sapiens
  misc_RNA (1)...(19): siRNA sense strand
caaccagaucccagcugaa

SEQ ID NO: 2240309 - RNA, 19 nt, Homo sapiens
  misc_RNA (1)...(19): siRNA sense strand
uaucaauggccagcagaaa

SEQ ID NO: 2240310 - RNA, 19 nt, Homo sapiens
  misc_RNA (1)...(19): siRNA sense strand
gugugaaaggcucuggaau

SEQ ID NO: 2240311 - RNA, 19 nt, Homo sapiens
  misc_RNA (1)...(19): siRNA sense strand
ggcaagaagaagggguaua

SEQ ID NO: 2240312 - RNA, 19 nt, Homo sapiens
  misc_RNA (1)...(19): siRNA sense strand
cgagaugguuggaagcaga

SEQ ID NO: 2240313 - RNA, 19 nt, Homo sapiens
  misc_RNA (1)...(19): siRNA sense strand
gguuggaagcagaguggau

SEQ ID NO: 2240314 - RNA, 19 nt, Homo sapiens
  misc_RNA (1)...(19): siRNA sense strand
ccuaaaggcaacagcagga

SEQ ID NO: 2240315 - RNA, 19 nt, Homo sapiens
  misc_RNA (1)...(19): siRNA sense strand
gagggugguacgaggaaaa

SEQ ID NO: 2240316 - RNA, 19 nt, Homo sapiens
  misc_RNA (1)...(19): siRNA sense strand
gcuuacugccagaacacaa

SEQ ID NO: 2240317 - RNA, 19 nt, Homo sapiens
  misc_RNA (1)...(19): siRNA sense strand
cuuacagcucacaaagaaa

SEQ ID NO: 2240318 - RNA, 19 nt, Homo sapiens
  misc_RNA (1)...(19): siRNA sense strand
ccccgaagucacuggaaaa

SEQ ID NO: 2240319 - RNA, 19 nt, Homo sapiens
  misc_RNA (1)...(19): siRNA sense strand
cagaagggacugaugggca

SEQ ID NO: 2240320 - RNA, 19 nt, Homo sapiens
  misc_RNA (1)...(19): siRNA sense strand
gugugugauaacuuggaaa

SEQ ID NO: 2240321 - RNA, 19 nt, Homo sapiens
  misc_RNA (1)...(19): siRNA sense strand
gauugaaagcugcaagacu

SEQ ID NO: 2240322 - RNA, 19 nt, Homo sapiens
  misc_RNA (1)...(19): siRNA sense strand
cagaggagguccagagagg

SEQ ID NO: 2240323 - RNA, 19 nt, Homo sapiens
  misc_RNA (1)...(19): siRNA sense strand
aaaccaagguccagggaag

SEQ ID NO: 2240324 - RNA, 19 nt, Homo sapiens
  misc_RNA (1)...(19): siRNA sense strand
ggagacuacacguggacca

SEQ ID NO: 2240325 - RNA, 19 nt, Homo sapiens
  misc_RNA (1)...(19): siRNA sense strand
cgacaacaagaaagagaaa

SEQ ID NO: 2240326 - RNA, 19 nt, Homo sapiens
  misc_RNA (1)...(19): siRNA sense strand
ccagagaagaagaggaaaa

SEQ ID NO: 2240327 - RNA, 19 nt, Homo sapiens
  misc_RNA (1)...(19): siRNA sense strand
uggcuaauacucagggaaa

SEQ ID NO: 2240328 - RNA, 19 nt, Homo sapiens
  misc_RNA (1)...(19): siRNA sense strand
cugcaaagauggaaaagaa

SEQ ID NO: 2240329 - RNA, 19 nt, Homo sapiens
  misc_RNA (1)...(19): siRNA sense strand
ccgagaaggagcuggaaga

SEQ ID NO: 2240330 - RNA, 19 nt, Homo sapiens
  misc_RNA (1)...(19): siRNA sense strand
aagaagacguucagcgaca

SEQ ID NO: 2240331 - RNA, 19 nt, Homo sapiens
  misc_RNA (1)...(19): siRNA sense strand
aggagauggaagugguuaa

SEQ ID NO: 2240332 - RNA, 19 nt, Homo sapiens
  misc_RNA (1)...(19): siRNA sense strand
aggccaagcgagugaaauu

SEQ ID NO: 2240333 - RNA, 19 nt, Homo sapiens
  misc_RNA (1)...(19): siRNA sense strand
gggaagaaugcuacaguca

SEQ ID NO: 2240334 - RNA, 19 nt, Homo sapiens
  misc_RNA (1)...(19): siRNA sense strand
aagaaggaagagauagaaa

SEQ ID NO: 2240335 - RNA, 19 nt, Homo sapiens
  misc_RNA (1)...(19): siRNA sense strand
augcagaacuccaggaagu

SEQ ID NO: 2240336 - RNA, 19 nt, Homo sapiens
  misc_RNA (1)...(19): siRNA sense strand
aagcagauggaaagagaau

SEQ ID NO: 2240337 - RNA, 19 nt, Homo sapiens
  misc_RNA (1)...(19): siRNA sense strand
ggaaaugaaacgaaugcau

SEQ ID NO: 2240338 - RNA, 19 nt, Homo sapiens
  misc_RNA (1)...(19): siRNA sense strand
guccagagaagaagaggaa

SEQ ID NO: 2240339 - RNA, 19 nt, Homo sapiens
  misc_RNA (1)...(19): siRNA sense strand
ggaaagaaggccaagagga

SEQ ID NO: 2240340 - RNA, 19 nt, Homo sapiens
  misc_RNA (1)...(19): siRNA sense strand
cugauuugcugcuggagaa

SEQ ID NO: 2240341 - RNA, 19 nt, Homo sapiens
  misc_RNA (1)...(19): siRNA sense strand
agauggaagugguuaaaca

SEQ ID NO: 2240342 - RNA, 19 nt, Homo sapiens
  misc_RNA (1)...(19): siRNA sense strand
acgucaaacugccgaggaa

SEQ ID NO: 2240343 - RNA, 19 nt, Homo sapiens
  misc_RNA (1)...(19): siRNA sense strand
aagagaaucccgagaacau

SEQ ID NO: 2240344 - RNA, 19 nt, Homo sapiens
  misc_RNA (1)...(19): siRNA sense strand
ccaauaauucagagcacau

SEQ ID NO: 2240345 - RNA, 19 nt, Homo sapiens
  misc_RNA (1)...(19): siRNA sense strand
uggaagaacgugaaauaga

SEQ ID NO: 2240346 - RNA, 19 nt, Homo sapiens
  misc_RNA (1)...(19): siRNA sense strand
ugaaaagaggcucgagaua

SEQ ID NO: 2240347 - RNA, 19 nt, Homo sapiens
  misc_RNA (1)...(19): siRNA sense strand
agaaugguccagagaagaa

SEQ ID NO: 2240348 - RNA, 19 nt, Homo sapiens
  misc_RNA (1)...(19): siRNA sense strand
gcuaauacucagggaaaga

SEQ ID NO: 2240349 - RNA, 19 nt, Homo sapiens
  misc_RNA (1)...(19): siRNA sense strand
cagcauuugaaaaggaaaa

SEQ ID NO: 2240350 - RNA, 19 nt, Homo sapiens
  misc_RNA (1)...(19): siRNA sense strand
gcguguaaaggaaaugaaa

SEQ ID NO: 2240351 - RNA, 19 nt, Homo sapiens
  misc_RNA (1)...(19): siRNA sense strand
cagaaaaugccgagaagga

SEQ ID NO: 2240352 - RNA, 19 nt, Homo sapiens
  misc_RNA (1)...(19): siRNA sense strand
acagaaugguccagagaag

SEQ ID NO: 2240353 - RNA, 19 nt, Homo sapiens
  misc_RNA (1)...(19): siRNA sense strand
aagagacaaugaagaggaa

SEQ ID NO: 2240354 - RNA, 19 nt, Homo sapiens
  misc_RNA (1)...(19): siRNA sense strand
auugaaagguggacuuaau

SEQ ID NO: 2240355 - RNA, 19 nt, Homo sapiens
  misc_RNA (1)...(19): siRNA sense strand
cuuaugaaccaucuggaaa

SEQ ID NO: 2240356 - RNA, 19 nt, Homo sapiens
  misc_RNA (1)...(19): siRNA sense strand
gcgacaacaagaaagagaa

SEQ ID NO: 2240357 - RNA, 19 nt, Homo sapiens
  misc_RNA (1)...(19): siRNA sense strand
gagacaaugaagaggaaac

SEQ ID NO: 2240358 - RNA, 19 nt, Homo sapiens
  misc_RNA (1)...(19): siRNA sense strand
gcaaagcagugcaaagcca

SEQ ID NO: 2240359 - RNA, 19 nt, Homo sapiens
  misc_RNA (1)...(19): siRNA sense strand
aaaagaaggaagagauaga

SEQ ID NO: 2240360 - RNA, 19 nt, Homo sapiens
  misc_RNA (1)...(19): siRNA sense strand
auccaaauccagaaacaaa

SEQ ID NO: 2240361 - RNA, 19 nt, Homo sapiens
  misc_RNA (1)...(19): siRNA sense strand
ccucuuacgugaagcagau

SEQ ID NO: 2240362 - RNA, 19 nt, Homo sapiens
  misc_RNA (1)...(19): siRNA sense strand
ccaacucaguggaggacca

SEQ ID NO: 2240363 - RNA, 19 nt, Homo sapiens
  misc_RNA (1)...(19): siRNA sense strand
aagaggaaagcaagagaga

SEQ ID NO: 2240364 - RNA, 19 nt, Homo sapiens
  misc_RNA (1)...(19): siRNA sense strand
agauccaaauccagaaaca

SEQ ID NO: 2240365 - RNA, 19 nt, Homo sapiens
  misc_RNA (1)...(19): siRNA sense strand
agaaggaagagauagaaaa

SEQ ID NO: 2240366 - RNA, 19 nt, Homo sapiens
  misc_RNA (1)...(19): siRNA sense strand
ucuccaaagaagagcugaa

SEQ ID NO: 2240367 - RNA, 19 nt, Homo sapiens
  misc_RNA (1)...(19): siRNA sense strand
uugauauggaugaggauga

SEQ ID NO: 2240368 - RNA, 19 nt, Homo sapiens
  misc_RNA (1)...(19): siRNA sense strand
ggccaagaggaaagcaaga

SEQ ID NO: 2240369 - RNA, 19 nt, Homo sapiens
  misc_RNA (1)...(19): siRNA sense strand
aagcaagagagaaacaauu

SEQ ID NO: 2240370 - RNA, 19 nt, Homo sapiens
  misc_RNA (1)...(19): siRNA sense strand
ucuucaaacuagugguguu

SEQ ID NO: 2240371 - RNA, 19 nt, Homo sapiens
  misc_RNA (1)...(19): siRNA sense strand
acuucgagcagcuggcaua

SEQ ID NO: 2240372 - RNA, 19 nt, Homo sapiens
  misc_RNA (1)...(19): siRNA sense strand
cgagaugcagagcguguaa

SEQ ID NO: 2240373 - RNA, 19 nt, Homo sapiens
  misc_RNA (1)...(19): siRNA sense strand
agcauuaagaagacagaau

SEQ ID NO: 2240374 - RNA, 19 nt, Homo sapiens
  misc_RNA (1)...(19): siRNA sense strand
acucaagaaacaugaagau

SEQ ID NO: 2240375 - RNA, 19 nt, Homo sapiens
  misc_RNA (1)...(19): siRNA sense strand
aaggagaaccagucugaaa

SEQ ID NO: 2240376 - RNA, 19 nt, Homo sapiens
  misc_RNA (1)...(19): siRNA sense strand
cgaaaugacuauuaccuga

SEQ ID NO: 2240377 - RNA, 19 nt, Homo sapiens
  misc_RNA (1)...(19): siRNA sense strand
ugaaaguacucuacagcca

SEQ ID NO: 2240378 - RNA, 19 nt, Homo sapiens
  misc_RNA (1)...(19): siRNA sense strand
ccaccaugauguucgggua

SEQ ID NO: 2240379 - RNA, 19 nt, Homo sapiens
  misc_RNA (1)...(19): siRNA sense strand
uggcugaacucaaagguca

SEQ ID NO: 2240380 - RNA, 19 nt, Homo sapiens
  misc_RNA (1)...(19): siRNA sense strand
cgguuuugauguagaggaa

SEQ ID NO: 2240381 - RNA, 19 nt, Homo sapiens
  misc_RNA (1)...(19): siRNA sense strand
gguaaugauaacuugguca

SEQ ID NO: 2240382 - RNA, 19 nt, Homo sapiens
  misc_RNA (1)...(19): siRNA sense strand
ccuggaucaaagagggcaa

SEQ ID NO: 2240383 - RNA, 19 nt, Homo sapiens
  misc_RNA (1)...(19): siRNA sense strand
gcaaggagaaccagucuga

SEQ ID NO: 2240384 - RNA, 19 nt, Homo sapiens
  misc_RNA (1)...(19): siRNA sense strand
ccaagguggcugaacucaa

SEQ ID NO: 2240385 - RNA, 19 nt, Homo sapiens
  misc_RNA (1)...(19): siRNA sense strand
cugaaauccgaaaugacua

SEQ ID NO: 2240386 - RNA, 19 nt, Homo sapiens
  misc_RNA (1)...(19): siRNA sense strand
ccagaggguuaucagaaca

SEQ ID NO: 2240387 - RNA, 19 nt, Homo sapiens
  misc_RNA (1)...(19): siRNA sense strand
agacauucacccagcauca

SEQ ID NO: 2240388 - RNA, 19 nt, Homo sapiens
  misc_RNA (1)...(19): siRNA sense strand
cgccagaggguuaucagaa

SEQ ID NO: 2240389 - RNA, 19 nt, Homo sapiens
  misc_RNA (1)...(19): siRNA sense strand
guguaccuguggagugcaa

SEQ ID NO: 2240390 - RNA, 19 nt, Homo sapiens
  misc_RNA (1)...(19): siRNA sense strand
aguucgcguucgagaguga

SEQ ID NO: 2240391 - RNA, 19 nt, Homo sapiens
  misc_RNA (1)...(19): siRNA sense strand
uggaaauagccgagaggua

SEQ ID NO: 2240392 - RNA, 19 nt, Homo sapiens
  misc_RNA (1)...(19): siRNA sense strand
gguuagaaggauugagaau

SEQ ID NO: 2240393 - RNA, 19 nt, Homo sapiens
  misc_RNA (1)...(19): siRNA sense strand
aggcaauugauaagcguua

SEQ ID NO: 2240394 - RNA, 19 nt, Homo sapiens
  misc_RNA (1)...(19): siRNA sense strand
ccacauuggaguaguucaa

SEQ ID NO: 2240395 - RNA, 19 nt, Homo sapiens
  misc_RNA (1)...(19): siRNA sense strand
augaauuucucuugggcua

SEQ ID NO: 2240396 - RNA, 19 nt, Homo sapiens
  misc_RNA (1)...(19): siRNA sense strand
caaccaaggagaauagcaa

SEQ ID NO: 2240397 - RNA, 19 nt, Homo sapiens
  misc_RNA (1)...(19): siRNA sense strand
cgaaaugcuaucagaguca

SEQ ID NO: 2240398 - RNA, 19 nt, Homo sapiens
  misc_RNA (1)...(19): siRNA sense strand
uaacugaagaauuggacaa

SEQ ID NO: 2240399 - RNA, 19 nt, Homo sapiens
  misc_RNA (1)...(19): siRNA sense strand
acuuaacagacauggauaa

SEQ ID NO: 2240400 - RNA, 19 nt, Homo sapiens
  misc_RNA (1)...(19): siRNA sense strand
ccaaaagagccuuaguuua

SEQ ID NO: 2240401 - RNA, 19 nt, Homo sapiens
  misc_RNA (1)...(19): siRNA sense strand
agucaauccuagacauuau

SEQ ID NO: 2240402 - RNA, 19 nt, Homo sapiens
  misc_RNA (1)...(19): siRNA sense strand
uugaaggcauggagaucua

SEQ ID NO: 2240403 - RNA, 19 nt, Homo sapiens
  misc_RNA (1)...(19): siRNA sense strand
agcugaaagugaugaauuu

SEQ ID NO: 2240404 - RNA, 19 nt, Homo sapiens
  misc_RNA (1)...(19): siRNA sense strand
cuaaaaucccaaacagaaa

SEQ ID NO: 2240405 - RNA, 19 nt, Homo sapiens
  misc_RNA (1)...(19): siRNA sense strand
cugcaaagaagcuauaaau

SEQ ID NO: 2240406 - RNA, 19 nt, Homo sapiens
  misc_RNA (1)...(19): siRNA sense strand
gugaaauggggaaagguua

SEQ ID NO: 2240407 - RNA, 19 nt, Homo sapiens
  misc_RNA (1)...(19): siRNA sense strand
cagagaaggcuuuggauac

SEQ ID NO: 2240408 - RNA, 19 nt, Homo sapiens
  misc_RNA (1)...(19): siRNA sense strand
uuacaagaaguuaggucaa

SEQ ID NO: 2240409 - RNA, 19 nt, Homo sapiens
  misc_RNA (1)...(19): siRNA sense strand
ugaaauaggugaaaagcca

SEQ ID NO: 2240410 - RNA, 19 nt, Homo sapiens
  misc_RNA (1)...(19): siRNA sense strand
ucuauuagggcaugaguuu

SEQ ID NO: 2240411 - RNA, 19 nt, Homo sapiens
  misc_RNA (1)...(19): siRNA sense strand
guuauuaccgcucaggaaa

SEQ ID NO: 2240412 - RNA, 19 nt, Homo sapiens
  misc_RNA (1)...(19): siRNA sense strand
gaucagaauguuaccaaaa

SEQ ID NO: 2240413 - RNA, 19 nt, Homo sapiens
  misc_RNA (1)...(19): siRNA sense strand
cggccaaacuggaacaaag

SEQ ID NO: 2240414 - RNA, 19 nt, Homo sapiens
  misc_RNA (1)...(19): siRNA sense strand
ucaaaagacuuaacagaca

SEQ ID NO: 2240415 - RNA, 19 nt, Homo sapiens
  misc_RNA (1)...(19): siRNA sense strand
gaggaauaacucaaccuaa

SEQ ID NO: 2240416 - RNA, 19 nt, Homo sapiens
  misc_RNA (1)...(19): siRNA sense strand
cagaugaugaggagccaau

SEQ ID NO: 2240417 - RNA, 19 nt, Homo sapiens
  misc_RNA (1)...(19): siRNA sense strand
cagcugaaagugaugaauu

SEQ ID NO: 2240418 - RNA, 19 nt, Homo sapiens
  misc_RNA (1)...(19): siRNA sense strand
gcagaaaagccaugaugau

SEQ ID NO: 2240419 - RNA, 19 nt, Homo sapiens
  misc_RNA (1)...(19): siRNA sense strand
cacuaaaccacuaugcuua

SEQ ID NO: 2240420 - RNA, 19 nt, Homo sapiens
  misc_RNA (1)...(19): siRNA sense strand
ucacagacagccugagaca

SEQ ID NO: 2240421 - RNA, 19 nt, Homo sapiens
  misc_RNA (1)...(19): siRNA sense strand
acaugcaagcugaaagaau

SEQ ID NO: 2240422 - RNA, 19 nt, Homo sapiens
  misc_RNA (1)...(19): siRNA sense strand
auuauagaguugaaggcau

SEQ ID NO: 2240423 - RNA, 19 nt, Homo sapiens
  misc_RNA (1)...(19): siRNA sense strand
cugcccaacucuugcacaa

SEQ ID NO: 2240424 - RNA, 19 nt, Homo sapiens
  misc_RNA (1)...(19): siRNA sense strand
cuauauggcaagcacuaaa

SEQ ID NO: 2240425 - RNA, 19 nt, Homo sapiens
  misc_RNA (1)...(19): siRNA sense strand
gaagaacagaucaugggaa

SEQ ID NO: 2240426 - RNA, 19 nt, Homo sapiens
  misc_RNA (1)...(19): siRNA sense strand
ggauugagaauuauagagu

SEQ ID NO: 2240427 - RNA, 19 nt, Homo sapiens
  misc_RNA (1)...(19): siRNA sense strand
caauaacccaagaagaaca

SEQ ID NO: 2240428 - RNA, 19 nt, Homo sapiens
  misc_RNA (1)...(19): siRNA sense strand
cccaagaagaacagaucau

SEQ ID NO: 2240429 - RNA, 19 nt, Homo sapiens
  misc_RNA (1)...(19): siRNA sense strand
aagaacagaucaugggaac

SEQ ID NO: 2240430 - RNA, 19 nt, Homo sapiens
  misc_RNA (1)...(19): siRNA sense strand
cugguggaguguuuaauaa

SEQ ID NO: 2240431 - RNA, 19 nt, Homo sapiens
  misc_RNA (1)...(19): siRNA sense strand
auaaaugauagccuggaaa

SEQ ID NO: 2240432 - RNA, 19 nt, Homo sapiens
  misc_RNA (1)...(19): siRNA sense strand
cuauccaaguugauccaaa

SEQ ID NO: 2240433 - RNA, 19 nt, Homo sapiens
  misc_RNA (1)...(19): siRNA sense strand
aagaauuggacaaagcauu

SEQ ID NO: 2240434 - RNA, 19 nt, Homo sapiens
  misc_RNA (1)...(19): siRNA sense strand
cagaaguacacucagaaga

SEQ ID NO: 2240435 - RNA, 19 nt, Homo sapiens
  misc_RNA (1)...(19): siRNA sense strand
ccuaaaaucccaaacagaa

SEQ ID NO: 2240436 - RNA, 19 nt, Homo sapiens
  misc_RNA (1)...(19): siRNA sense strand
aggaauaacucaaccuaac

SEQ ID NO: 2240437 - RNA, 19 nt, Homo sapiens
  misc_RNA (1)...(19): siRNA sense strand
cucagagguuagaaggauu

SEQ ID NO: 2240438 - RNA, 19 nt, Homo sapiens
  misc_RNA (1)...(19): siRNA sense strand
gaguugaaggcauggagau

SEQ ID NO: 2240439 - RNA, 19 nt, Homo sapiens
  misc_RNA (1)...(19): siRNA sense strand
cuuaacagacauggauaaa

SEQ ID NO: 2240440 - RNA, 19 nt, Homo sapiens
  misc_RNA (1)...(19): siRNA sense strand
cagaaaagccaugaugaua

SEQ ID NO: 2240441 - RNA, 19 nt, Homo sapiens
  misc_RNA (1)...(19): siRNA sense strand
ggugauucagcuugcuuua

SEQ ID NO: 2240442 - RNA, 19 nt, Homo sapiens
  misc_RNA (1)...(19): siRNA sense strand
guauauugcaagacagauc

SEQ ID NO: 2240443 - RNA, 19 nt, Homo sapiens
  misc_RNA (1)...(19): siRNA sense strand
ugccaaaggaucagaaugu

SEQ ID NO: 2240444 - RNA, 19 nt, Homo sapiens
  misc_RNA (1)...(19): siRNA sense strand
cuuaucugguggaguguuu

SEQ ID NO: 2240445 - RNA, 19 nt, Homo sapiens
  misc_RNA (1)...(19): siRNA sense strand
ccaucauuucagaagggaa

SEQ ID NO: 2240446 - RNA, 19 nt, Homo sapiens
  misc_RNA (1)...(19): siRNA sense strand
caaauuguucccaaagaau

SEQ ID NO: 2240447 - RNA, 19 nt, Homo sapiens
  misc_RNA (1)...(19): siRNA sense strand
agaaaagccaugaugauau

SEQ ID NO: 2240448 - RNA, 19 nt, Homo sapiens
  misc_RNA (1)...(19): siRNA sense strand
augcaagcugaaagaauau

SEQ ID NO: 2240449 - RNA, 19 nt, Homo sapiens
  misc_RNA (1)...(19): siRNA sense strand
uguuauuaccgcucaggaa

SEQ ID NO: 2240450 - RNA, 19 nt, Homo sapiens
  misc_RNA (1)...(19): siRNA sense strand
cuuuacagaacuuuagcaa

SEQ ID NO: 2240451 - RNA, 19 nt, Homo sapiens
  misc_RNA (1)...(19): siRNA sense strand
gcuuaguugcucugagaaa

SEQ ID NO: 2240452 - RNA, 19 nt, Homo sapiens
  misc_RNA (1)...(19): siRNA sense strand
ccacugaugucaauggcaa

SEQ ID NO: 2240453 - RNA, 19 nt, Homo sapiens
  misc_RNA (1)...(19): siRNA sense strand
ggaaagacauccagggcuc

SEQ ID NO: 2240454 - RNA, 19 nt, Homo sapiens
  misc_RNA (1)...(19): siRNA sense strand
cuggaaagggaguggauca

SEQ ID NO: 2240455 - RNA, 19 nt, Homo sapiens
  misc_RNA (1)...(19): siRNA sense strand
cugaauucauugaggacca

SEQ ID NO: 2240456 - RNA, 19 nt, Homo sapiens
  misc_RNA (1)...(19): siRNA sense strand
caguugaagauaaggauga

SEQ ID NO: 2240457 - RNA, 19 nt, Homo sapiens
  misc_RNA (1)...(19): siRNA sense strand
acauaacugcagugggcaa

SEQ ID NO: 2240458 - RNA, 19 nt, Homo sapiens
  misc_RNA (1)...(19): siRNA sense strand
aggaaggagcugugggagu

SEQ ID NO: 2240459 - RNA, 19 nt, Homo sapiens
  misc_RNA (1)...(19): siRNA sense strand
acaccaucaucaacggaaa

SEQ ID NO: 2240460 - RNA, 19 nt, Homo sapiens
  misc_RNA (1)...(19): siRNA sense strand
ccugauaaagucuggaaga

SEQ ID NO: 2240461 - RNA, 19 nt, Homo sapiens
  misc_RNA (1)...(19): siRNA sense strand
uugucaaaccauuggacua

SEQ ID NO: 2240462 - RNA, 19 nt, Homo sapiens
  misc_RNA (1)...(19): siRNA sense strand
ugaacaaagcaaacuacaa

SEQ ID NO: 2240463 - RNA, 19 nt, Homo sapiens
  misc_RNA (1)...(19): siRNA sense strand
ugaucaaaguggaaaauga

SEQ ID NO: 2240464 - RNA, 19 nt, Homo sapiens
  misc_RNA (1)...(19): siRNA sense strand
agucugugaugaugccaaa

SEQ ID NO: 2240465 - RNA, 19 nt, Homo sapiens
  misc_RNA (1)...(19): siRNA sense strand
caaaauucaccaagaaaga

SEQ ID NO: 2240466 - RNA, 19 nt, Homo sapiens
  misc_RNA (1)...(19): siRNA sense strand
cugauaaagucuggaagau

SEQ ID NO: 2240467 - RNA, 19 nt, Homo sapiens
  misc_RNA (1)...(19): siRNA sense strand
gggaguggaucaagagccu

SEQ ID NO: 2240468 - RNA, 19 nt, Homo sapiens
  misc_RNA (1)...(19): siRNA sense strand
aucaagagccuaaaggaau

SEQ ID NO: 2240469 - RNA, 19 nt, Homo sapiens
  misc_RNA (1)...(19): siRNA sense strand
gaucaaaguggaaaaugaa

SEQ ID NO: 2240470 - RNA, 19 nt, Homo sapiens
  misc_RNA (1)...(19): siRNA sense strand
uggaaagggaguggaucaa

SEQ ID NO: 2240471 - RNA, 19 nt, Homo sapiens
  misc_RNA (1)...(19): siRNA sense strand
cccuggaggacgugaauga

SEQ ID NO: 2240472 - RNA, 19 nt, Homo sapiens
  misc_RNA (1)...(19): siRNA sense strand
caucauggugacagauuca

SEQ ID NO: 2240473 - RNA, 19 nt, Homo sapiens
  misc_RNA (1)...(19): siRNA sense strand
gcaccacagugaugcggau

SEQ ID NO: 2240474 - RNA, 19 nt, Homo sapiens
  misc_RNA (1)...(19): siRNA sense strand
uggaaaaucccaaguauga

SEQ ID NO: 2240475 - RNA, 19 nt, Homo sapiens
  misc_RNA (1)...(19): siRNA sense strand
ucaucgaggcucaagauau

SEQ ID NO: 2240476 - RNA, 19 nt, Homo sapiens
  misc_RNA (1)...(19): siRNA sense strand
acaccaacccucaaaccaa

SEQ ID NO: 2240477 - RNA, 19 nt, Homo sapiens
  misc_RNA (1)...(19): siRNA sense strand
uaucacagaucucagggua

SEQ ID NO: 2240478 - RNA, 19 nt, Homo sapiens
  misc_RNA (1)...(19): siRNA sense strand
ucuggaagucauugugauu

SEQ ID NO: 2240479 - RNA, 19 nt, Homo sapiens
  misc_RNA (1)...(19): siRNA sense strand
ugauaacccuggaggacgu

SEQ ID NO: 2240480 - RNA, 19 nt, Homo sapiens
  misc_RNA (1)...(19): siRNA sense strand
uggaagagauugugcccaa

SEQ ID NO: 2240481 - RNA, 19 nt, Homo sapiens
  misc_RNA (1)...(19): siRNA sense strand
cugaagaaguacauggacu

SEQ ID NO: 2240482 - RNA, 19 nt, Homo sapiens
  misc_RNA (1)...(19): siRNA sense strand
agguagagaagaucggaga

SEQ ID NO: 2240483 - RNA, 19 nt, Homo sapiens
  misc_RNA (1)...(19): siRNA sense strand
gggugguguacaaggccaa

SEQ ID NO: 2240484 - RNA, 19 nt, Homo sapiens
  misc_RNA (1)...(19): siRNA sense strand
ccuauggggugguguacaa

SEQ ID NO: 2240485 - RNA, 19 nt, Homo sapiens
  misc_RNA (1)...(19): siRNA sense strand
ggccaagaacagggagaca

SEQ ID NO: 2240486 - RNA, 19 nt, Homo sapiens
  misc_RNA (1)...(19): siRNA sense strand
gggagaucucgcugcucaa

SEQ ID NO: 2240487 - RNA, 19 nt, Homo sapiens
  misc_RNA (1)...(19): siRNA sense strand
ggauaaaguuccagagccu

SEQ ID NO: 2240488 - RNA, 19 nt, Homo sapiens
  misc_RNA (1)...(19): siRNA sense strand
ggagaagaagacuggccua

SEQ ID NO: 2240489 - RNA, 19 nt, Homo sapiens
  misc_RNA (1)...(19): siRNA sense strand
uaucgaugaacuaggcaaa

SEQ ID NO: 2240490 - RNA, 19 nt, Homo sapiens
  misc_RNA (1)...(19): siRNA sense strand
acgaaugcguggcggagau

SEQ ID NO: 2240491 - RNA, 19 nt, Homo sapiens
  misc_RNA (1)...(19): siRNA sense strand
uggaaaggugcaaagaaaa

SEQ ID NO: 2240492 - RNA, 19 nt, Homo sapiens
  misc_RNA (1)...(19): siRNA sense strand
ccagauggcucuaaccuca

SEQ ID NO: 2240493 - RNA, 19 nt, Homo sapiens
  misc_RNA (1)...(19): siRNA sense strand
gccuagagauguugcccuu

SEQ ID NO: 2240494 - RNA, 19 nt, Homo sapiens
  misc_RNA (1)...(19): siRNA sense strand
gggugaagguccugagcga

SEQ ID NO: 2240495 - RNA, 19 nt, Homo sapiens
  misc_RNA (1)...(19): siRNA sense strand
ucuacaaagccaagaggaa

SEQ ID NO: 2240496 - RNA, 19 nt, Homo sapiens
  misc_RNA (1)...(19): siRNA sense strand
gcuauugauauuugggcua

SEQ ID NO: 2240497 - RNA, 19 nt, Homo sapiens
  misc_RNA (1)...(19): siRNA sense strand
ccaagaggaaagaugggaa

SEQ ID NO: 2240498 - RNA, 19 nt, Homo sapiens
  misc_RNA (1)...(19): siRNA sense strand
cguugaagaaagugagagu

SEQ ID NO: 2240499 - RNA, 19 nt, Homo sapiens
  misc_RNA (1)...(19): siRNA sense strand
aggcauuauaccaaagcua

SEQ ID NO: 2240500 - RNA, 19 nt, Homo sapiens
  misc_RNA (1)...(19): siRNA sense strand
augucggcauguagagaaa

SEQ ID NO: 2240501 - RNA, 19 nt, Homo sapiens
  misc_RNA (1)...(19): siRNA sense strand
ugaugacaaaggagacaaa

SEQ ID NO: 2240502 - RNA, 19 nt, Homo sapiens
  misc_RNA (1)...(19): siRNA sense strand
gcagauaaagauugggaag

SEQ ID NO: 2240503 - RNA, 19 nt, Homo sapiens
  misc_RNA (1)...(19): siRNA sense strand
ccgcagagcagcaugggau

SEQ ID NO: 2240504 - RNA, 19 nt, Homo sapiens
  misc_RNA (1)...(19): siRNA sense strand
cagauaaagauugggaaga

SEQ ID NO: 2240505 - RNA, 19 nt, Homo sapiens
  misc_RNA (1)...(19): siRNA sense strand
cgacaagaggacaucaaaa

SEQ ID NO: 2240506 - RNA, 19 nt, Homo sapiens
  misc_RNA (1)...(19): siRNA sense strand
cggaagaagaaccugauga

SEQ ID NO: 2240507 - RNA, 19 nt, Homo sapiens
  misc_RNA (1)...(19): siRNA sense strand
agcauuacuucgagagcuu

SEQ ID NO: 2240508 - RNA, 19 nt, Homo sapiens
  misc_RNA (1)...(19): siRNA sense strand
augaccagcuggacagaau

SEQ ID NO: 2240509 - RNA, 19 nt, Homo sapiens
  misc_RNA (1)...(19): siRNA sense strand
agaugggaaggaugauaaa

SEQ ID NO: 2240510 - RNA, 19 nt, Homo sapiens
  misc_RNA (1)...(19): siRNA sense strand
ugaacuacuucuuggagca

SEQ ID NO: 2240511 - RNA, 19 nt, Homo sapiens
  misc_RNA (1)...(19): siRNA sense strand
gcgaauuaccucagaacag

SEQ ID NO: 2240512 - RNA, 19 nt, Homo sapiens
  misc_RNA (1)...(19): siRNA sense strand
gggaaggaugauaaagacu

SEQ ID NO: 2240513 - RNA, 19 nt, Homo sapiens
  misc_RNA (1)...(19): siRNA sense strand
caaaguuggccgaggcacu

SEQ ID NO: 2240514 - RNA, 19 nt, Homo sapiens
  misc_RNA (1)...(19): siRNA sense strand
ugucaaaucccuuacccaa

SEQ ID NO: 2240515 - RNA, 19 nt, Homo sapiens
  misc_RNA (1)...(19): siRNA sense strand
ugagcgaggaagaguaaaa

SEQ ID NO: 2240516 - RNA, 19 nt, Homo sapiens
  misc_RNA (1)...(19): siRNA sense strand
gcauguagagaaauagcau

SEQ ID NO: 2240517 - RNA, 19 nt, Homo sapiens
  misc_RNA (1)...(19): siRNA sense strand
gggcaauaaccacacuaau

SEQ ID NO: 2240518 - RNA, 19 nt, Homo sapiens
  misc_RNA (1)...(19): siRNA sense strand
cagcagcagcagggcaaua

SEQ ID NO: 2240519 - RNA, 19 nt, Homo sapiens
  misc_RNA (1)...(19): siRNA sense strand
cgcagagcagcaugggaua

SEQ ID NO: 2240520 - RNA, 19 nt, Homo sapiens
  misc_RNA (1)...(19): siRNA sense strand
cagaacaggcuaugcagga

SEQ ID NO: 2240521 - RNA, 19 nt, Homo sapiens
  misc_RNA (1)...(19): siRNA sense strand
augggaaggaugauaaaga

SEQ ID NO: 2240522 - RNA, 19 nt, Homo sapiens
  misc_RNA (1)...(19): siRNA sense strand
aauagaaggaacugggauc

SEQ ID NO: 2240523 - RNA, 19 nt, Homo sapiens
  misc_RNA (1)...(19): siRNA sense strand
cuuugaagccuuuagcaga

SEQ ID NO: 2240524 - RNA, 19 nt, Homo sapiens
  misc_RNA (1)...(19): siRNA sense strand
ugggauuuccugcagauaa

SEQ ID NO: 2240525 - RNA, 19 nt, Homo sapiens
  misc_RNA (1)...(19): siRNA sense strand
aaucaagacagcagucaca

SEQ ID NO: 2240526 - RNA, 19 nt, Homo sapiens
  misc_RNA (1)...(19): siRNA sense strand
uugaagaaagugagaguug

SEQ ID NO: 2240527 - RNA, 19 nt, Homo sapiens
  misc_RNA (1)...(19): siRNA sense strand
ggaaugagguuguuagccu

SEQ ID NO: 2240528 - RNA, 19 nt, Homo sapiens
  misc_RNA (1)...(19): siRNA sense strand
ugguggaguuccuggugaa

SEQ ID NO: 2240529 - RNA, 19 nt, Homo sapiens
  misc_RNA (1)...(19): siRNA sense strand
cgaggauaaugaagggaac

SEQ ID NO: 2240530 - RNA, 19 nt, Homo sapiens
  misc_RNA (1)...(19): siRNA sense strand
auguaaacgucaaugcaca

SEQ ID NO: 2240531 - RNA, 19 nt, Homo sapiens
  misc_RNA (1)...(19): siRNA sense strand
uguaaacgucaaugcacaa

SEQ ID NO: 2240532 - RNA, 19 nt, Homo sapiens
  misc_RNA (1)...(19): siRNA sense strand
agguuaugaaacuuggaaa

SEQ ID NO: 2240533 - RNA, 19 nt, Homo sapiens
  misc_RNA (1)...(19): siRNA sense strand
aguuucaagcugauguuaa

SEQ ID NO: 2240534 - RNA, 19 nt, Homo sapiens
  misc_RNA (1)...(19): siRNA sense strand
ucgaggauaaugaagggaa

SEQ ID NO: 2240535 - RNA, 19 nt, Homo sapiens
  misc_RNA (1)...(19): siRNA sense strand
ggaaugagguuguuagccu

SEQ ID NO: 2240536 - RNA, 19 nt, Homo sapiens
  misc_RNA (1)...(19): siRNA sense strand
ugguggaguuccuggugaa

SEQ ID NO: 2240537 - RNA, 19 nt, Homo sapiens
  misc_RNA (1)...(19): siRNA sense strand
cgaggauaaugaagggaac

SEQ ID NO: 2240538 - RNA, 19 nt, Homo sapiens
  misc_RNA (1)...(19): siRNA sense strand
auguaaacgucaaugcaca

SEQ ID NO: 2240539 - RNA, 19 nt, Homo sapiens
  misc_RNA (1)...(19): siRNA sense strand
uguaaacgucaaugcacaa

SEQ ID NO: 2240540 - RNA, 19 nt, Homo sapiens
  misc_RNA (1)...(19): siRNA sense strand
agguuaugaaacuuggaaa

SEQ ID NO: 2240541 - RNA, 19 nt, Homo sapiens
  misc_RNA (1)...(19): siRNA sense strand
aguuucaagcugauguuaa

SEQ ID NO: 2240542 - RNA, 19 nt, Homo sapiens
  misc_RNA (1)...(19): siRNA sense strand
ucgaggauaaugaagggaa

SEQ ID NO: 2240543 - RNA, 19 nt, Homo sapiens
  misc_RNA (1)...(19): siRNA sense strand
ugucaguauuugauggcaa

SEQ ID NO: 2240544 - RNA, 19 nt, Homo sapiens
  misc_RNA (1)...(19): siRNA sense strand
agauagaaccccugagauu

SEQ ID NO: 2240545 - RNA, 19 nt, Homo sapiens
  misc_RNA (1)...(19): siRNA sense strand
uccuggacauggugggaua

SEQ ID NO: 2240546 - RNA, 19 nt, Homo sapiens
  misc_RNA (1)...(19): siRNA sense strand
gcgacaaagaaacagauau

SEQ ID NO: 2240547 - RNA, 19 nt, Homo sapiens
  misc_RNA (1)...(19): siRNA sense strand
gauguaaacuccuucguga

SEQ ID NO: 2240548 - RNA, 19 nt, Homo sapiens
  misc_RNA (1)...(19): siRNA sense strand
agauauggagauuuggauu

SEQ ID NO: 2240549 - RNA, 19 nt, Homo sapiens
  misc_RNA (1)...(19): siRNA sense strand
ucaaaagagccuucaaaau

SEQ ID NO: 2240550 - RNA, 19 nt, Homo sapiens
  misc_RNA (1)...(19): siRNA sense strand
uggagagacuguagcugau

SEQ ID NO: 2240551 - RNA, 19 nt, Homo sapiens
  misc_RNA (1)...(19): siRNA sense strand
uugucugcccaguggaaua

SEQ ID NO: 2240552 - RNA, 19 nt, Homo sapiens
  misc_RNA (1)...(19): siRNA sense strand
uguuaucugcaaugacaua

SEQ ID NO: 2240553 - RNA, 19 nt, Homo sapiens
  misc_RNA (1)...(19): siRNA sense strand
cuaccaugguuuagaacac

SEQ ID NO: 2240554 - RNA, 19 nt, Homo sapiens
  misc_RNA (1)...(19): siRNA sense strand
ggaccuuggcuaagagcau

SEQ ID NO: 2240555 - RNA, 19 nt, Homo sapiens
  misc_RNA (1)...(19): siRNA sense strand
agugguagcuccagcggau

SEQ ID NO: 2240556 - RNA, 19 nt, Homo sapiens
  misc_RNA (1)...(19): siRNA sense strand
gcccagaagcugaaggaca

SEQ ID NO: 2240557 - RNA, 19 nt, Homo sapiens
  misc_RNA (1)...(19): siRNA sense strand
agacuuagcaagaugguga

SEQ ID NO: 2240558 - RNA, 19 nt, Homo sapiens
  misc_RNA (1)...(19): siRNA sense strand
gugaugaaauucugggcca

SEQ ID NO: 2240559 - RNA, 19 nt, Homo sapiens
  misc_RNA (1)...(19): siRNA sense strand
gcacugugauugaugggau

SEQ ID NO: 2240560 - RNA, 19 nt, Homo sapiens
  misc_RNA (1)...(19): siRNA sense strand
ggaauuaacaagcaggagu

SEQ ID NO: 2240561 - RNA, 19 nt, Homo sapiens
  misc_RNA (1)...(19): siRNA sense strand
caucagacaugaaacccaa

SEQ ID NO: 2240562 - RNA, 19 nt, Homo sapiens
  misc_RNA (1)...(19): siRNA sense strand
ccaagacggugauaggaga

SEQ ID NO: 2240563 - RNA, 19 nt, Homo sapiens
  misc_RNA (1)...(19): siRNA sense strand
ugagaaauacuuaggagga

SEQ ID NO: 2240564 - RNA, 19 nt, Homo sapiens
  misc_RNA (1)...(19): siRNA sense strand
uuccaauguugaugagcua

SEQ ID NO: 2240565 - RNA, 19 nt, Homo sapiens
  misc_RNA (1)...(19): siRNA sense strand
ccgaagggcaacuggacca

SEQ ID NO: 2240566 - RNA, 19 nt, Homo sapiens
  misc_RNA (1)...(19): siRNA sense strand
ugaugaaauucugggccaa

SEQ ID NO: 2240567 - RNA, 19 nt, Homo sapiens
  misc_RNA (1)...(19): siRNA sense strand
gcuuagaaggauuugcaca

SEQ ID NO: 2240568 - RNA, 19 nt, Homo sapiens
  misc_RNA (1)...(19): siRNA sense strand
uuuacaaaccgaaaggaga

SEQ ID NO: 2240569 - RNA, 19 nt, Homo sapiens
  misc_RNA (1)...(19): siRNA sense strand
gaguacaaccagaaggaag

SEQ ID NO: 2240570 - RNA, 19 nt, Homo sapiens
  misc_RNA (1)...(19): siRNA sense strand
agcaagauggugaugaaau

SEQ ID NO: 2240571 - RNA, 19 nt, Homo sapiens
  misc_RNA (1)...(19): siRNA sense strand
acaaccagaaggaagggua

SEQ ID NO: 2240572 - RNA, 19 nt, Homo sapiens
  misc_RNA (1)...(19): siRNA sense strand
cccacuggccagaguacaa

SEQ ID NO: 2240573 - RNA, 19 nt, Homo sapiens
  misc_RNA (1)...(19): siRNA sense strand
cugccaaguucaagggcca

SEQ ID NO: 2240574 - RNA, 19 nt, Homo sapiens
  misc_RNA (1)...(19): siRNA sense strand
gcagauaccuggagacccu

SEQ ID NO: 2240575 - RNA, 19 nt, Homo sapiens
  misc_RNA (1)...(19): siRNA sense strand
gggugguggaggagcugaa

SEQ ID NO: 2240576 - RNA, 19 nt, Homo sapiens
  misc_RNA (1)...(19): siRNA sense strand
caacaagauccgugagcug

SEQ ID NO: 2240577 - RNA, 19 nt, Homo sapiens
  misc_RNA (1)...(19): siRNA sense strand
agaacaaccgcuugaacca

SEQ ID NO: 2240578 - RNA, 19 nt, Homo sapiens
  misc_RNA (1)...(19): siRNA sense strand
ggcucuaccugucggaaaa

SEQ ID NO: 2240579 - RNA, 19 nt, Homo sapiens
  misc_RNA (1)...(19): siRNA sense strand
ugcucaaccuacagcgcaa

SEQ ID NO: 2240580 - RNA, 19 nt, Homo sapiens
  misc_RNA (1)...(19): siRNA sense strand
agauguuagaugugggaaa

SEQ ID NO: 2240581 - RNA, 19 nt, Homo sapiens
  misc_RNA (1)...(19): siRNA sense strand
guggaaaaggacaggauua

SEQ ID NO: 2240582 - RNA, 19 nt, Homo sapiens
  misc_RNA (1)...(19): siRNA sense strand
auaaaguaguugugaccau

SEQ ID NO: 2240583 - RNA, 19 nt, Homo sapiens
  misc_RNA (1)...(19): siRNA sense strand
auuaacagaugaaggccaa

SEQ ID NO: 2240584 - RNA, 19 nt, Homo sapiens
  misc_RNA (1)...(19): siRNA sense strand
gaaaguacauuuaugcaca

SEQ ID NO: 2240585 - RNA, 19 nt, Homo sapiens
  misc_RNA (1)...(19): siRNA sense strand
caagauucgaugugagcau

SEQ ID NO: 2240586 - RNA, 19 nt, Homo sapiens
  misc_RNA (1)...(19): siRNA sense strand
aagauaacgaggaugauau

SEQ ID NO: 2240587 - RNA, 19 nt, Homo sapiens
  misc_RNA (1)...(19): siRNA sense strand
aguaugaugcacaggauuu

SEQ ID NO: 2240588 - RNA, 19 nt, Homo sapiens
  misc_RNA (1)...(19): siRNA sense strand
gggcaaugggacaacuaau

SEQ ID NO: 2240589 - RNA, 19 nt, Homo sapiens
  misc_RNA (1)...(19): siRNA sense strand
cgucauuggaagauaacga

SEQ ID NO: 2240590 - RNA, 19 nt, Homo sapiens
  misc_RNA (1)...(19): siRNA sense strand
ugaagagggaauuugacaa

SEQ ID NO: 2240591 - RNA, 19 nt, Homo sapiens
  misc_RNA (1)...(19): siRNA sense strand
gagucacugaagagggaau

SEQ ID NO: 2240592 - RNA, 19 nt, Homo sapiens
  misc_RNA (1)...(19): siRNA sense strand
gcuuauagccagcugggca

SEQ ID NO: 2240593 - RNA, 19 nt, Homo sapiens
  misc_RNA (1)...(19): siRNA sense strand
cuuauagccagcugggcaa

SEQ ID NO: 2240594 - RNA, 19 nt, Homo sapiens
  misc_RNA (1)...(19): siRNA sense strand
cuacaguaaaugaugagau

SEQ ID NO: 2240595 - RNA, 19 nt, Homo sapiens
  misc_RNA (1)...(19): siRNA sense strand
ccagcugggcaaugggaca

SEQ ID NO: 2240596 - RNA, 19 nt, Homo sapiens
  misc_RNA (1)...(19): siRNA sense strand
ugaaguugccugugggucu

SEQ ID NO: 2240597 - RNA, 19 nt, Homo sapiens
  misc_RNA (1)...(19): siRNA sense strand
caacaguuaaucagccaau

SEQ ID NO: 2240598 - RNA, 19 nt, Homo sapiens
  misc_RNA (1)...(19): siRNA sense strand
gaggaugauauuguagaaa

SEQ ID NO: 2240599 - RNA, 19 nt, Homo sapiens
  misc_RNA (1)...(19): siRNA sense strand
ugaagaagagagagagaaa

SEQ ID NO: 2240600 - RNA, 19 nt, Homo sapiens
  misc_RNA (1)...(19): siRNA sense strand
ggauauggaagcugggaaa

SEQ ID NO: 2240601 - RNA, 19 nt, Homo sapiens
  misc_RNA (1)...(19): siRNA sense strand
gcuaagaagaauaaagcaa

SEQ ID NO: 2240602 - RNA, 19 nt, Homo sapiens
  misc_RNA (1)...(19): siRNA sense strand
uggcaaagggagagaauau

SEQ ID NO: 2240603 - RNA, 19 nt, Homo sapiens
  misc_RNA (1)...(19): siRNA sense strand
ccuaagagaacgaggcaau

SEQ ID NO: 2240604 - RNA, 19 nt, Homo sapiens
  misc_RNA (1)...(19): siRNA sense strand
uuacagugacagagagaaa

SEQ ID NO: 2240605 - RNA, 19 nt, Homo sapiens
  misc_RNA (1)...(19): siRNA sense strand
cagcagaauguuagaggaa

SEQ ID NO: 2240606 - RNA, 19 nt, Homo sapiens
  misc_RNA (1)...(19): siRNA sense strand
caaauuaagcaauggagaa

SEQ ID NO: 2240607 - RNA, 19 nt, Homo sapiens
  misc_RNA (1)...(19): siRNA sense strand
agggaaagauccaagaaau

SEQ ID NO: 2240608 - RNA, 19 nt, Homo sapiens
  misc_RNA (1)...(19): siRNA sense strand
acaugagggcuuagaauua

SEQ ID NO: 2240609 - RNA, 19 nt, Homo sapiens
  misc_RNA (1)...(19): siRNA sense strand
aguuggaaccugaaagaaa

SEQ ID NO: 2240610 - RNA, 19 nt, Homo sapiens
  misc_RNA (1)...(19): siRNA sense strand
aagaagacgauuagaagaa

SEQ ID NO: 2240611 - RNA, 19 nt, Homo sapiens
  misc_RNA (1)...(19): siRNA sense strand
gaugauagcagcagggaca

SEQ ID NO: 2240612 - RNA, 19 nt, Homo sapiens
  misc_RNA (1)...(19): siRNA sense strand
ugaagaagaacauggcaaa

SEQ ID NO: 2240613 - RNA, 19 nt, Homo sapiens
  misc_RNA (1)...(19): siRNA sense strand
acauuaugauggagcuaaa

SEQ ID NO: 2240614 - RNA, 19 nt, Homo sapiens
  misc_RNA (1)...(19): siRNA sense strand
aagcaagagcuaagaagaa

SEQ ID NO: 2240615 - RNA, 19 nt, Homo sapiens
  misc_RNA (1)...(19): siRNA sense strand
cagcauuuguaaagaaaga

SEQ ID NO: 2240616 - RNA, 19 nt, Homo sapiens
  misc_RNA (1)...(19): siRNA sense strand
uagaaacaguaguggagaa

SEQ ID NO: 2240617 - RNA, 19 nt, Homo sapiens
  misc_RNA (1)...(19): siRNA sense strand
ucaaagaauugggaggaaa

SEQ ID NO: 2240618 - RNA, 19 nt, Homo sapiens
  misc_RNA (1)...(19): siRNA sense strand
agaucaaagaagacgauua

SEQ ID NO: 2240619 - RNA, 19 nt, Homo sapiens
  misc_RNA (1)...(19): siRNA sense strand
ucaaauagugggacguaua

SEQ ID NO: 2240620 - RNA, 19 nt, Homo sapiens
  misc_RNA (1)...(19): siRNA sense strand
caaauauggaugaggauga

SEQ ID NO: 2240621 - RNA, 19 nt, Homo sapiens
  misc_RNA (1)...(19): siRNA sense strand
gcuauaaggaggaugaaga

SEQ ID NO: 2240622 - RNA, 19 nt, Homo sapiens
  misc_RNA (1)...(19): siRNA sense strand
ugaaaugggccuuggaaaa

SEQ ID NO: 2240623 - RNA, 19 nt, Homo sapiens
  misc_RNA (1)...(19): siRNA sense strand
caaagaauugggaggaaau

SEQ ID NO: 2240624 - RNA, 19 nt, Homo sapiens
  misc_RNA (1)...(19): siRNA sense strand
gcaagagcuaagaagaaua

SEQ ID NO: 2240625 - RNA, 19 nt, Homo sapiens
  misc_RNA (1)...(19): siRNA sense strand
gaggaaauaaagagugauu

SEQ ID NO: 2240626 - RNA, 19 nt, Homo sapiens
  misc_RNA (1)...(19): siRNA sense strand
gguaaagaccaucgugauu

SEQ ID NO: 2240627 - RNA, 19 nt, Homo sapiens
  misc_RNA (1)...(19): siRNA sense strand
cugaugaagaugaugauaa

SEQ ID NO: 2240628 - RNA, 19 nt, Homo sapiens
  misc_RNA (1)...(19): siRNA sense strand
ggaugaugaugaagaagau

SEQ ID NO: 2240629 - RNA, 19 nt, Homo sapiens
  misc_RNA (1)...(19): siRNA sense strand
ugggagaauugguacauaa

SEQ ID NO: 2240630 - RNA, 19 nt, Homo sapiens
  misc_RNA (1)...(19): siRNA sense strand
ggucaaauuuggaaggaag

SEQ ID NO: 2240631 - RNA, 19 nt, Homo sapiens
  misc_RNA (1)...(19): siRNA sense strand
gcagaauguuagaggaaug

SEQ ID NO: 2240632 - RNA, 19 nt, Homo sapiens
  misc_RNA (1)...(19): siRNA sense strand
ggaugaugauucuggguca

SEQ ID NO: 2240633 - RNA, 19 nt, Homo sapiens
  misc_RNA (1)...(19): siRNA sense strand
cggcaggagucucagcaaa

SEQ ID NO: 2240634 - RNA, 19 nt, Homo sapiens
  misc_RNA (1)...(19): siRNA sense strand
aaaugaaugcugugguuua

SEQ ID NO: 2240635 - RNA, 19 nt, Homo sapiens
  misc_RNA (1)...(19): siRNA sense strand
uagaagaagaagaaagaca

SEQ ID NO: 2240636 - RNA, 19 nt, Homo sapiens
  misc_RNA (1)...(19): siRNA sense strand
cgguuuaucaagagcuaua

SEQ ID NO: 2240637 - RNA, 19 nt, Homo sapiens
  misc_RNA (1)...(19): siRNA sense strand
gcaucuaugaauauggaua

SEQ ID NO: 2240638 - RNA, 19 nt, Homo sapiens
  misc_RNA (1)...(19): siRNA sense strand
ggaaguucaaagaggagaa

SEQ ID NO: 2240639 - RNA, 19 nt, Homo sapiens
  misc_RNA (1)...(19): siRNA sense strand
ggaaauaaagagugauucu

SEQ ID NO: 2240640 - RNA, 19 nt, Homo sapiens
  misc_RNA (1)...(19): siRNA sense strand
acagagagaaacacagaaa

SEQ ID NO: 2240641 - RNA, 19 nt, Homo sapiens
  misc_RNA (1)...(19): siRNA sense strand
aagaggaaauaaagaguga

SEQ ID NO: 2240642 - RNA, 19 nt, Homo sapiens
  misc_RNA (1)...(19): siRNA sense strand
gaauguuagaggaaugaaa

SEQ ID NO: 2240643 - RNA, 19 nt, Homo sapiens
  misc_RNA (1)...(19): siRNA sense strand
agaagaagaagaaagacaa

SEQ ID NO: 2240644 - RNA, 19 nt, Homo sapiens
  misc_RNA (1)...(19): siRNA sense strand
cagaagaaagaaagcagua

SEQ ID NO: 2240645 - RNA, 19 nt, Homo sapiens
  misc_RNA (1)...(19): siRNA sense strand
gggaagauuuugaagaaga

SEQ ID NO: 2240646 - RNA, 19 nt, Homo sapiens
  misc_RNA (1)...(19): siRNA sense strand
gggaaagauccaagaaauc

SEQ ID NO: 2240647 - RNA, 19 nt, Homo sapiens
  misc_RNA (1)...(19): siRNA sense strand
aaucugaagaagagagaga

SEQ ID NO: 2240648 - RNA, 19 nt, Homo sapiens
  misc_RNA (1)...(19): siRNA sense strand
gggcaguaccucaggcuuu

SEQ ID NO: 2240649 - RNA, 19 nt, Homo sapiens
  misc_RNA (1)...(19): siRNA sense strand
acgauuagaagaagaagaa

SEQ ID NO: 2240650 - RNA, 19 nt, Homo sapiens
  misc_RNA (1)...(19): siRNA sense strand
uggaaagauuagaugcaau

SEQ ID NO: 2240651 - RNA, 19 nt, Homo sapiens
  misc_RNA (1)...(19): siRNA sense strand
uaguagagaucuugcaaaa

SEQ ID NO: 2240652 - RNA, 19 nt, Homo sapiens
  misc_RNA (1)...(19): siRNA sense strand
gccaaagaaacguggaaga

SEQ ID NO: 2240653 - RNA, 19 nt, Homo sapiens
  misc_RNA (1)...(19): siRNA sense strand
aaggauaguucuucaggaa

SEQ ID NO: 2240654 - RNA, 19 nt, Homo sapiens
  misc_RNA (1)...(19): siRNA sense strand
ggacaugagggcuuagaau

SEQ ID NO: 2240655 - RNA, 19 nt, Homo sapiens
  misc_RNA (1)...(19): siRNA sense strand
ucaaagaagacgauuagaa

SEQ ID NO: 2240656 - RNA, 19 nt, Homo sapiens
  misc_RNA (1)...(19): siRNA sense strand
gcgcaguagaaguaggaga

SEQ ID NO: 2240657 - RNA, 19 nt, Homo sapiens
  misc_RNA (1)...(19): siRNA sense strand
agaacauggcaaagggaga

SEQ ID NO: 2240658 - RNA, 19 nt, Homo sapiens
  misc_RNA (1)...(19): siRNA sense strand
acucuuacuuccuggcaaa

SEQ ID NO: 2240659 - RNA, 19 nt, Homo sapiens
  misc_RNA (1)...(19): siRNA sense strand
caucagaccaaacgguuaa

SEQ ID NO: 2240660 - RNA, 19 nt, Homo sapiens
  misc_RNA (1)...(19): siRNA sense strand
augcugaguuaguugauaa

SEQ ID NO: 2240661 - RNA, 19 nt, Homo sapiens
  misc_RNA (1)...(19): siRNA sense strand
aagcaagacagcagauauu

SEQ ID NO: 2240662 - RNA, 19 nt, Homo sapiens
  misc_RNA (1)...(19): siRNA sense strand
cuauaaggaggaugaagaa

SEQ ID NO: 2240663 - RNA, 19 nt, Homo sapiens
  misc_RNA (1)...(19): siRNA sense strand
gggaucaguugaagaagau

SEQ ID NO: 2240664 - RNA, 19 nt, Homo sapiens
  misc_RNA (1)...(19): siRNA sense strand
agaaugagaaauugugcaa

SEQ ID NO: 2240665 - RNA, 19 nt, Homo sapiens
  misc_RNA (1)...(19): siRNA sense strand
acacagugaugaagaaagu

SEQ ID NO: 2240666 - RNA, 19 nt, Homo sapiens
  misc_RNA (1)...(19): siRNA sense strand
ccacaacacuugggagaca

SEQ ID NO: 2240667 - RNA, 19 nt, Homo sapiens
  misc_RNA (1)...(19): siRNA sense strand
agcuggaggucuagggauu

SEQ ID NO: 2240668 - RNA, 19 nt, Homo sapiens
  misc_RNA (1)...(19): siRNA sense strand
gaguagagaucacagguca

SEQ ID NO: 2240669 - RNA, 19 nt, Homo sapiens
  misc_RNA (1)...(19): siRNA sense strand
aaagaaacguggaagacca

SEQ ID NO: 2240670 - RNA, 19 nt, Homo sapiens
  misc_RNA (1)...(19): siRNA sense strand
uaucaggaguacaggugaa

SEQ ID NO: 2240671 - RNA, 19 nt, Homo sapiens
  misc_RNA (1)...(19): siRNA sense strand
gggaaaaggaccagggaaa

SEQ ID NO: 2240672 - RNA, 19 nt, Homo sapiens
  misc_RNA (1)...(19): siRNA sense strand
agaagaagaaagagaacaa

SEQ ID NO: 2240673 - RNA, 19 nt, Homo sapiens
  misc_RNA (1)...(19): siRNA sense strand
caaacaaugguuagggaaa

SEQ ID NO: 2240674 - RNA, 19 nt, Homo sapiens
  misc_RNA (1)...(19): siRNA sense strand
agauuaacguagugguuua

SEQ ID NO: 2240675 - RNA, 19 nt, Homo sapiens
  misc_RNA (1)...(19): siRNA sense strand
ggagacuggcagagggaaa

SEQ ID NO: 2240676 - RNA, 19 nt, Homo sapiens
  misc_RNA (1)...(19): siRNA sense strand
agaaagagaacaaggagaa

SEQ ID NO: 2240677 - RNA, 19 nt, Homo sapiens
  misc_RNA (1)...(19): siRNA sense strand
cagcaagauaauagugaaa

SEQ ID NO: 2240678 - RNA, 19 nt, Homo sapiens
  misc_RNA (1)...(19): siRNA sense strand
gaagaaaaugaaagggaaa

SEQ ID NO: 2240679 - RNA, 19 nt, Homo sapiens
  misc_RNA (1)...(19): siRNA sense strand
ggaagaugaagaagagcua

SEQ ID NO: 2240680 - RNA, 19 nt, Homo sapiens
  misc_RNA (1)...(19): siRNA sense strand
aaucagaaccucaggaaau

SEQ ID NO: 2240681 - RNA, 19 nt, Homo sapiens
  misc_RNA (1)...(19): siRNA sense strand
aaacagaagaagaaagaga

SEQ ID NO: 2240682 - RNA, 19 nt, Homo sapiens
  misc_RNA (1)...(19): siRNA sense strand
uguugaagcugcucagaaa

SEQ ID NO: 2240683 - RNA, 19 nt, Homo sapiens
  misc_RNA (1)...(19): siRNA sense strand
ggguaaagaaggaaaacaa

SEQ ID NO: 2240684 - RNA, 19 nt, Homo sapiens
  misc_RNA (1)...(19): siRNA sense strand
agaagagggagaagugaaa

SEQ ID NO: 2240685 - RNA, 19 nt, Homo sapiens
  misc_RNA (1)...(19): siRNA sense strand
aagaagaagaggagcaaaa

SEQ ID NO: 2240686 - RNA, 19 nt, Homo sapiens
  misc_RNA (1)...(19): siRNA sense strand
gagaacaaggagaaacaaa

SEQ ID NO: 2240687 - RNA, 19 nt, Homo sapiens
  misc_RNA (1)...(19): siRNA sense strand
gggaagugauccaggaagu

SEQ ID NO: 2240688 - RNA, 19 nt, Homo sapiens
  misc_RNA (1)...(19): siRNA sense strand
gcucauuccuggugcaaaa

SEQ ID NO: 2240689 - RNA, 19 nt, Homo sapiens
  misc_RNA (1)...(19): siRNA sense strand
agaaauacgauacgggaau

SEQ ID NO: 2240690 - RNA, 19 nt, Homo sapiens
  misc_RNA (1)...(19): siRNA sense strand
caacaauggaagaugaaga

SEQ ID NO: 2240691 - RNA, 19 nt, Homo sapiens
  misc_RNA (1)...(19): siRNA sense strand
ccaaauuaaagaagcggaa

SEQ ID NO: 2240692 - RNA, 19 nt, Homo sapiens
  misc_RNA (1)...(19): siRNA sense strand
ugaaagaggagcauggaau

SEQ ID NO: 2240693 - RNA, 19 nt, Homo sapiens
  misc_RNA (1)...(19): siRNA sense strand
gcaagauaauagugaaacu

SEQ ID NO: 2240694 - RNA, 19 nt, Homo sapiens
  misc_RNA (1)...(19): siRNA sense strand
cagaagaugaacaggaaca

SEQ ID NO: 2240695 - RNA, 19 nt, Homo sapiens
  misc_RNA (1)...(19): siRNA sense strand
cuagagaacuucaagaaaa

SEQ ID NO: 2240696 - RNA, 19 nt, Homo sapiens
  misc_RNA (1)...(19): siRNA sense strand
ggcugaaacgagagagaau

SEQ ID NO: 2240697 - RNA, 19 nt, Homo sapiens
  misc_RNA (1)...(19): siRNA sense strand
aagagaacaaggagaacaa

SEQ ID NO: 2240698 - RNA, 19 nt, Homo sapiens
  misc_RNA (1)...(19): siRNA sense strand
aggaaagaaagaagucaaa

SEQ ID NO: 2240699 - RNA, 19 nt, Homo sapiens
  misc_RNA (1)...(19): siRNA sense strand
ggaugaugaugaugacgaa

SEQ ID NO: 2240700 - RNA, 19 nt, Homo sapiens
  misc_RNA (1)...(19): siRNA sense strand
cagaagagggagaagugaa

SEQ ID NO: 2240701 - RNA, 19 nt, Homo sapiens
  misc_RNA (1)...(19): siRNA sense strand
gccaaaucuucgaguaaau

SEQ ID NO: 2240702 - RNA, 19 nt, Homo sapiens
  misc_RNA (1)...(19): siRNA sense strand
gggaagauuuugaagaaga

SEQ ID NO: 2240703 - RNA, 19 nt, Homo sapiens
  misc_RNA (1)...(19): siRNA sense strand
gauaagaaagagaagccua

SEQ ID NO: 2240704 - RNA, 19 nt, Homo sapiens
  misc_RNA (1)...(19): siRNA sense strand
gugaagaagaugugggaag

SEQ ID NO: 2240705 - RNA, 19 nt, Homo sapiens
  misc_RNA (1)...(19): siRNA sense strand
agaagaugugggaagaaua

SEQ ID NO: 2240706 - RNA, 19 nt, Homo sapiens
  misc_RNA (1)...(19): siRNA sense strand
acaaggagaacaaggagaa

SEQ ID NO: 2240707 - RNA, 19 nt, Homo sapiens
  misc_RNA (1)...(19): siRNA sense strand
aggagaacaaggagaaaca

SEQ ID NO: 2240708 - RNA, 19 nt, Homo sapiens
  misc_RNA (1)...(19): siRNA sense strand
acaaagaagaugaugacuu

SEQ ID NO: 2240709 - RNA, 19 nt, Homo sapiens
  misc_RNA (1)...(19): siRNA sense strand
cagaaauacgauacgggaa

SEQ ID NO: 2240710 - RNA, 19 nt, Homo sapiens
  misc_RNA (1)...(19): siRNA sense strand
cggaagacucugaugauga

SEQ ID NO: 2240711 - RNA, 19 nt, Homo sapiens
  misc_RNA (1)...(19): siRNA sense strand
augaagagcagcugaaaga

SEQ ID NO: 2240712 - RNA, 19 nt, Homo sapiens
  misc_RNA (1)...(19): siRNA sense strand
agggagaagugaaagauga

SEQ ID NO: 2240713 - RNA, 19 nt, Homo sapiens
  misc_RNA (1)...(19): siRNA sense strand
uggagaaggaguugaugaa

SEQ ID NO: 2240714 - RNA, 19 nt, Homo sapiens
  misc_RNA (1)...(19): siRNA sense strand
uugacaagacuucgagaaa

SEQ ID NO: 2240715 - RNA, 19 nt, Homo sapiens
  misc_RNA (1)...(19): siRNA sense strand
aagcggaagccucggguaa

SEQ ID NO: 2240716 - RNA, 19 nt, Homo sapiens
  misc_RNA (1)...(19): siRNA sense strand
auaagaaagagaagccuaa

SEQ ID NO: 2240717 - RNA, 19 nt, Homo sapiens
  misc_RNA (1)...(19): siRNA sense strand
gagaaugaagugucaacaa

SEQ ID NO: 2240718 - RNA, 19 nt, Homo sapiens
  misc_RNA (1)...(19): siRNA sense strand
gcauauguaaggagaggau

SEQ ID NO: 2240719 - RNA, 19 nt, Homo sapiens
  misc_RNA (1)...(19): siRNA sense strand
ggauagcugaugugaagaa

SEQ ID NO: 2240720 - RNA, 19 nt, Homo sapiens
  misc_RNA (1)...(19): siRNA sense strand
gaucauagaacgggccaaa

SEQ ID NO: 2240721 - RNA, 19 nt, Homo sapiens
  misc_RNA (1)...(19): siRNA sense strand
caauggaagaugaagaaga

SEQ ID NO: 2240722 - RNA, 19 nt, Homo sapiens
  misc_RNA (1)...(19): siRNA sense strand
ugaagaauccuuacagcaa

SEQ ID NO: 2240723 - RNA, 19 nt, Homo sapiens
  misc_RNA (1)...(19): siRNA sense strand
ggacuguggaggaggagau

SEQ ID NO: 2240724 - RNA, 19 nt, Homo sapiens
  misc_RNA (1)...(19): siRNA sense strand
ggacaaggaaagaaagaag

SEQ ID NO: 2240725 - RNA, 19 nt, Homo sapiens
  misc_RNA (1)...(19): siRNA sense strand
aggaggaaccuauggauuu

SEQ ID NO: 2240726 - RNA, 19 nt, Homo sapiens
  misc_RNA (1)...(19): siRNA sense strand
acaagagacacuucaguaa

SEQ ID NO: 2240727 - RNA, 19 nt, Homo sapiens
  misc_RNA (1)...(19): siRNA sense strand
ugaaaaggaugaaggugaa

SEQ ID NO: 2240728 - RNA, 19 nt, Homo sapiens
  misc_RNA (1)...(19): siRNA sense strand
cagauaguagaaagaguaa

SEQ ID NO: 2240729 - RNA, 19 nt, Homo sapiens
  misc_RNA (1)...(19): siRNA sense strand
augaaaugggccuaggaaa

SEQ ID NO: 2240730 - RNA, 19 nt, Homo sapiens
  misc_RNA (1)...(19): siRNA sense strand
ggaaaaggaccagggaaaa

SEQ ID NO: 2240731 - RNA, 19 nt, Homo sapiens
  misc_RNA (1)...(19): siRNA sense strand
cugaaaaggaugaagguga

SEQ ID NO: 2240732 - RNA, 19 nt, Homo sapiens
  misc_RNA (1)...(19): siRNA sense strand
uggcagagagaguuugaaa

SEQ ID NO: 2240733 - RNA, 19 nt, Homo sapiens
  misc_RNA (1)...(19): siRNA sense strand
aaggaaagaaagaagucaa

SEQ ID NO: 2240734 - RNA, 19 nt, Homo sapiens
  misc_RNA (1)...(19): siRNA sense strand
ccagaggaacaaaggaaaa

SEQ ID NO: 2240735 - RNA, 19 nt, Homo sapiens
  misc_RNA (1)...(19): siRNA sense strand
augccaaaucuucgaguaa

SEQ ID NO: 2240736 - RNA, 19 nt, Homo sapiens
  misc_RNA (1)...(19): siRNA sense strand
ccgaagacucagcguggaa

SEQ ID NO: 2240737 - RNA, 19 nt, Homo sapiens
  misc_RNA (1)...(19): siRNA sense strand
ggacgauccuggaaaacaa

SEQ ID NO: 2240738 - RNA, 19 nt, Homo sapiens
  misc_RNA (1)...(19): siRNA sense strand
ccagaagaacagugcccaa

SEQ ID NO: 2240739 - RNA, 19 nt, Homo sapiens
  misc_RNA (1)...(19): siRNA sense strand
aguaauagcugugaagaca

SEQ ID NO: 2240740 - RNA, 19 nt, Homo sapiens
  misc_RNA (1)...(19): siRNA sense strand
gugaagacaaguaaaucua

SEQ ID NO: 2240741 - RNA, 19 nt, Homo sapiens
  misc_RNA (1)...(19): siRNA sense strand
uggugagaauguuggauau

SEQ ID NO: 2240742 - RNA, 19 nt, Homo sapiens
  misc_RNA (1)...(19): siRNA sense strand
gaaauuuggagcagaggau

SEQ ID NO: 2240743 - RNA, 19 nt, Homo sapiens
  misc_RNA (1)...(19): siRNA sense strand
agaaagagaagaagagcaa

SEQ ID NO: 2240744 - RNA, 19 nt, Homo sapiens
  misc_RNA (1)...(19): siRNA sense strand
uagagaagguggaggaaaa

SEQ ID NO: 2240745 - RNA, 19 nt, Homo sapiens
  misc_RNA (1)...(19): siRNA sense strand
agaaagaagaagaagagaa

SEQ ID NO: 2240746 - RNA, 19 nt, Homo sapiens
  misc_RNA (1)...(19): siRNA sense strand
acaaagaagagaagaaaga

SEQ ID NO: 2240747 - RNA, 19 nt, Homo sapiens
  misc_RNA (1)...(19): siRNA sense strand
ugagaugggccuugggaaa

SEQ ID NO: 2240748 - RNA, 19 nt, Homo sapiens
  misc_RNA (1)...(19): siRNA sense strand
ucaaagaagaagagagcau

SEQ ID NO: 2240749 - RNA, 19 nt, Homo sapiens
  misc_RNA (1)...(19): siRNA sense strand
acacagaauugcagggcau

SEQ ID NO: 2240750 - RNA, 19 nt, Homo sapiens
  misc_RNA (1)...(19): siRNA sense strand
uggcugagguggaggaaaa

SEQ ID NO: 2240751 - RNA, 19 nt, Homo sapiens
  misc_RNA (1)...(19): siRNA sense strand
gagaaagaguucaaggcau

SEQ ID NO: 2240752 - RNA, 19 nt, Homo sapiens
  misc_RNA (1)...(19): siRNA sense strand
aagacaaagaagagaagaa

SEQ ID NO: 2240753 - RNA, 19 nt, Homo sapiens
  misc_RNA (1)...(19): siRNA sense strand
agacagaccaccaggacua

SEQ ID NO: 2240754 - RNA, 19 nt, Homo sapiens
  misc_RNA (1)...(19): siRNA sense strand
ccuaagagcaagcgccaaa

SEQ ID NO: 2240755 - RNA, 19 nt, Homo sapiens
  misc_RNA (1)...(19): siRNA sense strand
gggaggaagaggagguaga

SEQ ID NO: 2240756 - RNA, 19 nt, Homo sapiens
  misc_RNA (1)...(19): siRNA sense strand
gcaauuucuuagagaucaa

SEQ ID NO: 2240757 - RNA, 19 nt, Homo sapiens
  misc_RNA (1)...(19): siRNA sense strand
ggaaggaggaggaggagga

SEQ ID NO: 2240758 - RNA, 19 nt, Homo sapiens
  misc_RNA (1)...(19): siRNA sense strand
gagacaacaaagagggaga

SEQ ID NO: 2240759 - RNA, 19 nt, Homo sapiens
  misc_RNA (1)...(19): siRNA sense strand
agaagaaagaagaagaaga

SEQ ID NO: 2240760 - RNA, 19 nt, Homo sapiens
  misc_RNA (1)...(19): siRNA sense strand
aaagagaagaagagcaaau

SEQ ID NO: 2240761 - RNA, 19 nt, Homo sapiens
  misc_RNA (1)...(19): siRNA sense strand
ugguggugaugaagagaaa

SEQ ID NO: 2240762 - RNA, 19 nt, Homo sapiens
  misc_RNA (1)...(19): siRNA sense strand
ggauaaaacccgaguggau

SEQ ID NO: 2240763 - RNA, 19 nt, Homo sapiens
  misc_RNA (1)...(19): siRNA sense strand
gaucaggcuucuugggaga

SEQ ID NO: 2240764 - RNA, 19 nt, Homo sapiens
  misc_RNA (1)...(19): siRNA sense strand
gaggcaaaucagagaaaga

SEQ ID NO: 2240765 - RNA, 19 nt, Homo sapiens
  misc_RNA (1)...(19): siRNA sense strand
gagaggagaaaguggaaaa

SEQ ID NO: 2240766 - RNA, 19 nt, Homo sapiens
  misc_RNA (1)...(19): siRNA sense strand
uggaaaaggcagaggugaa

SEQ ID NO: 2240767 - RNA, 19 nt, Homo sapiens
  misc_RNA (1)...(19): siRNA sense strand
ggcaagaagaagaagaaga

SEQ ID NO: 2240768 - RNA, 19 nt, Homo sapiens
  misc_RNA (1)...(19): siRNA sense strand
ccuaagaaagagaagaaga

SEQ ID NO: 2240769 - RNA, 19 nt, Homo sapiens
  misc_RNA (1)...(19): siRNA sense strand
gaauaaauuucuagcucga

SEQ ID NO: 2240770 - RNA, 19 nt, Homo sapiens
  misc_RNA (1)...(19): siRNA sense strand
gaccuaagaaagagaagaa

SEQ ID NO: 2240771 - RNA, 19 nt, Homo sapiens
  misc_RNA (1)...(19): siRNA sense strand
ggaacaugaagguuauaaa

SEQ ID NO: 2240772 - RNA, 19 nt, Homo sapiens
  misc_RNA (1)...(19): siRNA sense strand
ugaaaugaaccguggcaau

SEQ ID NO: 2240773 - RNA, 19 nt, Homo sapiens
  misc_RNA (1)...(19): siRNA sense strand
aggaggaggaggaggauga

SEQ ID NO: 2240774 - RNA, 19 nt, Homo sapiens
  misc_RNA (1)...(19): siRNA sense strand
gccgaaagcgaaagaacaa

SEQ ID NO: 2240775 - RNA, 19 nt, Homo sapiens
  misc_RNA (1)...(19): siRNA sense strand
gcaagaagaucuagcccga

SEQ ID NO: 2240776 - RNA, 19 nt, Homo sapiens
  misc_RNA (1)...(19): siRNA sense strand
agacaaagaagagaagaaa

SEQ ID NO: 2240777 - RNA, 19 nt, Homo sapiens
  misc_RNA (1)...(19): siRNA sense strand
agagaagaaagaagaagaa

SEQ ID NO: 2240778 - RNA, 19 nt, Homo sapiens
  misc_RNA (1)...(19): siRNA sense strand
ggccagaguuuguggagga

SEQ ID NO: 2240779 - RNA, 19 nt, Homo sapiens
  misc_RNA (1)...(19): siRNA sense strand
gaugagaaacagaagaaaa

SEQ ID NO: 2240780 - RNA, 19 nt, Homo sapiens
  misc_RNA (1)...(19): siRNA sense strand
gcccuaugcagaagaaaua

SEQ ID NO: 2240781 - RNA, 19 nt, Homo sapiens
  misc_RNA (1)...(19): siRNA sense strand
cauuauaaaccauggcuau

SEQ ID NO: 2240782 - RNA, 19 nt, Homo sapiens
  misc_RNA (1)...(19): siRNA sense strand
caaauuuggcacugaggaa

SEQ ID NO: 2240783 - RNA, 19 nt, Homo sapiens
  misc_RNA (1)...(19): siRNA sense strand
gggaagcuaaagaggacaa

SEQ ID NO: 2240784 - RNA, 19 nt, Homo sapiens
  misc_RNA (1)...(19): siRNA sense strand
cagugaaguaugagcgaca

SEQ ID NO: 2240785 - RNA, 19 nt, Homo sapiens
  misc_RNA (1)...(19): siRNA sense strand
gcgaggcaaaucagagaaa

SEQ ID NO: 2240786 - RNA, 19 nt, Homo sapiens
  misc_RNA (1)...(19): siRNA sense strand
aaucagagaaagaguucaa

SEQ ID NO: 2240787 - RNA, 19 nt, Homo sapiens
  misc_RNA (1)...(19): siRNA sense strand
gaaggagagaacagaggaa

SEQ ID NO: 2240788 - RNA, 19 nt, Homo sapiens
  misc_RNA (1)...(19): siRNA sense strand
cagaagaggauuugucaga

SEQ ID NO: 2240789 - RNA, 19 nt, Homo sapiens
  misc_RNA (1)...(19): siRNA sense strand
gcaucacgcagguggcaaa

SEQ ID NO: 2240790 - RNA, 19 nt, Homo sapiens
  misc_RNA (1)...(19): siRNA sense strand
gauccugacuacugggaga

SEQ ID NO: 2240791 - RNA, 19 nt, Homo sapiens
  misc_RNA (1)...(19): siRNA sense strand
ugaugaagacuuugaugaa

SEQ ID NO: 2240792 - RNA, 19 nt, Homo sapiens
  misc_RNA (1)...(19): siRNA sense strand
ucuuggaacaugaagguua

SEQ ID NO: 2240793 - RNA, 19 nt, Homo sapiens
  misc_RNA (1)...(19): siRNA sense strand
cgucaguggaggagcgcau

SEQ ID NO: 2240794 - RNA, 19 nt, Homo sapiens
  misc_RNA (1)...(19): siRNA sense strand
gggagaaauugcugcggca

SEQ ID NO: 2240795 - RNA, 19 nt, Homo sapiens
  misc_RNA (1)...(19): siRNA sense strand
aggacaauucggaggguga

SEQ ID NO: 2240796 - RNA, 19 nt, Homo sapiens
  misc_RNA (1)...(19): siRNA sense strand
cuaaaaucccuaagagcaa

SEQ ID NO: 2240797 - RNA, 19 nt, Homo sapiens
  misc_RNA (1)...(19): siRNA sense strand
gagaaaagccgaaagcgaa

SEQ ID NO: 2240798 - RNA, 19 nt, Homo sapiens
  misc_RNA (1)...(19): siRNA sense strand
ccaagaagccuaaacccaa

SEQ ID NO: 2240799 - RNA, 19 nt, Homo sapiens
  misc_RNA (1)...(19): siRNA sense strand
cugcggaaugauaaagaua

SEQ ID NO: 2240800 - RNA, 19 nt, Homo sapiens
  misc_RNA (1)...(19): siRNA sense strand
ugguagaagacaaagaaga

SEQ ID NO: 2240801 - RNA, 19 nt, Homo sapiens
  misc_RNA (1)...(19): siRNA sense strand
aagagaagaaagaagaaga

SEQ ID NO: 2240802 - RNA, 19 nt, Homo sapiens
  misc_RNA (1)...(19): siRNA sense strand
ccuuaaggagggugggcau

SEQ ID NO: 2240803 - RNA, 19 nt, Homo sapiens
  misc_RNA (1)...(19): siRNA sense strand
uagaagacaaagaagagaa

SEQ ID NO: 2240804 - RNA, 19 nt, Homo sapiens
  misc_RNA (1)...(19): siRNA sense strand
agaagagaagaaagaagaa

SEQ ID NO: 2240805 - RNA, 19 nt, Homo sapiens
  misc_RNA (1)...(19): siRNA sense strand
auuucuagcucgaagguuu

SEQ ID NO: 2240806 - RNA, 19 nt, Homo sapiens
  misc_RNA (1)...(19): siRNA sense strand
agggcaaagugcagaagau

SEQ ID NO: 2240807 - RNA, 19 nt, Homo sapiens
  misc_RNA (1)...(19): siRNA sense strand
gagaagaggaggaggagga

SEQ ID NO: 2240808 - RNA, 19 nt, Homo sapiens
  misc_RNA (1)...(19): siRNA sense strand
agaaagaggaggaggagga

SEQ ID NO: 2240809 - RNA, 19 nt, Homo sapiens
  misc_RNA (1)...(19): siRNA sense strand
aggaggaggaggaggacaa

SEQ ID NO: 2240810 - RNA, 19 nt, Homo sapiens
  misc_RNA (1)...(19): siRNA sense strand
agagagaagaggaggagga

SEQ ID NO: 2240811 - RNA, 19 nt, Homo sapiens
  misc_RNA (1)...(19): siRNA sense strand
aguccaaggcugaggggaa

SEQ ID NO: 2240812 - RNA, 19 nt, Homo sapiens
  misc_RNA (1)...(19): siRNA sense strand
caaagagagaagaggagga

SEQ ID NO: 2240813 - RNA, 19 nt, Homo sapiens
  misc_RNA (1)...(19): siRNA sense strand
ccaaggagcugacggcuga

SEQ ID NO: 2240814 - RNA, 19 nt, Homo sapiens
  misc_RNA (1)...(19): siRNA sense strand
aggaggaggaggaggcuga

SEQ ID NO: 2240815 - RNA, 19 nt, Homo sapiens
  misc_RNA (1)...(19): siRNA sense strand
aagaggaggaggaggagau

SEQ ID NO: 2240816 - RNA, 19 nt, Homo sapiens
  misc_RNA (1)...(19): siRNA sense strand
aggcaaagagagaagagga

SEQ ID NO: 2240817 - RNA, 19 nt, Homo sapiens
  misc_RNA (1)...(19): siRNA sense strand
aggaggaggaggaggagga

SEQ ID NO: 2240818 - RNA, 19 nt, Homo sapiens
  misc_RNA (1)...(19): siRNA sense strand
aggaggaggaggaggagga

SEQ ID NO: 2240819 - RNA, 19 nt, Homo sapiens
  misc_RNA (1)...(19): siRNA sense strand
aagaggaggaggaggagga

SEQ ID NO: 2240820 - RNA, 19 nt, Homo sapiens
  misc_RNA (1)...(19): siRNA sense strand
uuccaaggaggcagagaaa

SEQ ID NO: 2240821 - RNA, 19 nt, Homo sapiens
  misc_RNA (1)...(19): siRNA sense strand
ggaagggagaacaggagca

SEQ ID NO: 2240822 - RNA, 19 nt, Homo sapiens
  misc_RNA (1)...(19): siRNA sense strand
ccagaaauacccaggccca

SEQ ID NO: 2240823 - RNA, 19 nt, Homo sapiens
  misc_RNA (1)...(19): siRNA sense strand
ccauugaagcagagcugga

SEQ ID NO: 2240824 - RNA, 19 nt, Homo sapiens
  misc_RNA (1)...(19): siRNA sense strand
agcagaaagaggaggagga

SEQ ID NO: 2240825 - RNA, 19 nt, Homo sapiens
  misc_RNA (1)...(19): siRNA sense strand
gaggcuaccccgaggagaa

SEQ ID NO: 2240826 - RNA, 19 nt, Homo sapiens
  misc_RNA (1)...(19): siRNA sense strand
ccgaggagaugaacggauc

SEQ ID NO: 2240827 - RNA, 19 nt, Homo sapiens
  misc_RNA (1)...(19): siRNA sense strand
ccaaggaggcagagaaaag

SEQ ID NO: 2240828 - RNA, 19 nt, Homo sapiens
  misc_RNA (1)...(19): siRNA sense strand
agauggaccagcuggccaa

SEQ ID NO: 2240829 - RNA, 19 nt, Homo sapiens
  misc_RNA (1)...(19): siRNA sense strand
agaauuuacugaaggagcu

SEQ ID NO: 2240830 - RNA, 19 nt, Homo sapiens
  misc_RNA (1)...(19): siRNA sense strand
gagaagggccugagugcag

SEQ ID NO: 2240831 - RNA, 19 nt, Homo sapiens
  misc_RNA (1)...(19): siRNA sense strand
cagaaaucgccgagaaaau

SEQ ID NO: 2240832 - RNA, 19 nt, Homo sapiens
  misc_RNA (1)...(19): siRNA sense strand
aagcaagguuugaugccua

SEQ ID NO: 2240833 - RNA, 19 nt, Homo sapiens
  misc_RNA (1)...(19): siRNA sense strand
ggaaagugcuccugcggcu

SEQ ID NO: 2240834 - RNA, 19 nt, Homo sapiens
  misc_RNA (1)...(19): siRNA sense strand
ugcagaaaucgccgagaaa

SEQ ID NO: 2240835 - RNA, 19 nt, Homo sapiens
  misc_RNA (1)...(19): siRNA sense strand
aaacagaaacugaugcuca

SEQ ID NO: 2240836 - RNA, 19 nt, Homo sapiens
  misc_RNA (1)...(19): siRNA sense strand
cuggaaaaccugagaucau

SEQ ID NO: 2240837 - RNA, 19 nt, Homo sapiens
  misc_RNA (1)...(19): siRNA sense strand
ccaagaaacaacagcucca

SEQ ID NO: 2240838 - RNA, 19 nt, Homo sapiens
  misc_RNA (1)...(19): siRNA sense strand
gguccauuguacaagccaa

SEQ ID NO: 2240839 - RNA, 19 nt, Homo sapiens
  misc_RNA (1)...(19): siRNA sense strand
uaauaaagagggauccgaa

SEQ ID NO: 2240840 - RNA, 19 nt, Homo sapiens
  misc_RNA (1)...(19): siRNA sense strand
cauucaauaaggaaccaaa

SEQ ID NO: 2240841 - RNA, 19 nt, Homo sapiens
  misc_RNA (1)...(19): siRNA sense strand
cggaaguaucccaccaaga

SEQ ID NO: 2240842 - RNA, 19 nt, Homo sapiens
  misc_RNA (1)...(19): siRNA sense strand
guacauggacuacgcccaa

SEQ ID NO: 2240843 - RNA, 19 nt, Homo sapiens
  misc_RNA (1)...(19): siRNA sense strand
gaauuuggguacauggacu

SEQ ID NO: 2240844 - RNA, 19 nt, Homo sapiens
  misc_RNA (1)...(19): siRNA sense strand
ggccgagagaauucugaaa

SEQ ID NO: 2240845 - RNA, 19 nt, Homo sapiens
  misc_RNA (1)...(19): siRNA sense strand
ccaccauguaugagaugua

SEQ ID NO: 2240846 - RNA, 19 nt, Homo sapiens
  misc_RNA (1)...(19): siRNA sense strand
gaucacagacuaagcgagu

SEQ ID NO: 2240847 - RNA, 19 nt, Homo sapiens
  misc_RNA (1)...(19): siRNA sense strand
cucuggugcuggaggaaga

SEQ ID NO: 2240848 - RNA, 19 nt, Homo sapiens
  misc_RNA (1)...(19): siRNA sense strand
ggucacaagccaagggcag

SEQ ID NO: 2240849 - RNA, 19 nt, Homo sapiens
  misc_RNA (1)...(19): siRNA sense strand
agauguacuccguguccua

SEQ ID NO: 2240850 - RNA, 19 nt, Homo sapiens
  misc_RNA (1)...(19): siRNA sense strand
ccaccauguaugagaugua

SEQ ID NO: 2240851 - RNA, 19 nt, Homo sapiens
  misc_RNA (1)...(19): siRNA sense strand
gaucacagacuaagcgagu

SEQ ID NO: 2240852 - RNA, 19 nt, Homo sapiens
  misc_RNA (1)...(19): siRNA sense strand
cucuggugcuggaggaaga

SEQ ID NO: 2240853 - RNA, 19 nt, Homo sapiens
  misc_RNA (1)...(19): siRNA sense strand
ggucacaagccaagggcag

SEQ ID NO: 2240854 - RNA, 19 nt, Homo sapiens
  misc_RNA (1)...(19): siRNA sense strand
agauguacuccguguccua

SEQ ID NO: 2240855 - RNA, 19 nt, Homo sapiens
  misc_RNA (1)...(19): siRNA sense strand
ccaacaaguaugaaaguau

SEQ ID NO: 2240856 - RNA, 19 nt, Homo sapiens
  misc_RNA (1)...(19): siRNA sense strand
caguaaaggcuaaaggcuu

SEQ ID NO: 2240857 - RNA, 19 nt, Homo sapiens
  misc_RNA (1)...(19): siRNA sense strand
cugacaaucuggaacuaaa

SEQ ID NO: 2240858 - RNA, 19 nt, Homo sapiens
  misc_RNA (1)...(19): siRNA sense strand
cuugcaacauggaaggaua

SEQ ID NO: 2240859 - RNA, 19 nt, Homo sapiens
  misc_RNA (1)...(19): siRNA sense strand
ugauuuggauugugggaga

SEQ ID NO: 2240860 - RNA, 19 nt, Homo sapiens
  misc_RNA (1)...(19): siRNA sense strand
cccaaaugguggaagauca

SEQ ID NO: 2240861 - RNA, 19 nt, Homo sapiens
  misc_RNA (1)...(19): siRNA sense strand
auccaauggugguggcuaa

SEQ ID NO: 2240862 - RNA, 19 nt, Homo sapiens
  misc_RNA (1)...(19): siRNA sense strand
cgguaaaaguccuaaugaa

SEQ ID NO: 2240863 - RNA, 19 nt, Homo sapiens
  misc_RNA (1)...(19): siRNA sense strand
uggcaaaacuccaugauau

SEQ ID NO: 2240864 - RNA, 19 nt, Homo sapiens
  misc_RNA (1)...(19): siRNA sense strand
ggcuaaaggcuuggagauu

SEQ ID NO: 2240865 - RNA, 19 nt, Homo sapiens
  misc_RNA (1)...(19): siRNA sense strand
cucaagaaaccaucagaaa

SEQ ID NO: 2240866 - RNA, 19 nt, Homo sapiens
  misc_RNA (1)...(19): siRNA sense strand
ugguggaagaucagggauu

SEQ ID NO: 2240867 - RNA, 19 nt, Homo sapiens
  misc_RNA (1)...(19): siRNA sense strand
ugaacuacgccaagaguca

SEQ ID NO: 2240868 - RNA, 19 nt, Homo sapiens
  misc_RNA (1)...(19): siRNA sense strand
uggaacagccucagguuau

SEQ ID NO: 2240869 - RNA, 19 nt, Homo sapiens
  misc_RNA (1)...(19): siRNA sense strand
uagauagucuggugggaca

SEQ ID NO: 2240870 - RNA, 19 nt, Homo sapiens
  misc_RNA (1)...(19): siRNA sense strand
ggauauucccaaugaaaau

SEQ ID NO: 2240871 - RNA, 19 nt, Homo sapiens
  misc_RNA (1)...(19): siRNA sense strand
cugaaugaaugcacugaau

SEQ ID NO: 2240872 - RNA, 19 nt, Homo sapiens
  misc_RNA (1)...(19): siRNA sense strand
ucauggaauucaucguaaa

SEQ ID NO: 2240873 - RNA, 19 nt, Homo sapiens
  misc_RNA (1)...(19): siRNA sense strand
gugcauccggguagacaaa

SEQ ID NO: 2240874 - RNA, 19 nt, Homo sapiens
  misc_RNA (1)...(19): siRNA sense strand
acuaaagaagcuuguguau

SEQ ID NO: 2240875 - RNA, 19 nt, Homo sapiens
  misc_RNA (1)...(19): siRNA sense strand
aggcuaaaggcuuggagau

SEQ ID NO: 2240876 - RNA, 19 nt, Homo sapiens
  misc_RNA (1)...(19): siRNA sense strand
ccaauaaagcucugcagca

SEQ ID NO: 2240877 - RNA, 19 nt, Homo sapiens
  misc_RNA (1)...(19): siRNA sense strand
agagaaaggaggcugugaa

SEQ ID NO: 2240878 - RNA, 19 nt, Homo sapiens
  misc_RNA (1)...(19): siRNA sense strand
aaagcuuccuggaggguuu

SEQ ID NO: 2240879 - RNA, 19 nt, Homo sapiens
  misc_RNA (1)...(19): siRNA sense strand
aaggauauucccaaugaaa

SEQ ID NO: 2240880 - RNA, 19 nt, Homo sapiens
  misc_RNA (1)...(19): siRNA sense strand
uagagaaguuggacaucau

SEQ ID NO: 2240881 - RNA, 19 nt, Homo sapiens
  misc_RNA (1)...(19): siRNA sense strand
gcagaugggagcaguggau

SEQ ID NO: 2240882 - RNA, 19 nt, Homo sapiens
  misc_RNA (1)...(19): siRNA sense strand
aguaaaggcuaaaggcuug

SEQ ID NO: 2240883 - RNA, 19 nt, Homo sapiens
  misc_RNA (1)...(19): siRNA sense strand
guagugaacuguaugcaga

SEQ ID NO: 2240884 - RNA, 19 nt, Homo sapiens
  misc_RNA (1)...(19): siRNA sense strand
ggcagaacugaaagaauau

SEQ ID NO: 2240885 - RNA, 19 nt, Homo sapiens
  misc_RNA (1)...(19): siRNA sense strand
auacuauugccaagaggaa

SEQ ID NO: 2240886 - RNA, 19 nt, Homo sapiens
  misc_RNA (1)...(19): siRNA sense strand
ugugaaggacugugaagau

SEQ ID NO: 2240887 - RNA, 19 nt, Homo sapiens
  misc_RNA (1)...(19): siRNA sense strand
ggacaauccuucaucccau

SEQ ID NO: 2240888 - RNA, 19 nt, Homo sapiens
  misc_RNA (1)...(19): siRNA sense strand
ugaacucuccacagggaua

SEQ ID NO: 2240889 - RNA, 19 nt, Homo sapiens
  misc_RNA (1)...(19): siRNA sense strand
ccuccagguggcugugaaa

SEQ ID NO: 2240890 - RNA, 19 nt, Homo sapiens
  misc_RNA (1)...(19): siRNA sense strand
cugaggaacaucaacuuaa

SEQ ID NO: 2240891 - RNA, 19 nt, Homo sapiens
  misc_RNA (1)...(19): siRNA sense strand
cugaaaucuugaagcagga

SEQ ID NO: 2240892 - RNA, 19 nt, Homo sapiens
  misc_RNA (1)...(19): siRNA sense strand
auguugacuuuguucgaaa

SEQ ID NO: 2240893 - RNA, 19 nt, Homo sapiens
  misc_RNA (1)...(19): siRNA sense strand
acuuagacucgcuggauga

SEQ ID NO: 2240894 - RNA, 19 nt, Homo sapiens
  misc_RNA (1)...(19): siRNA sense strand
cugcagcacaugacagauu

SEQ ID NO: 2240895 - RNA, 19 nt, Homo sapiens
  misc_RNA (1)...(19): siRNA sense strand
cgccaagggcacaucuaua

SEQ ID NO: 2240896 - RNA, 19 nt, Homo sapiens
  misc_RNA (1)...(19): siRNA sense strand
augaguuacuagaaagcuu

SEQ ID NO: 2240897 - RNA, 19 nt, Homo sapiens
  misc_RNA (1)...(19): siRNA sense strand
agaggaauguggaagggca

SEQ ID NO: 2240898 - RNA, 19 nt, Homo sapiens
  misc_RNA (1)...(19): siRNA sense strand
gccaagagucagccagaca

SEQ ID NO: 2240899 - RNA, 19 nt, Homo sapiens
  misc_RNA (1)...(19): siRNA sense strand
aaaucuugaagcaggaaau

SEQ ID NO: 2240900 - RNA, 19 nt, Homo sapiens
  misc_RNA (1)...(19): siRNA sense strand
ugaaagaauaugcuacaga

SEQ ID NO: 2240901 - RNA, 19 nt, Homo sapiens
  misc_RNA (1)...(19): siRNA sense strand
aauccagaccaaagugaau

SEQ ID NO: 2240902 - RNA, 19 nt, Homo sapiens
  misc_RNA (1)...(19): siRNA sense strand
cugcaacgaaccuggaaca

SEQ ID NO: 2240903 - RNA, 19 nt, Homo sapiens
  misc_RNA (1)...(19): siRNA sense strand
augcccaaaugguggaaga

SEQ ID NO: 2240904 - RNA, 19 nt, Homo sapiens
  misc_RNA (1)...(19): siRNA sense strand
acugaaagaauaugcuaca

SEQ ID NO: 2240905 - RNA, 19 nt, Homo sapiens
  misc_RNA (1)...(19): siRNA sense strand
uagugaagcuguuucucaa

SEQ ID NO: 2240906 - RNA, 19 nt, Homo sapiens
  misc_RNA (1)...(19): siRNA sense strand
gaauuguuaccuaaggauu

SEQ ID NO: 2240907 - RNA, 19 nt, Homo sapiens
  misc_RNA (1)...(19): siRNA sense strand
uuggauugugggagaauau

SEQ ID NO: 2240908 - RNA, 19 nt, Homo sapiens
  misc_RNA (1)...(19): siRNA sense strand
caucagaaacacaggagcu

SEQ ID NO: 2240909 - RNA, 19 nt, Homo sapiens
  misc_RNA (1)...(19): siRNA sense strand
gcugaacucaacaaugaaa

SEQ ID NO: 2240910 - RNA, 19 nt, Homo sapiens
  misc_RNA (1)...(19): siRNA sense strand
ggugguggcuaaugccgua

SEQ ID NO: 2240911 - RNA, 19 nt, Homo sapiens
  misc_RNA (1)...(19): siRNA sense strand
acuacaauaugcugcugaa

SEQ ID NO: 2240912 - RNA, 19 nt, Homo sapiens
  misc_RNA (1)...(19): siRNA sense strand
cagaaacacaggagcuagu

SEQ ID NO: 2240913 - RNA, 19 nt, Homo sapiens
  misc_RNA (1)...(19): siRNA sense strand
gcaacacaggauucugaua

SEQ ID NO: 2240914 - RNA, 19 nt, Homo sapiens
  misc_RNA (1)...(19): siRNA sense strand
agccagaagugcaguaugu

SEQ ID NO: 2240915 - RNA, 19 nt, Homo sapiens
  misc_RNA (1)...(19): siRNA sense strand
aguaugucgcccugaggaa

SEQ ID NO: 2240916 - RNA, 19 nt, Homo sapiens
  misc_RNA (1)...(19): siRNA sense strand
agaaaaggccugaaaucuu

SEQ ID NO: 2240917 - RNA, 19 nt, Homo sapiens
  misc_RNA (1)...(19): siRNA sense strand
uggaaggaagucauggaau

SEQ ID NO: 2240918 - RNA, 19 nt, Homo sapiens
  misc_RNA (1)...(19): siRNA sense strand
ggaagaagauggugcgcga

SEQ ID NO: 2240919 - RNA, 19 nt, Homo sapiens
  misc_RNA (1)...(19): siRNA sense strand
cguggagcucuuagacaaa

SEQ ID NO: 2240920 - RNA, 19 nt, Homo sapiens
  misc_RNA (1)...(19): siRNA sense strand
ccaucgagggccaagacaa

SEQ ID NO: 2240921 - RNA, 19 nt, Homo sapiens
  misc_RNA (1)...(19): siRNA sense strand
cggacaaggaacggaagaa

SEQ ID NO: 2240922 - RNA, 19 nt, Homo sapiens
  misc_RNA (1)...(19): siRNA sense strand
uauucagccggcagggaaa

SEQ ID NO: 2240923 - RNA, 19 nt, Homo sapiens
  misc_RNA (1)...(19): siRNA sense strand
uggagcucuuagacaaaua

SEQ ID NO: 2240924 - RNA, 19 nt, Homo sapiens
  misc_RNA (1)...(19): siRNA sense strand
ggaagaagauggugcgcga

SEQ ID NO: 2240925 - RNA, 19 nt, Homo sapiens
  misc_RNA (1)...(19): siRNA sense strand
cguggagcucuuagacaaa

SEQ ID NO: 2240926 - RNA, 19 nt, Homo sapiens
  misc_RNA (1)...(19): siRNA sense strand
ccaucgagggccaagacaa

SEQ ID NO: 2240927 - RNA, 19 nt, Homo sapiens
  misc_RNA (1)...(19): siRNA sense strand
cggacaaggaacggaagaa

SEQ ID NO: 2240928 - RNA, 19 nt, Homo sapiens
  misc_RNA (1)...(19): siRNA sense strand
uauucagccggcagggaaa

SEQ ID NO: 2240929 - RNA, 19 nt, Homo sapiens
  misc_RNA (1)...(19): siRNA sense strand
uggagcucuuagacaaaua

SEQ ID NO: 2240930 - RNA, 19 nt, Homo sapiens
  misc_RNA (1)...(19): siRNA sense strand
guguuuaguccuugacaaa

SEQ ID NO: 2240931 - RNA, 19 nt, Homo sapiens
  misc_RNA (1)...(19): siRNA sense strand
acacugagcagaugggcaa

SEQ ID NO: 2240932 - RNA, 19 nt, Homo sapiens
  misc_RNA (1)...(19): siRNA sense strand
gaguauuugacgaguacaa

SEQ ID NO: 2240933 - RNA, 19 nt, Homo sapiens
  misc_RNA (1)...(19): siRNA sense strand
uggaagaauacaagcagua

SEQ ID NO: 2240934 - RNA, 19 nt, Homo sapiens
  misc_RNA (1)...(19): siRNA sense strand
caauaaaguuacaggacuc

SEQ ID NO: 2240935 - RNA, 19 nt, Homo sapiens
  misc_RNA (1)...(19): siRNA sense strand
agguauuacugguacaaau

SEQ ID NO: 2240936 - RNA, 19 nt, Homo sapiens
  misc_RNA (1)...(19): siRNA sense strand
uggacagcaccgugggaaa

SEQ ID NO: 2240937 - RNA, 19 nt, Homo sapiens
  misc_RNA (1)...(19): siRNA sense strand
uugaaucagugaauggaaa

SEQ ID NO: 2240938 - RNA, 19 nt, Homo sapiens
  misc_RNA (1)...(19): siRNA sense strand
cgaacaaggacaccagcaa

SEQ ID NO: 2240939 - RNA, 19 nt, Homo sapiens
  misc_RNA (1)...(19): siRNA sense strand
cugaaacauggaagacaaa

SEQ ID NO: 2240940 - RNA, 19 nt, Homo sapiens
  misc_RNA (1)...(19): siRNA sense strand
agccagacggagagugaua

SEQ ID NO: 2240941 - RNA, 19 nt, Homo sapiens
  misc_RNA (1)...(19): siRNA sense strand
acuauaagugggugcuuua

SEQ ID NO: 2240942 - RNA, 19 nt, Homo sapiens
  misc_RNA (1)...(19): siRNA sense strand
gcuugagaguaagggauua

SEQ ID NO: 2240943 - RNA, 19 nt, Homo sapiens
  misc_RNA (1)...(19): siRNA sense strand
ccuccaaaucccaggcauu

SEQ ID NO: 2240944 - RNA, 19 nt, Homo sapiens
  misc_RNA (1)...(19): siRNA sense strand
ugauaaggucgaucugaaa

SEQ ID NO: 2240945 - RNA, 19 nt, Homo sapiens
  misc_RNA (1)...(19): siRNA sense strand
ucacaaaccuugacccuga

SEQ ID NO: 2240946 - RNA, 19 nt, Homo sapiens
  misc_RNA (1)...(19): siRNA sense strand
caaauaaaggacaugguga

SEQ ID NO: 2240947 - RNA, 19 nt, Homo sapiens
  misc_RNA (1)...(19): siRNA sense strand
ggaacagcucacaaguaua

SEQ ID NO: 2240948 - RNA, 19 nt, Homo sapiens
  misc_RNA (1)...(19): siRNA sense strand
gcacagugaucguggacag

SEQ ID NO: 2240949 - RNA, 19 nt, Homo sapiens
  misc_RNA (1)...(19): siRNA sense strand
aagaauacaagcaguaaga

SEQ ID NO: 2240950 - RNA, 19 nt, Homo sapiens
  misc_RNA (1)...(19): siRNA sense strand
ccacagacuccgccagaga

SEQ ID NO: 2240951 - RNA, 19 nt, Homo sapiens
  misc_RNA (1)...(19): siRNA sense strand
guggaaguggauaggagaa

SEQ ID NO: 2240952 - RNA, 19 nt, Homo sapiens
  misc_RNA (1)...(19): siRNA sense strand
cuauucaggcuguugauaa

SEQ ID NO: 2240953 - RNA, 19 nt, Homo sapiens
  misc_RNA (1)...(19): siRNA sense strand
ugacaaaucuggaagcaug

SEQ ID NO: 2240954 - RNA, 19 nt, Homo sapiens
  misc_RNA (1)...(19): siRNA sense strand
uugauaaggucgaucugaa

SEQ ID NO: 2240955 - RNA, 19 nt, Homo sapiens
  misc_RNA (1)...(19): siRNA sense strand
gcagccagacggagaguga

SEQ ID NO: 2240956 - RNA, 19 nt, Homo sapiens
  misc_RNA (1)...(19): siRNA sense strand
gcugcagauuggacaaaga

SEQ ID NO: 2240957 - RNA, 19 nt, Homo sapiens
  misc_RNA (1)...(19): siRNA sense strand
cuggcuggauugagaauga

SEQ ID NO: 2240958 - RNA, 19 nt, Homo sapiens
  misc_RNA (1)...(19): siRNA sense strand
agagaagggugaaaggauc

SEQ ID NO: 2240959 - RNA, 19 nt, Homo sapiens
  misc_RNA (1)...(19): siRNA sense strand
ucugaggacuuuaagaaaa

SEQ ID NO: 2240960 - RNA, 19 nt, Homo sapiens
  misc_RNA (1)...(19): siRNA sense strand
acagauaaacaguggcagu

SEQ ID NO: 2240961 - RNA, 19 nt, Homo sapiens
  misc_RNA (1)...(19): siRNA sense strand
cugugauuaggaagaaaua

SEQ ID NO: 2240962 - RNA, 19 nt, Homo sapiens
  misc_RNA (1)...(19): siRNA sense strand
ggggaguauuugacgagua

SEQ ID NO: 2240963 - RNA, 19 nt, Homo sapiens
  misc_RNA (1)...(19): siRNA sense strand
cucaagaacuagaggagcu

SEQ ID NO: 2240964 - RNA, 19 nt, Homo sapiens
  misc_RNA (1)...(19): siRNA sense strand
aaauacagucugcaagcaa

SEQ ID NO: 2240965 - RNA, 19 nt, Homo sapiens
  misc_RNA (1)...(19): siRNA sense strand
ucugguaguuuaugcaaau

SEQ ID NO: 2240966 - RNA, 19 nt, Homo sapiens
  misc_RNA (1)...(19): siRNA sense strand
ugauuaugaccauggaaca

SEQ ID NO: 2240967 - RNA, 19 nt, Homo sapiens
  misc_RNA (1)...(19): siRNA sense strand
guuacaggacucuaugaaa

SEQ ID NO: 2240968 - RNA, 19 nt, Homo sapiens
  misc_RNA (1)...(19): siRNA sense strand
acaacaaagaagcuccaaa

SEQ ID NO: 2240969 - RNA, 19 nt, Homo sapiens
  misc_RNA (1)...(19): siRNA sense strand
guacagaacaaaaccacaa

SEQ ID NO: 2240970 - RNA, 19 nt, Homo sapiens
  misc_RNA (1)...(19): siRNA sense strand
ggaagugauccgugauucu

SEQ ID NO: 2240971 - RNA, 19 nt, Homo sapiens
  misc_RNA (1)...(19): siRNA sense strand
cuugagaguaagggauuaa

SEQ ID NO: 2240972 - RNA, 19 nt, Homo sapiens
  misc_RNA (1)...(19): siRNA sense strand
cauggaagacaaaggcuga

SEQ ID NO: 2240973 - RNA, 19 nt, Homo sapiens
  misc_RNA (1)...(19): siRNA sense strand
caaugugccagaagaugaa

SEQ ID NO: 2240974 - RNA, 19 nt, Homo sapiens
  misc_RNA (1)...(19): siRNA sense strand
ucaauaaaguuacaggacu

SEQ ID NO: 2240975 - RNA, 19 nt, Homo sapiens
  misc_RNA (1)...(19): siRNA sense strand
ccaaacaagcaaaaucaaa

SEQ ID NO: 2240976 - RNA, 19 nt, Homo sapiens
  misc_RNA (1)...(19): siRNA sense strand
cuucagaucaaguucagaa

SEQ ID NO: 2240977 - RNA, 19 nt, Homo sapiens
  misc_RNA (1)...(19): siRNA sense strand
cugcaagcaagcucacaaa

SEQ ID NO: 2240978 - RNA, 19 nt, Homo sapiens
  misc_RNA (1)...(19): siRNA sense strand
aagccaacucugaggaagu

SEQ ID NO: 2240979 - RNA, 19 nt, Homo sapiens
  misc_RNA (1)...(19): siRNA sense strand
ggggaagacaacacuauaa

SEQ ID NO: 2240980 - RNA, 19 nt, Homo sapiens
  misc_RNA (1)...(19): siRNA sense strand
cucugcagcucaagaacua

SEQ ID NO: 2240981 - RNA, 19 nt, Homo sapiens
  misc_RNA (1)...(19): siRNA sense strand
aagguuggcacuuggaaau

SEQ ID NO: 2240982 - RNA, 19 nt, Homo sapiens
  misc_RNA (1)...(19): siRNA sense strand
aguaagauguucagcaggu

SEQ ID NO: 2240983 - RNA, 19 nt, Homo sapiens
  misc_RNA (1)...(19): siRNA sense strand
guaaagaagugucagggag

SEQ ID NO: 2240984 - RNA, 19 nt, Homo sapiens
  misc_RNA (1)...(19): siRNA sense strand
gcugaacaacaauggcuau

SEQ ID NO: 2240985 - RNA, 19 nt, Homo sapiens
  misc_RNA (1)...(19): siRNA sense strand
gagaaacacaggaggagga

SEQ ID NO: 2240986 - RNA, 19 nt, Homo sapiens
  misc_RNA (1)...(19): siRNA sense strand
ggauaauaagaaaggucga

SEQ ID NO: 2240987 - RNA, 19 nt, Homo sapiens
  misc_RNA (1)...(19): siRNA sense strand
aaacacaggaggaggagga

SEQ ID NO: 2240988 - RNA, 19 nt, Homo sapiens
  misc_RNA (1)...(19): siRNA sense strand
cguaaaggugccaggaauc

SEQ ID NO: 2240989 - RNA, 19 nt, Homo sapiens
  misc_RNA (1)...(19): siRNA sense strand
guggaggagugcagccaga

SEQ ID NO: 2240990 - RNA, 19 nt, Homo sapiens
  misc_RNA (1)...(19): siRNA sense strand
agaccauggauaauaagaa

SEQ ID NO: 2240991 - RNA, 19 nt, Homo sapiens
  misc_RNA (1)...(19): siRNA sense strand
aggaggaggaugagauucu

SEQ ID NO: 2240992 - RNA, 19 nt, Homo sapiens
  misc_RNA (1)...(19): siRNA sense strand
aggaggaggaggaugagau

SEQ ID NO: 2240993 - RNA, 19 nt, Homo sapiens
  misc_RNA (1)...(19): siRNA sense strand
gacuaugagaguuuggauu

SEQ ID NO: 2240994 - RNA, 19 nt, Homo sapiens
  misc_RNA (1)...(19): siRNA sense strand
agacaucgguggaggagug

SEQ ID NO: 2240995 - RNA, 19 nt, Homo sapiens
  misc_RNA (1)...(19): siRNA sense strand
gagaaacacaggaggagga

SEQ ID NO: 2240996 - RNA, 19 nt, Homo sapiens
  misc_RNA (1)...(19): siRNA sense strand
ggauaauaagaaaggucga

SEQ ID NO: 2240997 - RNA, 19 nt, Homo sapiens
  misc_RNA (1)...(19): siRNA sense strand
aaacacaggaggaggagga

SEQ ID NO: 2240998 - RNA, 19 nt, Homo sapiens
  misc_RNA (1)...(19): siRNA sense strand
cguaaaggugccaggaauc

SEQ ID NO: 2240999 - RNA, 19 nt, Homo sapiens
  misc_RNA (1)...(19): siRNA sense strand
guggaggagugcagccaga

SEQ ID NO: 2241000 - RNA, 19 nt, Homo sapiens
  misc_RNA (1)...(19): siRNA sense strand
agaccauggauaauaagaa

SEQ ID NO: 2241001 - RNA, 19 nt, Homo sapiens
  misc_RNA (1)...(19): siRNA sense strand
aggaggaggaugagauucu

SEQ ID NO: 2241002 - RNA, 19 nt, Homo sapiens
  misc_RNA (1)...(19): siRNA sense strand
aggaggaggaggaugagau

SEQ ID NO: 2241003 - RNA, 19 nt, Homo sapiens
  misc_RNA (1)...(19): siRNA sense strand
gacuaugagaguuuggauu

SEQ ID NO: 2241004 - RNA, 19 nt, Homo sapiens
  misc_RNA (1)...(19): siRNA sense strand
agacaucgguggaggagug

SEQ ID NO: 2241005 - RNA, 19 nt, Homo sapiens
  misc_RNA (1)...(19): siRNA sense strand
gagaaacacaggaggagga

SEQ ID NO: 2241006 - RNA, 19 nt, Homo sapiens
  misc_RNA (1)...(19): siRNA sense strand
ggauaauaagaaaggucga

SEQ ID NO: 2241007 - RNA, 19 nt, Homo sapiens
  misc_RNA (1)...(19): siRNA sense strand
aaacacaggaggaggagga

SEQ ID NO: 2241008 - RNA, 19 nt, Homo sapiens
  misc_RNA (1)...(19): siRNA sense strand
cguaaaggugccaggaauc

SEQ ID NO: 2241009 - RNA, 19 nt, Homo sapiens
  misc_RNA (1)...(19): siRNA sense strand
guggaggagugcagccaga

SEQ ID NO: 2241010 - RNA, 19 nt, Homo sapiens
  misc_RNA (1)...(19): siRNA sense strand
agaccauggauaauaagaa

SEQ ID NO: 2241011 - RNA, 19 nt, Homo sapiens
  misc_RNA (1)...(19): siRNA sense strand
aggaggaggaugagauucu

SEQ ID NO: 2241012 - RNA, 19 nt, Homo sapiens
  misc_RNA (1)...(19): siRNA sense strand
aggaggaggaggaugagau

SEQ ID NO: 2241013 - RNA, 19 nt, Homo sapiens
  misc_RNA (1)...(19): siRNA sense strand
gacuaugagaguuuggauu

SEQ ID NO: 2241014 - RNA, 19 nt, Homo sapiens
  misc_RNA (1)...(19): siRNA sense strand
agacaucgguggaggagug

SEQ ID NO: 2241015 - RNA, 19 nt, Homo sapiens
  misc_RNA (1)...(19): siRNA sense strand
gagaaacacaggaggagga

SEQ ID NO: 2241016 - RNA, 19 nt, Homo sapiens
  misc_RNA (1)...(19): siRNA sense strand
ggauaauaagaaaggucga

SEQ ID NO: 2241017 - RNA, 19 nt, Homo sapiens
  misc_RNA (1)...(19): siRNA sense strand
aaacacaggaggaggagga

SEQ ID NO: 2241018 - RNA, 19 nt, Homo sapiens
  misc_RNA (1)...(19): siRNA sense strand
cguaaaggugccaggaauc

SEQ ID NO: 2241019 - RNA, 19 nt, Homo sapiens
  misc_RNA (1)...(19): siRNA sense strand
guggaggagugcagccaga

SEQ ID NO: 2241020 - RNA, 19 nt, Homo sapiens
  misc_RNA (1)...(19): siRNA sense strand
agaccauggauaauaagaa

SEQ ID NO: 2241021 - RNA, 19 nt, Homo sapiens
  misc_RNA (1)...(19): siRNA sense strand
aggaggaggaugagauucu

SEQ ID NO: 2241022 - RNA, 19 nt, Homo sapiens
  misc_RNA (1)...(19): siRNA sense strand
aggaggaggaggaugagau

SEQ ID NO: 2241023 - RNA, 19 nt, Homo sapiens
  misc_RNA (1)...(19): siRNA sense strand
gacuaugagaguuuggauu

SEQ ID NO: 2241024 - RNA, 19 nt, Homo sapiens
  misc_RNA (1)...(19): siRNA sense strand
agacaucgguggaggagug

SEQ ID NO: 2241025 - RNA, 19 nt, Homo sapiens
  misc_RNA (1)...(19): siRNA sense strand
aggaauuucuggaggcagu

SEQ ID NO: 2241026 - RNA, 19 nt, Homo sapiens
  misc_RNA (1)...(19): siRNA sense strand
ccugaagguuuuagacaau

SEQ ID NO: 2241027 - RNA, 19 nt, Homo sapiens
  misc_RNA (1)...(19): siRNA sense strand
ucccagaagaaguggauga

SEQ ID NO: 2241028 - RNA, 19 nt, Homo sapiens
  misc_RNA (1)...(19): siRNA sense strand
guccagaugaugaggagau

SEQ ID NO: 2241029 - RNA, 19 nt, Homo sapiens
  misc_RNA (1)...(19): siRNA sense strand
caucaagaauucaaaccca

SEQ ID NO: 2241030 - RNA, 19 nt, Homo sapiens
  misc_RNA (1)...(19): siRNA sense strand
cagaugaugaggagaucga

SEQ ID NO: 2241031 - RNA, 19 nt, Homo sapiens
  misc_RNA (1)...(19): siRNA sense strand
gugcugaagaugaaggugu

SEQ ID NO: 2241032 - RNA, 19 nt, Homo sapiens
  misc_RNA (1)...(19): siRNA sense strand
uguaagaaguaccggggau

SEQ ID NO: 2241033 - RNA, 19 nt, Homo sapiens
  misc_RNA (1)...(19): siRNA sense strand
cgaaagcauaagcgacgaa

SEQ ID NO: 2241034 - RNA, 19 nt, Homo sapiens
  misc_RNA (1)...(19): siRNA sense strand
ggguguaugaccggcgaua

SEQ ID NO: 2241035 - RNA, 19 nt, Homo sapiens
  misc_RNA (1)...(19): siRNA sense strand
uaugaauaucagcgggaga

SEQ ID NO: 2241036 - RNA, 19 nt, Homo sapiens
  misc_RNA (1)...(19): siRNA sense strand
uugaauacuaugugggauu

SEQ ID NO: 2241037 - RNA, 19 nt, Homo sapiens
  misc_RNA (1)...(19): siRNA sense strand
cgaaagacaagaaagcaga

SEQ ID NO: 2241038 - RNA, 19 nt, Homo sapiens
  misc_RNA (1)...(19): siRNA sense strand
ccugaagaucauuaagaau

SEQ ID NO: 2241039 - RNA, 19 nt, Homo sapiens
  misc_RNA (1)...(19): siRNA sense strand
auacagaccucaagccuga

SEQ ID NO: 2241040 - RNA, 19 nt, Homo sapiens
  misc_RNA (1)...(19): siRNA sense strand
agaauguggagaaguacaa

SEQ ID NO: 2241041 - RNA, 19 nt, Homo sapiens
  misc_RNA (1)...(19): siRNA sense strand
ucaacgugcuagagaaaau

SEQ ID NO: 2241042 - RNA, 19 nt, Homo sapiens
  misc_RNA (1)...(19): siRNA sense strand
ccaugacaacagagagcau

SEQ ID NO: 2241043 - RNA, 19 nt, Homo sapiens
  misc_RNA (1)...(19): siRNA sense strand
guggagaaguacaaggaag

SEQ ID NO: 2241044 - RNA, 19 nt, Homo sapiens
  misc_RNA (1)...(19): siRNA sense strand
cgaaagcauaagcgacgaa

SEQ ID NO: 2241045 - RNA, 19 nt, Homo sapiens
  misc_RNA (1)...(19): siRNA sense strand
uguacaauguguugaccau

SEQ ID NO: 2241046 - RNA, 19 nt, Homo sapiens
  misc_RNA (1)...(19): siRNA sense strand
aagacaagaaagcagaaau

SEQ ID NO: 2241047 - RNA, 19 nt, Homo sapiens
  misc_RNA (1)...(19): siRNA sense strand
ccuugugauguguggagua

SEQ ID NO: 2241048 - RNA, 19 nt, Homo sapiens
  misc_RNA (1)...(19): siRNA sense strand
ggguguaugaccggcgaua

SEQ ID NO: 2241049 - RNA, 19 nt, Homo sapiens
  misc_RNA (1)...(19): siRNA sense strand
uaugaauaucagcgggaga

SEQ ID NO: 2241050 - RNA, 19 nt, Homo sapiens
  misc_RNA (1)...(19): siRNA sense strand
guacaaggaagcagcucga

SEQ ID NO: 2241051 - RNA, 19 nt, Homo sapiens
  misc_RNA (1)...(19): siRNA sense strand
ccgaaagacaagaaagcag

SEQ ID NO: 2241052 - RNA, 19 nt, Homo sapiens
  misc_RNA (1)...(19): siRNA sense strand
cuagagaagaagcgagaug

SEQ ID NO: 2241053 - RNA, 19 nt, Homo sapiens
  misc_RNA (1)...(19): siRNA sense strand
ccuuugagcuucugggccu

SEQ ID NO: 2241054 - RNA, 19 nt, Homo sapiens
  misc_RNA (1)...(19): siRNA sense strand
ggaccaugccagagggaag

SEQ ID NO: 2241055 - RNA, 19 nt, Homo sapiens
  misc_RNA (1)...(19): siRNA sense strand
ucgggaacaugaagggaga

SEQ ID NO: 2241056 - RNA, 19 nt, Homo sapiens
  misc_RNA (1)...(19): siRNA sense strand
ccacgaagaucucggucca

SEQ ID NO: 2241057 - RNA, 19 nt, Homo sapiens
  misc_RNA (1)...(19): siRNA sense strand
augaagggagacugcgaua

SEQ ID NO: 2241058 - RNA, 19 nt, Homo sapiens
  misc_RNA (1)...(19): siRNA sense strand
cgauggaagaggaggaggu

SEQ ID NO: 2241059 - RNA, 19 nt, Homo sapiens
  misc_RNA (1)...(19): siRNA sense strand
ccuuugagcuccugggcaa

SEQ ID NO: 2241060 - RNA, 19 nt, Homo sapiens
  misc_RNA (1)...(19): siRNA sense strand
aggagaagucagugaagaa

SEQ ID NO: 2241061 - RNA, 19 nt, Homo sapiens
  misc_RNA (1)...(19): siRNA sense strand
aaaucaaggagaaggacaa

SEQ ID NO: 2241062 - RNA, 19 nt, Homo sapiens
  misc_RNA (1)...(19): siRNA sense strand
aaggagaaggacaaagaaa

SEQ ID NO: 2241063 - RNA, 19 nt, Homo sapiens
  misc_RNA (1)...(19): siRNA sense strand
aggagaaggacaaagaaaa

SEQ ID NO: 2241064 - RNA, 19 nt, Homo sapiens
  misc_RNA (1)...(19): siRNA sense strand
ggaccaugccagagggaag

SEQ ID NO: 2241065 - RNA, 19 nt, Homo sapiens
  misc_RNA (1)...(19): siRNA sense strand
gagaauaacuuccagccuu

SEQ ID NO: 2241066 - RNA, 19 nt, Homo sapiens
  misc_RNA (1)...(19): siRNA sense strand
uggugaugauggagaagau

SEQ ID NO: 2241067 - RNA, 19 nt, Homo sapiens
  misc_RNA (1)...(19): siRNA sense strand
ucgggaacaugaagggaga

SEQ ID NO: 2241068 - RNA, 19 nt, Homo sapiens
  misc_RNA (1)...(19): siRNA sense strand
ccacgaagaucucggucca

SEQ ID NO: 2241069 - RNA, 19 nt, Homo sapiens
  misc_RNA (1)...(19): siRNA sense strand
gguucaacuuccacgguca

SEQ ID NO: 2241070 - RNA, 19 nt, Homo sapiens
  misc_RNA (1)...(19): siRNA sense strand
acaagagcugugaggagaa

SEQ ID NO: 2241071 - RNA, 19 nt, Homo sapiens
  misc_RNA (1)...(19): siRNA sense strand
augaagggagacugcgaua

SEQ ID NO: 2241072 - RNA, 19 nt, Homo sapiens
  misc_RNA (1)...(19): siRNA sense strand
gugaauucugaguuugaaa

SEQ ID NO: 2241073 - RNA, 19 nt, Homo sapiens
  misc_RNA (1)...(19): siRNA sense strand
augaggaggauguuagaau

SEQ ID NO: 2241074 - RNA, 19 nt, Homo sapiens
  misc_RNA (1)...(19): siRNA sense strand
cgauggaagaggaggaggu

SEQ ID NO: 2241075 - RNA, 19 nt, Homo sapiens
  misc_RNA (1)...(19): siRNA sense strand
uagaaaucaacgugcucaa

SEQ ID NO: 2241076 - RNA, 19 nt, Homo sapiens
  misc_RNA (1)...(19): siRNA sense strand
cgaccaaaugagaagaaau

SEQ ID NO: 2241077 - RNA, 19 nt, Homo sapiens
  misc_RNA (1)...(19): siRNA sense strand
gugucaacccagugaucua

SEQ ID NO: 2241078 - RNA, 19 nt, Homo sapiens
  misc_RNA (1)...(19): siRNA sense strand
ccaaaugagaagaaaucca

SEQ ID NO: 2241079 - RNA, 19 nt, Homo sapiens
  misc_RNA (1)...(19): siRNA sense strand
gguccugguccuugugcaa

SEQ ID NO: 2241080 - RNA, 19 nt, Homo sapiens
  misc_RNA (1)...(19): siRNA sense strand
gagaagaaauccaaagcug

SEQ ID NO: 2241081 - RNA, 19 nt, Homo sapiens
  misc_RNA (1)...(19): siRNA sense strand
ugacggaggugaucgccua

SEQ ID NO: 2241082 - RNA, 19 nt, Homo sapiens
  misc_RNA (1)...(19): siRNA sense strand
uggcugugcaccugguuaa

SEQ ID NO: 2241083 - RNA, 19 nt, Homo sapiens
  misc_RNA (1)...(19): siRNA sense strand
ccuucuggaucgacuacaa

SEQ ID NO: 2241084 - RNA, 19 nt, Homo sapiens
  misc_RNA (1)...(19): siRNA sense strand
uggacaggcuggagagggu

SEQ ID NO: 2241085 - RNA, 19 nt, Homo sapiens
  misc_RNA (1)...(19): siRNA sense strand
ggaucgacuacaaguugaa

SEQ ID NO: 2241086 - RNA, 19 nt, Homo sapiens
  misc_RNA (1)...(19): siRNA sense strand
ccacagaggacuaugacac

SEQ ID NO: 2241087 - RNA, 19 nt, Homo sapiens
  misc_RNA (1)...(19): siRNA sense strand
gcuuguacagcgagaucuu

SEQ ID NO: 2241088 - RNA, 19 nt, Homo sapiens
  misc_RNA (1)...(19): siRNA sense strand
aggugaagcuggugggcaa

SEQ ID NO: 2241089 - RNA, 19 nt, Homo sapiens
  misc_RNA (1)...(19): siRNA sense strand
aacaaaugcucguggcaaa

SEQ ID NO: 2241090 - RNA, 19 nt, Homo sapiens
  misc_RNA (1)...(19): siRNA sense strand
aguaaugcguggagcagaa

SEQ ID NO: 2241091 - RNA, 19 nt, Homo sapiens
  misc_RNA (1)...(19): siRNA sense strand
cuaauguaguggugaaaga

SEQ ID NO: 2241092 - RNA, 19 nt, Homo sapiens
  misc_RNA (1)...(19): siRNA sense strand
gggaaaaucaguagaguca

SEQ ID NO: 2241093 - RNA, 19 nt, Homo sapiens
  misc_RNA (1)...(19): siRNA sense strand
cauuaguguugcugagauu

SEQ ID NO: 2241094 - RNA, 19 nt, Homo sapiens
  misc_RNA (1)...(19): siRNA sense strand
agauaagacuggaaagcca

SEQ ID NO: 2241095 - RNA, 19 nt, Homo sapiens
  misc_RNA (1)...(19): siRNA sense strand
cgucagaggauuuguucua

SEQ ID NO: 2241096 - RNA, 19 nt, Homo sapiens
  misc_RNA (1)...(19): siRNA sense strand
gcggagaaugguuuggaaa

SEQ ID NO: 2241097 - RNA, 19 nt, Homo sapiens
  misc_RNA (1)...(19): siRNA sense strand
ggugauagucuuugacaca

SEQ ID NO: 2241098 - RNA, 19 nt, Homo sapiens
  misc_RNA (1)...(19): siRNA sense strand
caugaauccugauggguau

SEQ ID NO: 2241099 - RNA, 19 nt, Homo sapiens
  misc_RNA (1)...(19): siRNA sense strand
gggacagagcacugaauau

SEQ ID NO: 2241100 - RNA, 19 nt, Homo sapiens
  misc_RNA (1)...(19): siRNA sense strand
gaaagaaggaccagccaca

SEQ ID NO: 2241101 - RNA, 19 nt, Homo sapiens
  misc_RNA (1)...(19): siRNA sense strand
uuggaaauaugcauggaaa

SEQ ID NO: 2241102 - RNA, 19 nt, Homo sapiens
  misc_RNA (1)...(19): siRNA sense strand
caguacagacaguggaaaa

SEQ ID NO: 2241103 - RNA, 19 nt, Homo sapiens
  misc_RNA (1)...(19): siRNA sense strand
guauguuaguggagguuca

SEQ ID NO: 2241104 - RNA, 19 nt, Homo sapiens
  misc_RNA (1)...(19): siRNA sense strand
uggaaauaugcauggaaau

SEQ ID NO: 2241105 - RNA, 19 nt, Homo sapiens
  misc_RNA (1)...(19): siRNA sense strand
ccucagaugaugaaguauu

SEQ ID NO: 2241106 - RNA, 19 nt, Homo sapiens
  misc_RNA (1)...(19): siRNA sense strand
aggaauaaagguacaaaca

SEQ ID NO: 2241107 - RNA, 19 nt, Homo sapiens
  misc_RNA (1)...(19): siRNA sense strand
gagugaaaggauuuguuaa

SEQ ID NO: 2241108 - RNA, 19 nt, Homo sapiens
  misc_RNA (1)...(19): siRNA sense strand
ggaauaacaaauggagcua

SEQ ID NO: 2241109 - RNA, 19 nt, Homo sapiens
  misc_RNA (1)...(19): siRNA sense strand
gggcagacaauaagagauc

SEQ ID NO: 2241110 - RNA, 19 nt, Homo sapiens
  misc_RNA (1)...(19): siRNA sense strand
gaaaugaagugguuggaag

SEQ ID NO: 2241111 - RNA, 19 nt, Homo sapiens
  misc_RNA (1)...(19): siRNA sense strand
gagagagagcucaagagaa

SEQ ID NO: 2241112 - RNA, 19 nt, Homo sapiens
  misc_RNA (1)...(19): siRNA sense strand
gacaggaaugggagaacaa

SEQ ID NO: 2241113 - RNA, 19 nt, Homo sapiens
  misc_RNA (1)...(19): siRNA sense strand
ccagauguuucaagguaga

SEQ ID NO: 2241114 - RNA, 19 nt, Homo sapiens
  misc_RNA (1)...(19): siRNA sense strand
guuaaagauaagacuggaa

SEQ ID NO: 2241115 - RNA, 19 nt, Homo sapiens
  misc_RNA (1)...(19): siRNA sense strand
gaggaaugcaggacuggaa

SEQ ID NO: 2241116 - RNA, 19 nt, Homo sapiens
  misc_RNA (1)...(19): siRNA sense strand
uguggaaggugguaugcaa

SEQ ID NO: 2241117 - RNA, 19 nt, Homo sapiens
  misc_RNA (1)...(19): siRNA sense strand
ccaugaaccaggugaacca

SEQ ID NO: 2241118 - RNA, 19 nt, Homo sapiens
  misc_RNA (1)...(19): siRNA sense strand
aaaugaagugguuggaaga

SEQ ID NO: 2241119 - RNA, 19 nt, Homo sapiens
  misc_RNA (1)...(19): siRNA sense strand
caggaaggagauucaauaa

SEQ ID NO: 2241120 - RNA, 19 nt, Homo sapiens
  misc_RNA (1)...(19): siRNA sense strand
augaaggaauaaagguaca

SEQ ID NO: 2241121 - RNA, 19 nt, Homo sapiens
  misc_RNA (1)...(19): siRNA sense strand
ugagaauauuccaggagga

SEQ ID NO: 2241122 - RNA, 19 nt, Homo sapiens
  misc_RNA (1)...(19): siRNA sense strand
acuuugaccugaaccgaaa

SEQ ID NO: 2241123 - RNA, 19 nt, Homo sapiens
  misc_RNA (1)...(19): siRNA sense strand
gagcagaauggcauaguca

SEQ ID NO: 2241124 - RNA, 19 nt, Homo sapiens
  misc_RNA (1)...(19): siRNA sense strand
gcaugaaggauuauagugu

SEQ ID NO: 2241125 - RNA, 19 nt, Homo sapiens
  misc_RNA (1)...(19): siRNA sense strand
augaaggauuauaguguca

SEQ ID NO: 2241126 - RNA, 19 nt, Homo sapiens
  misc_RNA (1)...(19): siRNA sense strand
gaguggauccgcaggaaca

SEQ ID NO: 2241127 - RNA, 19 nt, Homo sapiens
  misc_RNA (1)...(19): siRNA sense strand
acauuggagugaaaggauu

SEQ ID NO: 2241128 - RNA, 19 nt, Homo sapiens
  misc_RNA (1)...(19): siRNA sense strand
ggcagaaacaacagcaaca

SEQ ID NO: 2241129 - RNA, 19 nt, Homo sapiens
  misc_RNA (1)...(19): siRNA sense strand
acacugaagaggaaacauu

SEQ ID NO: 2241130 - RNA, 19 nt, Homo sapiens
  misc_RNA (1)...(19): siRNA sense strand
uuucaaagauggaaucaca

SEQ ID NO: 2241131 - RNA, 19 nt, Homo sapiens
  misc_RNA (1)...(19): siRNA sense strand
ugggcagcaugaaggauua

SEQ ID NO: 2241132 - RNA, 19 nt, Homo sapiens
  misc_RNA (1)...(19): siRNA sense strand
acaagggaguucauggauu

SEQ ID NO: 2241133 - RNA, 19 nt, Homo sapiens
  misc_RNA (1)...(19): siRNA sense strand
gcaugguggcucaguggua

SEQ ID NO: 2241134 - RNA, 19 nt, Homo sapiens
  misc_RNA (1)...(19): siRNA sense strand
ccuaauauucuuucuggaa

SEQ ID NO: 2241135 - RNA, 19 nt, Homo sapiens
  misc_RNA (1)...(19): siRNA sense strand
uugagaaagagcugccaaa

SEQ ID NO: 2241136 - RNA, 19 nt, Homo sapiens
  misc_RNA (1)...(19): siRNA sense strand
ccucccaaccugagaccaa

SEQ ID NO: 2241137 - RNA, 19 nt, Homo sapiens
  misc_RNA (1)...(19): siRNA sense strand
ugacaagccaguacagaca

SEQ ID NO: 2241138 - RNA, 19 nt, Homo sapiens
  misc_RNA (1)...(19): siRNA sense strand
ucaaagauggaaucacaaa

SEQ ID NO: 2241139 - RNA, 19 nt, Homo sapiens
  misc_RNA (1)...(19): siRNA sense strand
ucucuuaggccaacuguaa

SEQ ID NO: 2241140 - RNA, 19 nt, Homo sapiens
  misc_RNA (1)...(19): siRNA sense strand
gauccuacgcaaccagaaa

SEQ ID NO: 2241141 - RNA, 19 nt, Homo sapiens
  misc_RNA (1)...(19): siRNA sense strand
guucgauccucaacagauu

SEQ ID NO: 2241142 - RNA, 19 nt, Homo sapiens
  misc_RNA (1)...(19): siRNA sense strand
acuggaaucuauagcaaaa

SEQ ID NO: 2241143 - RNA, 19 nt, Homo sapiens
  misc_RNA (1)...(19): siRNA sense strand
caggugaaccagaauuuaa

SEQ ID NO: 2241144 - RNA, 19 nt, Homo sapiens
  misc_RNA (1)...(19): siRNA sense strand
uuguaagaacuuuggaaca

SEQ ID NO: 2241145 - RNA, 19 nt, Homo sapiens
  misc_RNA (1)...(19): siRNA sense strand
ccuuggaaccagaggucaa

SEQ ID NO: 2241146 - RNA, 19 nt, Homo sapiens
  misc_RNA (1)...(19): siRNA sense strand
agaaagaaagaaauggaga

SEQ ID NO: 2241147 - RNA, 19 nt, Homo sapiens
  misc_RNA (1)...(19): siRNA sense strand
gccccaagccagaaagaaa

SEQ ID NO: 2241148 - RNA, 19 nt, Homo sapiens
  misc_RNA (1)...(19): siRNA sense strand
gaguggaccugaaccgcaa

SEQ ID NO: 2241149 - RNA, 19 nt, Homo sapiens
  misc_RNA (1)...(19): siRNA sense strand
ggaacaggaaccagcgcau

SEQ ID NO: 2241150 - RNA, 19 nt, Homo sapiens
  misc_RNA (1)...(19): siRNA sense strand
ggguaaucgggaagcccua

SEQ ID NO: 2241151 - RNA, 19 nt, Homo sapiens
  misc_RNA (1)...(19): siRNA sense strand
agggaaugcaagacuuuaa

SEQ ID NO: 2241152 - RNA, 19 nt, Homo sapiens
  misc_RNA (1)...(19): siRNA sense strand
aagaaauggagaugaggca

SEQ ID NO: 2241153 - RNA, 19 nt, Homo sapiens
  misc_RNA (1)...(19): siRNA sense strand
uggcaggaacaaugcaaau

SEQ ID NO: 2241154 - RNA, 19 nt, Homo sapiens
  misc_RNA (1)...(19): siRNA sense strand
ggaacaaugcaaauggagu

SEQ ID NO: 2241155 - RNA, 19 nt, Homo sapiens
  misc_RNA (1)...(19): siRNA sense strand
ccaugaaccccgacggcua

SEQ ID NO: 2241156 - RNA, 19 nt, Homo sapiens
  misc_RNA (1)...(19): siRNA sense strand
aggucaaguauguggggaa

SEQ ID NO: 2241157 - RNA, 19 nt, Homo sapiens
  misc_RNA (1)...(19): siRNA sense strand
aagaggaguuacagcggga

SEQ ID NO: 2241158 - RNA, 19 nt, Homo sapiens
  misc_RNA (1)...(19): siRNA sense strand
gaacaaugcaaauggagug

SEQ ID NO: 2241159 - RNA, 19 nt, Homo sapiens
  misc_RNA (1)...(19): siRNA sense strand
uggcaauggaccaaggaaa

SEQ ID NO: 2241160 - RNA, 19 nt, Homo sapiens
  misc_RNA (1)...(19): siRNA sense strand
cuggagaagagcagaacaa

SEQ ID NO: 2241161 - RNA, 19 nt, Homo sapiens
  misc_RNA (1)...(19): siRNA sense strand
cagucgagaaagagcuaua

SEQ ID NO: 2241162 - RNA, 19 nt, Homo sapiens
  misc_RNA (1)...(19): siRNA sense strand
ggcaauggaccaaggaaaa

SEQ ID NO: 2241163 - RNA, 19 nt, Homo sapiens
  misc_RNA (1)...(19): siRNA sense strand
cgguaaacguggucggaag

SEQ ID NO: 2241164 - RNA, 19 nt, Homo sapiens
  misc_RNA (1)...(19): siRNA sense strand
aagcaguggugcauggcaa

SEQ ID NO: 2241165 - RNA, 19 nt, Homo sapiens
  misc_RNA (1)...(19): siRNA sense strand
aguaaagaagcccgguaaa

SEQ ID NO: 2241166 - RNA, 19 nt, Homo sapiens
  misc_RNA (1)...(19): siRNA sense strand
cugggaagacagaugcuaa

SEQ ID NO: 2241167 - RNA, 19 nt, Homo sapiens
  misc_RNA (1)...(19): siRNA sense strand
ccggcagagugcaagagaa

SEQ ID NO: 2241168 - RNA, 19 nt, Homo sapiens
  misc_RNA (1)...(19): siRNA sense strand
aagcaaaacuugagaggag

SEQ ID NO: 2241169 - RNA, 19 nt, Homo sapiens
  misc_RNA (1)...(19): siRNA sense strand
ucacuggagaagagcagaa

SEQ ID NO: 2241170 - RNA, 19 nt, Homo sapiens
  misc_RNA (1)...(19): siRNA sense strand
cagaacucaagcaggcaua

SEQ ID NO: 2241171 - RNA, 19 nt, Homo sapiens
  misc_RNA (1)...(19): siRNA sense strand
guaaggugguuggaggcaa

SEQ ID NO: 2241172 - RNA, 19 nt, Homo sapiens
  misc_RNA (1)...(19): siRNA sense strand
cagaacaaaucucagcaga

SEQ ID NO: 2241173 - RNA, 19 nt, Homo sapiens
  misc_RNA (1)...(19): siRNA sense strand
aggaacuggaaauguacaa

SEQ ID NO: 2241174 - RNA, 19 nt, Homo sapiens
  misc_RNA (1)...(19): siRNA sense strand
ugggaagacagaugcuaau

SEQ ID NO: 2241175 - RNA, 19 nt, Homo sapiens
  misc_RNA (1)...(19): siRNA sense strand
cgaaaagaaccuacagaga

SEQ ID NO: 2241176 - RNA, 19 nt, Homo sapiens
  misc_RNA (1)...(19): siRNA sense strand
gaaugaagacugugagcug

SEQ ID NO: 2241177 - RNA, 19 nt, Homo sapiens
  misc_RNA (1)...(19): siRNA sense strand
cugcaaggucucuggagga

SEQ ID NO: 2241178 - RNA, 19 nt, Homo sapiens
  misc_RNA (1)...(19): siRNA sense strand
augaagacugugagcugaa

SEQ ID NO: 2241179 - RNA, 19 nt, Homo sapiens
  misc_RNA (1)...(19): siRNA sense strand
aggaauucaaugaugugua

SEQ ID NO: 2241180 - RNA, 19 nt, Homo sapiens
  misc_RNA (1)...(19): siRNA sense strand
augaugaaaugacaggcua

SEQ ID NO: 2241181 - RNA, 19 nt, Homo sapiens
  misc_RNA (1)...(19): siRNA sense strand
cgaaaagaaccuacagaga

SEQ ID NO: 2241182 - RNA, 19 nt, Homo sapiens
  misc_RNA (1)...(19): siRNA sense strand
gaaugaagacugugagcug

SEQ ID NO: 2241183 - RNA, 19 nt, Homo sapiens
  misc_RNA (1)...(19): siRNA sense strand
cugcaaggucucuggagga

SEQ ID NO: 2241184 - RNA, 19 nt, Homo sapiens
  misc_RNA (1)...(19): siRNA sense strand
augaagacugugagcugaa

SEQ ID NO: 2241185 - RNA, 19 nt, Homo sapiens
  misc_RNA (1)...(19): siRNA sense strand
aggaauucaaugaugugua

SEQ ID NO: 2241186 - RNA, 19 nt, Homo sapiens
  misc_RNA (1)...(19): siRNA sense strand
augaugaaaugacaggcua

SEQ ID NO: 2241187 - RNA, 19 nt, Homo sapiens
  misc_RNA (1)...(19): siRNA sense strand
cgaaaagaaccuacagaga

SEQ ID NO: 2241188 - RNA, 19 nt, Homo sapiens
  misc_RNA (1)...(19): siRNA sense strand
gaaugaagacugugagcug

SEQ ID NO: 2241189 - RNA, 19 nt, Homo sapiens
  misc_RNA (1)...(19): siRNA sense strand
cugcaaggucucuggagga

SEQ ID NO: 2241190 - RNA, 19 nt, Homo sapiens
  misc_RNA (1)...(19): siRNA sense strand
augaagacugugagcugaa

SEQ ID NO: 2241191 - RNA, 19 nt, Homo sapiens
  misc_RNA (1)...(19): siRNA sense strand
aggaauucaaugaugugua

SEQ ID NO: 2241192 - RNA, 19 nt, Homo sapiens
  misc_RNA (1)...(19): siRNA sense strand
augaugaaaugacaggcua

SEQ ID NO: 2241193 - RNA, 19 nt, Homo sapiens
  misc_RNA (1)...(19): siRNA sense strand
cgaaaagaaccuacagaga

SEQ ID NO: 2241194 - RNA, 19 nt, Homo sapiens
  misc_RNA (1)...(19): siRNA sense strand
gaaugaagacugugagcug

SEQ ID NO: 2241195 - RNA, 19 nt, Homo sapiens
  misc_RNA (1)...(19): siRNA sense strand
cugcaaggucucuggagga

SEQ ID NO: 2241196 - RNA, 19 nt, Homo sapiens
  misc_RNA (1)...(19): siRNA sense strand
augaagacugugagcugaa

SEQ ID NO: 2241197 - RNA, 19 nt, Homo sapiens
  misc_RNA (1)...(19): siRNA sense strand
aggaauucaaugaugugua

SEQ ID NO: 2241198 - RNA, 19 nt, Homo sapiens
  misc_RNA (1)...(19): siRNA sense strand
augaugaaaugacaggcua

SEQ ID NO: 2241199 - RNA, 19 nt, Homo sapiens
  misc_RNA (1)...(19): siRNA sense strand
gggcagauccucaagcaga

SEQ ID NO: 2241200 - RNA, 19 nt, Homo sapiens
  misc_RNA (1)...(19): siRNA sense strand
acacaaacucgcacaacca

SEQ ID NO: 2241201 - RNA, 19 nt, Homo sapiens
  misc_RNA (1)...(19): siRNA sense strand
gggcagauccucaagcaga

SEQ ID NO: 2241202 - RNA, 19 nt, Homo sapiens
  misc_RNA (1)...(19): siRNA sense strand
gggcagauccucaagcaga

SEQ ID NO: 2241203 - RNA, 19 nt, Homo sapiens
  misc_RNA (1)...(19): siRNA sense strand
acacaaacucgcacaacca

SEQ ID NO: 2241204 - RNA, 19 nt, Homo sapiens
  misc_RNA (1)...(19): siRNA sense strand
gggcagauccucaagcaga

SEQ ID NO: 2241205 - RNA, 19 nt, Homo sapiens
  misc_RNA (1)...(19): siRNA sense strand
ggaaagaaguaugggccaa

SEQ ID NO: 2241206 - RNA, 19 nt, Homo sapiens
  misc_RNA (1)...(19): siRNA sense strand
gaagauaauuggagcugga

SEQ ID NO: 2241207 - RNA, 19 nt, Homo sapiens
  misc_RNA (1)...(19): siRNA sense strand
ggccaaaaggcuacgguua

SEQ ID NO: 2241208 - RNA, 19 nt, Homo sapiens
  misc_RNA (1)...(19): siRNA sense strand
cggaaagaaguaugggcca

SEQ ID NO: 2241209 - RNA, 19 nt, Homo sapiens
  misc_RNA (1)...(19): siRNA sense strand
agauaauuggagcuggaaa

SEQ ID NO: 2241210 - RNA, 19 nt, Homo sapiens
  misc_RNA (1)...(19): siRNA sense strand
gcuggaaagcccuggcaca

SEQ ID NO: 2241211 - RNA, 19 nt, Homo sapiens
  misc_RNA (1)...(19): siRNA sense strand
cuguauaugcugccgagaa

SEQ ID NO: 2241212 - RNA, 19 nt, Homo sapiens
  misc_RNA (1)...(19): siRNA sense strand
cuggaaagcccuggcacaa

SEQ ID NO: 2241213 - RNA, 19 nt, Homo sapiens
  misc_RNA (1)...(19): siRNA sense strand
ccugcuacggaaagaagua

SEQ ID NO: 2241214 - RNA, 19 nt, Homo sapiens
  misc_RNA (1)...(19): siRNA sense strand
gcgcauggucggagaacuc

SEQ ID NO: 2241215 - RNA, 19 nt, Homo sapiens
  misc_RNA (1)...(19): siRNA sense strand
ucaucaaggcgcagagcca

SEQ ID NO: 2241216 - RNA, 19 nt, Homo sapiens
  misc_RNA (1)...(19): siRNA sense strand
guuaauagcuacugggucu

SEQ ID NO: 2241217 - RNA, 19 nt, Homo sapiens
  misc_RNA (1)...(19): siRNA sense strand
gcuucugguucaagggauu

SEQ ID NO: 2241218 - RNA, 19 nt, Homo sapiens
  misc_RNA (1)...(19): siRNA sense strand
cagagaggauguuggccaa

SEQ ID NO: 2241219 - RNA, 19 nt, Homo sapiens
  misc_RNA (1)...(19): siRNA sense strand
uugcaauccucaagaucaa

SEQ ID NO: 2241220 - RNA, 19 nt, Homo sapiens
  misc_RNA (1)...(19): siRNA sense strand
agcuaaacuuugggaaaua

SEQ ID NO: 2241221 - RNA, 19 nt, Homo sapiens
  misc_RNA (1)...(19): siRNA sense strand
gcacaacaaaauauggaaa

SEQ ID NO: 2241222 - RNA, 19 nt, Homo sapiens
  misc_RNA (1)...(19): siRNA sense strand
cugcugaugcuucgauaaa

SEQ ID NO: 2241223 - RNA, 19 nt, Homo sapiens
  misc_RNA (1)...(19): siRNA sense strand
cgauaaagauacuugacac

SEQ ID NO: 2241224 - RNA, 19 nt, Homo sapiens
  misc_RNA (1)...(19): siRNA sense strand
ucaaugaaaucaagccuca

SEQ ID NO: 2241225 - RNA, 19 nt, Homo sapiens
  misc_RNA (1)...(19): siRNA sense strand
guacguaacuggaagcaag

SEQ ID NO: 2241226 - RNA, 19 nt, Homo sapiens
  misc_RNA (1)...(19): siRNA sense strand
ggaaauaucaacgggacga

SEQ ID NO: 2241227 - RNA, 19 nt, Homo sapiens
  misc_RNA (1)...(19): siRNA sense strand
cuuuauacuugucggaacu

SEQ ID NO: 2241228 - RNA, 19 nt, Homo sapiens
  misc_RNA (1)...(19): siRNA sense strand
guuucaaaucgaugcauca

SEQ ID NO: 2241229 - RNA, 19 nt, Homo sapiens
  misc_RNA (1)...(19): siRNA sense strand
acagagaggauguuggcca

SEQ ID NO: 2241230 - RNA, 19 nt, Homo sapiens
  misc_RNA (1)...(19): siRNA sense strand
uggcagagguggaagggau

SEQ ID NO: 2241231 - RNA, 19 nt, Homo sapiens
  misc_RNA (1)...(19): siRNA sense strand
gcgcgaauucagugggaga

SEQ ID NO: 2241232 - RNA, 19 nt, Homo sapiens
  misc_RNA (1)...(19): siRNA sense strand
agaacaaagaagagcugaa

SEQ ID NO: 2241233 - RNA, 19 nt, Homo sapiens
  misc_RNA (1)...(19): siRNA sense strand
gaagagcaguugaaggaca

SEQ ID NO: 2241234 - RNA, 19 nt, Homo sapiens
  misc_RNA (1)...(19): siRNA sense strand
aagaagagcugaagagccu

SEQ ID NO: 2241235 - RNA, 19 nt, Homo sapiens
  misc_RNA (1)...(19): siRNA sense strand
auaccaagaccaagagaca

SEQ ID NO: 2241236 - RNA, 19 nt, Homo sapiens
  misc_RNA (1)...(19): siRNA sense strand
gaacaaauacagaaaucca

SEQ ID NO: 2241237 - RNA, 19 nt, Homo sapiens
  misc_RNA (1)...(19): siRNA sense strand
ccaugagagccgaggacca

SEQ ID NO: 2241238 - RNA, 19 nt, Homo sapiens
  misc_RNA (1)...(19): siRNA sense strand
gugaaaagaacaaagaaga

SEQ ID NO: 2241239 - RNA, 19 nt, Homo sapiens
  misc_RNA (1)...(19): siRNA sense strand
ugucaaugaaccagcagaa

SEQ ID NO: 2241240 - RNA, 19 nt, Homo sapiens
  misc_RNA (1)...(19): siRNA sense strand
cggaaauugcccugaaaau

SEQ ID NO: 2241241 - RNA, 19 nt, Homo sapiens
  misc_RNA (1)...(19): siRNA sense strand
cgauagagagacaggaaag

SEQ ID NO: 2241242 - RNA, 19 nt, Homo sapiens
  misc_RNA (1)...(19): siRNA sense strand
cggguuugacugugagaga

SEQ ID NO: 2241243 - RNA, 19 nt, Homo sapiens
  misc_RNA (1)...(19): siRNA sense strand
gaggaggaaugcaggcuca

SEQ ID NO: 2241244 - RNA, 19 nt, Homo sapiens
  misc_RNA (1)...(19): siRNA sense strand
acgauagagagacaggaaa

SEQ ID NO: 2241245 - RNA, 19 nt, Homo sapiens
  misc_RNA (1)...(19): siRNA sense strand
cugugaauaccaagaccaa

SEQ ID NO: 2241246 - RNA, 19 nt, Homo sapiens
  misc_RNA (1)...(19): siRNA sense strand
acaaauaucccaacgcuga

SEQ ID NO: 2241247 - RNA, 19 nt, Homo sapiens
  misc_RNA (1)...(19): siRNA sense strand
ggguuagaugccagaggau

SEQ ID NO: 2241248 - RNA, 19 nt, Homo sapiens
  misc_RNA (1)...(19): siRNA sense strand
ggauuagaggcccgugcaa

SEQ ID NO: 2241249 - RNA, 19 nt, Homo sapiens
  misc_RNA (1)...(19): siRNA sense strand
aaugcaaggagcaaguaua

SEQ ID NO: 2241250 - RNA, 19 nt, Homo sapiens
  misc_RNA (1)...(19): siRNA sense strand
aagagcaguugaaggacau

SEQ ID NO: 2241251 - RNA, 19 nt, Homo sapiens
  misc_RNA (1)...(19): siRNA sense strand
guucuguguucguggggaa

SEQ ID NO: 2241252 - RNA, 19 nt, Homo sapiens
  misc_RNA (1)...(19): siRNA sense strand
gcugaagagccuuggcacu

SEQ ID NO: 2241253 - RNA, 19 nt, Homo sapiens
  misc_RNA (1)...(19): siRNA sense strand
aguuccagcaccagggcaa

SEQ ID NO: 2241254 - RNA, 19 nt, Homo sapiens
  misc_RNA (1)...(19): siRNA sense strand
gagaauuguggauccggaa

SEQ ID NO: 2241255 - RNA, 19 nt, Homo sapiens
  misc_RNA (1)...(19): siRNA sense strand
gguuggaaugccaggaagu

SEQ ID NO: 2241256 - RNA, 19 nt, Homo sapiens
  misc_RNA (1)...(19): siRNA sense strand
cuggagagguagagccuag

SEQ ID NO: 2241257 - RNA, 19 nt, Homo sapiens
  misc_RNA (1)...(19): siRNA sense strand
gguuagaugccagaggauu

SEQ ID NO: 2241258 - RNA, 19 nt, Homo sapiens
  misc_RNA (1)...(19): siRNA sense strand
aggaaugcaaggagcaagu

SEQ ID NO: 2241259 - RNA, 19 nt, Homo sapiens
  misc_RNA (1)...(19): siRNA sense strand
ccuccugagcaaaggcaga

SEQ ID NO: 2241260 - RNA, 19 nt, Homo sapiens
  misc_RNA (1)...(19): siRNA sense strand
ccugagaagucuggagaaa

SEQ ID NO: 2241261 - RNA, 19 nt, Homo sapiens
  misc_RNA (1)...(19): siRNA sense strand
gaguaugaagggaaagaaa

SEQ ID NO: 2241262 - RNA, 19 nt, Homo sapiens
  misc_RNA (1)...(19): siRNA sense strand
acauugaagcagagauuaa

SEQ ID NO: 2241263 - RNA, 19 nt, Homo sapiens
  misc_RNA (1)...(19): siRNA sense strand
ggauaaaauuggaauggaa

SEQ ID NO: 2241264 - RNA, 19 nt, Homo sapiens
  misc_RNA (1)...(19): siRNA sense strand
aagaagaguaugaagggaa

SEQ ID NO: 2241265 - RNA, 19 nt, Homo sapiens
  misc_RNA (1)...(19): siRNA sense strand
accaaauacuguugaggaa

SEQ ID NO: 2241266 - RNA, 19 nt, Homo sapiens
  misc_RNA (1)...(19): siRNA sense strand
guggaugaacugauggaaa

SEQ ID NO: 2241267 - RNA, 19 nt, Homo sapiens
  misc_RNA (1)...(19): siRNA sense strand
acaaguaugaagaggguau

SEQ ID NO: 2241268 - RNA, 19 nt, Homo sapiens
  misc_RNA (1)...(19): siRNA sense strand
cagaugaagaugaagaaaa

SEQ ID NO: 2241269 - RNA, 19 nt, Homo sapiens
  misc_RNA (1)...(19): siRNA sense strand
cagaguauguccuggccua

SEQ ID NO: 2241270 - RNA, 19 nt, Homo sapiens
  misc_RNA (1)...(19): siRNA sense strand
agaucggaguagagauuau

SEQ ID NO: 2241271 - RNA, 19 nt, Homo sapiens
  misc_RNA (1)...(19): siRNA sense strand
agaaauauauacaguggga

SEQ ID NO: 2241272 - RNA, 19 nt, Homo sapiens
  misc_RNA (1)...(19): siRNA sense strand
ccgagaaaccaaggguaaa

SEQ ID NO: 2241273 - RNA, 19 nt, Homo sapiens
  misc_RNA (1)...(19): siRNA sense strand
cggaaaagaaauuagaaga

SEQ ID NO: 2241274 - RNA, 19 nt, Homo sapiens
  misc_RNA (1)...(19): siRNA sense strand
cauucaaagaagaguauga

SEQ ID NO: 2241275 - RNA, 19 nt, Homo sapiens
  misc_RNA (1)...(19): siRNA sense strand
cgaagaugcaagauaccaa

SEQ ID NO: 2241276 - RNA, 19 nt, Homo sapiens
  misc_RNA (1)...(19): siRNA sense strand
gcacauugauuuauggaag

SEQ ID NO: 2241277 - RNA, 19 nt, Homo sapiens
  misc_RNA (1)...(19): siRNA sense strand
ugacaagguugaaaagcua

SEQ ID NO: 2241278 - RNA, 19 nt, Homo sapiens
  misc_RNA (1)...(19): siRNA sense strand
uccgagaaaccaaggguaa

SEQ ID NO: 2241279 - RNA, 19 nt, Homo sapiens
  misc_RNA (1)...(19): siRNA sense strand
agacaguaaugaaaggcuu

SEQ ID NO: 2241280 - RNA, 19 nt, Homo sapiens
  misc_RNA (1)...(19): siRNA sense strand
ggagcaggcagcugaguau

SEQ ID NO: 2241281 - RNA, 19 nt, Homo sapiens
  misc_RNA (1)...(19): siRNA sense strand
aaggaauaugagacaguaa

SEQ ID NO: 2241282 - RNA, 19 nt, Homo sapiens
  misc_RNA (1)...(19): siRNA sense strand
guguuaauccgaugaucaa

SEQ ID NO: 2241283 - RNA, 19 nt, Homo sapiens
  misc_RNA (1)...(19): siRNA sense strand
ugaagaaagcggaaaagaa

SEQ ID NO: 2241284 - RNA, 19 nt, Homo sapiens
  misc_RNA (1)...(19): siRNA sense strand
cagaaaagggagauaugaa

SEQ ID NO: 2241285 - RNA, 19 nt, Homo sapiens
  misc_RNA (1)...(19): siRNA sense strand
cagcauucaaagaagagua

SEQ ID NO: 2241286 - RNA, 19 nt, Homo sapiens
  misc_RNA (1)...(19): siRNA sense strand
ucccagagaaggugaagaa

SEQ ID NO: 2241287 - RNA, 19 nt, Homo sapiens
  misc_RNA (1)...(19): siRNA sense strand
caaguagauauguggaaga

SEQ ID NO: 2241288 - RNA, 19 nt, Homo sapiens
  misc_RNA (1)...(19): siRNA sense strand
aggugaagaaagcggaaaa

SEQ ID NO: 2241289 - RNA, 19 nt, Homo sapiens
  misc_RNA (1)...(19): siRNA sense strand
caaaggaauaugagacagu

SEQ ID NO: 2241290 - RNA, 19 nt, Homo sapiens
  misc_RNA (1)...(19): siRNA sense strand
gaggaagcugugaggauca

SEQ ID NO: 2241291 - RNA, 19 nt, Homo sapiens
  misc_RNA (1)...(19): siRNA sense strand
agcagagauuaaagcuaaa

SEQ ID NO: 2241292 - RNA, 19 nt, Homo sapiens
  misc_RNA (1)...(19): siRNA sense strand
caaaucuggaagaaugaua

SEQ ID NO: 2241293 - RNA, 19 nt, Homo sapiens
  misc_RNA (1)...(19): siRNA sense strand
cagaauacccuaaaccaga

SEQ ID NO: 2241294 - RNA, 19 nt, Homo sapiens
  misc_RNA (1)...(19): siRNA sense strand
gcaucaaaucuggaagaau

SEQ ID NO: 2241295 - RNA, 19 nt, Homo sapiens
  misc_RNA (1)...(19): siRNA sense strand
ugaaagaugaaguggauag

SEQ ID NO: 2241296 - RNA, 19 nt, Homo sapiens
  misc_RNA (1)...(19): siRNA sense strand
agcaaaggaauaugagaca

SEQ ID NO: 2241297 - RNA, 19 nt, Homo sapiens
  misc_RNA (1)...(19): siRNA sense strand
ugaaagagccauaagcacu

SEQ ID NO: 2241298 - RNA, 19 nt, Homo sapiens
  misc_RNA (1)...(19): siRNA sense strand
cagaaucaaccuauagaca

SEQ ID NO: 2241299 - RNA, 19 nt, Homo sapiens
  misc_RNA (1)...(19): siRNA sense strand
uaugaaauuugcacggaga

SEQ ID NO: 2241300 - RNA, 19 nt, Homo sapiens
  misc_RNA (1)...(19): siRNA sense strand
augaagaggguaucaauau

SEQ ID NO: 2241301 - RNA, 19 nt, Homo sapiens
  misc_RNA (1)...(19): siRNA sense strand
gacguguagcaaaggaaua

SEQ ID NO: 2241302 - RNA, 19 nt, Homo sapiens
  misc_RNA (1)...(19): siRNA sense strand
aaguagauauguggaagaa

SEQ ID NO: 2241303 - RNA, 19 nt, Homo sapiens
  misc_RNA (1)...(19): siRNA sense strand
agaaucaaccuauagacaa

SEQ ID NO: 2241304 - RNA, 19 nt, Homo sapiens
  misc_RNA (1)...(19): siRNA sense strand
uugaggaagcugugaggau

SEQ ID NO: 2241305 - RNA, 19 nt, Homo sapiens
  misc_RNA (1)...(19): siRNA sense strand
guauacucaaaguggagaa

SEQ ID NO: 2241306 - RNA, 19 nt, Homo sapiens
  misc_RNA (1)...(19): siRNA sense strand
ggauagaaaaccagaauac

SEQ ID NO: 2241307 - RNA, 19 nt, Homo sapiens
  misc_RNA (1)...(19): siRNA sense strand
ccagagaaggugaagaaag

SEQ ID NO: 2241308 - RNA, 19 nt, Homo sapiens
  misc_RNA (1)...(19): siRNA sense strand
ggagauaugaauaaugcca

SEQ ID NO: 2241309 - RNA, 19 nt, Homo sapiens
  misc_RNA (1)...(19): siRNA sense strand
ccgucaagcagaugagaca

SEQ ID NO: 2241310 - RNA, 19 nt, Homo sapiens
  misc_RNA (1)...(19): siRNA sense strand
gcacacgaguccagagcgu

SEQ ID NO: 2241311 - RNA, 19 nt, Homo sapiens
  misc_RNA (1)...(19): siRNA sense strand
gagcaggcauccaucgaga

SEQ ID NO: 2241312 - RNA, 19 nt, Homo sapiens
  misc_RNA (1)...(19): siRNA sense strand
gcacaguggagaugcccau

SEQ ID NO: 2241313 - RNA, 19 nt, Homo sapiens
  misc_RNA (1)...(19): siRNA sense strand
ggauagagaccacgccagu

SEQ ID NO: 2241314 - RNA, 19 nt, Homo sapiens
  misc_RNA (1)...(19): siRNA sense strand
ccauaaagcagaugaggca

SEQ ID NO: 2241315 - RNA, 19 nt, Homo sapiens
  misc_RNA (1)...(19): siRNA sense strand
gcgcagucgacgcaggaaa

SEQ ID NO: 2241316 - RNA, 19 nt, Homo sapiens
  misc_RNA (1)...(19): siRNA sense strand
cuuaagaaauugugugaac

SEQ ID NO: 2241317 - RNA, 19 nt, Homo sapiens
  misc_RNA (1)...(19): siRNA sense strand
ccacaaaacacggggacaa

SEQ ID NO: 2241318 - RNA, 19 nt, Homo sapiens
  misc_RNA (1)...(19): siRNA sense strand
guaauagaccagcaagcaa

SEQ ID NO: 2241319 - RNA, 19 nt, Homo sapiens
  misc_RNA (1)...(19): siRNA sense strand
cggccugguggacgagaaa

SEQ ID NO: 2241320 - RNA, 19 nt, Homo sapiens
  misc_RNA (1)...(19): siRNA sense strand
ugagagugaucgugcggau

SEQ ID NO: 2241321 - RNA, 19 nt, Homo sapiens
  misc_RNA (1)...(19): siRNA sense strand
cgcaggaaauccacgagaa

SEQ ID NO: 2241322 - RNA, 19 nt, Homo sapiens
  misc_RNA (1)...(19): siRNA sense strand
cgucugcagccguggaaga

SEQ ID NO: 2241323 - RNA, 19 nt, Homo sapiens
  misc_RNA (1)...(19): siRNA sense strand
cggaggaacacguggcugu

SEQ ID NO: 2241324 - RNA, 19 nt, Homo sapiens
  misc_RNA (1)...(19): siRNA sense strand
aguucaaggcccugagagu

SEQ ID NO: 2241325 - RNA, 19 nt, Homo sapiens
  misc_RNA (1)...(19): siRNA sense strand
gagcaggcgucacuggaga

SEQ ID NO: 2241326 - RNA, 19 nt, Homo sapiens
  misc_RNA (1)...(19): siRNA sense strand
acgagaaagccuuagcaca

SEQ ID NO: 2241327 - RNA, 19 nt, Homo sapiens
  misc_RNA (1)...(19): siRNA sense strand
aggaaauccacgagaaggu

SEQ ID NO: 2241328 - RNA, 19 nt, Homo sapiens
  misc_RNA (1)...(19): siRNA sense strand
cagaugaggcagggagcau

SEQ ID NO: 2241329 - RNA, 19 nt, Homo sapiens
  misc_RNA (1)...(19): siRNA sense strand
uaauagaccagcaagcaau

SEQ ID NO: 2241330 - RNA, 19 nt, Homo sapiens
  misc_RNA (1)...(19): siRNA sense strand
gaacauaaccaccaccuca

SEQ ID NO: 2241331 - RNA, 19 nt, Homo sapiens
  misc_RNA (1)...(19): siRNA sense strand
caauucauccugagcucaa

SEQ ID NO: 2241332 - RNA, 19 nt, Homo sapiens
  misc_RNA (1)...(19): siRNA sense strand
gaucaucccuggaggcauc

SEQ ID NO: 2241333 - RNA, 19 nt, Homo sapiens
  misc_RNA (1)...(19): siRNA sense strand
ccauaaagcagaugaggca

SEQ ID NO: 2241334 - RNA, 19 nt, Homo sapiens
  misc_RNA (1)...(19): siRNA sense strand
gcgcagucgacgcaggaaa

SEQ ID NO: 2241335 - RNA, 19 nt, Homo sapiens
  misc_RNA (1)...(19): siRNA sense strand
cuuaagaaauugugugaac

SEQ ID NO: 2241336 - RNA, 19 nt, Homo sapiens
  misc_RNA (1)...(19): siRNA sense strand
ccacaaaacacggggacaa

SEQ ID NO: 2241337 - RNA, 19 nt, Homo sapiens
  misc_RNA (1)...(19): siRNA sense strand
guaauagaccagcaagcaa

SEQ ID NO: 2241338 - RNA, 19 nt, Homo sapiens
  misc_RNA (1)...(19): siRNA sense strand
cggccugguggacgagaaa

SEQ ID NO: 2241339 - RNA, 19 nt, Homo sapiens
  misc_RNA (1)...(19): siRNA sense strand
ugagagugaucgugcggau

SEQ ID NO: 2241340 - RNA, 19 nt, Homo sapiens
  misc_RNA (1)...(19): siRNA sense strand
cgcaggaaauccacgagaa

SEQ ID NO: 2241341 - RNA, 19 nt, Homo sapiens
  misc_RNA (1)...(19): siRNA sense strand
cgucugcagccguggaaga

SEQ ID NO: 2241342 - RNA, 19 nt, Homo sapiens
  misc_RNA (1)...(19): siRNA sense strand
cggaggaacacguggcugu

SEQ ID NO: 2241343 - RNA, 19 nt, Homo sapiens
  misc_RNA (1)...(19): siRNA sense strand
aguucaaggcccugagagu

SEQ ID NO: 2241344 - RNA, 19 nt, Homo sapiens
  misc_RNA (1)...(19): siRNA sense strand
gagcaggcgucacuggaga

SEQ ID NO: 2241345 - RNA, 19 nt, Homo sapiens
  misc_RNA (1)...(19): siRNA sense strand
acgagaaagccuuagcaca

SEQ ID NO: 2241346 - RNA, 19 nt, Homo sapiens
  misc_RNA (1)...(19): siRNA sense strand
aggaaauccacgagaaggu

SEQ ID NO: 2241347 - RNA, 19 nt, Homo sapiens
  misc_RNA (1)...(19): siRNA sense strand
cagaugaggcagggagcau

SEQ ID NO: 2241348 - RNA, 19 nt, Homo sapiens
  misc_RNA (1)...(19): siRNA sense strand
uaauagaccagcaagcaau

SEQ ID NO: 2241349 - RNA, 19 nt, Homo sapiens
  misc_RNA (1)...(19): siRNA sense strand
gaacauaaccaccaccuca

SEQ ID NO: 2241350 - RNA, 19 nt, Homo sapiens
  misc_RNA (1)...(19): siRNA sense strand
caauucauccugagcucaa

SEQ ID NO: 2241351 - RNA, 19 nt, Homo sapiens
  misc_RNA (1)...(19): siRNA sense strand
gaucaucccuggaggcauc

SEQ ID NO: 2241352 - RNA, 19 nt, Homo sapiens
  misc_RNA (1)...(19): siRNA sense strand
agauuugacuggagggaca

SEQ ID NO: 2241353 - RNA, 19 nt, Homo sapiens
  misc_RNA (1)...(19): siRNA sense strand
cauauuggauugugcggaa

SEQ ID NO: 2241354 - RNA, 19 nt, Homo sapiens
  misc_RNA (1)...(19): siRNA sense strand
ccugaagaguuuaaagcca

SEQ ID NO: 2241355 - RNA, 19 nt, Homo sapiens
  misc_RNA (1)...(19): siRNA sense strand
cugaagaguuuaaagccau

SEQ ID NO: 2241356 - RNA, 19 nt, Homo sapiens
  misc_RNA (1)...(19): siRNA sense strand
ccaagaagaugaaauggca

SEQ ID NO: 2241357 - RNA, 19 nt, Homo sapiens
  misc_RNA (1)...(19): siRNA sense strand
caagaagaugaaauggcaa

SEQ ID NO: 2241358 - RNA, 19 nt, Homo sapiens
  misc_RNA (1)...(19): siRNA sense strand
gcucuaguggagaagcaaa

SEQ ID NO: 2241359 - RNA, 19 nt, Homo sapiens
  misc_RNA (1)...(19): siRNA sense strand
ugguuaugcccaugucaaa

SEQ ID NO: 2241360 - RNA, 19 nt, Homo sapiens
  misc_RNA (1)...(19): siRNA sense strand
gugaccaagaagaugaaau

SEQ ID NO: 2241361 - RNA, 19 nt, Homo sapiens
  misc_RNA (1)...(19): siRNA sense strand
cuuaauagacaucgauacu

SEQ ID NO: 2241362 - RNA, 19 nt, Homo sapiens
  misc_RNA (1)...(19): siRNA sense strand
ugucaaaaugggaaguaau

SEQ ID NO: 2241363 - RNA, 19 nt, Homo sapiens
  misc_RNA (1)...(19): siRNA sense strand
gcauaugacuucagugacc

SEQ ID NO: 2241364 - RNA, 19 nt, Homo sapiens
  misc_RNA (1)...(19): siRNA sense strand
gggcagagaaauaaggucu

SEQ ID NO: 2241365 - RNA, 19 nt, Homo sapiens
  misc_RNA (1)...(19): siRNA sense strand
agaacaacgagcacagaau

SEQ ID NO: 2241366 - RNA, 19 nt, Homo sapiens
  misc_RNA (1)...(19): siRNA sense strand
gagcaauaccuguggcauc

SEQ ID NO: 2241367 - RNA, 19 nt, Homo sapiens
  misc_RNA (1)...(19): siRNA sense strand
cugaagagccagaggaguc

SEQ ID NO: 2241368 - RNA, 19 nt, Homo sapiens
  misc_RNA (1)...(19): siRNA sense strand
aauaaggucugaagagcca

SEQ ID NO: 2241369 - RNA, 19 nt, Homo sapiens
  misc_RNA (1)...(19): siRNA sense strand
ggggauaugggcagagaca

SEQ ID NO: 2241370 - RNA, 19 nt, Homo sapiens
  misc_RNA (1)...(19): siRNA sense strand
cuguccugcugguggguuu

SEQ ID NO: 2241371 - RNA, 19 nt, Homo sapiens
  misc_RNA (1)...(19): siRNA sense strand
ggauauagagaaaggaaaa

SEQ ID NO: 2241372 - RNA, 19 nt, Homo sapiens
  misc_RNA (1)...(19): siRNA sense strand
gugcaaagaaagauaacaa

SEQ ID NO: 2241373 - RNA, 19 nt, Homo sapiens
  misc_RNA (1)...(19): siRNA sense strand
augcaaagaagaagggcaa

SEQ ID NO: 2241374 - RNA, 19 nt, Homo sapiens
  misc_RNA (1)...(19): siRNA sense strand
agcagaaauugguaagaaa

SEQ ID NO: 2241375 - RNA, 19 nt, Homo sapiens
  misc_RNA (1)...(19): siRNA sense strand
cuguaaaagcagaugaaaa

SEQ ID NO: 2241376 - RNA, 19 nt, Homo sapiens
  misc_RNA (1)...(19): siRNA sense strand
augcaaagaaagauagcaa

SEQ ID NO: 2241377 - RNA, 19 nt, Homo sapiens
  misc_RNA (1)...(19): siRNA sense strand
acucaaaggaugaugucaa

SEQ ID NO: 2241378 - RNA, 19 nt, Homo sapiens
  misc_RNA (1)...(19): siRNA sense strand
agaaggaugaggauggaaa

SEQ ID NO: 2241379 - RNA, 19 nt, Homo sapiens
  misc_RNA (1)...(19): siRNA sense strand
auucaaagaaggaugcaaa

SEQ ID NO: 2241380 - RNA, 19 nt, Homo sapiens
  misc_RNA (1)...(19): siRNA sense strand
ggauucaaacaaaggcaaa

SEQ ID NO: 2241381 - RNA, 19 nt, Homo sapiens
  misc_RNA (1)...(19): siRNA sense strand
aggauauagagaaaggaaa

SEQ ID NO: 2241382 - RNA, 19 nt, Homo sapiens
  misc_RNA (1)...(19): siRNA sense strand
agaaagaugcaaaggagau

SEQ ID NO: 2241383 - RNA, 19 nt, Homo sapiens
  misc_RNA (1)...(19): siRNA sense strand
agagaaaggaaaagaagaa

SEQ ID NO: 2241384 - RNA, 19 nt, Homo sapiens
  misc_RNA (1)...(19): siRNA sense strand
agaaaguugccaagaaaga

SEQ ID NO: 2241385 - RNA, 19 nt, Homo sapiens
  misc_RNA (1)...(19): siRNA sense strand
cuagaugcaaagaaagaua

SEQ ID NO: 2241386 - RNA, 19 nt, Homo sapiens
  misc_RNA (1)...(19): siRNA sense strand
augcaaagaaggaugaaaa

SEQ ID NO: 2241387 - RNA, 19 nt, Homo sapiens
  misc_RNA (1)...(19): siRNA sense strand
aggaaaagaagaaaagcua

SEQ ID NO: 2241388 - RNA, 19 nt, Homo sapiens
  misc_RNA (1)...(19): siRNA sense strand
agucagugaauuaagcaaa

SEQ ID NO: 2241389 - RNA, 19 nt, Homo sapiens
  misc_RNA (1)...(19): siRNA sense strand
gaaaagaagaaaagcuaga

SEQ ID NO: 2241390 - RNA, 19 nt, Homo sapiens
  misc_RNA (1)...(19): siRNA sense strand
augcuaagaaggaugcaaa

SEQ ID NO: 2241391 - RNA, 19 nt, Homo sapiens
  misc_RNA (1)...(19): siRNA sense strand
agaacaauuaagaggagau

SEQ ID NO: 2241392 - RNA, 19 nt, Homo sapiens
  misc_RNA (1)...(19): siRNA sense strand
ggacacaacagauucggaa

SEQ ID NO: 2241393 - RNA, 19 nt, Homo sapiens
  misc_RNA (1)...(19): siRNA sense strand
augaaaagaaggaugcaaa

SEQ ID NO: 2241394 - RNA, 19 nt, Homo sapiens
  misc_RNA (1)...(19): siRNA sense strand
agagaagggcaaagacuca

SEQ ID NO: 2241395 - RNA, 19 nt, Homo sapiens
  misc_RNA (1)...(19): siRNA sense strand
agaagaaugcaaagaagga

SEQ ID NO: 2241396 - RNA, 19 nt, Homo sapiens
  misc_RNA (1)...(19): siRNA sense strand
acagagaaagauagcaaaa

SEQ ID NO: 2241397 - RNA, 19 nt, Homo sapiens
  misc_RNA (1)...(19): siRNA sense strand
cugucgagguggauucuaa

SEQ ID NO: 2241398 - RNA, 19 nt, Homo sapiens
  misc_RNA (1)...(19): siRNA sense strand
ggugaugaaucgaaggaug

SEQ ID NO: 2241399 - RNA, 19 nt, Homo sapiens
  misc_RNA (1)...(19): siRNA sense strand
augccaagaaagaugcaaa

SEQ ID NO: 2241400 - RNA, 19 nt, Homo sapiens
  misc_RNA (1)...(19): siRNA sense strand
augucaagaaagagucuaa

SEQ ID NO: 2241401 - RNA, 19 nt, Homo sapiens
  misc_RNA (1)...(19): siRNA sense strand
ccauagaauuacaagcugu

SEQ ID NO: 2241402 - RNA, 19 nt, Homo sapiens
  misc_RNA (1)...(19): siRNA sense strand
aagaaagaugcaaaggaga

SEQ ID NO: 2241403 - RNA, 19 nt, Homo sapiens
  misc_RNA (1)...(19): siRNA sense strand
gcaaagaagaagggcaagu

SEQ ID NO: 2241404 - RNA, 19 nt, Homo sapiens
  misc_RNA (1)...(19): siRNA sense strand
gaaagaugcaaaggagauu

SEQ ID NO: 2241405 - RNA, 19 nt, Homo sapiens
  misc_RNA (1)...(19): siRNA sense strand
aagacaacacagaaggaca

SEQ ID NO: 2241406 - RNA, 19 nt, Homo sapiens
  misc_RNA (1)...(19): siRNA sense strand
agcuagaugcaaagaaaga

SEQ ID NO: 2241407 - RNA, 19 nt, Homo sapiens
  misc_RNA (1)...(19): siRNA sense strand
gcagagaagggcaaagacu

SEQ ID NO: 2241408 - RNA, 19 nt, Homo sapiens
  misc_RNA (1)...(19): siRNA sense strand
ccaagaaagaugcaaagga

SEQ ID NO: 2241409 - RNA, 19 nt, Homo sapiens
  misc_RNA (1)...(19): siRNA sense strand
aaggauauagagaaaggaa

SEQ ID NO: 2241410 - RNA, 19 nt, Homo sapiens
  misc_RNA (1)...(19): siRNA sense strand
aaacaaaggaucuggguca

SEQ ID NO: 2241411 - RNA, 19 nt, Homo sapiens
  misc_RNA (1)...(19): siRNA sense strand
cugaaaagacagaugaaua

SEQ ID NO: 2241412 - RNA, 19 nt, Homo sapiens
  misc_RNA (1)...(19): siRNA sense strand
agaucaaggaugugaaaga

SEQ ID NO: 2241413 - RNA, 19 nt, Homo sapiens
  misc_RNA (1)...(19): siRNA sense strand
agauagaggaagccagcaa

SEQ ID NO: 2241414 - RNA, 19 nt, Homo sapiens
  misc_RNA (1)...(19): siRNA sense strand
aggaagaggcagaaggacu

SEQ ID NO: 2241415 - RNA, 19 nt, Homo sapiens
  misc_RNA (1)...(19): siRNA sense strand
ggguaauagagcaugaaca

SEQ ID NO: 2241416 - RNA, 19 nt, Homo sapiens
  misc_RNA (1)...(19): siRNA sense strand
gggucuaggugguguaacu

SEQ ID NO: 2241417 - RNA, 19 nt, Homo sapiens
  misc_RNA (1)...(19): siRNA sense strand
ccacaugacuccauagcca

SEQ ID NO: 2241418 - RNA, 19 nt, Homo sapiens
  misc_RNA (1)...(19): siRNA sense strand
ccagcaaagcaguugagaa

SEQ ID NO: 2241419 - RNA, 19 nt, Homo sapiens
  misc_RNA (1)...(19): siRNA sense strand
caacaagcccuuuggggaa

SEQ ID NO: 2241420 - RNA, 19 nt, Homo sapiens
  misc_RNA (1)...(19): siRNA sense strand
ugacaaugcauuugagaac

SEQ ID NO: 2241421 - RNA, 19 nt, Homo sapiens
  misc_RNA (1)...(19): siRNA sense strand
aagaaagagaauucgagua

SEQ ID NO: 2241422 - RNA, 19 nt, Homo sapiens
  misc_RNA (1)...(19): siRNA sense strand
acucugaaaucgacaccaa

SEQ ID NO: 2241423 - RNA, 19 nt, Homo sapiens
  misc_RNA (1)...(19): siRNA sense strand
ccaaacuaacaaacugaaa

SEQ ID NO: 2241424 - RNA, 19 nt, Homo sapiens
  misc_RNA (1)...(19): siRNA sense strand
ccagaucagaagaaagaga

SEQ ID NO: 2241425 - RNA, 19 nt, Homo sapiens
  misc_RNA (1)...(19): siRNA sense strand
agaucagaagaaagagaau

SEQ ID NO: 2241426 - RNA, 19 nt, Homo sapiens
  misc_RNA (1)...(19): siRNA sense strand
gguguugaccagauggauu

SEQ ID NO: 2241427 - RNA, 19 nt, Homo sapiens
  misc_RNA (1)...(19): siRNA sense strand
caaaccaggaagaggcaga

SEQ ID NO: 2241428 - RNA, 19 nt, Homo sapiens
  misc_RNA (1)...(19): siRNA sense strand
augaugacuuugaugcuaa

SEQ ID NO: 2241429 - RNA, 19 nt, Homo sapiens
  misc_RNA (1)...(19): siRNA sense strand
uggaaauccuuuugccuaa

SEQ ID NO: 2241430 - RNA, 19 nt, Homo sapiens
  misc_RNA (1)...(19): siRNA sense strand
uagcaagguucaaaggcga

SEQ ID NO: 2241431 - RNA, 19 nt, Homo sapiens
  misc_RNA (1)...(19): siRNA sense strand
gcugauuggcauugaugau

SEQ ID NO: 2241432 - RNA, 19 nt, Homo sapiens
  misc_RNA (1)...(19): siRNA sense strand
guguugaccagauggauuu

SEQ ID NO: 2241433 - RNA, 19 nt, Homo sapiens
  misc_RNA (1)...(19): siRNA sense strand
gauaaagagaucaaggaug

SEQ ID NO: 2241434 - RNA, 19 nt, Homo sapiens
  misc_RNA (1)...(19): siRNA sense strand
gcauugaugaugugccaga

SEQ ID NO: 2241435 - RNA, 19 nt, Homo sapiens
  misc_RNA (1)...(19): siRNA sense strand
cuccagaucagaagaaaga

SEQ ID NO: 2241436 - RNA, 19 nt, Homo sapiens
  misc_RNA (1)...(19): siRNA sense strand
aaauauaaggccaagcuga

SEQ ID NO: 2241437 - RNA, 19 nt, Homo sapiens
  misc_RNA (1)...(19): siRNA sense strand
augaugaaacuaaagggaa

SEQ ID NO: 2241438 - RNA, 19 nt, Homo sapiens
  misc_RNA (1)...(19): siRNA sense strand
ggaccauggaacacagcau

SEQ ID NO: 2241439 - RNA, 19 nt, Homo sapiens
  misc_RNA (1)...(19): siRNA sense strand
ucugagauguauagggauc

SEQ ID NO: 2241440 - RNA, 19 nt, Homo sapiens
  misc_RNA (1)...(19): siRNA sense strand
gcacccucaaagaaggaaa

SEQ ID NO: 2241441 - RNA, 19 nt, Homo sapiens
  misc_RNA (1)...(19): siRNA sense strand
agagaucaaggaugugaaa

SEQ ID NO: 2241442 - RNA, 19 nt, Homo sapiens
  misc_RNA (1)...(19): siRNA sense strand
aucaaggaugugaaagaaa

SEQ ID NO: 2241443 - RNA, 19 nt, Homo sapiens
  misc_RNA (1)...(19): siRNA sense strand
aaagagaacagaacggcuu

SEQ ID NO: 2241444 - RNA, 19 nt, Homo sapiens
  misc_RNA (1)...(19): siRNA sense strand
cugacaaugcauuugagaa

SEQ ID NO: 2241445 - RNA, 19 nt, Homo sapiens
  misc_RNA (1)...(19): siRNA sense strand
aauauaaggccaagcugau

SEQ ID NO: 2241446 - RNA, 19 nt, Homo sapiens
  misc_RNA (1)...(19): siRNA sense strand
aggagaaugcagaccauga

SEQ ID NO: 2241447 - RNA, 19 nt, Homo sapiens
  misc_RNA (1)...(19): siRNA sense strand
gaugaauaucuccuagcaa

SEQ ID NO: 2241448 - RNA, 19 nt, Homo sapiens
  misc_RNA (1)...(19): siRNA sense strand
gaugagaaaacugggguaa

SEQ ID NO: 2241449 - RNA, 19 nt, Homo sapiens
  misc_RNA (1)...(19): siRNA sense strand
cuacagcccugcagcccaa

SEQ ID NO: 2241450 - RNA, 19 nt, Homo sapiens
  misc_RNA (1)...(19): siRNA sense strand
cuaacgaaguagaaacaag

SEQ ID NO: 2241451 - RNA, 19 nt, Homo sapiens
  misc_RNA (1)...(19): siRNA sense strand
cagaucagaagaaagagaa

SEQ ID NO: 2241452 - RNA, 19 nt, Homo sapiens
  misc_RNA (1)...(19): siRNA sense strand
cuucugagauguauaggga

SEQ ID NO: 2241453 - RNA, 19 nt, Homo sapiens
  misc_RNA (1)...(19): siRNA sense strand
agaucaacccacagaacaa

SEQ ID NO: 2241454 - RNA, 19 nt, Homo sapiens
  misc_RNA (1)...(19): siRNA sense strand
gaagaguacuugagcucca

SEQ ID NO: 2241455 - RNA, 19 nt, Homo sapiens
  misc_RNA (1)...(19): siRNA sense strand
ugaaguugcuggacgcgua

SEQ ID NO: 2241456 - RNA, 19 nt, Homo sapiens
  misc_RNA (1)...(19): siRNA sense strand
gccugagaauacagaucaa

SEQ ID NO: 2241457 - RNA, 19 nt, Homo sapiens
  misc_RNA (1)...(19): siRNA sense strand
gaauacagaucaacccaca

SEQ ID NO: 2241458 - RNA, 19 nt, Homo sapiens
  misc_RNA (1)...(19): siRNA sense strand
ggacgaugcugauggacga

SEQ ID NO: 2241459 - RNA, 19 nt, Homo sapiens
  misc_RNA (1)...(19): siRNA sense strand
gggaagaggagccuggcaa

SEQ ID NO: 2241460 - RNA, 19 nt, Homo sapiens
  misc_RNA (1)...(19): siRNA sense strand
ggguccaggcagagagaca

SEQ ID NO: 2241461 - RNA, 19 nt, Homo sapiens
  misc_RNA (1)...(19): siRNA sense strand
agaucgugcagaugaguaa

SEQ ID NO: 2241462 - RNA, 19 nt, Homo sapiens
  misc_RNA (1)...(19): siRNA sense strand
ccgagagucccgagagcuu

SEQ ID NO: 2241463 - RNA, 19 nt, Homo sapiens
  misc_RNA (1)...(19): siRNA sense strand
gccugaagcacgugaggau

SEQ ID NO: 2241464 - RNA, 19 nt, Homo sapiens
  misc_RNA (1)...(19): siRNA sense strand
gcagagagacacaggcaac

SEQ ID NO: 2241465 - RNA, 19 nt, Homo sapiens
  misc_RNA (1)...(19): siRNA sense strand
ccgugguguccgugaguca

SEQ ID NO: 2241466 - RNA, 19 nt, Homo sapiens
  misc_RNA (1)...(19): siRNA sense strand
aggaugggcaccaggauca

SEQ ID NO: 2241467 - RNA, 19 nt, Homo sapiens
  misc_RNA (1)...(19): siRNA sense strand
aggugcacaugcugaggaa

SEQ ID NO: 2241468 - RNA, 19 nt, Homo sapiens
  misc_RNA (1)...(19): siRNA sense strand
cagagaacgacacggcaga

SEQ ID NO: 2241469 - RNA, 19 nt, Homo sapiens
  misc_RNA (1)...(19): siRNA sense strand
acgacaucuucgagaacaa

SEQ ID NO: 2241470 - RNA, 19 nt, Homo sapiens
  misc_RNA (1)...(19): siRNA sense strand
acaucaugcugcuggacaa

SEQ ID NO: 2241471 - RNA, 19 nt, Homo sapiens
  misc_RNA (1)...(19): siRNA sense strand
aggaggacguggaggacca

SEQ ID NO: 2241472 - RNA, 19 nt, Homo sapiens
  misc_RNA (1)...(19): siRNA sense strand
aggagaagcugcagggcgu

SEQ ID NO: 2241473 - RNA, 19 nt, Homo sapiens
  misc_RNA (1)...(19): siRNA sense strand
agaucgagcgggaggugaa

SEQ ID NO: 2241474 - RNA, 19 nt, Homo sapiens
  misc_RNA (1)...(19): siRNA sense strand
gugaacauccugcgggaga

SEQ ID NO: 2241475 - RNA, 19 nt, Homo sapiens
  misc_RNA (1)...(19): siRNA sense strand
ccgccaucuacgaggagaa

SEQ ID NO: 2241476 - RNA, 19 nt, Homo sapiens
  misc_RNA (1)...(19): siRNA sense strand
uggacaagaacgugcccaa

SEQ ID NO: 2241477 - RNA, 19 nt, Homo sapiens
  misc_RNA (1)...(19): siRNA sense strand
ccaucuacgaggagaagga

SEQ ID NO: 2241478 - RNA, 19 nt, Homo sapiens
  misc_RNA (1)...(19): siRNA sense strand
agaaagagucgcugacgga

SEQ ID NO: 2241479 - RNA, 19 nt, Homo sapiens
  misc_RNA (1)...(19): siRNA sense strand
gcaaggaguacgcagccaa

SEQ ID NO: 2241480 - RNA, 19 nt, Homo sapiens
  misc_RNA (1)...(19): siRNA sense strand
acgacuucgacgaggagua

SEQ ID NO: 2241481 - RNA, 19 nt, Homo sapiens
  misc_RNA (1)...(19): siRNA sense strand
acgaggaguacuucagcaa

SEQ ID NO: 2241482 - RNA, 19 nt, Homo sapiens
  misc_RNA (1)...(19): siRNA sense strand
acaucucagccgugaacua

SEQ ID NO: 2241483 - RNA, 19 nt, Homo sapiens
  misc_RNA (1)...(19): siRNA sense strand
acgccgacuucgagcgcuu

SEQ ID NO: 2241484 - RNA, 19 nt, Homo sapiens
  misc_RNA (1)...(19): siRNA sense strand
aggacguggaggaccauua

SEQ ID NO: 2241485 - RNA, 19 nt, Homo sapiens
  misc_RNA (1)...(19): siRNA sense strand
guucaugagaggagaagaa

SEQ ID NO: 2241486 - RNA, 19 nt, Homo sapiens
  misc_RNA (1)...(19): siRNA sense strand
uggaauugauuuggagaaa

SEQ ID NO: 2241487 - RNA, 19 nt, Homo sapiens
  misc_RNA (1)...(19): siRNA sense strand
ggcagaaggagaagaggaa

SEQ ID NO: 2241488 - RNA, 19 nt, Homo sapiens
  misc_RNA (1)...(19): siRNA sense strand
ggucauuugguaaaggaaa

SEQ ID NO: 2241489 - RNA, 19 nt, Homo sapiens
  misc_RNA (1)...(19): siRNA sense strand
ucauacaagcagagcuaaa

SEQ ID NO: 2241490 - RNA, 19 nt, Homo sapiens
  misc_RNA (1)...(19): siRNA sense strand
gagaaaagugaaucagaaa

SEQ ID NO: 2241491 - RNA, 19 nt, Homo sapiens
  misc_RNA (1)...(19): siRNA sense strand
gucaggagcucaaagaaua

SEQ ID NO: 2241492 - RNA, 19 nt, Homo sapiens
  misc_RNA (1)...(19): siRNA sense strand
augaaaagcuguuggguca

SEQ ID NO: 2241493 - RNA, 19 nt, Homo sapiens
  misc_RNA (1)...(19): siRNA sense strand
cagugaaggaggagccaau

SEQ ID NO: 2241494 - RNA, 19 nt, Homo sapiens
  misc_RNA (1)...(19): siRNA sense strand
ugaugaaguuguuugggua

SEQ ID NO: 2241495 - RNA, 19 nt, Homo sapiens
  misc_RNA (1)...(19): siRNA sense strand
aggagaagaggaaggaaga

SEQ ID NO: 2241496 - RNA, 19 nt, Homo sapiens
  misc_RNA (1)...(19): siRNA sense strand
acgaaguuauggaagaaau

SEQ ID NO: 2241497 - RNA, 19 nt, Homo sapiens
  misc_RNA (1)...(19): siRNA sense strand
auucaaaggacuucaagaa

SEQ ID NO: 2241498 - RNA, 19 nt, Homo sapiens
  misc_RNA (1)...(19): siRNA sense strand
ggguuagagacuugacaau

SEQ ID NO: 2241499 - RNA, 19 nt, Homo sapiens
  misc_RNA (1)...(19): siRNA sense strand
cggcggaagauuaugcuaa

SEQ ID NO: 2241500 - RNA, 19 nt, Homo sapiens
  misc_RNA (1)...(19): siRNA sense strand
agucauugaucuuaggaca

SEQ ID NO: 2241501 - RNA, 19 nt, Homo sapiens
  misc_RNA (1)...(19): siRNA sense strand
cgaaguuauggaagaaauu

SEQ ID NO: 2241502 - RNA, 19 nt, Homo sapiens
  misc_RNA (1)...(19): siRNA sense strand
agucgaaaugggagaugaa

SEQ ID NO: 2241503 - RNA, 19 nt, Homo sapiens
  misc_RNA (1)...(19): siRNA sense strand
caguccaacucuuacgaua

SEQ ID NO: 2241504 - RNA, 19 nt, Homo sapiens
  misc_RNA (1)...(19): siRNA sense strand
ugucaggagcucaaagaau

SEQ ID NO: 2241505 - RNA, 19 nt, Homo sapiens
  misc_RNA (1)...(19): siRNA sense strand
agauuagacaacagaguca

SEQ ID NO: 2241506 - RNA, 19 nt, Homo sapiens
  misc_RNA (1)...(19): siRNA sense strand
acaucaacaaagagagcau

SEQ ID NO: 2241507 - RNA, 19 nt, Homo sapiens
  misc_RNA (1)...(19): siRNA sense strand
agcaagacguugaguuaca

SEQ ID NO: 2241508 - RNA, 19 nt, Homo sapiens
  misc_RNA (1)...(19): siRNA sense strand
ggauacaagauuagacaac

SEQ ID NO: 2241509 - RNA, 19 nt, Homo sapiens
  misc_RNA (1)...(19): siRNA sense strand
ucgaaaugggagaugaaga

SEQ ID NO: 2241510 - RNA, 19 nt, Homo sapiens
  misc_RNA (1)...(19): siRNA sense strand
gucauuugguaaaggaaaa

SEQ ID NO: 2241511 - RNA, 19 nt, Homo sapiens
  misc_RNA (1)...(19): siRNA sense strand
ccaaacaguccaacucuua

SEQ ID NO: 2241512 - RNA, 19 nt, Homo sapiens
  misc_RNA (1)...(19): siRNA sense strand
cggaagauuaugcuaaaga

SEQ ID NO: 2241513 - RNA, 19 nt, Homo sapiens
  misc_RNA (1)...(19): siRNA sense strand
aguuacauguucagaagau

SEQ ID NO: 2241514 - RNA, 19 nt, Homo sapiens
  misc_RNA (1)...(19): siRNA sense strand
aggcagaaggagaagagga

SEQ ID NO: 2241515 - RNA, 19 nt, Homo sapiens
  misc_RNA (1)...(19): siRNA sense strand
cugcuaacagagagagcuu

SEQ ID NO: 2241516 - RNA, 19 nt, Homo sapiens
  misc_RNA (1)...(19): siRNA sense strand
gagcuuuacaucauggaau

SEQ ID NO: 2241517 - RNA, 19 nt, Homo sapiens
  misc_RNA (1)...(19): siRNA sense strand
caaagagagcauuguggau

SEQ ID NO: 2241518 - RNA, 19 nt, Homo sapiens
  misc_RNA (1)...(19): siRNA sense strand
gguuaaauuugcugccaac

SEQ ID NO: 2241519 - RNA, 19 nt, Homo sapiens
  misc_RNA (1)...(19): siRNA sense strand
accacgaaguuauggaaga

SEQ ID NO: 2241520 - RNA, 19 nt, Homo sapiens
  misc_RNA (1)...(19): siRNA sense strand
ugagaggagaagaaauauu

SEQ ID NO: 2241521 - RNA, 19 nt, Homo sapiens
  misc_RNA (1)...(19): siRNA sense strand
ggaauugauuuggagaaaa

SEQ ID NO: 2241522 - RNA, 19 nt, Homo sapiens
  misc_RNA (1)...(19): siRNA sense strand
guacaaauauucaaaggac

SEQ ID NO: 2241523 - RNA, 19 nt, Homo sapiens
  misc_RNA (1)...(19): siRNA sense strand
caagcagagcuaaagggaa

SEQ ID NO: 2241524 - RNA, 19 nt, Homo sapiens
  misc_RNA (1)...(19): siRNA sense strand
ugguaaaggaaaaguauga

SEQ ID NO: 2241525 - RNA, 19 nt, Homo sapiens
  misc_RNA (1)...(19): siRNA sense strand
cuaaagggaaacagugcuu

SEQ ID NO: 2241526 - RNA, 19 nt, Homo sapiens
  misc_RNA (1)...(19): siRNA sense strand
cgaaaugggagaugaagac

SEQ ID NO: 2241527 - RNA, 19 nt, Homo sapiens
  misc_RNA (1)...(19): siRNA sense strand
ucaugagaggagaagaaau

SEQ ID NO: 2241528 - RNA, 19 nt, Homo sapiens
  misc_RNA (1)...(19): siRNA sense strand
ugguuaaauuugcugccaa

SEQ ID NO: 2241529 - RNA, 19 nt, Homo sapiens
  misc_RNA (1)...(19): siRNA sense strand
gugaauaaacaguucccau

SEQ ID NO: 2241530 - RNA, 19 nt, Homo sapiens
  misc_RNA (1)...(19): siRNA sense strand
agcuuuacaucauggaauu

SEQ ID NO: 2241531 - RNA, 19 nt, Homo sapiens
  misc_RNA (1)...(19): siRNA sense strand
ugggagaccaugcaagcaa

SEQ ID NO: 2241532 - RNA, 19 nt, Homo sapiens
  misc_RNA (1)...(19): siRNA sense strand
auggaauugauuuggagaa

SEQ ID NO: 2241533 - RNA, 19 nt, Homo sapiens
  misc_RNA (1)...(19): siRNA sense strand
ggaagaaauugcugacacc

SEQ ID NO: 2241534 - RNA, 19 nt, Homo sapiens
  misc_RNA (1)...(19): siRNA sense strand
ccaagaaaucccaaacagu

SEQ ID NO: 2241535 - RNA, 19 nt, Homo sapiens
  misc_RNA (1)...(19): siRNA sense strand
aguccaacucuuacgauau

SEQ ID NO: 2241536 - RNA, 19 nt, Homo sapiens
  misc_RNA (1)...(19): siRNA sense strand
ccgcaagagucaggagaag

SEQ ID NO: 2241537 - RNA, 19 nt, Homo sapiens
  misc_RNA (1)...(19): siRNA sense strand
gcauuggauuggaacgagu

SEQ ID NO: 2241538 - RNA, 19 nt, Homo sapiens
  misc_RNA (1)...(19): siRNA sense strand
gcauaauguucgucagacc

SEQ ID NO: 2241539 - RNA, 19 nt, Homo sapiens
  misc_RNA (1)...(19): siRNA sense strand
caggauacaagauuagaca

SEQ ID NO: 2241540 - RNA, 19 nt, Homo sapiens
  misc_RNA (1)...(19): siRNA sense strand
cuauauaagcaaaugugca

SEQ ID NO: 2241541 - RNA, 19 nt, Homo sapiens
  misc_RNA (1)...(19): siRNA sense strand
gggaagcuggagucgaaau

SEQ ID NO: 2241542 - RNA, 19 nt, Homo sapiens
  misc_RNA (1)...(19): siRNA sense strand
auaaauauccauuggcugu

SEQ ID NO: 2241543 - RNA, 19 nt, Homo sapiens
  misc_RNA (1)...(19): siRNA sense strand
aggagaagaaauauuguca

SEQ ID NO: 2241544 - RNA, 19 nt, Homo sapiens
  misc_RNA (1)...(19): siRNA sense strand
cagugaaagaagugaagau

SEQ ID NO: 2241545 - RNA, 19 nt, Homo sapiens
  misc_RNA (1)...(19): siRNA sense strand
agaagauaguagaaucaca

SEQ ID NO: 2241546 - RNA, 19 nt, Homo sapiens
  misc_RNA (1)...(19): siRNA sense strand
uuuagaagaagucgggcaa

SEQ ID NO: 2241547 - RNA, 19 nt, Homo sapiens
  misc_RNA (1)...(19): siRNA sense strand
acguggaugugcagaagau

SEQ ID NO: 2241548 - RNA, 19 nt, Homo sapiens
  misc_RNA (1)...(19): siRNA sense strand
aggaauugauguuaggaug

SEQ ID NO: 2241549 - RNA, 19 nt, Homo sapiens
  misc_RNA (1)...(19): siRNA sense strand
ccugaaacuccaaacucaa

SEQ ID NO: 2241550 - RNA, 19 nt, Homo sapiens
  misc_RNA (1)...(19): siRNA sense strand
cggcuuauucagcuguuaa

SEQ ID NO: 2241551 - RNA, 19 nt, Homo sapiens
  misc_RNA (1)...(19): siRNA sense strand
gugcagaagauaguagaau

SEQ ID NO: 2241552 - RNA, 19 nt, Homo sapiens
  misc_RNA (1)...(19): siRNA sense strand
cuguuaacuaccacuguaa

SEQ ID NO: 2241553 - RNA, 19 nt, Homo sapiens
  misc_RNA (1)...(19): siRNA sense strand
agguguugguggaggcuau

SEQ ID NO: 2241554 - RNA, 19 nt, Homo sapiens
  misc_RNA (1)...(19): siRNA sense strand
cgagguggcuuuagaggca

SEQ ID NO: 2241555 - RNA, 19 nt, Homo sapiens
  misc_RNA (1)...(19): siRNA sense strand
gggcuauauccaucgaaau

SEQ ID NO: 2241556 - RNA, 19 nt, Homo sapiens
  misc_RNA (1)...(19): siRNA sense strand
guaaaugaacguaugcuga

SEQ ID NO: 2241557 - RNA, 19 nt, Homo sapiens
  misc_RNA (1)...(19): siRNA sense strand
ugcuagaauggguggagaa

SEQ ID NO: 2241558 - RNA, 19 nt, Homo sapiens
  misc_RNA (1)...(19): siRNA sense strand
aguggaggcuacagaggau

SEQ ID NO: 2241559 - RNA, 19 nt, Homo sapiens
  misc_RNA (1)...(19): siRNA sense strand
ccuuaugauuggcaguaca

SEQ ID NO: 2241560 - RNA, 19 nt, Homo sapiens
  misc_RNA (1)...(19): siRNA sense strand
aguucagcucaaagagauu

SEQ ID NO: 2241561 - RNA, 19 nt, Homo sapiens
  misc_RNA (1)...(19): siRNA sense strand
agguguugguggaggcuau

SEQ ID NO: 2241562 - RNA, 19 nt, Homo sapiens
  misc_RNA (1)...(19): siRNA sense strand
cgagguggcuuuagaggca

SEQ ID NO: 2241563 - RNA, 19 nt, Homo sapiens
  misc_RNA (1)...(19): siRNA sense strand
guaaaugaacguaugcuga

SEQ ID NO: 2241564 - RNA, 19 nt, Homo sapiens
  misc_RNA (1)...(19): siRNA sense strand
aguggaggcuacagaggau

SEQ ID NO: 2241565 - RNA, 19 nt, Homo sapiens
  misc_RNA (1)...(19): siRNA sense strand
ccuuaugauuggcaguaca

SEQ ID NO: 2241566 - RNA, 19 nt, Homo sapiens
  misc_RNA (1)...(19): siRNA sense strand
gugaagaggaagagggaga

SEQ ID NO: 2241567 - RNA, 19 nt, Homo sapiens
  misc_RNA (1)...(19): siRNA sense strand
cagaaugguuggugaaaau

SEQ ID NO: 2241568 - RNA, 19 nt, Homo sapiens
  misc_RNA (1)...(19): siRNA sense strand
gggagaaagaaaaggagaa

SEQ ID NO: 2241569 - RNA, 19 nt, Homo sapiens
  misc_RNA (1)...(19): siRNA sense strand
cuccagaaccagagagaga

SEQ ID NO: 2241570 - RNA, 19 nt, Homo sapiens
  misc_RNA (1)...(19): siRNA sense strand
cuuaacuggucaagaggaa

SEQ ID NO: 2241571 - RNA, 19 nt, Homo sapiens
  misc_RNA (1)...(19): siRNA sense strand
guacagacaucaagccaga

SEQ ID NO: 2241572 - RNA, 19 nt, Homo sapiens
  misc_RNA (1)...(19): siRNA sense strand
guaagagaauaaagcguga

SEQ ID NO: 2241573 - RNA, 19 nt, Homo sapiens
  misc_RNA (1)...(19): siRNA sense strand
uagaggagauagagagcga

SEQ ID NO: 2241574 - RNA, 19 nt, Homo sapiens
  misc_RNA (1)...(19): siRNA sense strand
cuuuaaaugaugauggaga

SEQ ID NO: 2241575 - RNA, 19 nt, Homo sapiens
  misc_RNA (1)...(19): siRNA sense strand
cagacuuuacacagagaaa

SEQ ID NO: 2241576 - RNA, 19 nt, Homo sapiens
  misc_RNA (1)...(19): siRNA sense strand
ggaaguuguaagacagaga

SEQ ID NO: 2241577 - RNA, 19 nt, Homo sapiens
  misc_RNA (1)...(19): siRNA sense strand
ggaaauugaugaagccugu

SEQ ID NO: 2241578 - RNA, 19 nt, Homo sapiens
  misc_RNA (1)...(19): siRNA sense strand
guuugggaauacaaggaua

SEQ ID NO: 2241579 - RNA, 19 nt, Homo sapiens
  misc_RNA (1)...(19): siRNA sense strand
guauaugacugaugggaug

SEQ ID NO: 2241580 - RNA, 19 nt, Homo sapiens
  misc_RNA (1)...(19): siRNA sense strand
cccugaaguuggugacauu

SEQ ID NO: 2241581 - RNA, 19 nt, Homo sapiens
  misc_RNA (1)...(19): siRNA sense strand
agaacgugauagaggagau

SEQ ID NO: 2241582 - RNA, 19 nt, Homo sapiens
  misc_RNA (1)...(19): siRNA sense strand
aagacagagaucagauuua

SEQ ID NO: 2241583 - RNA, 19 nt, Homo sapiens
  misc_RNA (1)...(19): siRNA sense strand
cgaacagggcauuacuuaa

SEQ ID NO: 2241584 - RNA, 19 nt, Homo sapiens
  misc_RNA (1)...(19): siRNA sense strand
gaggagauagagagcgaga

SEQ ID NO: 2241585 - RNA, 19 nt, Homo sapiens
  misc_RNA (1)...(19): siRNA sense strand
agaccgagaacgugauaga

SEQ ID NO: 2241586 - RNA, 19 nt, Homo sapiens
  misc_RNA (1)...(19): siRNA sense strand
gagagagggagaaagaaaa

SEQ ID NO: 2241587 - RNA, 19 nt, Homo sapiens
  misc_RNA (1)...(19): siRNA sense strand
agaaagaaaaggagaagga

SEQ ID NO: 2241588 - RNA, 19 nt, Homo sapiens
  misc_RNA (1)...(19): siRNA sense strand
ccagaaccagagagagauu

SEQ ID NO: 2241589 - RNA, 19 nt, Homo sapiens
  misc_RNA (1)...(19): siRNA sense strand
guucagugguguuaugaca

SEQ ID NO: 2241590 - RNA, 19 nt, Homo sapiens
  misc_RNA (1)...(19): siRNA sense strand
aagaaaaggagaaggaguu

SEQ ID NO: 2241591 - RNA, 19 nt, Homo sapiens
  misc_RNA (1)...(19): siRNA sense strand
agugugaagcaaagagaca

SEQ ID NO: 2241592 - RNA, 19 nt, Homo sapiens
  misc_RNA (1)...(19): siRNA sense strand
gaagccuguaagagaauaa

SEQ ID NO: 2241593 - RNA, 19 nt, Homo sapiens
  misc_RNA (1)...(19): siRNA sense strand
uugcgaaacagaaggucua

SEQ ID NO: 2241594 - RNA, 19 nt, Homo sapiens
  misc_RNA (1)...(19): siRNA sense strand
cccuggaacuuuugaauua

SEQ ID NO: 2241595 - RNA, 19 nt, Homo sapiens
  misc_RNA (1)...(19): siRNA sense strand
agaccgggaucgugaagau

SEQ ID NO: 2241596 - RNA, 19 nt, Homo sapiens
  misc_RNA (1)...(19): siRNA sense strand
agcaauuggaagaaaggua

SEQ ID NO: 2241597 - RNA, 19 nt, Homo sapiens
  misc_RNA (1)...(19): siRNA sense strand
guuauaguuaugagcgcua

SEQ ID NO: 2241598 - RNA, 19 nt, Homo sapiens
  misc_RNA (1)...(19): siRNA sense strand
aagaaagguaguuguguca

SEQ ID NO: 2241599 - RNA, 19 nt, Homo sapiens
  misc_RNA (1)...(19): siRNA sense strand
cuaaagaucgagaccgaga

SEQ ID NO: 2241600 - RNA, 19 nt, Homo sapiens
  misc_RNA (1)...(19): siRNA sense strand
auagagagcgagagaggga

SEQ ID NO: 2241601 - RNA, 19 nt, Homo sapiens
  misc_RNA (1)...(19): siRNA sense strand
caauagauggugugguguu

SEQ ID NO: 2241602 - RNA, 19 nt, Homo sapiens
  misc_RNA (1)...(19): siRNA sense strand
gugauagaggagauagaga

SEQ ID NO: 2241603 - RNA, 19 nt, Homo sapiens
  misc_RNA (1)...(19): siRNA sense strand
acgugauagaggagauaga

SEQ ID NO: 2241604 - RNA, 19 nt, Homo sapiens
  misc_RNA (1)...(19): siRNA sense strand
ucaacaaaugcuaugcuua

SEQ ID NO: 2241605 - RNA, 19 nt, Homo sapiens
  misc_RNA (1)...(19): siRNA sense strand
cugaaguuggugacauuaa

SEQ ID NO: 2241606 - RNA, 19 nt, Homo sapiens
  misc_RNA (1)...(19): siRNA sense strand
gcaaagggcuggucgagcu

SEQ ID NO: 2241607 - RNA, 19 nt, Homo sapiens
  misc_RNA (1)...(19): siRNA sense strand
gcuucagacuuuacacaga

SEQ ID NO: 2241608 - RNA, 19 nt, Homo sapiens
  misc_RNA (1)...(19): siRNA sense strand
aaaacagaauggagcaauu

SEQ ID NO: 2241609 - RNA, 19 nt, Homo sapiens
  misc_RNA (1)...(19): siRNA sense strand
gugugguguuugugauuga

SEQ ID NO: 2241610 - RNA, 19 nt, Homo sapiens
  misc_RNA (1)...(19): siRNA sense strand
ccgagaacgugauagagga

SEQ ID NO: 2241611 - RNA, 19 nt, Homo sapiens
  misc_RNA (1)...(19): siRNA sense strand
uaacuggucaagaggaaau

SEQ ID NO: 2241612 - RNA, 19 nt, Homo sapiens
  misc_RNA (1)...(19): siRNA sense strand
agcgagagagggagaaaga

SEQ ID NO: 2241613 - RNA, 19 nt, Homo sapiens
  misc_RNA (1)...(19): siRNA sense strand
ccagaaugguuggugaaaa

SEQ ID NO: 2241614 - RNA, 19 nt, Homo sapiens
  misc_RNA (1)...(19): siRNA sense strand
ccuuuguacugguugguga

SEQ ID NO: 2241615 - RNA, 19 nt, Homo sapiens
  misc_RNA (1)...(19): siRNA sense strand
ucgaacaguuauccagauu

SEQ ID NO: 2241616 - RNA, 19 nt, Homo sapiens
  misc_RNA (1)...(19): siRNA sense strand
ccacaaaccugaaugggug

SEQ ID NO: 2241617 - RNA, 19 nt, Homo sapiens
  misc_RNA (1)...(19): siRNA sense strand
cagauauucuaaugggugu

SEQ ID NO: 2241618 - RNA, 19 nt, Homo sapiens
  misc_RNA (1)...(19): siRNA sense strand
gugugaagaggaagaggga

SEQ ID NO: 2241619 - RNA, 19 nt, Homo sapiens
  misc_RNA (1)...(19): siRNA sense strand
gaagaaagguaguuguguc

SEQ ID NO: 2241620 - RNA, 19 nt, Homo sapiens
  misc_RNA (1)...(19): siRNA sense strand
guauugaugacuugguaca

SEQ ID NO: 2241621 - RNA, 19 nt, Homo sapiens
  misc_RNA (1)...(19): siRNA sense strand
ggugcuuuauaaugaguuu

SEQ ID NO: 2241622 - RNA, 19 nt, Homo sapiens
  misc_RNA (1)...(19): siRNA sense strand
cugaugagauggaugugau

SEQ ID NO: 2241623 - RNA, 19 nt, Homo sapiens
  misc_RNA (1)...(19): siRNA sense strand
ggaacauuugagaaagaaa

SEQ ID NO: 2241624 - RNA, 19 nt, Homo sapiens
  misc_RNA (1)...(19): siRNA sense strand
ggguaaauauggaaugcga

SEQ ID NO: 2241625 - RNA, 19 nt, Homo sapiens
  misc_RNA (1)...(19): siRNA sense strand
guguggaagccaugagcaa

SEQ ID NO: 2241626 - RNA, 19 nt, Homo sapiens
  misc_RNA (1)...(19): siRNA sense strand
aauucaacgaccugagaaa

SEQ ID NO: 2241627 - RNA, 19 nt, Homo sapiens
  misc_RNA (1)...(19): siRNA sense strand
gaaagaaaugauuggcaga

SEQ ID NO: 2241628 - RNA, 19 nt, Homo sapiens
  misc_RNA (1)...(19): siRNA sense strand
agguacuggccuugguaaa

SEQ ID NO: 2241629 - RNA, 19 nt, Homo sapiens
  misc_RNA (1)...(19): siRNA sense strand
ugaucaaaguugcaggaca

SEQ ID NO: 2241630 - RNA, 19 nt, Homo sapiens
  misc_RNA (1)...(19): siRNA sense strand
cuguagaagaacucgcaaa

SEQ ID NO: 2241631 - RNA, 19 nt, Homo sapiens
  misc_RNA (1)...(19): siRNA sense strand
aacuggaacauuugagaaa

SEQ ID NO: 2241632 - RNA, 19 nt, Homo sapiens
  misc_RNA (1)...(19): siRNA sense strand
auuugacgguggagaggaa

SEQ ID NO: 2241633 - RNA, 19 nt, Homo sapiens
  misc_RNA (1)...(19): siRNA sense strand
ugacacuagaaauuggaaa

SEQ ID NO: 2241634 - RNA, 19 nt, Homo sapiens
  misc_RNA (1)...(19): siRNA sense strand
gacacuagaaauuggaaaa

SEQ ID NO: 2241635 - RNA, 19 nt, Homo sapiens
  misc_RNA (1)...(19): siRNA sense strand
accaaggagcagugggaca

SEQ ID NO: 2241636 - RNA, 19 nt, Homo sapiens
  misc_RNA (1)...(19): siRNA sense strand
gagaaagaaaugauuggca

SEQ ID NO: 2241637 - RNA, 19 nt, Homo sapiens
  misc_RNA (1)...(19): siRNA sense strand
gcucagugcgugauagcca

SEQ ID NO: 2241638 - RNA, 19 nt, Homo sapiens
  misc_RNA (1)...(19): siRNA sense strand
cauuaaauuugacggugga

SEQ ID NO: 2241639 - RNA, 19 nt, Homo sapiens
  misc_RNA (1)...(19): siRNA sense strand
uaaacaaugcagcagggaa

SEQ ID NO: 2241640 - RNA, 19 nt, Homo sapiens
  misc_RNA (1)...(19): siRNA sense strand
acucaaaccauucgggaga

SEQ ID NO: 2241641 - RNA, 19 nt, Homo sapiens
  misc_RNA (1)...(19): siRNA sense strand
gaacacagguuacgggcca

SEQ ID NO: 2241642 - RNA, 19 nt, Homo sapiens
  misc_RNA (1)...(19): siRNA sense strand
gggcaaagucaagcgggaa

SEQ ID NO: 2241643 - RNA, 19 nt, Homo sapiens
  misc_RNA (1)...(19): siRNA sense strand
gaaggaaacccuagaccca

SEQ ID NO: 2241644 - RNA, 19 nt, Homo sapiens
  misc_RNA (1)...(19): siRNA sense strand
ccauaaauuccgaaaucca

SEQ ID NO: 2241645 - RNA, 19 nt, Homo sapiens
  misc_RNA (1)...(19): siRNA sense strand
uggucaaagaguugggcau

SEQ ID NO: 2241646 - RNA, 19 nt, Homo sapiens
  misc_RNA (1)...(19): siRNA sense strand
ugagauaggaagugugacu

SEQ ID NO: 2241647 - RNA, 19 nt, Homo sapiens
  misc_RNA (1)...(19): siRNA sense strand
gggcuuuggcggagucaca

SEQ ID NO: 2241648 - RNA, 19 nt, Homo sapiens
  misc_RNA (1)...(19): siRNA sense strand
ugaccaaggugcugcagga

SEQ ID NO: 2241649 - RNA, 19 nt, Homo sapiens
  misc_RNA (1)...(19): siRNA sense strand
ugcggagccuucagggaaa

SEQ ID NO: 2241650 - RNA, 19 nt, Homo sapiens
  misc_RNA (1)...(19): siRNA sense strand
gggccagacagcagaagca

SEQ ID NO: 2241651 - RNA, 19 nt, Homo sapiens
  misc_RNA (1)...(19): siRNA sense strand
cugcaggauuugacaagca

SEQ ID NO: 2241652 - RNA, 19 nt, Homo sapiens
  misc_RNA (1)...(19): siRNA sense strand
ggacauugccagugugguc

SEQ ID NO: 2241653 - RNA, 19 nt, Homo sapiens
  misc_RNA (1)...(19): siRNA sense strand
aggaccaagcugucauuaa

SEQ ID NO: 2241654 - RNA, 19 nt, Homo sapiens
  misc_RNA (1)...(19): siRNA sense strand
ggcuuucagugguggaaca

SEQ ID NO: 2241655 - RNA, 19 nt, Homo sapiens
  misc_RNA (1)...(19): siRNA sense strand
gaacaagaccucaguggac

SEQ ID NO: 2241656 - RNA, 19 nt, Homo sapiens
  misc_RNA (1)...(19): siRNA sense strand
ugggcaaagucaagcggga

SEQ ID NO: 2241657 - RNA, 19 nt, Homo sapiens
  misc_RNA (1)...(19): siRNA sense strand
ggccaagcucacagaagau

SEQ ID NO: 2241658 - RNA, 19 nt, Homo sapiens
  misc_RNA (1)...(19): siRNA sense strand
aagugagaguucugggcca

SEQ ID NO: 2241659 - RNA, 19 nt, Homo sapiens
  misc_RNA (1)...(19): siRNA sense strand
cugcggagccuucagggaa

SEQ ID NO: 2241660 - RNA, 19 nt, Homo sapiens
  misc_RNA (1)...(19): siRNA sense strand
gcacuugguuggaacgcua

SEQ ID NO: 2241661 - RNA, 19 nt, Homo sapiens
  misc_RNA (1)...(19): siRNA sense strand
gcgccuacuucgagcgucu

SEQ ID NO: 2241662 - RNA, 19 nt, Homo sapiens
  misc_RNA (1)...(19): siRNA sense strand
agcccgaaguggagcucaa

SEQ ID NO: 2241663 - RNA, 19 nt, Homo sapiens
  misc_RNA (1)...(19): siRNA sense strand
ucacuaaguaccagcgcga

SEQ ID NO: 2241664 - RNA, 19 nt, Homo sapiens
  misc_RNA (1)...(19): siRNA sense strand
gagucaugcuggagggaga

SEQ ID NO: 2241665 - RNA, 19 nt, Homo sapiens
  misc_RNA (1)...(19): siRNA sense strand
gagcagagugagcaggaaa

SEQ ID NO: 2241666 - RNA, 19 nt, Homo sapiens
  misc_RNA (1)...(19): siRNA sense strand
ccagagaacaaauggagaa

SEQ ID NO: 2241667 - RNA, 19 nt, Homo sapiens
  misc_RNA (1)...(19): siRNA sense strand
gggaagauggagaagguau

SEQ ID NO: 2241668 - RNA, 19 nt, Homo sapiens
  misc_RNA (1)...(19): siRNA sense strand
agaacaagaauuuggagaa

SEQ ID NO: 2241669 - RNA, 19 nt, Homo sapiens
  misc_RNA (1)...(19): siRNA sense strand
gcuuguuauugaagagcaa

SEQ ID NO: 2241670 - RNA, 19 nt, Homo sapiens
  misc_RNA (1)...(19): siRNA sense strand
ggaagauggagaagguauu

SEQ ID NO: 2241671 - RNA, 19 nt, Homo sapiens
  misc_RNA (1)...(19): siRNA sense strand
agaacaaggagcagaguga

SEQ ID NO: 2241672 - RNA, 19 nt, Homo sapiens
  misc_RNA (1)...(19): siRNA sense strand
ccucaaaggaaaaguuaua

SEQ ID NO: 2241673 - RNA, 19 nt, Homo sapiens
  misc_RNA (1)...(19): siRNA sense strand
ugucauuuccagagaacaa

SEQ ID NO: 2241674 - RNA, 19 nt, Homo sapiens
  misc_RNA (1)...(19): siRNA sense strand
aggagauacuuuagaagau

SEQ ID NO: 2241675 - RNA, 19 nt, Homo sapiens
  misc_RNA (1)...(19): siRNA sense strand
acgaagaggcaguagcaau

SEQ ID NO: 2241676 - RNA, 19 nt, Homo sapiens
  misc_RNA (1)...(19): siRNA sense strand
ggagaauauuuuacagcua

SEQ ID NO: 2241677 - RNA, 19 nt, Homo sapiens
  misc_RNA (1)...(19): siRNA sense strand
gcguagaagacgaccuauu

SEQ ID NO: 2241678 - RNA, 19 nt, Homo sapiens
  misc_RNA (1)...(19): siRNA sense strand
gauuguaucuugcggguga

SEQ ID NO: 2241679 - RNA, 19 nt, Homo sapiens
  misc_RNA (1)...(19): siRNA sense strand
caacauugucgguggggaa

SEQ ID NO: 2241680 - RNA, 19 nt, Homo sapiens
  misc_RNA (1)...(19): siRNA sense strand
cagugaaguuuaaugccaa

SEQ ID NO: 2241681 - RNA, 19 nt, Homo sapiens
  misc_RNA (1)...(19): siRNA sense strand
cagagaacaaauggagaaa

SEQ ID NO: 2241682 - RNA, 19 nt, Homo sapiens
  misc_RNA (1)...(19): siRNA sense strand
gguggauggcagagacuau

SEQ ID NO: 2241683 - RNA, 19 nt, Homo sapiens
  misc_RNA (1)...(19): siRNA sense strand
ugugagauuuguagcagaa

SEQ ID NO: 2241684 - RNA, 19 nt, Homo sapiens
  misc_RNA (1)...(19): siRNA sense strand
gagauuuguagcagaaaga

SEQ ID NO: 2241685 - RNA, 19 nt, Homo sapiens
  misc_RNA (1)...(19): siRNA sense strand
aauuauagauggaggagcu

SEQ ID NO: 2241686 - RNA, 19 nt, Homo sapiens
  misc_RNA (1)...(19): siRNA sense strand
ucgacuacgacaagagcaa

SEQ ID NO: 2241687 - RNA, 19 nt, Homo sapiens
  misc_RNA (1)...(19): siRNA sense strand
acgugaagaaguaucgaua

SEQ ID NO: 2241688 - RNA, 19 nt, Homo sapiens
  misc_RNA (1)...(19): siRNA sense strand
uguagcagaaagaggcaaa

SEQ ID NO: 2241689 - RNA, 19 nt, Homo sapiens
  misc_RNA (1)...(19): siRNA sense strand
uaacagaggaacaagccaa

SEQ ID NO: 2241690 - RNA, 19 nt, Homo sapiens
  misc_RNA (1)...(19): siRNA sense strand
ccacgaaguaagaggccca

SEQ ID NO: 2241691 - RNA, 19 nt, Homo sapiens
  misc_RNA (1)...(19): siRNA sense strand
agaaaauguccauggauau

SEQ ID NO: 2241692 - RNA, 19 nt, Homo sapiens
  misc_RNA (1)...(19): siRNA sense strand
guuacaaggcaggaaauaa

SEQ ID NO: 2241693 - RNA, 19 nt, Homo sapiens
  misc_RNA (1)...(19): siRNA sense strand
uggagaccguuguggaaau

SEQ ID NO: 2241694 - RNA, 19 nt, Homo sapiens
  misc_RNA (1)...(19): siRNA sense strand
guuuagaagaaguaacaca

SEQ ID NO: 2241695 - RNA, 19 nt, Homo sapiens
  misc_RNA (1)...(19): siRNA sense strand
uggagaugacccuggcaua

SEQ ID NO: 2241696 - RNA, 19 nt, Homo sapiens
  misc_RNA (1)...(19): siRNA sense strand
cuacaguuuagaagaagua

SEQ ID NO: 2241697 - RNA, 19 nt, Homo sapiens
  misc_RNA (1)...(19): siRNA sense strand
agauggaggagcugcacaa

SEQ ID NO: 2241698 - RNA, 19 nt, Homo sapiens
  misc_RNA (1)...(19): siRNA sense strand
ccugcgaaccaaucagaaa

SEQ ID NO: 2241699 - RNA, 19 nt, Homo sapiens
  misc_RNA (1)...(19): siRNA sense strand
agugaaguuuaaugccaaa

SEQ ID NO: 2241700 - RNA, 19 nt, Homo sapiens
  misc_RNA (1)...(19): siRNA sense strand
guugcaaguaggagauaga

SEQ ID NO: 2241701 - RNA, 19 nt, Homo sapiens
  misc_RNA (1)...(19): siRNA sense strand
cuacgaggccaaagcgaga

SEQ ID NO: 2241702 - RNA, 19 nt, Homo sapiens
  misc_RNA (1)...(19): siRNA sense strand
agaaagauauccaagagca

SEQ ID NO: 2241703 - RNA, 19 nt, Homo sapiens
  misc_RNA (1)...(19): siRNA sense strand
gugugcagucugugagauu

SEQ ID NO: 2241704 - RNA, 19 nt, Homo sapiens
  misc_RNA (1)...(19): siRNA sense strand
agcaauuaagcuagaacaa

SEQ ID NO: 2241705 - RNA, 19 nt, Homo sapiens
  misc_RNA (1)...(19): siRNA sense strand
acacauuccuggagacaac

SEQ ID NO: 2241706 - RNA, 19 nt, Homo sapiens
  misc_RNA (1)...(19): siRNA sense strand
cgaaguaagaggcccagaa

SEQ ID NO: 2241707 - RNA, 19 nt, Homo sapiens
  misc_RNA (1)...(19): siRNA sense strand
acacaauuccuuaugucaa

SEQ ID NO: 2241708 - RNA, 19 nt, Homo sapiens
  misc_RNA (1)...(19): siRNA sense strand
agauagacuacuaauggua

SEQ ID NO: 2241709 - RNA, 19 nt, Homo sapiens
  misc_RNA (1)...(19): siRNA sense strand
caguuuagaagaaguaaca

SEQ ID NO: 2241710 - RNA, 19 nt, Homo sapiens
  misc_RNA (1)...(19): siRNA sense strand
aagauauccaagagcacaa

SEQ ID NO: 2241711 - RNA, 19 nt, Homo sapiens
  misc_RNA (1)...(19): siRNA sense strand
cagcuauuguccaaggaga

SEQ ID NO: 2241712 - RNA, 19 nt, Homo sapiens
  misc_RNA (1)...(19): siRNA sense strand
cuauaauugucaacacaga

SEQ ID NO: 2241713 - RNA, 19 nt, Homo sapiens
  misc_RNA (1)...(19): siRNA sense strand
uugaagacagugaaguuua

SEQ ID NO: 2241714 - RNA, 19 nt, Homo sapiens
  misc_RNA (1)...(19): siRNA sense strand
uggagugauugauucgaaa

SEQ ID NO: 2241715 - RNA, 19 nt, Homo sapiens
  misc_RNA (1)...(19): siRNA sense strand
ugaucgagcaauuaagcua

SEQ ID NO: 2241716 - RNA, 19 nt, Homo sapiens
  misc_RNA (1)...(19): siRNA sense strand
aggcaguagcaauauuaaa

SEQ ID NO: 2241717 - RNA, 19 nt, Homo sapiens
  misc_RNA (1)...(19): siRNA sense strand
gagcagaugaugaaccaca

SEQ ID NO: 2241718 - RNA, 19 nt, Homo sapiens
  misc_RNA (1)...(19): siRNA sense strand
agaagaaguaacacacgaa

SEQ ID NO: 2241719 - RNA, 19 nt, Homo sapiens
  misc_RNA (1)...(19): siRNA sense strand
ggccaaaauccaugaccua

SEQ ID NO: 2241720 - RNA, 19 nt, Homo sapiens
  misc_RNA (1)...(19): siRNA sense strand
cuacgagagcagaugauga

SEQ ID NO: 2241721 - RNA, 19 nt, Homo sapiens
  misc_RNA (1)...(19): siRNA sense strand
gaugaugagugguggcaag

SEQ ID NO: 2241722 - RNA, 19 nt, Homo sapiens
  misc_RNA (1)...(19): siRNA sense strand
ucgacuaacccacgaagua

SEQ ID NO: 2241723 - RNA, 19 nt, Homo sapiens
  misc_RNA (1)...(19): siRNA sense strand
cggacuaacgugaagaagu

SEQ ID NO: 2241724 - RNA, 19 nt, Homo sapiens
  misc_RNA (1)...(19): siRNA sense strand
cagaggaacaagccaagaa

SEQ ID NO: 2241725 - RNA, 19 nt, Homo sapiens
  misc_RNA (1)...(19): siRNA sense strand
aguaagaggcccagaacuc

SEQ ID NO: 2241726 - RNA, 19 nt, Homo sapiens
  misc_RNA (1)...(19): siRNA sense strand
aggagagccucgcaaggua

SEQ ID NO: 2241727 - RNA, 19 nt, Homo sapiens
  misc_RNA (1)...(19): siRNA sense strand
gcaaauacguggugggaag

SEQ ID NO: 2241728 - RNA, 19 nt, Homo sapiens
  misc_RNA (1)...(19): siRNA sense strand
cagaaauguuagaaggaga

SEQ ID NO: 2241729 - RNA, 19 nt, Homo sapiens
  misc_RNA (1)...(19): siRNA sense strand
agaagaagcuggaggagca

SEQ ID NO: 2241730 - RNA, 19 nt, Homo sapiens
  misc_RNA (1)...(19): siRNA sense strand
ggaucauuacagaggcaaa

SEQ ID NO: 2241731 - RNA, 19 nt, Homo sapiens
  misc_RNA (1)...(19): siRNA sense strand
agaaauguuagaaggagaa

SEQ ID NO: 2241732 - RNA, 19 nt, Homo sapiens
  misc_RNA (1)...(19): siRNA sense strand
gugacaugacgaagaagaa

SEQ ID NO: 2241733 - RNA, 19 nt, Homo sapiens
  misc_RNA (1)...(19): siRNA sense strand
acaacuuccuggaggccaa

SEQ ID NO: 2241734 - RNA, 19 nt, Homo sapiens
  misc_RNA (1)...(19): siRNA sense strand
gggugacagacgaguuuaa

SEQ ID NO: 2241735 - RNA, 19 nt, Homo sapiens
  misc_RNA (1)...(19): siRNA sense strand
caagaaaggucacuggguu

SEQ ID NO: 2241736 - RNA, 19 nt, Homo sapiens
  misc_RNA (1)...(19): siRNA sense strand
acgaagaagaacagagaag

SEQ ID NO: 2241737 - RNA, 19 nt, Homo sapiens
  misc_RNA (1)...(19): siRNA sense strand
guugaagagaaguuaggaa

SEQ ID NO: 2241738 - RNA, 19 nt, Homo sapiens
  misc_RNA (1)...(19): siRNA sense strand
agagaaguuaggaagcaaa

SEQ ID NO: 2241739 - RNA, 19 nt, Homo sapiens
  misc_RNA (1)...(19): siRNA sense strand
gacaggaagugguggcuga

SEQ ID NO: 2241740 - RNA, 19 nt, Homo sapiens
  misc_RNA (1)...(19): siRNA sense strand
ucccagaacugauggccaa

SEQ ID NO: 2241741 - RNA, 19 nt, Homo sapiens
  misc_RNA (1)...(19): siRNA sense strand
ccuaugaugauuugcgcua

SEQ ID NO: 2241742 - RNA, 19 nt, Homo sapiens
  misc_RNA (1)...(19): siRNA sense strand
caagagaagaaaaggucaa

SEQ ID NO: 2241743 - RNA, 19 nt, Homo sapiens
  misc_RNA (1)...(19): siRNA sense strand
gagaaacagugcuggugga

SEQ ID NO: 2241744 - RNA, 19 nt, Homo sapiens
  misc_RNA (1)...(19): siRNA sense strand
agaaagucaaggaagaaaa

SEQ ID NO: 2241745 - RNA, 19 nt, Homo sapiens
  misc_RNA (1)...(19): siRNA sense strand
augcaguggaguuggauuu

SEQ ID NO: 2241746 - RNA, 19 nt, Homo sapiens
  misc_RNA (1)...(19): siRNA sense strand
aagaaaaggucaaggcacu

SEQ ID NO: 2241747 - RNA, 19 nt, Homo sapiens
  misc_RNA (1)...(19): siRNA sense strand
aagagaaguuaggaagcaa

SEQ ID NO: 2241748 - RNA, 19 nt, Homo sapiens
  misc_RNA (1)...(19): siRNA sense strand
aaccugaagacuaaggaaa

SEQ ID NO: 2241749 - RNA, 19 nt, Homo sapiens
  misc_RNA (1)...(19): siRNA sense strand
gagaaguuaggaagcaaau

SEQ ID NO: 2241750 - RNA, 19 nt, Homo sapiens
  misc_RNA (1)...(19): siRNA sense strand
gaaggugccugcugggaca

SEQ ID NO: 2241751 - RNA, 19 nt, Homo sapiens
  misc_RNA (1)...(19): siRNA sense strand
aagaaauauuggagcgggu

SEQ ID NO: 2241752 - RNA, 19 nt, Homo sapiens
  misc_RNA (1)...(19): siRNA sense strand
ccaaggugacugaagugaa

SEQ ID NO: 2241753 - RNA, 19 nt, Homo sapiens
  misc_RNA (1)...(19): siRNA sense strand
ugcacaaggcccuggacaa

SEQ ID NO: 2241754 - RNA, 19 nt, Homo sapiens
  misc_RNA (1)...(19): siRNA sense strand
agagaagaguuuaggaguc

SEQ ID NO: 2241755 - RNA, 19 nt, Homo sapiens
  misc_RNA (1)...(19): siRNA sense strand
acauagagggaucugcuaa

SEQ ID NO: 2241756 - RNA, 19 nt, Homo sapiens
  misc_RNA (1)...(19): siRNA sense strand
gaaauauuggagcggguga

SEQ ID NO: 2241757 - RNA, 19 nt, Homo sapiens
  misc_RNA (1)...(19): siRNA sense strand
ggaucgggacauagaggga

SEQ ID NO: 2241758 - RNA, 19 nt, Homo sapiens
  misc_RNA (1)...(19): siRNA sense strand
ugaccuaugcuuugcgaga

SEQ ID NO: 2241759 - RNA, 19 nt, Homo sapiens
  misc_RNA (1)...(19): siRNA sense strand
acauggacuacaaugguua

SEQ ID NO: 2241760 - RNA, 19 nt, Homo sapiens
  misc_RNA (1)...(19): siRNA sense strand
cacaggaguggaagaacaa

SEQ ID NO: 2241761 - RNA, 19 nt, Homo sapiens
  misc_RNA (1)...(19): siRNA sense strand
gagauuuuguugaagagaa

SEQ ID NO: 2241762 - RNA, 19 nt, Homo sapiens
  misc_RNA (1)...(19): siRNA sense strand
ccacugaaggauguagaaa

SEQ ID NO: 2241763 - RNA, 19 nt, Homo sapiens
  misc_RNA (1)...(19): siRNA sense strand
uagaaagucaaggaagaaa

SEQ ID NO: 2241764 - RNA, 19 nt, Homo sapiens
  misc_RNA (1)...(19): siRNA sense strand
ugacugaagugaaaaucaa

SEQ ID NO: 2241765 - RNA, 19 nt, Homo sapiens
  misc_RNA (1)...(19): siRNA sense strand
ggcagaaagacgaaaauuu

SEQ ID NO: 2241766 - RNA, 19 nt, Homo sapiens
  misc_RNA (1)...(19): siRNA sense strand
ccaaaguggaggagcgcac

SEQ ID NO: 2241767 - RNA, 19 nt, Homo sapiens
  misc_RNA (1)...(19): siRNA sense strand
ccagagagauucagcgcuc

SEQ ID NO: 2241768 - RNA, 19 nt, Homo sapiens
  misc_RNA (1)...(19): siRNA sense strand
caggaguggaagaacaaga

SEQ ID NO: 2241769 - RNA, 19 nt, Homo sapiens
  misc_RNA (1)...(19): siRNA sense strand
ccuucaacaaucagaacuu

SEQ ID NO: 2241770 - RNA, 19 nt, Homo sapiens
  misc_RNA (1)...(19): siRNA sense strand
ugaccagccacauggagaa

SEQ ID NO: 2241771 - RNA, 19 nt, Homo sapiens
  misc_RNA (1)...(19): siRNA sense strand
gaggcaaagcugaaggauc

SEQ ID NO: 2241772 - RNA, 19 nt, Homo sapiens
  misc_RNA (1)...(19): siRNA sense strand
ucaugaaccgagaagucaa

SEQ ID NO: 2241773 - RNA, 19 nt, Homo sapiens
  misc_RNA (1)...(19): siRNA sense strand
ugggaagagcccuagauuu

SEQ ID NO: 2241774 - RNA, 19 nt, Homo sapiens
  misc_RNA (1)...(19): siRNA sense strand
ucaugaacgaccucagcaa

SEQ ID NO: 2241775 - RNA, 19 nt, Homo sapiens
  misc_RNA (1)...(19): siRNA sense strand
uggagaagaagcuggagga

SEQ ID NO: 2241776 - RNA, 19 nt, Homo sapiens
  misc_RNA (1)...(19): siRNA sense strand
cuggaggagcacagugaga

SEQ ID NO: 2241777 - RNA, 19 nt, Homo sapiens
  misc_RNA (1)...(19): siRNA sense strand
gagacggaguuuaagagca

SEQ ID NO: 2241778 - RNA, 19 nt, Homo sapiens
  misc_RNA (1)...(19): siRNA sense strand
accugaagacuaaggaaaa

SEQ ID NO: 2241779 - RNA, 19 nt, Homo sapiens
  misc_RNA (1)...(19): siRNA sense strand
ccucaugaaccgagaaguc

SEQ ID NO: 2241780 - RNA, 19 nt, Homo sapiens
  misc_RNA (1)...(19): siRNA sense strand
uauccucaccagagagauu

SEQ ID NO: 2241781 - RNA, 19 nt, Homo sapiens
  misc_RNA (1)...(19): siRNA sense strand
cauggagaacuuacagaau

SEQ ID NO: 2241782 - RNA, 19 nt, Homo sapiens
  misc_RNA (1)...(19): siRNA sense strand
agaagaacagagaagaguu

SEQ ID NO: 2241783 - RNA, 19 nt, Homo sapiens
  misc_RNA (1)...(19): siRNA sense strand
gcaaauacguggugggaag

SEQ ID NO: 2241784 - RNA, 19 nt, Homo sapiens
  misc_RNA (1)...(19): siRNA sense strand
cagaaauguuagaaggaga

SEQ ID NO: 2241785 - RNA, 19 nt, Homo sapiens
  misc_RNA (1)...(19): siRNA sense strand
agaagaagcuggaggagca

SEQ ID NO: 2241786 - RNA, 19 nt, Homo sapiens
  misc_RNA (1)...(19): siRNA sense strand
ggaucauuacagaggcaaa

SEQ ID NO: 2241787 - RNA, 19 nt, Homo sapiens
  misc_RNA (1)...(19): siRNA sense strand
agaaauguuagaaggagaa

SEQ ID NO: 2241788 - RNA, 19 nt, Homo sapiens
  misc_RNA (1)...(19): siRNA sense strand
gugacaugacgaagaagaa

SEQ ID NO: 2241789 - RNA, 19 nt, Homo sapiens
  misc_RNA (1)...(19): siRNA sense strand
acaacuuccuggaggccaa

SEQ ID NO: 2241790 - RNA, 19 nt, Homo sapiens
  misc_RNA (1)...(19): siRNA sense strand
gggugacagacgaguuuaa

SEQ ID NO: 2241791 - RNA, 19 nt, Homo sapiens
  misc_RNA (1)...(19): siRNA sense strand
caagaaaggucacuggguu

SEQ ID NO: 2241792 - RNA, 19 nt, Homo sapiens
  misc_RNA (1)...(19): siRNA sense strand
acgaagaagaacagagaag

SEQ ID NO: 2241793 - RNA, 19 nt, Homo sapiens
  misc_RNA (1)...(19): siRNA sense strand
guugaagagaaguuaggaa

SEQ ID NO: 2241794 - RNA, 19 nt, Homo sapiens
  misc_RNA (1)...(19): siRNA sense strand
agagaaguuaggaagcaaa

SEQ ID NO: 2241795 - RNA, 19 nt, Homo sapiens
  misc_RNA (1)...(19): siRNA sense strand
gacaggaagugguggcuga

SEQ ID NO: 2241796 - RNA, 19 nt, Homo sapiens
  misc_RNA (1)...(19): siRNA sense strand
ucccagaacugauggccaa

SEQ ID NO: 2241797 - RNA, 19 nt, Homo sapiens
  misc_RNA (1)...(19): siRNA sense strand
ccuaugaugauuugcgcua

SEQ ID NO: 2241798 - RNA, 19 nt, Homo sapiens
  misc_RNA (1)...(19): siRNA sense strand
caagagaagaaaaggucaa

SEQ ID NO: 2241799 - RNA, 19 nt, Homo sapiens
  misc_RNA (1)...(19): siRNA sense strand
agaaagucaaggaagaaaa

SEQ ID NO: 2241800 - RNA, 19 nt, Homo sapiens
  misc_RNA (1)...(19): siRNA sense strand
augcaguggaguuggauuu

SEQ ID NO: 2241801 - RNA, 19 nt, Homo sapiens
  misc_RNA (1)...(19): siRNA sense strand
aagaaaaggucaaggcacu

SEQ ID NO: 2241802 - RNA, 19 nt, Homo sapiens
  misc_RNA (1)...(19): siRNA sense strand
aagagaaguuaggaagcaa

SEQ ID NO: 2241803 - RNA, 19 nt, Homo sapiens
  misc_RNA (1)...(19): siRNA sense strand
aaccugaagacuaaggaaa

SEQ ID NO: 2241804 - RNA, 19 nt, Homo sapiens
  misc_RNA (1)...(19): siRNA sense strand
gagaaguuaggaagcaaau

SEQ ID NO: 2241805 - RNA, 19 nt, Homo sapiens
  misc_RNA (1)...(19): siRNA sense strand
gaaggugccugcugggaca

SEQ ID NO: 2241806 - RNA, 19 nt, Homo sapiens
  misc_RNA (1)...(19): siRNA sense strand
aagaaauauuggagcgggu

SEQ ID NO: 2241807 - RNA, 19 nt, Homo sapiens
  misc_RNA (1)...(19): siRNA sense strand
ugcacaaggcccuggacaa

SEQ ID NO: 2241808 - RNA, 19 nt, Homo sapiens
  misc_RNA (1)...(19): siRNA sense strand
agagaagaguuuaggaguc

SEQ ID NO: 2241809 - RNA, 19 nt, Homo sapiens
  misc_RNA (1)...(19): siRNA sense strand
acauagagggaucugcuaa

SEQ ID NO: 2241810 - RNA, 19 nt, Homo sapiens
  misc_RNA (1)...(19): siRNA sense strand
gaaauauuggagcggguga

SEQ ID NO: 2241811 - RNA, 19 nt, Homo sapiens
  misc_RNA (1)...(19): siRNA sense strand
ggaucgggacauagaggga

SEQ ID NO: 2241812 - RNA, 19 nt, Homo sapiens
  misc_RNA (1)...(19): siRNA sense strand
ugaccuaugcuuugcgaga

SEQ ID NO: 2241813 - RNA, 19 nt, Homo sapiens
  misc_RNA (1)...(19): siRNA sense strand
acauggacuacaaugguua

SEQ ID NO: 2241814 - RNA, 19 nt, Homo sapiens
  misc_RNA (1)...(19): siRNA sense strand
cacaggaguggaagaacaa

SEQ ID NO: 2241815 - RNA, 19 nt, Homo sapiens
  misc_RNA (1)...(19): siRNA sense strand
gagauuuuguugaagagaa

SEQ ID NO: 2241816 - RNA, 19 nt, Homo sapiens
  misc_RNA (1)...(19): siRNA sense strand
ccacugaaggauguagaaa

SEQ ID NO: 2241817 - RNA, 19 nt, Homo sapiens
  misc_RNA (1)...(19): siRNA sense strand
uagaaagucaaggaagaaa

SEQ ID NO: 2241818 - RNA, 19 nt, Homo sapiens
  misc_RNA (1)...(19): siRNA sense strand
ggcagaaagacgaaaauuu

SEQ ID NO: 2241819 - RNA, 19 nt, Homo sapiens
  misc_RNA (1)...(19): siRNA sense strand
ccaaaguggaggagcgcac

SEQ ID NO: 2241820 - RNA, 19 nt, Homo sapiens
  misc_RNA (1)...(19): siRNA sense strand
ccagagagauucagcgcuc

SEQ ID NO: 2241821 - RNA, 19 nt, Homo sapiens
  misc_RNA (1)...(19): siRNA sense strand
caggaguggaagaacaaga

SEQ ID NO: 2241822 - RNA, 19 nt, Homo sapiens
  misc_RNA (1)...(19): siRNA sense strand
ccuucaacaaucagaacuu

SEQ ID NO: 2241823 - RNA, 19 nt, Homo sapiens
  misc_RNA (1)...(19): siRNA sense strand
ugaccagccacauggagaa

SEQ ID NO: 2241824 - RNA, 19 nt, Homo sapiens
  misc_RNA (1)...(19): siRNA sense strand
gaggcaaagcugaaggauc

SEQ ID NO: 2241825 - RNA, 19 nt, Homo sapiens
  misc_RNA (1)...(19): siRNA sense strand
ucaugaaccgagaagucaa

SEQ ID NO: 2241826 - RNA, 19 nt, Homo sapiens
  misc_RNA (1)...(19): siRNA sense strand
ugggaagagcccuagauuu

SEQ ID NO: 2241827 - RNA, 19 nt, Homo sapiens
  misc_RNA (1)...(19): siRNA sense strand
uggagaagaagcuggagga

SEQ ID NO: 2241828 - RNA, 19 nt, Homo sapiens
  misc_RNA (1)...(19): siRNA sense strand
cuggaggagcacagugaga

SEQ ID NO: 2241829 - RNA, 19 nt, Homo sapiens
  misc_RNA (1)...(19): siRNA sense strand
gagacggaguuuaagagca

SEQ ID NO: 2241830 - RNA, 19 nt, Homo sapiens
  misc_RNA (1)...(19): siRNA sense strand
accugaagacuaaggaaaa

SEQ ID NO: 2241831 - RNA, 19 nt, Homo sapiens
  misc_RNA (1)...(19): siRNA sense strand
ccucaugaaccgagaaguc

SEQ ID NO: 2241832 - RNA, 19 nt, Homo sapiens
  misc_RNA (1)...(19): siRNA sense strand
uauccucaccagagagauu

SEQ ID NO: 2241833 - RNA, 19 nt, Homo sapiens
  misc_RNA (1)...(19): siRNA sense strand
cauggagaacuuacagaau

SEQ ID NO: 2241834 - RNA, 19 nt, Homo sapiens
  misc_RNA (1)...(19): siRNA sense strand
agaagaacagagaagaguu

SEQ ID NO: 2241835 - RNA, 19 nt, Homo sapiens
  misc_RNA (1)...(19): siRNA sense strand
gaaacaaagggaagggcaa

SEQ ID NO: 2241836 - RNA, 19 nt, Homo sapiens
  misc_RNA (1)...(19): siRNA sense strand
acgagaaagaugagaagaa

SEQ ID NO: 2241837 - RNA, 19 nt, Homo sapiens
  misc_RNA (1)...(19): siRNA sense strand
gggaagaagaagaaacaga

SEQ ID NO: 2241838 - RNA, 19 nt, Homo sapiens
  misc_RNA (1)...(19): siRNA sense strand
agaagaagaaacagaacaa

SEQ ID NO: 2241839 - RNA, 19 nt, Homo sapiens
  misc_RNA (1)...(19): siRNA sense strand
cgaagauggagacgagaaa

SEQ ID NO: 2241840 - RNA, 19 nt, Homo sapiens
  misc_RNA (1)...(19): siRNA sense strand
ccuauaaugcaaagagcaa

SEQ ID NO: 2241841 - RNA, 19 nt, Homo sapiens
  misc_RNA (1)...(19): siRNA sense strand
aggaaugugugaaggagaa

SEQ ID NO: 2241842 - RNA, 19 nt, Homo sapiens
  misc_RNA (1)...(19): siRNA sense strand
aggaaaagcaccaggcaaa

SEQ ID NO: 2241843 - RNA, 19 nt, Homo sapiens
  misc_RNA (1)...(19): siRNA sense strand
ccaucaaggaagaagacaa

SEQ ID NO: 2241844 - RNA, 19 nt, Homo sapiens
  misc_RNA (1)...(19): siRNA sense strand
agccagagauagagaucaa

SEQ ID NO: 2241845 - RNA, 19 nt, Homo sapiens
  misc_RNA (1)...(19): siRNA sense strand
acagagaagacaaggagaa

SEQ ID NO: 2241846 - RNA, 19 nt, Homo sapiens
  misc_RNA (1)...(19): siRNA sense strand
gguuaaauuugguggcagu

SEQ ID NO: 2241847 - RNA, 19 nt, Homo sapiens
  misc_RNA (1)...(19): siRNA sense strand
aagggaagggcaagggaaa

SEQ ID NO: 2241848 - RNA, 19 nt, Homo sapiens
  misc_RNA (1)...(19): siRNA sense strand
cggcagaccaucaggcauu

SEQ ID NO: 2241849 - RNA, 19 nt, Homo sapiens
  misc_RNA (1)...(19): siRNA sense strand
cgucaagacugaugggaag

SEQ ID NO: 2241850 - RNA, 19 nt, Homo sapiens
  misc_RNA (1)...(19): siRNA sense strand
ggagcaaguccgauggaga

SEQ ID NO: 2241851 - RNA, 19 nt, Homo sapiens
  misc_RNA (1)...(19): siRNA sense strand
ccaaagaucuagcugccaa

SEQ ID NO: 2241852 - RNA, 19 nt, Homo sapiens
  misc_RNA (1)...(19): siRNA sense strand
gcguggugguggaugacaa

SEQ ID NO: 2241853 - RNA, 19 nt, Homo sapiens
  misc_RNA (1)...(19): siRNA sense strand
caaagaaccaacggagaaa

SEQ ID NO: 2241854 - RNA, 19 nt, Homo sapiens
  misc_RNA (1)...(19): siRNA sense strand
ccugcaaggacaugguuaa

SEQ ID NO: 2241855 - RNA, 19 nt, Homo sapiens
  misc_RNA (1)...(19): siRNA sense strand
cgagcgagccagagauaga

SEQ ID NO: 2241856 - RNA, 19 nt, Homo sapiens
  misc_RNA (1)...(19): siRNA sense strand
ccgucaagacugaugggaa

SEQ ID NO: 2241857 - RNA, 19 nt, Homo sapiens
  misc_RNA (1)...(19): siRNA sense strand
cugaugggaagaagaguua

SEQ ID NO: 2241858 - RNA, 19 nt, Homo sapiens
  misc_RNA (1)...(19): siRNA sense strand
ucuugaaggugguguuaau

SEQ ID NO: 2241859 - RNA, 19 nt, Homo sapiens
  misc_RNA (1)...(19): siRNA sense strand
ccuaugaggaccugaucaa

SEQ ID NO: 2241860 - RNA, 19 nt, Homo sapiens
  misc_RNA (1)...(19): siRNA sense strand
agagagugccucagcuaaa

SEQ ID NO: 2241861 - RNA, 19 nt, Homo sapiens
  misc_RNA (1)...(19): siRNA sense strand
caggaugagaagagacgua

SEQ ID NO: 2241862 - RNA, 19 nt, Homo sapiens
  misc_RNA (1)...(19): siRNA sense strand
uggaguuccugcagagcaa

SEQ ID NO: 2241863 - RNA, 19 nt, Homo sapiens
  misc_RNA (1)...(19): siRNA sense strand
aagaagaaacagaacaaga

SEQ ID NO: 2241864 - RNA, 19 nt, Homo sapiens
  misc_RNA (1)...(19): siRNA sense strand
ccauuggcuuggagaucaa

SEQ ID NO: 2241865 - RNA, 19 nt, Homo sapiens
  misc_RNA (1)...(19): siRNA sense strand
aagacaaagaccaggauga

SEQ ID NO: 2241866 - RNA, 19 nt, Homo sapiens
  misc_RNA (1)...(19): siRNA sense strand
uggcuuugauggaggugaa

SEQ ID NO: 2241867 - RNA, 19 nt, Homo sapiens
  misc_RNA (1)...(19): siRNA sense strand
aggaggagccggacagaga

SEQ ID NO: 2241868 - RNA, 19 nt, Homo sapiens
  misc_RNA (1)...(19): siRNA sense strand
gagacgagaaagaugagaa

SEQ ID NO: 2241869 - RNA, 19 nt, Homo sapiens
  misc_RNA (1)...(19): siRNA sense strand
uguaaagccugcaaggaca

SEQ ID NO: 2241870 - RNA, 19 nt, Homo sapiens
  misc_RNA (1)...(19): siRNA sense strand
gccaggaagcugcgguaua

SEQ ID NO: 2241871 - RNA, 19 nt, Homo sapiens
  misc_RNA (1)...(19): siRNA sense strand
agaaagaugagaagaagca

SEQ ID NO: 2241872 - RNA, 19 nt, Homo sapiens
  misc_RNA (1)...(19): siRNA sense strand
gaagaagcacagaagucaa

SEQ ID NO: 2241873 - RNA, 19 nt, Homo sapiens
  misc_RNA (1)...(19): siRNA sense strand
ggacgaagauggagacgag

SEQ ID NO: 2241874 - RNA, 19 nt, Homo sapiens
  misc_RNA (1)...(19): siRNA sense strand
agggaaaagggaagggcaa

SEQ ID NO: 2241875 - RNA, 19 nt, Homo sapiens
  misc_RNA (1)...(19): siRNA sense strand
aagauggagacgagaaaga

SEQ ID NO: 2241876 - RNA, 19 nt, Homo sapiens
  misc_RNA (1)...(19): siRNA sense strand
agccacagaugcugacaaa

SEQ ID NO: 2241877 - RNA, 19 nt, Homo sapiens
  misc_RNA (1)...(19): siRNA sense strand
aggugguguuaauggcaaa

SEQ ID NO: 2241878 - RNA, 19 nt, Homo sapiens
  misc_RNA (1)...(19): siRNA sense strand
uuucauauauccacagcaa

SEQ ID NO: 2241879 - RNA, 19 nt, Homo sapiens
  misc_RNA (1)...(19): siRNA sense strand
ucaccuagccccaggauua

SEQ ID NO: 2241880 - RNA, 19 nt, Homo sapiens
  misc_RNA (1)...(19): siRNA sense strand
ucaaggaagaagacaaaga

SEQ ID NO: 2241881 - RNA, 19 nt, Homo sapiens
  misc_RNA (1)...(19): siRNA sense strand
acgaagauggagacgagaa

SEQ ID NO: 2241882 - RNA, 19 nt, Homo sapiens
  misc_RNA (1)...(19): siRNA sense strand
ccgagugcguccaggugua

SEQ ID NO: 2241883 - RNA, 19 nt, Homo sapiens
  misc_RNA (1)...(19): siRNA sense strand
cgagagagugccucagcua

SEQ ID NO: 2241884 - RNA, 19 nt, Homo sapiens
  misc_RNA (1)...(19): siRNA sense strand
ugaaaaggaagaagaaaga

SEQ ID NO: 2241885 - RNA, 19 nt, Homo sapiens
  misc_RNA (1)...(19): siRNA sense strand
acuccgaagucaaaccaaa

SEQ ID NO: 2241886 - RNA, 19 nt, Homo sapiens
  misc_RNA (1)...(19): siRNA sense strand
gagaagaagcacagaaguc

SEQ ID NO: 2241887 - RNA, 19 nt, Homo sapiens
  misc_RNA (1)...(19): siRNA sense strand
aggaagaagacaaagacca

SEQ ID NO: 2241888 - RNA, 19 nt, Homo sapiens
  misc_RNA (1)...(19): siRNA sense strand
cagaugacgaugaggaagu

SEQ ID NO: 2241889 - RNA, 19 nt, Homo sapiens
  misc_RNA (1)...(19): siRNA sense strand
agugaaagucaucuacaaa

SEQ ID NO: 2241890 - RNA, 19 nt, Homo sapiens
  misc_RNA (1)...(19): siRNA sense strand
ggaccaucacggugcgaga

SEQ ID NO: 2241891 - RNA, 19 nt, Homo sapiens
  misc_RNA (1)...(19): siRNA sense strand
aaauaaaggaggaggaagc

SEQ ID NO: 2241892 - RNA, 19 nt, Homo sapiens
  misc_RNA (1)...(19): siRNA sense strand
ggaggagaagagacgcaaa

SEQ ID NO: 2241893 - RNA, 19 nt, Homo sapiens
  misc_RNA (1)...(19): siRNA sense strand
aggcauucuaccagggaga

SEQ ID NO: 2241894 - RNA, 19 nt, Homo sapiens
  misc_RNA (1)...(19): siRNA sense strand
ccaauauggccaugaagga

SEQ ID NO: 2241895 - RNA, 19 nt, Homo sapiens
  misc_RNA (1)...(19): siRNA sense strand
ccaugaaggaggcagauga

SEQ ID NO: 2241896 - RNA, 19 nt, Homo sapiens
  misc_RNA (1)...(19): siRNA sense strand
gggacgacgggaagaccua

SEQ ID NO: 2241897 - RNA, 19 nt, Homo sapiens
  misc_RNA (1)...(19): siRNA sense strand
uguaaggacaugagugcau

SEQ ID NO: 2241898 - RNA, 19 nt, Homo sapiens
  misc_RNA (1)...(19): siRNA sense strand
ggaaacaaagggaagggca

SEQ ID NO: 2241899 - RNA, 19 nt, Homo sapiens
  misc_RNA (1)...(19): siRNA sense strand
aggaaaagguggagaaaga

SEQ ID NO: 2241900 - RNA, 19 nt, Homo sapiens
  misc_RNA (1)...(19): siRNA sense strand
aagcgauaguugaaggaaa

SEQ ID NO: 2241901 - RNA, 19 nt, Homo sapiens
  misc_RNA (1)...(19): siRNA sense strand
ccaccaagcgcgaggagaa

SEQ ID NO: 2241902 - RNA, 19 nt, Homo sapiens
  misc_RNA (1)...(19): siRNA sense strand
aggcagaguuggaagaaaa

SEQ ID NO: 2241903 - RNA, 19 nt, Homo sapiens
  misc_RNA (1)...(19): siRNA sense strand
gcgaauauguggaucgaga

SEQ ID NO: 2241904 - RNA, 19 nt, Homo sapiens
  misc_RNA (1)...(19): siRNA sense strand
uugucaagcugaugagaua

SEQ ID NO: 2241905 - RNA, 19 nt, Homo sapiens
  misc_RNA (1)...(19): siRNA sense strand
ggaaagguuacaagaggaa

SEQ ID NO: 2241906 - RNA, 19 nt, Homo sapiens
  misc_RNA (1)...(19): siRNA sense strand
gcugagaagccgggaguaa

SEQ ID NO: 2241907 - RNA, 19 nt, Homo sapiens
  misc_RNA (1)...(19): siRNA sense strand
agucgaugguggugaagua

SEQ ID NO: 2241908 - RNA, 19 nt, Homo sapiens
  misc_RNA (1)...(19): siRNA sense strand
agaaggagaagaaggacaa

SEQ ID NO: 2241909 - RNA, 19 nt, Homo sapiens
  misc_RNA (1)...(19): siRNA sense strand
caaaaguguugaagaacua

SEQ ID NO: 2241910 - RNA, 19 nt, Homo sapiens
  misc_RNA (1)...(19): siRNA sense strand
agacaaugaauuugcgaau

SEQ ID NO: 2241911 - RNA, 19 nt, Homo sapiens
  misc_RNA (1)...(19): siRNA sense strand
gagaaggagaagaaggaca

SEQ ID NO: 2241912 - RNA, 19 nt, Homo sapiens
  misc_RNA (1)...(19): siRNA sense strand
gugcaagauaacagggaga

SEQ ID NO: 2241913 - RNA, 19 nt, Homo sapiens
  misc_RNA (1)...(19): siRNA sense strand
guacgaugaggaugggaaa

SEQ ID NO: 2241914 - RNA, 19 nt, Homo sapiens
  misc_RNA (1)...(19): siRNA sense strand
cuaaacaaguggaggaaag

SEQ ID NO: 2241915 - RNA, 19 nt, Homo sapiens
  misc_RNA (1)...(19): siRNA sense strand
gagcaguaugagaacgaaa

SEQ ID NO: 2241916 - RNA, 19 nt, Homo sapiens
  misc_RNA (1)...(19): siRNA sense strand
gaacugaagaagaagguca

SEQ ID NO: 2241917 - RNA, 19 nt, Homo sapiens
  misc_RNA (1)...(19): siRNA sense strand
uaacauuaguucaaggaga

SEQ ID NO: 2241918 - RNA, 19 nt, Homo sapiens
  misc_RNA (1)...(19): siRNA sense strand
augcagauaugcugaacaa

SEQ ID NO: 2241919 - RNA, 19 nt, Homo sapiens
  misc_RNA (1)...(19): siRNA sense strand
ccgucaaugugcugaauuu

SEQ ID NO: 2241920 - RNA, 19 nt, Homo sapiens
  misc_RNA (1)...(19): siRNA sense strand
cuuaacaaguacggagaua

SEQ ID NO: 2241921 - RNA, 19 nt, Homo sapiens
  misc_RNA (1)...(19): siRNA sense strand
gaguaaaugagcagcugua

SEQ ID NO: 2241922 - RNA, 19 nt, Homo sapiens
  misc_RNA (1)...(19): siRNA sense strand
auucugaacucauuggaaa

SEQ ID NO: 2241923 - RNA, 19 nt, Homo sapiens
  misc_RNA (1)...(19): siRNA sense strand
gcagauaugcugaacaaaa

SEQ ID NO: 2241924 - RNA, 19 nt, Homo sapiens
  misc_RNA (1)...(19): siRNA sense strand
gauaugaugcagugugaau

SEQ ID NO: 2241925 - RNA, 19 nt, Homo sapiens
  misc_RNA (1)...(19): siRNA sense strand
ugggaaacgauuagagcau

SEQ ID NO: 2241926 - RNA, 19 nt, Homo sapiens
  misc_RNA (1)...(19): siRNA sense strand
agauaugaggagacagauu

SEQ ID NO: 2241927 - RNA, 19 nt, Homo sapiens
  misc_RNA (1)...(19): siRNA sense strand
ugacgaacgacaagaucaa

SEQ ID NO: 2241928 - RNA, 19 nt, Homo sapiens
  misc_RNA (1)...(19): siRNA sense strand
aggaugaccuggagaagga

SEQ ID NO: 2241929 - RNA, 19 nt, Homo sapiens
  misc_RNA (1)...(19): siRNA sense strand
cgaagagccaggugaugaa

SEQ ID NO: 2241930 - RNA, 19 nt, Homo sapiens
  misc_RNA (1)...(19): siRNA sense strand
ggguauauuuccugcuuca

SEQ ID NO: 2241931 - RNA, 19 nt, Homo sapiens
  misc_RNA (1)...(19): siRNA sense strand
cgagagaaccauauauaca

SEQ ID NO: 2241932 - RNA, 19 nt, Homo sapiens
  misc_RNA (1)...(19): siRNA sense strand
agcgauaguugaaggaaaa

SEQ ID NO: 2241933 - RNA, 19 nt, Homo sapiens
  misc_RNA (1)...(19): siRNA sense strand
ccagauuaucauggagaaa

SEQ ID NO: 2241934 - RNA, 19 nt, Homo sapiens
  misc_RNA (1)...(19): siRNA sense strand
gaggagacgaacaguacaa

SEQ ID NO: 2241935 - RNA, 19 nt, Homo sapiens
  misc_RNA (1)...(19): siRNA sense strand
gagaaagaauuuaaaccca

SEQ ID NO: 2241936 - RNA, 19 nt, Homo sapiens
  misc_RNA (1)...(19): siRNA sense strand
agaagaaggucacagccaa

SEQ ID NO: 2241937 - RNA, 19 nt, Homo sapiens
  misc_RNA (1)...(19): siRNA sense strand
guggugaaguagugaaguu

SEQ ID NO: 2241938 - RNA, 19 nt, Homo sapiens
  misc_RNA (1)...(19): siRNA sense strand
gauuagagcaugugauuuu

SEQ ID NO: 2241939 - RNA, 19 nt, Homo sapiens
  misc_RNA (1)...(19): siRNA sense strand
aggacaagcuggacaagga

SEQ ID NO: 2241940 - RNA, 19 nt, Homo sapiens
  misc_RNA (1)...(19): siRNA sense strand
ggaaaagggcaacaugaaa

SEQ ID NO: 2241941 - RNA, 19 nt, Homo sapiens
  misc_RNA (1)...(19): siRNA sense strand
agacauagacagauuacau

SEQ ID NO: 2241942 - RNA, 19 nt, Homo sapiens
  misc_RNA (1)...(19): siRNA sense strand
agauaaaguucauuccaga

SEQ ID NO: 2241943 - RNA, 19 nt, Homo sapiens
  misc_RNA (1)...(19): siRNA sense strand
gauggauguaacagauaua

SEQ ID NO: 2241944 - RNA, 19 nt, Homo sapiens
  misc_RNA (1)...(19): siRNA sense strand
cgaagaacguggaggucac

SEQ ID NO: 2241945 - RNA, 19 nt, Homo sapiens
  misc_RNA (1)...(19): siRNA sense strand
aauccggaagggagagaaa

SEQ ID NO: 2241946 - RNA, 19 nt, Homo sapiens
  misc_RNA (1)...(19): siRNA sense strand
gcacaugaucuaugaccuu

SEQ ID NO: 2241947 - RNA, 19 nt, Homo sapiens
  misc_RNA (1)...(19): siRNA sense strand
ccuggugguuagagaugaa

SEQ ID NO: 2241948 - RNA, 19 nt, Homo sapiens
  misc_RNA (1)...(19): siRNA sense strand
gguccagcgauuugaauau

SEQ ID NO: 2241949 - RNA, 19 nt, Homo sapiens
  misc_RNA (1)...(19): siRNA sense strand
gcuuggagcugaacggcau

SEQ ID NO: 2241950 - RNA, 19 nt, Homo sapiens
  misc_RNA (1)...(19): siRNA sense strand
gagaugaagaugggaauau

SEQ ID NO: 2241951 - RNA, 19 nt, Homo sapiens
  misc_RNA (1)...(19): siRNA sense strand
aguaccaucuggagagaca

SEQ ID NO: 2241952 - RNA, 19 nt, Homo sapiens
  misc_RNA (1)...(19): siRNA sense strand
ugaaauuacuuccuggaga

SEQ ID NO: 2241953 - RNA, 19 nt, Homo sapiens
  misc_RNA (1)...(19): siRNA sense strand
ccacgaaggcagaguugga

SEQ ID NO: 2241954 - RNA, 19 nt, Homo sapiens
  misc_RNA (1)...(19): siRNA sense strand
ucgaaaucguccacaguga

SEQ ID NO: 2241955 - RNA, 19 nt, Homo sapiens
  misc_RNA (1)...(19): siRNA sense strand
ccaucaugcacgacgagaa

SEQ ID NO: 2241956 - RNA, 19 nt, Homo sapiens
  misc_RNA (1)...(19): siRNA sense strand
acgacaagaucaacagcau

SEQ ID NO: 2241957 - RNA, 19 nt, Homo sapiens
  misc_RNA (1)...(19): siRNA sense strand
uggagaaggagaagaagga

SEQ ID NO: 2241958 - RNA, 19 nt, Homo sapiens
  misc_RNA (1)...(19): siRNA sense strand
cuucuaaacaaguggagga

SEQ ID NO: 2241959 - RNA, 19 nt, Homo sapiens
  misc_RNA (1)...(19): siRNA sense strand
aggaaagguuacaagagga

SEQ ID NO: 2241960 - RNA, 19 nt, Homo sapiens
  misc_RNA (1)...(19): siRNA sense strand
gcaaagaccugaaaaggga

SEQ ID NO: 2241961 - RNA, 19 nt, Homo sapiens
  misc_RNA (1)...(19): siRNA sense strand
cacaggacucuaaggauaa

SEQ ID NO: 2241962 - RNA, 19 nt, Homo sapiens
  misc_RNA (1)...(19): siRNA sense strand
cagcagaacuugaggcagc

SEQ ID NO: 2241963 - RNA, 19 nt, Homo sapiens
  misc_RNA (1)...(19): siRNA sense strand
ugaacauggugcaaaauaa

SEQ ID NO: 2241964 - RNA, 19 nt, Homo sapiens
  misc_RNA (1)...(19): siRNA sense strand
gggugaaggaggagggcua

SEQ ID NO: 2241965 - RNA, 19 nt, Homo sapiens
  misc_RNA (1)...(19): siRNA sense strand
gugcagacgcugugccgaa

SEQ ID NO: 2241966 - RNA, 19 nt, Homo sapiens
  misc_RNA (1)...(19): siRNA sense strand
gagagggaguacaacggaa

SEQ ID NO: 2241967 - RNA, 19 nt, Homo sapiens
  misc_RNA (1)...(19): siRNA sense strand
ggguaacggugcagaggac

SEQ ID NO: 2241968 - RNA, 19 nt, Homo sapiens
  misc_RNA (1)...(19): siRNA sense strand
gggucaagucagagggcuc

SEQ ID NO: 2241969 - RNA, 19 nt, Homo sapiens
  misc_RNA (1)...(19): siRNA sense strand
agaccugggccgugcucua

SEQ ID NO: 2241970 - RNA, 19 nt, Homo sapiens
  misc_RNA (1)...(19): siRNA sense strand
gggaccaagagguggagga

SEQ ID NO: 2241971 - RNA, 19 nt, Homo sapiens
  misc_RNA (1)...(19): siRNA sense strand
ccuuagacucccugcgcau

SEQ ID NO: 2241972 - RNA, 19 nt, Homo sapiens
  misc_RNA (1)...(19): siRNA sense strand
ggcccauacaugagagaaa

SEQ ID NO: 2241973 - RNA, 19 nt, Homo sapiens
  misc_RNA (1)...(19): siRNA sense strand
ugguagaguuggaagguga

SEQ ID NO: 2241974 - RNA, 19 nt, Homo sapiens
  misc_RNA (1)...(19): siRNA sense strand
auuccaaguucaagaccaa

SEQ ID NO: 2241975 - RNA, 19 nt, Homo sapiens
  misc_RNA (1)...(19): siRNA sense strand
ggaaggugauugucgggau

SEQ ID NO: 2241976 - RNA, 19 nt, Homo sapiens
  misc_RNA (1)...(19): siRNA sense strand
gcaugaucuuccugggcuu

SEQ ID NO: 2241977 - RNA, 19 nt, Homo sapiens
  misc_RNA (1)...(19): siRNA sense strand
ccacuuugggauugcucua

SEQ ID NO: 2241978 - RNA, 19 nt, Homo sapiens
  misc_RNA (1)...(19): siRNA sense strand
ggcccauacaugagagaaa

SEQ ID NO: 2241979 - RNA, 19 nt, Homo sapiens
  misc_RNA (1)...(19): siRNA sense strand
ugguagaguuggaagguga

SEQ ID NO: 2241980 - RNA, 19 nt, Homo sapiens
  misc_RNA (1)...(19): siRNA sense strand
auuccaaguucaagaccaa

SEQ ID NO: 2241981 - RNA, 19 nt, Homo sapiens
  misc_RNA (1)...(19): siRNA sense strand
ggaaggugauugucgggau

SEQ ID NO: 2241982 - RNA, 19 nt, Homo sapiens
  misc_RNA (1)...(19): siRNA sense strand
ccacuuugggauugcucua

SEQ ID NO: 2241983 - RNA, 19 nt, Homo sapiens
  misc_RNA (1)...(19): siRNA sense strand
gagucagagcugugggaaa

SEQ ID NO: 2241984 - RNA, 19 nt, Homo sapiens
  misc_RNA (1)...(19): siRNA sense strand
cugaccagcuauugggaga

SEQ ID NO: 2241985 - RNA, 19 nt, Homo sapiens
  misc_RNA (1)...(19): siRNA sense strand
gcuaagggcacgaagacga

SEQ ID NO: 2241986 - RNA, 19 nt, Homo sapiens
  misc_RNA (1)...(19): siRNA sense strand
ccuaugaggaugagggaag

SEQ ID NO: 2241987 - RNA, 19 nt, Homo sapiens
  misc_RNA (1)...(19): siRNA sense strand
ggaggagacgacaggguca

SEQ ID NO: 2241988 - RNA, 19 nt, Homo sapiens
  misc_RNA (1)...(19): siRNA sense strand
gguggaugucuuugugcua

SEQ ID NO: 2241989 - RNA, 19 nt, Homo sapiens
  misc_RNA (1)...(19): siRNA sense strand
ggaugagggaagcggcuga

SEQ ID NO: 2241990 - RNA, 19 nt, Homo sapiens
  misc_RNA (1)...(19): siRNA sense strand
cuguggugcugcugaguga

SEQ ID NO: 2241991 - RNA, 19 nt, Homo sapiens
  misc_RNA (1)...(19): siRNA sense strand
agauguucauucuggguga

SEQ ID NO: 2241992 - RNA, 19 nt, Homo sapiens
  misc_RNA (1)...(19): siRNA sense strand
acucauuacuggagaucuc

SEQ ID NO: 2241993 - RNA, 19 nt, Homo sapiens
  misc_RNA (1)...(19): siRNA sense strand
cugaccagcuauugggaga

SEQ ID NO: 2241994 - RNA, 19 nt, Homo sapiens
  misc_RNA (1)...(19): siRNA sense strand
ggaggagacgacaggguca

SEQ ID NO: 2241995 - RNA, 19 nt, Homo sapiens
  misc_RNA (1)...(19): siRNA sense strand
agauguucauucuggguga

SEQ ID NO: 2241996 - RNA, 19 nt, Homo sapiens
  misc_RNA (1)...(19): siRNA sense strand
ccagaaagcucuugggaag

SEQ ID NO: 2241997 - RNA, 19 nt, Homo sapiens
  misc_RNA (1)...(19): siRNA sense strand
ggaagguggucuaugguga

SEQ ID NO: 2241998 - RNA, 19 nt, Homo sapiens
  misc_RNA (1)...(19): siRNA sense strand
agacuuaauugcagaggga

SEQ ID NO: 2241999 - RNA, 19 nt, Homo sapiens
  misc_RNA (1)...(19): siRNA sense strand
aggcgugcauagugguaaa

SEQ ID NO: 2242000 - RNA, 19 nt, Homo sapiens
  misc_RNA (1)...(19): siRNA sense strand
caaagaagauguuggcucu

SEQ ID NO: 2242001 - RNA, 19 nt, Homo sapiens
  misc_RNA (1)...(19): siRNA sense strand
gacuauuucaagaggcaaa

SEQ ID NO: 2242002 - RNA, 19 nt, Homo sapiens
  misc_RNA (1)...(19): siRNA sense strand
acugaaauccagagugaca

SEQ ID NO: 2242003 - RNA, 19 nt, Homo sapiens
  misc_RNA (1)...(19): siRNA sense strand
ucaagauguuuauggccua

SEQ ID NO: 2242004 - RNA, 19 nt, Homo sapiens
  misc_RNA (1)...(19): siRNA sense strand
ccuauaaagaucuguacau

SEQ ID NO: 2242005 - RNA, 19 nt, Homo sapiens
  misc_RNA (1)...(19): siRNA sense strand
gguggagugaccagguuaa

SEQ ID NO: 2242006 - RNA, 19 nt, Homo sapiens
  misc_RNA (1)...(19): siRNA sense strand
gugcaaggaaauuggagca

SEQ ID NO: 2242007 - RNA, 19 nt, Homo sapiens
  misc_RNA (1)...(19): siRNA sense strand
cagaggcaguggaggcaga

SEQ ID NO: 2242008 - RNA, 19 nt, Homo sapiens
  misc_RNA (1)...(19): siRNA sense strand
gcaaagaagauguuggcuc

SEQ ID NO: 2242009 - RNA, 19 nt, Homo sapiens
  misc_RNA (1)...(19): siRNA sense strand
gaagaauagcuguaggauc

SEQ ID NO: 2242010 - RNA, 19 nt, Homo sapiens
  misc_RNA (1)...(19): siRNA sense strand
gugacuauuucaagaggca

SEQ ID NO: 2242011 - RNA, 19 nt, Homo sapiens
  misc_RNA (1)...(19): siRNA sense strand
gggugaaugguguugaaga

SEQ ID NO: 2242012 - RNA, 19 nt, Homo sapiens
  misc_RNA (1)...(19): siRNA sense strand
augcaaggagagaugggaa

SEQ ID NO: 2242013 - RNA, 19 nt, Homo sapiens
  misc_RNA (1)...(19): siRNA sense strand
gccagaaagcucuugggaa

SEQ ID NO: 2242014 - RNA, 19 nt, Homo sapiens
  misc_RNA (1)...(19): siRNA sense strand
gagcaauugcccaggucca

SEQ ID NO: 2242015 - RNA, 19 nt, Homo sapiens
  misc_RNA (1)...(19): siRNA sense strand
gugcaagauaaagguguua

SEQ ID NO: 2242016 - RNA, 19 nt, Homo sapiens
  misc_RNA (1)...(19): siRNA sense strand
cagagggagcaaagaagau

SEQ ID NO: 2242017 - RNA, 19 nt, Homo sapiens
  misc_RNA (1)...(19): siRNA sense strand
aaugaaaauccuugugcaa

SEQ ID NO: 2242018 - RNA, 19 nt, Homo sapiens
  misc_RNA (1)...(19): siRNA sense strand
gugcaugugaugagcaagu

SEQ ID NO: 2242019 - RNA, 19 nt, Homo sapiens
  misc_RNA (1)...(19): siRNA sense strand
uccaagaaaaggaagaaua

SEQ ID NO: 2242020 - RNA, 19 nt, Homo sapiens
  misc_RNA (1)...(19): siRNA sense strand
gcaaagugguauaugaagc

SEQ ID NO: 2242021 - RNA, 19 nt, Homo sapiens
  misc_RNA (1)...(19): siRNA sense strand
cgaauaaagcagcgagacc

SEQ ID NO: 2242022 - RNA, 19 nt, Homo sapiens
  misc_RNA (1)...(19): siRNA sense strand
aggaagaauagcuguagga

SEQ ID NO: 2242023 - RNA, 19 nt, Homo sapiens
  misc_RNA (1)...(19): siRNA sense strand
ggaauaaagaauggcacca

SEQ ID NO: 2242024 - RNA, 19 nt, Homo sapiens
  misc_RNA (1)...(19): siRNA sense strand
caagaaaggugguggcauc

SEQ ID NO: 2242025 - RNA, 19 nt, Homo sapiens
  misc_RNA (1)...(19): siRNA sense strand
cauugaaggcgcagcccaa

SEQ ID NO: 2242026 - RNA, 19 nt, Homo sapiens
  misc_RNA (1)...(19): siRNA sense strand
acacagaagaacaaggcca

SEQ ID NO: 2242027 - RNA, 19 nt, Homo sapiens
  misc_RNA (1)...(19): siRNA sense strand
aggcgcagcccaaggaaaa

SEQ ID NO: 2242028 - RNA, 19 nt, Homo sapiens
  misc_RNA (1)...(19): siRNA sense strand
acaucuacuucaagcccaa

SEQ ID NO: 2242029 - RNA, 19 nt, Homo sapiens
  misc_RNA (1)...(19): siRNA sense strand
cggagaucgagaaggagau

SEQ ID NO: 2242030 - RNA, 19 nt, Homo sapiens
  misc_RNA (1)...(19): siRNA sense strand
gcaugaagcugaaccugga

SEQ ID NO: 2242031 - RNA, 19 nt, Homo sapiens
  misc_RNA (1)...(19): siRNA sense strand
agggagaggugcagagguc

SEQ ID NO: 2242032 - RNA, 19 nt, Homo sapiens
  misc_RNA (1)...(19): siRNA sense strand
uggaagagguggaccgccu

SEQ ID NO: 2242033 - RNA, 19 nt, Homo sapiens
  misc_RNA (1)...(19): siRNA sense strand
cuggagaugcuuugggagu

SEQ ID NO: 2242034 - RNA, 19 nt, Homo sapiens
  misc_RNA (1)...(19): siRNA sense strand
gcauuaagcaagucccuga

SEQ ID NO: 2242035 - RNA, 19 nt, Homo sapiens
  misc_RNA (1)...(19): siRNA sense strand
gcauuaagcaagucccuga

SEQ ID NO: 2242036 - RNA, 19 nt, Homo sapiens
  misc_RNA (1)...(19): siRNA sense strand
gcauuaagcaagucccuga

SEQ ID NO: 2242037 - RNA, 19 nt, Homo sapiens
  misc_RNA (1)...(19): siRNA sense strand
gcauuaagcaagucccuga

SEQ ID NO: 2242038 - RNA, 19 nt, Homo sapiens
  misc_RNA (1)...(19): siRNA sense strand
gcauuaagcaagucccuga

SEQ ID NO: 2242039 - RNA, 19 nt, Homo sapiens
  misc_RNA (1)...(19): siRNA sense strand
gcauuaagcaagucccuga

SEQ ID NO: 2242040 - RNA, 19 nt, Homo sapiens
  misc_RNA (1)...(19): siRNA sense strand
cacagaagguugaggaaaa

SEQ ID NO: 2242041 - RNA, 19 nt, Homo sapiens
  misc_RNA (1)...(19): siRNA sense strand
aggaugaagaagugaaaga

SEQ ID NO: 2242042 - RNA, 19 nt, Homo sapiens
  misc_RNA (1)...(19): siRNA sense strand
aguuauaccugaaggggaa

SEQ ID NO: 2242043 - RNA, 19 nt, Homo sapiens
  misc_RNA (1)...(19): siRNA sense strand
ccacagaagguugaggaaa

SEQ ID NO: 2242044 - RNA, 19 nt, Homo sapiens
  misc_RNA (1)...(19): siRNA sense strand
ccgaauaguaagaaaagaa

SEQ ID NO: 2242045 - RNA, 19 nt, Homo sapiens
  misc_RNA (1)...(19): siRNA sense strand
uugcaaugcugaagaggau

SEQ ID NO: 2242046 - RNA, 19 nt, Homo sapiens
  misc_RNA (1)...(19): siRNA sense strand
ccuacuugcgucugggaaa

SEQ ID NO: 2242047 - RNA, 19 nt, Homo sapiens
  misc_RNA (1)...(19): siRNA sense strand
agugaaagaagaagauaca

SEQ ID NO: 2242048 - RNA, 19 nt, Homo sapiens
  misc_RNA (1)...(19): siRNA sense strand
aagaagauacagagcaaaa

SEQ ID NO: 2242049 - RNA, 19 nt, Homo sapiens
  misc_RNA (1)...(19): siRNA sense strand
ggaccgaauaguaagaaaa

SEQ ID NO: 2242050 - RNA, 19 nt, Homo sapiens
  misc_RNA (1)...(19): siRNA sense strand
ucacacaagcacagaucaa

SEQ ID NO: 2242051 - RNA, 19 nt, Homo sapiens
  misc_RNA (1)...(19): siRNA sense strand
acaagaaaugaaagcacua

SEQ ID NO: 2242052 - RNA, 19 nt, Homo sapiens
  misc_RNA (1)...(19): siRNA sense strand
augaggaggaggaggguga

SEQ ID NO: 2242053 - RNA, 19 nt, Homo sapiens
  misc_RNA (1)...(19): siRNA sense strand
gugaggaggaugaggagga

SEQ ID NO: 2242054 - RNA, 19 nt, Homo sapiens
  misc_RNA (1)...(19): siRNA sense strand
aagcaaaggaggaagaucu

SEQ ID NO: 2242055 - RNA, 19 nt, Homo sapiens
  misc_RNA (1)...(19): siRNA sense strand
aggaagcaaaggaggaaga

SEQ ID NO: 2242056 - RNA, 19 nt, Homo sapiens
  misc_RNA (1)...(19): siRNA sense strand
gaagggaggaggaggagga

SEQ ID NO: 2242057 - RNA, 19 nt, Homo sapiens
  misc_RNA (1)...(19): siRNA sense strand
aggaggaggaugaggagga

SEQ ID NO: 2242058 - RNA, 19 nt, Homo sapiens
  misc_RNA (1)...(19): siRNA sense strand
auuauagcauggaggaaaa

SEQ ID NO: 2242059 - RNA, 19 nt, Homo sapiens
  misc_RNA (1)...(19): siRNA sense strand
auacagagcaaaagagaga

SEQ ID NO: 2242060 - RNA, 19 nt, Homo sapiens
  misc_RNA (1)...(19): siRNA sense strand
gagaacaaucuucaggcua

SEQ ID NO: 2242061 - RNA, 19 nt, Homo sapiens
  misc_RNA (1)...(19): siRNA sense strand
aagaagugaaagaagaaga

SEQ ID NO: 2242062 - RNA, 19 nt, Homo sapiens
  misc_RNA (1)...(19): siRNA sense strand
cugaagaaguuaaugcguu

SEQ ID NO: 2242063 - RNA, 19 nt, Homo sapiens
  misc_RNA (1)...(19): siRNA sense strand
aucuauaccaccugggaua

SEQ ID NO: 2242064 - RNA, 19 nt, Homo sapiens
  misc_RNA (1)...(19): siRNA sense strand
ccuaggaagcaaaggagga

SEQ ID NO: 2242065 - RNA, 19 nt, Homo sapiens
  misc_RNA (1)...(19): siRNA sense strand
ugggauacaagaaaugaaa

SEQ ID NO: 2242066 - RNA, 19 nt, Homo sapiens
  misc_RNA (1)...(19): siRNA sense strand
gugaggagggugaggagga

SEQ ID NO: 2242067 - RNA, 19 nt, Homo sapiens
  misc_RNA (1)...(19): siRNA sense strand
cagugaagccaaugucaau

SEQ ID NO: 2242068 - RNA, 19 nt, Homo sapiens
  misc_RNA (1)...(19): siRNA sense strand
ccaccugggauacaagaaa

SEQ ID NO: 2242069 - RNA, 19 nt, Homo sapiens
  misc_RNA (1)...(19): siRNA sense strand
ggaaccagauugaacggau

SEQ ID NO: 2242070 - RNA, 19 nt, Homo sapiens
  misc_RNA (1)...(19): siRNA sense strand
uggaccgaauaguaagaaa

SEQ ID NO: 2242071 - RNA, 19 nt, Homo sapiens
  misc_RNA (1)...(19): siRNA sense strand
gaauuauaccgcagggucu

SEQ ID NO: 2242072 - RNA, 19 nt, Homo sapiens
  misc_RNA (1)...(19): siRNA sense strand
aaggaagggaggaggagga

SEQ ID NO: 2242073 - RNA, 19 nt, Homo sapiens
  misc_RNA (1)...(19): siRNA sense strand
agaaauuugcaaugcugaa

SEQ ID NO: 2242074 - RNA, 19 nt, Homo sapiens
  misc_RNA (1)...(19): siRNA sense strand
caaacagacagcuuggaau

SEQ ID NO: 2242075 - RNA, 19 nt, Homo sapiens
  misc_RNA (1)...(19): siRNA sense strand
aaucugaggaggaugaaga

SEQ ID NO: 2242076 - RNA, 19 nt, Homo sapiens
  misc_RNA (1)...(19): siRNA sense strand
aggaggaugaggaggacga

SEQ ID NO: 2242077 - RNA, 19 nt, Homo sapiens
  misc_RNA (1)...(19): siRNA sense strand
cgaugaagaaaguuuauca

SEQ ID NO: 2242078 - RNA, 19 nt, Homo sapiens
  misc_RNA (1)...(19): siRNA sense strand
auaauguguuaccaggaaa

SEQ ID NO: 2242079 - RNA, 19 nt, Homo sapiens
  misc_RNA (1)...(19): siRNA sense strand
aggcuugaucugaguaaaa

SEQ ID NO: 2242080 - RNA, 19 nt, Homo sapiens
  misc_RNA (1)...(19): siRNA sense strand
agaagugaaagaagaagau

SEQ ID NO: 2242081 - RNA, 19 nt, Homo sapiens
  misc_RNA (1)...(19): siRNA sense strand
augaggaggacgaggagga

SEQ ID NO: 2242082 - RNA, 19 nt, Homo sapiens
  misc_RNA (1)...(19): siRNA sense strand
cuaucgaugaagaaaguuu

SEQ ID NO: 2242083 - RNA, 19 nt, Homo sapiens
  misc_RNA (1)...(19): siRNA sense strand
cuggaguagaaucaaguua

SEQ ID NO: 2242084 - RNA, 19 nt, Homo sapiens
  misc_RNA (1)...(19): siRNA sense strand
agcaaaggaggaagaucua

SEQ ID NO: 2242085 - RNA, 19 nt, Homo sapiens
  misc_RNA (1)...(19): siRNA sense strand
aggaggaugaggaggagga

SEQ ID NO: 2242086 - RNA, 19 nt, Homo sapiens
  misc_RNA (1)...(19): siRNA sense strand
aggagggugaggaggguga

SEQ ID NO: 2242087 - RNA, 19 nt, Homo sapiens
  misc_RNA (1)...(19): siRNA sense strand
aggcauagguccaaaagca

SEQ ID NO: 2242088 - RNA, 19 nt, Homo sapiens
  misc_RNA (1)...(19): siRNA sense strand
gcuccuuuagccuggauaa

SEQ ID NO: 2242089 - RNA, 19 nt, Homo sapiens
  misc_RNA (1)...(19): siRNA sense strand
acuguuugguaaagggcau

SEQ ID NO: 2242090 - RNA, 19 nt, Homo sapiens
  misc_RNA (1)...(19): siRNA sense strand
cugaggaggaugaagaagu

SEQ ID NO: 2242091 - RNA, 19 nt, Homo sapiens
  misc_RNA (1)...(19): siRNA sense strand
aggaggaugaagaagugaa

SEQ ID NO: 2242092 - RNA, 19 nt, Homo sapiens
  misc_RNA (1)...(19): siRNA sense strand
cgguaagaggagauauguu

SEQ ID NO: 2242093 - RNA, 19 nt, Homo sapiens
  misc_RNA (1)...(19): siRNA sense strand
aggaaacaaucucagugaa

SEQ ID NO: 2242094 - RNA, 19 nt, Homo sapiens
  misc_RNA (1)...(19): siRNA sense strand
agggacacuguuugguaaa

SEQ ID NO: 2242095 - RNA, 19 nt, Homo sapiens
  misc_RNA (1)...(19): siRNA sense strand
aggagggugaggaggauga

SEQ ID NO: 2242096 - RNA, 19 nt, Homo sapiens
  misc_RNA (1)...(19): siRNA sense strand
cgccaugcuuacccagaua

SEQ ID NO: 2242097 - RNA, 19 nt, Homo sapiens
  misc_RNA (1)...(19): siRNA sense strand
ccacagagcccuuggaccu

SEQ ID NO: 2242098 - RNA, 19 nt, Homo sapiens
  misc_RNA (1)...(19): siRNA sense strand
ugaagaaacgggugaggcu

SEQ ID NO: 2242099 - RNA, 19 nt, Homo sapiens
  misc_RNA (1)...(19): siRNA sense strand
ccacagagcccuuggaccu

SEQ ID NO: 2242100 - RNA, 19 nt, Homo sapiens
  misc_RNA (1)...(19): siRNA sense strand
ugaagaaacgggugaggcu

SEQ ID NO: 2242101 - RNA, 19 nt, Homo sapiens
  misc_RNA (1)...(19): siRNA sense strand
uggugaaagugaaaggaaa

SEQ ID NO: 2242102 - RNA, 19 nt, Homo sapiens
  misc_RNA (1)...(19): siRNA sense strand
ggugaaagugaaaggaaau

SEQ ID NO: 2242103 - RNA, 19 nt, Homo sapiens
  misc_RNA (1)...(19): siRNA sense strand
aucuaaagcucaagaggaa

SEQ ID NO: 2242104 - RNA, 19 nt, Homo sapiens
  misc_RNA (1)...(19): siRNA sense strand
auaagaacccagagggauu

SEQ ID NO: 2242105 - RNA, 19 nt, Homo sapiens
  misc_RNA (1)...(19): siRNA sense strand
caacaaugacaauaggcaa

SEQ ID NO: 2242106 - RNA, 19 nt, Homo sapiens
  misc_RNA (1)...(19): siRNA sense strand
uauaauuggcauugggaau

SEQ ID NO: 2242107 - RNA, 19 nt, Homo sapiens
  misc_RNA (1)...(19): siRNA sense strand
acauagauaccauggaaga

SEQ ID NO: 2242108 - RNA, 19 nt, Homo sapiens
  misc_RNA (1)...(19): siRNA sense strand
cuaaagcucaagaggaaau

SEQ ID NO: 2242109 - RNA, 19 nt, Homo sapiens
  misc_RNA (1)...(19): siRNA sense strand
ucacugaaucugaagggaa

SEQ ID NO: 2242110 - RNA, 19 nt, Homo sapiens
  misc_RNA (1)...(19): siRNA sense strand
gcuguagagauuagccaaa

SEQ ID NO: 2242111 - RNA, 19 nt, Homo sapiens
  misc_RNA (1)...(19): siRNA sense strand
ggaaauugacaaaagguau

SEQ ID NO: 2242112 - RNA, 19 nt, Homo sapiens
  misc_RNA (1)...(19): siRNA sense strand
cuauaagaacccagaggga

SEQ ID NO: 2242113 - RNA, 19 nt, Homo sapiens
  misc_RNA (1)...(19): siRNA sense strand
aggaguaguucuaugacuu

SEQ ID NO: 2242114 - RNA, 19 nt, Homo sapiens
  misc_RNA (1)...(19): siRNA sense strand
aaagguauguggagagcca

SEQ ID NO: 2242115 - RNA, 19 nt, Homo sapiens
  misc_RNA (1)...(19): siRNA sense strand
aaaggaaaugugaaggaau

SEQ ID NO: 2242116 - RNA, 19 nt, Homo sapiens
  misc_RNA (1)...(19): siRNA sense strand
ugacaauaggcaaguuuau

SEQ ID NO: 2242117 - RNA, 19 nt, Homo sapiens
  misc_RNA (1)...(19): siRNA sense strand
gagauuagccaaacagcca

SEQ ID NO: 2242118 - RNA, 19 nt, Homo sapiens
  misc_RNA (1)...(19): siRNA sense strand
agagugaaaugauggcaga

SEQ ID NO: 2242119 - RNA, 19 nt, Homo sapiens
  misc_RNA (1)...(19): siRNA sense strand
gcagaaauaucuaaagcuc

SEQ ID NO: 2242120 - RNA, 19 nt, Homo sapiens
  misc_RNA (1)...(19): siRNA sense strand
aggcuauagcuuugacuuu

SEQ ID NO: 2242121 - RNA, 19 nt, Homo sapiens
  misc_RNA (1)...(19): siRNA sense strand
cagaaauaucuaaagcuca

SEQ ID NO: 2242122 - RNA, 19 nt, Homo sapiens
  misc_RNA (1)...(19): siRNA sense strand
uggcuuggugaaagugaaa

SEQ ID NO: 2242123 - RNA, 19 nt, Homo sapiens
  misc_RNA (1)...(19): siRNA sense strand
agugaaaugauggcagaaa

SEQ ID NO: 2242124 - RNA, 19 nt, Homo sapiens
  misc_RNA (1)...(19): siRNA sense strand
auggaagaucuguggccaa

SEQ ID NO: 2242125 - RNA, 19 nt, Homo sapiens
  misc_RNA (1)...(19): siRNA sense strand
aagaguaguugaaaggagu

SEQ ID NO: 2242126 - RNA, 19 nt, Homo sapiens
  misc_RNA (1)...(19): siRNA sense strand
cuggaaagagagucauuau

SEQ ID NO: 2242127 - RNA, 19 nt, Homo sapiens
  misc_RNA (1)...(19): siRNA sense strand
cguagaagaaggcuuggaa

SEQ ID NO: 2242128 - RNA, 19 nt, Homo sapiens
  misc_RNA (1)...(19): siRNA sense strand
uugaaaggacugaugacau

SEQ ID NO: 2242129 - RNA, 19 nt, Homo sapiens
  misc_RNA (1)...(19): siRNA sense strand
gaugaaugucuuugaugga

SEQ ID NO: 2242130 - RNA, 19 nt, Homo sapiens
  misc_RNA (1)...(19): siRNA sense strand
cgacugcucugaugcggaa

SEQ ID NO: 2242131 - RNA, 19 nt, Homo sapiens
  misc_RNA (1)...(19): siRNA sense strand
gguauugaccugauggaca

SEQ ID NO: 2242132 - RNA, 19 nt, Homo sapiens
  misc_RNA (1)...(19): siRNA sense strand
acaaagaggucaugcugga

SEQ ID NO: 2242133 - RNA, 19 nt, Homo sapiens
  misc_RNA (1)...(19): siRNA sense strand
gaacaaggucuucuggaga

SEQ ID NO: 2242134 - RNA, 19 nt, Homo sapiens
  misc_RNA (1)...(19): siRNA sense strand
aggagguggacguggguuu

SEQ ID NO: 2242135 - RNA, 19 nt, Homo sapiens
  misc_RNA (1)...(19): siRNA sense strand
ugguagagugcuucaacaa

SEQ ID NO: 2242136 - RNA, 19 nt, Homo sapiens
  misc_RNA (1)...(19): siRNA sense strand
caggagaccuucaacguca

SEQ ID NO: 2242137 - RNA, 19 nt, Homo sapiens
  misc_RNA (1)...(19): siRNA sense strand
ggagagagaugguagagug

SEQ ID NO: 2242138 - RNA, 19 nt, Homo sapiens
  misc_RNA (1)...(19): siRNA sense strand
cccacaagaugauggcuga

SEQ ID NO: 2242139 - RNA, 19 nt, Homo sapiens
  misc_RNA (1)...(19): siRNA sense strand
ggguguucccagacaaaga

SEQ ID NO: 2242140 - RNA, 19 nt, Homo sapiens
  misc_RNA (1)...(19): siRNA sense strand
aggugaaggagguggacgu

SEQ ID NO: 2242141 - RNA, 19 nt, Homo sapiens
  misc_RNA (1)...(19): siRNA sense strand
gauaguggcuucucgcaga

SEQ ID NO: 2242142 - RNA, 19 nt, Homo sapiens
  misc_RNA (1)...(19): siRNA sense strand
gggacaacccagagaccau

SEQ ID NO: 2242143 - RNA, 19 nt, Homo sapiens
  misc_RNA (1)...(19): siRNA sense strand
cauuacaacuacacgggaa

SEQ ID NO: 2242144 - RNA, 19 nt, Homo sapiens
  misc_RNA (1)...(19): siRNA sense strand
cggacaaggagaacagcau

SEQ ID NO: 2242145 - RNA, 19 nt, Homo sapiens
  misc_RNA (1)...(19): siRNA sense strand
ccauuaugucuucuggaaa

SEQ ID NO: 2242146 - RNA, 19 nt, Homo sapiens
  misc_RNA (1)...(19): siRNA sense strand
auuacaacuacacgggaaa

SEQ ID NO: 2242147 - RNA, 19 nt, Homo sapiens
  misc_RNA (1)...(19): siRNA sense strand
cggaguacuuccugguguu

SEQ ID NO: 2242148 - RNA, 19 nt, Homo sapiens
  misc_RNA (1)...(19): siRNA sense strand
gcggagacucugcuggcaa

SEQ ID NO: 2242149 - RNA, 19 nt, Homo sapiens
  misc_RNA (1)...(19): siRNA sense strand
uuaucauccuggagaacau

SEQ ID NO: 2242150 - RNA, 19 nt, Homo sapiens
  misc_RNA (1)...(19): siRNA sense strand
ccaucgccauugagcgcua

SEQ ID NO: 2242151 - RNA, 19 nt, Homo sapiens
  misc_RNA (1)...(19): siRNA sense strand
gaugugggcugcaagguga

SEQ ID NO: 2242152 - RNA, 19 nt, Homo sapiens
  misc_RNA (1)...(19): siRNA sense strand
gcacauggcuccuucguca

SEQ ID NO: 2242153 - RNA, 19 nt, Homo sapiens
  misc_RNA (1)...(19): siRNA sense strand
ugguaauggugguucucua

SEQ ID NO: 2242154 - RNA, 19 nt, Homo sapiens
  misc_RNA (1)...(19): siRNA sense strand
acucggagacugacuguua

SEQ ID NO: 2242155 - RNA, 19 nt, Homo sapiens
  misc_RNA (1)...(19): siRNA sense strand
uggaaagcaucuugccaca

SEQ ID NO: 2242156 - RNA, 19 nt, Homo sapiens
  misc_RNA (1)...(19): siRNA sense strand
gagacugacuguuagcaca

SEQ ID NO: 2242157 - RNA, 19 nt, Homo sapiens
  misc_RNA (1)...(19): siRNA sense strand
caucguuaugggugcuaua

SEQ ID NO: 2242158 - RNA, 19 nt, Homo sapiens
  misc_RNA (1)...(19): siRNA sense strand
gacaaagaaaugagcgcca

SEQ ID NO: 2242159 - RNA, 19 nt, Homo sapiens
  misc_RNA (1)...(19): siRNA sense strand
gcaagcuggugaugggacu

SEQ ID NO: 2242160 - RNA, 19 nt, Homo sapiens
  misc_RNA (1)...(19): siRNA sense strand
acagaauggaacacaguca

SEQ ID NO: 2242161 - RNA, 19 nt, Homo sapiens
  misc_RNA (1)...(19): siRNA sense strand
gcacauggcuccuucguca

SEQ ID NO: 2242162 - RNA, 19 nt, Homo sapiens
  misc_RNA (1)...(19): siRNA sense strand
ugguaauggugguucucua

SEQ ID NO: 2242163 - RNA, 19 nt, Homo sapiens
  misc_RNA (1)...(19): siRNA sense strand
acucggagacugacuguua

SEQ ID NO: 2242164 - RNA, 19 nt, Homo sapiens
  misc_RNA (1)...(19): siRNA sense strand
uggaaagcaucuugccaca

SEQ ID NO: 2242165 - RNA, 19 nt, Homo sapiens
  misc_RNA (1)...(19): siRNA sense strand
gagacugacuguuagcaca

SEQ ID NO: 2242166 - RNA, 19 nt, Homo sapiens
  misc_RNA (1)...(19): siRNA sense strand
caucguuaugggugcuaua

SEQ ID NO: 2242167 - RNA, 19 nt, Homo sapiens
  misc_RNA (1)...(19): siRNA sense strand
gacaaagaaaugagcgcca

SEQ ID NO: 2242168 - RNA, 19 nt, Homo sapiens
  misc_RNA (1)...(19): siRNA sense strand
gcaagcuggugaugggacu

SEQ ID NO: 2242169 - RNA, 19 nt, Homo sapiens
  misc_RNA (1)...(19): siRNA sense strand
acagaauggaacacaguca

SEQ ID NO: 2242170 - RNA, 19 nt, Homo sapiens
  misc_RNA (1)...(19): siRNA sense strand
acacgguggaggugagcau

SEQ ID NO: 2242171 - RNA, 19 nt, Homo sapiens
  misc_RNA (1)...(19): siRNA sense strand
aggugagcaucaaugacua

SEQ ID NO: 2242172 - RNA, 19 nt, Homo sapiens
  misc_RNA (1)...(19): siRNA sense strand
ggaaagagaccgaggggca

SEQ ID NO: 2242173 - RNA, 19 nt, Homo sapiens
  misc_RNA (1)...(19): siRNA sense strand
acuggaacucggcgaauaa

SEQ ID NO: 2242174 - RNA, 19 nt, Homo sapiens
  misc_RNA (1)...(19): siRNA sense strand
auaagagguuccaggcaga

SEQ ID NO: 2242175 - RNA, 19 nt, Homo sapiens
  misc_RNA (1)...(19): siRNA sense strand
cugaaaugcccauggaaag

SEQ ID NO: 2242176 - RNA, 19 nt, Homo sapiens
  misc_RNA (1)...(19): siRNA sense strand
ccaaagauguggauggcaa

SEQ ID NO: 2242177 - RNA, 19 nt, Homo sapiens
  misc_RNA (1)...(19): siRNA sense strand
cuucagaaagcgaggacaa

SEQ ID NO: 2242178 - RNA, 19 nt, Homo sapiens
  misc_RNA (1)...(19): siRNA sense strand
ccacagaacaguuggacau

SEQ ID NO: 2242179 - RNA, 19 nt, Homo sapiens
  misc_RNA (1)...(19): siRNA sense strand
cggcaaagacugucagcuu

SEQ ID NO: 2242180 - RNA, 19 nt, Homo sapiens
  misc_RNA (1)...(19): siRNA sense strand
agaauguggaggagggcua

SEQ ID NO: 2242181 - RNA, 19 nt, Homo sapiens
  misc_RNA (1)...(19): siRNA sense strand
gggcuugagugacgggcaa

SEQ ID NO: 2242182 - RNA, 19 nt, Homo sapiens
  misc_RNA (1)...(19): siRNA sense strand
cggaggaguugcuggccaa

SEQ ID NO: 2242183 - RNA, 19 nt, Homo sapiens
  misc_RNA (1)...(19): siRNA sense strand
gcuaugagcugguggugga

SEQ ID NO: 2242184 - RNA, 19 nt, Homo sapiens
  misc_RNA (1)...(19): siRNA sense strand
ggaaaguaaccucggcgaa

SEQ ID NO: 2242185 - RNA, 19 nt, Homo sapiens
  misc_RNA (1)...(19): siRNA sense strand
gcgagagcauggagcguca

SEQ ID NO: 2242186 - RNA, 19 nt, Homo sapiens
  misc_RNA (1)...(19): siRNA sense strand
acuucgaggcagagagaga

SEQ ID NO: 2242187 - RNA, 19 nt, Homo sapiens
  misc_RNA (1)...(19): siRNA sense strand
cugaagaaccgguugcaau

SEQ ID NO: 2242188 - RNA, 19 nt, Homo sapiens
  misc_RNA (1)...(19): siRNA sense strand
gcaacugagccgugagcga

SEQ ID NO: 2242189 - RNA, 19 nt, Homo sapiens
  misc_RNA (1)...(19): siRNA sense strand
caacagggagcaaggguca

SEQ ID NO: 2242190 - RNA, 19 nt, Homo sapiens
  misc_RNA (1)...(19): siRNA sense strand
caacaucaucaguggcaau

SEQ ID NO: 2242191 - RNA, 19 nt, Homo sapiens
  misc_RNA (1)...(19): siRNA sense strand
ugacaguagccgaccgcaa

SEQ ID NO: 2242192 - RNA, 19 nt, Homo sapiens
  misc_RNA (1)...(19): siRNA sense strand
gggugaaagagaauagcau

SEQ ID NO: 2242193 - RNA, 19 nt, Homo sapiens
  misc_RNA (1)...(19): siRNA sense strand
ccaacugcaacaagacaaa

SEQ ID NO: 2242194 - RNA, 19 nt, Homo sapiens
  misc_RNA (1)...(19): siRNA sense strand
ccgugagcgacuagaggaa

SEQ ID NO: 2242195 - RNA, 19 nt, Homo sapiens
  misc_RNA (1)...(19): siRNA sense strand
acuacaagcaggaacgcua

SEQ ID NO: 2242196 - RNA, 19 nt, Homo sapiens
  misc_RNA (1)...(19): siRNA sense strand
acucauugaccuagacuau

SEQ ID NO: 2242197 - RNA, 19 nt, Homo sapiens
  misc_RNA (1)...(19): siRNA sense strand
cauuagacuaugaggacca

SEQ ID NO: 2242198 - RNA, 19 nt, Homo sapiens
  misc_RNA (1)...(19): siRNA sense strand
auguggaggugauggucaa

SEQ ID NO: 2242199 - RNA, 19 nt, Homo sapiens
  misc_RNA (1)...(19): siRNA sense strand
cugaugaugacguggguga

SEQ ID NO: 2242200 - RNA, 19 nt, Homo sapiens
  misc_RNA (1)...(19): siRNA sense strand
cggacaggaccuuugcaaa

SEQ ID NO: 2242201 - RNA, 19 nt, Homo sapiens
  misc_RNA (1)...(19): siRNA sense strand
gcgacucagccgaaagcua

SEQ ID NO: 2242202 - RNA, 19 nt, Homo sapiens
  misc_RNA (1)...(19): siRNA sense strand
ccagcaaggaugcagcuaa

SEQ ID NO: 2242203 - RNA, 19 nt, Homo sapiens
  misc_RNA (1)...(19): siRNA sense strand
cgaggcagagagagaguau

SEQ ID NO: 2242204 - RNA, 19 nt, Homo sapiens
  misc_RNA (1)...(19): siRNA sense strand
cagccgaaagcuagacaau

SEQ ID NO: 2242205 - RNA, 19 nt, Homo sapiens
  misc_RNA (1)...(19): siRNA sense strand
caguagaccgugaugccaa

SEQ ID NO: 2242206 - RNA, 19 nt, Homo sapiens
  misc_RNA (1)...(19): siRNA sense strand
cggccugaguucacaauga

SEQ ID NO: 2242207 - RNA, 19 nt, Homo sapiens
  misc_RNA (1)...(19): siRNA sense strand
uggaauuguccguacagua

SEQ ID NO: 2242208 - RNA, 19 nt, Homo sapiens
  misc_RNA (1)...(19): siRNA sense strand
gcaacaagacaaaugggca

SEQ ID NO: 2242209 - RNA, 19 nt, Homo sapiens
  misc_RNA (1)...(19): siRNA sense strand
acaaggacgccaacggauu

SEQ ID NO: 2242210 - RNA, 19 nt, Homo sapiens
  misc_RNA (1)...(19): siRNA sense strand
ucacaaugaaggaguacca

SEQ ID NO: 2242211 - RNA, 19 nt, Homo sapiens
  misc_RNA (1)...(19): siRNA sense strand
gaagaucggccaaugggua

SEQ ID NO: 2242212 - RNA, 19 nt, Homo sapiens
  misc_RNA (1)...(19): siRNA sense strand
ccaagauguucgagucacu

SEQ ID NO: 2242213 - RNA, 19 nt, Homo sapiens
  misc_RNA (1)...(19): siRNA sense strand
gcgagagcccugugagaac

SEQ ID NO: 2242214 - RNA, 19 nt, Homo sapiens
  misc_RNA (1)...(19): siRNA sense strand
cagcaaggaugcagcuaac

SEQ ID NO: 2242215 - RNA, 19 nt, Homo sapiens
  misc_RNA (1)...(19): siRNA sense strand
gcuccucaguucagcgaga

SEQ ID NO: 2242216 - RNA, 19 nt, Homo sapiens
  misc_RNA (1)...(19): siRNA sense strand
caaagauguggauggcaau

SEQ ID NO: 2242217 - RNA, 19 nt, Homo sapiens
  misc_RNA (1)...(19): siRNA sense strand
gugaaugaagaucggccaa

SEQ ID NO: 2242218 - RNA, 19 nt, Homo sapiens
  misc_RNA (1)...(19): siRNA sense strand
aggugauggugcaggaugu

SEQ ID NO: 2242219 - RNA, 19 nt, Homo sapiens
  misc_RNA (1)...(19): siRNA sense strand
gugaaagagaauagcauug

SEQ ID NO: 2242220 - RNA, 19 nt, Homo sapiens
  misc_RNA (1)...(19): siRNA sense strand
ucgccaagaauaugugauu

SEQ ID NO: 2242221 - RNA, 19 nt, Homo sapiens
  misc_RNA (1)...(19): siRNA sense strand
uggauaccauggaggccaa

SEQ ID NO: 2242222 - RNA, 19 nt, Homo sapiens
  misc_RNA (1)...(19): siRNA sense strand
cgagcagcccagagugaga

SEQ ID NO: 2242223 - RNA, 19 nt, Homo sapiens
  misc_RNA (1)...(19): siRNA sense strand
gccaagaauaugugauugu

SEQ ID NO: 2242224 - RNA, 19 nt, Homo sapiens
  misc_RNA (1)...(19): siRNA sense strand
uggauggccuagagcugaa

SEQ ID NO: 2242225 - RNA, 19 nt, Homo sapiens
  misc_RNA (1)...(19): siRNA sense strand
gcgagcuggugcacaggaa

SEQ ID NO: 2242226 - RNA, 19 nt, Homo sapiens
  misc_RNA (1)...(19): siRNA sense strand
acggauuggugcacuacaa

SEQ ID NO: 2242227 - RNA, 19 nt, Homo sapiens
  misc_RNA (1)...(19): siRNA sense strand
ccgggaugcucaugccaau

SEQ ID NO: 2242228 - RNA, 19 nt, Homo sapiens
  misc_RNA (1)...(19): siRNA sense strand
uguggaggcucgagaccau

SEQ ID NO: 2242229 - RNA, 19 nt, Homo sapiens
  misc_RNA (1)...(19): siRNA sense strand
ccaacagugccaucagcua

SEQ ID NO: 2242230 - RNA, 19 nt, Homo sapiens
  misc_RNA (1)...(19): siRNA sense strand
gugcaaacaagcuccaaga

SEQ ID NO: 2242231 - RNA, 19 nt, Homo sapiens
  misc_RNA (1)...(19): siRNA sense strand
gcauuucggacacgggcaa

SEQ ID NO: 2242232 - RNA, 19 nt, Homo sapiens
  misc_RNA (1)...(19): siRNA sense strand
gugaugaggcccaggguug

SEQ ID NO: 2242233 - RNA, 19 nt, Homo sapiens
  misc_RNA (1)...(19): siRNA sense strand
cagugagugugaaugaaga

SEQ ID NO: 2242234 - RNA, 19 nt, Homo sapiens
  misc_RNA (1)...(19): siRNA sense strand
cggauucacgggagacuuu

SEQ ID NO: 2242235 - RNA, 19 nt, Homo sapiens
  misc_RNA (1)...(19): siRNA sense strand
caacaagacaaaugggcag

SEQ ID NO: 2242236 - RNA, 19 nt, Homo sapiens
  misc_RNA (1)...(19): siRNA sense strand
gaguggaccgcgagcacau

SEQ ID NO: 2242237 - RNA, 19 nt, Homo sapiens
  misc_RNA (1)...(19): siRNA sense strand
gaguuugaggugcggguga

SEQ ID NO: 2242238 - RNA, 19 nt, Homo sapiens
  misc_RNA (1)...(19): siRNA sense strand
cgaaugaggagcuggggau

SEQ ID NO: 2242239 - RNA, 19 nt, Homo sapiens
  misc_RNA (1)...(19): siRNA sense strand
ggcuggaguugcaggagga

SEQ ID NO: 2242240 - RNA, 19 nt, Homo sapiens
  misc_RNA (1)...(19): siRNA sense strand
gcccacaagcagcagcaua

SEQ ID NO: 2242241 - RNA, 19 nt, Homo sapiens
  misc_RNA (1)...(19): siRNA sense strand
uaucgguggcggagccuua

SEQ ID NO: 2242242 - RNA, 19 nt, Homo sapiens
  misc_RNA (1)...(19): siRNA sense strand
gggcauaugcaguggacaa

SEQ ID NO: 2242243 - RNA, 19 nt, Homo sapiens
  misc_RNA (1)...(19): siRNA sense strand
aggaagaagaggaggagga

SEQ ID NO: 2242244 - RNA, 19 nt, Homo sapiens
  misc_RNA (1)...(19): siRNA sense strand
ccacagugccggagaacca

SEQ ID NO: 2242245 - RNA, 19 nt, Homo sapiens
  misc_RNA (1)...(19): siRNA sense strand
cagcaggaguacaaggaga

SEQ ID NO: 2242246 - RNA, 19 nt, Homo sapiens
  misc_RNA (1)...(19): siRNA sense strand
aaggagagccucagggaga

SEQ ID NO: 2242247 - RNA, 19 nt, Homo sapiens
  misc_RNA (1)...(19): siRNA sense strand
ccguagugcgcuuggacaa

SEQ ID NO: 2242248 - RNA, 19 nt, Homo sapiens
  misc_RNA (1)...(19): siRNA sense strand
aagaagaacgugugugaca

SEQ ID NO: 2242249 - RNA, 19 nt, Homo sapiens
  misc_RNA (1)...(19): siRNA sense strand
ccgaggagcuggaucguga

SEQ ID NO: 2242250 - RNA, 19 nt, Homo sapiens
  misc_RNA (1)...(19): siRNA sense strand
gggcagugucuaugaggau

SEQ ID NO: 2242251 - RNA, 19 nt, Homo sapiens
  misc_RNA (1)...(19): siRNA sense strand
acuacaaacuugagcggca

SEQ ID NO: 2242252 - RNA, 19 nt, Homo sapiens
  misc_RNA (1)...(19): siRNA sense strand
gcuaacagcuauugcagca

SEQ ID NO: 2242253 - RNA, 19 nt, Homo sapiens
  misc_RNA (1)...(19): siRNA sense strand
ccaaagugguggugggcug

SEQ ID NO: 2242254 - RNA, 19 nt, Homo sapiens
  misc_RNA (1)...(19): siRNA sense strand
ccacacaggacgugcacuu

SEQ ID NO: 2242255 - RNA, 19 nt, Homo sapiens
  misc_RNA (1)...(19): siRNA sense strand
caguaugucuugcgggcau

SEQ ID NO: 2242256 - RNA, 19 nt, Homo sapiens
  misc_RNA (1)...(19): siRNA sense strand
agcagagagcagagggcaa

SEQ ID NO: 2242257 - RNA, 19 nt, Homo sapiens
  misc_RNA (1)...(19): siRNA sense strand
gggaaaggucaccagaaga

SEQ ID NO: 2242258 - RNA, 19 nt, Homo sapiens
  misc_RNA (1)...(19): siRNA sense strand
cagacagugaggaggaaga

SEQ ID NO: 2242259 - RNA, 19 nt, Homo sapiens
  misc_RNA (1)...(19): siRNA sense strand
ggaggaugacaaugauaau

SEQ ID NO: 2242260 - RNA, 19 nt, Homo sapiens
  misc_RNA (1)...(19): siRNA sense strand
uggugaacgacgugaauga

SEQ ID NO: 2242261 - RNA, 19 nt, Homo sapiens
  misc_RNA (1)...(19): siRNA sense strand
aggaggaagaagaggagga

SEQ ID NO: 2242262 - RNA, 19 nt, Homo sapiens
  misc_RNA (1)...(19): siRNA sense strand
cacgauggccugaggguuu

SEQ ID NO: 2242263 - RNA, 19 nt, Homo sapiens
  misc_RNA (1)...(19): siRNA sense strand
cggaaaaggaauguaaaua

SEQ ID NO: 2242264 - RNA, 19 nt, Homo sapiens
  misc_RNA (1)...(19): siRNA sense strand
auacggugcagcugaaaua

SEQ ID NO: 2242265 - RNA, 19 nt, Homo sapiens
  misc_RNA (1)...(19): siRNA sense strand
cgcugaugcuggugacaau

SEQ ID NO: 2242266 - RNA, 19 nt, Homo sapiens
  misc_RNA (1)...(19): siRNA sense strand
ccagaucaccaguggcaau

SEQ ID NO: 2242267 - RNA, 19 nt, Homo sapiens
  misc_RNA (1)...(19): siRNA sense strand
accagauuguggagggcaa

SEQ ID NO: 2242268 - RNA, 19 nt, Homo sapiens
  misc_RNA (1)...(19): siRNA sense strand
gcaacgacugggacagcua

SEQ ID NO: 2242269 - RNA, 19 nt, Homo sapiens
  misc_RNA (1)...(19): siRNA sense strand
gcggaaugagucaggccua

SEQ ID NO: 2242270 - RNA, 19 nt, Homo sapiens
  misc_RNA (1)...(19): siRNA sense strand
ggacuuaauggcagggucu

SEQ ID NO: 2242271 - RNA, 19 nt, Homo sapiens
  misc_RNA (1)...(19): siRNA sense strand
gcaacaucccugaggucuu

SEQ ID NO: 2242272 - RNA, 19 nt, Homo sapiens
  misc_RNA (1)...(19): siRNA sense strand
caucagacagugaggagga

SEQ ID NO: 2242273 - RNA, 19 nt, Homo sapiens
  misc_RNA (1)...(19): siRNA sense strand
cugaagucuuugagaucga

SEQ ID NO: 2242274 - RNA, 19 nt, Homo sapiens
  misc_RNA (1)...(19): siRNA sense strand
cacugaagacacugacaua

SEQ ID NO: 2242275 - RNA, 19 nt, Homo sapiens
  misc_RNA (1)...(19): siRNA sense strand
aggcaggcacgguggauga

SEQ ID NO: 2242276 - RNA, 19 nt, Homo sapiens
  misc_RNA (1)...(19): siRNA sense strand
uggaggaugacaaugauaa

SEQ ID NO: 2242277 - RNA, 19 nt, Homo sapiens
  misc_RNA (1)...(19): siRNA sense strand
gcaacugugaugucagcaa

SEQ ID NO: 2242278 - RNA, 19 nt, Homo sapiens
  misc_RNA (1)...(19): siRNA sense strand
uguucgagcagcaggagua

SEQ ID NO: 2242279 - RNA, 19 nt, Homo sapiens
  misc_RNA (1)...(19): siRNA sense strand
uggagauccuggugaacga

SEQ ID NO: 2242280 - RNA, 19 nt, Homo sapiens
  misc_RNA (1)...(19): siRNA sense strand
uugauguguuuguggaaga

SEQ ID NO: 2242281 - RNA, 19 nt, Homo sapiens
  misc_RNA (1)...(19): siRNA sense strand
ggugugcgggugagcgaua

SEQ ID NO: 2242282 - RNA, 19 nt, Homo sapiens
  misc_RNA (1)...(19): siRNA sense strand
caaaggagcgcgacggguu

SEQ ID NO: 2242283 - RNA, 19 nt, Homo sapiens
  misc_RNA (1)...(19): siRNA sense strand
gcuuugacccagacugcaa

SEQ ID NO: 2242284 - RNA, 19 nt, Homo sapiens
  misc_RNA (1)...(19): siRNA sense strand
cugaguacguccuggucau

SEQ ID NO: 2242285 - RNA, 19 nt, Homo sapiens
  misc_RNA (1)...(19): siRNA sense strand
gcccagaacaugcggcaca

SEQ ID NO: 2242286 - RNA, 19 nt, Homo sapiens
  misc_RNA (1)...(19): siRNA sense strand
agacagaggagcggaccaa

SEQ ID NO: 2242287 - RNA, 19 nt, Homo sapiens
  misc_RNA (1)...(19): siRNA sense strand
cgucaggcaucgugcgaac

SEQ ID NO: 2242288 - RNA, 19 nt, Homo sapiens
  misc_RNA (1)...(19): siRNA sense strand
gaggcuggaucgagagaac

SEQ ID NO: 2242289 - RNA, 19 nt, Homo sapiens
  misc_RNA (1)...(19): siRNA sense strand
cuguguuggaugugaauga

SEQ ID NO: 2242290 - RNA, 19 nt, Homo sapiens
  misc_RNA (1)...(19): siRNA sense strand
uagcaaggagguccggaaa

SEQ ID NO: 2242291 - RNA, 19 nt, Homo sapiens
  misc_RNA (1)...(19): siRNA sense strand
ccaccuaccuggagauccu

SEQ ID NO: 2242292 - RNA, 19 nt, Homo sapiens
  misc_RNA (1)...(19): siRNA sense strand
gcaaaagagaguaguggca

SEQ ID NO: 2242293 - RNA, 19 nt, Homo sapiens
  misc_RNA (1)...(19): siRNA sense strand
cgucggaaaaggaauguaa

SEQ ID NO: 2242294 - RNA, 19 nt, Homo sapiens
  misc_RNA (1)...(19): siRNA sense strand
ucgagcagcaggaguacaa

SEQ ID NO: 2242295 - RNA, 19 nt, Homo sapiens
  misc_RNA (1)...(19): siRNA sense strand
cuguggaggaugacaauga

SEQ ID NO: 2242296 - RNA, 19 nt, Homo sapiens
  misc_RNA (1)...(19): siRNA sense strand
uguuggaugugaaugacaa

SEQ ID NO: 2242297 - RNA, 19 nt, Homo sapiens
  misc_RNA (1)...(19): siRNA sense strand
aggaugaguuugauguguu

SEQ ID NO: 2242298 - RNA, 19 nt, Homo sapiens
  misc_RNA (1)...(19): siRNA sense strand
guacaaugggcguuucaau

SEQ ID NO: 2242299 - RNA, 19 nt, Homo sapiens
  misc_RNA (1)...(19): siRNA sense strand
ggucugcaccugagcaaca

SEQ ID NO: 2242300 - RNA, 19 nt, Homo sapiens
  misc_RNA (1)...(19): siRNA sense strand
agacaagcggcgagugcca

SEQ ID NO: 2242301 - RNA, 19 nt, Homo sapiens
  misc_RNA (1)...(19): siRNA sense strand
gugaggaggaagaagagga

SEQ ID NO: 2242302 - RNA, 19 nt, Homo sapiens
  misc_RNA (1)...(19): siRNA sense strand
cgacgaagugcccuggcua

SEQ ID NO: 2242303 - RNA, 19 nt, Homo sapiens
  misc_RNA (1)...(19): siRNA sense strand
gaguacaaggagagccuca

SEQ ID NO: 2242304 - RNA, 19 nt, Homo sapiens
  misc_RNA (1)...(19): siRNA sense strand
ugaggacacaggugagaau

SEQ ID NO: 2242305 - RNA, 19 nt, Homo sapiens
  misc_RNA (1)...(19): siRNA sense strand
acggguugcuguuguacaa

SEQ ID NO: 2242306 - RNA, 19 nt, Homo sapiens
  misc_RNA (1)...(19): siRNA sense strand
ggagcaaugcacagggucu

SEQ ID NO: 2242307 - RNA, 19 nt, Homo sapiens
  misc_RNA (1)...(19): siRNA sense strand
gcacugagcugacuggcca

SEQ ID NO: 2242308 - RNA, 19 nt, Homo sapiens
  misc_RNA (1)...(19): siRNA sense strand
cggaugaggacacagguga

SEQ ID NO: 2242309 - RNA, 19 nt, Homo sapiens
  misc_RNA (1)...(19): siRNA sense strand
gagcaucaacguggagcaa

SEQ ID NO: 2242310 - RNA, 19 nt, Homo sapiens
  misc_RNA (1)...(19): siRNA sense strand
gaauaaagguaaaggaggu

SEQ ID NO: 2242311 - RNA, 19 nt, Homo sapiens
  misc_RNA (1)...(19): siRNA sense strand
cuagaagucugaaggcaua

SEQ ID NO: 2242312 - RNA, 19 nt, Homo sapiens
  misc_RNA (1)...(19): siRNA sense strand
gcuagaagucugaaggcau

SEQ ID NO: 2242313 - RNA, 19 nt, Homo sapiens
  misc_RNA (1)...(19): siRNA sense strand
cauuggagaugaugaugaa

SEQ ID NO: 2242314 - RNA, 19 nt, Homo sapiens
  misc_RNA (1)...(19): siRNA sense strand
gagaugaugaugaagauau

SEQ ID NO: 2242315 - RNA, 19 nt, Homo sapiens
  misc_RNA (1)...(19): siRNA sense strand
guugggaaauggacggcua

SEQ ID NO: 2242316 - RNA, 19 nt, Homo sapiens
  misc_RNA (1)...(19): siRNA sense strand
cggcgagcuuccagagcau

SEQ ID NO: 2242317 - RNA, 19 nt, Homo sapiens
  misc_RNA (1)...(19): siRNA sense strand
aggaguaugcucagguaau

SEQ ID NO: 2242318 - RNA, 19 nt, Homo sapiens
  misc_RNA (1)...(19): siRNA sense strand
cuggagaugaugaugaaau

SEQ ID NO: 2242319 - RNA, 19 nt, Homo sapiens
  misc_RNA (1)...(19): siRNA sense strand
uggagaugaugaugaagau

SEQ ID NO: 2242320 - RNA, 19 nt, Homo sapiens
  misc_RNA (1)...(19): siRNA sense strand
ucagaggaaaauugagaaa

SEQ ID NO: 2242321 - RNA, 19 nt, Homo sapiens
  misc_RNA (1)...(19): siRNA sense strand
ugacauuggagaugaugau

SEQ ID NO: 2242322 - RNA, 19 nt, Homo sapiens
  misc_RNA (1)...(19): siRNA sense strand
ggagaugaugaugaagaua

SEQ ID NO: 2242323 - RNA, 19 nt, Homo sapiens
  misc_RNA (1)...(19): siRNA sense strand
uggauaaauaccucggaca

SEQ ID NO: 2242324 - RNA, 19 nt, Homo sapiens
  misc_RNA (1)...(19): siRNA sense strand
uccgagacuaccaggauaa

SEQ ID NO: 2242325 - RNA, 19 nt, Homo sapiens
  misc_RNA (1)...(19): siRNA sense strand
uauucaaagaggaugguca

SEQ ID NO: 2242326 - RNA, 19 nt, Homo sapiens
  misc_RNA (1)...(19): siRNA sense strand
agaucaagauguugggaaa

SEQ ID NO: 2242327 - RNA, 19 nt, Homo sapiens
  misc_RNA (1)...(19): siRNA sense strand
caggaaaguaagaggcaua

SEQ ID NO: 2242328 - RNA, 19 nt, Homo sapiens
  misc_RNA (1)...(19): siRNA sense strand
acucaaacaggaagggaua

SEQ ID NO: 2242329 - RNA, 19 nt, Homo sapiens
  misc_RNA (1)...(19): siRNA sense strand
aagaagaaucagaggaaga

SEQ ID NO: 2242330 - RNA, 19 nt, Homo sapiens
  misc_RNA (1)...(19): siRNA sense strand
gcuuaaugcagaugagauu

SEQ ID NO: 2242331 - RNA, 19 nt, Homo sapiens
  misc_RNA (1)...(19): siRNA sense strand
agaagaagaaucagaggaa

SEQ ID NO: 2242332 - RNA, 19 nt, Homo sapiens
  misc_RNA (1)...(19): siRNA sense strand
ugucaaugguguaagagaa

SEQ ID NO: 2242333 - RNA, 19 nt, Homo sapiens
  misc_RNA (1)...(19): siRNA sense strand
gaaagaagauauaacccaa

SEQ ID NO: 2242334 - RNA, 19 nt, Homo sapiens
  misc_RNA (1)...(19): siRNA sense strand
ggacagaagcaaagcacca

SEQ ID NO: 2242335 - RNA, 19 nt, Homo sapiens
  misc_RNA (1)...(19): siRNA sense strand
uuucagagcuggugagcau

SEQ ID NO: 2242336 - RNA, 19 nt, Homo sapiens
  misc_RNA (1)...(19): siRNA sense strand
agauagaagcgaugaagau

SEQ ID NO: 2242337 - RNA, 19 nt, Homo sapiens
  misc_RNA (1)...(19): siRNA sense strand
gucaaugguguaagagaaa

SEQ ID NO: 2242338 - RNA, 19 nt, Homo sapiens
  misc_RNA (1)...(19): siRNA sense strand
cuagaagagccaaaguaua

SEQ ID NO: 2242339 - RNA, 19 nt, Homo sapiens
  misc_RNA (1)...(19): siRNA sense strand
cuucauaagugcaucaaaa

SEQ ID NO: 2242340 - RNA, 19 nt, Homo sapiens
  misc_RNA (1)...(19): siRNA sense strand
caaccaggacagaagcaaa

SEQ ID NO: 2242341 - RNA, 19 nt, Homo sapiens
  misc_RNA (1)...(19): siRNA sense strand
gcacuagacgagaugacaa

SEQ ID NO: 2242342 - RNA, 19 nt, Homo sapiens
  misc_RNA (1)...(19): siRNA sense strand
cuaaauaguggaaaugcaa

SEQ ID NO: 2242343 - RNA, 19 nt, Homo sapiens
  misc_RNA (1)...(19): siRNA sense strand
gcgaugaagauaaagaaaa

SEQ ID NO: 2242344 - RNA, 19 nt, Homo sapiens
  misc_RNA (1)...(19): siRNA sense strand
aaggaaagggacugaguuu

SEQ ID NO: 2242345 - RNA, 19 nt, Homo sapiens
  misc_RNA (1)...(19): siRNA sense strand
cggaauugguacuggucca

SEQ ID NO: 2242346 - RNA, 19 nt, Homo sapiens
  misc_RNA (1)...(19): siRNA sense strand
caggugaaucaguggcuaa

SEQ ID NO: 2242347 - RNA, 19 nt, Homo sapiens
  misc_RNA (1)...(19): siRNA sense strand
agauaaaggauuugugaac

SEQ ID NO: 2242348 - RNA, 19 nt, Homo sapiens
  misc_RNA (1)...(19): siRNA sense strand
gguuagaaacugcugaaga

SEQ ID NO: 2242349 - RNA, 19 nt, Homo sapiens
  misc_RNA (1)...(19): siRNA sense strand
agaggaagaagcugacuaa

SEQ ID NO: 2242350 - RNA, 19 nt, Homo sapiens
  misc_RNA (1)...(19): siRNA sense strand
auagaagcgaugaagauaa

SEQ ID NO: 2242351 - RNA, 19 nt, Homo sapiens
  misc_RNA (1)...(19): siRNA sense strand
caaucaaauucgucaagau

SEQ ID NO: 2242352 - RNA, 19 nt, Homo sapiens
  misc_RNA (1)...(19): siRNA sense strand
gucccaaacuggagguuga

SEQ ID NO: 2242353 - RNA, 19 nt, Homo sapiens
  misc_RNA (1)...(19): siRNA sense strand
ccaaagaacaguuagagca

SEQ ID NO: 2242354 - RNA, 19 nt, Homo sapiens
  misc_RNA (1)...(19): siRNA sense strand
ggagagugcgauugcagaa

SEQ ID NO: 2242355 - RNA, 19 nt, Homo sapiens
  misc_RNA (1)...(19): siRNA sense strand
cagcaaacaacuccgcaaa

SEQ ID NO: 2242356 - RNA, 19 nt, Homo sapiens
  misc_RNA (1)...(19): siRNA sense strand
aagauaugggagaggauuu

SEQ ID NO: 2242357 - RNA, 19 nt, Homo sapiens
  misc_RNA (1)...(19): siRNA sense strand
ggacccacuuggaggacuu

SEQ ID NO: 2242358 - RNA, 19 nt, Homo sapiens
  misc_RNA (1)...(19): siRNA sense strand
cuaaauuacaagaucgaga

SEQ ID NO: 2242359 - RNA, 19 nt, Homo sapiens
  misc_RNA (1)...(19): siRNA sense strand
ggaaagaagauauaaccca

SEQ ID NO: 2242360 - RNA, 19 nt, Homo sapiens
  misc_RNA (1)...(19): siRNA sense strand
caauguggguguagagucu

SEQ ID NO: 2242361 - RNA, 19 nt, Homo sapiens
  misc_RNA (1)...(19): siRNA sense strand
ccuagaagagccaaaguau

SEQ ID NO: 2242362 - RNA, 19 nt, Homo sapiens
  misc_RNA (1)...(19): siRNA sense strand
cgagaaugguuaacagaac

SEQ ID NO: 2242363 - RNA, 19 nt, Homo sapiens
  misc_RNA (1)...(19): siRNA sense strand
aggaacuguugaagcaaau

SEQ ID NO: 2242364 - RNA, 19 nt, Homo sapiens
  misc_RNA (1)...(19): siRNA sense strand
gaacaguuagagcaggaaa

SEQ ID NO: 2242365 - RNA, 19 nt, Homo sapiens
  misc_RNA (1)...(19): siRNA sense strand
agccaguaaugcagaaauu

SEQ ID NO: 2242366 - RNA, 19 nt, Homo sapiens
  misc_RNA (1)...(19): siRNA sense strand
caaagauaugggagaggau

SEQ ID NO: 2242367 - RNA, 19 nt, Homo sapiens
  misc_RNA (1)...(19): siRNA sense strand
acaucaaauucauuggaga

SEQ ID NO: 2242368 - RNA, 19 nt, Homo sapiens
  misc_RNA (1)...(19): siRNA sense strand
gggcaaaacgcucagaaau

SEQ ID NO: 2242369 - RNA, 19 nt, Homo sapiens
  misc_RNA (1)...(19): siRNA sense strand
gggaaaaccccagggcaaa

SEQ ID NO: 2242370 - RNA, 19 nt, Homo sapiens
  misc_RNA (1)...(19): siRNA sense strand
uggcagaagaugcaccaaa

SEQ ID NO: 2242371 - RNA, 19 nt, Homo sapiens
  misc_RNA (1)...(19): siRNA sense strand
gaggaggaacagagagcca

SEQ ID NO: 2242372 - RNA, 19 nt, Homo sapiens
  misc_RNA (1)...(19): siRNA sense strand
cccagaaauugaucagaau

SEQ ID NO: 2242373 - RNA, 19 nt, Homo sapiens
  misc_RNA (1)...(19): siRNA sense strand
aggcuuuguuccaggugaa

SEQ ID NO: 2242374 - RNA, 19 nt, Homo sapiens
  misc_RNA (1)...(19): siRNA sense strand
cagaaaaugcucccagaaa

SEQ ID NO: 2242375 - RNA, 19 nt, Homo sapiens
  misc_RNA (1)...(19): siRNA sense strand
ucgucaagaugcaguaaaa

SEQ ID NO: 2242376 - RNA, 19 nt, Homo sapiens
  misc_RNA (1)...(19): siRNA sense strand
gcagaugagauuagccuga

SEQ ID NO: 2242377 - RNA, 19 nt, Homo sapiens
  misc_RNA (1)...(19): siRNA sense strand
gggauagccacaagugaca

SEQ ID NO: 2242378 - RNA, 19 nt, Homo sapiens
  misc_RNA (1)...(19): siRNA sense strand
ucaaauuggagaaggaacu

SEQ ID NO: 2242379 - RNA, 19 nt, Homo sapiens
  misc_RNA (1)...(19): siRNA sense strand
aagaacaguuagagcagga

SEQ ID NO: 2242380 - RNA, 19 nt, Homo sapiens
  misc_RNA (1)...(19): siRNA sense strand
aagcaaagcaccacauuca

SEQ ID NO: 2242381 - RNA, 19 nt, Homo sapiens
  misc_RNA (1)...(19): siRNA sense strand
aaggaacuguugaagcaaa

SEQ ID NO: 2242382 - RNA, 19 nt, Homo sapiens
  misc_RNA (1)...(19): siRNA sense strand
gagccauugcuaagaucaa

SEQ ID NO: 2242383 - RNA, 19 nt, Homo sapiens
  misc_RNA (1)...(19): siRNA sense strand
ccuuaauggaucaguacuu

SEQ ID NO: 2242384 - RNA, 19 nt, Homo sapiens
  misc_RNA (1)...(19): siRNA sense strand
ggaugaaaauggauaggga

SEQ ID NO: 2242385 - RNA, 19 nt, Homo sapiens
  misc_RNA (1)...(19): siRNA sense strand
ccuuaaacuaacugaaacu

SEQ ID NO: 2242386 - RNA, 19 nt, Homo sapiens
  misc_RNA (1)...(19): siRNA sense strand
ucuaaauaguggaaaugca

SEQ ID NO: 2242387 - RNA, 19 nt, Homo sapiens
  misc_RNA (1)...(19): siRNA sense strand
acaagaucgagaaugguua

SEQ ID NO: 2242388 - RNA, 19 nt, Homo sapiens
  misc_RNA (1)...(19): siRNA sense strand
uggaaaagaagaagagagu

SEQ ID NO: 2242389 - RNA, 19 nt, Homo sapiens
  misc_RNA (1)...(19): siRNA sense strand
agaaaaugcucccagaaau

SEQ ID NO: 2242390 - RNA, 19 nt, Homo sapiens
  misc_RNA (1)...(19): siRNA sense strand
uggacaaagcccuagaaga

SEQ ID NO: 2242391 - RNA, 19 nt, Homo sapiens
  misc_RNA (1)...(19): siRNA sense strand
ggaggaacagagagccauu

SEQ ID NO: 2242392 - RNA, 19 nt, Homo sapiens
  misc_RNA (1)...(19): siRNA sense strand
agaaaugagggcuccuaaa

SEQ ID NO: 2242393 - RNA, 19 nt, Homo sapiens
  misc_RNA (1)...(19): siRNA sense strand
gagauguuaagcaaaguaa

SEQ ID NO: 2242394 - RNA, 19 nt, Homo sapiens
  misc_RNA (1)...(19): siRNA sense strand
ucaaauucgucaagaugca

SEQ ID NO: 2242395 - RNA, 19 nt, Homo sapiens
  misc_RNA (1)...(19): siRNA sense strand
gggauaaaguagcaggaca

SEQ ID NO: 2242396 - RNA, 19 nt, Homo sapiens
  misc_RNA (1)...(19): siRNA sense strand
ggauaaaguagcaggacac

SEQ ID NO: 2242397 - RNA, 19 nt, Homo sapiens
  misc_RNA (1)...(19): siRNA sense strand
cagugaaguuugcagccaa

SEQ ID NO: 2242398 - RNA, 19 nt, Homo sapiens
  misc_RNA (1)...(19): siRNA sense strand
agaacaugacccaggauga

SEQ ID NO: 2242399 - RNA, 19 nt, Homo sapiens
  misc_RNA (1)...(19): siRNA sense strand
cccagaaggacguagaaga

SEQ ID NO: 2242400 - RNA, 19 nt, Homo sapiens
  misc_RNA (1)...(19): siRNA sense strand
augcagagagagcgaucaa

SEQ ID NO: 2242401 - RNA, 19 nt, Homo sapiens
  misc_RNA (1)...(19): siRNA sense strand
acaaacggucggaggcaga

SEQ ID NO: 2242402 - RNA, 19 nt, Homo sapiens
  misc_RNA (1)...(19): siRNA sense strand
cggaggcagaagaggcaau

SEQ ID NO: 2242403 - RNA, 19 nt, Homo sapiens
  misc_RNA (1)...(19): siRNA sense strand
ccaacaagugcaaaggguu

SEQ ID NO: 2242404 - RNA, 19 nt, Homo sapiens
  misc_RNA (1)...(19): siRNA sense strand
ugacaucgggagaacgaau

SEQ ID NO: 2242405 - RNA, 19 nt, Homo sapiens
  misc_RNA (1)...(19): siRNA sense strand
gggcuauggcuuugugaac

SEQ ID NO: 2242406 - RNA, 19 nt, Homo sapiens
  misc_RNA (1)...(19): siRNA sense strand
caggacacagcuugggcua

SEQ ID NO: 2242407 - RNA, 19 nt, Homo sapiens
  misc_RNA (1)...(19): siRNA sense strand
gguuuggcuuugugaccau

SEQ ID NO: 2242408 - RNA, 19 nt, Homo sapiens
  misc_RNA (1)...(19): siRNA sense strand
ggacaagaucacaggcaga

SEQ ID NO: 2242409 - RNA, 19 nt, Homo sapiens
  misc_RNA (1)...(19): siRNA sense strand
agaaagagauggagcagcu

SEQ ID NO: 2242410 - RNA, 19 nt, Homo sapiens
  misc_RNA (1)...(19): siRNA sense strand
ccccaaugaugcagacaaa

SEQ ID NO: 2242411 - RNA, 19 nt, Homo sapiens
  misc_RNA (1)...(19): siRNA sense strand
gccucaaauuacagacgaa

SEQ ID NO: 2242412 - RNA, 19 nt, Homo sapiens
  misc_RNA (1)...(19): siRNA sense strand
agaacaugacccaggauga

SEQ ID NO: 2242413 - RNA, 19 nt, Homo sapiens
  misc_RNA (1)...(19): siRNA sense strand
acaagaggauugaggccga

SEQ ID NO: 2242414 - RNA, 19 nt, Homo sapiens
  misc_RNA (1)...(19): siRNA sense strand
ggugcaucuucguguacaa

SEQ ID NO: 2242415 - RNA, 19 nt, Homo sapiens
  misc_RNA (1)...(19): siRNA sense strand
agaccaugagccagaaaga

SEQ ID NO: 2242416 - RNA, 19 nt, Homo sapiens
  misc_RNA (1)...(19): siRNA sense strand
gggcagucaccaacgucaa

SEQ ID NO: 2242417 - RNA, 19 nt, Homo sapiens
  misc_RNA (1)...(19): siRNA sense strand
cccaagaccaugagccaga

SEQ ID NO: 2242418 - RNA, 19 nt, Homo sapiens
  misc_RNA (1)...(19): siRNA sense strand
ucaaaggacugaaugggca

SEQ ID NO: 2242419 - RNA, 19 nt, Homo sapiens
  misc_RNA (1)...(19): siRNA sense strand
accaugagccagaaagaga

SEQ ID NO: 2242420 - RNA, 19 nt, Homo sapiens
  misc_RNA (1)...(19): siRNA sense strand
acgucaaggucauccguga

SEQ ID NO: 2242421 - RNA, 19 nt, Homo sapiens
  misc_RNA (1)...(19): siRNA sense strand
gugcaaggguuucggcuuc

SEQ ID NO: 2242422 - RNA, 19 nt, Homo sapiens
  misc_RNA (1)...(19): siRNA sense strand
aggcagagaccuuggcuac

SEQ ID NO: 2242423 - RNA, 19 nt, Homo sapiens
  misc_RNA (1)...(19): siRNA sense strand
agaccuuggcuacggguuu

SEQ ID NO: 2242424 - RNA, 19 nt, Homo sapiens
  misc_RNA (1)...(19): siRNA sense strand
ggaaugggaagauagggaa

SEQ ID NO: 2242425 - RNA, 19 nt, Homo sapiens
  misc_RNA (1)...(19): siRNA sense strand
ugaagaaaacuguggcauu

SEQ ID NO: 2242426 - RNA, 19 nt, Homo sapiens
  misc_RNA (1)...(19): siRNA sense strand
aagauagggaacaaggaau

SEQ ID NO: 2242427 - RNA, 19 nt, Homo sapiens
  misc_RNA (1)...(19): siRNA sense strand
ccaucaaagacuaugcuga

SEQ ID NO: 2242428 - RNA, 19 nt, Homo sapiens
  misc_RNA (1)...(19): siRNA sense strand
accgaagguuaguguacaa

SEQ ID NO: 2242429 - RNA, 19 nt, Homo sapiens
  misc_RNA (1)...(19): siRNA sense strand
ucagcaaugaagaguacua

SEQ ID NO: 2242430 - RNA, 19 nt, Homo sapiens
  misc_RNA (1)...(19): siRNA sense strand
uggaaugggaagauaggga

SEQ ID NO: 2242431 - RNA, 19 nt, Homo sapiens
  misc_RNA (1)...(19): siRNA sense strand
uggcaaagauguggggaca

SEQ ID NO: 2242432 - RNA, 19 nt, Homo sapiens
  misc_RNA (1)...(19): siRNA sense strand
augggaagauagggaacaa

SEQ ID NO: 2242433 - RNA, 19 nt, Homo sapiens
  misc_RNA (1)...(19): siRNA sense strand
ggaaugggaagauagggaa

SEQ ID NO: 2242434 - RNA, 19 nt, Homo sapiens
  misc_RNA (1)...(19): siRNA sense strand
ugaagaaaacuguggcauu

SEQ ID NO: 2242435 - RNA, 19 nt, Homo sapiens
  misc_RNA (1)...(19): siRNA sense strand
aagauagggaacaaggaau

SEQ ID NO: 2242436 - RNA, 19 nt, Homo sapiens
  misc_RNA (1)...(19): siRNA sense strand
ccaucaaagacuaugcuga

SEQ ID NO: 2242437 - RNA, 19 nt, Homo sapiens
  misc_RNA (1)...(19): siRNA sense strand
accgaagguuaguguacaa

SEQ ID NO: 2242438 - RNA, 19 nt, Homo sapiens
  misc_RNA (1)...(19): siRNA sense strand
ucagcaaugaagaguacua

SEQ ID NO: 2242439 - RNA, 19 nt, Homo sapiens
  misc_RNA (1)...(19): siRNA sense strand
uggaaugggaagauaggga

SEQ ID NO: 2242440 - RNA, 19 nt, Homo sapiens
  misc_RNA (1)...(19): siRNA sense strand
uggcaaagauguggggaca

SEQ ID NO: 2242441 - RNA, 19 nt, Homo sapiens
  misc_RNA (1)...(19): siRNA sense strand
augggaagauagggaacaa

SEQ ID NO: 2242442 - RNA, 19 nt, Homo sapiens
  misc_RNA (1)...(19): siRNA sense strand
agaacgagaaggaggacaa

SEQ ID NO: 2242443 - RNA, 19 nt, Homo sapiens
  misc_RNA (1)...(19): siRNA sense strand
aggacaaagacgagagcga

SEQ ID NO: 2242444 - RNA, 19 nt, Homo sapiens
  misc_RNA (1)...(19): siRNA sense strand
aagaagaagaagaacgaga

SEQ ID NO: 2242445 - RNA, 19 nt, Homo sapiens
  misc_RNA (1)...(19): siRNA sense strand
caagaaagccacaggcauc

SEQ ID NO: 2242446 - RNA, 19 nt, Homo sapiens
  misc_RNA (1)...(19): siRNA sense strand
aagcugaagaagaagaaga

SEQ ID NO: 2242447 - RNA, 19 nt, Homo sapiens
  misc_RNA (1)...(19): siRNA sense strand
agaagaacgagaaggagga

SEQ ID NO: 2242448 - RNA, 19 nt, Homo sapiens
  misc_RNA (1)...(19): siRNA sense strand
agcugaagaagaagaagaa

SEQ ID NO: 2242449 - RNA, 19 nt, Homo sapiens
  misc_RNA (1)...(19): siRNA sense strand
gacaaagacgagagcgagu

SEQ ID NO: 2242450 - RNA, 19 nt, Homo sapiens
  misc_RNA (1)...(19): siRNA sense strand
gccaagaucaagaaagcca

SEQ ID NO: 2242451 - RNA, 19 nt, Homo sapiens
  misc_RNA (1)...(19): siRNA sense strand
ucaagaaggccacgggcaa

SEQ ID NO: 2242452 - RNA, 19 nt, Homo sapiens
  misc_RNA (1)...(19): siRNA sense strand
ccacagccaaggagggcaa

SEQ ID NO: 2242453 - RNA, 19 nt, Homo sapiens
  misc_RNA (1)...(19): siRNA sense strand
aggccgaguuccagaccaa

SEQ ID NO: 2242454 - RNA, 19 nt, Homo sapiens
  misc_RNA (1)...(19): siRNA sense strand
ucaacgagucacagaucaa

SEQ ID NO: 2242455 - RNA, 19 nt, Homo sapiens
  misc_RNA (1)...(19): siRNA sense strand
ccaaagaagaagaacccga

SEQ ID NO: 2242456 - RNA, 19 nt, Homo sapiens
  misc_RNA (1)...(19): siRNA sense strand
acccgaacaaagaggacaa

SEQ ID NO: 2242457 - RNA, 19 nt, Homo sapiens
  misc_RNA (1)...(19): siRNA sense strand
caaagaagaagaacccgaa

SEQ ID NO: 2242458 - RNA, 19 nt, Homo sapiens
  misc_RNA (1)...(19): siRNA sense strand
cucgaaaaccaaagaagaa

SEQ ID NO: 2242459 - RNA, 19 nt, Homo sapiens
  misc_RNA (1)...(19): siRNA sense strand
gccaagaucaagaaggcca

SEQ ID NO: 2242460 - RNA, 19 nt, Homo sapiens
  misc_RNA (1)...(19): siRNA sense strand
gaucugagcgcuuggccaa

SEQ ID NO: 2242461 - RNA, 19 nt, Homo sapiens
  misc_RNA (1)...(19): siRNA sense strand
augucaucaaggagaaaua

SEQ ID NO: 2242462 - RNA, 19 nt, Homo sapiens
  misc_RNA (1)...(19): siRNA sense strand
ucaaggagaaauaugggaa

SEQ ID NO: 2242463 - RNA, 19 nt, Homo sapiens
  misc_RNA (1)...(19): siRNA sense strand
cccuagagcuccgggacaa

SEQ ID NO: 2242464 - RNA, 19 nt, Homo sapiens
  misc_RNA (1)...(19): siRNA sense strand
aggagaaauaugggaaaga

SEQ ID NO: 2242465 - RNA, 19 nt, Homo sapiens
  misc_RNA (1)...(19): siRNA sense strand
ccggcaggaacuucagaaa

SEQ ID NO: 2242466 - RNA, 19 nt, Homo sapiens
  misc_RNA (1)...(19): siRNA sense strand
acugaacgucacagaacaa

SEQ ID NO: 2242467 - RNA, 19 nt, Homo sapiens
  misc_RNA (1)...(19): siRNA sense strand
cgucacagaacaagagaag

SEQ ID NO: 2242468 - RNA, 19 nt, Homo sapiens
  misc_RNA (1)...(19): siRNA sense strand
gaucgagauggauggaaca

SEQ ID NO: 2242469 - RNA, 19 nt, Homo sapiens
  misc_RNA (1)...(19): siRNA sense strand
gcaagaaacugaacgucac

SEQ ID NO: 2242470 - RNA, 19 nt, Homo sapiens
  misc_RNA (1)...(19): siRNA sense strand
uguacaaguccuucaucaa

SEQ ID NO: 2242471 - RNA, 19 nt, Homo sapiens
  misc_RNA (1)...(19): siRNA sense strand
aagaaugucaucaaggaga

SEQ ID NO: 2242472 - RNA, 19 nt, Homo sapiens
  misc_RNA (1)...(19): siRNA sense strand
guucacagccagugcagga

SEQ ID NO: 2242473 - RNA, 19 nt, Homo sapiens
  misc_RNA (1)...(19): siRNA sense strand
agcaagaaacugaacguca

SEQ ID NO: 2242474 - RNA, 19 nt, Homo sapiens
  misc_RNA (1)...(19): siRNA sense strand
ggugaaaucuacagugaaa

SEQ ID NO: 2242475 - RNA, 19 nt, Homo sapiens
  misc_RNA (1)...(19): siRNA sense strand
ggagaaagccagagccaga

SEQ ID NO: 2242476 - RNA, 19 nt, Homo sapiens
  misc_RNA (1)...(19): siRNA sense strand
ucaaagagaauguggaaga

SEQ ID NO: 2242477 - RNA, 19 nt, Homo sapiens
  misc_RNA (1)...(19): siRNA sense strand
gaacaguggaggagaacau

SEQ ID NO: 2242478 - RNA, 19 nt, Homo sapiens
  misc_RNA (1)...(19): siRNA sense strand
ugauagaacaacagaugaa

SEQ ID NO: 2242479 - RNA, 19 nt, Homo sapiens
  misc_RNA (1)...(19): siRNA sense strand
gcaaagaaauguccuguuu

SEQ ID NO: 2242480 - RNA, 19 nt, Homo sapiens
  misc_RNA (1)...(19): siRNA sense strand
cuggaauauuucaggauuu

SEQ ID NO: 2242481 - RNA, 19 nt, Homo sapiens
  misc_RNA (1)...(19): siRNA sense strand
guucaaagagaauguggaa

SEQ ID NO: 2242482 - RNA, 19 nt, Homo sapiens
  misc_RNA (1)...(19): siRNA sense strand
gaacuaugaugauggacau

SEQ ID NO: 2242483 - RNA, 19 nt, Homo sapiens
  misc_RNA (1)...(19): siRNA sense strand
cgagcucgccuuagagaua

SEQ ID NO: 2242484 - RNA, 19 nt, Homo sapiens
  misc_RNA (1)...(19): siRNA sense strand
ggaagauggccgagcaagu

SEQ ID NO: 2242485 - RNA, 19 nt, Homo sapiens
  misc_RNA (1)...(19): siRNA sense strand
guguggagguucaaagaga

SEQ ID NO: 2242486 - RNA, 19 nt, Homo sapiens
  misc_RNA (1)...(19): siRNA sense strand
auggaacaguggaggagaa

SEQ ID NO: 2242487 - RNA, 19 nt, Homo sapiens
  misc_RNA (1)...(19): siRNA sense strand
ugaaggaaccuguacuaaa

SEQ ID NO: 2242488 - RNA, 19 nt, Homo sapiens
  misc_RNA (1)...(19): siRNA sense strand
gaauugaccuguuuggaga

SEQ ID NO: 2242489 - RNA, 19 nt, Homo sapiens
  misc_RNA (1)...(19): siRNA sense strand
ggaggaguguggagguuca

SEQ ID NO: 2242490 - RNA, 19 nt, Homo sapiens
  misc_RNA (1)...(19): siRNA sense strand
gaaggaaccuguacuaaau

SEQ ID NO: 2242491 - RNA, 19 nt, Homo sapiens
  misc_RNA (1)...(19): siRNA sense strand
aggcauggcaccuggguca

SEQ ID NO: 2242492 - RNA, 19 nt, Homo sapiens
  misc_RNA (1)...(19): siRNA sense strand
ccaauuauguugacuacuu

SEQ ID NO: 2242493 - RNA, 19 nt, Homo sapiens
  misc_RNA (1)...(19): siRNA sense strand
ccacuugcuuugagagaac

SEQ ID NO: 2242494 - RNA, 19 nt, Homo sapiens
  misc_RNA (1)...(19): siRNA sense strand
ggagagguucaaaggccaa

SEQ ID NO: 2242495 - RNA, 19 nt, Homo sapiens
  misc_RNA (1)...(19): siRNA sense strand
acucguuaaaguagagaau

SEQ ID NO: 2242496 - RNA, 19 nt, Homo sapiens
  misc_RNA (1)...(19): siRNA sense strand
cuucaagcucguuggguga

SEQ ID NO: 2242497 - RNA, 19 nt, Homo sapiens
  misc_RNA (1)...(19): siRNA sense strand
caaagaagguagcugugau

SEQ ID NO: 2242498 - RNA, 19 nt, Homo sapiens
  misc_RNA (1)...(19): siRNA sense strand
cuaugaugauggacauuau

SEQ ID NO: 2242499 - RNA, 19 nt, Homo sapiens
  misc_RNA (1)...(19): siRNA sense strand
ugaaaucuacagugaaaga

SEQ ID NO: 2242500 - RNA, 19 nt, Homo sapiens
  misc_RNA (1)...(19): siRNA sense strand
guggagguucaaagagaau

SEQ ID NO: 2242501 - RNA, 19 nt, Homo sapiens
  misc_RNA (1)...(19): siRNA sense strand
ugaaagagcucacagaaac

SEQ ID NO: 2242502 - RNA, 19 nt, Homo sapiens
  misc_RNA (1)...(19): siRNA sense strand
agaacuaugaugauggaca

SEQ ID NO: 2242503 - RNA, 19 nt, Homo sapiens
  misc_RNA (1)...(19): siRNA sense strand
gcuguugagcugaguaaga

SEQ ID NO: 2242504 - RNA, 19 nt, Homo sapiens
  misc_RNA (1)...(19): siRNA sense strand
gcucagauauugcuguuga

SEQ ID NO: 2242505 - RNA, 19 nt, Homo sapiens
  misc_RNA (1)...(19): siRNA sense strand
uggugauuggaaugggaaa

SEQ ID NO: 2242506 - RNA, 19 nt, Homo sapiens
  misc_RNA (1)...(19): siRNA sense strand
agauauugcuguugagcug

SEQ ID NO: 2242507 - RNA, 19 nt, Homo sapiens
  misc_RNA (1)...(19): siRNA sense strand
uggucucacuguauaaaua

SEQ ID NO: 2242508 - RNA, 19 nt, Homo sapiens
  misc_RNA (1)...(19): siRNA sense strand
agaccaauuauguugacua

SEQ ID NO: 2242509 - RNA, 19 nt, Homo sapiens
  misc_RNA (1)...(19): siRNA sense strand
cugcauaauucuaaacuuc

SEQ ID NO: 2242510 - RNA, 19 nt, Homo sapiens
  misc_RNA (1)...(19): siRNA sense strand
aaagaagguagcugugauu

SEQ ID NO: 2242511 - RNA, 19 nt, Homo sapiens
  misc_RNA (1)...(19): siRNA sense strand
cuaaacuggcugugagacu

SEQ ID NO: 2242512 - RNA, 19 nt, Homo sapiens
  misc_RNA (1)...(19): siRNA sense strand
gguucaaaggccaauauuu

SEQ ID NO: 2242513 - RNA, 19 nt, Homo sapiens
  misc_RNA (1)...(19): siRNA sense strand
guggaagauggccgagcaa

SEQ ID NO: 2242514 - RNA, 19 nt, Homo sapiens
  misc_RNA (1)...(19): siRNA sense strand
gcaacaggauauaguuucu

SEQ ID NO: 2242515 - RNA, 19 nt, Homo sapiens
  misc_RNA (1)...(19): siRNA sense strand
aaggugaaaucuacaguga

SEQ ID NO: 2242516 - RNA, 19 nt, Homo sapiens
  misc_RNA (1)...(19): siRNA sense strand
guucaaaggccaauauuuc

SEQ ID NO: 2242517 - RNA, 19 nt, Homo sapiens
  misc_RNA (1)...(19): siRNA sense strand
gaaagagcucacagaaacu

SEQ ID NO: 2242518 - RNA, 19 nt, Homo sapiens
  misc_RNA (1)...(19): siRNA sense strand
cguugggugacaagaguuu

SEQ ID NO: 2242519 - RNA, 19 nt, Homo sapiens
  misc_RNA (1)...(19): siRNA sense strand
guucaaagauccuaaacug

SEQ ID NO: 2242520 - RNA, 19 nt, Homo sapiens
  misc_RNA (1)...(19): siRNA sense strand
gugagaaaauguccagauu

SEQ ID NO: 2242521 - RNA, 19 nt, Homo sapiens
  misc_RNA (1)...(19): siRNA sense strand
accaacaccagcaaagaaa

SEQ ID NO: 2242522 - RNA, 19 nt, Homo sapiens
  misc_RNA (1)...(19): siRNA sense strand
caaagagaauguggaagau

SEQ ID NO: 2242523 - RNA, 19 nt, Homo sapiens
  misc_RNA (1)...(19): siRNA sense strand
cugaagucauuuccaggua

SEQ ID NO: 2242524 - RNA, 19 nt, Homo sapiens
  misc_RNA (1)...(19): siRNA sense strand
ccagguauggagagguuca

SEQ ID NO: 2242525 - RNA, 19 nt, Homo sapiens
  misc_RNA (1)...(19): siRNA sense strand
ccuuagagauaggugcgaa

SEQ ID NO: 2242526 - RNA, 19 nt, Homo sapiens
  misc_RNA (1)...(19): siRNA sense strand
aggaggaagaagagagaaa

SEQ ID NO: 2242527 - RNA, 19 nt, Homo sapiens
  misc_RNA (1)...(19): siRNA sense strand
aggcaauggacaagggaua

SEQ ID NO: 2242528 - RNA, 19 nt, Homo sapiens
  misc_RNA (1)...(19): siRNA sense strand
gcuuagaugaugagagcaa

SEQ ID NO: 2242529 - RNA, 19 nt, Homo sapiens
  misc_RNA (1)...(19): siRNA sense strand
agagaaaacgagaggaaaa

SEQ ID NO: 2242530 - RNA, 19 nt, Homo sapiens
  misc_RNA (1)...(19): siRNA sense strand
aggaaauaugggacagaua

SEQ ID NO: 2242531 - RNA, 19 nt, Homo sapiens
  misc_RNA (1)...(19): siRNA sense strand
aagugaagauggaggccaa

SEQ ID NO: 2242532 - RNA, 19 nt, Homo sapiens
  misc_RNA (1)...(19): siRNA sense strand
gcauuaaggaacuggaaca

SEQ ID NO: 2242533 - RNA, 19 nt, Homo sapiens
  misc_RNA (1)...(19): siRNA sense strand
gggagcagggccaggaaua

SEQ ID NO: 2242534 - RNA, 19 nt, Homo sapiens
  misc_RNA (1)...(19): siRNA sense strand
aaauaaaagaggaggaaga

SEQ ID NO: 2242535 - RNA, 19 nt, Homo sapiens
  misc_RNA (1)...(19): siRNA sense strand
aagcaaagaaccagcagaa

SEQ ID NO: 2242536 - RNA, 19 nt, Homo sapiens
  misc_RNA (1)...(19): siRNA sense strand
ccaccauggagaagcauaa

SEQ ID NO: 2242537 - RNA, 19 nt, Homo sapiens
  misc_RNA (1)...(19): siRNA sense strand
gccuaaacaucaagcagaa

SEQ ID NO: 2242538 - RNA, 19 nt, Homo sapiens
  misc_RNA (1)...(19): siRNA sense strand
ggacaagggauaaugccua

SEQ ID NO: 2242539 - RNA, 19 nt, Homo sapiens
  misc_RNA (1)...(19): siRNA sense strand
cuaaaguggaagacuguaa

SEQ ID NO: 2242540 - RNA, 19 nt, Homo sapiens
  misc_RNA (1)...(19): siRNA sense strand
uuucaaaccagaagaacua

SEQ ID NO: 2242541 - RNA, 19 nt, Homo sapiens
  misc_RNA (1)...(19): siRNA sense strand
acagaguacacuagacaua

SEQ ID NO: 2242542 - RNA, 19 nt, Homo sapiens
  misc_RNA (1)...(19): siRNA sense strand
cggaaaacaucacggguau

SEQ ID NO: 2242543 - RNA, 19 nt, Homo sapiens
  misc_RNA (1)...(19): siRNA sense strand
agagaagcacugaguuaaa

SEQ ID NO: 2242544 - RNA, 19 nt, Homo sapiens
  misc_RNA (1)...(19): siRNA sense strand
aguucaugcuucugacaaa

SEQ ID NO: 2242545 - RNA, 19 nt, Homo sapiens
  misc_RNA (1)...(19): siRNA sense strand
gggaagugaggcagugcaa

SEQ ID NO: 2242546 - RNA, 19 nt, Homo sapiens
  misc_RNA (1)...(19): siRNA sense strand
gaagaaagcauuaaggaac

SEQ ID NO: 2242547 - RNA, 19 nt, Homo sapiens
  misc_RNA (1)...(19): siRNA sense strand
aaagacagacggauggaaa

SEQ ID NO: 2242548 - RNA, 19 nt, Homo sapiens
  misc_RNA (1)...(19): siRNA sense strand
uggaaaaccuaguugcaua

SEQ ID NO: 2242549 - RNA, 19 nt, Homo sapiens
  misc_RNA (1)...(19): siRNA sense strand
ccuaaaugcuugaggacug

SEQ ID NO: 2242550 - RNA, 19 nt, Homo sapiens
  misc_RNA (1)...(19): siRNA sense strand
gggacaagcaccuggaguu

SEQ ID NO: 2242551 - RNA, 19 nt, Homo sapiens
  misc_RNA (1)...(19): siRNA sense strand
guacagagugcggaagaaa

SEQ ID NO: 2242552 - RNA, 19 nt, Homo sapiens
  misc_RNA (1)...(19): siRNA sense strand
cauaaacagcugucagaau

SEQ ID NO: 2242553 - RNA, 19 nt, Homo sapiens
  misc_RNA (1)...(19): siRNA sense strand
gggcacuaguggaccaaau

SEQ ID NO: 2242554 - RNA, 19 nt, Homo sapiens
  misc_RNA (1)...(19): siRNA sense strand
cuguaagcauugaaggaca

SEQ ID NO: 2242555 - RNA, 19 nt, Homo sapiens
  misc_RNA (1)...(19): siRNA sense strand
ccaaaauggaaguggauca

SEQ ID NO: 2242556 - RNA, 19 nt, Homo sapiens
  misc_RNA (1)...(19): siRNA sense strand
agagagaaaacgagaggaa

SEQ ID NO: 2242557 - RNA, 19 nt, Homo sapiens
  misc_RNA (1)...(19): siRNA sense strand
caacaugggucaacagcca

SEQ ID NO: 2242558 - RNA, 19 nt, Homo sapiens
  misc_RNA (1)...(19): siRNA sense strand
caaugaagaauguccuaaa

SEQ ID NO: 2242559 - RNA, 19 nt, Homo sapiens
  misc_RNA (1)...(19): siRNA sense strand
ugaccaagggagacagcaa

SEQ ID NO: 2242560 - RNA, 19 nt, Homo sapiens
  misc_RNA (1)...(19): siRNA sense strand
cuggauuagguuugauaaa

SEQ ID NO: 2242561 - RNA, 19 nt, Homo sapiens
  misc_RNA (1)...(19): siRNA sense strand
agaugggaaugaugaacaa

SEQ ID NO: 2242562 - RNA, 19 nt, Homo sapiens
  misc_RNA (1)...(19): siRNA sense strand
gcuacugaagauagauuaa

SEQ ID NO: 2242563 - RNA, 19 nt, Homo sapiens
  misc_RNA (1)...(19): siRNA sense strand
ucuagagaaucgugugaau

SEQ ID NO: 2242564 - RNA, 19 nt, Homo sapiens
  misc_RNA (1)...(19): siRNA sense strand
auuaacaagugcaaaggaa

SEQ ID NO: 2242565 - RNA, 19 nt, Homo sapiens
  misc_RNA (1)...(19): siRNA sense strand
agggaaugaauguaacaaa

SEQ ID NO: 2242566 - RNA, 19 nt, Homo sapiens
  misc_RNA (1)...(19): siRNA sense strand
ccagaggagaguauacaua

SEQ ID NO: 2242567 - RNA, 19 nt, Homo sapiens
  misc_RNA (1)...(19): siRNA sense strand
ugauaaauagcauggucaa

SEQ ID NO: 2242568 - RNA, 19 nt, Homo sapiens
  misc_RNA (1)...(19): siRNA sense strand
cagaaagaacuagaagaaa

SEQ ID NO: 2242569 - RNA, 19 nt, Homo sapiens
  misc_RNA (1)...(19): siRNA sense strand
caugcauguucaagaguau

SEQ ID NO: 2242570 - RNA, 19 nt, Homo sapiens
  misc_RNA (1)...(19): siRNA sense strand
guacugucugugaggauua

SEQ ID NO: 2242571 - RNA, 19 nt, Homo sapiens
  misc_RNA (1)...(19): siRNA sense strand
ccagaugggaggacaaaca

SEQ ID NO: 2242572 - RNA, 19 nt, Homo sapiens
  misc_RNA (1)...(19): siRNA sense strand
ccuccaaggcagacaccua

SEQ ID NO: 2242573 - RNA, 19 nt, Homo sapiens
  misc_RNA (1)...(19): siRNA sense strand
aaaccaggcaugaaagcaa

SEQ ID NO: 2242574 - RNA, 19 nt, Homo sapiens
  misc_RNA (1)...(19): siRNA sense strand
uggaacaggaggaagaaga

SEQ ID NO: 2242575 - RNA, 19 nt, Homo sapiens
  misc_RNA (1)...(19): siRNA sense strand
aggaauaggcccuggaaug

SEQ ID NO: 2242576 - RNA, 19 nt, Homo sapiens
  misc_RNA (1)...(19): siRNA sense strand
gauaaauagcauggucaaa

SEQ ID NO: 2242577 - RNA, 19 nt, Homo sapiens
  misc_RNA (1)...(19): siRNA sense strand
cagcaguggaaauggcaau

SEQ ID NO: 2242578 - RNA, 19 nt, Homo sapiens
  misc_RNA (1)...(19): siRNA sense strand
gaagaauuguacaagacau

SEQ ID NO: 2242579 - RNA, 19 nt, Homo sapiens
  misc_RNA (1)...(19): siRNA sense strand
auuaagaggaaguuagaca

SEQ ID NO: 2242580 - RNA, 19 nt, Homo sapiens
  misc_RNA (1)...(19): siRNA sense strand
ggcccaauguucuggaaga

SEQ ID NO: 2242581 - RNA, 19 nt, Homo sapiens
  misc_RNA (1)...(19): siRNA sense strand
ccgaaacagaagagagaag

SEQ ID NO: 2242582 - RNA, 19 nt, Homo sapiens
  misc_RNA (1)...(19): siRNA sense strand
cagccaaguacuucagcua

SEQ ID NO: 2242583 - RNA, 19 nt, Homo sapiens
  misc_RNA (1)...(19): siRNA sense strand
aagaaagcauuaaggaacu

SEQ ID NO: 2242584 - RNA, 19 nt, Homo sapiens
  misc_RNA (1)...(19): siRNA sense strand
ggaacaggccaauggggaa

SEQ ID NO: 2242585 - RNA, 19 nt, Homo sapiens
  misc_RNA (1)...(19): siRNA sense strand
aaggaauaugagagaguua

SEQ ID NO: 2242586 - RNA, 19 nt, Homo sapiens
  misc_RNA (1)...(19): siRNA sense strand
agaaggaauaugagagagu

SEQ ID NO: 2242587 - RNA, 19 nt, Homo sapiens
  misc_RNA (1)...(19): siRNA sense strand
gcucugacaugaauggcua

SEQ ID NO: 2242588 - RNA, 19 nt, Homo sapiens
  misc_RNA (1)...(19): siRNA sense strand
ggguuauacugguguccga

SEQ ID NO: 2242589 - RNA, 19 nt, Homo sapiens
  misc_RNA (1)...(19): siRNA sense strand
aguucagacagaagacaau

SEQ ID NO: 2242590 - RNA, 19 nt, Homo sapiens
  misc_RNA (1)...(19): siRNA sense strand
aaguaaagaaccaaagaag

SEQ ID NO: 2242591 - RNA, 19 nt, Homo sapiens
  misc_RNA (1)...(19): siRNA sense strand
gcuauuguuugcauggaca

SEQ ID NO: 2242592 - RNA, 19 nt, Homo sapiens
  misc_RNA (1)...(19): siRNA sense strand
cugguggacaugagucaaa

SEQ ID NO: 2242593 - RNA, 19 nt, Homo sapiens
  misc_RNA (1)...(19): siRNA sense strand
ccaaggagacagaggccaa

SEQ ID NO: 2242594 - RNA, 19 nt, Homo sapiens
  misc_RNA (1)...(19): siRNA sense strand
agacgauggagaugaggaa

SEQ ID NO: 2242595 - RNA, 19 nt, Homo sapiens
  misc_RNA (1)...(19): siRNA sense strand
cguggugauaguugggaaa

SEQ ID NO: 2242596 - RNA, 19 nt, Homo sapiens
  misc_RNA (1)...(19): siRNA sense strand
cgacagaauagaaaaggaa

SEQ ID NO: 2242597 - RNA, 19 nt, Homo sapiens
  misc_RNA (1)...(19): siRNA sense strand
gcagaaggacuuugcgcau

SEQ ID NO: 2242598 - RNA, 19 nt, Homo sapiens
  misc_RNA (1)...(19): siRNA sense strand
cagcgaacgacgugcucaa

SEQ ID NO: 2242599 - RNA, 19 nt, Homo sapiens
  misc_RNA (1)...(19): siRNA sense strand
uggaacaagacgauggaga

SEQ ID NO: 2242600 - RNA, 19 nt, Homo sapiens
  misc_RNA (1)...(19): siRNA sense strand
cgugaagcaguuagagaga

SEQ ID NO: 2242601 - RNA, 19 nt, Homo sapiens
  misc_RNA (1)...(19): siRNA sense strand
cagaauuggugcaggcauc

SEQ ID NO: 2242602 - RNA, 19 nt, Homo sapiens
  misc_RNA (1)...(19): siRNA sense strand
gcguggugauaguugggaa

SEQ ID NO: 2242603 - RNA, 19 nt, Homo sapiens
  misc_RNA (1)...(19): siRNA sense strand
aagauggacuggcgggaga

SEQ ID NO: 2242604 - RNA, 19 nt, Homo sapiens
  misc_RNA (1)...(19): siRNA sense strand
acuccaugcuuaaggacau

SEQ ID NO: 2242605 - RNA, 19 nt, Homo sapiens
  misc_RNA (1)...(19): siRNA sense strand
ucacagagaccuaaagcca

SEQ ID NO: 2242606 - RNA, 19 nt, Homo sapiens
  misc_RNA (1)...(19): siRNA sense strand
guuagagagaggcgggaga

SEQ ID NO: 2242607 - RNA, 19 nt, Homo sapiens
  misc_RNA (1)...(19): siRNA sense strand
cuacccaaacaucgggaaa

SEQ ID NO: 2242608 - RNA, 19 nt, Homo sapiens
  misc_RNA (1)...(19): siRNA sense strand
cuccgagccaugagaaaua

SEQ ID NO: 2242609 - RNA, 19 nt, Homo sapiens
  misc_RNA (1)...(19): siRNA sense strand
cagcaagaggacaggcuca

SEQ ID NO: 2242610 - RNA, 19 nt, Homo sapiens
  misc_RNA (1)...(19): siRNA sense strand
acagagaccuaaagccaca

SEQ ID NO: 2242611 - RNA, 19 nt, Homo sapiens
  misc_RNA (1)...(19): siRNA sense strand
agcgaagacuguaaggaga

SEQ ID NO: 2242612 - RNA, 19 nt, Homo sapiens
  misc_RNA (1)...(19): siRNA sense strand
cuccagagaugcugagcga

SEQ ID NO: 2242613 - RNA, 19 nt, Homo sapiens
  misc_RNA (1)...(19): siRNA sense strand
cacucuguauguugggaaa

SEQ ID NO: 2242614 - RNA, 19 nt, Homo sapiens
  misc_RNA (1)...(19): siRNA sense strand
ccagagaugcugagcgaag

SEQ ID NO: 2242615 - RNA, 19 nt, Homo sapiens
  misc_RNA (1)...(19): siRNA sense strand
cuaccuacacgguggacau

SEQ ID NO: 2242616 - RNA, 19 nt, Homo sapiens
  misc_RNA (1)...(19): siRNA sense strand
cuguggagacccugcgcua

SEQ ID NO: 2242617 - RNA, 19 nt, Homo sapiens
  misc_RNA (1)...(19): siRNA sense strand
cggagaaggaccggcaauu

SEQ ID NO: 2242618 - RNA, 19 nt, Homo sapiens
  misc_RNA (1)...(19): siRNA sense strand
cagagaagcacgaagacgu

SEQ ID NO: 2242619 - RNA, 19 nt, Homo sapiens
  misc_RNA (1)...(19): siRNA sense strand
ggucccaacacauguggaa

SEQ ID NO: 2242620 - RNA, 19 nt, Homo sapiens
  misc_RNA (1)...(19): siRNA sense strand
agguccagcuguugcgaga

SEQ ID NO: 2242621 - RNA, 19 nt, Homo sapiens
  misc_RNA (1)...(19): siRNA sense strand
caucguucacagagaccua

SEQ ID NO: 2242622 - RNA, 19 nt, Homo sapiens
  misc_RNA (1)...(19): siRNA sense strand
acggcaagaucaaggccau

SEQ ID NO: 2242623 - RNA, 19 nt, Homo sapiens
  misc_RNA (1)...(19): siRNA sense strand
gugagcgacagaauagaaa

SEQ ID NO: 2242624 - RNA, 19 nt, Homo sapiens
  misc_RNA (1)...(19): siRNA sense strand
aaagcaagaacaagcucaa

SEQ ID NO: 2242625 - RNA, 19 nt, Homo sapiens
  misc_RNA (1)...(19): siRNA sense strand
cucgggauguggaggagaa

SEQ ID NO: 2242626 - RNA, 19 nt, Homo sapiens
  misc_RNA (1)...(19): siRNA sense strand
auaaugaaggccugacgaa

SEQ ID NO: 2242627 - RNA, 19 nt, Homo sapiens
  misc_RNA (1)...(19): siRNA sense strand
ccaugagaaauaagaagca

SEQ ID NO: 2242628 - RNA, 19 nt, Homo sapiens
  misc_RNA (1)...(19): siRNA sense strand
cucuguauguugggaaaua

SEQ ID NO: 2242629 - RNA, 19 nt, Homo sapiens
  misc_RNA (1)...(19): siRNA sense strand
uggacuggcgggagaacau

SEQ ID NO: 2242630 - RNA, 19 nt, Homo sapiens
  misc_RNA (1)...(19): siRNA sense strand
cgguggaggaggaggaaga

SEQ ID NO: 2242631 - RNA, 19 nt, Homo sapiens
  misc_RNA (1)...(19): siRNA sense strand
gggaaucaguuuauggaga

SEQ ID NO: 2242632 - RNA, 19 nt, Homo sapiens
  misc_RNA (1)...(19): siRNA sense strand
ggaagaaugugauggugga

SEQ ID NO: 2242633 - RNA, 19 nt, Homo sapiens
  misc_RNA (1)...(19): siRNA sense strand
aggucgaggcggaggcuuu

SEQ ID NO: 2242634 - RNA, 19 nt, Homo sapiens
  misc_RNA (1)...(19): siRNA sense strand
cuucauuugucgaggaaag

SEQ ID NO: 2242635 - RNA, 19 nt, Homo sapiens
  misc_RNA (1)...(19): siRNA sense strand
cggaaggagaugacaaaau

SEQ ID NO: 2242636 - RNA, 19 nt, Homo sapiens
  misc_RNA (1)...(19): siRNA sense strand
ucgcaaugguggaugugau

SEQ ID NO: 2242637 - RNA, 19 nt, Homo sapiens
  misc_RNA (1)...(19): siRNA sense strand
acaugaagccgcaggagca

SEQ ID NO: 2242638 - RNA, 19 nt, Homo sapiens
  misc_RNA (1)...(19): siRNA sense strand
gaggaaaggaagaugcacu

SEQ ID NO: 2242639 - RNA, 19 nt, Homo sapiens
  misc_RNA (1)...(19): siRNA sense strand
agaugcaacaggagaacau

SEQ ID NO: 2242640 - RNA, 19 nt, Homo sapiens
  misc_RNA (1)...(19): siRNA sense strand
gaggaaaccagucggggaa

SEQ ID NO: 2242641 - RNA, 19 nt, Homo sapiens
  misc_RNA (1)...(19): siRNA sense strand
gcaguugacccuugagcca

SEQ ID NO: 2242642 - RNA, 19 nt, Homo sapiens
  misc_RNA (1)...(19): siRNA sense strand
ccuugagccauaugaaaga

SEQ ID NO: 2242643 - RNA, 19 nt, Homo sapiens
  misc_RNA (1)...(19): siRNA sense strand
aggaggaagagguggugga

SEQ ID NO: 2242644 - RNA, 19 nt, Homo sapiens
  misc_RNA (1)...(19): siRNA sense strand
aggaagaggugguggaggc

SEQ ID NO: 2242645 - RNA, 19 nt, Homo sapiens
  misc_RNA (1)...(19): siRNA sense strand
agaucgagguguaccgcaa

SEQ ID NO: 2242646 - RNA, 19 nt, Homo sapiens
  misc_RNA (1)...(19): siRNA sense strand
aggccugggaagugaacaa

SEQ ID NO: 2242647 - RNA, 19 nt, Homo sapiens
  misc_RNA (1)...(19): siRNA sense strand
cugcagaagggcaugaaga

SEQ ID NO: 2242648 - RNA, 19 nt, Homo sapiens
  misc_RNA (1)...(19): siRNA sense strand
ccucaagcccacagggaac

SEQ ID NO: 2242649 - RNA, 19 nt, Homo sapiens
  misc_RNA (1)...(19): siRNA sense strand
gagaagaggucuacaccag

SEQ ID NO: 2242650 - RNA, 19 nt, Homo sapiens
  misc_RNA (1)...(19): siRNA sense strand
gcgacagcguaguggugca

SEQ ID NO: 2242651 - RNA, 19 nt, Homo sapiens
  misc_RNA (1)...(19): siRNA sense strand
cuacagaacuucaaaggug

SEQ ID NO: 2242652 - RNA, 19 nt, Homo sapiens
  misc_RNA (1)...(19): siRNA sense strand
cccaauggcuuaaaggacu

SEQ ID NO: 2242653 - RNA, 19 nt, Homo sapiens
  misc_RNA (1)...(19): siRNA sense strand
cacgagaguuuaugagaga

SEQ ID NO: 2242654 - RNA, 19 nt, Homo sapiens
  misc_RNA (1)...(19): siRNA sense strand
agagaaaacgagaggauga

SEQ ID NO: 2242655 - RNA, 19 nt, Homo sapiens
  misc_RNA (1)...(19): siRNA sense strand
augauaaacugguggugga

SEQ ID NO: 2242656 - RNA, 19 nt, Homo sapiens
  misc_RNA (1)...(19): siRNA sense strand
ccauuaaaucugaaaguac

SEQ ID NO: 2242657 - RNA, 19 nt, Homo sapiens
  misc_RNA (1)...(19): siRNA sense strand
ugcagaaaugggauggaaa

SEQ ID NO: 2242658 - RNA, 19 nt, Homo sapiens
  misc_RNA (1)...(19): siRNA sense strand
aagaaguaggagugggcuu

SEQ ID NO: 2242659 - RNA, 19 nt, Homo sapiens
  misc_RNA (1)...(19): siRNA sense strand
aggaaagucaagagcacca

SEQ ID NO: 2242660 - RNA, 19 nt, Homo sapiens
  misc_RNA (1)...(19): siRNA sense strand
acaggaaagucaagagcac

SEQ ID NO: 2242661 - RNA, 19 nt, Homo sapiens
  misc_RNA (1)...(19): siRNA sense strand
aaagagaaaacgagaggau

SEQ ID NO: 2242662 - RNA, 19 nt, Homo sapiens
  misc_RNA (1)...(19): siRNA sense strand
ccauaaagagaaaacgaga

SEQ ID NO: 2242663 - RNA, 19 nt, Homo sapiens
  misc_RNA (1)...(19): siRNA sense strand
aguuggaaggugacaauaa

SEQ ID NO: 2242664 - RNA, 19 nt, Homo sapiens
  misc_RNA (1)...(19): siRNA sense strand
agagaaucagcaagagaau

SEQ ID NO: 2242665 - RNA, 19 nt, Homo sapiens
  misc_RNA (1)...(19): siRNA sense strand
aagucaagacagugguuca

SEQ ID NO: 2242666 - RNA, 19 nt, Homo sapiens
  misc_RNA (1)...(19): siRNA sense strand
ugaccgaacucaacggcga

SEQ ID NO: 2242667 - RNA, 19 nt, Homo sapiens
  misc_RNA (1)...(19): siRNA sense strand
aggaaaacuuugaagccuu

SEQ ID NO: 2242668 - RNA, 19 nt, Homo sapiens
  misc_RNA (1)...(19): siRNA sense strand
ugguucaguuggaagguga

SEQ ID NO: 2242669 - RNA, 19 nt, Homo sapiens
  misc_RNA (1)...(19): siRNA sense strand
acaucaagucugugaccga

SEQ ID NO: 2242670 - RNA, 19 nt, Homo sapiens
  misc_RNA (1)...(19): siRNA sense strand
aguaccaacugcagagcca

SEQ ID NO: 2242671 - RNA, 19 nt, Homo sapiens
  misc_RNA (1)...(19): siRNA sense strand
auaccaugacauuggguga

SEQ ID NO: 2242672 - RNA, 19 nt, Homo sapiens
  misc_RNA (1)...(19): siRNA sense strand
gggaaggaaagcacaauaa

SEQ ID NO: 2242673 - RNA, 19 nt, Homo sapiens
  misc_RNA (1)...(19): siRNA sense strand
ugggaauagcuuugcgaaa

SEQ ID NO: 2242674 - RNA, 19 nt, Homo sapiens
  misc_RNA (1)...(19): siRNA sense strand
ggaaauuagugguggagug

SEQ ID NO: 2242675 - RNA, 19 nt, Homo sapiens
  misc_RNA (1)...(19): siRNA sense strand
aaggaaagcacaauaacaa

SEQ ID NO: 2242676 - RNA, 19 nt, Homo sapiens
  misc_RNA (1)...(19): siRNA sense strand
gagugggaugggaaggaaa

SEQ ID NO: 2242677 - RNA, 19 nt, Homo sapiens
  misc_RNA (1)...(19): siRNA sense strand
gaaaauugaaagaugggaa

SEQ ID NO: 2242678 - RNA, 19 nt, Homo sapiens
  misc_RNA (1)...(19): siRNA sense strand
ggaaagcacaauaacaaga

SEQ ID NO: 2242679 - RNA, 19 nt, Homo sapiens
  misc_RNA (1)...(19): siRNA sense strand
gaugggaaggaaagcacaa

SEQ ID NO: 2242680 - RNA, 19 nt, Homo sapiens
  misc_RNA (1)...(19): siRNA sense strand
gaaggaaagcacaauaaca

SEQ ID NO: 2242681 - RNA, 19 nt, Homo sapiens
  misc_RNA (1)...(19): siRNA sense strand
acugagagcacuuugaaaa

SEQ ID NO: 2242682 - RNA, 19 nt, Homo sapiens
  misc_RNA (1)...(19): siRNA sense strand
ugggaaggaaagcacaaua

SEQ ID NO: 2242683 - RNA, 19 nt, Homo sapiens
  misc_RNA (1)...(19): siRNA sense strand
augaauacaugaaggagcu

SEQ ID NO: 2242684 - RNA, 19 nt, Homo sapiens
  misc_RNA (1)...(19): siRNA sense strand
ccucagagaucguggguga

SEQ ID NO: 2242685 - RNA, 19 nt, Homo sapiens
  misc_RNA (1)...(19): siRNA sense strand
gugacaagcugguggaggu

SEQ ID NO: 2242686 - RNA, 19 nt, Homo sapiens
  misc_RNA (1)...(19): siRNA sense strand
ccggcaaguucgagaugga

SEQ ID NO: 2242687 - RNA, 19 nt, Homo sapiens
  misc_RNA (1)...(19): siRNA sense strand
ggcaagacguucaaggcca

SEQ ID NO: 2242688 - RNA, 19 nt, Homo sapiens
  misc_RNA (1)...(19): siRNA sense strand
auggagagugagaagaauu

SEQ ID NO: 2242689 - RNA, 19 nt, Homo sapiens
  misc_RNA (1)...(19): siRNA sense strand
ucacggaggugcagcagga

SEQ ID NO: 2242690 - RNA, 19 nt, Homo sapiens
  misc_RNA (1)...(19): siRNA sense strand
cgagauggagagugagaag

SEQ ID NO: 2242691 - RNA, 19 nt, Homo sapiens
  misc_RNA (1)...(19): siRNA sense strand
ccaucggaggcgugaccua

SEQ ID NO: 2242692 - RNA, 19 nt, Homo sapiens
  misc_RNA (1)...(19): siRNA sense strand
aggagaaggucgaacuaua

SEQ ID NO: 2242693 - RNA, 19 nt, Homo sapiens
  misc_RNA (1)...(19): siRNA sense strand
aggaguauguggugggcaa

SEQ ID NO: 2242694 - RNA, 19 nt, Homo sapiens
  misc_RNA (1)...(19): siRNA sense strand
gcacuacaccugagagcaa

SEQ ID NO: 2242695 - RNA, 19 nt, Homo sapiens
  misc_RNA (1)...(19): siRNA sense strand
ggaaaaucucugagggcaa

SEQ ID NO: 2242696 - RNA, 19 nt, Homo sapiens
  misc_RNA (1)...(19): siRNA sense strand
aggcaaugaacuagaguau

SEQ ID NO: 2242697 - RNA, 19 nt, Homo sapiens
  misc_RNA (1)...(19): siRNA sense strand
caucauuacucuagcucaa

SEQ ID NO: 2242698 - RNA, 19 nt, Homo sapiens
  misc_RNA (1)...(19): siRNA sense strand
gugaaagacuggaaugaca

SEQ ID NO: 2242699 - RNA, 19 nt, Homo sapiens
  misc_RNA (1)...(19): siRNA sense strand
gggauaaggacauggacuu

SEQ ID NO: 2242700 - RNA, 19 nt, Homo sapiens
  misc_RNA (1)...(19): siRNA sense strand
ggguagagcuccugcgagu

SEQ ID NO: 2242701 - RNA, 19 nt, Homo sapiens
  misc_RNA (1)...(19): siRNA sense strand
gggccaaauuagugaagca

SEQ ID NO: 2242702 - RNA, 19 nt, Homo sapiens
  misc_RNA (1)...(19): siRNA sense strand
ggauggaggaggaagagua

SEQ ID NO: 2242703 - RNA, 19 nt, Homo sapiens
  misc_RNA (1)...(19): siRNA sense strand
cugacaugguggagaguga

SEQ ID NO: 2242704 - RNA, 19 nt, Homo sapiens
  misc_RNA (1)...(19): siRNA sense strand
ccauauagcacaagggucu

SEQ ID NO: 2242705 - RNA, 19 nt, Homo sapiens
  misc_RNA (1)...(19): siRNA sense strand
ccacauacucugacaguga

SEQ ID NO: 2242706 - RNA, 19 nt, Homo sapiens
  misc_RNA (1)...(19): siRNA sense strand
agaccuauguggagagcuu

SEQ ID NO: 2242707 - RNA, 19 nt, Homo sapiens
  misc_RNA (1)...(19): siRNA sense strand
gauauaugagguagcaaua

SEQ ID NO: 2242708 - RNA, 19 nt, Homo sapiens
  misc_RNA (1)...(19): siRNA sense strand
gggcagcugugaaggagaa

SEQ ID NO: 2242709 - RNA, 19 nt, Homo sapiens
  misc_RNA (1)...(19): siRNA sense strand
agaacuugcaggacagaaa

SEQ ID NO: 2242710 - RNA, 19 nt, Homo sapiens
  misc_RNA (1)...(19): siRNA sense strand
aggcagaauuagcagagaa

SEQ ID NO: 2242711 - RNA, 19 nt, Homo sapiens
  misc_RNA (1)...(19): siRNA sense strand
cuucaagacugguguccua

SEQ ID NO: 2242712 - RNA, 19 nt, Homo sapiens
  misc_RNA (1)...(19): siRNA sense strand
gggaaaucgauaaugacua

SEQ ID NO: 2242713 - RNA, 19 nt, Homo sapiens
  misc_RNA (1)...(19): siRNA sense strand
cuucagagaauguaggauu

SEQ ID NO: 2242714 - RNA, 19 nt, Homo sapiens
  misc_RNA (1)...(19): siRNA sense strand
aguuauucccugaagauua

SEQ ID NO: 2242715 - RNA, 19 nt, Homo sapiens
  misc_RNA (1)...(19): siRNA sense strand
gggucauaaaggugaggaa

SEQ ID NO: 2242716 - RNA, 19 nt, Homo sapiens
  misc_RNA (1)...(19): siRNA sense strand
ugacaaggacacugggaga

SEQ ID NO: 2242717 - RNA, 19 nt, Homo sapiens
  misc_RNA (1)...(19): siRNA sense strand
ugacagugaaugugaaaga

SEQ ID NO: 2242718 - RNA, 19 nt, Homo sapiens
  misc_RNA (1)...(19): siRNA sense strand
agaagaaauuggaccauga

SEQ ID NO: 2242719 - RNA, 19 nt, Homo sapiens
  misc_RNA (1)...(19): siRNA sense strand
ggaacgaacgcugggaaua

SEQ ID NO: 2242720 - RNA, 19 nt, Homo sapiens
  misc_RNA (1)...(19): siRNA sense strand
ccaaauuguaccagauuga

SEQ ID NO: 2242721 - RNA, 19 nt, Homo sapiens
  misc_RNA (1)...(19): siRNA sense strand
gaguuaagagagggaaaua

SEQ ID NO: 2242722 - RNA, 19 nt, Homo sapiens
  misc_RNA (1)...(19): siRNA sense strand
uggcaagguucaugaagau

SEQ ID NO: 2242723 - RNA, 19 nt, Homo sapiens
  misc_RNA (1)...(19): siRNA sense strand
guucagaugcggucagcua

SEQ ID NO: 2242724 - RNA, 19 nt, Homo sapiens
  misc_RNA (1)...(19): siRNA sense strand
ggaaaauucaacagagaga

SEQ ID NO: 2242725 - RNA, 19 nt, Homo sapiens
  misc_RNA (1)...(19): siRNA sense strand
aagacagccuggugggauu

SEQ ID NO: 2242726 - RNA, 19 nt, Homo sapiens
  misc_RNA (1)...(19): siRNA sense strand
acagagagaacaaggauga

SEQ ID NO: 2242727 - RNA, 19 nt, Homo sapiens
  misc_RNA (1)...(19): siRNA sense strand
cagugaaggcagaagauca

SEQ ID NO: 2242728 - RNA, 19 nt, Homo sapiens
  misc_RNA (1)...(19): siRNA sense strand
cagagaagaccuuggaguu

SEQ ID NO: 2242729 - RNA, 19 nt, Homo sapiens
  misc_RNA (1)...(19): siRNA sense strand
ggucagagauguuugccau

SEQ ID NO: 2242730 - RNA, 19 nt, Homo sapiens
  misc_RNA (1)...(19): siRNA sense strand
ggucuuaauggcagaguca

SEQ ID NO: 2242731 - RNA, 19 nt, Homo sapiens
  misc_RNA (1)...(19): siRNA sense strand
augaguuaagagagggaaa

SEQ ID NO: 2242732 - RNA, 19 nt, Homo sapiens
  misc_RNA (1)...(19): siRNA sense strand
agaaauuggaccaugagaa

SEQ ID NO: 2242733 - RNA, 19 nt, Homo sapiens
  misc_RNA (1)...(19): siRNA sense strand
guucaaagcaucugaguac

SEQ ID NO: 2242734 - RNA, 19 nt, Homo sapiens
  misc_RNA (1)...(19): siRNA sense strand
gagcagaacaggcagguca

SEQ ID NO: 2242735 - RNA, 19 nt, Homo sapiens
  misc_RNA (1)...(19): siRNA sense strand
ccaaguucuuccagaucaa

SEQ ID NO: 2242736 - RNA, 19 nt, Homo sapiens
  misc_RNA (1)...(19): siRNA sense strand
ccuuuaugaggcagaauua

SEQ ID NO: 2242737 - RNA, 19 nt, Homo sapiens
  misc_RNA (1)...(19): siRNA sense strand
cacaagggucuuagagaau

SEQ ID NO: 2242738 - RNA, 19 nt, Homo sapiens
  misc_RNA (1)...(19): siRNA sense strand
gaggaaagcaugagcucca

SEQ ID NO: 2242739 - RNA, 19 nt, Homo sapiens
  misc_RNA (1)...(19): siRNA sense strand
ccucaauguaacaguauau

SEQ ID NO: 2242740 - RNA, 19 nt, Homo sapiens
  misc_RNA (1)...(19): siRNA sense strand
uugcagaagauuacacaua

SEQ ID NO: 2242741 - RNA, 19 nt, Homo sapiens
  misc_RNA (1)...(19): siRNA sense strand
gagauggccaggugagcua

SEQ ID NO: 2242742 - RNA, 19 nt, Homo sapiens
  misc_RNA (1)...(19): siRNA sense strand
gcuacaucacagagggaga

SEQ ID NO: 2242743 - RNA, 19 nt, Homo sapiens
  misc_RNA (1)...(19): siRNA sense strand
acaggagacaggugugaaa

SEQ ID NO: 2242744 - RNA, 19 nt, Homo sapiens
  misc_RNA (1)...(19): siRNA sense strand
acacaaggucagagauguu

SEQ ID NO: 2242745 - RNA, 19 nt, Homo sapiens
  misc_RNA (1)...(19): siRNA sense strand
agugaaggcagaagaucaa

SEQ ID NO: 2242746 - RNA, 19 nt, Homo sapiens
  misc_RNA (1)...(19): siRNA sense strand
ggccauggauaaaggagau

SEQ ID NO: 2242747 - RNA, 19 nt, Homo sapiens
  misc_RNA (1)...(19): siRNA sense strand
cgggaaaauucaacagaga

SEQ ID NO: 2242748 - RNA, 19 nt, Homo sapiens
  misc_RNA (1)...(19): siRNA sense strand
ggaaagcacuucaaagcca

SEQ ID NO: 2242749 - RNA, 19 nt, Homo sapiens
  misc_RNA (1)...(19): siRNA sense strand
gggagaaggaaguguccau

SEQ ID NO: 2242750 - RNA, 19 nt, Homo sapiens
  misc_RNA (1)...(19): siRNA sense strand
ccaagauacaggaaugauu

SEQ ID NO: 2242751 - RNA, 19 nt, Homo sapiens
  misc_RNA (1)...(19): siRNA sense strand
aagucagggccauggauaa

SEQ ID NO: 2242752 - RNA, 19 nt, Homo sapiens
  misc_RNA (1)...(19): siRNA sense strand
gcaucugaguacacaguau

SEQ ID NO: 2242753 - RNA, 19 nt, Homo sapiens
  misc_RNA (1)...(19): siRNA sense strand
caucacuguuggagaggau

SEQ ID NO: 2242754 - RNA, 19 nt, Homo sapiens
  misc_RNA (1)...(19): siRNA sense strand
caaucuuacugcuggucaa

SEQ ID NO: 2242755 - RNA, 19 nt, Homo sapiens
  misc_RNA (1)...(19): siRNA sense strand
agauauaugagguagcaau

SEQ ID NO: 2242756 - RNA, 19 nt, Homo sapiens
  misc_RNA (1)...(19): siRNA sense strand
cagaaacuggaucgggaaa

SEQ ID NO: 2242757 - RNA, 19 nt, Homo sapiens
  misc_RNA (1)...(19): siRNA sense strand
gcacauugccuucagaaca

SEQ ID NO: 2242758 - RNA, 19 nt, Homo sapiens
  misc_RNA (1)...(19): siRNA sense strand
gcaccacuguccaggagaa

SEQ ID NO: 2242759 - RNA, 19 nt, Homo sapiens
  misc_RNA (1)...(19): siRNA sense strand
uggaaguggcugugaguau

SEQ ID NO: 2242760 - RNA, 19 nt, Homo sapiens
  misc_RNA (1)...(19): siRNA sense strand
acuugaaaaugcagagaaa

SEQ ID NO: 2242761 - RNA, 19 nt, Homo sapiens
  misc_RNA (1)...(19): siRNA sense strand
gcaaggucuccgugguaaa

SEQ ID NO: 2242762 - RNA, 19 nt, Homo sapiens
  misc_RNA (1)...(19): siRNA sense strand
aagagauggaggagaagua

SEQ ID NO: 2242763 - RNA, 19 nt, Homo sapiens
  misc_RNA (1)...(19): siRNA sense strand
gcuuagcgguugcgggaga

SEQ ID NO: 2242764 - RNA, 19 nt, Homo sapiens
  misc_RNA (1)...(19): siRNA sense strand
augugaaccuggaagaaau

SEQ ID NO: 2242765 - RNA, 19 nt, Homo sapiens
  misc_RNA (1)...(19): siRNA sense strand
agugacaggaaauggauua

SEQ ID NO: 2242766 - RNA, 19 nt, Homo sapiens
  misc_RNA (1)...(19): siRNA sense strand
gcaacaacccagaggucca

SEQ ID NO: 2242767 - RNA, 19 nt, Homo sapiens
  misc_RNA (1)...(19): siRNA sense strand
uggagaaggaaguggaagu

SEQ ID NO: 2242768 - RNA, 19 nt, Homo sapiens
  misc_RNA (1)...(19): siRNA sense strand
gcaucuuguuccugguuau

SEQ ID NO: 2242769 - RNA, 19 nt, Homo sapiens
  misc_RNA (1)...(19): siRNA sense strand
ccugcaaaguaaagaugau

SEQ ID NO: 2242770 - RNA, 19 nt, Homo sapiens
  misc_RNA (1)...(19): siRNA sense strand
auuaugaacaugcaggaua

SEQ ID NO: 2242771 - RNA, 19 nt, Homo sapiens
  misc_RNA (1)...(19): siRNA sense strand
agaggauggcugcaggaaa

SEQ ID NO: 2242772 - RNA, 19 nt, Homo sapiens
  misc_RNA (1)...(19): siRNA sense strand
cuacaaugccacugaccau

SEQ ID NO: 2242773 - RNA, 19 nt, Homo sapiens
  misc_RNA (1)...(19): siRNA sense strand
aggaaacggcaaugaggau

SEQ ID NO: 2242774 - RNA, 19 nt, Homo sapiens
  misc_RNA (1)...(19): siRNA sense strand
uguuacaacuacugcucaa

SEQ ID NO: 2242775 - RNA, 19 nt, Homo sapiens
  misc_RNA (1)...(19): siRNA sense strand
uuggaaugggaaaggcaaa

SEQ ID NO: 2242776 - RNA, 19 nt, Homo sapiens
  misc_RNA (1)...(19): siRNA sense strand
cggagaugucccucgcaaa

SEQ ID NO: 2242777 - RNA, 19 nt, Homo sapiens
  misc_RNA (1)...(19): siRNA sense strand
caugcaaaauucugagcua

SEQ ID NO: 2242778 - RNA, 19 nt, Homo sapiens
  misc_RNA (1)...(19): siRNA sense strand
cuaaaugacuucugggcuc

SEQ ID NO: 2242779 - RNA, 19 nt, Homo sapiens
  misc_RNA (1)...(19): siRNA sense strand
ugacuguuggaaugggaaa

SEQ ID NO: 2242780 - RNA, 19 nt, Homo sapiens
  misc_RNA (1)...(19): siRNA sense strand
augcagagagaguggagau

SEQ ID NO: 2242781 - RNA, 19 nt, Homo sapiens
  misc_RNA (1)...(19): siRNA sense strand
cugaaacaggccaagaaau

SEQ ID NO: 2242782 - RNA, 19 nt, Homo sapiens
  misc_RNA (1)...(19): siRNA sense strand
uguccaaaggcuucaacaa

SEQ ID NO: 2242783 - RNA, 19 nt, Homo sapiens
  misc_RNA (1)...(19): siRNA sense strand
acugaaacaggccaagaaa

SEQ ID NO: 2242784 - RNA, 19 nt, Homo sapiens
  misc_RNA (1)...(19): siRNA sense strand
cgagugaugaccagcaaga

SEQ ID NO: 2242785 - RNA, 19 nt, Homo sapiens
  misc_RNA (1)...(19): siRNA sense strand
agaugaagaaugcauacaa

SEQ ID NO: 2242786 - RNA, 19 nt, Homo sapiens
  misc_RNA (1)...(19): siRNA sense strand
ccacugaccaugcugggaa

SEQ ID NO: 2242787 - RNA, 19 nt, Homo sapiens
  misc_RNA (1)...(19): siRNA sense strand
ggaaugugugagcaaguau

SEQ ID NO: 2242788 - RNA, 19 nt, Homo sapiens
  misc_RNA (1)...(19): siRNA sense strand
aauugaagcuccagguuac

SEQ ID NO: 2242789 - RNA, 19 nt, Homo sapiens
  misc_RNA (1)...(19): siRNA sense strand
acauauggccauuuauaca

SEQ ID NO: 2242790 - RNA, 19 nt, Homo sapiens
  misc_RNA (1)...(19): siRNA sense strand
aaguaguggagaaggaagu

SEQ ID NO: 2242791 - RNA, 19 nt, Homo sapiens
  misc_RNA (1)...(19): siRNA sense strand
cggagcagcugaagcccuu

SEQ ID NO: 2242792 - RNA, 19 nt, Homo sapiens
  misc_RNA (1)...(19): siRNA sense strand
ggaagaacuccgugcgcca

SEQ ID NO: 2242793 - RNA, 19 nt, Homo sapiens
  misc_RNA (1)...(19): siRNA sense strand
ccagcaugugugaccgaaa

SEQ ID NO: 2242794 - RNA, 19 nt, Homo sapiens
  misc_RNA (1)...(19): siRNA sense strand
cguccaaggccaagaagac

SEQ ID NO: 2242795 - RNA, 19 nt, Homo sapiens
  misc_RNA (1)...(19): siRNA sense strand
ccucuuauaucaagcagca

SEQ ID NO: 2242796 - RNA, 19 nt, Homo sapiens
  misc_RNA (1)...(19): siRNA sense strand
gauauuaagcccugcguca

SEQ ID NO: 2242797 - RNA, 19 nt, Homo sapiens
  misc_RNA (1)...(19): siRNA sense strand
ggaagaacucggugcgcca

SEQ ID NO: 2242798 - RNA, 19 nt, Homo sapiens
  misc_RNA (1)...(19): siRNA sense strand
ccucaacuucaaugggauu

SEQ ID NO: 2242799 - RNA, 19 nt, Homo sapiens
  misc_RNA (1)...(19): siRNA sense strand
cuccagugugugacagaaa

SEQ ID NO: 2242800 - RNA, 19 nt, Homo sapiens
  misc_RNA (1)...(19): siRNA sense strand
aggacaaggaggagaagga

SEQ ID NO: 2242801 - RNA, 19 nt, Homo sapiens
  misc_RNA (1)...(19): siRNA sense strand
cggugaaggacaaggagga

SEQ ID NO: 2242802 - RNA, 19 nt, Homo sapiens
  misc_RNA (1)...(19): siRNA sense strand
cgggaauaguagcugucaa

SEQ ID NO: 2242803 - RNA, 19 nt, Homo sapiens
  misc_RNA (1)...(19): siRNA sense strand
aggacgcggugaaggacaa

SEQ ID NO: 2242804 - RNA, 19 nt, Homo sapiens
  misc_RNA (1)...(19): siRNA sense strand
gcuucagcguggacaacau

SEQ ID NO: 2242805 - RNA, 19 nt, Homo sapiens
  misc_RNA (1)...(19): siRNA sense strand
ccuucuaccgggacaacaa

SEQ ID NO: 2242806 - RNA, 19 nt, Homo sapiens
  misc_RNA (1)...(19): siRNA sense strand
gacaaggaggagaaggaca

SEQ ID NO: 2242807 - RNA, 19 nt, Homo sapiens
  misc_RNA (1)...(19): siRNA sense strand
agaggaucggcuugaacaa

SEQ ID NO: 2242808 - RNA, 19 nt, Homo sapiens
  misc_RNA (1)...(19): siRNA sense strand
aggauaagggcgacagcaa

SEQ ID NO: 2242809 - RNA, 19 nt, Homo sapiens
  misc_RNA (1)...(19): siRNA sense strand
agaccauccaagagaacaa

SEQ ID NO: 2242810 - RNA, 19 nt, Homo sapiens
  misc_RNA (1)...(19): siRNA sense strand
aggaggaggacgaugaaga

SEQ ID NO: 2242811 - RNA, 19 nt, Homo sapiens
  misc_RNA (1)...(19): siRNA sense strand
cugaaaaccucauggacga

SEQ ID NO: 2242812 - RNA, 19 nt, Homo sapiens
  misc_RNA (1)...(19): siRNA sense strand
ggaacgugaugcuucgcaa

SEQ ID NO: 2242813 - RNA, 19 nt, Homo sapiens
  misc_RNA (1)...(19): siRNA sense strand
gaaguuuggucaaucagaa

SEQ ID NO: 2242814 - RNA, 19 nt, Homo sapiens
  misc_RNA (1)...(19): siRNA sense strand
acuucaaggauaagggcga

SEQ ID NO: 2242815 - RNA, 19 nt, Homo sapiens
  misc_RNA (1)...(19): siRNA sense strand
ugucgaauucugucagcaa

SEQ ID NO: 2242816 - RNA, 19 nt, Homo sapiens
  misc_RNA (1)...(19): siRNA sense strand
gcgacuuggaccuggacau

SEQ ID NO: 2242817 - RNA, 19 nt, Homo sapiens
  misc_RNA (1)...(19): siRNA sense strand
agggaaguuuggucaauca

SEQ ID NO: 2242818 - RNA, 19 nt, Homo sapiens
  misc_RNA (1)...(19): siRNA sense strand
cagccaaacaccagcagca

SEQ ID NO: 2242819 - RNA, 19 nt, Homo sapiens
  misc_RNA (1)...(19): siRNA sense strand
aggauaagggcgacagcaa

SEQ ID NO: 2242820 - RNA, 19 nt, Homo sapiens
  misc_RNA (1)...(19): siRNA sense strand
agaccauccaagagaacaa

SEQ ID NO: 2242821 - RNA, 19 nt, Homo sapiens
  misc_RNA (1)...(19): siRNA sense strand
aggaggaggacgaugaaga

SEQ ID NO: 2242822 - RNA, 19 nt, Homo sapiens
  misc_RNA (1)...(19): siRNA sense strand
cugaaaaccucauggacga

SEQ ID NO: 2242823 - RNA, 19 nt, Homo sapiens
  misc_RNA (1)...(19): siRNA sense strand
ggaacgugaugcuucgcaa

SEQ ID NO: 2242824 - RNA, 19 nt, Homo sapiens
  misc_RNA (1)...(19): siRNA sense strand
gaaguuuggucaaucagaa

SEQ ID NO: 2242825 - RNA, 19 nt, Homo sapiens
  misc_RNA (1)...(19): siRNA sense strand
acuucaaggauaagggcga

SEQ ID NO: 2242826 - RNA, 19 nt, Homo sapiens
  misc_RNA (1)...(19): siRNA sense strand
ugucgaauucugucagcaa

SEQ ID NO: 2242827 - RNA, 19 nt, Homo sapiens
  misc_RNA (1)...(19): siRNA sense strand
gcgacuuggaccuggacau

SEQ ID NO: 2242828 - RNA, 19 nt, Homo sapiens
  misc_RNA (1)...(19): siRNA sense strand
agggaaguuuggucaauca

SEQ ID NO: 2242829 - RNA, 19 nt, Homo sapiens
  misc_RNA (1)...(19): siRNA sense strand
cagccaaacaccagcagca

SEQ ID NO: 2242830 - RNA, 19 nt, Homo sapiens
  misc_RNA (1)...(19): siRNA sense strand
ggacaauggugauggcuca

SEQ ID NO: 2242831 - RNA, 19 nt, Homo sapiens
  misc_RNA (1)...(19): siRNA sense strand
gcaucgagccacagggcaa

SEQ ID NO: 2242832 - RNA, 19 nt, Homo sapiens
  misc_RNA (1)...(19): siRNA sense strand
ggaucaaguaugacggcaa

SEQ ID NO: 2242833 - RNA, 19 nt, Homo sapiens
  misc_RNA (1)...(19): siRNA sense strand
gggcagagcucgaugugga

SEQ ID NO: 2242834 - RNA, 19 nt, Homo sapiens
  misc_RNA (1)...(19): siRNA sense strand
gcaagguggcugugggaca

SEQ ID NO: 2242835 - RNA, 19 nt, Homo sapiens
  misc_RNA (1)...(19): siRNA sense strand
gcgcaagaguggcaagcau

SEQ ID NO: 2242836 - RNA, 19 nt, Homo sapiens
  misc_RNA (1)...(19): siRNA sense strand
uggcagugacagugacuua

SEQ ID NO: 2242837 - RNA, 19 nt, Homo sapiens
  misc_RNA (1)...(19): siRNA sense strand
gcgugaaagagguggcuga

SEQ ID NO: 2242838 - RNA, 19 nt, Homo sapiens
  misc_RNA (1)...(19): siRNA sense strand
gggcuguggaggagugcua

SEQ ID NO: 2242839 - RNA, 19 nt, Homo sapiens
  misc_RNA (1)...(19): siRNA sense strand
gggccaagacagacaccua

SEQ ID NO: 2242840 - RNA, 19 nt, Homo sapiens
  misc_RNA (1)...(19): siRNA sense strand
cagagaucgucgagggcga

SEQ ID NO: 2242841 - RNA, 19 nt, Homo sapiens
  misc_RNA (1)...(19): siRNA sense strand
gccuggaaccugugggcaa

SEQ ID NO: 2242842 - RNA, 19 nt, Homo sapiens
  misc_RNA (1)...(19): siRNA sense strand
cugcagaggcugacauuga

SEQ ID NO: 2242843 - RNA, 19 nt, Homo sapiens
  misc_RNA (1)...(19): siRNA sense strand
aggccaagaucgagugcca

SEQ ID NO: 2242844 - RNA, 19 nt, Homo sapiens
  misc_RNA (1)...(19): siRNA sense strand
guaugcacccacugagaaa

SEQ ID NO: 2242845 - RNA, 19 nt, Homo sapiens
  misc_RNA (1)...(19): siRNA sense strand
ggacauggaggacgggaca

SEQ ID NO: 2242846 - RNA, 19 nt, Homo sapiens
  misc_RNA (1)...(19): siRNA sense strand
gccaaaugaagcuggagaa

SEQ ID NO: 2242847 - RNA, 19 nt, Homo sapiens
  misc_RNA (1)...(19): siRNA sense strand
ccaagaaagccaucgccua

SEQ ID NO: 2242848 - RNA, 19 nt, Homo sapiens
  misc_RNA (1)...(19): siRNA sense strand
aggcuaaggugguucccaa

SEQ ID NO: 2242849 - RNA, 19 nt, Homo sapiens
  misc_RNA (1)...(19): siRNA sense strand
acaucaaguuugcugacaa

SEQ ID NO: 2242850 - RNA, 19 nt, Homo sapiens
  misc_RNA (1)...(19): siRNA sense strand
ccagcaaagucaaggccga

SEQ ID NO: 2242851 - RNA, 19 nt, Homo sapiens
  misc_RNA (1)...(19): siRNA sense strand
ccaucgaugucaaguucaa

SEQ ID NO: 2242852 - RNA, 19 nt, Homo sapiens
  misc_RNA (1)...(19): siRNA sense strand
gggcaauguggccaacaaa

SEQ ID NO: 2242853 - RNA, 19 nt, Homo sapiens
  misc_RNA (1)...(19): siRNA sense strand
gggaggaugaagaugauga

SEQ ID NO: 2242854 - RNA, 19 nt, Homo sapiens
  misc_RNA (1)...(19): siRNA sense strand
agacuggccaggugggcaa

SEQ ID NO: 2242855 - RNA, 19 nt, Homo sapiens
  misc_RNA (1)...(19): siRNA sense strand
acuuugagaucauagacaa

SEQ ID NO: 2242856 - RNA, 19 nt, Homo sapiens
  misc_RNA (1)...(19): siRNA sense strand
agaucgagugccaggacaa

SEQ ID NO: 2242857 - RNA, 19 nt, Homo sapiens
  misc_RNA (1)...(19): siRNA sense strand
ggacaugaguggccgguac

SEQ ID NO: 2242858 - RNA, 19 nt, Homo sapiens
  misc_RNA (1)...(19): siRNA sense strand
gagaucaccuguaaggaca

SEQ ID NO: 2242859 - RNA, 19 nt, Homo sapiens
  misc_RNA (1)...(19): siRNA sense strand
acaucaagcucguguccau

SEQ ID NO: 2242860 - RNA, 19 nt, Homo sapiens
  misc_RNA (1)...(19): siRNA sense strand
ccaacaucaccgacaacaa

SEQ ID NO: 2242861 - RNA, 19 nt, Homo sapiens
  misc_RNA (1)...(19): siRNA sense strand
ccucaagaucccaggaaac

SEQ ID NO: 2242862 - RNA, 19 nt, Homo sapiens
  misc_RNA (1)...(19): siRNA sense strand
ccuacacugucaaggagaa

SEQ ID NO: 2242863 - RNA, 19 nt, Homo sapiens
  misc_RNA (1)...(19): siRNA sense strand
gugacuggcaggacggcaa

SEQ ID NO: 2242864 - RNA, 19 nt, Homo sapiens
  misc_RNA (1)...(19): siRNA sense strand
acacauuccagguggcaga

SEQ ID NO: 2242865 - RNA, 19 nt, Homo sapiens
  misc_RNA (1)...(19): siRNA sense strand
acuucaagguguuuaccaa

SEQ ID NO: 2242866 - RNA, 19 nt, Homo sapiens
  misc_RNA (1)...(19): siRNA sense strand
ccggcugcaucguggacaa

SEQ ID NO: 2242867 - RNA, 19 nt, Homo sapiens
  misc_RNA (1)...(19): siRNA sense strand
gcaacauggcagugacagu

SEQ ID NO: 2242868 - RNA, 19 nt, Homo sapiens
  misc_RNA (1)...(19): siRNA sense strand
ucacaagccaagaucgaau

SEQ ID NO: 2242869 - RNA, 19 nt, Homo sapiens
  misc_RNA (1)...(19): siRNA sense strand
cagugaaggauguggugga

SEQ ID NO: 2242870 - RNA, 19 nt, Homo sapiens
  misc_RNA (1)...(19): siRNA sense strand
ccaugugggaggaugaaga

SEQ ID NO: 2242871 - RNA, 19 nt, Homo sapiens
  misc_RNA (1)...(19): siRNA sense strand
cccagaggcaggagugcaa

SEQ ID NO: 2242872 - RNA, 19 nt, Homo sapiens
  misc_RNA (1)...(19): siRNA sense strand
ggcaaggcgacgugagcau

SEQ ID NO: 2242873 - RNA, 19 nt, Homo sapiens
  misc_RNA (1)...(19): siRNA sense strand
agaaggaccuggcggagga

SEQ ID NO: 2242874 - RNA, 19 nt, Homo sapiens
  misc_RNA (1)...(19): siRNA sense strand
ggugaagugcucagggcca

SEQ ID NO: 2242875 - RNA, 19 nt, Homo sapiens
  misc_RNA (1)...(19): siRNA sense strand
agguguacgugaagcacau

SEQ ID NO: 2242876 - RNA, 19 nt, Homo sapiens
  misc_RNA (1)...(19): siRNA sense strand
agguggcccuggaggacaa

SEQ ID NO: 2242877 - RNA, 19 nt, Homo sapiens
  misc_RNA (1)...(19): siRNA sense strand
ccucacaagccaagaucga

SEQ ID NO: 2242878 - RNA, 19 nt, Homo sapiens
  misc_RNA (1)...(19): siRNA sense strand
gggcaacauggcagugaca

SEQ ID NO: 2242879 - RNA, 19 nt, Homo sapiens
  misc_RNA (1)...(19): siRNA sense strand
aaaucaaaguucagggccu

SEQ ID NO: 2242880 - RNA, 19 nt, Homo sapiens
  misc_RNA (1)...(19): siRNA sense strand
ggugaugacuccaugagga

SEQ ID NO: 2242881 - RNA, 19 nt, Homo sapiens
  misc_RNA (1)...(19): siRNA sense strand
ccauagacagcaaggccau

SEQ ID NO: 2242882 - RNA, 19 nt, Homo sapiens
  misc_RNA (1)...(19): siRNA sense strand
ugggcgaggugcuggucua

SEQ ID NO: 2242883 - RNA, 19 nt, Homo sapiens
  misc_RNA (1)...(19): siRNA sense strand
ccgagcggguaaaggugua

SEQ ID NO: 2242884 - RNA, 19 nt, Homo sapiens
  misc_RNA (1)...(19): siRNA sense strand
gagaaaggccugcaccaga

SEQ ID NO: 2242885 - RNA, 19 nt, Homo sapiens
  misc_RNA (1)...(19): siRNA sense strand
cagcaaggccaucguggau

SEQ ID NO: 2242886 - RNA, 19 nt, Homo sapiens
  misc_RNA (1)...(19): siRNA sense strand
cagccaagggcgagguugu

SEQ ID NO: 2242887 - RNA, 19 nt, Homo sapiens
  misc_RNA (1)...(19): siRNA sense strand
ggcccuacaagguggauau

SEQ ID NO: 2242888 - RNA, 19 nt, Homo sapiens
  misc_RNA (1)...(19): siRNA sense strand
cgucaaggucucagggccu

SEQ ID NO: 2242889 - RNA, 19 nt, Homo sapiens
  misc_RNA (1)...(19): siRNA sense strand
ucacaggagaggugcggau

SEQ ID NO: 2242890 - RNA, 19 nt, Homo sapiens
  misc_RNA (1)...(19): siRNA sense strand
aagaagauccagcagaaca

SEQ ID NO: 2242891 - RNA, 19 nt, Homo sapiens
  misc_RNA (1)...(19): siRNA sense strand
ccuggagacuacagcauca

SEQ ID NO: 2242892 - RNA, 19 nt, Homo sapiens
  misc_RNA (1)...(19): siRNA sense strand
ugaccaagggagccggcaa

SEQ ID NO: 2242893 - RNA, 19 nt, Homo sapiens
  misc_RNA (1)...(19): siRNA sense strand
acaucaacugugaggacau

SEQ ID NO: 2242894 - RNA, 19 nt, Homo sapiens
  misc_RNA (1)...(19): siRNA sense strand
ggguaaagguguacggccc

SEQ ID NO: 2242895 - RNA, 19 nt, Homo sapiens
  misc_RNA (1)...(19): siRNA sense strand
aggccaagcuggaugugca

SEQ ID NO: 2242896 - RNA, 19 nt, Homo sapiens
  misc_RNA (1)...(19): siRNA sense strand
ccgaggugcugauccacaa

SEQ ID NO: 2242897 - RNA, 19 nt, Homo sapiens
  misc_RNA (1)...(19): siRNA sense strand
gcuacaaguuucugggcga

SEQ ID NO: 2242898 - RNA, 19 nt, Homo sapiens
  misc_RNA (1)...(19): siRNA sense strand
ccgaaaagcuggagcggcu

SEQ ID NO: 2242899 - RNA, 19 nt, Homo sapiens
  misc_RNA (1)...(19): siRNA sense strand
ugguagacaugcagcgcuu

SEQ ID NO: 2242900 - RNA, 19 nt, Homo sapiens
  misc_RNA (1)...(19): siRNA sense strand
gcaccaagaaggagggcug

SEQ ID NO: 2242901 - RNA, 19 nt, Homo sapiens
  misc_RNA (1)...(19): siRNA sense strand
ccauggugucgguggccua

SEQ ID NO: 2242902 - RNA, 19 nt, Homo sapiens
  misc_RNA (1)...(19): siRNA sense strand
acgcaggccuagaggugca

SEQ ID NO: 2242903 - RNA, 19 nt, Homo sapiens
  misc_RNA (1)...(19): siRNA sense strand
gcaccaucaugaagcacga

SEQ ID NO: 2242904 - RNA, 19 nt, Homo sapiens
  misc_RNA (1)...(19): siRNA sense strand
cugcacucguggaggaagu

SEQ ID NO: 2242905 - RNA, 19 nt, Homo sapiens
  misc_RNA (1)...(19): siRNA sense strand
ucaaauaccucaugacgcu

SEQ ID NO: 2242906 - RNA, 19 nt, Homo sapiens
  misc_RNA (1)...(19): siRNA sense strand
agaucgaccuaucggccua

SEQ ID NO: 2242907 - RNA, 19 nt, Homo sapiens
  misc_RNA (1)...(19): siRNA sense strand
cugaaaugauugggccuau

SEQ ID NO: 2242908 - RNA, 19 nt, Homo sapiens
  misc_RNA (1)...(19): siRNA sense strand
cgccaaauccagaggaggu

SEQ ID NO: 2242909 - RNA, 19 nt, Homo sapiens
  misc_RNA (1)...(19): siRNA sense strand
aggagauggacccgccaaa

SEQ ID NO: 2242910 - RNA, 19 nt, Homo sapiens
  misc_RNA (1)...(19): siRNA sense strand
gugaauagccgcagggaca

SEQ ID NO: 2242911 - RNA, 19 nt, Homo sapiens
  misc_RNA (1)...(19): siRNA sense strand
acaacaacgaggaggagaa

SEQ ID NO: 2242912 - RNA, 19 nt, Homo sapiens
  misc_RNA (1)...(19): siRNA sense strand
gaccaaaucuaccgggcaa

SEQ ID NO: 2242913 - RNA, 19 nt, Homo sapiens
  misc_RNA (1)...(19): siRNA sense strand
aggaggaaccuaaggaaga

SEQ ID NO: 2242914 - RNA, 19 nt, Homo sapiens
  misc_RNA (1)...(19): siRNA sense strand
aggaauuuguggagaaacu

SEQ ID NO: 2242915 - RNA, 19 nt, Homo sapiens
  misc_RNA (1)...(19): siRNA sense strand
gaacaagacaucuggagga

SEQ ID NO: 2242916 - RNA, 19 nt, Homo sapiens
  misc_RNA (1)...(19): siRNA sense strand
gcaccggaccauugagaca

SEQ ID NO: 2242917 - RNA, 19 nt, Homo sapiens
  misc_RNA (1)...(19): siRNA sense strand
gcuacaagaagauuggcua

SEQ ID NO: 2242918 - RNA, 19 nt, Homo sapiens
  misc_RNA (1)...(19): siRNA sense strand
ccaacaacaacgaggagga

SEQ ID NO: 2242919 - RNA, 19 nt, Homo sapiens
  misc_RNA (1)...(19): siRNA sense strand
gaaaagaaggaguggagga

SEQ ID NO: 2242920 - RNA, 19 nt, Homo sapiens
  misc_RNA (1)...(19): siRNA sense strand
agaucauugcugagaaaga

SEQ ID NO: 2242921 - RNA, 19 nt, Homo sapiens
  misc_RNA (1)...(19): siRNA sense strand
gaagaugaauacauggcuu

SEQ ID NO: 2242922 - RNA, 19 nt, Homo sapiens
  misc_RNA (1)...(19): siRNA sense strand
cugagaaagaggagcgugu

SEQ ID NO: 2242923 - RNA, 19 nt, Homo sapiens
  misc_RNA (1)...(19): siRNA sense strand
caagugugauccaggccaa

SEQ ID NO: 2242924 - RNA, 19 nt, Homo sapiens
  misc_RNA (1)...(19): siRNA sense strand
ugaugggagucgagugcau

SEQ ID NO: 2242925 - RNA, 19 nt, Homo sapiens
  misc_RNA (1)...(19): siRNA sense strand
uggcacuggcccugaacaa

SEQ ID NO: 2242926 - RNA, 19 nt, Homo sapiens
  misc_RNA (1)...(19): siRNA sense strand
agacauuugccaaggagga

SEQ ID NO: 2242927 - RNA, 19 nt, Homo sapiens
  misc_RNA (1)...(19): siRNA sense strand
agugaaggaggcuggaauu

SEQ ID NO: 2242928 - RNA, 19 nt, Homo sapiens
  misc_RNA (1)...(19): siRNA sense strand
gcugaucacccgaggggaa

SEQ ID NO: 2242929 - RNA, 19 nt, Homo sapiens
  misc_RNA (1)...(19): siRNA sense strand
cuuaugagaccaagagugu

SEQ ID NO: 2242930 - RNA, 19 nt, Homo sapiens
  misc_RNA (1)...(19): siRNA sense strand
gcuaggauguggaaccuca

SEQ ID NO: 2242931 - RNA, 19 nt, Homo sapiens
  misc_RNA (1)...(19): siRNA sense strand
ggaggcuggaauugagauu

SEQ ID NO: 2242932 - RNA, 19 nt, Homo sapiens
  misc_RNA (1)...(19): siRNA sense strand
ccauugagacauuugccaa

SEQ ID NO: 2242933 - RNA, 19 nt, Homo sapiens
  misc_RNA (1)...(19): siRNA sense strand
ggcuguuggagaaggagaa

SEQ ID NO: 2242934 - RNA, 19 nt, Homo sapiens
  misc_RNA (1)...(19): siRNA sense strand
uugccaaggaggaaccuaa

SEQ ID NO: 2242935 - RNA, 19 nt, Homo sapiens
  misc_RNA (1)...(19): siRNA sense strand
gaggagaagucccggcugu

SEQ ID NO: 2242936 - RNA, 19 nt, Homo sapiens
  misc_RNA (1)...(19): siRNA sense strand
uggaggaacgagugaagga

SEQ ID NO: 2242937 - RNA, 19 nt, Homo sapiens
  misc_RNA (1)...(19): siRNA sense strand
agucccggcuguuggagaa

SEQ ID NO: 2242938 - RNA, 19 nt, Homo sapiens
  misc_RNA (1)...(19): siRNA sense strand
uggagaaggagaaccguga

SEQ ID NO: 2242939 - RNA, 19 nt, Homo sapiens
  misc_RNA (1)...(19): siRNA sense strand
acaugacaucccaggaauu

SEQ ID NO: 2242940 - RNA, 19 nt, Homo sapiens
  misc_RNA (1)...(19): siRNA sense strand
gggcugugggcauggcuau

SEQ ID NO: 2242941 - RNA, 19 nt, Homo sapiens
  misc_RNA (1)...(19): siRNA sense strand
cccaagaugcgcaggcuga

SEQ ID NO: 2242942 - RNA, 19 nt, Homo sapiens
  misc_RNA (1)...(19): siRNA sense strand
gagaaagaggagcgugucu

SEQ ID NO: 2242943 - RNA, 19 nt, Homo sapiens
  misc_RNA (1)...(19): siRNA sense strand
gugaauagccgcagggaca

SEQ ID NO: 2242944 - RNA, 19 nt, Homo sapiens
  misc_RNA (1)...(19): siRNA sense strand
acaacaacgaggaggagaa

SEQ ID NO: 2242945 - RNA, 19 nt, Homo sapiens
  misc_RNA (1)...(19): siRNA sense strand
gaccaaaucuaccgggcaa

SEQ ID NO: 2242946 - RNA, 19 nt, Homo sapiens
  misc_RNA (1)...(19): siRNA sense strand
aggaggaaccuaaggaaga

SEQ ID NO: 2242947 - RNA, 19 nt, Homo sapiens
  misc_RNA (1)...(19): siRNA sense strand
aggaauuuguggagaaacu

SEQ ID NO: 2242948 - RNA, 19 nt, Homo sapiens
  misc_RNA (1)...(19): siRNA sense strand
gaacaagacaucuggagga

SEQ ID NO: 2242949 - RNA, 19 nt, Homo sapiens
  misc_RNA (1)...(19): siRNA sense strand
gcaccggaccauugagaca

SEQ ID NO: 2242950 - RNA, 19 nt, Homo sapiens
  misc_RNA (1)...(19): siRNA sense strand
gcuacaagaagauuggcua

SEQ ID NO: 2242951 - RNA, 19 nt, Homo sapiens
  misc_RNA (1)...(19): siRNA sense strand
ccaacaacaacgaggagga

SEQ ID NO: 2242952 - RNA, 19 nt, Homo sapiens
  misc_RNA (1)...(19): siRNA sense strand
gaaaagaaggaguggagga

SEQ ID NO: 2242953 - RNA, 19 nt, Homo sapiens
  misc_RNA (1)...(19): siRNA sense strand
agaucauugcugagaaaga

SEQ ID NO: 2242954 - RNA, 19 nt, Homo sapiens
  misc_RNA (1)...(19): siRNA sense strand
gaagaugaauacauggcuu

SEQ ID NO: 2242955 - RNA, 19 nt, Homo sapiens
  misc_RNA (1)...(19): siRNA sense strand
cugagaaagaggagcgugu

SEQ ID NO: 2242956 - RNA, 19 nt, Homo sapiens
  misc_RNA (1)...(19): siRNA sense strand
caagugugauccaggccaa

SEQ ID NO: 2242957 - RNA, 19 nt, Homo sapiens
  misc_RNA (1)...(19): siRNA sense strand
ugaugggagucgagugcau

SEQ ID NO: 2242958 - RNA, 19 nt, Homo sapiens
  misc_RNA (1)...(19): siRNA sense strand
uggcacuggcccugaacaa

SEQ ID NO: 2242959 - RNA, 19 nt, Homo sapiens
  misc_RNA (1)...(19): siRNA sense strand
agacauuugccaaggagga

SEQ ID NO: 2242960 - RNA, 19 nt, Homo sapiens
  misc_RNA (1)...(19): siRNA sense strand
agugaaggaggcuggaauu

SEQ ID NO: 2242961 - RNA, 19 nt, Homo sapiens
  misc_RNA (1)...(19): siRNA sense strand
gcugaucacccgaggggaa

SEQ ID NO: 2242962 - RNA, 19 nt, Homo sapiens
  misc_RNA (1)...(19): siRNA sense strand
cuuaugagaccaagagugu

SEQ ID NO: 2242963 - RNA, 19 nt, Homo sapiens
  misc_RNA (1)...(19): siRNA sense strand
gcuaggauguggaaccuca

SEQ ID NO: 2242964 - RNA, 19 nt, Homo sapiens
  misc_RNA (1)...(19): siRNA sense strand
ggaggcuggaauugagauu

SEQ ID NO: 2242965 - RNA, 19 nt, Homo sapiens
  misc_RNA (1)...(19): siRNA sense strand
ccauugagacauuugccaa

SEQ ID NO: 2242966 - RNA, 19 nt, Homo sapiens
  misc_RNA (1)...(19): siRNA sense strand
ggcuguuggagaaggagaa

SEQ ID NO: 2242967 - RNA, 19 nt, Homo sapiens
  misc_RNA (1)...(19): siRNA sense strand
uugccaaggaggaaccuaa

SEQ ID NO: 2242968 - RNA, 19 nt, Homo sapiens
  misc_RNA (1)...(19): siRNA sense strand
gaggagaagucccggcugu

SEQ ID NO: 2242969 - RNA, 19 nt, Homo sapiens
  misc_RNA (1)...(19): siRNA sense strand
uggaggaacgagugaagga

SEQ ID NO: 2242970 - RNA, 19 nt, Homo sapiens
  misc_RNA (1)...(19): siRNA sense strand
agucccggcuguuggagaa

SEQ ID NO: 2242971 - RNA, 19 nt, Homo sapiens
  misc_RNA (1)...(19): siRNA sense strand
uggagaaggagaaccguga

SEQ ID NO: 2242972 - RNA, 19 nt, Homo sapiens
  misc_RNA (1)...(19): siRNA sense strand
acaugacaucccaggaauu

SEQ ID NO: 2242973 - RNA, 19 nt, Homo sapiens
  misc_RNA (1)...(19): siRNA sense strand
gggcugugggcauggcuau

SEQ ID NO: 2242974 - RNA, 19 nt, Homo sapiens
  misc_RNA (1)...(19): siRNA sense strand
cccaagaugcgcaggcuga

SEQ ID NO: 2242975 - RNA, 19 nt, Homo sapiens
  misc_RNA (1)...(19): siRNA sense strand
gagaaagaggagcgugucu

SEQ ID NO: 2242976 - RNA, 19 nt, Homo sapiens
  misc_RNA (1)...(19): siRNA sense strand
gugaauagccgcagggaca

SEQ ID NO: 2242977 - RNA, 19 nt, Homo sapiens
  misc_RNA (1)...(19): siRNA sense strand
acaacaacgaggaggagaa

SEQ ID NO: 2242978 - RNA, 19 nt, Homo sapiens
  misc_RNA (1)...(19): siRNA sense strand
gaccaaaucuaccgggcaa

SEQ ID NO: 2242979 - RNA, 19 nt, Homo sapiens
  misc_RNA (1)...(19): siRNA sense strand
aggaggaaccuaaggaaga

SEQ ID NO: 2242980 - RNA, 19 nt, Homo sapiens
  misc_RNA (1)...(19): siRNA sense strand
aggaauuuguggagaaacu

SEQ ID NO: 2242981 - RNA, 19 nt, Homo sapiens
  misc_RNA (1)...(19): siRNA sense strand
gaacaagacaucuggagga

SEQ ID NO: 2242982 - RNA, 19 nt, Homo sapiens
  misc_RNA (1)...(19): siRNA sense strand
gcaccggaccauugagaca

SEQ ID NO: 2242983 - RNA, 19 nt, Homo sapiens
  misc_RNA (1)...(19): siRNA sense strand
gcuacaagaagauuggcua

SEQ ID NO: 2242984 - RNA, 19 nt, Homo sapiens
  misc_RNA (1)...(19): siRNA sense strand
ccaacaacaacgaggagga

SEQ ID NO: 2242985 - RNA, 19 nt, Homo sapiens
  misc_RNA (1)...(19): siRNA sense strand
gaaaagaaggaguggagga

SEQ ID NO: 2242986 - RNA, 19 nt, Homo sapiens
  misc_RNA (1)...(19): siRNA sense strand
agaucauugcugagaaaga

SEQ ID NO: 2242987 - RNA, 19 nt, Homo sapiens
  misc_RNA (1)...(19): siRNA sense strand
gaagaugaauacauggcuu

SEQ ID NO: 2242988 - RNA, 19 nt, Homo sapiens
  misc_RNA (1)...(19): siRNA sense strand
cugagaaagaggagcgugu

SEQ ID NO: 2242989 - RNA, 19 nt, Homo sapiens
  misc_RNA (1)...(19): siRNA sense strand
caagugugauccaggccaa

SEQ ID NO: 2242990 - RNA, 19 nt, Homo sapiens
  misc_RNA (1)...(19): siRNA sense strand
ugaugggagucgagugcau

SEQ ID NO: 2242991 - RNA, 19 nt, Homo sapiens
  misc_RNA (1)...(19): siRNA sense strand
uggcacuggcccugaacaa

SEQ ID NO: 2242992 - RNA, 19 nt, Homo sapiens
  misc_RNA (1)...(19): siRNA sense strand
agacauuugccaaggagga

SEQ ID NO: 2242993 - RNA, 19 nt, Homo sapiens
  misc_RNA (1)...(19): siRNA sense strand
agugaaggaggcuggaauu

SEQ ID NO: 2242994 - RNA, 19 nt, Homo sapiens
  misc_RNA (1)...(19): siRNA sense strand
gcugaucacccgaggggaa

SEQ ID NO: 2242995 - RNA, 19 nt, Homo sapiens
  misc_RNA (1)...(19): siRNA sense strand
cuuaugagaccaagagugu

SEQ ID NO: 2242996 - RNA, 19 nt, Homo sapiens
  misc_RNA (1)...(19): siRNA sense strand
gcuaggauguggaaccuca

SEQ ID NO: 2242997 - RNA, 19 nt, Homo sapiens
  misc_RNA (1)...(19): siRNA sense strand
ggaggcuggaauugagauu

SEQ ID NO: 2242998 - RNA, 19 nt, Homo sapiens
  misc_RNA (1)...(19): siRNA sense strand
ccauugagacauuugccaa

SEQ ID NO: 2242999 - RNA, 19 nt, Homo sapiens
  misc_RNA (1)...(19): siRNA sense strand
ggcuguuggagaaggagaa

SEQ ID NO: 2243000 - RNA, 19 nt, Homo sapiens
  misc_RNA (1)...(19): siRNA sense strand
uugccaaggaggaaccuaa

SEQ ID NO: 2243001 - RNA, 19 nt, Homo sapiens
  misc_RNA (1)...(19): siRNA sense strand
gaggagaagucccggcugu

SEQ ID NO: 2243002 - RNA, 19 nt, Homo sapiens
  misc_RNA (1)...(19): siRNA sense strand
uggaggaacgagugaagga

SEQ ID NO: 2243003 - RNA, 19 nt, Homo sapiens
  misc_RNA (1)...(19): siRNA sense strand
agucccggcuguuggagaa

SEQ ID NO: 2243004 - RNA, 19 nt, Homo sapiens
  misc_RNA (1)...(19): siRNA sense strand
uggagaaggagaaccguga

SEQ ID NO: 2243005 - RNA, 19 nt, Homo sapiens
  misc_RNA (1)...(19): siRNA sense strand
acaugacaucccaggaauu

SEQ ID NO: 2243006 - RNA, 19 nt, Homo sapiens
  misc_RNA (1)...(19): siRNA sense strand
gggcugugggcauggcuau

SEQ ID NO: 2243007 - RNA, 19 nt, Homo sapiens
  misc_RNA (1)...(19): siRNA sense strand
cccaagaugcgcaggcuga

SEQ ID NO: 2243008 - RNA, 19 nt, Homo sapiens
  misc_RNA (1)...(19): siRNA sense strand
gagaaagaggagcgugucu

SEQ ID NO: 2243009 - RNA, 19 nt, Homo sapiens
  misc_RNA (1)...(19): siRNA sense strand
gugaauagccgcagggaca

SEQ ID NO: 2243010 - RNA, 19 nt, Homo sapiens
  misc_RNA (1)...(19): siRNA sense strand
gaccaaaucuaccgggcaa

SEQ ID NO: 2243011 - RNA, 19 nt, Homo sapiens
  misc_RNA (1)...(19): siRNA sense strand
aggaauuuguggagaaacu

SEQ ID NO: 2243012 - RNA, 19 nt, Homo sapiens
  misc_RNA (1)...(19): siRNA sense strand
gaacaagacaucuggagga

SEQ ID NO: 2243013 - RNA, 19 nt, Homo sapiens
  misc_RNA (1)...(19): siRNA sense strand
gcuacaagaagauuggcua

SEQ ID NO: 2243014 - RNA, 19 nt, Homo sapiens
  misc_RNA (1)...(19): siRNA sense strand
caagugugauccaggccaa

SEQ ID NO: 2243015 - RNA, 19 nt, Homo sapiens
  misc_RNA (1)...(19): siRNA sense strand
uggcacuggcccugaacaa

SEQ ID NO: 2243016 - RNA, 19 nt, Homo sapiens
  misc_RNA (1)...(19): siRNA sense strand
agugaaggaggcuggaauu

SEQ ID NO: 2243017 - RNA, 19 nt, Homo sapiens
  misc_RNA (1)...(19): siRNA sense strand
gcuaggauguggaaccuca

SEQ ID NO: 2243018 - RNA, 19 nt, Homo sapiens
  misc_RNA (1)...(19): siRNA sense strand
ggaggcuggaauugagauu

SEQ ID NO: 2243019 - RNA, 19 nt, Homo sapiens
  misc_RNA (1)...(19): siRNA sense strand
uggaggaacgagugaagga

SEQ ID NO: 2243020 - RNA, 19 nt, Homo sapiens
  misc_RNA (1)...(19): siRNA sense strand
acaugacaucccaggaauu

SEQ ID NO: 2243021 - RNA, 19 nt, Homo sapiens
  misc_RNA (1)...(19): siRNA sense strand
agaucgaccuaucggccua

SEQ ID NO: 2243022 - RNA, 19 nt, Homo sapiens
  misc_RNA (1)...(19): siRNA sense strand
ggccgaagccugaagcuca

SEQ ID NO: 2243023 - RNA, 19 nt, Homo sapiens
  misc_RNA (1)...(19): siRNA sense strand
cugaaaugauugggccuau

SEQ ID NO: 2243024 - RNA, 19 nt, Homo sapiens
  misc_RNA (1)...(19): siRNA sense strand
cgccaaauccagaggaggu

SEQ ID NO: 2243025 - RNA, 19 nt, Homo sapiens
  misc_RNA (1)...(19): siRNA sense strand
aggagauggacccgccaaa

SEQ ID NO: 2243026 - RNA, 19 nt, Homo sapiens
  misc_RNA (1)...(19): siRNA sense strand
cgccaaauccagaggaggu

SEQ ID NO: 2243027 - RNA, 19 nt, Homo sapiens
  misc_RNA (1)...(19): siRNA sense strand
aggagauggacccgccaaa

SEQ ID NO: 2243028 - RNA, 19 nt, Homo sapiens
  misc_RNA (1)...(19): siRNA sense strand
cgccaaauccagaggaggu

SEQ ID NO: 2243029 - RNA, 19 nt, Homo sapiens
  misc_RNA (1)...(19): siRNA sense strand
aggagauggacccgccaaa

SEQ ID NO: 2243030 - RNA, 19 nt, Homo sapiens
  misc_RNA (1)...(19): siRNA sense strand
cgccaaauccagaggaggu

SEQ ID NO: 2243031 - RNA, 19 nt, Homo sapiens
  misc_RNA (1)...(19): siRNA sense strand
cgccaaauccagaggaggu

SEQ ID NO: 2243032 - RNA, 19 nt, Homo sapiens
  misc_RNA (1)...(19): siRNA sense strand
aggagauggacccgccaaa

SEQ ID NO: 2243033 - RNA, 19 nt, Homo sapiens
  misc_RNA (1)...(19): siRNA sense strand
ccgacgucgugguggauca

SEQ ID NO: 2243034 - RNA, 19 nt, Homo sapiens
  misc_RNA (1)...(19): siRNA sense strand
ggaccaacucaacaggcaa

SEQ ID NO: 2243035 - RNA, 19 nt, Homo sapiens
  misc_RNA (1)...(19): siRNA sense strand
ggucaggaucaaggagcaa

SEQ ID NO: 2243036 - RNA, 19 nt, Homo sapiens
  misc_RNA (1)...(19): siRNA sense strand
gaucacuggacgagagcca

SEQ ID NO: 2243037 - RNA, 19 nt, Homo sapiens
  misc_RNA (1)...(19): siRNA sense strand
cggucaggaucaaggagca

SEQ ID NO: 2243038 - RNA, 19 nt, Homo sapiens
  misc_RNA (1)...(19): siRNA sense strand
ggacugacaaggugcgcga

SEQ ID NO: 2243039 - RNA, 19 nt, Homo sapiens
  misc_RNA (1)...(19): siRNA sense strand
augccggagcagagacuua

SEQ ID NO: 2243040 - RNA, 19 nt, Homo sapiens
  misc_RNA (1)...(19): siRNA sense strand
cuggagagggucaggcaga

SEQ ID NO: 2243041 - RNA, 19 nt, Homo sapiens
  misc_RNA (1)...(19): siRNA sense strand
ggaucaaggagcaaguagu

SEQ ID NO: 2243042 - RNA, 19 nt, Homo sapiens
  misc_RNA (1)...(19): siRNA sense strand
uggagaggcuuguggacgu

SEQ ID NO: 2243043 - RNA, 19 nt, Homo sapiens
  misc_RNA (1)...(19): siRNA sense strand
cugagugauacuaaagaaa

SEQ ID NO: 2243044 - RNA, 19 nt, Homo sapiens
  misc_RNA (1)...(19): siRNA sense strand
gcaccuucgucuucggcua

SEQ ID NO: 2243045 - RNA, 19 nt, Homo sapiens
  misc_RNA (1)...(19): siRNA sense strand
caaagaagucugaagcauc

SEQ ID NO: 2243046 - RNA, 19 nt, Homo sapiens
  misc_RNA (1)...(19): siRNA sense strand
ugguugugguguuuggaau

SEQ ID NO: 2243047 - RNA, 19 nt, Homo sapiens
  misc_RNA (1)...(19): siRNA sense strand
ccuaaagaggaucaagaaa

SEQ ID NO: 2243048 - RNA, 19 nt, Homo sapiens
  misc_RNA (1)...(19): siRNA sense strand
cuaaagaggaucaagaaaa

SEQ ID NO: 2243049 - RNA, 19 nt, Homo sapiens
  misc_RNA (1)...(19): siRNA sense strand
aaacaaagguguauccaga

SEQ ID NO: 2243050 - RNA, 19 nt, Homo sapiens
  misc_RNA (1)...(19): siRNA sense strand
gaucaaacaugacaggaga

SEQ ID NO: 2243051 - RNA, 19 nt, Homo sapiens
  misc_RNA (1)...(19): siRNA sense strand
ccacagaagaggauagcca

SEQ ID NO: 2243052 - RNA, 19 nt, Homo sapiens
  misc_RNA (1)...(19): siRNA sense strand
gcaacaaaugugaugaaaa

SEQ ID NO: 2243053 - RNA, 19 nt, Homo sapiens
  misc_RNA (1)...(19): siRNA sense strand
caagaaaagaugaaagaga

SEQ ID NO: 2243054 - RNA, 19 nt, Homo sapiens
  misc_RNA (1)...(19): siRNA sense strand
guagaugaugccagugaaa

SEQ ID NO: 2243055 - RNA, 19 nt, Homo sapiens
  misc_RNA (1)...(19): siRNA sense strand
agaugaugccagugaaaga

SEQ ID NO: 2243056 - RNA, 19 nt, Homo sapiens
  misc_RNA (1)...(19): siRNA sense strand
ggaaauuguuacaugcuca

SEQ ID NO: 2243057 - RNA, 19 nt, Homo sapiens
  misc_RNA (1)...(19): siRNA sense strand
aggagaaaaccuagaaauu

SEQ ID NO: 2243058 - RNA, 19 nt, Homo sapiens
  misc_RNA (1)...(19): siRNA sense strand
caugaagguccuggagaaa

SEQ ID NO: 2243059 - RNA, 19 nt, Homo sapiens
  misc_RNA (1)...(19): siRNA sense strand
guggaggaacuuuggaaau

SEQ ID NO: 2243060 - RNA, 19 nt, Homo sapiens
  misc_RNA (1)...(19): siRNA sense strand
agagauacgaaauguggaa

SEQ ID NO: 2243061 - RNA, 19 nt, Homo sapiens
  misc_RNA (1)...(19): siRNA sense strand
ggauauuuggggaggagaa

SEQ ID NO: 2243062 - RNA, 19 nt, Homo sapiens
  misc_RNA (1)...(19): siRNA sense strand
gcuagaaaagagaaugaaa

SEQ ID NO: 2243063 - RNA, 19 nt, Homo sapiens
  misc_RNA (1)...(19): siRNA sense strand
uggagauguucuagagcca

SEQ ID NO: 2243064 - RNA, 19 nt, Homo sapiens
  misc_RNA (1)...(19): siRNA sense strand
gacacaugauagaagaaau

SEQ ID NO: 2243065 - RNA, 19 nt, Homo sapiens
  misc_RNA (1)...(19): siRNA sense strand
ggguucaacuggaagcuca

SEQ ID NO: 2243066 - RNA, 19 nt, Homo sapiens
  misc_RNA (1)...(19): siRNA sense strand
aaggaaaggugaucggacu

SEQ ID NO: 2243067 - RNA, 19 nt, Homo sapiens
  misc_RNA (1)...(19): siRNA sense strand
caguucaauuuaauggcaa

SEQ ID NO: 2243068 - RNA, 19 nt, Homo sapiens
  misc_RNA (1)...(19): siRNA sense strand
gagaaauggacagaaggaa

SEQ ID NO: 2243069 - RNA, 19 nt, Homo sapiens
  misc_RNA (1)...(19): siRNA sense strand
gcagaaguguggauggaug

SEQ ID NO: 2243070 - RNA, 19 nt, Homo sapiens
  misc_RNA (1)...(19): siRNA sense strand
caaagguagauuauggaga

SEQ ID NO: 2243071 - RNA, 19 nt, Homo sapiens
  misc_RNA (1)...(19): siRNA sense strand
agagaaauggacagaagga

SEQ ID NO: 2243072 - RNA, 19 nt, Homo sapiens
  misc_RNA (1)...(19): siRNA sense strand
acgaaauguggaaacgaau

SEQ ID NO: 2243073 - RNA, 19 nt, Homo sapiens
  misc_RNA (1)...(19): siRNA sense strand
caccaagacacaugauaga

SEQ ID NO: 2243074 - RNA, 19 nt, Homo sapiens
  misc_RNA (1)...(19): siRNA sense strand
uuagaaggguguaaaacaa

SEQ ID NO: 2243075 - RNA, 19 nt, Homo sapiens
  misc_RNA (1)...(19): siRNA sense strand
aagguagauuauggagaua

SEQ ID NO: 2243076 - RNA, 19 nt, Homo sapiens
  misc_RNA (1)...(19): siRNA sense strand
aauuagaacagaugaccuu

SEQ ID NO: 2243077 - RNA, 19 nt, Homo sapiens
  misc_RNA (1)...(19): siRNA sense strand
uggauaaagccacagaaga

SEQ ID NO: 2243078 - RNA, 19 nt, Homo sapiens
  misc_RNA (1)...(19): siRNA sense strand
guguuacaaagguagauua

SEQ ID NO: 2243079 - RNA, 19 nt, Homo sapiens
  misc_RNA (1)...(19): siRNA sense strand
augcaacaaaugugaugaa

SEQ ID NO: 2243080 - RNA, 19 nt, Homo sapiens
  misc_RNA (1)...(19): siRNA sense strand
acuuaauggcccaguuaca

SEQ ID NO: 2243081 - RNA, 19 nt, Homo sapiens
  misc_RNA (1)...(19): siRNA sense strand
cgaacuguccauaguguca

SEQ ID NO: 2243082 - RNA, 19 nt, Homo sapiens
  misc_RNA (1)...(19): siRNA sense strand
cuuuagagaguuaugugaa

SEQ ID NO: 2243083 - RNA, 19 nt, Homo sapiens
  misc_RNA (1)...(19): siRNA sense strand
gguguaaaacaaaggugua

SEQ ID NO: 2243084 - RNA, 19 nt, Homo sapiens
  misc_RNA (1)...(19): siRNA sense strand
gguucaacuggaagcucaa

SEQ ID NO: 2243085 - RNA, 19 nt, Homo sapiens
  misc_RNA (1)...(19): siRNA sense strand
aaacaugacaggagaacag

SEQ ID NO: 2243086 - RNA, 19 nt, Homo sapiens
  misc_RNA (1)...(19): siRNA sense strand
ccaacaaagaaauuagaac

SEQ ID NO: 2243087 - RNA, 19 nt, Homo sapiens
  misc_RNA (1)...(19): siRNA sense strand
cauugggagagauacgaaa

SEQ ID NO: 2243088 - RNA, 19 nt, Homo sapiens
  misc_RNA (1)...(19): siRNA sense strand
uuacaaugcucaaaugcca

SEQ ID NO: 2243089 - RNA, 19 nt, Homo sapiens
  misc_RNA (1)...(19): siRNA sense strand
acgaaguggaggagaggaa

SEQ ID NO: 2243090 - RNA, 19 nt, Homo sapiens
  misc_RNA (1)...(19): siRNA sense strand
ugacagagaugaaggcuga

SEQ ID NO: 2243091 - RNA, 19 nt, Homo sapiens
  misc_RNA (1)...(19): siRNA sense strand
ggaagaaaggcaaagccaa

SEQ ID NO: 2243092 - RNA, 19 nt, Homo sapiens
  misc_RNA (1)...(19): siRNA sense strand
gcaaacuacgagagggaca

SEQ ID NO: 2243093 - RNA, 19 nt, Homo sapiens
  misc_RNA (1)...(19): siRNA sense strand
gcaaggagcagguggagga

SEQ ID NO: 2243094 - RNA, 19 nt, Homo sapiens
  misc_RNA (1)...(19): siRNA sense strand
gugaagaaccugcggcuga

SEQ ID NO: 2243095 - RNA, 19 nt, Homo sapiens
  misc_RNA (1)...(19): siRNA sense strand
agaaagggaagaaaggcaa

SEQ ID NO: 2243096 - RNA, 19 nt, Homo sapiens
  misc_RNA (1)...(19): siRNA sense strand
cacugaagguggagcucaa

SEQ ID NO: 2243097 - RNA, 19 nt, Homo sapiens
  misc_RNA (1)...(19): siRNA sense strand
cgggaggagaugagcgaga

SEQ ID NO: 2243098 - RNA, 19 nt, Homo sapiens
  misc_RNA (1)...(19): siRNA sense strand
cuccagaggacaugagcaa

SEQ ID NO: 2243099 - RNA, 19 nt, Homo sapiens
  misc_RNA (1)...(19): siRNA sense strand
agaugaagaugcugaggga

SEQ ID NO: 2243100 - RNA, 19 nt, Homo sapiens
  misc_RNA (1)...(19): siRNA sense strand
ucgcaaacuacgagaggga

SEQ ID NO: 2243101 - RNA, 19 nt, Homo sapiens
  misc_RNA (1)...(19): siRNA sense strand
ugaaagaccugcaguggga

SEQ ID NO: 2243102 - RNA, 19 nt, Homo sapiens
  misc_RNA (1)...(19): siRNA sense strand
guguacaagcagaaaguga

SEQ ID NO: 2243103 - RNA, 19 nt, Homo sapiens
  misc_RNA (1)...(19): siRNA sense strand
uuugaaagucagggagaaa

SEQ ID NO: 2243104 - RNA, 19 nt, Homo sapiens
  misc_RNA (1)...(19): siRNA sense strand
aggccaaguaugauaagaa

SEQ ID NO: 2243105 - RNA, 19 nt, Homo sapiens
  misc_RNA (1)...(19): siRNA sense strand
aggagcagauggaggacau

SEQ ID NO: 2243106 - RNA, 19 nt, Homo sapiens
  misc_RNA (1)...(19): siRNA sense strand
agaaagagcugaaagaccu

SEQ ID NO: 2243107 - RNA, 19 nt, Homo sapiens
  misc_RNA (1)...(19): siRNA sense strand
gggaagaaaggcaaagcca

SEQ ID NO: 2243108 - RNA, 19 nt, Homo sapiens
  misc_RNA (1)...(19): siRNA sense strand
cguuugaaagucagggaga

SEQ ID NO: 2243109 - RNA, 19 nt, Homo sapiens
  misc_RNA (1)...(19): siRNA sense strand
guuugaaagucagggagaa

SEQ ID NO: 2243110 - RNA, 19 nt, Homo sapiens
  misc_RNA (1)...(19): siRNA sense strand
agauggaggacaugcggaa

SEQ ID NO: 2243111 - RNA, 19 nt, Homo sapiens
  misc_RNA (1)...(19): siRNA sense strand
ggaaugauuuugagaggca

SEQ ID NO: 2243112 - RNA, 19 nt, Homo sapiens
  misc_RNA (1)...(19): siRNA sense strand
aggagagugugcugcgcaa

SEQ ID NO: 2243113 - RNA, 19 nt, Homo sapiens
  misc_RNA (1)...(19): siRNA sense strand
aggagcagguggaggagca

SEQ ID NO: 2243114 - RNA, 19 nt, Homo sapiens
  misc_RNA (1)...(19): siRNA sense strand
gcgagcgggaggaacgaaa

SEQ ID NO: 2243115 - RNA, 19 nt, Homo sapiens
  misc_RNA (1)...(19): siRNA sense strand
agaacaagcgccuggcaga

SEQ ID NO: 2243116 - RNA, 19 nt, Homo sapiens
  misc_RNA (1)...(19): siRNA sense strand
agaugaaggcugagggcac

SEQ ID NO: 2243117 - RNA, 19 nt, Homo sapiens
  misc_RNA (1)...(19): siRNA sense strand
aagaaagggaagaaaggca

SEQ ID NO: 2243118 - RNA, 19 nt, Homo sapiens
  misc_RNA (1)...(19): siRNA sense strand
uggaagaagccgaggagag

SEQ ID NO: 2243119 - RNA, 19 nt, Homo sapiens
  misc_RNA (1)...(19): siRNA sense strand
caugaagcuggcacagaaa

SEQ ID NO: 2243120 - RNA, 19 nt, Homo sapiens
  misc_RNA (1)...(19): siRNA sense strand
gagaugagcgagaugcaga

SEQ ID NO: 2243121 - RNA, 19 nt, Homo sapiens
  misc_RNA (1)...(19): siRNA sense strand
uguacaagcagaaagugaa

SEQ ID NO: 2243122 - RNA, 19 nt, Homo sapiens
  misc_RNA (1)...(19): siRNA sense strand
uucgagaaauugaggccaa

SEQ ID NO: 2243123 - RNA, 19 nt, Homo sapiens
  misc_RNA (1)...(19): siRNA sense strand
uggagaagaaggaggugca

SEQ ID NO: 2243124 - RNA, 19 nt, Homo sapiens
  misc_RNA (1)...(19): siRNA sense strand
gagaaagagcugaaagacc

SEQ ID NO: 2243125 - RNA, 19 nt, Homo sapiens
  misc_RNA (1)...(19): siRNA sense strand
ggaagaaggaggaccaccu

SEQ ID NO: 2243126 - RNA, 19 nt, Homo sapiens
  misc_RNA (1)...(19): siRNA sense strand
aggaccaccuggagaggga

SEQ ID NO: 2243127 - RNA, 19 nt, Homo sapiens
  misc_RNA (1)...(19): siRNA sense strand
aagaagaugaagaugcuga

SEQ ID NO: 2243128 - RNA, 19 nt, Homo sapiens
  misc_RNA (1)...(19): siRNA sense strand
uggaggagaagaaggcuga

SEQ ID NO: 2243129 - RNA, 19 nt, Homo sapiens
  misc_RNA (1)...(19): siRNA sense strand
gauaagaagaugaagaugc

SEQ ID NO: 2243130 - RNA, 19 nt, Homo sapiens
  misc_RNA (1)...(19): siRNA sense strand
gcaugaaguguuagagcag

SEQ ID NO: 2243131 - RNA, 19 nt, Homo sapiens
  misc_RNA (1)...(19): siRNA sense strand
ucaaggagcagauggagga

SEQ ID NO: 2243132 - RNA, 19 nt, Homo sapiens
  misc_RNA (1)...(19): siRNA sense strand
gcuucagacaggaugguaa

SEQ ID NO: 2243133 - RNA, 19 nt, Homo sapiens
  misc_RNA (1)...(19): siRNA sense strand
gccuagaagcauacaacaa

SEQ ID NO: 2243134 - RNA, 19 nt, Homo sapiens
  misc_RNA (1)...(19): siRNA sense strand
ucacaauguuaaaccggaa

SEQ ID NO: 2243135 - RNA, 19 nt, Homo sapiens
  misc_RNA (1)...(19): siRNA sense strand
cagggaagacauacggaau

SEQ ID NO: 2243136 - RNA, 19 nt, Homo sapiens
  misc_RNA (1)...(19): siRNA sense strand
caaacauggcugggaggaa

SEQ ID NO: 2243137 - RNA, 19 nt, Homo sapiens
  misc_RNA (1)...(19): siRNA sense strand
gagguaugaaggaggcuau

SEQ ID NO: 2243138 - RNA, 19 nt, Homo sapiens
  misc_RNA (1)...(19): siRNA sense strand
cguaaggcaagaagugaca

SEQ ID NO: 2243139 - RNA, 19 nt, Homo sapiens
  misc_RNA (1)...(19): siRNA sense strand
ggaaugagccugugccaag

SEQ ID NO: 2243140 - RNA, 19 nt, Homo sapiens
  misc_RNA (1)...(19): siRNA sense strand
ucgagaagacagcuggcua

SEQ ID NO: 2243141 - RNA, 19 nt, Homo sapiens
  misc_RNA (1)...(19): siRNA sense strand
ugucaagagguguugccaa

SEQ ID NO: 2243142 - RNA, 19 nt, Homo sapiens
  misc_RNA (1)...(19): siRNA sense strand
cuccaaucuccuagccaaa

SEQ ID NO: 2243143 - RNA, 19 nt, Homo sapiens
  misc_RNA (1)...(19): siRNA sense strand
gugcaauccgcuucagaca

SEQ ID NO: 2243144 - RNA, 19 nt, Homo sapiens
  misc_RNA (1)...(19): siRNA sense strand
gguacagguggcugggaaa

SEQ ID NO: 2243145 - RNA, 19 nt, Homo sapiens
  misc_RNA (1)...(19): siRNA sense strand
agaaaaugcaggagaaaca

SEQ ID NO: 2243146 - RNA, 19 nt, Homo sapiens
  misc_RNA (1)...(19): siRNA sense strand
aggugaaagagaagaccaa

SEQ ID NO: 2243147 - RNA, 19 nt, Homo sapiens
  misc_RNA (1)...(19): siRNA sense strand
cgggaagaagagagugauu

SEQ ID NO: 2243148 - RNA, 19 nt, Homo sapiens
  misc_RNA (1)...(19): siRNA sense strand
gcuucaauccagugagcau

SEQ ID NO: 2243149 - RNA, 19 nt, Homo sapiens
  misc_RNA (1)...(19): siRNA sense strand
cuauaguggagcaggugaa

SEQ ID NO: 2243150 - RNA, 19 nt, Homo sapiens
  misc_RNA (1)...(19): siRNA sense strand
ugaugaaaggucugggaca

SEQ ID NO: 2243151 - RNA, 19 nt, Homo sapiens
  misc_RNA (1)...(19): siRNA sense strand
cugggaaaguucaggaagu

SEQ ID NO: 2243152 - RNA, 19 nt, Homo sapiens
  misc_RNA (1)...(19): siRNA sense strand
ccgagauguccguggcuuu

SEQ ID NO: 2243153 - RNA, 19 nt, Homo sapiens
  misc_RNA (1)...(19): siRNA sense strand
gcagaaaaugcaggagaaa

SEQ ID NO: 2243154 - RNA, 19 nt, Homo sapiens
  misc_RNA (1)...(19): siRNA sense strand
uggauggaguagagugcau

SEQ ID NO: 2243155 - RNA, 19 nt, Homo sapiens
  misc_RNA (1)...(19): siRNA sense strand
ugguacagguggcugggaa

SEQ ID NO: 2243156 - RNA, 19 nt, Homo sapiens
  misc_RNA (1)...(19): siRNA sense strand
gccgggaagaagagaguga

SEQ ID NO: 2243157 - RNA, 19 nt, Homo sapiens
  misc_RNA (1)...(19): siRNA sense strand
gacaaguagcagagcggau

SEQ ID NO: 2243158 - RNA, 19 nt, Homo sapiens
  misc_RNA (1)...(19): siRNA sense strand
ucuuugaauaugaagggaa

SEQ ID NO: 2243159 - RNA, 19 nt, Homo sapiens
  misc_RNA (1)...(19): siRNA sense strand
ccggaugaaagguggaagu

SEQ ID NO: 2243160 - RNA, 19 nt, Homo sapiens
  misc_RNA (1)...(19): siRNA sense strand
ccaccaagauucugcugga

SEQ ID NO: 2243161 - RNA, 19 nt, Homo sapiens
  misc_RNA (1)...(19): siRNA sense strand
cccauaagacuguggacca

SEQ ID NO: 2243162 - RNA, 19 nt, Homo sapiens
  misc_RNA (1)...(19): siRNA sense strand
agugauugucauuggcauu

SEQ ID NO: 2243163 - RNA, 19 nt, Homo sapiens
  misc_RNA (1)...(19): siRNA sense strand
agacuguggaccagggcau

SEQ ID NO: 2243164 - RNA, 19 nt, Homo sapiens
  misc_RNA (1)...(19): siRNA sense strand
cuuugaauaugaagggaac

SEQ ID NO: 2243165 - RNA, 19 nt, Homo sapiens
  misc_RNA (1)...(19): siRNA sense strand
ggaccagggcauugcagca

SEQ ID NO: 2243166 - RNA, 19 nt, Homo sapiens
  misc_RNA (1)...(19): siRNA sense strand
agacuauaguggagcaggu

SEQ ID NO: 2243167 - RNA, 19 nt, Homo sapiens
  misc_RNA (1)...(19): siRNA sense strand
uccagaaguuccagcguga

SEQ ID NO: 2243168 - RNA, 19 nt, Homo sapiens
  misc_RNA (1)...(19): siRNA sense strand
accaagauucugcuggaaa

SEQ ID NO: 2243169 - RNA, 19 nt, Homo sapiens
  misc_RNA (1)...(19): siRNA sense strand
accaaaugggugcugaaua

SEQ ID NO: 2243170 - RNA, 19 nt, Homo sapiens
  misc_RNA (1)...(19): siRNA sense strand
augagaaggaacaggugau

SEQ ID NO: 2243171 - RNA, 19 nt, Homo sapiens
  misc_RNA (1)...(19): siRNA sense strand
agguaaagcuugagauccu

SEQ ID NO: 2243172 - RNA, 19 nt, Homo sapiens
  misc_RNA (1)...(19): siRNA sense strand
ggcaguacuuugaggguga

SEQ ID NO: 2243173 - RNA, 19 nt, Homo sapiens
  misc_RNA (1)...(19): siRNA sense strand
acuggaaguacuugauaaa

SEQ ID NO: 2243174 - RNA, 19 nt, Homo sapiens
  misc_RNA (1)...(19): siRNA sense strand
gaagaaagguggaagaagc

SEQ ID NO: 2243175 - RNA, 19 nt, Homo sapiens
  misc_RNA (1)...(19): siRNA sense strand
ccaauaaguuugacgugga

SEQ ID NO: 2243176 - RNA, 19 nt, Homo sapiens
  misc_RNA (1)...(19): siRNA sense strand
ucaaguuguuaaugggaga

SEQ ID NO: 2243177 - RNA, 19 nt, Homo sapiens
  misc_RNA (1)...(19): siRNA sense strand
accuagaaauugucaggaa

SEQ ID NO: 2243178 - RNA, 19 nt, Homo sapiens
  misc_RNA (1)...(19): siRNA sense strand
ugaacuggaugcugcgcaa

SEQ ID NO: 2243179 - RNA, 19 nt, Homo sapiens
  misc_RNA (1)...(19): siRNA sense strand
ccaaaguuuuacaggguga

SEQ ID NO: 2243180 - RNA, 19 nt, Homo sapiens
  misc_RNA (1)...(19): siRNA sense strand
guuaauggaaagcugacaa

SEQ ID NO: 2243181 - RNA, 19 nt, Homo sapiens
  misc_RNA (1)...(19): siRNA sense strand
gcaaauauauuguagaacc

SEQ ID NO: 2243182 - RNA, 19 nt, Homo sapiens
  misc_RNA (1)...(19): siRNA sense strand
augaggucguuaauggaaa

SEQ ID NO: 2243183 - RNA, 19 nt, Homo sapiens
  misc_RNA (1)...(19): siRNA sense strand
aauggaaagcugacaaaca

SEQ ID NO: 2243184 - RNA, 19 nt, Homo sapiens
  misc_RNA (1)...(19): siRNA sense strand
agggugauguaaaugaaau

SEQ ID NO: 2243185 - RNA, 19 nt, Homo sapiens
  misc_RNA (1)...(19): siRNA sense strand
cggaguuuccaauagcaua

SEQ ID NO: 2243186 - RNA, 19 nt, Homo sapiens
  misc_RNA (1)...(19): siRNA sense strand
cauaaagaagaaaggugga

SEQ ID NO: 2243187 - RNA, 19 nt, Homo sapiens
  misc_RNA (1)...(19): siRNA sense strand
ggaagaagcgguaugaggu

SEQ ID NO: 2243188 - RNA, 19 nt, Homo sapiens
  misc_RNA (1)...(19): siRNA sense strand
gcugacaaacacagggacu

SEQ ID NO: 2243189 - RNA, 19 nt, Homo sapiens
  misc_RNA (1)...(19): siRNA sense strand
aguuugacguggauguuga

SEQ ID NO: 2243190 - RNA, 19 nt, Homo sapiens
  misc_RNA (1)...(19): siRNA sense strand
uggaaaccucagagcuaua

SEQ ID NO: 2243191 - RNA, 19 nt, Homo sapiens
  misc_RNA (1)...(19): siRNA sense strand
gugacauggaagacagaca

SEQ ID NO: 2243192 - RNA, 19 nt, Homo sapiens
  misc_RNA (1)...(19): siRNA sense strand
ccucagagcuauaaagugg

SEQ ID NO: 2243193 - RNA, 19 nt, Homo sapiens
  misc_RNA (1)...(19): siRNA sense strand
ccucaaucagagugaaacu

SEQ ID NO: 2243194 - RNA, 19 nt, Homo sapiens
  misc_RNA (1)...(19): siRNA sense strand
auggaaacggagacuuaaa

SEQ ID NO: 2243195 - RNA, 19 nt, Homo sapiens
  misc_RNA (1)...(19): siRNA sense strand
uggaaaccucagagcuaua

SEQ ID NO: 2243196 - RNA, 19 nt, Homo sapiens
  misc_RNA (1)...(19): siRNA sense strand
gugacauggaagacagaca

SEQ ID NO: 2243197 - RNA, 19 nt, Homo sapiens
  misc_RNA (1)...(19): siRNA sense strand
ccucagagcuauaaagugg

SEQ ID NO: 2243198 - RNA, 19 nt, Homo sapiens
  misc_RNA (1)...(19): siRNA sense strand
ccucaaucagagugaaacu

SEQ ID NO: 2243199 - RNA, 19 nt, Homo sapiens
  misc_RNA (1)...(19): siRNA sense strand
auggaaacggagacuuaaa

SEQ ID NO: 2243200 - RNA, 19 nt, Homo sapiens
  misc_RNA (1)...(19): siRNA sense strand
uggaaaccucagagcuaua

SEQ ID NO: 2243201 - RNA, 19 nt, Homo sapiens
  misc_RNA (1)...(19): siRNA sense strand
gugacauggaagacagaca

SEQ ID NO: 2243202 - RNA, 19 nt, Homo sapiens
  misc_RNA (1)...(19): siRNA sense strand
ccucagagcuauaaagugg

SEQ ID NO: 2243203 - RNA, 19 nt, Homo sapiens
  misc_RNA (1)...(19): siRNA sense strand
ccucaaucagagugaaacu

SEQ ID NO: 2243204 - RNA, 19 nt, Homo sapiens
  misc_RNA (1)...(19): siRNA sense strand
auggaaacggagacuuaaa

SEQ ID NO: 2243205 - RNA, 19 nt, Homo sapiens
  misc_RNA (1)...(19): siRNA sense strand
gcgugaagucugagggaga

SEQ ID NO: 2243206 - RNA, 19 nt, Homo sapiens
  misc_RNA (1)...(19): siRNA sense strand
ccuuugacuuugagaacau

SEQ ID NO: 2243207 - RNA, 19 nt, Homo sapiens
  misc_RNA (1)...(19): siRNA sense strand
gagacaaccugcaacgaca

SEQ ID NO: 2243208 - RNA, 19 nt, Homo sapiens
  misc_RNA (1)...(19): siRNA sense strand
ccacugagacugaggccuu

SEQ ID NO: 2243209 - RNA, 19 nt, Homo sapiens
  misc_RNA (1)...(19): siRNA sense strand
uugagaacaugaagcgcaa

SEQ ID NO: 2243210 - RNA, 19 nt, Homo sapiens
  misc_RNA (1)...(19): siRNA sense strand
agaacgacgucuuuggaga

SEQ ID NO: 2243211 - RNA, 19 nt, Homo sapiens
  misc_RNA (1)...(19): siRNA sense strand
cuuccaaucugaugggcau

SEQ ID NO: 2243212 - RNA, 19 nt, Homo sapiens
  misc_RNA (1)...(19): siRNA sense strand
auacagaggugacucgcua

SEQ ID NO: 2243213 - RNA, 19 nt, Homo sapiens
  misc_RNA (1)...(19): siRNA sense strand
gaccagaaguuuguggcua

SEQ ID NO: 2243214 - RNA, 19 nt, Homo sapiens
  misc_RNA (1)...(19): siRNA sense strand
guacauagcuauugccagc

SEQ ID NO: 2243215 - RNA, 19 nt, Homo sapiens
  misc_RNA (1)...(19): siRNA sense strand
cccuggaggagcuguauaa

SEQ ID NO: 2243216 - RNA, 19 nt, Homo sapiens
  misc_RNA (1)...(19): siRNA sense strand
cuaauuaagaagagagcau

SEQ ID NO: 2243217 - RNA, 19 nt, Homo sapiens
  misc_RNA (1)...(19): siRNA sense strand
aucuaaguguggugagaaa

SEQ ID NO: 2243218 - RNA, 19 nt, Homo sapiens
  misc_RNA (1)...(19): siRNA sense strand
uuacaugauugaagggaca

SEQ ID NO: 2243219 - RNA, 19 nt, Homo sapiens
  misc_RNA (1)...(19): siRNA sense strand
ccgacauaggagaggagaa

SEQ ID NO: 2243220 - RNA, 19 nt, Homo sapiens
  misc_RNA (1)...(19): siRNA sense strand
guaccaauauuuaaggaca

SEQ ID NO: 2243221 - RNA, 19 nt, Homo sapiens
  misc_RNA (1)...(19): siRNA sense strand
caugaagguagcacagaaa

SEQ ID NO: 2243222 - RNA, 19 nt, Homo sapiens
  misc_RNA (1)...(19): siRNA sense strand
augugaaugcccagaguua

SEQ ID NO: 2243223 - RNA, 19 nt, Homo sapiens
  misc_RNA (1)...(19): siRNA sense strand
cagaugaagcaauaaacaa

SEQ ID NO: 2243224 - RNA, 19 nt, Homo sapiens
  misc_RNA (1)...(19): siRNA sense strand
gcaggaaggcauugaucau

SEQ ID NO: 2243225 - RNA, 19 nt, Homo sapiens
  misc_RNA (1)...(19): siRNA sense strand
ucacacugcccgaggucaa

SEQ ID NO: 2243226 - RNA, 19 nt, Homo sapiens
  misc_RNA (1)...(19): siRNA sense strand
cuuuccagaugaagcaaua

SEQ ID NO: 2243227 - RNA, 19 nt, Homo sapiens
  misc_RNA (1)...(19): siRNA sense strand
uggaucagcauuuaggaaa

SEQ ID NO: 2243228 - RNA, 19 nt, Homo sapiens
  misc_RNA (1)...(19): siRNA sense strand
agaaacauuuacugaggau

SEQ ID NO: 2243229 - RNA, 19 nt, Homo sapiens
  misc_RNA (1)...(19): siRNA sense strand
uggauggagaguagaauuu

SEQ ID NO: 2243230 - RNA, 19 nt, Homo sapiens
  misc_RNA (1)...(19): siRNA sense strand
gggaggaaaccaagcgcca

SEQ ID NO: 2243231 - RNA, 19 nt, Homo sapiens
  misc_RNA (1)...(19): siRNA sense strand
ccuuuggagaccagaguau

SEQ ID NO: 2243232 - RNA, 19 nt, Homo sapiens
  misc_RNA (1)...(19): siRNA sense strand
cuuuaugaucaguuggcua

SEQ ID NO: 2243233 - RNA, 19 nt, Homo sapiens
  misc_RNA (1)...(19): siRNA sense strand
agaaaauacaccuggauga

SEQ ID NO: 2243234 - RNA, 19 nt, Homo sapiens
  misc_RNA (1)...(19): siRNA sense strand
cuggagaacuaaugacagu

SEQ ID NO: 2243235 - RNA, 19 nt, Homo sapiens
  misc_RNA (1)...(19): siRNA sense strand
ggggcgaugagguggaaua

SEQ ID NO: 2243236 - RNA, 19 nt, Homo sapiens
  misc_RNA (1)...(19): siRNA sense strand
caaagguugaugagaacau

SEQ ID NO: 2243237 - RNA, 19 nt, Homo sapiens
  misc_RNA (1)...(19): siRNA sense strand
ggaucagcauuuaggaaag

SEQ ID NO: 2243238 - RNA, 19 nt, Homo sapiens
  misc_RNA (1)...(19): siRNA sense strand
gaacaauaacuauaggauc

SEQ ID NO: 2243239 - RNA, 19 nt, Homo sapiens
  misc_RNA (1)...(19): siRNA sense strand
ugggaaggaagguguguuu

SEQ ID NO: 2243240 - RNA, 19 nt, Homo sapiens
  misc_RNA (1)...(19): siRNA sense strand
gaucauauuuacauggaug

SEQ ID NO: 2243241 - RNA, 19 nt, Homo sapiens
  misc_RNA (1)...(19): siRNA sense strand
auuccaagccugcaguaua

SEQ ID NO: 2243242 - RNA, 19 nt, Homo sapiens
  misc_RNA (1)...(19): siRNA sense strand
gaugagaacaugaagguag

SEQ ID NO: 2243243 - RNA, 19 nt, Homo sapiens
  misc_RNA (1)...(19): siRNA sense strand
cugaacuaccuaaagcuaa

SEQ ID NO: 2243244 - RNA, 19 nt, Homo sapiens
  misc_RNA (1)...(19): siRNA sense strand
cuucaguaccuuaacaaga

SEQ ID NO: 2243245 - RNA, 19 nt, Homo sapiens
  misc_RNA (1)...(19): siRNA sense strand
acuaaugacaguugccaga

SEQ ID NO: 2243246 - RNA, 19 nt, Homo sapiens
  misc_RNA (1)...(19): siRNA sense strand
cauuggauggagaguagaa

SEQ ID NO: 2243247 - RNA, 19 nt, Homo sapiens
  misc_RNA (1)...(19): siRNA sense strand
gccagauggaugagggagu

SEQ ID NO: 2243248 - RNA, 19 nt, Homo sapiens
  misc_RNA (1)...(19): siRNA sense strand
ggggaaaggacaaacccaa

SEQ ID NO: 2243249 - RNA, 19 nt, Homo sapiens
  misc_RNA (1)...(19): siRNA sense strand
aaucaggcucuuugcacaa

SEQ ID NO: 2243250 - RNA, 19 nt, Homo sapiens
  misc_RNA (1)...(19): siRNA sense strand
acaccuggaugaugcuaau

SEQ ID NO: 2243251 - RNA, 19 nt, Homo sapiens
  misc_RNA (1)...(19): siRNA sense strand
guuacuuggaucagcauuu

SEQ ID NO: 2243252 - RNA, 19 nt, Homo sapiens
  misc_RNA (1)...(19): siRNA sense strand
augcugucuugcagggaau

SEQ ID NO: 2243253 - RNA, 19 nt, Homo sapiens
  misc_RNA (1)...(19): siRNA sense strand
ucgcaaaccauccugacua

SEQ ID NO: 2243254 - RNA, 19 nt, Homo sapiens
  misc_RNA (1)...(19): siRNA sense strand
auacaaacuggcagagaaa

SEQ ID NO: 2243255 - RNA, 19 nt, Homo sapiens
  misc_RNA (1)...(19): siRNA sense strand
ccagagaagccuugggaca

SEQ ID NO: 2243256 - RNA, 19 nt, Homo sapiens
  misc_RNA (1)...(19): siRNA sense strand
aggaggagcaggagaggaa

SEQ ID NO: 2243257 - RNA, 19 nt, Homo sapiens
  misc_RNA (1)...(19): siRNA sense strand
ggaaggaacugaagcagca

SEQ ID NO: 2243258 - RNA, 19 nt, Homo sapiens
  misc_RNA (1)...(19): siRNA sense strand
acaaacuggcagagaaauu

SEQ ID NO: 2243259 - RNA, 19 nt, Homo sapiens
  misc_RNA (1)...(19): siRNA sense strand
caaauggaaccaagggcaa

SEQ ID NO: 2243260 - RNA, 19 nt, Homo sapiens
  misc_RNA (1)...(19): siRNA sense strand
acacagaaugaaaggaaca

SEQ ID NO: 2243261 - RNA, 19 nt, Homo sapiens
  misc_RNA (1)...(19): siRNA sense strand
ccaaaguggagcagcaaga

SEQ ID NO: 2243262 - RNA, 19 nt, Homo sapiens
  misc_RNA (1)...(19): siRNA sense strand
agggaauggcuuuggaaga

SEQ ID NO: 2243263 - RNA, 19 nt, Homo sapiens
  misc_RNA (1)...(19): siRNA sense strand
ccacuuucaaggagggaau

SEQ ID NO: 2243264 - RNA, 19 nt, Homo sapiens
  misc_RNA (1)...(19): siRNA sense strand
ggcagagaaauuugugaaa

SEQ ID NO: 2243265 - RNA, 19 nt, Homo sapiens
  misc_RNA (1)...(19): siRNA sense strand
cugaacaacugaagcgguu

SEQ ID NO: 2243266 - RNA, 19 nt, Homo sapiens
  misc_RNA (1)...(19): siRNA sense strand
aggugaagguacaagacau

SEQ ID NO: 2243267 - RNA, 19 nt, Homo sapiens
  misc_RNA (1)...(19): siRNA sense strand
cuacauaagaaguguccuu

SEQ ID NO: 2243268 - RNA, 19 nt, Homo sapiens
  misc_RNA (1)...(19): siRNA sense strand
cgaggauguuuuagaagaa

SEQ ID NO: 2243269 - RNA, 19 nt, Homo sapiens
  misc_RNA (1)...(19): siRNA sense strand
ggaucaaaguggaaggcug

SEQ ID NO: 2243270 - RNA, 19 nt, Homo sapiens
  misc_RNA (1)...(19): siRNA sense strand
gcgugaagcaagcagaaca

SEQ ID NO: 2243271 - RNA, 19 nt, Homo sapiens
  misc_RNA (1)...(19): siRNA sense strand
ugaaacaaggcgaggagga

SEQ ID NO: 2243272 - RNA, 19 nt, Homo sapiens
  misc_RNA (1)...(19): siRNA sense strand
uggaagacuaucagaggau

SEQ ID NO: 2243273 - RNA, 19 nt, Homo sapiens
  misc_RNA (1)...(19): siRNA sense strand
ucuuaaacauggagcccuu

SEQ ID NO: 2243274 - RNA, 19 nt, Homo sapiens
  misc_RNA (1)...(19): siRNA sense strand
aggaacugaagcagcauaa

SEQ ID NO: 2243275 - RNA, 19 nt, Homo sapiens
  misc_RNA (1)...(19): siRNA sense strand
cugaagcagcauaaagaau

SEQ ID NO: 2243276 - RNA, 19 nt, Homo sapiens
  misc_RNA (1)...(19): siRNA sense strand
gcaaggacagucaggccaa

SEQ ID NO: 2243277 - RNA, 19 nt, Homo sapiens
  misc_RNA (1)...(19): siRNA sense strand
acgaacugguacacagaau

SEQ ID NO: 2243278 - RNA, 19 nt, Homo sapiens
  misc_RNA (1)...(19): siRNA sense strand
gguaaagcugcaagaggca

SEQ ID NO: 2243279 - RNA, 19 nt, Homo sapiens
  misc_RNA (1)...(19): siRNA sense strand
caggagggaaacagaauga

SEQ ID NO: 2243280 - RNA, 19 nt, Homo sapiens
  misc_RNA (1)...(19): siRNA sense strand
acacagaaucuaugguacu

SEQ ID NO: 2243281 - RNA, 19 nt, Homo sapiens
  misc_RNA (1)...(19): siRNA sense strand
gagcaccgucacagagcaa

SEQ ID NO: 2243282 - RNA, 19 nt, Homo sapiens
  misc_RNA (1)...(19): siRNA sense strand
ggcuauggcaggaggagca

SEQ ID NO: 2243283 - RNA, 19 nt, Homo sapiens
  misc_RNA (1)...(19): siRNA sense strand
uggcagagaaauuugugaa

SEQ ID NO: 2243284 - RNA, 19 nt, Homo sapiens
  misc_RNA (1)...(19): siRNA sense strand
ccuggaggugugugggaau

SEQ ID NO: 2243285 - RNA, 19 nt, Homo sapiens
  misc_RNA (1)...(19): siRNA sense strand
ccuuugagggccugaccaa

SEQ ID NO: 2243286 - RNA, 19 nt, Homo sapiens
  misc_RNA (1)...(19): siRNA sense strand
ccaaauggaaccaagggca

SEQ ID NO: 2243287 - RNA, 19 nt, Homo sapiens
  misc_RNA (1)...(19): siRNA sense strand
aggaugaagaagaggccca

SEQ ID NO: 2243288 - RNA, 19 nt, Homo sapiens
  misc_RNA (1)...(19): siRNA sense strand
ggaaacagaaugaagaccu

SEQ ID NO: 2243289 - RNA, 19 nt, Homo sapiens
  misc_RNA (1)...(19): siRNA sense strand
ugaaaggaacagagggccu

SEQ ID NO: 2243290 - RNA, 19 nt, Homo sapiens
  misc_RNA (1)...(19): siRNA sense strand
gcaaagauucucaaccuga

SEQ ID NO: 2243291 - RNA, 19 nt, Homo sapiens
  misc_RNA (1)...(19): siRNA sense strand
aaguggagcagcaagacaa

SEQ ID NO: 2243292 - RNA, 19 nt, Homo sapiens
  misc_RNA (1)...(19): siRNA sense strand
gcgcgugaagcaagcagaa

SEQ ID NO: 2243293 - RNA, 19 nt, Homo sapiens
  misc_RNA (1)...(19): siRNA sense strand
acaagaggaggcaggauga

SEQ ID NO: 2243294 - RNA, 19 nt, Homo sapiens
  misc_RNA (1)...(19): siRNA sense strand
ccucauucuugcucaucua

SEQ ID NO: 2243295 - RNA, 19 nt, Homo sapiens
  misc_RNA (1)...(19): siRNA sense strand
acugguacacagaaugaaa

SEQ ID NO: 2243296 - RNA, 19 nt, Homo sapiens
  misc_RNA (1)...(19): siRNA sense strand
cauaaagaauuccaggacu

SEQ ID NO: 2243297 - RNA, 19 nt, Homo sapiens
  misc_RNA (1)...(19): siRNA sense strand
ccuacgcaguuccgacaaa

SEQ ID NO: 2243298 - RNA, 19 nt, Homo sapiens
  misc_RNA (1)...(19): siRNA sense strand
agaggaggcaggaugaaga

SEQ ID NO: 2243299 - RNA, 19 nt, Homo sapiens
  misc_RNA (1)...(19): siRNA sense strand
agacagacauccuggcgua

SEQ ID NO: 2243300 - RNA, 19 nt, Homo sapiens
  misc_RNA (1)...(19): siRNA sense strand
ucaagcaguaugugggcaa

SEQ ID NO: 2243301 - RNA, 19 nt, Homo sapiens
  misc_RNA (1)...(19): siRNA sense strand
aagcaggagaagaugaaga

SEQ ID NO: 2243302 - RNA, 19 nt, Homo sapiens
  misc_RNA (1)...(19): siRNA sense strand
agaugaagauggauugcca

SEQ ID NO: 2243303 - RNA, 19 nt, Homo sapiens
  misc_RNA (1)...(19): siRNA sense strand
gucccaagcaggagaagau

SEQ ID NO: 2243304 - RNA, 19 nt, Homo sapiens
  misc_RNA (1)...(19): siRNA sense strand
ugagaaaggggaugugaau

SEQ ID NO: 2243305 - RNA, 19 nt, Homo sapiens
  misc_RNA (1)...(19): siRNA sense strand
ucaagcaguaugugggcaa

SEQ ID NO: 2243306 - RNA, 19 nt, Homo sapiens
  misc_RNA (1)...(19): siRNA sense strand
aagcaggagaagaugaaga

SEQ ID NO: 2243307 - RNA, 19 nt, Homo sapiens
  misc_RNA (1)...(19): siRNA sense strand
agaugaagauggauugcca

SEQ ID NO: 2243308 - RNA, 19 nt, Homo sapiens
  misc_RNA (1)...(19): siRNA sense strand
gucccaagcaggagaagau

SEQ ID NO: 2243309 - RNA, 19 nt, Homo sapiens
  misc_RNA (1)...(19): siRNA sense strand
cugaaaaugucuuguguaa

SEQ ID NO: 2243310 - RNA, 19 nt, Homo sapiens
  misc_RNA (1)...(19): siRNA sense strand
cgaagaaauaccagggcuu

SEQ ID NO: 2243311 - RNA, 19 nt, Homo sapiens
  misc_RNA (1)...(19): siRNA sense strand
cugaaaagacaguggauau

SEQ ID NO: 2243312 - RNA, 19 nt, Homo sapiens
  misc_RNA (1)...(19): siRNA sense strand
cuggagacgugguggaaca

SEQ ID NO: 2243313 - RNA, 19 nt, Homo sapiens
  misc_RNA (1)...(19): siRNA sense strand
auacgauauccguggaaua

SEQ ID NO: 2243314 - RNA, 19 nt, Homo sapiens
  misc_RNA (1)...(19): siRNA sense strand
uggcagagguguucgaaaa

SEQ ID NO: 2243315 - RNA, 19 nt, Homo sapiens
  misc_RNA (1)...(19): siRNA sense strand
uagaagaacugaaucgcua

SEQ ID NO: 2243316 - RNA, 19 nt, Homo sapiens
  misc_RNA (1)...(19): siRNA sense strand
gugaaaaugugguggacuu

SEQ ID NO: 2243317 - RNA, 19 nt, Homo sapiens
  misc_RNA (1)...(19): siRNA sense strand
ggguaaugauccagaccga

SEQ ID NO: 2243318 - RNA, 19 nt, Homo sapiens
  misc_RNA (1)...(19): siRNA sense strand
uggguugacuggagagcua

SEQ ID NO: 2243319 - RNA, 19 nt, Homo sapiens
  misc_RNA (1)...(19): siRNA sense strand
guaaauagcuugugcacag

SEQ ID NO: 2243320 - RNA, 19 nt, Homo sapiens
  misc_RNA (1)...(19): siRNA sense strand
cugacaagaaauuggagaa

SEQ ID NO: 2243321 - RNA, 19 nt, Homo sapiens
  misc_RNA (1)...(19): siRNA sense strand
cugagguuguggagacuaa

SEQ ID NO: 2243322 - RNA, 19 nt, Homo sapiens
  misc_RNA (1)...(19): siRNA sense strand
aagcacaaaugguggccua

SEQ ID NO: 2243323 - RNA, 19 nt, Homo sapiens
  misc_RNA (1)...(19): siRNA sense strand
caccaugagaauagaagaa

SEQ ID NO: 2243324 - RNA, 19 nt, Homo sapiens
  misc_RNA (1)...(19): siRNA sense strand
uggagaaaauggaggcaau

SEQ ID NO: 2243325 - RNA, 19 nt, Homo sapiens
  misc_RNA (1)...(19): siRNA sense strand
ggaauggcuugguaggaga

SEQ ID NO: 2243326 - RNA, 19 nt, Homo sapiens
  misc_RNA (1)...(19): siRNA sense strand
caacuauggagaagagcuu

SEQ ID NO: 2243327 - RNA, 19 nt, Homo sapiens
  misc_RNA (1)...(19): siRNA sense strand
cugaaucgcuaucgagaca

SEQ ID NO: 2243328 - RNA, 19 nt, Homo sapiens
  misc_RNA (1)...(19): siRNA sense strand
caacauugugugauccaaa

SEQ ID NO: 2243329 - RNA, 19 nt, Homo sapiens
  misc_RNA (1)...(19): siRNA sense strand
ggguggaguuaguggguug

SEQ ID NO: 2243330 - RNA, 19 nt, Homo sapiens
  misc_RNA (1)...(19): siRNA sense strand
cuuuaagagagccgacaua

SEQ ID NO: 2243331 - RNA, 19 nt, Homo sapiens
  misc_RNA (1)...(19): siRNA sense strand
uggaaauacuguugcugau

SEQ ID NO: 2243332 - RNA, 19 nt, Homo sapiens
  misc_RNA (1)...(19): siRNA sense strand
ccgcaugaaaggacugaau

SEQ ID NO: 2243333 - RNA, 19 nt, Homo sapiens
  misc_RNA (1)...(19): siRNA sense strand
ggaacuuguaagaagguca

SEQ ID NO: 2243334 - RNA, 19 nt, Homo sapiens
  misc_RNA (1)...(19): siRNA sense strand
caucaagaaggguggaguu

SEQ ID NO: 2243335 - RNA, 19 nt, Homo sapiens
  misc_RNA (1)...(19): siRNA sense strand
agagcuagaauuuggagaa

SEQ ID NO: 2243336 - RNA, 19 nt, Homo sapiens
  misc_RNA (1)...(19): siRNA sense strand
aagaggaugacaaggaaau

SEQ ID NO: 2243337 - RNA, 19 nt, Homo sapiens
  misc_RNA (1)...(19): siRNA sense strand
ugacguuuguugauggcaa

SEQ ID NO: 2243338 - RNA, 19 nt, Homo sapiens
  misc_RNA (1)...(19): siRNA sense strand
ccuccauagacguguaaau

SEQ ID NO: 2243339 - RNA, 19 nt, Homo sapiens
  misc_RNA (1)...(19): siRNA sense strand
aaggucaauuggaagguua

SEQ ID NO: 2243340 - RNA, 19 nt, Homo sapiens
  misc_RNA (1)...(19): siRNA sense strand
uggacauccugaagcacaa

SEQ ID NO: 2243341 - RNA, 19 nt, Homo sapiens
  misc_RNA (1)...(19): siRNA sense strand
ggaaauaaacgauguggac

SEQ ID NO: 2243342 - RNA, 19 nt, Homo sapiens
  misc_RNA (1)...(19): siRNA sense strand
cgauguggacguacaggaa

SEQ ID NO: 2243343 - RNA, 19 nt, Homo sapiens
  misc_RNA (1)...(19): siRNA sense strand
ugacaagaaauuggagaau

SEQ ID NO: 2243344 - RNA, 19 nt, Homo sapiens
  misc_RNA (1)...(19): siRNA sense strand
ggaucaaugacgucuacua

SEQ ID NO: 2243345 - RNA, 19 nt, Homo sapiens
  misc_RNA (1)...(19): siRNA sense strand
uacaggaguucuuggacaa

SEQ ID NO: 2243346 - RNA, 19 nt, Homo sapiens
  misc_RNA (1)...(19): siRNA sense strand
uuguguaagccgaagaaau

SEQ ID NO: 2243347 - RNA, 19 nt, Homo sapiens
  misc_RNA (1)...(19): siRNA sense strand
ccaugagaauagaagaacu

SEQ ID NO: 2243348 - RNA, 19 nt, Homo sapiens
  misc_RNA (1)...(19): siRNA sense strand
gaauccugcuacagccaaa

SEQ ID NO: 2243349 - RNA, 19 nt, Homo sapiens
  misc_RNA (1)...(19): siRNA sense strand
aaauaaacgauguggacgu

SEQ ID NO: 2243350 - RNA, 19 nt, Homo sapiens
  misc_RNA (1)...(19): siRNA sense strand
acucauauuaccacaacaa

SEQ ID NO: 2243351 - RNA, 19 nt, Homo sapiens
  misc_RNA (1)...(19): siRNA sense strand
agaaaucccuuauggcaca

SEQ ID NO: 2243352 - RNA, 19 nt, Homo sapiens
  misc_RNA (1)...(19): siRNA sense strand
aaagaggaugacaaggaaa

SEQ ID NO: 2243353 - RNA, 19 nt, Homo sapiens
  misc_RNA (1)...(19): siRNA sense strand
aagaguggucacagaguau

SEQ ID NO: 2243354 - RNA, 19 nt, Homo sapiens
  misc_RNA (1)...(19): siRNA sense strand
aggucaauuggaagguuaa

SEQ ID NO: 2243355 - RNA, 19 nt, Homo sapiens
  misc_RNA (1)...(19): siRNA sense strand
cgugguggaacaagaggaa

SEQ ID NO: 2243356 - RNA, 19 nt, Homo sapiens
  misc_RNA (1)...(19): siRNA sense strand
aggaaaggcucccggguuc

SEQ ID NO: 2243357 - RNA, 19 nt, Homo sapiens
  misc_RNA (1)...(19): siRNA sense strand
auacaggaguucuuggaca

SEQ ID NO: 2243358 - RNA, 19 nt, Homo sapiens
  misc_RNA (1)...(19): siRNA sense strand
acgacaagcacuggagcaa

SEQ ID NO: 2243359 - RNA, 19 nt, Homo sapiens
  misc_RNA (1)...(19): siRNA sense strand
cgacaagcacuggagcaaa

SEQ ID NO: 2243360 - RNA, 19 nt, Homo sapiens
  misc_RNA (1)...(19): siRNA sense strand
caaauguggcggaugauca

SEQ ID NO: 2243361 - RNA, 19 nt, Homo sapiens
  misc_RNA (1)...(19): siRNA sense strand
uggaauugcauuacaacau

SEQ ID NO: 2243362 - RNA, 19 nt, Homo sapiens
  misc_RNA (1)...(19): siRNA sense strand
ccgcacacugucagcuaaa

SEQ ID NO: 2243363 - RNA, 19 nt, Homo sapiens
  misc_RNA (1)...(19): siRNA sense strand
gaacauaagucagcggugu

SEQ ID NO: 2243364 - RNA, 19 nt, Homo sapiens
  misc_RNA (1)...(19): siRNA sense strand
gcucagaauauggagauuu

SEQ ID NO: 2243365 - RNA, 19 nt, Homo sapiens
  misc_RNA (1)...(19): siRNA sense strand
agaaagaacucaaagcccu

SEQ ID NO: 2243366 - RNA, 19 nt, Homo sapiens
  misc_RNA (1)...(19): siRNA sense strand
uggagaagagcuuggcaga

SEQ ID NO: 2243367 - RNA, 19 nt, Homo sapiens
  misc_RNA (1)...(19): siRNA sense strand
acucgucaguggacacaaa

SEQ ID NO: 2243368 - RNA, 19 nt, Homo sapiens
  misc_RNA (1)...(19): siRNA sense strand
ggacaaagucucucagcag

SEQ ID NO: 2243369 - RNA, 19 nt, Homo sapiens
  misc_RNA (1)...(19): siRNA sense strand
cgacacguuacauggacua

SEQ ID NO: 2243370 - RNA, 19 nt, Homo sapiens
  misc_RNA (1)...(19): siRNA sense strand
caaaagaggaugacaagga

SEQ ID NO: 2243371 - RNA, 19 nt, Homo sapiens
  misc_RNA (1)...(19): siRNA sense strand
agaagaugggacauggaau

SEQ ID NO: 2243372 - RNA, 19 nt, Homo sapiens
  misc_RNA (1)...(19): siRNA sense strand
ugagaauagaagaacugaa

SEQ ID NO: 2243373 - RNA, 19 nt, Homo sapiens
  misc_RNA (1)...(19): siRNA sense strand
uaguaacuguucuggaaga

SEQ ID NO: 2243374 - RNA, 19 nt, Homo sapiens
  misc_RNA (1)...(19): siRNA sense strand
acuauuacacgcauugaaa

SEQ ID NO: 2243375 - RNA, 19 nt, Homo sapiens
  misc_RNA (1)...(19): siRNA sense strand
ggcaagaaccucaaggaga

SEQ ID NO: 2243376 - RNA, 19 nt, Homo sapiens
  misc_RNA (1)...(19): siRNA sense strand
aggaauacacagugaaacu

SEQ ID NO: 2243377 - RNA, 19 nt, Homo sapiens
  misc_RNA (1)...(19): siRNA sense strand
ggaagaggccggauggagu

SEQ ID NO: 2243378 - RNA, 19 nt, Homo sapiens
  misc_RNA (1)...(19): siRNA sense strand
gcaagaaccucaaggagag

SEQ ID NO: 2243379 - RNA, 19 nt, Homo sapiens
  misc_RNA (1)...(19): siRNA sense strand
gguugaaauugacgggaug

SEQ ID NO: 2243380 - RNA, 19 nt, Homo sapiens
  misc_RNA (1)...(19): siRNA sense strand
ugguugaaauugacgggau

SEQ ID NO: 2243381 - RNA, 19 nt, Homo sapiens
  misc_RNA (1)...(19): siRNA sense strand
acauagcagacaagcacaa

SEQ ID NO: 2243382 - RNA, 19 nt, Homo sapiens
  misc_RNA (1)...(19): siRNA sense strand
cagcaaggcccaagcucca

SEQ ID NO: 2243383 - RNA, 19 nt, Homo sapiens
  misc_RNA (1)...(19): siRNA sense strand
agcacaaucucuuuggcaa

SEQ ID NO: 2243384 - RNA, 19 nt, Homo sapiens
  misc_RNA (1)...(19): siRNA sense strand
ucuuaaaaccagaugauca

SEQ ID NO: 2243385 - RNA, 19 nt, Homo sapiens
  misc_RNA (1)...(19): siRNA sense strand
aagcuuucuuguugguaau

SEQ ID NO: 2243386 - RNA, 19 nt, Homo sapiens
  misc_RNA (1)...(19): siRNA sense strand
gcacaaucucuuuggcaag

SEQ ID NO: 2243387 - RNA, 19 nt, Homo sapiens
  misc_RNA (1)...(19): siRNA sense strand
gcauauacuguguaggaga

SEQ ID NO: 2243388 - RNA, 19 nt, Homo sapiens
  misc_RNA (1)...(19): siRNA sense strand
ccacugagcugagggccua

SEQ ID NO: 2243389 - RNA, 19 nt, Homo sapiens
  misc_RNA (1)...(19): siRNA sense strand
uccugaagcaagugggaga

SEQ ID NO: 2243390 - RNA, 19 nt, Homo sapiens
  misc_RNA (1)...(19): siRNA sense strand
gcuuuaacgcccuggagca

SEQ ID NO: 2243391 - RNA, 19 nt, Homo sapiens
  misc_RNA (1)...(19): siRNA sense strand
gcauauacuguguaggaga

SEQ ID NO: 2243392 - RNA, 19 nt, Homo sapiens
  misc_RNA (1)...(19): siRNA sense strand
ccacugagcugagggccua

SEQ ID NO: 2243393 - RNA, 19 nt, Homo sapiens
  misc_RNA (1)...(19): siRNA sense strand
caucaaucucauaaaggau

SEQ ID NO: 2243394 - RNA, 19 nt, Homo sapiens
  misc_RNA (1)...(19): siRNA sense strand
uccugaagcaagugggaga

SEQ ID NO: 2243395 - RNA, 19 nt, Homo sapiens
  misc_RNA (1)...(19): siRNA sense strand
gcuuuaacgcccuggagca

SEQ ID NO: 2243396 - RNA, 19 nt, Homo sapiens
  misc_RNA (1)...(19): siRNA sense strand
gcauauacuguguaggaga

SEQ ID NO: 2243397 - RNA, 19 nt, Homo sapiens
  misc_RNA (1)...(19): siRNA sense strand
ccacugagcugagggccua

SEQ ID NO: 2243398 - RNA, 19 nt, Homo sapiens
  misc_RNA (1)...(19): siRNA sense strand
caucaaucucauaaaggau

SEQ ID NO: 2243399 - RNA, 19 nt, Homo sapiens
  misc_RNA (1)...(19): siRNA sense strand
uccugaagcaagugggaga

SEQ ID NO: 2243400 - RNA, 19 nt, Homo sapiens
  misc_RNA (1)...(19): siRNA sense strand
gcuuuaacgcccuggagca

SEQ ID NO: 2243401 - RNA, 19 nt, Homo sapiens
  misc_RNA (1)...(19): siRNA sense strand
uauucaaggcaaagagaaa

SEQ ID NO: 2243402 - RNA, 19 nt, Homo sapiens
  misc_RNA (1)...(19): siRNA sense strand
uaugaaagaacaugggaga

SEQ ID NO: 2243403 - RNA, 19 nt, Homo sapiens
  misc_RNA (1)...(19): siRNA sense strand
gggaauugaaagaccaaca

SEQ ID NO: 2243404 - RNA, 19 nt, Homo sapiens
  misc_RNA (1)...(19): siRNA sense strand
agaaauuccccuagaagaa

SEQ ID NO: 2243405 - RNA, 19 nt, Homo sapiens
  misc_RNA (1)...(19): siRNA sense strand
uggaauacuuuguagagga

SEQ ID NO: 2243406 - RNA, 19 nt, Homo sapiens
  misc_RNA (1)...(19): siRNA sense strand
ccuauuagucagauuggaa

SEQ ID NO: 2243407 - RNA, 19 nt, Homo sapiens
  misc_RNA (1)...(19): siRNA sense strand
gcgaugggaaggaggcuau

SEQ ID NO: 2243408 - RNA, 19 nt, Homo sapiens
  misc_RNA (1)...(19): siRNA sense strand
gaccaagauuuaaagccua

SEQ ID NO: 2243409 - RNA, 19 nt, Homo sapiens
  misc_RNA (1)...(19): siRNA sense strand
augaagaaccugaaagaac

SEQ ID NO: 2243410 - RNA, 19 nt, Homo sapiens
  misc_RNA (1)...(19): siRNA sense strand
gcuuacauuaggaggcuau

SEQ ID NO: 2243411 - RNA, 19 nt, Homo sapiens
  misc_RNA (1)...(19): siRNA sense strand
acauucuauucaaggcaaa

SEQ ID NO: 2243412 - RNA, 19 nt, Homo sapiens
  misc_RNA (1)...(19): siRNA sense strand
caagaacaauggaagacca

SEQ ID NO: 2243413 - RNA, 19 nt, Homo sapiens
  misc_RNA (1)...(19): siRNA sense strand
aagaacaauggaagaccaa

SEQ ID NO: 2243414 - RNA, 19 nt, Homo sapiens
  misc_RNA (1)...(19): siRNA sense strand
uguacuugcucgugaaacu

SEQ ID NO: 2243415 - RNA, 19 nt, Homo sapiens
  misc_RNA (1)...(19): siRNA sense strand
aaagaguauuugagcacca

SEQ ID NO: 2243416 - RNA, 19 nt, Homo sapiens
  misc_RNA (1)...(19): siRNA sense strand
agaacuaagcgaugggaag

SEQ ID NO: 2243417 - RNA, 19 nt, Homo sapiens
  misc_RNA (1)...(19): siRNA sense strand
ccuuacaacuugcgaucca

SEQ ID NO: 2243418 - RNA, 19 nt, Homo sapiens
  misc_RNA (1)...(19): siRNA sense strand
ccugaaagaacuaagcgau

SEQ ID NO: 2243419 - RNA, 19 nt, Homo sapiens
  misc_RNA (1)...(19): siRNA sense strand
agaccaagauuuaaagccu

SEQ ID NO: 2243420 - RNA, 19 nt, Homo sapiens
  misc_RNA (1)...(19): siRNA sense strand
aaucaagacccuaaaggca

SEQ ID NO: 2243421 - RNA, 19 nt, Homo sapiens
  misc_RNA (1)...(19): siRNA sense strand
ccuaaaggcagcuaaaauu

SEQ ID NO: 2243422 - RNA, 19 nt, Homo sapiens
  misc_RNA (1)...(19): siRNA sense strand
augaaagccauuacaaaga

SEQ ID NO: 2243423 - RNA, 19 nt, Homo sapiens
  misc_RNA (1)...(19): siRNA sense strand
uggcuguauucauaagauu

SEQ ID NO: 2243424 - RNA, 19 nt, Homo sapiens
  misc_RNA (1)...(19): siRNA sense strand
gcgcauuuggauggcaaua

SEQ ID NO: 2243425 - RNA, 19 nt, Homo sapiens
  misc_RNA (1)...(19): siRNA sense strand
aguagauggaucaagaaca

SEQ ID NO: 2243426 - RNA, 19 nt, Homo sapiens
  misc_RNA (1)...(19): siRNA sense strand
ggaucaagaacaauggaag

SEQ ID NO: 2243427 - RNA, 19 nt, Homo sapiens
  misc_RNA (1)...(19): siRNA sense strand
uggacauacaagucgagaa

SEQ ID NO: 2243428 - RNA, 19 nt, Homo sapiens
  misc_RNA (1)...(19): siRNA sense strand
gacccuaaaggcagcuaaa

SEQ ID NO: 2243429 - RNA, 19 nt, Homo sapiens
  misc_RNA (1)...(19): siRNA sense strand
gcacuguacuugcucguga

SEQ ID NO: 2243430 - RNA, 19 nt, Homo sapiens
  misc_RNA (1)...(19): siRNA sense strand
cugaaagaacuaagcgaug

SEQ ID NO: 2243431 - RNA, 19 nt, Homo sapiens
  misc_RNA (1)...(19): siRNA sense strand
ggaauaaccucuugcagca

SEQ ID NO: 2243432 - RNA, 19 nt, Homo sapiens
  misc_RNA (1)...(19): siRNA sense strand
ucauggugguggauggcaa

SEQ ID NO: 2243433 - RNA, 19 nt, Homo sapiens
  misc_RNA (1)...(19): siRNA sense strand
ucggagauucgguggacua

SEQ ID NO: 2243434 - RNA, 19 nt, Homo sapiens
  misc_RNA (1)...(19): siRNA sense strand
ccucuggacuccuggguca

SEQ ID NO: 2243435 - RNA, 19 nt, Homo sapiens
  misc_RNA (1)...(19): siRNA sense strand
cagcgguccucuaggccua

SEQ ID NO: 2243436 - RNA, 19 nt, Homo sapiens
  misc_RNA (1)...(19): siRNA sense strand
gcacggaggaagacagcca

SEQ ID NO: 2243437 - RNA, 19 nt, Homo sapiens
  misc_RNA (1)...(19): siRNA sense strand
cagaugaccucuaucccaa

SEQ ID NO: 2243438 - RNA, 19 nt, Homo sapiens
  misc_RNA (1)...(19): siRNA sense strand
aagaugaguuucuccgcua

SEQ ID NO: 2243439 - RNA, 19 nt, Homo sapiens
  misc_RNA (1)...(19): siRNA sense strand
gggaauaccugcacccgaa

SEQ ID NO: 2243440 - RNA, 19 nt, Homo sapiens
  misc_RNA (1)...(19): siRNA sense strand
acuaugacgacgaggaauu

SEQ ID NO: 2243441 - RNA, 19 nt, Homo sapiens
  misc_RNA (1)...(19): siRNA sense strand
ccucaaugugcuaaagaga

SEQ ID NO: 2243442 - RNA, 19 nt, Homo sapiens
  misc_RNA (1)...(19): siRNA sense strand
cgaaagaauaugagugggu

SEQ ID NO: 2243443 - RNA, 19 nt, Homo sapiens
  misc_RNA (1)...(19): siRNA sense strand
cgguaccuguggagggaau

SEQ ID NO: 2243444 - RNA, 19 nt, Homo sapiens
  misc_RNA (1)...(19): siRNA sense strand
gcuucggagcugaaugaaa

SEQ ID NO: 2243445 - RNA, 19 nt, Homo sapiens
  misc_RNA (1)...(19): siRNA sense strand
ugccaauagugcugcgaau

SEQ ID NO: 2243446 - RNA, 19 nt, Homo sapiens
  misc_RNA (1)...(19): siRNA sense strand
gucucaugguguuggcuua

SEQ ID NO: 2243447 - RNA, 19 nt, Homo sapiens
  misc_RNA (1)...(19): siRNA sense strand
cugaugugcucgugaccau

SEQ ID NO: 2243448 - RNA, 19 nt, Homo sapiens
  misc_RNA (1)...(19): siRNA sense strand
gaaugaaacucaagagccc

SEQ ID NO: 2243449 - RNA, 19 nt, Homo sapiens
  misc_RNA (1)...(19): siRNA sense strand
auguuuaagagcacagcaa

SEQ ID NO: 2243450 - RNA, 19 nt, Homo sapiens
  misc_RNA (1)...(19): siRNA sense strand
cauacugaagacagagaga

SEQ ID NO: 2243451 - RNA, 19 nt, Homo sapiens
  misc_RNA (1)...(19): siRNA sense strand
uaaagagaguauuugggau

SEQ ID NO: 2243452 - RNA, 19 nt, Homo sapiens
  misc_RNA (1)...(19): siRNA sense strand
aucaaaacuuucugagcaa

SEQ ID NO: 2243453 - RNA, 19 nt, Homo sapiens
  misc_RNA (1)...(19): siRNA sense strand
aaagagaguauuugggaug

SEQ ID NO: 2243454 - RNA, 19 nt, Homo sapiens
  misc_RNA (1)...(19): siRNA sense strand
agaaagaaacagaggacaa

SEQ ID NO: 2243455 - RNA, 19 nt, Homo sapiens
  misc_RNA (1)...(19): siRNA sense strand
cguuaaggaagaagauaaa

SEQ ID NO: 2243456 - RNA, 19 nt, Homo sapiens
  misc_RNA (1)...(19): siRNA sense strand
gaagauaaauccaaggaca

SEQ ID NO: 2243457 - RNA, 19 nt, Homo sapiens
  misc_RNA (1)...(19): siRNA sense strand
acguuaaggaagaagauaa

SEQ ID NO: 2243458 - RNA, 19 nt, Homo sapiens
  misc_RNA (1)...(19): siRNA sense strand
gggcagauauuuaagccua

SEQ ID NO: 2243459 - RNA, 19 nt, Homo sapiens
  misc_RNA (1)...(19): siRNA sense strand
aagauaaauccaaggacaa

SEQ ID NO: 2243460 - RNA, 19 nt, Homo sapiens
  misc_RNA (1)...(19): siRNA sense strand
ccauaaagccacugccgaa

SEQ ID NO: 2243461 - RNA, 19 nt, Homo sapiens
  misc_RNA (1)...(19): siRNA sense strand
cagucaaggaggcggcaaa

SEQ ID NO: 2243462 - RNA, 19 nt, Homo sapiens
  misc_RNA (1)...(19): siRNA sense strand
gaucauaagaaaggagcaa

SEQ ID NO: 2243463 - RNA, 19 nt, Homo sapiens
  misc_RNA (1)...(19): siRNA sense strand
cguuaaugauauugugcuu

SEQ ID NO: 2243464 - RNA, 19 nt, Homo sapiens
  misc_RNA (1)...(19): siRNA sense strand
uggugaugguguugaagaa

SEQ ID NO: 2243465 - RNA, 19 nt, Homo sapiens
  misc_RNA (1)...(19): siRNA sense strand
caauaagaccagauaacau

SEQ ID NO: 2243466 - RNA, 19 nt, Homo sapiens
  misc_RNA (1)...(19): siRNA sense strand
gcacaggagacuugaggga

SEQ ID NO: 2243467 - RNA, 19 nt, Homo sapiens
  misc_RNA (1)...(19): siRNA sense strand
ccuauuaucucaaagguga

SEQ ID NO: 2243468 - RNA, 19 nt, Homo sapiens
  misc_RNA (1)...(19): siRNA sense strand
cugccgaagaaaugacaaa

SEQ ID NO: 2243469 - RNA, 19 nt, Homo sapiens
  misc_RNA (1)...(19): siRNA sense strand
cggugauauuggaaauuau

SEQ ID NO: 2243470 - RNA, 19 nt, Homo sapiens
  misc_RNA (1)...(19): siRNA sense strand
uaucaaauuucuacgguca

SEQ ID NO: 2243471 - RNA, 19 nt, Homo sapiens
  misc_RNA (1)...(19): siRNA sense strand
aggagaaggaggucgaaga

SEQ ID NO: 2243472 - RNA, 19 nt, Homo sapiens
  misc_RNA (1)...(19): siRNA sense strand
agaagauuguccagcguuu

SEQ ID NO: 2243473 - RNA, 19 nt, Homo sapiens
  misc_RNA (1)...(19): siRNA sense strand
aaucagaacagcucagcaa

SEQ ID NO: 2243474 - RNA, 19 nt, Homo sapiens
  misc_RNA (1)...(19): siRNA sense strand
ucaugaagacaguggagau

SEQ ID NO: 2243475 - RNA, 19 nt, Homo sapiens
  misc_RNA (1)...(19): siRNA sense strand
agcuagaauugaagaagau

SEQ ID NO: 2243476 - RNA, 19 nt, Homo sapiens
  misc_RNA (1)...(19): siRNA sense strand
agacaguggagaugaagau

SEQ ID NO: 2243477 - RNA, 19 nt, Homo sapiens
  misc_RNA (1)...(19): siRNA sense strand
ggaugaaggagaaggaggu

SEQ ID NO: 2243478 - RNA, 19 nt, Homo sapiens
  misc_RNA (1)...(19): siRNA sense strand
aggaagaagauaaauccaa

SEQ ID NO: 2243479 - RNA, 19 nt, Homo sapiens
  misc_RNA (1)...(19): siRNA sense strand
gggauauuggugcuggaaa

SEQ ID NO: 2243480 - RNA, 19 nt, Homo sapiens
  misc_RNA (1)...(19): siRNA sense strand
gaaagcuagaauugaagaa

SEQ ID NO: 2243481 - RNA, 19 nt, Homo sapiens
  misc_RNA (1)...(19): siRNA sense strand
cauauuaguccuucaaaca

SEQ ID NO: 2243482 - RNA, 19 nt, Homo sapiens
  misc_RNA (1)...(19): siRNA sense strand
guggagaugaagauggaga

SEQ ID NO: 2243483 - RNA, 19 nt, Homo sapiens
  misc_RNA (1)...(19): siRNA sense strand
agauaacaugucugaguau

SEQ ID NO: 2243484 - RNA, 19 nt, Homo sapiens
  misc_RNA (1)...(19): siRNA sense strand
uggagaugaagauggagaa

SEQ ID NO: 2243485 - RNA, 19 nt, Homo sapiens
  misc_RNA (1)...(19): siRNA sense strand
cagucaaaggucaugcuaa

SEQ ID NO: 2243486 - RNA, 19 nt, Homo sapiens
  misc_RNA (1)...(19): siRNA sense strand
gagaaggaggucgaagaaa

SEQ ID NO: 2243487 - RNA, 19 nt, Homo sapiens
  misc_RNA (1)...(19): siRNA sense strand
gcuacuacuacgacgguga

SEQ ID NO: 2243488 - RNA, 19 nt, Homo sapiens
  misc_RNA (1)...(19): siRNA sense strand
cugugaaguuaaaccgaca

SEQ ID NO: 2243489 - RNA, 19 nt, Homo sapiens
  misc_RNA (1)...(19): siRNA sense strand
auucugaggaugaaggaga

SEQ ID NO: 2243490 - RNA, 19 nt, Homo sapiens
  misc_RNA (1)...(19): siRNA sense strand
ugaaggagaaggaggucga

SEQ ID NO: 2243491 - RNA, 19 nt, Homo sapiens
  misc_RNA (1)...(19): siRNA sense strand
auaagaaaggagcaaagaa

SEQ ID NO: 2243492 - RNA, 19 nt, Homo sapiens
  misc_RNA (1)...(19): siRNA sense strand
guaagcagaugcauauauu

SEQ ID NO: 2243493 - RNA, 19 nt, Homo sapiens
  misc_RNA (1)...(19): siRNA sense strand
gagcaucagacaagcggau

SEQ ID NO: 2243494 - RNA, 19 nt, Homo sapiens
  misc_RNA (1)...(19): siRNA sense strand
auaguaagcagaugcauau

SEQ ID NO: 2243495 - RNA, 19 nt, Homo sapiens
  misc_RNA (1)...(19): siRNA sense strand
uggaaaaggcaaauacuau

SEQ ID NO: 2243496 - RNA, 19 nt, Homo sapiens
  misc_RNA (1)...(19): siRNA sense strand
ggcagauauuuaagccuau

SEQ ID NO: 2243497 - RNA, 19 nt, Homo sapiens
  misc_RNA (1)...(19): siRNA sense strand
ugcccuugauugugagauu

SEQ ID NO: 2243498 - RNA, 19 nt, Homo sapiens
  misc_RNA (1)...(19): siRNA sense strand
gcauauuaguccuucaaac

SEQ ID NO: 2243499 - RNA, 19 nt, Homo sapiens
  misc_RNA (1)...(19): siRNA sense strand
ggaagaagauaaauccaag

SEQ ID NO: 2243500 - RNA, 19 nt, Homo sapiens
  misc_RNA (1)...(19): siRNA sense strand
ccguaauguugcucgaugu

SEQ ID NO: 2243501 - RNA, 19 nt, Homo sapiens
  misc_RNA (1)...(19): siRNA sense strand
gucaauaagaccagauaac

SEQ ID NO: 2243502 - RNA, 19 nt, Homo sapiens
  misc_RNA (1)...(19): siRNA sense strand
uggcuuaccucuacggcau

SEQ ID NO: 2243503 - RNA, 19 nt, Homo sapiens
  misc_RNA (1)...(19): siRNA sense strand
ccgcaggacacaagugcca

SEQ ID NO: 2243504 - RNA, 19 nt, Homo sapiens
  misc_RNA (1)...(19): siRNA sense strand
ccggcuacuucgacugcaa

SEQ ID NO: 2243505 - RNA, 19 nt, Homo sapiens
  misc_RNA (1)...(19): siRNA sense strand
aggcacaagaagaggacgu

SEQ ID NO: 2243506 - RNA, 19 nt, Homo sapiens
  misc_RNA (1)...(19): siRNA sense strand
uggaacagugcgagugcuu

SEQ ID NO: 2243507 - RNA, 19 nt, Homo sapiens
  misc_RNA (1)...(19): siRNA sense strand
cagaaauggccuugugaaa

SEQ ID NO: 2243508 - RNA, 19 nt, Homo sapiens
  misc_RNA (1)...(19): siRNA sense strand
caugaggaaaugagagaaa

SEQ ID NO: 2243509 - RNA, 19 nt, Homo sapiens
  misc_RNA (1)...(19): siRNA sense strand
ccuaauagucccagugaau

SEQ ID NO: 2243510 - RNA, 19 nt, Homo sapiens
  misc_RNA (1)...(19): siRNA sense strand
cugaagacacagaagcaaa

SEQ ID NO: 2243511 - RNA, 19 nt, Homo sapiens
  misc_RNA (1)...(19): siRNA sense strand
ugaacaaauacaugggauu

SEQ ID NO: 2243512 - RNA, 19 nt, Homo sapiens
  misc_RNA (1)...(19): siRNA sense strand
gcuauuugcgugugaggaa

SEQ ID NO: 2243513 - RNA, 19 nt, Homo sapiens
  misc_RNA (1)...(19): siRNA sense strand
gggauaugagccagaagaa

SEQ ID NO: 2243514 - RNA, 19 nt, Homo sapiens
  misc_RNA (1)...(19): siRNA sense strand
acaugaaagcacagaugaa

SEQ ID NO: 2243515 - RNA, 19 nt, Homo sapiens
  misc_RNA (1)...(19): siRNA sense strand
ccuaacuagccgaggaaga

SEQ ID NO: 2243516 - RNA, 19 nt, Homo sapiens
  misc_RNA (1)...(19): siRNA sense strand
gugcauuguaugugugaau

SEQ ID NO: 2243517 - RNA, 19 nt, Homo sapiens
  misc_RNA (1)...(19): siRNA sense strand
ugcagaaugcucagagaaa

SEQ ID NO: 2243518 - RNA, 19 nt, Homo sapiens
  misc_RNA (1)...(19): siRNA sense strand
cgauggaagcacuagacaa

SEQ ID NO: 2243519 - RNA, 19 nt, Homo sapiens
  misc_RNA (1)...(19): siRNA sense strand
guacaggaugcuugccaaa

SEQ ID NO: 2243520 - RNA, 19 nt, Homo sapiens
  misc_RNA (1)...(19): siRNA sense strand
caguuaugauugugaaguu

SEQ ID NO: 2243521 - RNA, 19 nt, Homo sapiens
  misc_RNA (1)...(19): siRNA sense strand
ucaucaccauauagagaua

SEQ ID NO: 2243522 - RNA, 19 nt, Homo sapiens
  misc_RNA (1)...(19): siRNA sense strand
aguuaaugcuccuauacaa

SEQ ID NO: 2243523 - RNA, 19 nt, Homo sapiens
  misc_RNA (1)...(19): siRNA sense strand
gaggaagaacuaugaacau

SEQ ID NO: 2243524 - RNA, 19 nt, Homo sapiens
  misc_RNA (1)...(19): siRNA sense strand
uaauagucccagugaauau

SEQ ID NO: 2243525 - RNA, 19 nt, Homo sapiens
  misc_RNA (1)...(19): siRNA sense strand
agaaccaaauccagaguca

SEQ ID NO: 2243526 - RNA, 19 nt, Homo sapiens
  misc_RNA (1)...(19): siRNA sense strand
ggguauaagaaaccaccua

SEQ ID NO: 2243527 - RNA, 19 nt, Homo sapiens
  misc_RNA (1)...(19): siRNA sense strand
uugacaaacuuaagaagga

SEQ ID NO: 2243528 - RNA, 19 nt, Homo sapiens
  misc_RNA (1)...(19): siRNA sense strand
aguuggaauugguagaaaa

SEQ ID NO: 2243529 - RNA, 19 nt, Homo sapiens
  misc_RNA (1)...(19): siRNA sense strand
gucauagaacagacagaaa

SEQ ID NO: 2243530 - RNA, 19 nt, Homo sapiens
  misc_RNA (1)...(19): siRNA sense strand
gaaaccuacugcaggguga

SEQ ID NO: 2243531 - RNA, 19 nt, Homo sapiens
  misc_RNA (1)...(19): siRNA sense strand
cgaggaagaacuaugaaca

SEQ ID NO: 2243532 - RNA, 19 nt, Homo sapiens
  misc_RNA (1)...(19): siRNA sense strand
acacagaaacugaugacca

SEQ ID NO: 2243533 - RNA, 19 nt, Homo sapiens
  misc_RNA (1)...(19): siRNA sense strand
aauggaugaaaguggauua

SEQ ID NO: 2243534 - RNA, 19 nt, Homo sapiens
  misc_RNA (1)...(19): siRNA sense strand
ccacaggacaguacaggau

SEQ ID NO: 2243535 - RNA, 19 nt, Homo sapiens
  misc_RNA (1)...(19): siRNA sense strand
caccaaacagagcaggaaa

SEQ ID NO: 2243536 - RNA, 19 nt, Homo sapiens
  misc_RNA (1)...(19): siRNA sense strand
ccuuaaaccgguugaaucu

SEQ ID NO: 2243537 - RNA, 19 nt, Homo sapiens
  misc_RNA (1)...(19): siRNA sense strand
ccaagaagcccuaacgugu

SEQ ID NO: 2243538 - RNA, 19 nt, Homo sapiens
  misc_RNA (1)...(19): siRNA sense strand
auuuagacuuggagauguu

SEQ ID NO: 2243539 - RNA, 19 nt, Homo sapiens
  misc_RNA (1)...(19): siRNA sense strand
gugaacaaauacaugggau

SEQ ID NO: 2243540 - RNA, 19 nt, Homo sapiens
  misc_RNA (1)...(19): siRNA sense strand
caaaagaccguauggaaga

SEQ ID NO: 2243541 - RNA, 19 nt, Homo sapiens
  misc_RNA (1)...(19): siRNA sense strand
augaaagcacagaugaauu

SEQ ID NO: 2243542 - RNA, 19 nt, Homo sapiens
  misc_RNA (1)...(19): siRNA sense strand
agagaaaugcuuacacaca

SEQ ID NO: 2243543 - RNA, 19 nt, Homo sapiens
  misc_RNA (1)...(19): siRNA sense strand
ggguaaagaacaaaacaca

SEQ ID NO: 2243544 - RNA, 19 nt, Homo sapiens
  misc_RNA (1)...(19): siRNA sense strand
auacaagaaccuacugcua

SEQ ID NO: 2243545 - RNA, 19 nt, Homo sapiens
  misc_RNA (1)...(19): siRNA sense strand
ugccaaaagagguggauau

SEQ ID NO: 2243546 - RNA, 19 nt, Homo sapiens
  misc_RNA (1)...(19): siRNA sense strand
caaaguugaaucagaagau

SEQ ID NO: 2243547 - RNA, 19 nt, Homo sapiens
  misc_RNA (1)...(19): siRNA sense strand
gggcaaucaauggaugaaa

SEQ ID NO: 2243548 - RNA, 19 nt, Homo sapiens
  misc_RNA (1)...(19): siRNA sense strand
agaaaugcuuacacacaga

SEQ ID NO: 2243549 - RNA, 19 nt, Homo sapiens
  misc_RNA (1)...(19): siRNA sense strand
cagauuuagacuuggagau

SEQ ID NO: 2243550 - RNA, 19 nt, Homo sapiens
  misc_RNA (1)...(19): siRNA sense strand
agauacuagcuuugcagaa

SEQ ID NO: 2243551 - RNA, 19 nt, Homo sapiens
  misc_RNA (1)...(19): siRNA sense strand
agaaaagucucgagaugca

SEQ ID NO: 2243552 - RNA, 19 nt, Homo sapiens
  misc_RNA (1)...(19): siRNA sense strand
ucugcaacauggaagguau

SEQ ID NO: 2243553 - RNA, 19 nt, Homo sapiens
  misc_RNA (1)...(19): siRNA sense strand
guggauagugauaugguca

SEQ ID NO: 2243554 - RNA, 19 nt, Homo sapiens
  misc_RNA (1)...(19): siRNA sense strand
ggauagugauauggucaau

SEQ ID NO: 2243555 - RNA, 19 nt, Homo sapiens
  misc_RNA (1)...(19): siRNA sense strand
gagucauagaacagacaga

SEQ ID NO: 2243556 - RNA, 19 nt, Homo sapiens
  misc_RNA (1)...(19): siRNA sense strand
gaacaaaacacacagcgaa

SEQ ID NO: 2243557 - RNA, 19 nt, Homo sapiens
  misc_RNA (1)...(19): siRNA sense strand
aguugaaucagaagauaca

SEQ ID NO: 2243558 - RNA, 19 nt, Homo sapiens
  misc_RNA (1)...(19): siRNA sense strand
ugaccagcaacuugaggaa

SEQ ID NO: 2243559 - RNA, 19 nt, Homo sapiens
  misc_RNA (1)...(19): siRNA sense strand
cuaacuagccgaggaagaa

SEQ ID NO: 2243560 - RNA, 19 nt, Homo sapiens
  misc_RNA (1)...(19): siRNA sense strand
ucauagaacagacagaaaa

SEQ ID NO: 2243561 - RNA, 19 nt, Homo sapiens
  misc_RNA (1)...(19): siRNA sense strand
cguugugagugguauuauu

SEQ ID NO: 2243562 - RNA, 19 nt, Homo sapiens
  misc_RNA (1)...(19): siRNA sense strand
cagcaacgacacagaaacu

SEQ ID NO: 2243563 - RNA, 19 nt, Homo sapiens
  misc_RNA (1)...(19): siRNA sense strand
gcacagaugaauugcuuuu

SEQ ID NO: 2243564 - RNA, 19 nt, Homo sapiens
  misc_RNA (1)...(19): siRNA sense strand
gaaucagaagauacaagua

SEQ ID NO: 2243565 - RNA, 19 nt, Homo sapiens
  misc_RNA (1)...(19): siRNA sense strand
cagaaauggccuugugaaa

SEQ ID NO: 2243566 - RNA, 19 nt, Homo sapiens
  misc_RNA (1)...(19): siRNA sense strand
caugaggaaaugagagaaa

SEQ ID NO: 2243567 - RNA, 19 nt, Homo sapiens
  misc_RNA (1)...(19): siRNA sense strand
ccuaauagucccagugaau

SEQ ID NO: 2243568 - RNA, 19 nt, Homo sapiens
  misc_RNA (1)...(19): siRNA sense strand
cugaagacacagaagcaaa

SEQ ID NO: 2243569 - RNA, 19 nt, Homo sapiens
  misc_RNA (1)...(19): siRNA sense strand
ugaacaaauacaugggauu

SEQ ID NO: 2243570 - RNA, 19 nt, Homo sapiens
  misc_RNA (1)...(19): siRNA sense strand
gcuauuugcgugugaggaa

SEQ ID NO: 2243571 - RNA, 19 nt, Homo sapiens
  misc_RNA (1)...(19): siRNA sense strand
gggauaugagccagaagaa

SEQ ID NO: 2243572 - RNA, 19 nt, Homo sapiens
  misc_RNA (1)...(19): siRNA sense strand
acaugaaagcacagaugaa

SEQ ID NO: 2243573 - RNA, 19 nt, Homo sapiens
  misc_RNA (1)...(19): siRNA sense strand
ccuaacuagccgaggaaga

SEQ ID NO: 2243574 - RNA, 19 nt, Homo sapiens
  misc_RNA (1)...(19): siRNA sense strand
gugcauuguaugugugaau

SEQ ID NO: 2243575 - RNA, 19 nt, Homo sapiens
  misc_RNA (1)...(19): siRNA sense strand
ugcagaaugcucagagaaa

SEQ ID NO: 2243576 - RNA, 19 nt, Homo sapiens
  misc_RNA (1)...(19): siRNA sense strand
cgauggaagcacuagacaa

SEQ ID NO: 2243577 - RNA, 19 nt, Homo sapiens
  misc_RNA (1)...(19): siRNA sense strand
guacaggaugcuugccaaa

SEQ ID NO: 2243578 - RNA, 19 nt, Homo sapiens
  misc_RNA (1)...(19): siRNA sense strand
ucaucaccauauagagaua

SEQ ID NO: 2243579 - RNA, 19 nt, Homo sapiens
  misc_RNA (1)...(19): siRNA sense strand
gaggaagaacuaugaacau

SEQ ID NO: 2243580 - RNA, 19 nt, Homo sapiens
  misc_RNA (1)...(19): siRNA sense strand
uaauagucccagugaauau

SEQ ID NO: 2243581 - RNA, 19 nt, Homo sapiens
  misc_RNA (1)...(19): siRNA sense strand
agaaccaaauccagaguca

SEQ ID NO: 2243582 - RNA, 19 nt, Homo sapiens
  misc_RNA (1)...(19): siRNA sense strand
ggguauaagaaaccaccua

SEQ ID NO: 2243583 - RNA, 19 nt, Homo sapiens
  misc_RNA (1)...(19): siRNA sense strand
uugacaaacuuaagaagga

SEQ ID NO: 2243584 - RNA, 19 nt, Homo sapiens
  misc_RNA (1)...(19): siRNA sense strand
aguuggaauugguagaaaa

SEQ ID NO: 2243585 - RNA, 19 nt, Homo sapiens
  misc_RNA (1)...(19): siRNA sense strand
gucauagaacagacagaaa

SEQ ID NO: 2243586 - RNA, 19 nt, Homo sapiens
  misc_RNA (1)...(19): siRNA sense strand
cgaggaagaacuaugaaca

SEQ ID NO: 2243587 - RNA, 19 nt, Homo sapiens
  misc_RNA (1)...(19): siRNA sense strand
acacagaaacugaugacca

SEQ ID NO: 2243588 - RNA, 19 nt, Homo sapiens
  misc_RNA (1)...(19): siRNA sense strand
ccacaggacaguacaggau

SEQ ID NO: 2243589 - RNA, 19 nt, Homo sapiens
  misc_RNA (1)...(19): siRNA sense strand
caccaaacagagcaggaaa

SEQ ID NO: 2243590 - RNA, 19 nt, Homo sapiens
  misc_RNA (1)...(19): siRNA sense strand
ccuuaaaccgguugaaucu

SEQ ID NO: 2243591 - RNA, 19 nt, Homo sapiens
  misc_RNA (1)...(19): siRNA sense strand
ccaagaagcccuaacgugu

SEQ ID NO: 2243592 - RNA, 19 nt, Homo sapiens
  misc_RNA (1)...(19): siRNA sense strand
auuuagacuuggagauguu

SEQ ID NO: 2243593 - RNA, 19 nt, Homo sapiens
  misc_RNA (1)...(19): siRNA sense strand
gugaacaaauacaugggau

SEQ ID NO: 2243594 - RNA, 19 nt, Homo sapiens
  misc_RNA (1)...(19): siRNA sense strand
caaaagaccguauggaaga

SEQ ID NO: 2243595 - RNA, 19 nt, Homo sapiens
  misc_RNA (1)...(19): siRNA sense strand
augaaagcacagaugaauu

SEQ ID NO: 2243596 - RNA, 19 nt, Homo sapiens
  misc_RNA (1)...(19): siRNA sense strand
agagaaaugcuuacacaca

SEQ ID NO: 2243597 - RNA, 19 nt, Homo sapiens
  misc_RNA (1)...(19): siRNA sense strand
ggguaaagaacaaaacaca

SEQ ID NO: 2243598 - RNA, 19 nt, Homo sapiens
  misc_RNA (1)...(19): siRNA sense strand
auacaagaaccuacugcua

SEQ ID NO: 2243599 - RNA, 19 nt, Homo sapiens
  misc_RNA (1)...(19): siRNA sense strand
ugccaaaagagguggauau

SEQ ID NO: 2243600 - RNA, 19 nt, Homo sapiens
  misc_RNA (1)...(19): siRNA sense strand
caaaguugaaucagaagau

SEQ ID NO: 2243601 - RNA, 19 nt, Homo sapiens
  misc_RNA (1)...(19): siRNA sense strand
agaaaugcuuacacacaga

SEQ ID NO: 2243602 - RNA, 19 nt, Homo sapiens
  misc_RNA (1)...(19): siRNA sense strand
cagauuuagacuuggagau

SEQ ID NO: 2243603 - RNA, 19 nt, Homo sapiens
  misc_RNA (1)...(19): siRNA sense strand
agauacuagcuuugcagaa

SEQ ID NO: 2243604 - RNA, 19 nt, Homo sapiens
  misc_RNA (1)...(19): siRNA sense strand
agaaaagucucgagaugca

SEQ ID NO: 2243605 - RNA, 19 nt, Homo sapiens
  misc_RNA (1)...(19): siRNA sense strand
ucugcaacauggaagguau

SEQ ID NO: 2243606 - RNA, 19 nt, Homo sapiens
  misc_RNA (1)...(19): siRNA sense strand
guggauagugauaugguca

SEQ ID NO: 2243607 - RNA, 19 nt, Homo sapiens
  misc_RNA (1)...(19): siRNA sense strand
ggauagugauauggucaau

SEQ ID NO: 2243608 - RNA, 19 nt, Homo sapiens
  misc_RNA (1)...(19): siRNA sense strand
gagucauagaacagacaga

SEQ ID NO: 2243609 - RNA, 19 nt, Homo sapiens
  misc_RNA (1)...(19): siRNA sense strand
gaacaaaacacacagcgaa

SEQ ID NO: 2243610 - RNA, 19 nt, Homo sapiens
  misc_RNA (1)...(19): siRNA sense strand
aguugaaucagaagauaca

SEQ ID NO: 2243611 - RNA, 19 nt, Homo sapiens
  misc_RNA (1)...(19): siRNA sense strand
ugaccagcaacuugaggaa

SEQ ID NO: 2243612 - RNA, 19 nt, Homo sapiens
  misc_RNA (1)...(19): siRNA sense strand
cuaacuagccgaggaagaa

SEQ ID NO: 2243613 - RNA, 19 nt, Homo sapiens
  misc_RNA (1)...(19): siRNA sense strand
ucauagaacagacagaaaa

SEQ ID NO: 2243614 - RNA, 19 nt, Homo sapiens
  misc_RNA (1)...(19): siRNA sense strand
cguugugagugguauuauu

SEQ ID NO: 2243615 - RNA, 19 nt, Homo sapiens
  misc_RNA (1)...(19): siRNA sense strand
cagcaacgacacagaaacu

SEQ ID NO: 2243616 - RNA, 19 nt, Homo sapiens
  misc_RNA (1)...(19): siRNA sense strand
gcacagaugaauugcuuuu

SEQ ID NO: 2243617 - RNA, 19 nt, Homo sapiens
  misc_RNA (1)...(19): siRNA sense strand
gaaucagaagauacaagua

SEQ ID NO: 2243618 - RNA, 19 nt, Homo sapiens
  misc_RNA (1)...(19): siRNA sense strand
agaaacugaugaccagcaa

SEQ ID NO: 2243619 - RNA, 19 nt, Homo sapiens
  misc_RNA (1)...(19): siRNA sense strand
ucaaguuggaauugguaga

SEQ ID NO: 2243620 - RNA, 19 nt, Homo sapiens
  misc_RNA (1)...(19): siRNA sense strand
gacaaaagaccguauggaa

SEQ ID NO: 2243621 - RNA, 19 nt, Homo sapiens
  misc_RNA (1)...(19): siRNA sense strand
acucaaagucggacagccu

SEQ ID NO: 2243622 - RNA, 19 nt, Homo sapiens
  misc_RNA (1)...(19): siRNA sense strand
cugcaacauggaagguauu

SEQ ID NO: 2243623 - RNA, 19 nt, Homo sapiens
  misc_RNA (1)...(19): siRNA sense strand
cuuuagauagcaagacuuu

SEQ ID NO: 2243624 - RNA, 19 nt, Homo sapiens
  misc_RNA (1)...(19): siRNA sense strand
gcgaaguaaagaaucugaa

SEQ ID NO: 2243625 - RNA, 19 nt, Homo sapiens
  misc_RNA (1)...(19): siRNA sense strand
aggcuuaccaucagcuauu

SEQ ID NO: 2243626 - RNA, 19 nt, Homo sapiens
  misc_RNA (1)...(19): siRNA sense strand
uggaagcacuagacaaagu

SEQ ID NO: 2243627 - RNA, 19 nt, Homo sapiens
  misc_RNA (1)...(19): siRNA sense strand
caguauuccagcagacuca

SEQ ID NO: 2243628 - RNA, 19 nt, Homo sapiens
  misc_RNA (1)...(19): siRNA sense strand
agucauacggguuggaaga

SEQ ID NO: 2243629 - RNA, 19 nt, Homo sapiens
  misc_RNA (1)...(19): siRNA sense strand
ugaaaguauucucaggcaa

SEQ ID NO: 2243630 - RNA, 19 nt, Homo sapiens
  misc_RNA (1)...(19): siRNA sense strand
ccaacaaacgccagaggca

SEQ ID NO: 2243631 - RNA, 19 nt, Homo sapiens
  misc_RNA (1)...(19): siRNA sense strand
uggaggugaccgaggagaa

SEQ ID NO: 2243632 - RNA, 19 nt, Homo sapiens
  misc_RNA (1)...(19): siRNA sense strand
uggagauggcugauggcua

SEQ ID NO: 2243633 - RNA, 19 nt, Homo sapiens
  misc_RNA (1)...(19): siRNA sense strand
cuugcaacgcagugaacua

SEQ ID NO: 2243634 - RNA, 19 nt, Homo sapiens
  misc_RNA (1)...(19): siRNA sense strand
aaauauacauugcugguca

SEQ ID NO: 2243635 - RNA, 19 nt, Homo sapiens
  misc_RNA (1)...(19): siRNA sense strand
auguggagaaggugaaauu

SEQ ID NO: 2243636 - RNA, 19 nt, Homo sapiens
  misc_RNA (1)...(19): siRNA sense strand
ggagauggcugauggcuac

SEQ ID NO: 2243637 - RNA, 19 nt, Homo sapiens
  misc_RNA (1)...(19): siRNA sense strand
gaucaggauacuugggacu

SEQ ID NO: 2243638 - RNA, 19 nt, Homo sapiens
  misc_RNA (1)...(19): siRNA sense strand
agaauggaguucaggcgau

SEQ ID NO: 2243639 - RNA, 19 nt, Homo sapiens
  misc_RNA (1)...(19): siRNA sense strand
ugaagaucgaauacgcaaa

SEQ ID NO: 2243640 - RNA, 19 nt, Homo sapiens
  misc_RNA (1)...(19): siRNA sense strand
ggacugcuggagugggaau

SEQ ID NO: 2243641 - RNA, 19 nt, Homo sapiens
  misc_RNA (1)...(19): siRNA sense strand
cugaagaucgaauacgcaa

SEQ ID NO: 2243642 - RNA, 19 nt, Homo sapiens
  misc_RNA (1)...(19): siRNA sense strand
ggucuauggcuuggaucaa

SEQ ID NO: 2243643 - RNA, 19 nt, Homo sapiens
  misc_RNA (1)...(19): siRNA sense strand
caagauaccugccacgcaa

SEQ ID NO: 2243644 - RNA, 19 nt, Homo sapiens
  misc_RNA (1)...(19): siRNA sense strand
caagauaaauuucagacca

SEQ ID NO: 2243645 - RNA, 19 nt, Homo sapiens
  misc_RNA (1)...(19): siRNA sense strand
ugaccagaucauugggaga

SEQ ID NO: 2243646 - RNA, 19 nt, Homo sapiens
  misc_RNA (1)...(19): siRNA sense strand
gaguagucgcauugaugau

SEQ ID NO: 2243647 - RNA, 19 nt, Homo sapiens
  misc_RNA (1)...(19): siRNA sense strand
ggguggaagaacuggaaag

SEQ ID NO: 2243648 - RNA, 19 nt, Homo sapiens
  misc_RNA (1)...(19): siRNA sense strand
augcaggaggcaagagaaa

SEQ ID NO: 2243649 - RNA, 19 nt, Homo sapiens
  misc_RNA (1)...(19): siRNA sense strand
gagcaaugcaggaggcaag

SEQ ID NO: 2243650 - RNA, 19 nt, Homo sapiens
  misc_RNA (1)...(19): siRNA sense strand
aggccauccuggaagggaa

SEQ ID NO: 2243651 - RNA, 19 nt, Homo sapiens
  misc_RNA (1)...(19): siRNA sense strand
ggccauccuggaagggaaa

SEQ ID NO: 2243652 - RNA, 19 nt, Homo sapiens
  misc_RNA (1)...(19): siRNA sense strand
aagcauagcaacauggcga

SEQ ID NO: 2243653 - RNA, 19 nt, Homo sapiens
  misc_RNA (1)...(19): siRNA sense strand
gggcgagaauggacccuga

SEQ ID NO: 2243654 - RNA, 19 nt, Homo sapiens
  misc_RNA (1)...(19): siRNA sense strand
cccucaagaaaguguggaa

SEQ ID NO: 2243655 - RNA, 19 nt, Homo sapiens
  misc_RNA (1)...(19): siRNA sense strand
gaauggacccugauggacu

SEQ ID NO: 2243656 - RNA, 19 nt, Homo sapiens
  misc_RNA (1)...(19): siRNA sense strand
gcgcaaagccccaagggua

SEQ ID NO: 2243657 - RNA, 19 nt, Homo sapiens
  misc_RNA (1)...(19): siRNA sense strand
cuaugaagucccaggcgua

SEQ ID NO: 2243658 - RNA, 19 nt, Homo sapiens
  misc_RNA (1)...(19): siRNA sense strand
cggcaaggcaagacgcuca

SEQ ID NO: 2243659 - RNA, 19 nt, Homo sapiens
  misc_RNA (1)...(19): siRNA sense strand
gucuuaaagggcaggaaau

SEQ ID NO: 2243660 - RNA, 19 nt, Homo sapiens
  misc_RNA (1)...(19): siRNA sense strand
agguguucccggugggcua

SEQ ID NO: 2243661 - RNA, 19 nt, Homo sapiens
  misc_RNA (1)...(19): siRNA sense strand
ggaaauacacuuugcgcug

SEQ ID NO: 2243662 - RNA, 19 nt, Homo sapiens
  misc_RNA (1)...(19): siRNA sense strand
aggcauggaagccggguca

SEQ ID NO: 2243663 - RNA, 19 nt, Homo sapiens
  misc_RNA (1)...(19): siRNA sense strand
gcgcaaagccccaagggua

SEQ ID NO: 2243664 - RNA, 19 nt, Homo sapiens
  misc_RNA (1)...(19): siRNA sense strand
cggcaaggcaagacgcuca

SEQ ID NO: 2243665 - RNA, 19 nt, Homo sapiens
  misc_RNA (1)...(19): siRNA sense strand
gucuuaaagggcaggaaau

SEQ ID NO: 2243666 - RNA, 19 nt, Homo sapiens
  misc_RNA (1)...(19): siRNA sense strand
agguguucccggugggcua

SEQ ID NO: 2243667 - RNA, 19 nt, Homo sapiens
  misc_RNA (1)...(19): siRNA sense strand
ggaaauacacuuugcgcug

SEQ ID NO: 2243668 - RNA, 19 nt, Homo sapiens
  misc_RNA (1)...(19): siRNA sense strand
aggcauggaagccggguca

SEQ ID NO: 2243669 - RNA, 19 nt, Homo sapiens
  misc_RNA (1)...(19): siRNA sense strand
cccgaauggugcaaagcaa

SEQ ID NO: 2243670 - RNA, 19 nt, Homo sapiens
  misc_RNA (1)...(19): siRNA sense strand
gcaucuacagccuggacaa

SEQ ID NO: 2243671 - RNA, 19 nt, Homo sapiens
  misc_RNA (1)...(19): siRNA sense strand
gaagauagccaucacgcau

SEQ ID NO: 2243672 - RNA, 19 nt, Homo sapiens
  misc_RNA (1)...(19): siRNA sense strand
gcuguaaagacaagcagga

SEQ ID NO: 2243673 - RNA, 19 nt, Homo sapiens
  misc_RNA (1)...(19): siRNA sense strand
aggcuaaaauacagagaua

SEQ ID NO: 2243674 - RNA, 19 nt, Homo sapiens
  misc_RNA (1)...(19): siRNA sense strand
aggaagaacaagaagaaaa

SEQ ID NO: 2243675 - RNA, 19 nt, Homo sapiens
  misc_RNA (1)...(19): siRNA sense strand
aggaagaggaugaugaaca

SEQ ID NO: 2243676 - RNA, 19 nt, Homo sapiens
  misc_RNA (1)...(19): siRNA sense strand
aggcagcaccagaggaauu

SEQ ID NO: 2243677 - RNA, 19 nt, Homo sapiens
  misc_RNA (1)...(19): siRNA sense strand
gcuaaaauacagagauaca

SEQ ID NO: 2243678 - RNA, 19 nt, Homo sapiens
  misc_RNA (1)...(19): siRNA sense strand
ugggaugacuggaaggaca

SEQ ID NO: 2243679 - RNA, 19 nt, Homo sapiens
  misc_RNA (1)...(19): siRNA sense strand
aagaagaaaaggaggaaga

SEQ ID NO: 2243680 - RNA, 19 nt, Homo sapiens
  misc_RNA (1)...(19): siRNA sense strand
cagaaaagcagcucagcaa

SEQ ID NO: 2243681 - RNA, 19 nt, Homo sapiens
  misc_RNA (1)...(19): siRNA sense strand
agaagaaggaguuggagca

SEQ ID NO: 2243682 - RNA, 19 nt, Homo sapiens
  misc_RNA (1)...(19): siRNA sense strand
auacagagauacaagcaga

SEQ ID NO: 2243683 - RNA, 19 nt, Homo sapiens
  misc_RNA (1)...(19): siRNA sense strand
agaagguguucaagggcuu

SEQ ID NO: 2243684 - RNA, 19 nt, Homo sapiens
  misc_RNA (1)...(19): siRNA sense strand
gguaugagcaacaucggaa

SEQ ID NO: 2243685 - RNA, 19 nt, Homo sapiens
  misc_RNA (1)...(19): siRNA sense strand
augaagauuuggaagagau

SEQ ID NO: 2243686 - RNA, 19 nt, Homo sapiens
  misc_RNA (1)...(19): siRNA sense strand
aggaggaagaggaugauga

SEQ ID NO: 2243687 - RNA, 19 nt, Homo sapiens
  misc_RNA (1)...(19): siRNA sense strand
aaaaggaggaagaggauga

SEQ ID NO: 2243688 - RNA, 19 nt, Homo sapiens
  misc_RNA (1)...(19): siRNA sense strand
ggauaguccaggagaaggu

SEQ ID NO: 2243689 - RNA, 19 nt, Homo sapiens
  misc_RNA (1)...(19): siRNA sense strand
guaugagcaacaucggaaa

SEQ ID NO: 2243690 - RNA, 19 nt, Homo sapiens
  misc_RNA (1)...(19): siRNA sense strand
cugcugaggacgaguuaca

SEQ ID NO: 2243691 - RNA, 19 nt, Homo sapiens
  misc_RNA (1)...(19): siRNA sense strand
cccggauaguccaggagaa

SEQ ID NO: 2243692 - RNA, 19 nt, Homo sapiens
  misc_RNA (1)...(19): siRNA sense strand
ugaagauuuggaagagauu

SEQ ID NO: 2243693 - RNA, 19 nt, Homo sapiens
  misc_RNA (1)...(19): siRNA sense strand
aagcagaugaugagcgugu

SEQ ID NO: 2243694 - RNA, 19 nt, Homo sapiens
  misc_RNA (1)...(19): siRNA sense strand
gugacugguaugagcaaca

SEQ ID NO: 2243695 - RNA, 19 nt, Homo sapiens
  misc_RNA (1)...(19): siRNA sense strand
caggaagaacaagaagaaa

SEQ ID NO: 2243696 - RNA, 19 nt, Homo sapiens
  misc_RNA (1)...(19): siRNA sense strand
aagaaaaggaggaagagga

SEQ ID NO: 2243697 - RNA, 19 nt, Homo sapiens
  misc_RNA (1)...(19): siRNA sense strand
uugagaaggcugccgaaau

SEQ ID NO: 2243698 - RNA, 19 nt, Homo sapiens
  misc_RNA (1)...(19): siRNA sense strand
cuaucauguggcagaguuu

SEQ ID NO: 2243699 - RNA, 19 nt, Homo sapiens
  misc_RNA (1)...(19): siRNA sense strand
caucucaaagacaggcuaa

SEQ ID NO: 2243700 - RNA, 19 nt, Homo sapiens
  misc_RNA (1)...(19): siRNA sense strand
gggaauagccaaggcagca

SEQ ID NO: 2243701 - RNA, 19 nt, Homo sapiens
  misc_RNA (1)...(19): siRNA sense strand
cagagauacaagcagaaga

SEQ ID NO: 2243702 - RNA, 19 nt, Homo sapiens
  misc_RNA (1)...(19): siRNA sense strand
ucagcaacaggaagaacaa

SEQ ID NO: 2243703 - RNA, 19 nt, Homo sapiens
  misc_RNA (1)...(19): siRNA sense strand
agaaaaggaggaagaggau

SEQ ID NO: 2243704 - RNA, 19 nt, Homo sapiens
  misc_RNA (1)...(19): siRNA sense strand
gcuaugaggacaugggcaa

SEQ ID NO: 2243705 - RNA, 19 nt, Homo sapiens
  misc_RNA (1)...(19): siRNA sense strand
ccaccgagauucugggcau

SEQ ID NO: 2243706 - RNA, 19 nt, Homo sapiens
  misc_RNA (1)...(19): siRNA sense strand
aauuacaguuacagcucua

SEQ ID NO: 2243707 - RNA, 19 nt, Homo sapiens
  misc_RNA (1)...(19): siRNA sense strand
gcaaggacucccugcccaa

SEQ ID NO: 2243708 - RNA, 19 nt, Homo sapiens
  misc_RNA (1)...(19): siRNA sense strand
cuggaaaucaacaaguauu

SEQ ID NO: 2243709 - RNA, 19 nt, Homo sapiens
  misc_RNA (1)...(19): siRNA sense strand
cagaagcgcuacuugguca

SEQ ID NO: 2243710 - RNA, 19 nt, Homo sapiens
  misc_RNA (1)...(19): siRNA sense strand
auuuuaacauggagaguga

SEQ ID NO: 2243711 - RNA, 19 nt, Homo sapiens
  misc_RNA (1)...(19): siRNA sense strand
ggagcugacaggagggaaa

SEQ ID NO: 2243712 - RNA, 19 nt, Homo sapiens
  misc_RNA (1)...(19): siRNA sense strand
uggaagaacuggagccuca

SEQ ID NO: 2243713 - RNA, 19 nt, Homo sapiens
  misc_RNA (1)...(19): siRNA sense strand
cugcaaacucagagggcau

SEQ ID NO: 2243714 - RNA, 19 nt, Homo sapiens
  misc_RNA (1)...(19): siRNA sense strand
acucagagggcauggacaa

SEQ ID NO: 2243715 - RNA, 19 nt, Homo sapiens
  misc_RNA (1)...(19): siRNA sense strand
uggagugauuggagugaau

SEQ ID NO: 2243716 - RNA, 19 nt, Homo sapiens
  misc_RNA (1)...(19): siRNA sense strand
ggacacaccuccuggacca

SEQ ID NO: 2243717 - RNA, 19 nt, Homo sapiens
  misc_RNA (1)...(19): siRNA sense strand
cagugguguagcagagaaa

SEQ ID NO: 2243718 - RNA, 19 nt, Homo sapiens
  misc_RNA (1)...(19): siRNA sense strand
gagaaagacaugaugcaca

SEQ ID NO: 2243719 - RNA, 19 nt, Homo sapiens
  misc_RNA (1)...(19): siRNA sense strand
cagagaaauuccagaucca

SEQ ID NO: 2243720 - RNA, 19 nt, Homo sapiens
  misc_RNA (1)...(19): siRNA sense strand
gaggaaaaggggagcauuu

SEQ ID NO: 2243721 - RNA, 19 nt, Homo sapiens
  misc_RNA (1)...(19): siRNA sense strand
acauauguccuguggauga

SEQ ID NO: 2243722 - RNA, 19 nt, Homo sapiens
  misc_RNA (1)...(19): siRNA sense strand
ggaaagaggacgagacacc

SEQ ID NO: 2243723 - RNA, 19 nt, Homo sapiens
  misc_RNA (1)...(19): siRNA sense strand
guuacaaaggccaaaggaa

SEQ ID NO: 2243724 - RNA, 19 nt, Homo sapiens
  misc_RNA (1)...(19): siRNA sense strand
gugguguagcagagaaauu

SEQ ID NO: 2243725 - RNA, 19 nt, Homo sapiens
  misc_RNA (1)...(19): siRNA sense strand
uggaagaaucugagugucu

SEQ ID NO: 2243726 - RNA, 19 nt, Homo sapiens
  misc_RNA (1)...(19): siRNA sense strand
gagggaaagccaugacaca

SEQ ID NO: 2243727 - RNA, 19 nt, Homo sapiens
  misc_RNA (1)...(19): siRNA sense strand
ggccaaaggaagacaugau

SEQ ID NO: 2243728 - RNA, 19 nt, Homo sapiens
  misc_RNA (1)...(19): siRNA sense strand
agcacaaacaccagaagaa

SEQ ID NO: 2243729 - RNA, 19 nt, Homo sapiens
  misc_RNA (1)...(19): siRNA sense strand
uuaugaaauccguguguau

SEQ ID NO: 2243730 - RNA, 19 nt, Homo sapiens
  misc_RNA (1)...(19): siRNA sense strand
uugcagaggagaagacaca

SEQ ID NO: 2243731 - RNA, 19 nt, Homo sapiens
  misc_RNA (1)...(19): siRNA sense strand
cuacaucuuuauaagggaa

SEQ ID NO: 2243732 - RNA, 19 nt, Homo sapiens
  misc_RNA (1)...(19): siRNA sense strand
aggaguacgugguggaaug

SEQ ID NO: 2243733 - RNA, 19 nt, Homo sapiens
  misc_RNA (1)...(19): siRNA sense strand
uacaaaggccaaaggaaga

SEQ ID NO: 2243734 - RNA, 19 nt, Homo sapiens
  misc_RNA (1)...(19): siRNA sense strand
aggauauacuggaaggaac

SEQ ID NO: 2243735 - RNA, 19 nt, Homo sapiens
  misc_RNA (1)...(19): siRNA sense strand
ucucagaggcaagaggaaa

SEQ ID NO: 2243736 - RNA, 19 nt, Homo sapiens
  misc_RNA (1)...(19): siRNA sense strand
agaaauaucccauugcaga

SEQ ID NO: 2243737 - RNA, 19 nt, Homo sapiens
  misc_RNA (1)...(19): siRNA sense strand
aguuaaagaugagguguga

SEQ ID NO: 2243738 - RNA, 19 nt, Homo sapiens
  misc_RNA (1)...(19): siRNA sense strand
acauaaugaaccuguguga

SEQ ID NO: 2243739 - RNA, 19 nt, Homo sapiens
  misc_RNA (1)...(19): siRNA sense strand
gcuguugauuaaagcaaaa

SEQ ID NO: 2243740 - RNA, 19 nt, Homo sapiens
  misc_RNA (1)...(19): siRNA sense strand
aguuaauccuguacaaguu

SEQ ID NO: 2243741 - RNA, 19 nt, Homo sapiens
  misc_RNA (1)...(19): siRNA sense strand
acagcuaaguggaccaaaa

SEQ ID NO: 2243742 - RNA, 19 nt, Homo sapiens
  misc_RNA (1)...(19): siRNA sense strand
ccgugggacauuagaauca

SEQ ID NO: 2243743 - RNA, 19 nt, Homo sapiens
  misc_RNA (1)...(19): siRNA sense strand
uuacaaaggccaaaggaag

SEQ ID NO: 2243744 - RNA, 19 nt, Homo sapiens
  misc_RNA (1)...(19): siRNA sense strand
ggcuguugauuaaagcaaa

SEQ ID NO: 2243745 - RNA, 19 nt, Homo sapiens
  misc_RNA (1)...(19): siRNA sense strand
cuaucaucauggugggcau

SEQ ID NO: 2243746 - RNA, 19 nt, Homo sapiens
  misc_RNA (1)...(19): siRNA sense strand
ugggaaagaggacgagaca

SEQ ID NO: 2243747 - RNA, 19 nt, Homo sapiens
  misc_RNA (1)...(19): siRNA sense strand
cacggaaaugagagggaau

SEQ ID NO: 2243748 - RNA, 19 nt, Homo sapiens
  misc_RNA (1)...(19): siRNA sense strand
ucaaauauguggagcagag

SEQ ID NO: 2243749 - RNA, 19 nt, Homo sapiens
  misc_RNA (1)...(19): siRNA sense strand
ucugcaagguaaagccaau

SEQ ID NO: 2243750 - RNA, 19 nt, Homo sapiens
  misc_RNA (1)...(19): siRNA sense strand
uguacaaguuugacagaag

SEQ ID NO: 2243751 - RNA, 19 nt, Homo sapiens
  misc_RNA (1)...(19): siRNA sense strand
ccugcauacagaagggaga

SEQ ID NO: 2243752 - RNA, 19 nt, Homo sapiens
  misc_RNA (1)...(19): siRNA sense strand
gcuuaaucgacucagauau

SEQ ID NO: 2243753 - RNA, 19 nt, Homo sapiens
  misc_RNA (1)...(19): siRNA sense strand
ggauguuagaugucuggua

SEQ ID NO: 2243754 - RNA, 19 nt, Homo sapiens
  misc_RNA (1)...(19): siRNA sense strand
gaaauugggcuguggcugu

SEQ ID NO: 2243755 - RNA, 19 nt, Homo sapiens
  misc_RNA (1)...(19): siRNA sense strand
agauaucggcccaguaaca

SEQ ID NO: 2243756 - RNA, 19 nt, Homo sapiens
  misc_RNA (1)...(19): siRNA sense strand
gugaaauucccuacagagu

SEQ ID NO: 2243757 - RNA, 19 nt, Homo sapiens
  misc_RNA (1)...(19): siRNA sense strand
cacaaacaccagaagaaga

SEQ ID NO: 2243758 - RNA, 19 nt, Homo sapiens
  misc_RNA (1)...(19): siRNA sense strand
cuggguaacucuaagcaca

SEQ ID NO: 2243759 - RNA, 19 nt, Homo sapiens
  misc_RNA (1)...(19): siRNA sense strand
cagccucagcucugugaaa

SEQ ID NO: 2243760 - RNA, 19 nt, Homo sapiens
  misc_RNA (1)...(19): siRNA sense strand
agggacugguacugcuuaa

SEQ ID NO: 2243761 - RNA, 19 nt, Homo sapiens
  misc_RNA (1)...(19): siRNA sense strand
cucagaggcaagaggaaaa

SEQ ID NO: 2243762 - RNA, 19 nt, Homo sapiens
  misc_RNA (1)...(19): siRNA sense strand
ccaaaauucacauccaaua

SEQ ID NO: 2243763 - RNA, 19 nt, Homo sapiens
  misc_RNA (1)...(19): siRNA sense strand
uggguaacucuaagcacaa

SEQ ID NO: 2243764 - RNA, 19 nt, Homo sapiens
  misc_RNA (1)...(19): siRNA sense strand
ccacggaaaugagagggaa

SEQ ID NO: 2243765 - RNA, 19 nt, Homo sapiens
  misc_RNA (1)...(19): siRNA sense strand
agguaaagccaauuggaug

SEQ ID NO: 2243766 - RNA, 19 nt, Homo sapiens
  misc_RNA (1)...(19): siRNA sense strand
ugucaauagucuuggaagc

SEQ ID NO: 2243767 - RNA, 19 nt, Homo sapiens
  misc_RNA (1)...(19): siRNA sense strand
cugagaaagacaugaugca

SEQ ID NO: 2243768 - RNA, 19 nt, Homo sapiens
  misc_RNA (1)...(19): siRNA sense strand
auccagaauuugagagaaa

SEQ ID NO: 2243769 - RNA, 19 nt, Homo sapiens
  misc_RNA (1)...(19): siRNA sense strand
agucagaauaagagucaaa

SEQ ID NO: 2243770 - RNA, 19 nt, Homo sapiens
  misc_RNA (1)...(19): siRNA sense strand
ggucaaggauaaugcagga

SEQ ID NO: 2243771 - RNA, 19 nt, Homo sapiens
  misc_RNA (1)...(19): siRNA sense strand
caaggauaaugcaggaaaa

SEQ ID NO: 2243772 - RNA, 19 nt, Homo sapiens
  misc_RNA (1)...(19): siRNA sense strand
aagcaaaccaaggaggaaa

SEQ ID NO: 2243773 - RNA, 19 nt, Homo sapiens
  misc_RNA (1)...(19): siRNA sense strand
cuauaugugcaaugggaga

SEQ ID NO: 2243774 - RNA, 19 nt, Homo sapiens
  misc_RNA (1)...(19): siRNA sense strand
aguaauauggacauggaau

SEQ ID NO: 2243775 - RNA, 19 nt, Homo sapiens
  misc_RNA (1)...(19): siRNA sense strand
cuucaaugcauuuggcaca

SEQ ID NO: 2243776 - RNA, 19 nt, Homo sapiens
  misc_RNA (1)...(19): siRNA sense strand
cuguagugcugauagaaaa

SEQ ID NO: 2243777 - RNA, 19 nt, Homo sapiens
  misc_RNA (1)...(19): siRNA sense strand
aguuaugcuaugaggauga

SEQ ID NO: 2243778 - RNA, 19 nt, Homo sapiens
  misc_RNA (1)...(19): siRNA sense strand
augugagaauccagaauuu

SEQ ID NO: 2243779 - RNA, 19 nt, Homo sapiens
  misc_RNA (1)...(19): siRNA sense strand
guauagguaagaagcgcaa

SEQ ID NO: 2243780 - RNA, 19 nt, Homo sapiens
  misc_RNA (1)...(19): siRNA sense strand
ugauagaaaaccugaagaa

SEQ ID NO: 2243781 - RNA, 19 nt, Homo sapiens
  misc_RNA (1)...(19): siRNA sense strand
uggcacaaccugagcuaca

SEQ ID NO: 2243782 - RNA, 19 nt, Homo sapiens
  misc_RNA (1)...(19): siRNA sense strand
ggagccaagaaaugaguau

SEQ ID NO: 2243783 - RNA, 19 nt, Homo sapiens
  misc_RNA (1)...(19): siRNA sense strand
caucuuuagagaaggccaa

SEQ ID NO: 2243784 - RNA, 19 nt, Homo sapiens
  misc_RNA (1)...(19): siRNA sense strand
ccuucaauauagugccuuu

SEQ ID NO: 2243785 - RNA, 19 nt, Homo sapiens
  misc_RNA (1)...(19): siRNA sense strand
uugaacacagucagaauaa

SEQ ID NO: 2243786 - RNA, 19 nt, Homo sapiens
  misc_RNA (1)...(19): siRNA sense strand
uugagagaaauguggagaa

SEQ ID NO: 2243787 - RNA, 19 nt, Homo sapiens
  misc_RNA (1)...(19): siRNA sense strand
agccaaacugagacacaua

SEQ ID NO: 2243788 - RNA, 19 nt, Homo sapiens
  misc_RNA (1)...(19): siRNA sense strand
cuuugaacacagucagaau

SEQ ID NO: 2243789 - RNA, 19 nt, Homo sapiens
  misc_RNA (1)...(19): siRNA sense strand
gguaagaagcgcaauucca

SEQ ID NO: 2243790 - RNA, 19 nt, Homo sapiens
  misc_RNA (1)...(19): siRNA sense strand
guguccaaauaauggucaa

SEQ ID NO: 2243791 - RNA, 19 nt, Homo sapiens
  misc_RNA (1)...(19): siRNA sense strand
ccggaaacucgucguucaa

SEQ ID NO: 2243792 - RNA, 19 nt, Homo sapiens
  misc_RNA (1)...(19): siRNA sense strand
guaauauggacauggaauc

SEQ ID NO: 2243793 - RNA, 19 nt, Homo sapiens
  misc_RNA (1)...(19): siRNA sense strand
cagaauaagagucaaaaca

SEQ ID NO: 2243794 - RNA, 19 nt, Homo sapiens
  misc_RNA (1)...(19): siRNA sense strand
ucuguagugcugauagaaa

SEQ ID NO: 2243795 - RNA, 19 nt, Homo sapiens
  misc_RNA (1)...(19): siRNA sense strand
acucuguagugcugauaga

SEQ ID NO: 2243796 - RNA, 19 nt, Homo sapiens
  misc_RNA (1)...(19): siRNA sense strand
uggcacagaagccuggaaa

SEQ ID NO: 2243797 - RNA, 19 nt, Homo sapiens
  misc_RNA (1)...(19): siRNA sense strand
cugcacaguaauauggaca

SEQ ID NO: 2243798 - RNA, 19 nt, Homo sapiens
  misc_RNA (1)...(19): siRNA sense strand
uuuaacuucccgugugaaa

SEQ ID NO: 2243799 - RNA, 19 nt, Homo sapiens
  misc_RNA (1)...(19): siRNA sense strand
gauagaaaaccugaagaaa

SEQ ID NO: 2243800 - RNA, 19 nt, Homo sapiens
  misc_RNA (1)...(19): siRNA sense strand
agaaggugauccugagucu

SEQ ID NO: 2243801 - RNA, 19 nt, Homo sapiens
  misc_RNA (1)...(19): siRNA sense strand
ccuuuaacuucccguguga

SEQ ID NO: 2243802 - RNA, 19 nt, Homo sapiens
  misc_RNA (1)...(19): siRNA sense strand
ucuacguccaagaggcuaa

SEQ ID NO: 2243803 - RNA, 19 nt, Homo sapiens
  misc_RNA (1)...(19): siRNA sense strand
augcuaugaggaugacaaa

SEQ ID NO: 2243804 - RNA, 19 nt, Homo sapiens
  misc_RNA (1)...(19): siRNA sense strand
cuucauugaccaaggaaau

SEQ ID NO: 2243805 - RNA, 19 nt, Homo sapiens
  misc_RNA (1)...(19): siRNA sense strand
cugaaccaguagaagacaa

SEQ ID NO: 2243806 - RNA, 19 nt, Homo sapiens
  misc_RNA (1)...(19): siRNA sense strand
guauaaagauagccagccu

SEQ ID NO: 2243807 - RNA, 19 nt, Homo sapiens
  misc_RNA (1)...(19): siRNA sense strand
cugugaagugugagaaaau

SEQ ID NO: 2243808 - RNA, 19 nt, Homo sapiens
  misc_RNA (1)...(19): siRNA sense strand
caguagaagacaauugcau

SEQ ID NO: 2243809 - RNA, 19 nt, Homo sapiens
  misc_RNA (1)...(19): siRNA sense strand
uagcugaagaugaugaaaa

SEQ ID NO: 2243810 - RNA, 19 nt, Homo sapiens
  misc_RNA (1)...(19): siRNA sense strand
acuuuauagcugaagauga

SEQ ID NO: 2243811 - RNA, 19 nt, Homo sapiens
  misc_RNA (1)...(19): siRNA sense strand
acuuuguggcaaugaaauu

SEQ ID NO: 2243812 - RNA, 19 nt, Homo sapiens
  misc_RNA (1)...(19): siRNA sense strand
cucugugaagugugagaaa

SEQ ID NO: 2243813 - RNA, 19 nt, Homo sapiens
  misc_RNA (1)...(19): siRNA sense strand
gggaaaugguauugcccaa

SEQ ID NO: 2243814 - RNA, 19 nt, Homo sapiens
  misc_RNA (1)...(19): siRNA sense strand
ccuauaaaccaaaggggaa

SEQ ID NO: 2243815 - RNA, 19 nt, Homo sapiens
  misc_RNA (1)...(19): siRNA sense strand
ggagauaaugagaaaacaa

SEQ ID NO: 2243816 - RNA, 19 nt, Homo sapiens
  misc_RNA (1)...(19): siRNA sense strand
aggcagcggaccagugaaa

SEQ ID NO: 2243817 - RNA, 19 nt, Homo sapiens
  misc_RNA (1)...(19): siRNA sense strand
aagaaauccaagucagcaa

SEQ ID NO: 2243818 - RNA, 19 nt, Homo sapiens
  misc_RNA (1)...(19): siRNA sense strand
ccaaagugcaggggagaua

SEQ ID NO: 2243819 - RNA, 19 nt, Homo sapiens
  misc_RNA (1)...(19): siRNA sense strand
aggaaauugaugaugucua

SEQ ID NO: 2243820 - RNA, 19 nt, Homo sapiens
  misc_RNA (1)...(19): siRNA sense strand
gcuccaaggccaagcagga

SEQ ID NO: 2243821 - RNA, 19 nt, Homo sapiens
  misc_RNA (1)...(19): siRNA sense strand
aagaauugggagaugaaaa

SEQ ID NO: 2243822 - RNA, 19 nt, Homo sapiens
  misc_RNA (1)...(19): siRNA sense strand
gaagaaacgucuacagcag

SEQ ID NO: 2243823 - RNA, 19 nt, Homo sapiens
  misc_RNA (1)...(19): siRNA sense strand
ggaaaaucgggcaagacaa

SEQ ID NO: 2243824 - RNA, 19 nt, Homo sapiens
  misc_RNA (1)...(19): siRNA sense strand
gaagaugauuuaaaccaga

SEQ ID NO: 2243825 - RNA, 19 nt, Homo sapiens
  misc_RNA (1)...(19): siRNA sense strand
cuauaaaccaaaggggaaa

SEQ ID NO: 2243826 - RNA, 19 nt, Homo sapiens
  misc_RNA (1)...(19): siRNA sense strand
ugaaagugaacgagccuca

SEQ ID NO: 2243827 - RNA, 19 nt, Homo sapiens
  misc_RNA (1)...(19): siRNA sense strand
aggccaagcaggaaaggga

SEQ ID NO: 2243828 - RNA, 19 nt, Homo sapiens
  misc_RNA (1)...(19): siRNA sense strand
ccaaaggggaaaugguauu

SEQ ID NO: 2243829 - RNA, 19 nt, Homo sapiens
  misc_RNA (1)...(19): siRNA sense strand
aagaaacgcuccaaggcca

SEQ ID NO: 2243830 - RNA, 19 nt, Homo sapiens
  misc_RNA (1)...(19): siRNA sense strand
ugcucgaauugguggaaaa

SEQ ID NO: 2243831 - RNA, 19 nt, Homo sapiens
  misc_RNA (1)...(19): siRNA sense strand
aauccaagucagcaaagaa

SEQ ID NO: 2243832 - RNA, 19 nt, Homo sapiens
  misc_RNA (1)...(19): siRNA sense strand
aggauagaagaucgaggua

SEQ ID NO: 2243833 - RNA, 19 nt, Homo sapiens
  misc_RNA (1)...(19): siRNA sense strand
uugaugaugucuacgaaaa

SEQ ID NO: 2243834 - RNA, 19 nt, Homo sapiens
  misc_RNA (1)...(19): siRNA sense strand
augagaaaacaauggacaa

SEQ ID NO: 2243835 - RNA, 19 nt, Homo sapiens
  misc_RNA (1)...(19): siRNA sense strand
ugagaaaacaauggacaaa

SEQ ID NO: 2243836 - RNA, 19 nt, Homo sapiens
  misc_RNA (1)...(19): siRNA sense strand
aauuauuccugcaagccaa

SEQ ID NO: 2243837 - RNA, 19 nt, Homo sapiens
  misc_RNA (1)...(19): siRNA sense strand
aagcaguuagcaaggaaau

SEQ ID NO: 2243838 - RNA, 19 nt, Homo sapiens
  misc_RNA (1)...(19): siRNA sense strand
uggcaaugcuggaggacau

SEQ ID NO: 2243839 - RNA, 19 nt, Homo sapiens
  misc_RNA (1)...(19): siRNA sense strand
ggaucauggacuugaggaa

SEQ ID NO: 2243840 - RNA, 19 nt, Homo sapiens
  misc_RNA (1)...(19): siRNA sense strand
ggacaugagccuugggauc

SEQ ID NO: 2243841 - RNA, 19 nt, Homo sapiens
  misc_RNA (1)...(19): siRNA sense strand
acaaauuugaagagaccaa

SEQ ID NO: 2243842 - RNA, 19 nt, Homo sapiens
  misc_RNA (1)...(19): siRNA sense strand
guguaugaugucaaagaua

SEQ ID NO: 2243843 - RNA, 19 nt, Homo sapiens
  misc_RNA (1)...(19): siRNA sense strand
gcacaaauuugaagagacc

SEQ ID NO: 2243844 - RNA, 19 nt, Homo sapiens
  misc_RNA (1)...(19): siRNA sense strand
caguuugaaagcagauaaa

SEQ ID NO: 2243845 - RNA, 19 nt, Homo sapiens
  misc_RNA (1)...(19): siRNA sense strand
cggagaucauugagggaac

SEQ ID NO: 2243846 - RNA, 19 nt, Homo sapiens
  misc_RNA (1)...(19): siRNA sense strand
ggaugagaguucaagacga

SEQ ID NO: 2243847 - RNA, 19 nt, Homo sapiens
  misc_RNA (1)...(19): siRNA sense strand
ggacaagagccuagagugc

SEQ ID NO: 2243848 - RNA, 19 nt, Homo sapiens
  misc_RNA (1)...(19): siRNA sense strand
acaagagccuagagugcau

SEQ ID NO: 2243849 - RNA, 19 nt, Homo sapiens
  misc_RNA (1)...(19): siRNA sense strand
guuaggaauccgauccaaa

SEQ ID NO: 2243850 - RNA, 19 nt, Homo sapiens
  misc_RNA (1)...(19): siRNA sense strand
aggaaaucgcgacggguuu

SEQ ID NO: 2243851 - RNA, 19 nt, Homo sapiens
  misc_RNA (1)...(19): siRNA sense strand
agacacuggccgagagguu

SEQ ID NO: 2243852 - RNA, 19 nt, Homo sapiens
  misc_RNA (1)...(19): siRNA sense strand
agaauaagaacgucgacau

SEQ ID NO: 2243853 - RNA, 19 nt, Homo sapiens
  misc_RNA (1)...(19): siRNA sense strand
acugcaagcuccuggccaa

SEQ ID NO: 2243854 - RNA, 19 nt, Homo sapiens
  misc_RNA (1)...(19): siRNA sense strand
acaaaggaugagaguucaa

SEQ ID NO: 2243855 - RNA, 19 nt, Homo sapiens
  misc_RNA (1)...(19): siRNA sense strand
cgguggacagggagaaaca

SEQ ID NO: 2243856 - RNA, 19 nt, Homo sapiens
  misc_RNA (1)...(19): siRNA sense strand
agaggaagaugcagccaga

SEQ ID NO: 2243857 - RNA, 19 nt, Homo sapiens
  misc_RNA (1)...(19): siRNA sense strand
gcauuuaacacuaaggucu

SEQ ID NO: 2243858 - RNA, 19 nt, Homo sapiens
  misc_RNA (1)...(19): siRNA sense strand
guaugaugucaaagauaga

SEQ ID NO: 2243859 - RNA, 19 nt, Homo sapiens
  misc_RNA (1)...(19): siRNA sense strand
gccaagaaggccaugguau

SEQ ID NO: 2243860 - RNA, 19 nt, Homo sapiens
  misc_RNA (1)...(19): siRNA sense strand
gcuaaggaccguacagcca

SEQ ID NO: 2243861 - RNA, 19 nt, Homo sapiens
  misc_RNA (1)...(19): siRNA sense strand
ucacauaccaggagaaccu

SEQ ID NO: 2243862 - RNA, 19 nt, Homo sapiens
  misc_RNA (1)...(19): siRNA sense strand
agucaaacucuccguguau

SEQ ID NO: 2243863 - RNA, 19 nt, Homo sapiens
  misc_RNA (1)...(19): siRNA sense strand
cgaggaggagugggagaaa

SEQ ID NO: 2243864 - RNA, 19 nt, Homo sapiens
  misc_RNA (1)...(19): siRNA sense strand
uggcgagggcugugaggau

SEQ ID NO: 2243865 - RNA, 19 nt, Homo sapiens
  misc_RNA (1)...(19): siRNA sense strand
ggaggagaagucagaccaa

SEQ ID NO: 2243866 - RNA, 19 nt, Homo sapiens
  misc_RNA (1)...(19): siRNA sense strand
aggaggagugggagaaagu

SEQ ID NO: 2243867 - RNA, 19 nt, Homo sapiens
  misc_RNA (1)...(19): siRNA sense strand
cgcuagaucgaaagccaaa

SEQ ID NO: 2243868 - RNA, 19 nt, Homo sapiens
  misc_RNA (1)...(19): siRNA sense strand
ccucaggcauucuggacga

SEQ ID NO: 2243869 - RNA, 19 nt, Homo sapiens
  misc_RNA (1)...(19): siRNA sense strand
cgggagauccagaguggca

SEQ ID NO: 2243870 - RNA, 19 nt, Homo sapiens
  misc_RNA (1)...(19): siRNA sense strand
aggaaauauacaagaccca

SEQ ID NO: 2243871 - RNA, 19 nt, Homo sapiens
  misc_RNA (1)...(19): siRNA sense strand
ucauucagcguguggacaa

SEQ ID NO: 2243872 - RNA, 19 nt, Homo sapiens
  misc_RNA (1)...(19): siRNA sense strand
gagaguuuggugcgguuaa

SEQ ID NO: 2243873 - RNA, 19 nt, Homo sapiens
  misc_RNA (1)...(19): siRNA sense strand
gggcccucguuuaaagcaa

SEQ ID NO: 2243874 - RNA, 19 nt, Homo sapiens
  misc_RNA (1)...(19): siRNA sense strand
gaaauauacaagacccaga

SEQ ID NO: 2243875 - RNA, 19 nt, Homo sapiens
  misc_RNA (1)...(19): siRNA sense strand
aagcaugcacagacggaga

SEQ ID NO: 2243876 - RNA, 19 nt, Homo sapiens
  misc_RNA (1)...(19): siRNA sense strand
ccguguaugaugucaaaga

SEQ ID NO: 2243877 - RNA, 19 nt, Homo sapiens
  misc_RNA (1)...(19): siRNA sense strand
caggaaaucgcgacggguu

SEQ ID NO: 2243878 - RNA, 19 nt, Homo sapiens
  misc_RNA (1)...(19): siRNA sense strand
ccuauauuucuaagcagua

SEQ ID NO: 2243879 - RNA, 19 nt, Homo sapiens
  misc_RNA (1)...(19): siRNA sense strand
cgacugaggaggagcaggu

SEQ ID NO: 2243880 - RNA, 19 nt, Homo sapiens
  misc_RNA (1)...(19): siRNA sense strand
augcacagacggagaucau

SEQ ID NO: 2243881 - RNA, 19 nt, Homo sapiens
  misc_RNA (1)...(19): siRNA sense strand
gcugcauacuccaucgcua

SEQ ID NO: 2243882 - RNA, 19 nt, Homo sapiens
  misc_RNA (1)...(19): siRNA sense strand
ugggagaaaguguggcuga

SEQ ID NO: 2243883 - RNA, 19 nt, Homo sapiens
  misc_RNA (1)...(19): siRNA sense strand
cuggcaagcugcugagauc

SEQ ID NO: 2243884 - RNA, 19 nt, Homo sapiens
  misc_RNA (1)...(19): siRNA sense strand
agauggaggagaagucaga

SEQ ID NO: 2243885 - RNA, 19 nt, Homo sapiens
  misc_RNA (1)...(19): siRNA sense strand
cuuuacaagaagucaucaa

SEQ ID NO: 2243886 - RNA, 19 nt, Homo sapiens
  misc_RNA (1)...(19): siRNA sense strand
ugccagagcugcugcgguu

SEQ ID NO: 2243887 - RNA, 19 nt, Homo sapiens
  misc_RNA (1)...(19): siRNA sense strand
cugccaagguuuuaaguca

SEQ ID NO: 2243888 - RNA, 19 nt, Homo sapiens
  misc_RNA (1)...(19): siRNA sense strand
uggcaaugcuggaggacau

SEQ ID NO: 2243889 - RNA, 19 nt, Homo sapiens
  misc_RNA (1)...(19): siRNA sense strand
ggaucauggacuugaggaa

SEQ ID NO: 2243890 - RNA, 19 nt, Homo sapiens
  misc_RNA (1)...(19): siRNA sense strand
ggacaugagccuugggauc

SEQ ID NO: 2243891 - RNA, 19 nt, Homo sapiens
  misc_RNA (1)...(19): siRNA sense strand
acaaauuugaagagaccaa

SEQ ID NO: 2243892 - RNA, 19 nt, Homo sapiens
  misc_RNA (1)...(19): siRNA sense strand
guguaugaugucaaagaua

SEQ ID NO: 2243893 - RNA, 19 nt, Homo sapiens
  misc_RNA (1)...(19): siRNA sense strand
gcacaaauuugaagagacc

SEQ ID NO: 2243894 - RNA, 19 nt, Homo sapiens
  misc_RNA (1)...(19): siRNA sense strand
caguuugaaagcagauaaa

SEQ ID NO: 2243895 - RNA, 19 nt, Homo sapiens
  misc_RNA (1)...(19): siRNA sense strand
cggagaucauugagggaac

SEQ ID NO: 2243896 - RNA, 19 nt, Homo sapiens
  misc_RNA (1)...(19): siRNA sense strand
ggaugagaguucaagacga

SEQ ID NO: 2243897 - RNA, 19 nt, Homo sapiens
  misc_RNA (1)...(19): siRNA sense strand
ggacaagagccuagagugc

SEQ ID NO: 2243898 - RNA, 19 nt, Homo sapiens
  misc_RNA (1)...(19): siRNA sense strand
acaagagccuagagugcau

SEQ ID NO: 2243899 - RNA, 19 nt, Homo sapiens
  misc_RNA (1)...(19): siRNA sense strand
guuaggaauccgauccaaa

SEQ ID NO: 2243900 - RNA, 19 nt, Homo sapiens
  misc_RNA (1)...(19): siRNA sense strand
aggaaaucgcgacggguuu

SEQ ID NO: 2243901 - RNA, 19 nt, Homo sapiens
  misc_RNA (1)...(19): siRNA sense strand
agacacuggccgagagguu

SEQ ID NO: 2243902 - RNA, 19 nt, Homo sapiens
  misc_RNA (1)...(19): siRNA sense strand
agaauaagaacgucgacau

SEQ ID NO: 2243903 - RNA, 19 nt, Homo sapiens
  misc_RNA (1)...(19): siRNA sense strand
acugcaagcuccuggccaa

SEQ ID NO: 2243904 - RNA, 19 nt, Homo sapiens
  misc_RNA (1)...(19): siRNA sense strand
acaaaggaugagaguucaa

SEQ ID NO: 2243905 - RNA, 19 nt, Homo sapiens
  misc_RNA (1)...(19): siRNA sense strand
cgguggacagggagaaaca

SEQ ID NO: 2243906 - RNA, 19 nt, Homo sapiens
  misc_RNA (1)...(19): siRNA sense strand
agaggaagaugcagccaga

SEQ ID NO: 2243907 - RNA, 19 nt, Homo sapiens
  misc_RNA (1)...(19): siRNA sense strand
gcauuuaacacuaaggucu

SEQ ID NO: 2243908 - RNA, 19 nt, Homo sapiens
  misc_RNA (1)...(19): siRNA sense strand
guaugaugucaaagauaga

SEQ ID NO: 2243909 - RNA, 19 nt, Homo sapiens
  misc_RNA (1)...(19): siRNA sense strand
gccaagaaggccaugguau

SEQ ID NO: 2243910 - RNA, 19 nt, Homo sapiens
  misc_RNA (1)...(19): siRNA sense strand
gcuaaggaccguacagcca

SEQ ID NO: 2243911 - RNA, 19 nt, Homo sapiens
  misc_RNA (1)...(19): siRNA sense strand
ucacauaccaggagaaccu

SEQ ID NO: 2243912 - RNA, 19 nt, Homo sapiens
  misc_RNA (1)...(19): siRNA sense strand
agucaaacucuccguguau

SEQ ID NO: 2243913 - RNA, 19 nt, Homo sapiens
  misc_RNA (1)...(19): siRNA sense strand
cgaggaggagugggagaaa

SEQ ID NO: 2243914 - RNA, 19 nt, Homo sapiens
  misc_RNA (1)...(19): siRNA sense strand
uggcgagggcugugaggau

SEQ ID NO: 2243915 - RNA, 19 nt, Homo sapiens
  misc_RNA (1)...(19): siRNA sense strand
ggaggagaagucagaccaa

SEQ ID NO: 2243916 - RNA, 19 nt, Homo sapiens
  misc_RNA (1)...(19): siRNA sense strand
aggaggagugggagaaagu

SEQ ID NO: 2243917 - RNA, 19 nt, Homo sapiens
  misc_RNA (1)...(19): siRNA sense strand
cgcuagaucgaaagccaaa

SEQ ID NO: 2243918 - RNA, 19 nt, Homo sapiens
  misc_RNA (1)...(19): siRNA sense strand
ccucaggcauucuggacga

SEQ ID NO: 2243919 - RNA, 19 nt, Homo sapiens
  misc_RNA (1)...(19): siRNA sense strand
cgggagauccagaguggca

SEQ ID NO: 2243920 - RNA, 19 nt, Homo sapiens
  misc_RNA (1)...(19): siRNA sense strand
aggaaauauacaagaccca

SEQ ID NO: 2243921 - RNA, 19 nt, Homo sapiens
  misc_RNA (1)...(19): siRNA sense strand
ucauucagcguguggacaa

SEQ ID NO: 2243922 - RNA, 19 nt, Homo sapiens
  misc_RNA (1)...(19): siRNA sense strand
gagaguuuggugcgguuaa

SEQ ID NO: 2243923 - RNA, 19 nt, Homo sapiens
  misc_RNA (1)...(19): siRNA sense strand
gggcccucguuuaaagcaa

SEQ ID NO: 2243924 - RNA, 19 nt, Homo sapiens
  misc_RNA (1)...(19): siRNA sense strand
gaaauauacaagacccaga

SEQ ID NO: 2243925 - RNA, 19 nt, Homo sapiens
  misc_RNA (1)...(19): siRNA sense strand
aagcaugcacagacggaga

SEQ ID NO: 2243926 - RNA, 19 nt, Homo sapiens
  misc_RNA (1)...(19): siRNA sense strand
ccguguaugaugucaaaga

SEQ ID NO: 2243927 - RNA, 19 nt, Homo sapiens
  misc_RNA (1)...(19): siRNA sense strand
caggaaaucgcgacggguu

SEQ ID NO: 2243928 - RNA, 19 nt, Homo sapiens
  misc_RNA (1)...(19): siRNA sense strand
ccuauauuucuaagcagua

SEQ ID NO: 2243929 - RNA, 19 nt, Homo sapiens
  misc_RNA (1)...(19): siRNA sense strand
cgacugaggaggagcaggu

SEQ ID NO: 2243930 - RNA, 19 nt, Homo sapiens
  misc_RNA (1)...(19): siRNA sense strand
augcacagacggagaucau

SEQ ID NO: 2243931 - RNA, 19 nt, Homo sapiens
  misc_RNA (1)...(19): siRNA sense strand
gcugcauacuccaucgcua

SEQ ID NO: 2243932 - RNA, 19 nt, Homo sapiens
  misc_RNA (1)...(19): siRNA sense strand
ugggagaaaguguggcuga

SEQ ID NO: 2243933 - RNA, 19 nt, Homo sapiens
  misc_RNA (1)...(19): siRNA sense strand
cuggcaagcugcugagauc

SEQ ID NO: 2243934 - RNA, 19 nt, Homo sapiens
  misc_RNA (1)...(19): siRNA sense strand
agauggaggagaagucaga

SEQ ID NO: 2243935 - RNA, 19 nt, Homo sapiens
  misc_RNA (1)...(19): siRNA sense strand
cuuuacaagaagucaucaa

SEQ ID NO: 2243936 - RNA, 19 nt, Homo sapiens
  misc_RNA (1)...(19): siRNA sense strand
ugccagagcugcugcgguu

SEQ ID NO: 2243937 - RNA, 19 nt, Homo sapiens
  misc_RNA (1)...(19): siRNA sense strand
cugccaagguuuuaaguca

SEQ ID NO: 2243938 - RNA, 19 nt, Homo sapiens
  misc_RNA (1)...(19): siRNA sense strand
gugaagaggcugaaggaga

SEQ ID NO: 2243939 - RNA, 19 nt, Homo sapiens
  misc_RNA (1)...(19): siRNA sense strand
ugguagugcuagagaccuu

SEQ ID NO: 2243940 - RNA, 19 nt, Homo sapiens
  misc_RNA (1)...(19): siRNA sense strand
gaguacaucaagacgggaa

SEQ ID NO: 2243941 - RNA, 19 nt, Homo sapiens
  misc_RNA (1)...(19): siRNA sense strand
ugguggaagaggaggcuga

SEQ ID NO: 2243942 - RNA, 19 nt, Homo sapiens
  misc_RNA (1)...(19): siRNA sense strand
ccuaccugcccgaggagua

SEQ ID NO: 2243943 - RNA, 19 nt, Homo sapiens
  misc_RNA (1)...(19): siRNA sense strand
acgagaggcuagagaagcu

SEQ ID NO: 2243944 - RNA, 19 nt, Homo sapiens
  misc_RNA (1)...(19): siRNA sense strand
uggccgaccucgugcacau

SEQ ID NO: 2243945 - RNA, 19 nt, Homo sapiens
  misc_RNA (1)...(19): siRNA sense strand
gaugagaggcugacaccca

SEQ ID NO: 2243946 - RNA, 19 nt, Homo sapiens
  misc_RNA (1)...(19): siRNA sense strand
caagaagcucagagagaca

SEQ ID NO: 2243947 - RNA, 19 nt, Homo sapiens
  misc_RNA (1)...(19): siRNA sense strand
gaaggaaggcugcggguca

SEQ ID NO: 2243948 - RNA, 19 nt, Homo sapiens
  misc_RNA (1)...(19): siRNA sense strand
guggagaacgugauggcaa

SEQ ID NO: 2243949 - RNA, 19 nt, Homo sapiens
  misc_RNA (1)...(19): siRNA sense strand
aggacagacugcaggguca

SEQ ID NO: 2243950 - RNA, 19 nt, Homo sapiens
  misc_RNA (1)...(19): siRNA sense strand
guggaauaguguuggccga

SEQ ID NO: 2243951 - RNA, 19 nt, Homo sapiens
  misc_RNA (1)...(19): siRNA sense strand
uucaagaagcucagagaga

SEQ ID NO: 2243952 - RNA, 19 nt, Homo sapiens
  misc_RNA (1)...(19): siRNA sense strand
uguaagaaaggcugaggau

SEQ ID NO: 2243953 - RNA, 19 nt, Homo sapiens
  misc_RNA (1)...(19): siRNA sense strand
gugcagggugugagcauca

SEQ ID NO: 2243954 - RNA, 19 nt, Homo sapiens
  misc_RNA (1)...(19): siRNA sense strand
cugaggaugaacaggaaga

SEQ ID NO: 2243955 - RNA, 19 nt, Homo sapiens
  misc_RNA (1)...(19): siRNA sense strand
cuguucaaguccaggauca

SEQ ID NO: 2243956 - RNA, 19 nt, Homo sapiens
  misc_RNA (1)...(19): siRNA sense strand
gggugcagggugugagcau

SEQ ID NO: 2243957 - RNA, 19 nt, Homo sapiens
  misc_RNA (1)...(19): siRNA sense strand
gcucuaaugucuugcugga

SEQ ID NO: 2243958 - RNA, 19 nt, Homo sapiens
  misc_RNA (1)...(19): siRNA sense strand
cgucugauucaaaggacuu

SEQ ID NO: 2243959 - RNA, 19 nt, Homo sapiens
  misc_RNA (1)...(19): siRNA sense strand
gagugggacuggauggagu

SEQ ID NO: 2243960 - RNA, 19 nt, Homo sapiens
  misc_RNA (1)...(19): siRNA sense strand
aggaaacagacgacguuga

SEQ ID NO: 2243961 - RNA, 19 nt, Homo sapiens
  misc_RNA (1)...(19): siRNA sense strand
aggacuugguggagggcau

SEQ ID NO: 2243962 - RNA, 19 nt, Homo sapiens
  misc_RNA (1)...(19): siRNA sense strand
ccaaccuggaagaggaauu

SEQ ID NO: 2243963 - RNA, 19 nt, Homo sapiens
  misc_RNA (1)...(19): siRNA sense strand
ccaagaggcucgugauggu

SEQ ID NO: 2243964 - RNA, 19 nt, Homo sapiens
  misc_RNA (1)...(19): siRNA sense strand
cugccaaccuggaagagga

SEQ ID NO: 2243965 - RNA, 19 nt, Homo sapiens
  misc_RNA (1)...(19): siRNA sense strand
ugguggagggcauggauuu

SEQ ID NO: 2243966 - RNA, 19 nt, Homo sapiens
  misc_RNA (1)...(19): siRNA sense strand
ggacaaggaaggaggcgug

SEQ ID NO: 2243967 - RNA, 19 nt, Homo sapiens
  misc_RNA (1)...(19): siRNA sense strand
aggaaggaggcguguuuga

SEQ ID NO: 2243968 - RNA, 19 nt, Homo sapiens
  misc_RNA (1)...(19): siRNA sense strand
ggaggcaguacuucugaua

SEQ ID NO: 2243969 - RNA, 19 nt, Homo sapiens
  misc_RNA (1)...(19): siRNA sense strand
ggugauugcugcugggaug

SEQ ID NO: 2243970 - RNA, 19 nt, Homo sapiens
  misc_RNA (1)...(19): siRNA sense strand
gugaaugacuggugugccu

SEQ ID NO: 2243971 - RNA, 19 nt, Homo sapiens
  misc_RNA (1)...(19): siRNA sense strand
cagaugugcucaaggugga

SEQ ID NO: 2243972 - RNA, 19 nt, Homo sapiens
  misc_RNA (1)...(19): siRNA sense strand
acaguguguucgagggcga

SEQ ID NO: 2243973 - RNA, 19 nt, Homo sapiens
  misc_RNA (1)...(19): siRNA sense strand
ggugauugcugcugggaug

SEQ ID NO: 2243974 - RNA, 19 nt, Homo sapiens
  misc_RNA (1)...(19): siRNA sense strand
gugaaugacuggugugccu

SEQ ID NO: 2243975 - RNA, 19 nt, Homo sapiens
  misc_RNA (1)...(19): siRNA sense strand
cagaugugcucaaggugga

SEQ ID NO: 2243976 - RNA, 19 nt, Homo sapiens
  misc_RNA (1)...(19): siRNA sense strand
acaguguguucgagggcga

SEQ ID NO: 2243977 - RNA, 19 nt, Homo sapiens
  misc_RNA (1)...(19): siRNA sense strand
cagaugugcucaaggugga

SEQ ID NO: 2243978 - RNA, 19 nt, Homo sapiens
  misc_RNA (1)...(19): siRNA sense strand
acaguguguucgagggcga

SEQ ID NO: 2243979 - RNA, 19 nt, Homo sapiens
  misc_RNA (1)...(19): siRNA sense strand
ggugauugcugcugggaug

SEQ ID NO: 2243980 - RNA, 19 nt, Homo sapiens
  misc_RNA (1)...(19): siRNA sense strand
gugaaugacuggugugccu

SEQ ID NO: 2243981 - RNA, 19 nt, Homo sapiens
  misc_RNA (1)...(19): siRNA sense strand
cagaugugcucaaggugga

SEQ ID NO: 2243982 - RNA, 19 nt, Homo sapiens
  misc_RNA (1)...(19): siRNA sense strand
acaguguguucgagggcga

SEQ ID NO: 2243983 - RNA, 19 nt, Homo sapiens
  misc_RNA (1)...(19): siRNA sense strand
cagaugugcucaaggugga

SEQ ID NO: 2243984 - RNA, 19 nt, Homo sapiens
  misc_RNA (1)...(19): siRNA sense strand
acaguguguucgagggcga

SEQ ID NO: 2243985 - RNA, 19 nt, Homo sapiens
  misc_RNA (1)...(19): siRNA sense strand
acguacaacuugaggaaga

SEQ ID NO: 2243986 - RNA, 19 nt, Homo sapiens
  misc_RNA (1)...(19): siRNA sense strand
uuuaagaccacgugggauu

SEQ ID NO: 2243987 - RNA, 19 nt, Homo sapiens
  misc_RNA (1)...(19): siRNA sense strand
acgcaugaaacgaaagaau

SEQ ID NO: 2243988 - RNA, 19 nt, Homo sapiens
  misc_RNA (1)...(19): siRNA sense strand
gugaagaggaagaacgcau

SEQ ID NO: 2243989 - RNA, 19 nt, Homo sapiens
  misc_RNA (1)...(19): siRNA sense strand
ccagaaucagagagagaca

SEQ ID NO: 2243990 - RNA, 19 nt, Homo sapiens
  misc_RNA (1)...(19): siRNA sense strand
aagacagacucgugugaca

SEQ ID NO: 2243991 - RNA, 19 nt, Homo sapiens
  misc_RNA (1)...(19): siRNA sense strand
gcaagguguucaaggagca

SEQ ID NO: 2243992 - RNA, 19 nt, Homo sapiens
  misc_RNA (1)...(19): siRNA sense strand
gcgauugugccaagcgcaa

SEQ ID NO: 2243993 - RNA, 19 nt, Homo sapiens
  misc_RNA (1)...(19): siRNA sense strand
caaagaugcuugcgggaag

SEQ ID NO: 2243994 - RNA, 19 nt, Homo sapiens
  misc_RNA (1)...(19): siRNA sense strand
gcgacuugcgccuggacaa

SEQ ID NO: 2243995 - RNA, 19 nt, Homo sapiens
  misc_RNA (1)...(19): siRNA sense strand
augaugaggugguggccau

SEQ ID NO: 2243996 - RNA, 19 nt, Homo sapiens
  misc_RNA (1)...(19): siRNA sense strand
ggcacgagcugaaggagga

SEQ ID NO: 2243997 - RNA, 19 nt, Homo sapiens
  misc_RNA (1)...(19): siRNA sense strand
aaggagacguguuuggaga

SEQ ID NO: 2243998 - RNA, 19 nt, Homo sapiens
  misc_RNA (1)...(19): siRNA sense strand
uagauguggagaagggcaa

SEQ ID NO: 2243999 - RNA, 19 nt, Homo sapiens
  misc_RNA (1)...(19): siRNA sense strand
guccagaggcauugacaca

SEQ ID NO: 2244000 - RNA, 19 nt, Homo sapiens
  misc_RNA (1)...(19): siRNA sense strand
ugaaacgugaagaggaaga

SEQ ID NO: 2244001 - RNA, 19 nt, Homo sapiens
  misc_RNA (1)...(19): siRNA sense strand
ccccagaaucagagagaga

SEQ ID NO: 2244002 - RNA, 19 nt, Homo sapiens
  misc_RNA (1)...(19): siRNA sense strand
uugagaacuaugagaugaa

SEQ ID NO: 2244003 - RNA, 19 nt, Homo sapiens
  misc_RNA (1)...(19): siRNA sense strand
augccaacaccaacagaua

SEQ ID NO: 2244004 - RNA, 19 nt, Homo sapiens
  misc_RNA (1)...(19): siRNA sense strand
ggccuauuguguacagcaa

SEQ ID NO: 2244005 - RNA, 19 nt, Homo sapiens
  misc_RNA (1)...(19): siRNA sense strand
cugcagaaagugcuggaau

SEQ ID NO: 2244006 - RNA, 19 nt, Homo sapiens
  misc_RNA (1)...(19): siRNA sense strand
agaaucagagagagacauu

SEQ ID NO: 2244007 - RNA, 19 nt, Homo sapiens
  misc_RNA (1)...(19): siRNA sense strand
cugauaaagacacgauuga

SEQ ID NO: 2244008 - RNA, 19 nt, Homo sapiens
  misc_RNA (1)...(19): siRNA sense strand
ugguggacauugugcucaa

SEQ ID NO: 2244009 - RNA, 19 nt, Homo sapiens
  misc_RNA (1)...(19): siRNA sense strand
gggcacuggccauggaguu

SEQ ID NO: 2244010 - RNA, 19 nt, Homo sapiens
  misc_RNA (1)...(19): siRNA sense strand
aggugaggcacgagcugaa

SEQ ID NO: 2244011 - RNA, 19 nt, Homo sapiens
  misc_RNA (1)...(19): siRNA sense strand
caaacagccaauugaggau

SEQ ID NO: 2244012 - RNA, 19 nt, Homo sapiens
  misc_RNA (1)...(19): siRNA sense strand
acgaggacaccaagacaau

SEQ ID NO: 2244013 - RNA, 19 nt, Homo sapiens
  misc_RNA (1)...(19): siRNA sense strand
aggaaaaggagacguguuu

SEQ ID NO: 2244014 - RNA, 19 nt, Homo sapiens
  misc_RNA (1)...(19): siRNA sense strand
gagaacuaugagaugaauu

SEQ ID NO: 2244015 - RNA, 19 nt, Homo sapiens
  misc_RNA (1)...(19): siRNA sense strand
ccacacugaagaagacaga

SEQ ID NO: 2244016 - RNA, 19 nt, Homo sapiens
  misc_RNA (1)...(19): siRNA sense strand
aggcauugacacagagaag

SEQ ID NO: 2244017 - RNA, 19 nt, Homo sapiens
  misc_RNA (1)...(19): siRNA sense strand
cuaauuuuguguuggggaa

SEQ ID NO: 2244018 - RNA, 19 nt, Homo sapiens
  misc_RNA (1)...(19): siRNA sense strand
aggaggacaucaaggccuu

SEQ ID NO: 2244019 - RNA, 19 nt, Homo sapiens
  misc_RNA (1)...(19): siRNA sense strand
acaccaagacaauccgcaa

SEQ ID NO: 2244020 - RNA, 19 nt, Homo sapiens
  misc_RNA (1)...(19): siRNA sense strand
acauaacagcuuucaaaca

SEQ ID NO: 2244021 - RNA, 19 nt, Homo sapiens
  misc_RNA (1)...(19): siRNA sense strand
guccauguccagaggcauu

SEQ ID NO: 2244022 - RNA, 19 nt, Homo sapiens
  misc_RNA (1)...(19): siRNA sense strand
ccauccuggcagaggucaa

SEQ ID NO: 2244023 - RNA, 19 nt, Homo sapiens
  misc_RNA (1)...(19): siRNA sense strand
gagcugacugauaaagaca

SEQ ID NO: 2244024 - RNA, 19 nt, Homo sapiens
  misc_RNA (1)...(19): siRNA sense strand
cugauguacaagaagaaca

SEQ ID NO: 2244025 - RNA, 19 nt, Homo sapiens
  misc_RNA (1)...(19): siRNA sense strand
guuuaaugggucuggcuca

SEQ ID NO: 2244026 - RNA, 19 nt, Homo sapiens
  misc_RNA (1)...(19): siRNA sense strand
guacaagaagaacaggaca

SEQ ID NO: 2244027 - RNA, 19 nt, Homo sapiens
  misc_RNA (1)...(19): siRNA sense strand
gauccaagaugaugaggug

SEQ ID NO: 2244028 - RNA, 19 nt, Homo sapiens
  misc_RNA (1)...(19): siRNA sense strand
acacugaagaagacagacu

SEQ ID NO: 2244029 - RNA, 19 nt, Homo sapiens
  misc_RNA (1)...(19): siRNA sense strand
acguacaacuugaggaaga

SEQ ID NO: 2244030 - RNA, 19 nt, Homo sapiens
  misc_RNA (1)...(19): siRNA sense strand
uuuaagaccacgugggauu

SEQ ID NO: 2244031 - RNA, 19 nt, Homo sapiens
  misc_RNA (1)...(19): siRNA sense strand
acgcaugaaacgaaagaau

SEQ ID NO: 2244032 - RNA, 19 nt, Homo sapiens
  misc_RNA (1)...(19): siRNA sense strand
gugaagaggaagaacgcau

SEQ ID NO: 2244033 - RNA, 19 nt, Homo sapiens
  misc_RNA (1)...(19): siRNA sense strand
ccagaaucagagagagaca

SEQ ID NO: 2244034 - RNA, 19 nt, Homo sapiens
  misc_RNA (1)...(19): siRNA sense strand
aagacagacucgugugaca

SEQ ID NO: 2244035 - RNA, 19 nt, Homo sapiens
  misc_RNA (1)...(19): siRNA sense strand
gcaagguguucaaggagca

SEQ ID NO: 2244036 - RNA, 19 nt, Homo sapiens
  misc_RNA (1)...(19): siRNA sense strand
gcgauugugccaagcgcaa

SEQ ID NO: 2244037 - RNA, 19 nt, Homo sapiens
  misc_RNA (1)...(19): siRNA sense strand
caaagaugcuugcgggaag

SEQ ID NO: 2244038 - RNA, 19 nt, Homo sapiens
  misc_RNA (1)...(19): siRNA sense strand
gcgacuugcgccuggacaa

SEQ ID NO: 2244039 - RNA, 19 nt, Homo sapiens
  misc_RNA (1)...(19): siRNA sense strand
augaugaggugguggccau

SEQ ID NO: 2244040 - RNA, 19 nt, Homo sapiens
  misc_RNA (1)...(19): siRNA sense strand
ggcacgagcugaaggagga

SEQ ID NO: 2244041 - RNA, 19 nt, Homo sapiens
  misc_RNA (1)...(19): siRNA sense strand
aaggagacguguuuggaga

SEQ ID NO: 2244042 - RNA, 19 nt, Homo sapiens
  misc_RNA (1)...(19): siRNA sense strand
uagauguggagaagggcaa

SEQ ID NO: 2244043 - RNA, 19 nt, Homo sapiens
  misc_RNA (1)...(19): siRNA sense strand
guccagaggcauugacaca

SEQ ID NO: 2244044 - RNA, 19 nt, Homo sapiens
  misc_RNA (1)...(19): siRNA sense strand
ugaaacgugaagaggaaga

SEQ ID NO: 2244045 - RNA, 19 nt, Homo sapiens
  misc_RNA (1)...(19): siRNA sense strand
ccccagaaucagagagaga

SEQ ID NO: 2244046 - RNA, 19 nt, Homo sapiens
  misc_RNA (1)...(19): siRNA sense strand
uugagaacuaugagaugaa

SEQ ID NO: 2244047 - RNA, 19 nt, Homo sapiens
  misc_RNA (1)...(19): siRNA sense strand
augccaacaccaacagaua

SEQ ID NO: 2244048 - RNA, 19 nt, Homo sapiens
  misc_RNA (1)...(19): siRNA sense strand
ggccuauuguguacagcaa

SEQ ID NO: 2244049 - RNA, 19 nt, Homo sapiens
  misc_RNA (1)...(19): siRNA sense strand
cugcagaaagugcuggaau

SEQ ID NO: 2244050 - RNA, 19 nt, Homo sapiens
  misc_RNA (1)...(19): siRNA sense strand
agaaucagagagagacauu

SEQ ID NO: 2244051 - RNA, 19 nt, Homo sapiens
  misc_RNA (1)...(19): siRNA sense strand
cugauaaagacacgauuga

SEQ ID NO: 2244052 - RNA, 19 nt, Homo sapiens
  misc_RNA (1)...(19): siRNA sense strand
ugguggacauugugcucaa

SEQ ID NO: 2244053 - RNA, 19 nt, Homo sapiens
  misc_RNA (1)...(19): siRNA sense strand
gggcacuggccauggaguu

SEQ ID NO: 2244054 - RNA, 19 nt, Homo sapiens
  misc_RNA (1)...(19): siRNA sense strand
aggugaggcacgagcugaa

SEQ ID NO: 2244055 - RNA, 19 nt, Homo sapiens
  misc_RNA (1)...(19): siRNA sense strand
caaacagccaauugaggau

SEQ ID NO: 2244056 - RNA, 19 nt, Homo sapiens
  misc_RNA (1)...(19): siRNA sense strand
acgaggacaccaagacaau

SEQ ID NO: 2244057 - RNA, 19 nt, Homo sapiens
  misc_RNA (1)...(19): siRNA sense strand
aggaaaaggagacguguuu

SEQ ID NO: 2244058 - RNA, 19 nt, Homo sapiens
  misc_RNA (1)...(19): siRNA sense strand
gagaacuaugagaugaauu

SEQ ID NO: 2244059 - RNA, 19 nt, Homo sapiens
  misc_RNA (1)...(19): siRNA sense strand
ccacacugaagaagacaga

SEQ ID NO: 2244060 - RNA, 19 nt, Homo sapiens
  misc_RNA (1)...(19): siRNA sense strand
aggcauugacacagagaag

SEQ ID NO: 2244061 - RNA, 19 nt, Homo sapiens
  misc_RNA (1)...(19): siRNA sense strand
cuaauuuuguguuggggaa

SEQ ID NO: 2244062 - RNA, 19 nt, Homo sapiens
  misc_RNA (1)...(19): siRNA sense strand
aggaggacaucaaggccuu

SEQ ID NO: 2244063 - RNA, 19 nt, Homo sapiens
  misc_RNA (1)...(19): siRNA sense strand
acaccaagacaauccgcaa

SEQ ID NO: 2244064 - RNA, 19 nt, Homo sapiens
  misc_RNA (1)...(19): siRNA sense strand
acauaacagcuuucaaaca

SEQ ID NO: 2244065 - RNA, 19 nt, Homo sapiens
  misc_RNA (1)...(19): siRNA sense strand
guccauguccagaggcauu

SEQ ID NO: 2244066 - RNA, 19 nt, Homo sapiens
  misc_RNA (1)...(19): siRNA sense strand
ccauccuggcagaggucaa

SEQ ID NO: 2244067 - RNA, 19 nt, Homo sapiens
  misc_RNA (1)...(19): siRNA sense strand
gagcugacugauaaagaca

SEQ ID NO: 2244068 - RNA, 19 nt, Homo sapiens
  misc_RNA (1)...(19): siRNA sense strand
cugauguacaagaagaaca

SEQ ID NO: 2244069 - RNA, 19 nt, Homo sapiens
  misc_RNA (1)...(19): siRNA sense strand
guuuaaugggucuggcuca

SEQ ID NO: 2244070 - RNA, 19 nt, Homo sapiens
  misc_RNA (1)...(19): siRNA sense strand
guacaagaagaacaggaca

SEQ ID NO: 2244071 - RNA, 19 nt, Homo sapiens
  misc_RNA (1)...(19): siRNA sense strand
gauccaagaugaugaggug

SEQ ID NO: 2244072 - RNA, 19 nt, Homo sapiens
  misc_RNA (1)...(19): siRNA sense strand
acacugaagaagacagacu

SEQ ID NO: 2244073 - RNA, 19 nt, Homo sapiens
  misc_RNA (1)...(19): siRNA sense strand
cagcuaggauggaagggaa

SEQ ID NO: 2244074 - RNA, 19 nt, Homo sapiens
  misc_RNA (1)...(19): siRNA sense strand
gugaaagagcaggaggaaa

SEQ ID NO: 2244075 - RNA, 19 nt, Homo sapiens
  misc_RNA (1)...(19): siRNA sense strand
aaagauggcuggaggagca

SEQ ID NO: 2244076 - RNA, 19 nt, Homo sapiens
  misc_RNA (1)...(19): siRNA sense strand
gcaauguacagcacggcaa

SEQ ID NO: 2244077 - RNA, 19 nt, Homo sapiens
  misc_RNA (1)...(19): siRNA sense strand
gcguccaugugguggguga

SEQ ID NO: 2244078 - RNA, 19 nt, Homo sapiens
  misc_RNA (1)...(19): siRNA sense strand
caaccugggcagcgagaca

SEQ ID NO: 2244079 - RNA, 19 nt, Homo sapiens
  misc_RNA (1)...(19): siRNA sense strand
gugugaaagagcaggagga

SEQ ID NO: 2244080 - RNA, 19 nt, Homo sapiens
  misc_RNA (1)...(19): siRNA sense strand
gaagagaagacuuucccaa

SEQ ID NO: 2244081 - RNA, 19 nt, Homo sapiens
  misc_RNA (1)...(19): siRNA sense strand
agaagaagcggcagcgguu

SEQ ID NO: 2244082 - RNA, 19 nt, Homo sapiens
  misc_RNA (1)...(19): siRNA sense strand
ccaucuaagcugcagaaaa

SEQ ID NO: 2244083 - RNA, 19 nt, Homo sapiens
  misc_RNA (1)...(19): siRNA sense strand
ggcagcgguucguggacaa

SEQ ID NO: 2244084 - RNA, 19 nt, Homo sapiens
  misc_RNA (1)...(19): siRNA sense strand
cagccauaacuaacagcaa

SEQ ID NO: 2244085 - RNA, 19 nt, Homo sapiens
  misc_RNA (1)...(19): siRNA sense strand
cgggcaacucagaagaaaa

SEQ ID NO: 2244086 - RNA, 19 nt, Homo sapiens
  misc_RNA (1)...(19): siRNA sense strand
ucuccaugagggacggaaa

SEQ ID NO: 2244087 - RNA, 19 nt, Homo sapiens
  misc_RNA (1)...(19): siRNA sense strand
uuuccuuagaagagggauu

SEQ ID NO: 2244088 - RNA, 19 nt, Homo sapiens
  misc_RNA (1)...(19): siRNA sense strand
uggaaugcuuagauggacu

SEQ ID NO: 2244089 - RNA, 19 nt, Homo sapiens
  misc_RNA (1)...(19): siRNA sense strand
cuuagauggacuagaugau

SEQ ID NO: 2244090 - RNA, 19 nt, Homo sapiens
  misc_RNA (1)...(19): siRNA sense strand
agauggacuagaugauauu

SEQ ID NO: 2244091 - RNA, 19 nt, Homo sapiens
  misc_RNA (1)...(19): siRNA sense strand
cucaaggaccuguggacaa

SEQ ID NO: 2244092 - RNA, 19 nt, Homo sapiens
  misc_RNA (1)...(19): siRNA sense strand
cgucaguugccaaggugua

SEQ ID NO: 2244093 - RNA, 19 nt, Homo sapiens
  misc_RNA (1)...(19): siRNA sense strand
ccgcuacaucagugaggaa

SEQ ID NO: 2244094 - RNA, 19 nt, Homo sapiens
  misc_RNA (1)...(19): siRNA sense strand
cagaccacucagacagaaa

SEQ ID NO: 2244095 - RNA, 19 nt, Homo sapiens
  misc_RNA (1)...(19): siRNA sense strand
acgugagaauggagcacau

SEQ ID NO: 2244096 - RNA, 19 nt, Homo sapiens
  misc_RNA (1)...(19): siRNA sense strand
ccaaggaaggggagaacau

SEQ ID NO: 2244097 - RNA, 19 nt, Homo sapiens
  misc_RNA (1)...(19): siRNA sense strand
gcacuguacgcuacggaga

SEQ ID NO: 2244098 - RNA, 19 nt, Homo sapiens
  misc_RNA (1)...(19): siRNA sense strand
cauuaagggagcaagcuga

SEQ ID NO: 2244099 - RNA, 19 nt, Homo sapiens
  misc_RNA (1)...(19): siRNA sense strand
aggacaaggacgaggauca

SEQ ID NO: 2244100 - RNA, 19 nt, Homo sapiens
  misc_RNA (1)...(19): siRNA sense strand
ugaagaaggacaaggacga

SEQ ID NO: 2244101 - RNA, 19 nt, Homo sapiens
  misc_RNA (1)...(19): siRNA sense strand
ccaagcaggugguggccau

SEQ ID NO: 2244102 - RNA, 19 nt, Homo sapiens
  misc_RNA (1)...(19): siRNA sense strand
gcuuccuggugcugggcua

SEQ ID NO: 2244103 - RNA, 19 nt, Homo sapiens
  misc_RNA (1)...(19): siRNA sense strand
ucuaugugaagaaggacaa

SEQ ID NO: 2244104 - RNA, 19 nt, Homo sapiens
  misc_RNA (1)...(19): siRNA sense strand
ucagcaacgccucgggcaa

SEQ ID NO: 2244105 - RNA, 19 nt, Homo sapiens
  misc_RNA (1)...(19): siRNA sense strand
ccaugaacgccgaggacga

SEQ ID NO: 2244106 - RNA, 19 nt, Homo sapiens
  misc_RNA (1)...(19): siRNA sense strand
ggaccuucuuccaggccua

SEQ ID NO: 2244107 - RNA, 19 nt, Homo sapiens
  misc_RNA (1)...(19): siRNA sense strand
ccaagaaggggcugggcau

SEQ ID NO: 2244108 - RNA, 19 nt, Homo sapiens
  misc_RNA (1)...(19): siRNA sense strand
ugguaguggccaagaguga

SEQ ID NO: 2244109 - RNA, 19 nt, Homo sapiens
  misc_RNA (1)...(19): siRNA sense strand
ggugaagaagccagaccaa

SEQ ID NO: 2244110 - RNA, 19 nt, Homo sapiens
  misc_RNA (1)...(19): siRNA sense strand
acgaggaugaugaggaaga

SEQ ID NO: 2244111 - RNA, 19 nt, Homo sapiens
  misc_RNA (1)...(19): siRNA sense strand
aggacgaugacgaggauga

SEQ ID NO: 2244112 - RNA, 19 nt, Homo sapiens
  misc_RNA (1)...(19): siRNA sense strand
gcgagagguaccacgacaa

SEQ ID NO: 2244113 - RNA, 19 nt, Homo sapiens
  misc_RNA (1)...(19): siRNA sense strand
aggaugaugaggaagauga

SEQ ID NO: 2244114 - RNA, 19 nt, Homo sapiens
  misc_RNA (1)...(19): siRNA sense strand
gagugugaagaucgagcaa

SEQ ID NO: 2244115 - RNA, 19 nt, Homo sapiens
  misc_RNA (1)...(19): siRNA sense strand
agcugaacgaccaggcuaa

SEQ ID NO: 2244116 - RNA, 19 nt, Homo sapiens
  misc_RNA (1)...(19): siRNA sense strand
gccaagacccagaccguca

SEQ ID NO: 2244117 - RNA, 19 nt, Homo sapiens
  misc_RNA (1)...(19): siRNA sense strand
ugaagaucgagcaagggaa

SEQ ID NO: 2244118 - RNA, 19 nt, Homo sapiens
  misc_RNA (1)...(19): siRNA sense strand
ccaaagagaugaaggaguc

SEQ ID NO: 2244119 - RNA, 19 nt, Homo sapiens
  misc_RNA (1)...(19): siRNA sense strand
gcacuggagucaugggugu

SEQ ID NO: 2244120 - RNA, 19 nt, Homo sapiens
  misc_RNA (1)...(19): siRNA sense strand
uuaacaaggcagagaagca

SEQ ID NO: 2244121 - RNA, 19 nt, Homo sapiens
  misc_RNA (1)...(19): siRNA sense strand
gguucguggccaagcuuua

SEQ ID NO: 2244122 - RNA, 19 nt, Homo sapiens
  misc_RNA (1)...(19): siRNA sense strand
cuggagaaacagauugaca

SEQ ID NO: 2244123 - RNA, 19 nt, Homo sapiens
  misc_RNA (1)...(19): siRNA sense strand
guuaaaugcacgaucagca

SEQ ID NO: 2244124 - RNA, 19 nt, Homo sapiens
  misc_RNA (1)...(19): siRNA sense strand
auaccaaagagaugaagga

SEQ ID NO: 2244125 - RNA, 19 nt, Homo sapiens
  misc_RNA (1)...(19): siRNA sense strand
cugcagaucuagagagcca

SEQ ID NO: 2244126 - RNA, 19 nt, Homo sapiens
  misc_RNA (1)...(19): siRNA sense strand
aggaggaggacgugggcuu

SEQ ID NO: 2244127 - RNA, 19 nt, Homo sapiens
  misc_RNA (1)...(19): siRNA sense strand
cugaaaccuuugugagcga

SEQ ID NO: 2244128 - RNA, 19 nt, Homo sapiens
  misc_RNA (1)...(19): siRNA sense strand
cugaaaaggaggaggacgu

SEQ ID NO: 2244129 - RNA, 19 nt, Homo sapiens
  misc_RNA (1)...(19): siRNA sense strand
gggagaaggaccugccgaa

SEQ ID NO: 2244130 - RNA, 19 nt, Homo sapiens
  misc_RNA (1)...(19): siRNA sense strand
cuuagaaauuagaggugau

SEQ ID NO: 2244131 - RNA, 19 nt, Homo sapiens
  misc_RNA (1)...(19): siRNA sense strand
gaaauaaaguguauccuga

SEQ ID NO: 2244132 - RNA, 19 nt, Homo sapiens
  misc_RNA (1)...(19): siRNA sense strand
aacuaacaccugugagaaa

SEQ ID NO: 2244133 - RNA, 19 nt, Homo sapiens
  misc_RNA (1)...(19): siRNA sense strand
gaaaagaacuggaagugga

SEQ ID NO: 2244134 - RNA, 19 nt, Homo sapiens
  misc_RNA (1)...(19): siRNA sense strand
agaggugaugcuaaagaaa

SEQ ID NO: 2244135 - RNA, 19 nt, Homo sapiens
  misc_RNA (1)...(19): siRNA sense strand
aggaauaaaacaacagaga

SEQ ID NO: 2244136 - RNA, 19 nt, Homo sapiens
  misc_RNA (1)...(19): siRNA sense strand
cugucaacccuuggaauaa

SEQ ID NO: 2244137 - RNA, 19 nt, Homo sapiens
  misc_RNA (1)...(19): siRNA sense strand
acuuagcugugcugggauu

SEQ ID NO: 2244138 - RNA, 19 nt, Homo sapiens
  misc_RNA (1)...(19): siRNA sense strand
gcuaaagaaaacagcugua

SEQ ID NO: 2244139 - RNA, 19 nt, Homo sapiens
  misc_RNA (1)...(19): siRNA sense strand
ggaaagaagaacuugggaa

SEQ ID NO: 2244140 - RNA, 19 nt, Homo sapiens
  misc_RNA (1)...(19): siRNA sense strand
gaaagaagaacuugggaag

SEQ ID NO: 2244141 - RNA, 19 nt, Homo sapiens
  misc_RNA (1)...(19): siRNA sense strand
aaaggaaaccuaaaggcaa

SEQ ID NO: 2244142 - RNA, 19 nt, Homo sapiens
  misc_RNA (1)...(19): siRNA sense strand
ccgaauacaagaacgcaga

SEQ ID NO: 2244143 - RNA, 19 nt, Homo sapiens
  misc_RNA (1)...(19): siRNA sense strand
caaaggaaaccuaaaggca

SEQ ID NO: 2244144 - RNA, 19 nt, Homo sapiens
  misc_RNA (1)...(19): siRNA sense strand
caggaaccgaacaggaaau

SEQ ID NO: 2244145 - RNA, 19 nt, Homo sapiens
  misc_RNA (1)...(19): siRNA sense strand
gaguaaacaaagaggaacc

SEQ ID NO: 2244146 - RNA, 19 nt, Homo sapiens
  misc_RNA (1)...(19): siRNA sense strand
cggcagcaaaggaaaccua

SEQ ID NO: 2244147 - RNA, 19 nt, Homo sapiens
  misc_RNA (1)...(19): siRNA sense strand
agucaucauccauggguga

SEQ ID NO: 2244148 - RNA, 19 nt, Homo sapiens
  misc_RNA (1)...(19): siRNA sense strand
auugguaaggaaagaagaa

SEQ ID NO: 2244149 - RNA, 19 nt, Homo sapiens
  misc_RNA (1)...(19): siRNA sense strand
aaaggaaaccuaaaggcaa

SEQ ID NO: 2244150 - RNA, 19 nt, Homo sapiens
  misc_RNA (1)...(19): siRNA sense strand
gcuacauguacguggacuu

SEQ ID NO: 2244151 - RNA, 19 nt, Homo sapiens
  misc_RNA (1)...(19): siRNA sense strand
gaauaaacaaagaggaacc

SEQ ID NO: 2244152 - RNA, 19 nt, Homo sapiens
  misc_RNA (1)...(19): siRNA sense strand
ccgaauacaagaacgcaga

SEQ ID NO: 2244153 - RNA, 19 nt, Homo sapiens
  misc_RNA (1)...(19): siRNA sense strand
caaaggaaaccuaaaggca

SEQ ID NO: 2244154 - RNA, 19 nt, Homo sapiens
  misc_RNA (1)...(19): siRNA sense strand
caggaaccgaacaggaaau

SEQ ID NO: 2244155 - RNA, 19 nt, Homo sapiens
  misc_RNA (1)...(19): siRNA sense strand
agucaucauccauggguga

SEQ ID NO: 2244156 - RNA, 19 nt, Homo sapiens
  misc_RNA (1)...(19): siRNA sense strand
gcugaacguaacugugcaa

SEQ ID NO: 2244157 - RNA, 19 nt, Homo sapiens
  misc_RNA (1)...(19): siRNA sense strand
gaagagaguuugcaggccu

SEQ ID NO: 2244158 - RNA, 19 nt, Homo sapiens
  misc_RNA (1)...(19): siRNA sense strand
ccgcagcaaaggaaaccua

SEQ ID NO: 2244159 - RNA, 19 nt, Homo sapiens
  misc_RNA (1)...(19): siRNA sense strand
aaaggaaaccuaaaggcaa

SEQ ID NO: 2244160 - RNA, 19 nt, Homo sapiens
  misc_RNA (1)...(19): siRNA sense strand
gcuacauguacguggacuu

SEQ ID NO: 2244161 - RNA, 19 nt, Homo sapiens
  misc_RNA (1)...(19): siRNA sense strand
gaauaaacaaagaggaacc

SEQ ID NO: 2244162 - RNA, 19 nt, Homo sapiens
  misc_RNA (1)...(19): siRNA sense strand
caaaggaaaccuaaaggca

SEQ ID NO: 2244163 - RNA, 19 nt, Homo sapiens
  misc_RNA (1)...(19): siRNA sense strand
caggaaccgaacaggaaau

SEQ ID NO: 2244164 - RNA, 19 nt, Homo sapiens
  misc_RNA (1)...(19): siRNA sense strand
ugaaauuucuggccagcau

SEQ ID NO: 2244165 - RNA, 19 nt, Homo sapiens
  misc_RNA (1)...(19): siRNA sense strand
agucaucauccauggguga

SEQ ID NO: 2244166 - RNA, 19 nt, Homo sapiens
  misc_RNA (1)...(19): siRNA sense strand
gcugaacguaacugugcaa

SEQ ID NO: 2244167 - RNA, 19 nt, Homo sapiens
  misc_RNA (1)...(19): siRNA sense strand
gaagagaguuugcaggccu

SEQ ID NO: 2244168 - RNA, 19 nt, Homo sapiens
  misc_RNA (1)...(19): siRNA sense strand
ccgcagcaaaggaaaccua

SEQ ID NO: 2244169 - RNA, 19 nt, Homo sapiens
  misc_RNA (1)...(19): siRNA sense strand
acaaagaacugcauagcgu

SEQ ID NO: 2244170 - RNA, 19 nt, Homo sapiens
  misc_RNA (1)...(19): siRNA sense strand
cguuauaucuguaagcaac

SEQ ID NO: 2244171 - RNA, 19 nt, Homo sapiens
  misc_RNA (1)...(19): siRNA sense strand
uaaacugaguauugagcca

SEQ ID NO: 2244172 - RNA, 19 nt, Homo sapiens
  misc_RNA (1)...(19): siRNA sense strand
ucguuauaucuguaagcaa

SEQ ID NO: 2244173 - RNA, 19 nt, Homo sapiens
  misc_RNA (1)...(19): siRNA sense strand
acaaagaacugcauagcgu

SEQ ID NO: 2244174 - RNA, 19 nt, Homo sapiens
  misc_RNA (1)...(19): siRNA sense strand
cguuauaucuguaagcaac

SEQ ID NO: 2244175 - RNA, 19 nt, Homo sapiens
  misc_RNA (1)...(19): siRNA sense strand
uaaacugaguauugagcca

SEQ ID NO: 2244176 - RNA, 19 nt, Homo sapiens
  misc_RNA (1)...(19): siRNA sense strand
ucguuauaucuguaagcaa

SEQ ID NO: 2244177 - RNA, 19 nt, Homo sapiens
  misc_RNA (1)...(19): siRNA sense strand
cgaagaaggcccagcuaau

SEQ ID NO: 2244178 - RNA, 19 nt, Homo sapiens
  misc_RNA (1)...(19): siRNA sense strand
cccagaaggcugaggaaaa

SEQ ID NO: 2244179 - RNA, 19 nt, Homo sapiens
  misc_RNA (1)...(19): siRNA sense strand
aggcaaacauccugggucu

SEQ ID NO: 2244180 - RNA, 19 nt, Homo sapiens
  misc_RNA (1)...(19): siRNA sense strand
cuacagaagcuaagcagca

SEQ ID NO: 2244181 - RNA, 19 nt, Homo sapiens
  misc_RNA (1)...(19): siRNA sense strand
ccgaagaaggcccagcuaa

SEQ ID NO: 2244182 - RNA, 19 nt, Homo sapiens
  misc_RNA (1)...(19): siRNA sense strand
uggcugggucagaggacaa

SEQ ID NO: 2244183 - RNA, 19 nt, Homo sapiens
  misc_RNA (1)...(19): siRNA sense strand
uggaacgcguggagggcau

SEQ ID NO: 2244184 - RNA, 19 nt, Homo sapiens
  misc_RNA (1)...(19): siRNA sense strand
ugguagaugcgcugaauca

SEQ ID NO: 2244185 - RNA, 19 nt, Homo sapiens
  misc_RNA (1)...(19): siRNA sense strand
agagaaagcuggagucccu

SEQ ID NO: 2244186 - RNA, 19 nt, Homo sapiens
  misc_RNA (1)...(19): siRNA sense strand
aagcaagauuggagcuacu

SEQ ID NO: 2244187 - RNA, 19 nt, Homo sapiens
  misc_RNA (1)...(19): siRNA sense strand
gcccugaggaagaggagau

SEQ ID NO: 2244188 - RNA, 19 nt, Homo sapiens
  misc_RNA (1)...(19): siRNA sense strand
cggaagagaaagcuggagu

SEQ ID NO: 2244189 - RNA, 19 nt, Homo sapiens
  misc_RNA (1)...(19): siRNA sense strand
aggagaaggcugaggacug

SEQ ID NO: 2244190 - RNA, 19 nt, Homo sapiens
  misc_RNA (1)...(19): siRNA sense strand
gcccagaaggcugaggaaa

SEQ ID NO: 2244191 - RNA, 19 nt, Homo sapiens
  misc_RNA (1)...(19): siRNA sense strand
aggcugaggaaaaggagaa

SEQ ID NO: 2244192 - RNA, 19 nt, Homo sapiens
  misc_RNA (1)...(19): siRNA sense strand
uguuaagcugucucagaaa

SEQ ID NO: 2244193 - RNA, 19 nt, Homo sapiens
  misc_RNA (1)...(19): siRNA sense strand
augcugugcuccuggucaa

SEQ ID NO: 2244194 - RNA, 19 nt, Homo sapiens
  misc_RNA (1)...(19): siRNA sense strand
gcaaagugguagaugcgcu

SEQ ID NO: 2244195 - RNA, 19 nt, Homo sapiens
  misc_RNA (1)...(19): siRNA sense strand
aagaagaaacagaagaaga

SEQ ID NO: 2244196 - RNA, 19 nt, Homo sapiens
  misc_RNA (1)...(19): siRNA sense strand
ccucaaacgaaaagagaau

SEQ ID NO: 2244197 - RNA, 19 nt, Homo sapiens
  misc_RNA (1)...(19): siRNA sense strand
cagcagaagaagaaacaga

SEQ ID NO: 2244198 - RNA, 19 nt, Homo sapiens
  misc_RNA (1)...(19): siRNA sense strand
uugaagauguccaggaaca

SEQ ID NO: 2244199 - RNA, 19 nt, Homo sapiens
  misc_RNA (1)...(19): siRNA sense strand
agauggacccaaugauaaa

SEQ ID NO: 2244200 - RNA, 19 nt, Homo sapiens
  misc_RNA (1)...(19): siRNA sense strand
cugaguagcccaaaggaau

SEQ ID NO: 2244201 - RNA, 19 nt, Homo sapiens
  misc_RNA (1)...(19): siRNA sense strand
cugaaaaguuacaagaaca

SEQ ID NO: 2244202 - RNA, 19 nt, Homo sapiens
  misc_RNA (1)...(19): siRNA sense strand
cagaagaagaaacagaaga

SEQ ID NO: 2244203 - RNA, 19 nt, Homo sapiens
  misc_RNA (1)...(19): siRNA sense strand
gcugaguagcccaaaggaa

SEQ ID NO: 2244204 - RNA, 19 nt, Homo sapiens
  misc_RNA (1)...(19): siRNA sense strand
augaaaaccaggagaucua

SEQ ID NO: 2244205 - RNA, 19 nt, Homo sapiens
  misc_RNA (1)...(19): siRNA sense strand
ccaaaagcccagagcaaca

SEQ ID NO: 2244206 - RNA, 19 nt, Homo sapiens
  misc_RNA (1)...(19): siRNA sense strand
cugacaugauugagaugau

SEQ ID NO: 2244207 - RNA, 19 nt, Homo sapiens
  misc_RNA (1)...(19): siRNA sense strand
gcauguuggacgauaucua

SEQ ID NO: 2244208 - RNA, 19 nt, Homo sapiens
  misc_RNA (1)...(19): siRNA sense strand
gcugaauuucggacaagaa

SEQ ID NO: 2244209 - RNA, 19 nt, Homo sapiens
  misc_RNA (1)...(19): siRNA sense strand
cagauuaguaacauggaga

SEQ ID NO: 2244210 - RNA, 19 nt, Homo sapiens
  misc_RNA (1)...(19): siRNA sense strand
cuuugcgagcugugggaaa

SEQ ID NO: 2244211 - RNA, 19 nt, Homo sapiens
  misc_RNA (1)...(19): siRNA sense strand
cccuaaauggcuuggaaaa

SEQ ID NO: 2244212 - RNA, 19 nt, Homo sapiens
  misc_RNA (1)...(19): siRNA sense strand
uggagaacaggaagccaaa

SEQ ID NO: 2244213 - RNA, 19 nt, Homo sapiens
  misc_RNA (1)...(19): siRNA sense strand
acacagaaauucaggaagc

SEQ ID NO: 2244214 - RNA, 19 nt, Homo sapiens
  misc_RNA (1)...(19): siRNA sense strand
ggagggaggaagaaggacu

SEQ ID NO: 2244215 - RNA, 19 nt, Homo sapiens
  misc_RNA (1)...(19): siRNA sense strand
agacugugauagaugccaa

SEQ ID NO: 2244216 - RNA, 19 nt, Homo sapiens
  misc_RNA (1)...(19): siRNA sense strand
uggccagguuuguggaguu

SEQ ID NO: 2244217 - RNA, 19 nt, Homo sapiens
  misc_RNA (1)...(19): siRNA sense strand
gcccuaaauggcuuggaaa

SEQ ID NO: 2244218 - RNA, 19 nt, Homo sapiens
  misc_RNA (1)...(19): siRNA sense strand
gaugagaugcgcaggagga

SEQ ID NO: 2244219 - RNA, 19 nt, Homo sapiens
  misc_RNA (1)...(19): siRNA sense strand
gcccaaaggaaucuaucaa

SEQ ID NO: 2244220 - RNA, 19 nt, Homo sapiens
  misc_RNA (1)...(19): siRNA sense strand
agaaaagagaagagcaguu

SEQ ID NO: 2244221 - RNA, 19 nt, Homo sapiens
  misc_RNA (1)...(19): siRNA sense strand
cggaaugcaguaugggcuu

SEQ ID NO: 2244222 - RNA, 19 nt, Homo sapiens
  misc_RNA (1)...(19): siRNA sense strand
cuaauauuacagcuggaaa

SEQ ID NO: 2244223 - RNA, 19 nt, Homo sapiens
  misc_RNA (1)...(19): siRNA sense strand
aggaagaaggacugcaguu

SEQ ID NO: 2244224 - RNA, 19 nt, Homo sapiens
  misc_RNA (1)...(19): siRNA sense strand
acacugauguacuggcuga

SEQ ID NO: 2244225 - RNA, 19 nt, Homo sapiens
  misc_RNA (1)...(19): siRNA sense strand
gugugaggcuccuauggaa

SEQ ID NO: 2244226 - RNA, 19 nt, Homo sapiens
  misc_RNA (1)...(19): siRNA sense strand
auguaggagacuuguggaa

SEQ ID NO: 2244227 - RNA, 19 nt, Homo sapiens
  misc_RNA (1)...(19): siRNA sense strand
agagaagagcaguuauuca

SEQ ID NO: 2244228 - RNA, 19 nt, Homo sapiens
  misc_RNA (1)...(19): siRNA sense strand
uuccaaaagcccagagcaa

SEQ ID NO: 2244229 - RNA, 19 nt, Homo sapiens
  misc_RNA (1)...(19): siRNA sense strand
aaggaagcauguuggacga

SEQ ID NO: 2244230 - RNA, 19 nt, Homo sapiens
  misc_RNA (1)...(19): siRNA sense strand
agaugaagacagcagcauu

SEQ ID NO: 2244231 - RNA, 19 nt, Homo sapiens
  misc_RNA (1)...(19): siRNA sense strand
caguuauucaagcggagaa

SEQ ID NO: 2244232 - RNA, 19 nt, Homo sapiens
  misc_RNA (1)...(19): siRNA sense strand
ccuaaauggcuuggaaaau

SEQ ID NO: 2244233 - RNA, 19 nt, Homo sapiens
  misc_RNA (1)...(19): siRNA sense strand
cuuugaucuuauugagcau

SEQ ID NO: 2244234 - RNA, 19 nt, Homo sapiens
  misc_RNA (1)...(19): siRNA sense strand
ugaagaauguggaggcuua

SEQ ID NO: 2244235 - RNA, 19 nt, Homo sapiens
  misc_RNA (1)...(19): siRNA sense strand
cuguagaggaagaggaaga

SEQ ID NO: 2244236 - RNA, 19 nt, Homo sapiens
  misc_RNA (1)...(19): siRNA sense strand
uaacauugcuucugggaca

SEQ ID NO: 2244237 - RNA, 19 nt, Homo sapiens
  misc_RNA (1)...(19): siRNA sense strand
guguauaaggcuucguuaa

SEQ ID NO: 2244238 - RNA, 19 nt, Homo sapiens
  misc_RNA (1)...(19): siRNA sense strand
gggaaaagacaguacagaa

SEQ ID NO: 2244239 - RNA, 19 nt, Homo sapiens
  misc_RNA (1)...(19): siRNA sense strand
auguggaggcuuagacaaa

SEQ ID NO: 2244240 - RNA, 19 nt, Homo sapiens
  misc_RNA (1)...(19): siRNA sense strand
gaauagaggucaaugugga

SEQ ID NO: 2244241 - RNA, 19 nt, Homo sapiens
  misc_RNA (1)...(19): siRNA sense strand
aggaagaggaagaucaaaa

SEQ ID NO: 2244242 - RNA, 19 nt, Homo sapiens
  misc_RNA (1)...(19): siRNA sense strand
gaggagaaauguaagcuca

SEQ ID NO: 2244243 - RNA, 19 nt, Homo sapiens
  misc_RNA (1)...(19): siRNA sense strand
gaauauugucacugguaca

SEQ ID NO: 2244244 - RNA, 19 nt, Homo sapiens
  misc_RNA (1)...(19): siRNA sense strand
acuaggugaaacugagaaa

SEQ ID NO: 2244245 - RNA, 19 nt, Homo sapiens
  misc_RNA (1)...(19): siRNA sense strand
agaggaagaggaagaucaa

SEQ ID NO: 2244246 - RNA, 19 nt, Homo sapiens
  misc_RNA (1)...(19): siRNA sense strand
aaggaagcuacguggacaa

SEQ ID NO: 2244247 - RNA, 19 nt, Homo sapiens
  misc_RNA (1)...(19): siRNA sense strand
ugucacugguacagaugaa

SEQ ID NO: 2244248 - RNA, 19 nt, Homo sapiens
  misc_RNA (1)...(19): siRNA sense strand
ugagaaacuaggugaaacu

SEQ ID NO: 2244249 - RNA, 19 nt, Homo sapiens
  misc_RNA (1)...(19): siRNA sense strand
aggaaacauugcaggugau

SEQ ID NO: 2244250 - RNA, 19 nt, Homo sapiens
  misc_RNA (1)...(19): siRNA sense strand
ccuuguucacuguggcaua

SEQ ID NO: 2244251 - RNA, 19 nt, Homo sapiens
  misc_RNA (1)...(19): siRNA sense strand
ucaauguggagcugaggaa

SEQ ID NO: 2244252 - RNA, 19 nt, Homo sapiens
  misc_RNA (1)...(19): siRNA sense strand
cgagaaugcuaauacacca

SEQ ID NO: 2244253 - RNA, 19 nt, Homo sapiens
  misc_RNA (1)...(19): siRNA sense strand
cugucugggcucuaggaaa

SEQ ID NO: 2244254 - RNA, 19 nt, Homo sapiens
  misc_RNA (1)...(19): siRNA sense strand
uaggaaacauugcagguga

SEQ ID NO: 2244255 - RNA, 19 nt, Homo sapiens
  misc_RNA (1)...(19): siRNA sense strand
agauacagcaaguugugaa

SEQ ID NO: 2244256 - RNA, 19 nt, Homo sapiens
  misc_RNA (1)...(19): siRNA sense strand
agaaaugaggcgucgcaga

SEQ ID NO: 2244257 - RNA, 19 nt, Homo sapiens
  misc_RNA (1)...(19): siRNA sense strand
gaaaaugagucuguguaua

SEQ ID NO: 2244258 - RNA, 19 nt, Homo sapiens
  misc_RNA (1)...(19): siRNA sense strand
uagaggaagaggaagauca

SEQ ID NO: 2244259 - RNA, 19 nt, Homo sapiens
  misc_RNA (1)...(19): siRNA sense strand
gauacagcaaguugugaau

SEQ ID NO: 2244260 - RNA, 19 nt, Homo sapiens
  misc_RNA (1)...(19): siRNA sense strand
aggcagauuuuaagacaca

SEQ ID NO: 2244261 - RNA, 19 nt, Homo sapiens
  misc_RNA (1)...(19): siRNA sense strand
cagaugcugaagaggagaa

SEQ ID NO: 2244262 - RNA, 19 nt, Homo sapiens
  misc_RNA (1)...(19): siRNA sense strand
gaacaagggaaaagacagu

SEQ ID NO: 2244263 - RNA, 19 nt, Homo sapiens
  misc_RNA (1)...(19): siRNA sense strand
ccuuacugaugguccaaau

SEQ ID NO: 2244264 - RNA, 19 nt, Homo sapiens
  misc_RNA (1)...(19): siRNA sense strand
ugugauugaugcaggagca

SEQ ID NO: 2244265 - RNA, 19 nt, Homo sapiens
  misc_RNA (1)...(19): siRNA sense strand
caguaugggcuuugggaaa

SEQ ID NO: 2244266 - RNA, 19 nt, Homo sapiens
  misc_RNA (1)...(19): siRNA sense strand
gggaaacauuauaggugau

SEQ ID NO: 2244267 - RNA, 19 nt, Homo sapiens
  misc_RNA (1)...(19): siRNA sense strand
cugaaauaauagaggaaug

SEQ ID NO: 2244268 - RNA, 19 nt, Homo sapiens
  misc_RNA (1)...(19): siRNA sense strand
cuugacagauggagguaau

SEQ ID NO: 2244269 - RNA, 19 nt, Homo sapiens
  misc_RNA (1)...(19): siRNA sense strand
ggaaacaaugcgaagacau

SEQ ID NO: 2244270 - RNA, 19 nt, Homo sapiens
  misc_RNA (1)...(19): siRNA sense strand
caacauaacagcaggcaac

SEQ ID NO: 2244271 - RNA, 19 nt, Homo sapiens
  misc_RNA (1)...(19): siRNA sense strand
gcagaaaagaucagguuga

SEQ ID NO: 2244272 - RNA, 19 nt, Homo sapiens
  misc_RNA (1)...(19): siRNA sense strand
auguggagguuuggagaaa

SEQ ID NO: 2244273 - RNA, 19 nt, Homo sapiens
  misc_RNA (1)...(19): siRNA sense strand
acccaaaagagaagauaaa

SEQ ID NO: 2244274 - RNA, 19 nt, Homo sapiens
  misc_RNA (1)...(19): siRNA sense strand
ggugaugaagcaagcacaa

SEQ ID NO: 2244275 - RNA, 19 nt, Homo sapiens
  misc_RNA (1)...(19): siRNA sense strand
gucuagaaagggaugauaa

SEQ ID NO: 2244276 - RNA, 19 nt, Homo sapiens
  misc_RNA (1)...(19): siRNA sense strand
agucaaaguucaaacagca

SEQ ID NO: 2244277 - RNA, 19 nt, Homo sapiens
  misc_RNA (1)...(19): siRNA sense strand
ugggaaacauuauagguga

SEQ ID NO: 2244278 - RNA, 19 nt, Homo sapiens
  misc_RNA (1)...(19): siRNA sense strand
aacaauaaguggcagaaaa

SEQ ID NO: 2244279 - RNA, 19 nt, Homo sapiens
  misc_RNA (1)...(19): siRNA sense strand
ucaaaugucuagaaaggga

SEQ ID NO: 2244280 - RNA, 19 nt, Homo sapiens
  misc_RNA (1)...(19): siRNA sense strand
uggugaugauauugaugaa

SEQ ID NO: 2244281 - RNA, 19 nt, Homo sapiens
  misc_RNA (1)...(19): siRNA sense strand
ucuagaaagggaugauaau

SEQ ID NO: 2244282 - RNA, 19 nt, Homo sapiens
  misc_RNA (1)...(19): siRNA sense strand
cauuauaggugaugguccu

SEQ ID NO: 2244283 - RNA, 19 nt, Homo sapiens
  misc_RNA (1)...(19): siRNA sense strand
agcugaaauaauagaggaa

SEQ ID NO: 2244284 - RNA, 19 nt, Homo sapiens
  misc_RNA (1)...(19): siRNA sense strand
ccaacauaacagcaggcaa

SEQ ID NO: 2244285 - RNA, 19 nt, Homo sapiens
  misc_RNA (1)...(19): siRNA sense strand
aaaugaagugacaguggaa

SEQ ID NO: 2244286 - RNA, 19 nt, Homo sapiens
  misc_RNA (1)...(19): siRNA sense strand
uggaacugcggaagaacaa

SEQ ID NO: 2244287 - RNA, 19 nt, Homo sapiens
  misc_RNA (1)...(19): siRNA sense strand
cucauauaccauacagaua

SEQ ID NO: 2244288 - RNA, 19 nt, Homo sapiens
  misc_RNA (1)...(19): siRNA sense strand
cuguaauagaugcuggauu

SEQ ID NO: 2244289 - RNA, 19 nt, Homo sapiens
  misc_RNA (1)...(19): siRNA sense strand
cggaagaacaaaagagaug

SEQ ID NO: 2244290 - RNA, 19 nt, Homo sapiens
  misc_RNA (1)...(19): siRNA sense strand
gugauaacccaguggucca

SEQ ID NO: 2244291 - RNA, 19 nt, Homo sapiens
  misc_RNA (1)...(19): siRNA sense strand
gagguaaugaacagauaca

SEQ ID NO: 2244292 - RNA, 19 nt, Homo sapiens
  misc_RNA (1)...(19): siRNA sense strand
guggagguuuggagaaaau

SEQ ID NO: 2244293 - RNA, 19 nt, Homo sapiens
  misc_RNA (1)...(19): siRNA sense strand
agaaagucuagaagauuca

SEQ ID NO: 2244294 - RNA, 19 nt, Homo sapiens
  misc_RNA (1)...(19): siRNA sense strand
gcagaaugccacaagugau

SEQ ID NO: 2244295 - RNA, 19 nt, Homo sapiens
  misc_RNA (1)...(19): siRNA sense strand
aaacauucuuguagacacu

SEQ ID NO: 2244296 - RNA, 19 nt, Homo sapiens
  misc_RNA (1)...(19): siRNA sense strand
gagaagauaaauaaggaag

SEQ ID NO: 2244297 - RNA, 19 nt, Homo sapiens
  misc_RNA (1)...(19): siRNA sense strand
aguucaagcuguaauagau

SEQ ID NO: 2244298 - RNA, 19 nt, Homo sapiens
  misc_RNA (1)...(19): siRNA sense strand
cugcuugggcauuaacuaa

SEQ ID NO: 2244299 - RNA, 19 nt, Homo sapiens
  misc_RNA (1)...(19): siRNA sense strand
gcauuaacuaacauagcau

SEQ ID NO: 2244300 - RNA, 19 nt, Homo sapiens
  misc_RNA (1)...(19): siRNA sense strand
gaacaaaagagaugaacac

SEQ ID NO: 2244301 - RNA, 19 nt, Homo sapiens
  misc_RNA (1)...(19): siRNA sense strand
agauaaauaaggaagcagu

SEQ ID NO: 2244302 - RNA, 19 nt, Homo sapiens
  misc_RNA (1)...(19): siRNA sense strand
uaacaauaaguggcagaaa

SEQ ID NO: 2244303 - RNA, 19 nt, Homo sapiens
  misc_RNA (1)...(19): siRNA sense strand
ccgauugaugacuuaauaa

SEQ ID NO: 2244304 - RNA, 19 nt, Homo sapiens
  misc_RNA (1)...(19): siRNA sense strand
uggagacaguucaggagau

SEQ ID NO: 2244305 - RNA, 19 nt, Homo sapiens
  misc_RNA (1)...(19): siRNA sense strand
gaagaacaaaagagaugaa

SEQ ID NO: 2244306 - RNA, 19 nt, Homo sapiens
  misc_RNA (1)...(19): siRNA sense strand
gcaguaugggcuuugggaa

SEQ ID NO: 2244307 - RNA, 19 nt, Homo sapiens
  misc_RNA (1)...(19): siRNA sense strand
uccucaauguagagauuau

SEQ ID NO: 2244308 - RNA, 19 nt, Homo sapiens
  misc_RNA (1)...(19): siRNA sense strand
ucaggaagucaaaguucaa

SEQ ID NO: 2244309 - RNA, 19 nt, Homo sapiens
  misc_RNA (1)...(19): siRNA sense strand
auaaggaagcagugugguu

SEQ ID NO: 2244310 - RNA, 19 nt, Homo sapiens
  misc_RNA (1)...(19): siRNA sense strand
ugucaaucucugcaggaau

SEQ ID NO: 2244311 - RNA, 19 nt, Homo sapiens
  misc_RNA (1)...(19): siRNA sense strand
cuguccaggcagcaagaaa

SEQ ID NO: 2244312 - RNA, 19 nt, Homo sapiens
  misc_RNA (1)...(19): siRNA sense strand
uguuauccagugacagaaa

SEQ ID NO: 2244313 - RNA, 19 nt, Homo sapiens
  misc_RNA (1)...(19): siRNA sense strand
cagcaggcaaccagcaaca

SEQ ID NO: 2244314 - RNA, 19 nt, Homo sapiens
  misc_RNA (1)...(19): siRNA sense strand
gcguagacgaagagaagaa

SEQ ID NO: 2244315 - RNA, 19 nt, Homo sapiens
  misc_RNA (1)...(19): siRNA sense strand
gaacaagaaucuaagcaga

SEQ ID NO: 2244316 - RNA, 19 nt, Homo sapiens
  misc_RNA (1)...(19): siRNA sense strand
caggaguuguacagagauu

SEQ ID NO: 2244317 - RNA, 19 nt, Homo sapiens
  misc_RNA (1)...(19): siRNA sense strand
cugcaugggcauuaacaaa

SEQ ID NO: 2244318 - RNA, 19 nt, Homo sapiens
  misc_RNA (1)...(19): siRNA sense strand
uguacagagauuugugaaa

SEQ ID NO: 2244319 - RNA, 19 nt, Homo sapiens
  misc_RNA (1)...(19): siRNA sense strand
gaaauuuaccagaaggcau

SEQ ID NO: 2244320 - RNA, 19 nt, Homo sapiens
  misc_RNA (1)...(19): siRNA sense strand
acgaagagaagaagaagga

SEQ ID NO: 2244321 - RNA, 19 nt, Homo sapiens
  misc_RNA (1)...(19): siRNA sense strand
agaagaaggaauacagcuu

SEQ ID NO: 2244322 - RNA, 19 nt, Homo sapiens
  misc_RNA (1)...(19): siRNA sense strand
cagauaugguucagaugau

SEQ ID NO: 2244323 - RNA, 19 nt, Homo sapiens
  misc_RNA (1)...(19): siRNA sense strand
agagaugcguagacgaaga

SEQ ID NO: 2244324 - RNA, 19 nt, Homo sapiens
  misc_RNA (1)...(19): siRNA sense strand
uagacgaagagaagaagaa

SEQ ID NO: 2244325 - RNA, 19 nt, Homo sapiens
  misc_RNA (1)...(19): siRNA sense strand
aaauauagcaucuggaacu

SEQ ID NO: 2244326 - RNA, 19 nt, Homo sapiens
  misc_RNA (1)...(19): siRNA sense strand
gggaaagauaacuauagaa

SEQ ID NO: 2244327 - RNA, 19 nt, Homo sapiens
  misc_RNA (1)...(19): siRNA sense strand
cauggcuaguccagggaaa

SEQ ID NO: 2244328 - RNA, 19 nt, Homo sapiens
  misc_RNA (1)...(19): siRNA sense strand
ucaaauuuauguagaggca

SEQ ID NO: 2244329 - RNA, 19 nt, Homo sapiens
  misc_RNA (1)...(19): siRNA sense strand
uggaaauagagcucagauu

SEQ ID NO: 2244330 - RNA, 19 nt, Homo sapiens
  misc_RNA (1)...(19): siRNA sense strand
aaucuaagcagaauggaau

SEQ ID NO: 2244331 - RNA, 19 nt, Homo sapiens
  misc_RNA (1)...(19): siRNA sense strand
aacaagaaucuaagcagaa

SEQ ID NO: 2244332 - RNA, 19 nt, Homo sapiens
  misc_RNA (1)...(19): siRNA sense strand
cuaauaaugcugaucaaca

SEQ ID NO: 2244333 - RNA, 19 nt, Homo sapiens
  misc_RNA (1)...(19): siRNA sense strand
acagcaacacagaaauuua

SEQ ID NO: 2244334 - RNA, 19 nt, Homo sapiens
  misc_RNA (1)...(19): siRNA sense strand
acucacaacaacaagaaau

SEQ ID NO: 2244335 - RNA, 19 nt, Homo sapiens
  misc_RNA (1)...(19): siRNA sense strand
ucucauugaagaagcauau

SEQ ID NO: 2244336 - RNA, 19 nt, Homo sapiens
  misc_RNA (1)...(19): siRNA sense strand
aaauuuaccagaaggcauu

SEQ ID NO: 2244337 - RNA, 19 nt, Homo sapiens
  misc_RNA (1)...(19): siRNA sense strand
gagaagaagaaggaauaca

SEQ ID NO: 2244338 - RNA, 19 nt, Homo sapiens
  misc_RNA (1)...(19): siRNA sense strand
aggcuguuauagaugcaaa

SEQ ID NO: 2244339 - RNA, 19 nt, Homo sapiens
  misc_RNA (1)...(19): siRNA sense strand
uuuacgucuuggagaacaa

SEQ ID NO: 2244340 - RNA, 19 nt, Homo sapiens
  misc_RNA (1)...(19): siRNA sense strand
aaauaguccaaguggcuuu

SEQ ID NO: 2244341 - RNA, 19 nt, Homo sapiens
  misc_RNA (1)...(19): siRNA sense strand
cuaacaucacugcuggaaa

SEQ ID NO: 2244342 - RNA, 19 nt, Homo sapiens
  misc_RNA (1)...(19): siRNA sense strand
cuccagagcaaauaaggua

SEQ ID NO: 2244343 - RNA, 19 nt, Homo sapiens
  misc_RNA (1)...(19): siRNA sense strand
gcuuuaaauggacuugaaa

SEQ ID NO: 2244344 - RNA, 19 nt, Homo sapiens
  misc_RNA (1)...(19): siRNA sense strand
uuggagaacaagaaucuaa

SEQ ID NO: 2244345 - RNA, 19 nt, Homo sapiens
  misc_RNA (1)...(19): siRNA sense strand
cuguuugggcacuugguaa

SEQ ID NO: 2244346 - RNA, 19 nt, Homo sapiens
  misc_RNA (1)...(19): siRNA sense strand
agcccaaaggagucaauua

SEQ ID NO: 2244347 - RNA, 19 nt, Homo sapiens
  misc_RNA (1)...(19): siRNA sense strand
ggagucaauuagaaaagaa

SEQ ID NO: 2244348 - RNA, 19 nt, Homo sapiens
  misc_RNA (1)...(19): siRNA sense strand
ccagggaaagauaacuaua

SEQ ID NO: 2244349 - RNA, 19 nt, Homo sapiens
  misc_RNA (1)...(19): siRNA sense strand
gaugaaucuaugcuugaaa

SEQ ID NO: 2244350 - RNA, 19 nt, Homo sapiens
  misc_RNA (1)...(19): siRNA sense strand
acaaauucaaacagacuca

SEQ ID NO: 2244351 - RNA, 19 nt, Homo sapiens
  misc_RNA (1)...(19): siRNA sense strand
ccaugaaaaucaggaaauu

SEQ ID NO: 2244352 - RNA, 19 nt, Homo sapiens
  misc_RNA (1)...(19): siRNA sense strand
aaacagacucacaacaaca

SEQ ID NO: 2244353 - RNA, 19 nt, Homo sapiens
  misc_RNA (1)...(19): siRNA sense strand
agcauauggucuggauaaa

SEQ ID NO: 2244354 - RNA, 19 nt, Homo sapiens
  misc_RNA (1)...(19): siRNA sense strand
agauggaauugaagaggaa

SEQ ID NO: 2244355 - RNA, 19 nt, Homo sapiens
  misc_RNA (1)...(19): siRNA sense strand
cagaauugcuaaagcgcau

SEQ ID NO: 2244356 - RNA, 19 nt, Homo sapiens
  misc_RNA (1)...(19): siRNA sense strand
cugagaaacauaagagaca

SEQ ID NO: 2244357 - RNA, 19 nt, Homo sapiens
  misc_RNA (1)...(19): siRNA sense strand
gagaaacauaagagacaau

SEQ ID NO: 2244358 - RNA, 19 nt, Homo sapiens
  misc_RNA (1)...(19): siRNA sense strand
cagaaauggaacauguuaa

SEQ ID NO: 2244359 - RNA, 19 nt, Homo sapiens
  misc_RNA (1)...(19): siRNA sense strand
ugaugaagaaccagaggua

SEQ ID NO: 2244360 - RNA, 19 nt, Homo sapiens
  misc_RNA (1)...(19): siRNA sense strand
caguaggacucaagcucua

SEQ ID NO: 2244361 - RNA, 19 nt, Homo sapiens
  misc_RNA (1)...(19): siRNA sense strand
uguuaaagaaucaggcauu

SEQ ID NO: 2244362 - RNA, 19 nt, Homo sapiens
  misc_RNA (1)...(19): siRNA sense strand
gaauugaagaggaagauga

SEQ ID NO: 2244363 - RNA, 19 nt, Homo sapiens
  misc_RNA (1)...(19): siRNA sense strand
ucagaagauuugugaagau

SEQ ID NO: 2244364 - RNA, 19 nt, Homo sapiens
  misc_RNA (1)...(19): siRNA sense strand
gcaugaugaagauggaauu

SEQ ID NO: 2244365 - RNA, 19 nt, Homo sapiens
  misc_RNA (1)...(19): siRNA sense strand
guguaucagcguuguguaa

SEQ ID NO: 2244366 - RNA, 19 nt, Homo sapiens
  misc_RNA (1)...(19): siRNA sense strand
aaaucaaguuggcgaugaa

SEQ ID NO: 2244367 - RNA, 19 nt, Homo sapiens
  misc_RNA (1)...(19): siRNA sense strand
ccacaugggcaauuggaga

SEQ ID NO: 2244368 - RNA, 19 nt, Homo sapiens
  misc_RNA (1)...(19): siRNA sense strand
uaagagacaaugaggaaaa

SEQ ID NO: 2244369 - RNA, 19 nt, Homo sapiens
  misc_RNA (1)...(19): siRNA sense strand
gcauaauauaguugaguac

SEQ ID NO: 2244370 - RNA, 19 nt, Homo sapiens
  misc_RNA (1)...(19): siRNA sense strand
acuuaagggugauguugaa

SEQ ID NO: 2244371 - RNA, 19 nt, Homo sapiens
  misc_RNA (1)...(19): siRNA sense strand
ggauaaaaugccagaaguu

SEQ ID NO: 2244372 - RNA, 19 nt, Homo sapiens
  misc_RNA (1)...(19): siRNA sense strand
agcaagggcuucagcaaau

SEQ ID NO: 2244373 - RNA, 19 nt, Homo sapiens
  misc_RNA (1)...(19): siRNA sense strand
gaugaaaauuggaggcguu

SEQ ID NO: 2244374 - RNA, 19 nt, Homo sapiens
  misc_RNA (1)...(19): siRNA sense strand
uugaagaggaagaugauga

SEQ ID NO: 2244375 - RNA, 19 nt, Homo sapiens
  misc_RNA (1)...(19): siRNA sense strand
cgagcaagggcuucagcaa

SEQ ID NO: 2244376 - RNA, 19 nt, Homo sapiens
  misc_RNA (1)...(19): siRNA sense strand
aguaacauccugacacuaa

SEQ ID NO: 2244377 - RNA, 19 nt, Homo sapiens
  misc_RNA (1)...(19): siRNA sense strand
ccaagggagaauugcagaa

SEQ ID NO: 2244378 - RNA, 19 nt, Homo sapiens
  misc_RNA (1)...(19): siRNA sense strand
uuauaauaccugugaggga

SEQ ID NO: 2244379 - RNA, 19 nt, Homo sapiens
  misc_RNA (1)...(19): siRNA sense strand
ccuggauguucuugcaaau

SEQ ID NO: 2244380 - RNA, 19 nt, Homo sapiens
  misc_RNA (1)...(19): siRNA sense strand
gugaugaacugcugccaca

SEQ ID NO: 2244381 - RNA, 19 nt, Homo sapiens
  misc_RNA (1)...(19): siRNA sense strand
gccagaaguucgacagagu

SEQ ID NO: 2244382 - RNA, 19 nt, Homo sapiens
  misc_RNA (1)...(19): siRNA sense strand
agaggaagaugaugaugau

SEQ ID NO: 2244383 - RNA, 19 nt, Homo sapiens
  misc_RNA (1)...(19): siRNA sense strand
uugcaaauguguaucguga

SEQ ID NO: 2244384 - RNA, 19 nt, Homo sapiens
  misc_RNA (1)...(19): siRNA sense strand
cugaaggacuuggaggcaa

SEQ ID NO: 2244385 - RNA, 19 nt, Homo sapiens
  misc_RNA (1)...(19): siRNA sense strand
cauaggaacauuagcagau

SEQ ID NO: 2244386 - RNA, 19 nt, Homo sapiens
  misc_RNA (1)...(19): siRNA sense strand
agacguuguuagagaauac

SEQ ID NO: 2244387 - RNA, 19 nt, Homo sapiens
  misc_RNA (1)...(19): siRNA sense strand
uguuggauucugaagauua

SEQ ID NO: 2244388 - RNA, 19 nt, Homo sapiens
  misc_RNA (1)...(19): siRNA sense strand
ggcaugaaguacucagaca

SEQ ID NO: 2244389 - RNA, 19 nt, Homo sapiens
  misc_RNA (1)...(19): siRNA sense strand
agggugauguugaagaaga

SEQ ID NO: 2244390 - RNA, 19 nt, Homo sapiens
  misc_RNA (1)...(19): siRNA sense strand
ugacuggaaucuaagaaaa

SEQ ID NO: 2244391 - RNA, 19 nt, Homo sapiens
  misc_RNA (1)...(19): siRNA sense strand
uuacgaugccauaggaaca

SEQ ID NO: 2244392 - RNA, 19 nt, Homo sapiens
  misc_RNA (1)...(19): siRNA sense strand
uugcacaagccaugcuaaa

SEQ ID NO: 2244393 - RNA, 19 nt, Homo sapiens
  misc_RNA (1)...(19): siRNA sense strand
agaaccagagguacggaaa

SEQ ID NO: 2244394 - RNA, 19 nt, Homo sapiens
  misc_RNA (1)...(19): siRNA sense strand
aagcacacuuucagaacuu

SEQ ID NO: 2244395 - RNA, 19 nt, Homo sapiens
  misc_RNA (1)...(19): siRNA sense strand
auggaauugaagaggaaga

SEQ ID NO: 2244396 - RNA, 19 nt, Homo sapiens
  misc_RNA (1)...(19): siRNA sense strand
aagaggaagaugaugauga

SEQ ID NO: 2244397 - RNA, 19 nt, Homo sapiens
  misc_RNA (1)...(19): siRNA sense strand
cugacuggaaucuaagaaa

SEQ ID NO: 2244398 - RNA, 19 nt, Homo sapiens
  misc_RNA (1)...(19): siRNA sense strand
ucaugaauggguuguuaaa

SEQ ID NO: 2244399 - RNA, 19 nt, Homo sapiens
  misc_RNA (1)...(19): siRNA sense strand
cauacuugccugagcuuau

SEQ ID NO: 2244400 - RNA, 19 nt, Homo sapiens
  misc_RNA (1)...(19): siRNA sense strand
caguaggacaucauuuaaa

SEQ ID NO: 2244401 - RNA, 19 nt, Homo sapiens
  misc_RNA (1)...(19): siRNA sense strand
gaaccaaccuaaauccaga

SEQ ID NO: 2244402 - RNA, 19 nt, Homo sapiens
  misc_RNA (1)...(19): siRNA sense strand
agauggaauugaagaggaa

SEQ ID NO: 2244403 - RNA, 19 nt, Homo sapiens
  misc_RNA (1)...(19): siRNA sense strand
cagaauugcuaaagcgcau

SEQ ID NO: 2244404 - RNA, 19 nt, Homo sapiens
  misc_RNA (1)...(19): siRNA sense strand
cugagaaacauaagagaca

SEQ ID NO: 2244405 - RNA, 19 nt, Homo sapiens
  misc_RNA (1)...(19): siRNA sense strand
gagaaacauaagagacaau

SEQ ID NO: 2244406 - RNA, 19 nt, Homo sapiens
  misc_RNA (1)...(19): siRNA sense strand
cagaaauggaacauguuaa

SEQ ID NO: 2244407 - RNA, 19 nt, Homo sapiens
  misc_RNA (1)...(19): siRNA sense strand
ugaugaagaaccagaggua

SEQ ID NO: 2244408 - RNA, 19 nt, Homo sapiens
  misc_RNA (1)...(19): siRNA sense strand
caguaggacucaagcucua

SEQ ID NO: 2244409 - RNA, 19 nt, Homo sapiens
  misc_RNA (1)...(19): siRNA sense strand
uguuaaagaaucaggcauu

SEQ ID NO: 2244410 - RNA, 19 nt, Homo sapiens
  misc_RNA (1)...(19): siRNA sense strand
gaauugaagaggaagauga

SEQ ID NO: 2244411 - RNA, 19 nt, Homo sapiens
  misc_RNA (1)...(19): siRNA sense strand
ucagaagauuugugaagau

SEQ ID NO: 2244412 - RNA, 19 nt, Homo sapiens
  misc_RNA (1)...(19): siRNA sense strand
gcaugaugaagauggaauu

SEQ ID NO: 2244413 - RNA, 19 nt, Homo sapiens
  misc_RNA (1)...(19): siRNA sense strand
guguaucagcguuguguaa

SEQ ID NO: 2244414 - RNA, 19 nt, Homo sapiens
  misc_RNA (1)...(19): siRNA sense strand
aaaucaaguuggcgaugaa

SEQ ID NO: 2244415 - RNA, 19 nt, Homo sapiens
  misc_RNA (1)...(19): siRNA sense strand
ccacaugggcaauuggaga

SEQ ID NO: 2244416 - RNA, 19 nt, Homo sapiens
  misc_RNA (1)...(19): siRNA sense strand
uaagagacaaugaggaaaa

SEQ ID NO: 2244417 - RNA, 19 nt, Homo sapiens
  misc_RNA (1)...(19): siRNA sense strand
gcauaauauaguugaguac

SEQ ID NO: 2244418 - RNA, 19 nt, Homo sapiens
  misc_RNA (1)...(19): siRNA sense strand
acuuaagggugauguugaa

SEQ ID NO: 2244419 - RNA, 19 nt, Homo sapiens
  misc_RNA (1)...(19): siRNA sense strand
ggauaaaaugccagaaguu

SEQ ID NO: 2244420 - RNA, 19 nt, Homo sapiens
  misc_RNA (1)...(19): siRNA sense strand
agcaagggcuucagcaaau

SEQ ID NO: 2244421 - RNA, 19 nt, Homo sapiens
  misc_RNA (1)...(19): siRNA sense strand
gaugaaaauuggaggcguu

SEQ ID NO: 2244422 - RNA, 19 nt, Homo sapiens
  misc_RNA (1)...(19): siRNA sense strand
uugaagaggaagaugauga

SEQ ID NO: 2244423 - RNA, 19 nt, Homo sapiens
  misc_RNA (1)...(19): siRNA sense strand
cgagcaagggcuucagcaa

SEQ ID NO: 2244424 - RNA, 19 nt, Homo sapiens
  misc_RNA (1)...(19): siRNA sense strand
aguaacauccugacacuaa

SEQ ID NO: 2244425 - RNA, 19 nt, Homo sapiens
  misc_RNA (1)...(19): siRNA sense strand
ccaagggagaauugcagaa

SEQ ID NO: 2244426 - RNA, 19 nt, Homo sapiens
  misc_RNA (1)...(19): siRNA sense strand
uuauaauaccugugaggga

SEQ ID NO: 2244427 - RNA, 19 nt, Homo sapiens
  misc_RNA (1)...(19): siRNA sense strand
ccuggauguucuugcaaau

SEQ ID NO: 2244428 - RNA, 19 nt, Homo sapiens
  misc_RNA (1)...(19): siRNA sense strand
gugaugaacugcugccaca

SEQ ID NO: 2244429 - RNA, 19 nt, Homo sapiens
  misc_RNA (1)...(19): siRNA sense strand
gccagaaguucgacagagu

SEQ ID NO: 2244430 - RNA, 19 nt, Homo sapiens
  misc_RNA (1)...(19): siRNA sense strand
agaggaagaugaugaugau

SEQ ID NO: 2244431 - RNA, 19 nt, Homo sapiens
  misc_RNA (1)...(19): siRNA sense strand
uugcaaauguguaucguga

SEQ ID NO: 2244432 - RNA, 19 nt, Homo sapiens
  misc_RNA (1)...(19): siRNA sense strand
cugaaggacuuggaggcaa

SEQ ID NO: 2244433 - RNA, 19 nt, Homo sapiens
  misc_RNA (1)...(19): siRNA sense strand
cauaggaacauuagcagau

SEQ ID NO: 2244434 - RNA, 19 nt, Homo sapiens
  misc_RNA (1)...(19): siRNA sense strand
agacguuguuagagaauac

SEQ ID NO: 2244435 - RNA, 19 nt, Homo sapiens
  misc_RNA (1)...(19): siRNA sense strand
uguuggauucugaagauua

SEQ ID NO: 2244436 - RNA, 19 nt, Homo sapiens
  misc_RNA (1)...(19): siRNA sense strand
ggcaugaaguacucagaca

SEQ ID NO: 2244437 - RNA, 19 nt, Homo sapiens
  misc_RNA (1)...(19): siRNA sense strand
agggugauguugaagaaga

SEQ ID NO: 2244438 - RNA, 19 nt, Homo sapiens
  misc_RNA (1)...(19): siRNA sense strand
ugacuggaaucuaagaaaa

SEQ ID NO: 2244439 - RNA, 19 nt, Homo sapiens
  misc_RNA (1)...(19): siRNA sense strand
uuacgaugccauaggaaca

SEQ ID NO: 2244440 - RNA, 19 nt, Homo sapiens
  misc_RNA (1)...(19): siRNA sense strand
uugcacaagccaugcuaaa

SEQ ID NO: 2244441 - RNA, 19 nt, Homo sapiens
  misc_RNA (1)...(19): siRNA sense strand
agaaccagagguacggaaa

SEQ ID NO: 2244442 - RNA, 19 nt, Homo sapiens
  misc_RNA (1)...(19): siRNA sense strand
aagcacacuuucagaacuu

SEQ ID NO: 2244443 - RNA, 19 nt, Homo sapiens
  misc_RNA (1)...(19): siRNA sense strand
auggaauugaagaggaaga

SEQ ID NO: 2244444 - RNA, 19 nt, Homo sapiens
  misc_RNA (1)...(19): siRNA sense strand
aagaggaagaugaugauga

SEQ ID NO: 2244445 - RNA, 19 nt, Homo sapiens
  misc_RNA (1)...(19): siRNA sense strand
cugacuggaaucuaagaaa

SEQ ID NO: 2244446 - RNA, 19 nt, Homo sapiens
  misc_RNA (1)...(19): siRNA sense strand
ucaugaauggguuguuaaa

SEQ ID NO: 2244447 - RNA, 19 nt, Homo sapiens
  misc_RNA (1)...(19): siRNA sense strand
cauacuugccugagcuuau

SEQ ID NO: 2244448 - RNA, 19 nt, Homo sapiens
  misc_RNA (1)...(19): siRNA sense strand
caguaggacaucauuuaaa

SEQ ID NO: 2244449 - RNA, 19 nt, Homo sapiens
  misc_RNA (1)...(19): siRNA sense strand
gaaccaaccuaaauccaga

SEQ ID NO: 2244450 - RNA, 19 nt, Homo sapiens
  misc_RNA (1)...(19): siRNA sense strand
gcaauuccuucgugcgcua

SEQ ID NO: 2244451 - RNA, 19 nt, Homo sapiens
  misc_RNA (1)...(19): siRNA sense strand
gaaccaaguaccagaccga

SEQ ID NO: 2244452 - RNA, 19 nt, Homo sapiens
  misc_RNA (1)...(19): siRNA sense strand
gugcagagccugaucacca

SEQ ID NO: 2244453 - RNA, 19 nt, Homo sapiens
  misc_RNA (1)...(19): siRNA sense strand
accaugagcaggaggucaa

SEQ ID NO: 2244454 - RNA, 19 nt, Homo sapiens
  misc_RNA (1)...(19): siRNA sense strand
ggcuggagugugagaucaa

SEQ ID NO: 2244455 - RNA, 19 nt, Homo sapiens
  misc_RNA (1)...(19): siRNA sense strand
ccgcagggaaguggagcaa

SEQ ID NO: 2244456 - RNA, 19 nt, Homo sapiens
  misc_RNA (1)...(19): siRNA sense strand
agaucgagcugcaggccca

SEQ ID NO: 2244457 - RNA, 19 nt, Homo sapiens
  misc_RNA (1)...(19): siRNA sense strand
ccuaccaggcggagaucau

SEQ ID NO: 2244458 - RNA, 19 nt, Homo sapiens
  misc_RNA (1)...(19): siRNA sense strand
cagucaacgcccuggagau

SEQ ID NO: 2244459 - RNA, 19 nt, Homo sapiens
  misc_RNA (1)...(19): siRNA sense strand
ugguggagucggacaucaa

SEQ ID NO: 2244460 - RNA, 19 nt, Homo sapiens
  misc_RNA (1)...(19): siRNA sense strand
gggccaaguacgaggcaga

SEQ ID NO: 2244461 - RNA, 19 nt, Homo sapiens
  misc_RNA (1)...(19): siRNA sense strand
cagcacagccugagggacu

SEQ ID NO: 2244462 - RNA, 19 nt, Homo sapiens
  misc_RNA (1)...(19): siRNA sense strand
ggcuggagggcgagaucaa

SEQ ID NO: 2244463 - RNA, 19 nt, Homo sapiens
  misc_RNA (1)...(19): siRNA sense strand
ugguggaggccgacaucaa

SEQ ID NO: 2244464 - RNA, 19 nt, Homo sapiens
  misc_RNA (1)...(19): siRNA sense strand
gccgaugacuucagggcca

SEQ ID NO: 2244465 - RNA, 19 nt, Homo sapiens
  misc_RNA (1)...(19): siRNA sense strand
gaaaacacgcugacggaga

SEQ ID NO: 2244466 - RNA, 19 nt, Homo sapiens
  misc_RNA (1)...(19): siRNA sense strand
cagaacuaccagucagaca

SEQ ID NO: 2244467 - RNA, 19 nt, Homo sapiens
  misc_RNA (1)...(19): siRNA sense strand
agaucgagcugcaggccca

SEQ ID NO: 2244468 - RNA, 19 nt, Homo sapiens
  misc_RNA (1)...(19): siRNA sense strand
ugcagauggaggagcuuaa

SEQ ID NO: 2244469 - RNA, 19 nt, Homo sapiens
  misc_RNA (1)...(19): siRNA sense strand
gccuuaacaucgaggugga

SEQ ID NO: 2244470 - RNA, 19 nt, Homo sapiens
  misc_RNA (1)...(19): siRNA sense strand
cggucaacacgcuggagau

SEQ ID NO: 2244471 - RNA, 19 nt, Homo sapiens
  misc_RNA (1)...(19): siRNA sense strand
cagaagauccugugcagca

SEQ ID NO: 2244472 - RNA, 19 nt, Homo sapiens
  misc_RNA (1)...(19): siRNA sense strand
gugcagagccugaucacca

SEQ ID NO: 2244473 - RNA, 19 nt, Homo sapiens
  misc_RNA (1)...(19): siRNA sense strand
gaaccaaguaccagacgga

SEQ ID NO: 2244474 - RNA, 19 nt, Homo sapiens
  misc_RNA (1)...(19): siRNA sense strand
ggcuggagugugagaucaa

SEQ ID NO: 2244475 - RNA, 19 nt, Homo sapiens
  misc_RNA (1)...(19): siRNA sense strand
ccgcagggaaguggagcaa

SEQ ID NO: 2244476 - RNA, 19 nt, Homo sapiens
  misc_RNA (1)...(19): siRNA sense strand
gugcagcaagucugagaau

SEQ ID NO: 2244477 - RNA, 19 nt, Homo sapiens
  misc_RNA (1)...(19): siRNA sense strand
agaucgagcugcaggccca

SEQ ID NO: 2244478 - RNA, 19 nt, Homo sapiens
  misc_RNA (1)...(19): siRNA sense strand
ccuaccaggcggagaucau

SEQ ID NO: 2244479 - RNA, 19 nt, Homo sapiens
  misc_RNA (1)...(19): siRNA sense strand
ugguggaguccgacaucaa

SEQ ID NO: 2244480 - RNA, 19 nt, Homo sapiens
  misc_RNA (1)...(19): siRNA sense strand
aguccuacuucaagaccau

SEQ ID NO: 2244481 - RNA, 19 nt, Homo sapiens
  misc_RNA (1)...(19): siRNA sense strand
cagucaaugcccuggagau

SEQ ID NO: 2244482 - RNA, 19 nt, Homo sapiens
  misc_RNA (1)...(19): siRNA sense strand
gcugaagacugguuggaca

SEQ ID NO: 2244483 - RNA, 19 nt, Homo sapiens
  misc_RNA (1)...(19): siRNA sense strand
gcagaugacuucaggacca

SEQ ID NO: 2244484 - RNA, 19 nt, Homo sapiens
  misc_RNA (1)...(19): siRNA sense strand
ggaccaaguaugagacgga

SEQ ID NO: 2244485 - RNA, 19 nt, Homo sapiens
  misc_RNA (1)...(19): siRNA sense strand
agaagaaccaugaggagga

SEQ ID NO: 2244486 - RNA, 19 nt, Homo sapiens
  misc_RNA (1)...(19): siRNA sense strand
agaagcagcuacagggcca

SEQ ID NO: 2244487 - RNA, 19 nt, Homo sapiens
  misc_RNA (1)...(19): siRNA sense strand
ucaccaacguggaggccca

SEQ ID NO: 2244488 - RNA, 19 nt, Homo sapiens
  misc_RNA (1)...(19): siRNA sense strand
ggcuggagugugagaucaa

SEQ ID NO: 2244489 - RNA, 19 nt, Homo sapiens
  misc_RNA (1)...(19): siRNA sense strand
cggucaacgcccuggagau

SEQ ID NO: 2244490 - RNA, 19 nt, Homo sapiens
  misc_RNA (1)...(19): siRNA sense strand
gagcugagacgcacgguca

SEQ ID NO: 2244491 - RNA, 19 nt, Homo sapiens
  misc_RNA (1)...(19): siRNA sense strand
agucugaccuggaggccca

SEQ ID NO: 2244492 - RNA, 19 nt, Homo sapiens
  misc_RNA (1)...(19): siRNA sense strand
uggagagugaggacagcaa

SEQ ID NO: 2244493 - RNA, 19 nt, Homo sapiens
  misc_RNA (1)...(19): siRNA sense strand
gggcauccucacuggcaau

SEQ ID NO: 2244494 - RNA, 19 nt, Homo sapiens
  misc_RNA (1)...(19): siRNA sense strand
augaggugccaguaugaaa

SEQ ID NO: 2244495 - RNA, 19 nt, Homo sapiens
  misc_RNA (1)...(19): siRNA sense strand
ugguggagucagacaucaa

SEQ ID NO: 2244496 - RNA, 19 nt, Homo sapiens
  misc_RNA (1)...(19): siRNA sense strand
agucagaccuggaggccaa

SEQ ID NO: 2244497 - RNA, 19 nt, Homo sapiens
  misc_RNA (1)...(19): siRNA sense strand
aggaggugcuggagggcua

SEQ ID NO: 2244498 - RNA, 19 nt, Homo sapiens
  misc_RNA (1)...(19): siRNA sense strand
aggagaaggagcagaucaa

SEQ ID NO: 2244499 - RNA, 19 nt, Homo sapiens
  misc_RNA (1)...(19): siRNA sense strand
agaagaaguaugaggagga

SEQ ID NO: 2244500 - RNA, 19 nt, Homo sapiens
  misc_RNA (1)...(19): siRNA sense strand
agucugagcagcaggguga

SEQ ID NO: 2244501 - RNA, 19 nt, Homo sapiens
  misc_RNA (1)...(19): siRNA sense strand
gagaaugccaagugccaga

SEQ ID NO: 2244502 - RNA, 19 nt, Homo sapiens
  misc_RNA (1)...(19): siRNA sense strand
ccaaggaggagaucaauga

SEQ ID NO: 2244503 - RNA, 19 nt, Homo sapiens
  misc_RNA (1)...(19): siRNA sense strand
gagaugaaggccacgguga

SEQ ID NO: 2244504 - RNA, 19 nt, Homo sapiens
  misc_RNA (1)...(19): siRNA sense strand
aggaggagaaggagcagau

SEQ ID NO: 2244505 - RNA, 19 nt, Homo sapiens
  misc_RNA (1)...(19): siRNA sense strand
agaacgaguuuguggcucu

SEQ ID NO: 2244506 - RNA, 19 nt, Homo sapiens
  misc_RNA (1)...(19): siRNA sense strand
ggcgaggagcagaggcuau

SEQ ID NO: 2244507 - RNA, 19 nt, Homo sapiens
  misc_RNA (1)...(19): siRNA sense strand
agaacaaacugcuggagac

SEQ ID NO: 2244508 - RNA, 19 nt, Homo sapiens
  misc_RNA (1)...(19): siRNA sense strand
cagaacaaacugcuggaga

SEQ ID NO: 2244509 - RNA, 19 nt, Homo sapiens
  misc_RNA (1)...(19): siRNA sense strand
ucaaugagcugaaccgcau

SEQ ID NO: 2244510 - RNA, 19 nt, Homo sapiens
  misc_RNA (1)...(19): siRNA sense strand
aguuuguggcucugaagaa

SEQ ID NO: 2244511 - RNA, 19 nt, Homo sapiens
  misc_RNA (1)...(19): siRNA sense strand
aguaccaggaggugaugaa

SEQ ID NO: 2244512 - RNA, 19 nt, Homo sapiens
  misc_RNA (1)...(19): siRNA sense strand
ccucagagcuuaaccacgu

SEQ ID NO: 2244513 - RNA, 19 nt, Homo sapiens
  misc_RNA (1)...(19): siRNA sense strand
acaagaagaaguaugagga

SEQ ID NO: 2244514 - RNA, 19 nt, Homo sapiens
  misc_RNA (1)...(19): siRNA sense strand
ugaagaaggauguggacug

SEQ ID NO: 2244515 - RNA, 19 nt, Homo sapiens
  misc_RNA (1)...(19): siRNA sense strand
ggcuguaugaggaggagau

SEQ ID NO: 2244516 - RNA, 19 nt, Homo sapiens
  misc_RNA (1)...(19): siRNA sense strand
aggcacaguaugacgacau

SEQ ID NO: 2244517 - RNA, 19 nt, Homo sapiens
  misc_RNA (1)...(19): siRNA sense strand
agucagaccuggaggccaa

SEQ ID NO: 2244518 - RNA, 19 nt, Homo sapiens
  misc_RNA (1)...(19): siRNA sense strand
aggaggugcuggagggcua

SEQ ID NO: 2244519 - RNA, 19 nt, Homo sapiens
  misc_RNA (1)...(19): siRNA sense strand
aggagaaggagcagaucaa

SEQ ID NO: 2244520 - RNA, 19 nt, Homo sapiens
  misc_RNA (1)...(19): siRNA sense strand
agucugagcagcaggguga

SEQ ID NO: 2244521 - RNA, 19 nt, Homo sapiens
  misc_RNA (1)...(19): siRNA sense strand
cccucaaccuggagauaga

SEQ ID NO: 2244522 - RNA, 19 nt, Homo sapiens
  misc_RNA (1)...(19): siRNA sense strand
gcaucguugccgagaucaa

SEQ ID NO: 2244523 - RNA, 19 nt, Homo sapiens
  misc_RNA (1)...(19): siRNA sense strand
gagaaugccaagugccaga

SEQ ID NO: 2244524 - RNA, 19 nt, Homo sapiens
  misc_RNA (1)...(19): siRNA sense strand
cagaacaagcugcuggaga

SEQ ID NO: 2244525 - RNA, 19 nt, Homo sapiens
  misc_RNA (1)...(19): siRNA sense strand
aggaggagaaggagcagau

SEQ ID NO: 2244526 - RNA, 19 nt, Homo sapiens
  misc_RNA (1)...(19): siRNA sense strand
agaacgaguuuguggcucu

SEQ ID NO: 2244527 - RNA, 19 nt, Homo sapiens
  misc_RNA (1)...(19): siRNA sense strand
agaacaagcugcuggagac

SEQ ID NO: 2244528 - RNA, 19 nt, Homo sapiens
  misc_RNA (1)...(19): siRNA sense strand
gagccacagcagagaacga

SEQ ID NO: 2244529 - RNA, 19 nt, Homo sapiens
  misc_RNA (1)...(19): siRNA sense strand
ugcagaaggccaagcaaga

SEQ ID NO: 2244530 - RNA, 19 nt, Homo sapiens
  misc_RNA (1)...(19): siRNA sense strand
agaaguaugaagaagaagu

SEQ ID NO: 2244531 - RNA, 19 nt, Homo sapiens
  misc_RNA (1)...(19): siRNA sense strand
cuccauaggcuguggguuc

SEQ ID NO: 2244532 - RNA, 19 nt, Homo sapiens
  misc_RNA (1)...(19): siRNA sense strand
aguaccaggaggugaugaa

SEQ ID NO: 2244533 - RNA, 19 nt, Homo sapiens
  misc_RNA (1)...(19): siRNA sense strand
ggcuguacgaggaggagau

SEQ ID NO: 2244534 - RNA, 19 nt, Homo sapiens
  misc_RNA (1)...(19): siRNA sense strand
aggcacaguaugaugacau

SEQ ID NO: 2244535 - RNA, 19 nt, Homo sapiens
  misc_RNA (1)...(19): siRNA sense strand
cagaaggccaagcaagaca

SEQ ID NO: 2244536 - RNA, 19 nt, Homo sapiens
  misc_RNA (1)...(19): siRNA sense strand
aaucagaccuggaggccaa

SEQ ID NO: 2244537 - RNA, 19 nt, Homo sapiens
  misc_RNA (1)...(19): siRNA sense strand
aggaggugcuggagggcua

SEQ ID NO: 2244538 - RNA, 19 nt, Homo sapiens
  misc_RNA (1)...(19): siRNA sense strand
aggcagagcagcaggguga

SEQ ID NO: 2244539 - RNA, 19 nt, Homo sapiens
  misc_RNA (1)...(19): siRNA sense strand
aggagaaggagcagaucaa

SEQ ID NO: 2244540 - RNA, 19 nt, Homo sapiens
  misc_RNA (1)...(19): siRNA sense strand
gcaucaucgcugagaucaa

SEQ ID NO: 2244541 - RNA, 19 nt, Homo sapiens
  misc_RNA (1)...(19): siRNA sense strand
agaagaaguaugaagagga

SEQ ID NO: 2244542 - RNA, 19 nt, Homo sapiens
  misc_RNA (1)...(19): siRNA sense strand
guagcaagugugaggagau

SEQ ID NO: 2244543 - RNA, 19 nt, Homo sapiens
  misc_RNA (1)...(19): siRNA sense strand
cagaacaagcugcuggaga

SEQ ID NO: 2244544 - RNA, 19 nt, Homo sapiens
  misc_RNA (1)...(19): siRNA sense strand
cggucauagucaagaugga

SEQ ID NO: 2244545 - RNA, 19 nt, Homo sapiens
  misc_RNA (1)...(19): siRNA sense strand
gagaugaaggccacgguga

SEQ ID NO: 2244546 - RNA, 19 nt, Homo sapiens
  misc_RNA (1)...(19): siRNA sense strand
aggaggagaaggagcagau

SEQ ID NO: 2244547 - RNA, 19 nt, Homo sapiens
  misc_RNA (1)...(19): siRNA sense strand
ucauagucaagauggacaa

SEQ ID NO: 2244548 - RNA, 19 nt, Homo sapiens
  misc_RNA (1)...(19): siRNA sense strand
aggaguaccaggaggugau

SEQ ID NO: 2244549 - RNA, 19 nt, Homo sapiens
  misc_RNA (1)...(19): siRNA sense strand
agaacaagcugcuggagac

SEQ ID NO: 2244550 - RNA, 19 nt, Homo sapiens
  misc_RNA (1)...(19): siRNA sense strand
aguaccaggaggugaugaa

SEQ ID NO: 2244551 - RNA, 19 nt, Homo sapiens
  misc_RNA (1)...(19): siRNA sense strand
ggacaacagccgagaccug

SEQ ID NO: 2244552 - RNA, 19 nt, Homo sapiens
  misc_RNA (1)...(19): siRNA sense strand
aaucagaccuggaggccaa

SEQ ID NO: 2244553 - RNA, 19 nt, Homo sapiens
  misc_RNA (1)...(19): siRNA sense strand
aggaggugcuggagggcua

SEQ ID NO: 2244554 - RNA, 19 nt, Homo sapiens
  misc_RNA (1)...(19): siRNA sense strand
aggagaaggagcagaucaa

SEQ ID NO: 2244555 - RNA, 19 nt, Homo sapiens
  misc_RNA (1)...(19): siRNA sense strand
agaagaaguaugaggagga

SEQ ID NO: 2244556 - RNA, 19 nt, Homo sapiens
  misc_RNA (1)...(19): siRNA sense strand
gcaucauugccgagaucaa

SEQ ID NO: 2244557 - RNA, 19 nt, Homo sapiens
  misc_RNA (1)...(19): siRNA sense strand
gagcagaggcugugcgaag

SEQ ID NO: 2244558 - RNA, 19 nt, Homo sapiens
  misc_RNA (1)...(19): siRNA sense strand
agucugagcagcaggguga

SEQ ID NO: 2244559 - RNA, 19 nt, Homo sapiens
  misc_RNA (1)...(19): siRNA sense strand
gagaaugccaagugccaga

SEQ ID NO: 2244560 - RNA, 19 nt, Homo sapiens
  misc_RNA (1)...(19): siRNA sense strand
gagaugaaggccacgguga

SEQ ID NO: 2244561 - RNA, 19 nt, Homo sapiens
  misc_RNA (1)...(19): siRNA sense strand
aggaggagaaggagcagau

SEQ ID NO: 2244562 - RNA, 19 nt, Homo sapiens
  misc_RNA (1)...(19): siRNA sense strand
agaacgaguuuguggcucu

SEQ ID NO: 2244563 - RNA, 19 nt, Homo sapiens
  misc_RNA (1)...(19): siRNA sense strand
agaacaaacugcuggagac

SEQ ID NO: 2244564 - RNA, 19 nt, Homo sapiens
  misc_RNA (1)...(19): siRNA sense strand
cagaacaaacugcuggaga

SEQ ID NO: 2244565 - RNA, 19 nt, Homo sapiens
  misc_RNA (1)...(19): siRNA sense strand
agaucaaggcacaguacga

SEQ ID NO: 2244566 - RNA, 19 nt, Homo sapiens
  misc_RNA (1)...(19): siRNA sense strand
aguuuguggcucugaagaa

SEQ ID NO: 2244567 - RNA, 19 nt, Homo sapiens
  misc_RNA (1)...(19): siRNA sense strand
aguaccaggaggugaugaa

SEQ ID NO: 2244568 - RNA, 19 nt, Homo sapiens
  misc_RNA (1)...(19): siRNA sense strand
ccucagagcuuaaccacgu

SEQ ID NO: 2244569 - RNA, 19 nt, Homo sapiens
  misc_RNA (1)...(19): siRNA sense strand
acaagaagaaguaugagga

SEQ ID NO: 2244570 - RNA, 19 nt, Homo sapiens
  misc_RNA (1)...(19): siRNA sense strand
ugaagaaggauguggacug

SEQ ID NO: 2244571 - RNA, 19 nt, Homo sapiens
  misc_RNA (1)...(19): siRNA sense strand
ggcuguaugaggaggagau

SEQ ID NO: 2244572 - RNA, 19 nt, Homo sapiens
  misc_RNA (1)...(19): siRNA sense strand
aggcacaguacgaugacau

SEQ ID NO: 2244573 - RNA, 19 nt, Homo sapiens
  misc_RNA (1)...(19): siRNA sense strand
gggccaaacaagugugcaa

SEQ ID NO: 2244574 - RNA, 19 nt, Homo sapiens
  misc_RNA (1)...(19): siRNA sense strand
ccaaggagcuggaggagca

SEQ ID NO: 2244575 - RNA, 19 nt, Homo sapiens
  misc_RNA (1)...(19): siRNA sense strand
ugagagagaaggagaucaa

SEQ ID NO: 2244576 - RNA, 19 nt, Homo sapiens
  misc_RNA (1)...(19): siRNA sense strand
cggaggaaagaacgagaaa

SEQ ID NO: 2244577 - RNA, 19 nt, Homo sapiens
  misc_RNA (1)...(19): siRNA sense strand
ggagaguagaucuggagaa

SEQ ID NO: 2244578 - RNA, 19 nt, Homo sapiens
  misc_RNA (1)...(19): siRNA sense strand
gcagugaugaagaggagaa

SEQ ID NO: 2244579 - RNA, 19 nt, Homo sapiens
  misc_RNA (1)...(19): siRNA sense strand
aguccgagcaggaggagua

SEQ ID NO: 2244580 - RNA, 19 nt, Homo sapiens
  misc_RNA (1)...(19): siRNA sense strand
gaagacgacuacagggaga

SEQ ID NO: 2244581 - RNA, 19 nt, Homo sapiens
  misc_RNA (1)...(19): siRNA sense strand
agguaugcuaugagacuaa

SEQ ID NO: 2244582 - RNA, 19 nt, Homo sapiens
  misc_RNA (1)...(19): siRNA sense strand
acgagaaagaagaaaucaa

SEQ ID NO: 2244583 - RNA, 19 nt, Homo sapiens
  misc_RNA (1)...(19): siRNA sense strand
guggaaaugcaauggaaca

SEQ ID NO: 2244584 - RNA, 19 nt, Homo sapiens
  misc_RNA (1)...(19): siRNA sense strand
agaacgagaaagaagaaau

SEQ ID NO: 2244585 - RNA, 19 nt, Homo sapiens
  misc_RNA (1)...(19): siRNA sense strand
gagcaaaggccaaggacag

SEQ ID NO: 2244586 - RNA, 19 nt, Homo sapiens
  misc_RNA (1)...(19): siRNA sense strand
cagaaacaguagagcucau

SEQ ID NO: 2244587 - RNA, 19 nt, Homo sapiens
  misc_RNA (1)...(19): siRNA sense strand
acuacaacccggugaaaga

SEQ ID NO: 2244588 - RNA, 19 nt, Homo sapiens
  misc_RNA (1)...(19): siRNA sense strand
gaagaaauaauccgggaga

SEQ ID NO: 2244589 - RNA, 19 nt, Homo sapiens
  misc_RNA (1)...(19): siRNA sense strand
agacaauggcacaucgaau

SEQ ID NO: 2244590 - RNA, 19 nt, Homo sapiens
  misc_RNA (1)...(19): siRNA sense strand
cagcccagccugagagaga

SEQ ID NO: 2244591 - RNA, 19 nt, Homo sapiens
  misc_RNA (1)...(19): siRNA sense strand
ggaguaaaggcgugaagca

SEQ ID NO: 2244592 - RNA, 19 nt, Homo sapiens
  misc_RNA (1)...(19): siRNA sense strand
gaaaggugaugcagagcca

SEQ ID NO: 2244593 - RNA, 19 nt, Homo sapiens
  misc_RNA (1)...(19): siRNA sense strand
gugacaacgaagacgacua

SEQ ID NO: 2244594 - RNA, 19 nt, Homo sapiens
  misc_RNA (1)...(19): siRNA sense strand
gaaugaagcauaaagcaga

SEQ ID NO: 2244595 - RNA, 19 nt, Homo sapiens
  misc_RNA (1)...(19): siRNA sense strand
ccuuauuaccugauguauu

SEQ ID NO: 2244596 - RNA, 19 nt, Homo sapiens
  misc_RNA (1)...(19): siRNA sense strand
uauucaagcaccuggcaaa

SEQ ID NO: 2244597 - RNA, 19 nt, Homo sapiens
  misc_RNA (1)...(19): siRNA sense strand
caaagaaaggugaugcaga

SEQ ID NO: 2244598 - RNA, 19 nt, Homo sapiens
  misc_RNA (1)...(19): siRNA sense strand
gccagagaguccagacaau

SEQ ID NO: 2244599 - RNA, 19 nt, Homo sapiens
  misc_RNA (1)...(19): siRNA sense strand
uggagaugguguuggcaga

SEQ ID NO: 2244600 - RNA, 19 nt, Homo sapiens
  misc_RNA (1)...(19): siRNA sense strand
ggucagagagcaaucagua

SEQ ID NO: 2244601 - RNA, 19 nt, Homo sapiens
  misc_RNA (1)...(19): siRNA sense strand
cggcggagaccucacgaaa

SEQ ID NO: 2244602 - RNA, 19 nt, Homo sapiens
  misc_RNA (1)...(19): siRNA sense strand
aggaaacgcaagugugaca

SEQ ID NO: 2244603 - RNA, 19 nt, Homo sapiens
  misc_RNA (1)...(19): siRNA sense strand
ucgucuaucuguagcacua

SEQ ID NO: 2244604 - RNA, 19 nt, Homo sapiens
  misc_RNA (1)...(19): siRNA sense strand
ggagcaaaggccaaggaca

SEQ ID NO: 2244605 - RNA, 19 nt, Homo sapiens
  misc_RNA (1)...(19): siRNA sense strand
cagaugcaaugguggaaaa

SEQ ID NO: 2244606 - RNA, 19 nt, Homo sapiens
  misc_RNA (1)...(19): siRNA sense strand
aguaaaggcgugaagcaga

SEQ ID NO: 2244607 - RNA, 19 nt, Homo sapiens
  misc_RNA (1)...(19): siRNA sense strand
uggaaaugcaauggaacaa

SEQ ID NO: 2244608 - RNA, 19 nt, Homo sapiens
  misc_RNA (1)...(19): siRNA sense strand
augaagaggagaaugaaca

SEQ ID NO: 2244609 - RNA, 19 nt, Homo sapiens
  misc_RNA (1)...(19): siRNA sense strand
aggaguucauugagacaga

SEQ ID NO: 2244610 - RNA, 19 nt, Homo sapiens
  misc_RNA (1)...(19): siRNA sense strand
guuuaucgaguguggaaau

SEQ ID NO: 2244611 - RNA, 19 nt, Homo sapiens
  misc_RNA (1)...(19): siRNA sense strand
cggccaacagagagcaaca

SEQ ID NO: 2244612 - RNA, 19 nt, Homo sapiens
  misc_RNA (1)...(19): siRNA sense strand
gcagcuggauaaauggcua

SEQ ID NO: 2244613 - RNA, 19 nt, Homo sapiens
  misc_RNA (1)...(19): siRNA sense strand
aaaugaaagccacggguca

SEQ ID NO: 2244614 - RNA, 19 nt, Homo sapiens
  misc_RNA (1)...(19): siRNA sense strand
uaagcuaagcagugaugaa

SEQ ID NO: 2244615 - RNA, 19 nt, Homo sapiens
  misc_RNA (1)...(19): siRNA sense strand
gccacgggucagagagcaa

SEQ ID NO: 2244616 - RNA, 19 nt, Homo sapiens
  misc_RNA (1)...(19): siRNA sense strand
guguggaaaugcaauggaa

SEQ ID NO: 2244617 - RNA, 19 nt, Homo sapiens
  misc_RNA (1)...(19): siRNA sense strand
agaaggagaucaagagcac

SEQ ID NO: 2244618 - RNA, 19 nt, Homo sapiens
  misc_RNA (1)...(19): siRNA sense strand
agagagaaggagaucaaga

SEQ ID NO: 2244619 - RNA, 19 nt, Homo sapiens
  misc_RNA (1)...(19): siRNA sense strand
ccaacagagagcaacacaa

SEQ ID NO: 2244620 - RNA, 19 nt, Homo sapiens
  misc_RNA (1)...(19): siRNA sense strand
gcaaaguggaaccaaccaa

SEQ ID NO: 2244621 - RNA, 19 nt, Homo sapiens
  misc_RNA (1)...(19): siRNA sense strand
uggauaaauggcuaaacaa

SEQ ID NO: 2244622 - RNA, 19 nt, Homo sapiens
  misc_RNA (1)...(19): siRNA sense strand
acgacuacagggagaucaa

SEQ ID NO: 2244623 - RNA, 19 nt, Homo sapiens
  misc_RNA (1)...(19): siRNA sense strand
caguguggcaauaccaaua

SEQ ID NO: 2244624 - RNA, 19 nt, Homo sapiens
  misc_RNA (1)...(19): siRNA sense strand
gcaucuaaacacaaauaca

SEQ ID NO: 2244625 - RNA, 19 nt, Homo sapiens
  misc_RNA (1)...(19): siRNA sense strand
cugccagagccaaggccaa

SEQ ID NO: 2244626 - RNA, 19 nt, Homo sapiens
  misc_RNA (1)...(19): siRNA sense strand
cagcuggauaaauggcuaa

SEQ ID NO: 2244627 - RNA, 19 nt, Homo sapiens
  misc_RNA (1)...(19): siRNA sense strand
ugccaaaauccaagaggaa

SEQ ID NO: 2244628 - RNA, 19 nt, Homo sapiens
  misc_RNA (1)...(19): siRNA sense strand
auucaagagcccagaacca

SEQ ID NO: 2244629 - RNA, 19 nt, Homo sapiens
  misc_RNA (1)...(19): siRNA sense strand
ggccaaggacagccaacaa

SEQ ID NO: 2244630 - RNA, 19 nt, Homo sapiens
  misc_RNA (1)...(19): siRNA sense strand
agaggaaacgcaaguguga

SEQ ID NO: 2244631 - RNA, 19 nt, Homo sapiens
  misc_RNA (1)...(19): siRNA sense strand
ugcaagaagcuaaacgaau

SEQ ID NO: 2244632 - RNA, 19 nt, Homo sapiens
  misc_RNA (1)...(19): siRNA sense strand
aaggaggagcaaaggccaa

SEQ ID NO: 2244633 - RNA, 19 nt, Homo sapiens
  misc_RNA (1)...(19): siRNA sense strand
ccacaaagcccauggccga

SEQ ID NO: 2244634 - RNA, 19 nt, Homo sapiens
  misc_RNA (1)...(19): siRNA sense strand
acucaguaagugaaggaaa

SEQ ID NO: 2244635 - RNA, 19 nt, Homo sapiens
  misc_RNA (1)...(19): siRNA sense strand
ccugagaaggacagagaga

SEQ ID NO: 2244636 - RNA, 19 nt, Homo sapiens
  misc_RNA (1)...(19): siRNA sense strand
gaagcaaggacgaggagca

SEQ ID NO: 2244637 - RNA, 19 nt, Homo sapiens
  misc_RNA (1)...(19): siRNA sense strand
caacagucacaaugagcau

SEQ ID NO: 2244638 - RNA, 19 nt, Homo sapiens
  misc_RNA (1)...(19): siRNA sense strand
gagcagaagccacagcaga

SEQ ID NO: 2244639 - RNA, 19 nt, Homo sapiens
  misc_RNA (1)...(19): siRNA sense strand
ccacaaagcccauggccga

SEQ ID NO: 2244640 - RNA, 19 nt, Homo sapiens
  misc_RNA (1)...(19): siRNA sense strand
acucaguaagugaaggaaa

SEQ ID NO: 2244641 - RNA, 19 nt, Homo sapiens
  misc_RNA (1)...(19): siRNA sense strand
ccugagaaggacagagaga

SEQ ID NO: 2244642 - RNA, 19 nt, Homo sapiens
  misc_RNA (1)...(19): siRNA sense strand
gaagcaaggacgaggagca

SEQ ID NO: 2244643 - RNA, 19 nt, Homo sapiens
  misc_RNA (1)...(19): siRNA sense strand
caacagucacaaugagcau

SEQ ID NO: 2244644 - RNA, 19 nt, Homo sapiens
  misc_RNA (1)...(19): siRNA sense strand
gagcagaagccacagcaga

SEQ ID NO: 2244645 - RNA, 19 nt, Homo sapiens
  misc_RNA (1)...(19): siRNA sense strand
acucaguaagugaaggaaa

SEQ ID NO: 2244646 - RNA, 19 nt, Homo sapiens
  misc_RNA (1)...(19): siRNA sense strand
gaagcaaggacgaggagca

SEQ ID NO: 2244647 - RNA, 19 nt, Homo sapiens
  misc_RNA (1)...(19): siRNA sense strand
caacagucacaaugagcau

SEQ ID NO: 2244648 - RNA, 19 nt, Homo sapiens
  misc_RNA (1)...(19): siRNA sense strand
gagcagaagccacagcaga

SEQ ID NO: 2244649 - RNA, 19 nt, Homo sapiens
  misc_RNA (1)...(19): siRNA sense strand
acucaguaagugaaggaaa

SEQ ID NO: 2244650 - RNA, 19 nt, Homo sapiens
  misc_RNA (1)...(19): siRNA sense strand
aggauagagccaaguacaa

SEQ ID NO: 2244651 - RNA, 19 nt, Homo sapiens
  misc_RNA (1)...(19): siRNA sense strand
gagagggaggauagagcca

SEQ ID NO: 2244652 - RNA, 19 nt, Homo sapiens
  misc_RNA (1)...(19): siRNA sense strand
acucaguaagugaaggaaa

SEQ ID NO: 2244653 - RNA, 19 nt, Homo sapiens
  misc_RNA (1)...(19): siRNA sense strand
aggauagagccaaguacaa

SEQ ID NO: 2244654 - RNA, 19 nt, Homo sapiens
  misc_RNA (1)...(19): siRNA sense strand
gagagggaggauagagcca

SEQ ID NO: 2244655 - RNA, 19 nt, Homo sapiens
  misc_RNA (1)...(19): siRNA sense strand
guuugaagauggaggguac

SEQ ID NO: 2244656 - RNA, 19 nt, Homo sapiens
  misc_RNA (1)...(19): siRNA sense strand
guuugaagauggaggguac

SEQ ID NO: 2244657 - RNA, 19 nt, Homo sapiens
  misc_RNA (1)...(19): siRNA sense strand
cuacgaagaccgaggaaaa

SEQ ID NO: 2244658 - RNA, 19 nt, Homo sapiens
  misc_RNA (1)...(19): siRNA sense strand
acgcagaucuaguggcaga

SEQ ID NO: 2244659 - RNA, 19 nt, Homo sapiens
  misc_RNA (1)...(19): siRNA sense strand
augacaaacaggagagaca

SEQ ID NO: 2244660 - RNA, 19 nt, Homo sapiens
  misc_RNA (1)...(19): siRNA sense strand
ggagaaagagagccgggaa

SEQ ID NO: 2244661 - RNA, 19 nt, Homo sapiens
  misc_RNA (1)...(19): siRNA sense strand
aggaagaugaugaggaacu

SEQ ID NO: 2244662 - RNA, 19 nt, Homo sapiens
  misc_RNA (1)...(19): siRNA sense strand
augcaaaaguagacaauga

SEQ ID NO: 2244663 - RNA, 19 nt, Homo sapiens
  misc_RNA (1)...(19): siRNA sense strand
caccagagauugagacgga

SEQ ID NO: 2244664 - RNA, 19 nt, Homo sapiens
  misc_RNA (1)...(19): siRNA sense strand
gaggaaaagcugcggccua

SEQ ID NO: 2244665 - RNA, 19 nt, Homo sapiens
  misc_RNA (1)...(19): siRNA sense strand
ccgacuucgcucaguauaa

SEQ ID NO: 2244666 - RNA, 19 nt, Homo sapiens
  misc_RNA (1)...(19): siRNA sense strand
gagaggaagaugaugagga

SEQ ID NO: 2244667 - RNA, 19 nt, Homo sapiens
  misc_RNA (1)...(19): siRNA sense strand
cuauggaagaaaugggcuu

SEQ ID NO: 2244668 - RNA, 19 nt, Homo sapiens
  misc_RNA (1)...(19): siRNA sense strand
cagaaggguaccaggaugu

SEQ ID NO: 2244669 - RNA, 19 nt, Homo sapiens
  misc_RNA (1)...(19): siRNA sense strand
caacauuuaccgaaagcca

SEQ ID NO: 2244670 - RNA, 19 nt, Homo sapiens
  misc_RNA (1)...(19): siRNA sense strand
aucuaguggcagagaggaa

SEQ ID NO: 2244671 - RNA, 19 nt, Homo sapiens
  misc_RNA (1)...(19): siRNA sense strand
uggcagagaggaagaugau

SEQ ID NO: 2244672 - RNA, 19 nt, Homo sapiens
  misc_RNA (1)...(19): siRNA sense strand
gagaauggaccgaggagug

SEQ ID NO: 2244673 - RNA, 19 nt, Homo sapiens
  misc_RNA (1)...(19): siRNA sense strand
uuccgaaggucaaggcaau

SEQ ID NO: 2244674 - RNA, 19 nt, Homo sapiens
  misc_RNA (1)...(19): siRNA sense strand
cagccauuccgaaggucaa

SEQ ID NO: 2244675 - RNA, 19 nt, Homo sapiens
  misc_RNA (1)...(19): siRNA sense strand
gacaaacaggagagacaga

SEQ ID NO: 2244676 - RNA, 19 nt, Homo sapiens
  misc_RNA (1)...(19): siRNA sense strand
uugaaagaagagauggaga

SEQ ID NO: 2244677 - RNA, 19 nt, Homo sapiens
  misc_RNA (1)...(19): siRNA sense strand
uuuccauguuccagaucaa

SEQ ID NO: 2244678 - RNA, 19 nt, Homo sapiens
  misc_RNA (1)...(19): siRNA sense strand
ccuuggcagcccagagcaa

SEQ ID NO: 2244679 - RNA, 19 nt, Homo sapiens
  misc_RNA (1)...(19): siRNA sense strand
guaccaggauguucgggau

SEQ ID NO: 2244680 - RNA, 19 nt, Homo sapiens
  misc_RNA (1)...(19): siRNA sense strand
gaggagugucuaugcccaa

SEQ ID NO: 2244681 - RNA, 19 nt, Homo sapiens
  misc_RNA (1)...(19): siRNA sense strand
cuacgaagaccgaggaaaa

SEQ ID NO: 2244682 - RNA, 19 nt, Homo sapiens
  misc_RNA (1)...(19): siRNA sense strand
acgcagaucuaguggcaga

SEQ ID NO: 2244683 - RNA, 19 nt, Homo sapiens
  misc_RNA (1)...(19): siRNA sense strand
augacaaacaggagagaca

SEQ ID NO: 2244684 - RNA, 19 nt, Homo sapiens
  misc_RNA (1)...(19): siRNA sense strand
ggagaaagagagccgggaa

SEQ ID NO: 2244685 - RNA, 19 nt, Homo sapiens
  misc_RNA (1)...(19): siRNA sense strand
aggaagaugaugaggaacu

SEQ ID NO: 2244686 - RNA, 19 nt, Homo sapiens
  misc_RNA (1)...(19): siRNA sense strand
augcaaaaguagacaauga

SEQ ID NO: 2244687 - RNA, 19 nt, Homo sapiens
  misc_RNA (1)...(19): siRNA sense strand
caccagagauugagacgga

SEQ ID NO: 2244688 - RNA, 19 nt, Homo sapiens
  misc_RNA (1)...(19): siRNA sense strand
gaggaaaagcugcggccua

SEQ ID NO: 2244689 - RNA, 19 nt, Homo sapiens
  misc_RNA (1)...(19): siRNA sense strand
ccgacuucgcucaguauaa

SEQ ID NO: 2244690 - RNA, 19 nt, Homo sapiens
  misc_RNA (1)...(19): siRNA sense strand
gagaggaagaugaugagga

SEQ ID NO: 2244691 - RNA, 19 nt, Homo sapiens
  misc_RNA (1)...(19): siRNA sense strand
cuauggaagaaaugggcuu

SEQ ID NO: 2244692 - RNA, 19 nt, Homo sapiens
  misc_RNA (1)...(19): siRNA sense strand
cagaaggguaccaggaugu

SEQ ID NO: 2244693 - RNA, 19 nt, Homo sapiens
  misc_RNA (1)...(19): siRNA sense strand
caacauuuaccgaaagcca

SEQ ID NO: 2244694 - RNA, 19 nt, Homo sapiens
  misc_RNA (1)...(19): siRNA sense strand
aucuaguggcagagaggaa

SEQ ID NO: 2244695 - RNA, 19 nt, Homo sapiens
  misc_RNA (1)...(19): siRNA sense strand
uggcagagaggaagaugau

SEQ ID NO: 2244696 - RNA, 19 nt, Homo sapiens
  misc_RNA (1)...(19): siRNA sense strand
gagaauggaccgaggagug

SEQ ID NO: 2244697 - RNA, 19 nt, Homo sapiens
  misc_RNA (1)...(19): siRNA sense strand
uuccgaaggucaaggcaau

SEQ ID NO: 2244698 - RNA, 19 nt, Homo sapiens
  misc_RNA (1)...(19): siRNA sense strand
cagccauuccgaaggucaa

SEQ ID NO: 2244699 - RNA, 19 nt, Homo sapiens
  misc_RNA (1)...(19): siRNA sense strand
gacaaacaggagagacaga

SEQ ID NO: 2244700 - RNA, 19 nt, Homo sapiens
  misc_RNA (1)...(19): siRNA sense strand
uugaaagaagagauggaga

SEQ ID NO: 2244701 - RNA, 19 nt, Homo sapiens
  misc_RNA (1)...(19): siRNA sense strand
uuuccauguuccagaucaa

SEQ ID NO: 2244702 - RNA, 19 nt, Homo sapiens
  misc_RNA (1)...(19): siRNA sense strand
ccuuggcagcccagagcaa

SEQ ID NO: 2244703 - RNA, 19 nt, Homo sapiens
  misc_RNA (1)...(19): siRNA sense strand
guaccaggauguucgggau

SEQ ID NO: 2244704 - RNA, 19 nt, Homo sapiens
  misc_RNA (1)...(19): siRNA sense strand
gaggagugucuaugcccaa

SEQ ID NO: 2244705 - RNA, 19 nt, Homo sapiens
  misc_RNA (1)...(19): siRNA sense strand
cuacgaagaccgaggaaaa

SEQ ID NO: 2244706 - RNA, 19 nt, Homo sapiens
  misc_RNA (1)...(19): siRNA sense strand
acgcagaucuaguggcaga

SEQ ID NO: 2244707 - RNA, 19 nt, Homo sapiens
  misc_RNA (1)...(19): siRNA sense strand
augacaaacaggagagaca

SEQ ID NO: 2244708 - RNA, 19 nt, Homo sapiens
  misc_RNA (1)...(19): siRNA sense strand
ggagaaagagagccgggaa

SEQ ID NO: 2244709 - RNA, 19 nt, Homo sapiens
  misc_RNA (1)...(19): siRNA sense strand
aggaagaugaugaggaacu

SEQ ID NO: 2244710 - RNA, 19 nt, Homo sapiens
  misc_RNA (1)...(19): siRNA sense strand
augcaaaaguagacaauga

SEQ ID NO: 2244711 - RNA, 19 nt, Homo sapiens
  misc_RNA (1)...(19): siRNA sense strand
caccagagauugagacgga

SEQ ID NO: 2244712 - RNA, 19 nt, Homo sapiens
  misc_RNA (1)...(19): siRNA sense strand
gaggaaaagcugcggccua

SEQ ID NO: 2244713 - RNA, 19 nt, Homo sapiens
  misc_RNA (1)...(19): siRNA sense strand
ccgacuucgcucaguauaa

SEQ ID NO: 2244714 - RNA, 19 nt, Homo sapiens
  misc_RNA (1)...(19): siRNA sense strand
gagaggaagaugaugagga

SEQ ID NO: 2244715 - RNA, 19 nt, Homo sapiens
  misc_RNA (1)...(19): siRNA sense strand
cuauggaagaaaugggcuu

SEQ ID NO: 2244716 - RNA, 19 nt, Homo sapiens
  misc_RNA (1)...(19): siRNA sense strand
cagaaggguaccaggaugu

SEQ ID NO: 2244717 - RNA, 19 nt, Homo sapiens
  misc_RNA (1)...(19): siRNA sense strand
caacauuuaccgaaagcca

SEQ ID NO: 2244718 - RNA, 19 nt, Homo sapiens
  misc_RNA (1)...(19): siRNA sense strand
aucuaguggcagagaggaa

SEQ ID NO: 2244719 - RNA, 19 nt, Homo sapiens
  misc_RNA (1)...(19): siRNA sense strand
uggcagagaggaagaugau

SEQ ID NO: 2244720 - RNA, 19 nt, Homo sapiens
  misc_RNA (1)...(19): siRNA sense strand
gagaauggaccgaggagug

SEQ ID NO: 2244721 - RNA, 19 nt, Homo sapiens
  misc_RNA (1)...(19): siRNA sense strand
uuccgaaggucaaggcaau

SEQ ID NO: 2244722 - RNA, 19 nt, Homo sapiens
  misc_RNA (1)...(19): siRNA sense strand
cagccauuccgaaggucaa

SEQ ID NO: 2244723 - RNA, 19 nt, Homo sapiens
  misc_RNA (1)...(19): siRNA sense strand
gacaaacaggagagacaga

SEQ ID NO: 2244724 - RNA, 19 nt, Homo sapiens
  misc_RNA (1)...(19): siRNA sense strand
uugaaagaagagauggaga

SEQ ID NO: 2244725 - RNA, 19 nt, Homo sapiens
  misc_RNA (1)...(19): siRNA sense strand
uuuccauguuccagaucaa

SEQ ID NO: 2244726 - RNA, 19 nt, Homo sapiens
  misc_RNA (1)...(19): siRNA sense strand
ccuuggcagcccagagcaa

SEQ ID NO: 2244727 - RNA, 19 nt, Homo sapiens
  misc_RNA (1)...(19): siRNA sense strand
guaccaggauguucgggau

SEQ ID NO: 2244728 - RNA, 19 nt, Homo sapiens
  misc_RNA (1)...(19): siRNA sense strand
gaggagugucuaugcccaa

SEQ ID NO: 2244729 - RNA, 19 nt, Homo sapiens
  misc_RNA (1)...(19): siRNA sense strand
gcucagggcuguuguggga

SEQ ID NO: 2244730 - RNA, 19 nt, Homo sapiens
  misc_RNA (1)...(19): siRNA sense strand
ccagagaacgcaaggagga

SEQ ID NO: 2244731 - RNA, 19 nt, Homo sapiens
  misc_RNA (1)...(19): siRNA sense strand
ggaugaagagcgaggcacu

SEQ ID NO: 2244732 - RNA, 19 nt, Homo sapiens
  misc_RNA (1)...(19): siRNA sense strand
cagauugacuucaucgaca

SEQ ID NO: 2244733 - RNA, 19 nt, Homo sapiens
  misc_RNA (1)...(19): siRNA sense strand
gaagggaauuugaaggaga

SEQ ID NO: 2244734 - RNA, 19 nt, Homo sapiens
  misc_RNA (1)...(19): siRNA sense strand
uugaaggagaagaagaaua

SEQ ID NO: 2244735 - RNA, 19 nt, Homo sapiens
  misc_RNA (1)...(19): siRNA sense strand
agacacagcaugagcccaa

SEQ ID NO: 2244736 - RNA, 19 nt, Homo sapiens
  misc_RNA (1)...(19): siRNA sense strand
caggcaaauaugagugcaa

SEQ ID NO: 2244737 - RNA, 19 nt, Homo sapiens
  misc_RNA (1)...(19): siRNA sense strand
auuugaaggagaagaagaa

SEQ ID NO: 2244738 - RNA, 19 nt, Homo sapiens
  misc_RNA (1)...(19): siRNA sense strand
gaagaagaauaucuggaga

SEQ ID NO: 2244739 - RNA, 19 nt, Homo sapiens
  misc_RNA (1)...(19): siRNA sense strand
cugaggagcacuacggcaa

SEQ ID NO: 2244740 - RNA, 19 nt, Homo sapiens
  misc_RNA (1)...(19): siRNA sense strand
guagaagacaagaacucaa

SEQ ID NO: 2244741 - RNA, 19 nt, Homo sapiens
  misc_RNA (1)...(19): siRNA sense strand
acaccaacuggaagggaau

SEQ ID NO: 2244742 - RNA, 19 nt, Homo sapiens
  misc_RNA (1)...(19): siRNA sense strand
ccucaggugcguuguagaa

SEQ ID NO: 2244743 - RNA, 19 nt, Homo sapiens
  misc_RNA (1)...(19): siRNA sense strand
ccgggaugacacuaggaua

SEQ ID NO: 2244744 - RNA, 19 nt, Homo sapiens
  misc_RNA (1)...(19): siRNA sense strand
ggacaugacaaguggucuc

SEQ ID NO: 2244745 - RNA, 19 nt, Homo sapiens
  misc_RNA (1)...(19): siRNA sense strand
gagaagaagaauaucugga

SEQ ID NO: 2244746 - RNA, 19 nt, Homo sapiens
  misc_RNA (1)...(19): siRNA sense strand
ccagggagcagucaggcaa

SEQ ID NO: 2244747 - RNA, 19 nt, Homo sapiens
  misc_RNA (1)...(19): siRNA sense strand
aauuugaaggagaagaaga

SEQ ID NO: 2244748 - RNA, 19 nt, Homo sapiens
  misc_RNA (1)...(19): siRNA sense strand
gaguucagccggaucggaa

SEQ ID NO: 2244749 - RNA, 19 nt, Homo sapiens
  misc_RNA (1)...(19): siRNA sense strand
ugccagaggaggagccaga

SEQ ID NO: 2244750 - RNA, 19 nt, Homo sapiens
  misc_RNA (1)...(19): siRNA sense strand
ugccagaggaggagccaga

SEQ ID NO: 2244751 - RNA, 19 nt, Homo sapiens
  misc_RNA (1)...(19): siRNA sense strand
ucaaagaugaaguugggaa

SEQ ID NO: 2244752 - RNA, 19 nt, Homo sapiens
  misc_RNA (1)...(19): siRNA sense strand
augaaguugggaaggguaa

SEQ ID NO: 2244753 - RNA, 19 nt, Homo sapiens
  misc_RNA (1)...(19): siRNA sense strand
gggaccaggaaaaggaaua

SEQ ID NO: 2244754 - RNA, 19 nt, Homo sapiens
  misc_RNA (1)...(19): siRNA sense strand
gaugaaguugggaagggua

SEQ ID NO: 2244755 - RNA, 19 nt, Homo sapiens
  misc_RNA (1)...(19): siRNA sense strand
aggaaaaggaauacuauga

SEQ ID NO: 2244756 - RNA, 19 nt, Homo sapiens
  misc_RNA (1)...(19): siRNA sense strand
acaacgagcacuggaacua

SEQ ID NO: 2244757 - RNA, 19 nt, Homo sapiens
  misc_RNA (1)...(19): siRNA sense strand
caaagaugaaguugggaag

SEQ ID NO: 2244758 - RNA, 19 nt, Homo sapiens
  misc_RNA (1)...(19): siRNA sense strand
ccuacuacuucgagaggga

SEQ ID NO: 2244759 - RNA, 19 nt, Homo sapiens
  misc_RNA (1)...(19): siRNA sense strand
aguacaagaagguggagau

SEQ ID NO: 2244760 - RNA, 19 nt, Homo sapiens
  misc_RNA (1)...(19): siRNA sense strand
agguggagaucaaggaacu

SEQ ID NO: 2244761 - RNA, 19 nt, Homo sapiens
  misc_RNA (1)...(19): siRNA sense strand
ggaaguacaagaaggugga

SEQ ID NO: 2244762 - RNA, 19 nt, Homo sapiens
  misc_RNA (1)...(19): siRNA sense strand
agagggacaucaagggcga

SEQ ID NO: 2244763 - RNA, 19 nt, Homo sapiens
  misc_RNA (1)...(19): siRNA sense strand
acucagaccuggacgccga

SEQ ID NO: 2244764 - RNA, 19 nt, Homo sapiens
  misc_RNA (1)...(19): siRNA sense strand
agauaaaggagauggguga

SEQ ID NO: 2244765 - RNA, 19 nt, Homo sapiens
  misc_RNA (1)...(19): siRNA sense strand
agaaagaagagaauggcaa

SEQ ID NO: 2244766 - RNA, 19 nt, Homo sapiens
  misc_RNA (1)...(19): siRNA sense strand
ccagaacaaugaugggcuu

SEQ ID NO: 2244767 - RNA, 19 nt, Homo sapiens
  misc_RNA (1)...(19): siRNA sense strand
ggugagaugcauagggaac

SEQ ID NO: 2244768 - RNA, 19 nt, Homo sapiens
  misc_RNA (1)...(19): siRNA sense strand
caaaguaugagaaggcuga

SEQ ID NO: 2244769 - RNA, 19 nt, Homo sapiens
  misc_RNA (1)...(19): siRNA sense strand
gggaacaacuggaucugga

SEQ ID NO: 2244770 - RNA, 19 nt, Homo sapiens
  misc_RNA (1)...(19): siRNA sense strand
ccguaaacugcuuugugaa

SEQ ID NO: 2244771 - RNA, 19 nt, Homo sapiens
  misc_RNA (1)...(19): siRNA sense strand
aggaagaaugugucuguga

SEQ ID NO: 2244772 - RNA, 19 nt, Homo sapiens
  misc_RNA (1)...(19): siRNA sense strand
cuggaucaucauugaacua

SEQ ID NO: 2244773 - RNA, 19 nt, Homo sapiens
  misc_RNA (1)...(19): siRNA sense strand
acuaaaacacaaagcaaga

SEQ ID NO: 2244774 - RNA, 19 nt, Homo sapiens
  misc_RNA (1)...(19): siRNA sense strand
guuuggugaugaaggcaga

SEQ ID NO: 2244775 - RNA, 19 nt, Homo sapiens
  misc_RNA (1)...(19): siRNA sense strand
agaagaacagacaaggaca

SEQ ID NO: 2244776 - RNA, 19 nt, Homo sapiens
  misc_RNA (1)...(19): siRNA sense strand
ggauccuggucaaacuuua

SEQ ID NO: 2244777 - RNA, 19 nt, Homo sapiens
  misc_RNA (1)...(19): siRNA sense strand
gcagaaaugaauggcucaa

SEQ ID NO: 2244778 - RNA, 19 nt, Homo sapiens
  misc_RNA (1)...(19): siRNA sense strand
gggugagaugcauagggaa

SEQ ID NO: 2244779 - RNA, 19 nt, Homo sapiens
  misc_RNA (1)...(19): siRNA sense strand
gcacuuaaucuauggggaa

SEQ ID NO: 2244780 - RNA, 19 nt, Homo sapiens
  misc_RNA (1)...(19): siRNA sense strand
cuuugagagaugaggaaga

SEQ ID NO: 2244781 - RNA, 19 nt, Homo sapiens
  misc_RNA (1)...(19): siRNA sense strand
ugaucuucuuaaagggcaa

SEQ ID NO: 2244782 - RNA, 19 nt, Homo sapiens
  misc_RNA (1)...(19): siRNA sense strand
augaaaaguacaaggauca

SEQ ID NO: 2244783 - RNA, 19 nt, Homo sapiens
  misc_RNA (1)...(19): siRNA sense strand
gcagauaugcugaagguug

SEQ ID NO: 2244784 - RNA, 19 nt, Homo sapiens
  misc_RNA (1)...(19): siRNA sense strand
aguacgagcaggugcccaa

SEQ ID NO: 2244785 - RNA, 19 nt, Homo sapiens
  misc_RNA (1)...(19): siRNA sense strand
cccaagaucuggugcagga

SEQ ID NO: 2244786 - RNA, 19 nt, Homo sapiens
  misc_RNA (1)...(19): siRNA sense strand
cugaaaccaccaagaugaa

SEQ ID NO: 2244787 - RNA, 19 nt, Homo sapiens
  misc_RNA (1)...(19): siRNA sense strand
cagcagagaaagaggagug

SEQ ID NO: 2244788 - RNA, 19 nt, Homo sapiens
  misc_RNA (1)...(19): siRNA sense strand
cuucauucuacguaaguau

SEQ ID NO: 2244789 - RNA, 19 nt, Homo sapiens
  misc_RNA (1)...(19): siRNA sense strand
gagaugaggaagagagagc

SEQ ID NO: 2244790 - RNA, 19 nt, Homo sapiens
  misc_RNA (1)...(19): siRNA sense strand
ugaggaagagagagcccaa

SEQ ID NO: 2244791 - RNA, 19 nt, Homo sapiens
  misc_RNA (1)...(19): siRNA sense strand
cgaaggugccaaaugccaa

SEQ ID NO: 2244792 - RNA, 19 nt, Homo sapiens
  misc_RNA (1)...(19): siRNA sense strand
ggcuuugagagaugaggaa

SEQ ID NO: 2244793 - RNA, 19 nt, Homo sapiens
  misc_RNA (1)...(19): siRNA sense strand
gaugaaaaguacaaggauc

SEQ ID NO: 2244794 - RNA, 19 nt, Homo sapiens
  misc_RNA (1)...(19): siRNA sense strand
aagaucuggugcaggaaaa

SEQ ID NO: 2244795 - RNA, 19 nt, Homo sapiens
  misc_RNA (1)...(19): siRNA sense strand
caagaugaauggugccacu

SEQ ID NO: 2244796 - RNA, 19 nt, Homo sapiens
  misc_RNA (1)...(19): siRNA sense strand
gugccaaaugccaagguga

SEQ ID NO: 2244797 - RNA, 19 nt, Homo sapiens
  misc_RNA (1)...(19): siRNA sense strand
ccgaggaagagaucuggaa

SEQ ID NO: 2244798 - RNA, 19 nt, Homo sapiens
  misc_RNA (1)...(19): siRNA sense strand
ccauuaugaaggcagauau

SEQ ID NO: 2244799 - RNA, 19 nt, Homo sapiens
  misc_RNA (1)...(19): siRNA sense strand
cccauuaugaagaggcuuu

SEQ ID NO: 2244800 - RNA, 19 nt, Homo sapiens
  misc_RNA (1)...(19): siRNA sense strand
gcacuuaaucuauggggaa

SEQ ID NO: 2244801 - RNA, 19 nt, Homo sapiens
  misc_RNA (1)...(19): siRNA sense strand
cuuugagagaugaggaaga

SEQ ID NO: 2244802 - RNA, 19 nt, Homo sapiens
  misc_RNA (1)...(19): siRNA sense strand
ugaucuucuuaaagggcaa

SEQ ID NO: 2244803 - RNA, 19 nt, Homo sapiens
  misc_RNA (1)...(19): siRNA sense strand
augaaaaguacaaggauca

SEQ ID NO: 2244804 - RNA, 19 nt, Homo sapiens
  misc_RNA (1)...(19): siRNA sense strand
gcagauaugcugaagguug

SEQ ID NO: 2244805 - RNA, 19 nt, Homo sapiens
  misc_RNA (1)...(19): siRNA sense strand
aguacgagcaggugcccaa

SEQ ID NO: 2244806 - RNA, 19 nt, Homo sapiens
  misc_RNA (1)...(19): siRNA sense strand
cccaagaucuggugcagga

SEQ ID NO: 2244807 - RNA, 19 nt, Homo sapiens
  misc_RNA (1)...(19): siRNA sense strand
cugaaaccaccaagaugaa

SEQ ID NO: 2244808 - RNA, 19 nt, Homo sapiens
  misc_RNA (1)...(19): siRNA sense strand
cagcagagaaagaggagug

SEQ ID NO: 2244809 - RNA, 19 nt, Homo sapiens
  misc_RNA (1)...(19): siRNA sense strand
cuucauucuacguaaguau

SEQ ID NO: 2244810 - RNA, 19 nt, Homo sapiens
  misc_RNA (1)...(19): siRNA sense strand
gagaugaggaagagagagc

SEQ ID NO: 2244811 - RNA, 19 nt, Homo sapiens
  misc_RNA (1)...(19): siRNA sense strand
ugaggaagagagagcccaa

SEQ ID NO: 2244812 - RNA, 19 nt, Homo sapiens
  misc_RNA (1)...(19): siRNA sense strand
cgaaggugccaaaugccaa

SEQ ID NO: 2244813 - RNA, 19 nt, Homo sapiens
  misc_RNA (1)...(19): siRNA sense strand
ggcuuugagagaugaggaa

SEQ ID NO: 2244814 - RNA, 19 nt, Homo sapiens
  misc_RNA (1)...(19): siRNA sense strand
gaugaaaaguacaaggauc

SEQ ID NO: 2244815 - RNA, 19 nt, Homo sapiens
  misc_RNA (1)...(19): siRNA sense strand
aagaucuggugcaggaaaa

SEQ ID NO: 2244816 - RNA, 19 nt, Homo sapiens
  misc_RNA (1)...(19): siRNA sense strand
caagaugaauggugccacu

SEQ ID NO: 2244817 - RNA, 19 nt, Homo sapiens
  misc_RNA (1)...(19): siRNA sense strand
gugccaaaugccaagguga

SEQ ID NO: 2244818 - RNA, 19 nt, Homo sapiens
  misc_RNA (1)...(19): siRNA sense strand
ccgaggaagagaucuggaa

SEQ ID NO: 2244819 - RNA, 19 nt, Homo sapiens
  misc_RNA (1)...(19): siRNA sense strand
ccauuaugaaggcagauau

SEQ ID NO: 2244820 - RNA, 19 nt, Homo sapiens
  misc_RNA (1)...(19): siRNA sense strand
cccauuaugaagaggcuuu

SEQ ID NO: 2244821 - RNA, 19 nt, Homo sapiens
  misc_RNA (1)...(19): siRNA sense strand
gcacuuaaucuauggggaa

SEQ ID NO: 2244822 - RNA, 19 nt, Homo sapiens
  misc_RNA (1)...(19): siRNA sense strand
cuuugagagaugaggaaga

SEQ ID NO: 2244823 - RNA, 19 nt, Homo sapiens
  misc_RNA (1)...(19): siRNA sense strand
ugaucuucuuaaagggcaa

SEQ ID NO: 2244824 - RNA, 19 nt, Homo sapiens
  misc_RNA (1)...(19): siRNA sense strand
augaaaaguacaaggauca

SEQ ID NO: 2244825 - RNA, 19 nt, Homo sapiens
  misc_RNA (1)...(19): siRNA sense strand
gcagauaugcugaagguug

SEQ ID NO: 2244826 - RNA, 19 nt, Homo sapiens
  misc_RNA (1)...(19): siRNA sense strand
aguacgagcaggugcccaa

SEQ ID NO: 2244827 - RNA, 19 nt, Homo sapiens
  misc_RNA (1)...(19): siRNA sense strand
cccaagaucuggugcagga

SEQ ID NO: 2244828 - RNA, 19 nt, Homo sapiens
  misc_RNA (1)...(19): siRNA sense strand
cugaaaccaccaagaugaa

SEQ ID NO: 2244829 - RNA, 19 nt, Homo sapiens
  misc_RNA (1)...(19): siRNA sense strand
cagcagagaaagaggagug

SEQ ID NO: 2244830 - RNA, 19 nt, Homo sapiens
  misc_RNA (1)...(19): siRNA sense strand
cuucauucuacguaaguau

SEQ ID NO: 2244831 - RNA, 19 nt, Homo sapiens
  misc_RNA (1)...(19): siRNA sense strand
gagaugaggaagagagagc

SEQ ID NO: 2244832 - RNA, 19 nt, Homo sapiens
  misc_RNA (1)...(19): siRNA sense strand
ugaggaagagagagcccaa

SEQ ID NO: 2244833 - RNA, 19 nt, Homo sapiens
  misc_RNA (1)...(19): siRNA sense strand
cgaaggugccaaaugccaa

SEQ ID NO: 2244834 - RNA, 19 nt, Homo sapiens
  misc_RNA (1)...(19): siRNA sense strand
ggcuuugagagaugaggaa

SEQ ID NO: 2244835 - RNA, 19 nt, Homo sapiens
  misc_RNA (1)...(19): siRNA sense strand
gaugaaaaguacaaggauc

SEQ ID NO: 2244836 - RNA, 19 nt, Homo sapiens
  misc_RNA (1)...(19): siRNA sense strand
aagaucuggugcaggaaaa

SEQ ID NO: 2244837 - RNA, 19 nt, Homo sapiens
  misc_RNA (1)...(19): siRNA sense strand
caagaugaauggugccacu

SEQ ID NO: 2244838 - RNA, 19 nt, Homo sapiens
  misc_RNA (1)...(19): siRNA sense strand
gugccaaaugccaagguga

SEQ ID NO: 2244839 - RNA, 19 nt, Homo sapiens
  misc_RNA (1)...(19): siRNA sense strand
ccgaggaagagaucuggaa

SEQ ID NO: 2244840 - RNA, 19 nt, Homo sapiens
  misc_RNA (1)...(19): siRNA sense strand
ccauuaugaaggcagauau

SEQ ID NO: 2244841 - RNA, 19 nt, Homo sapiens
  misc_RNA (1)...(19): siRNA sense strand
cccauuaugaagaggcuuu

SEQ ID NO: 2244842 - RNA, 19 nt, Homo sapiens
  misc_RNA (1)...(19): siRNA sense strand
gguauuugguguugauuua

SEQ ID NO: 2244843 - RNA, 19 nt, Homo sapiens
  misc_RNA (1)...(19): siRNA sense strand
gagaauauaugaugggaag

SEQ ID NO: 2244844 - RNA, 19 nt, Homo sapiens
  misc_RNA (1)...(19): siRNA sense strand
ccucuaaucaugaagacaa

SEQ ID NO: 2244845 - RNA, 19 nt, Homo sapiens
  misc_RNA (1)...(19): siRNA sense strand
uggaaauguacaagaugaa

SEQ ID NO: 2244846 - RNA, 19 nt, Homo sapiens
  misc_RNA (1)...(19): siRNA sense strand
agacaaauauguuggugca

SEQ ID NO: 2244847 - RNA, 19 nt, Homo sapiens
  misc_RNA (1)...(19): siRNA sense strand
cucuaaucaugaagacaaa

SEQ ID NO: 2244848 - RNA, 19 nt, Homo sapiens
  misc_RNA (1)...(19): siRNA sense strand
cuuugagagaugaggaaga

SEQ ID NO: 2244849 - RNA, 19 nt, Homo sapiens
  misc_RNA (1)...(19): siRNA sense strand
ugagaauauaugaugggaa

SEQ ID NO: 2244850 - RNA, 19 nt, Homo sapiens
  misc_RNA (1)...(19): siRNA sense strand
ccagaaagcucaucaccca

SEQ ID NO: 2244851 - RNA, 19 nt, Homo sapiens
  misc_RNA (1)...(19): siRNA sense strand
agaaaguguuccaaggcca

SEQ ID NO: 2244852 - RNA, 19 nt, Homo sapiens
  misc_RNA (1)...(19): siRNA sense strand
ucaacauggaggugguauu

SEQ ID NO: 2244853 - RNA, 19 nt, Homo sapiens
  misc_RNA (1)...(19): siRNA sense strand
gcacagacccucuaaucau

SEQ ID NO: 2244854 - RNA, 19 nt, Homo sapiens
  misc_RNA (1)...(19): siRNA sense strand
gaaaguguuccaaggccaa

SEQ ID NO: 2244855 - RNA, 19 nt, Homo sapiens
  misc_RNA (1)...(19): siRNA sense strand
ugaggaagaaagaguccaa

SEQ ID NO: 2244856 - RNA, 19 nt, Homo sapiens
  misc_RNA (1)...(19): siRNA sense strand
agaaagaguccaagcugca

SEQ ID NO: 2244857 - RNA, 19 nt, Homo sapiens
  misc_RNA (1)...(19): siRNA sense strand
caacaaugggacagugacu

SEQ ID NO: 2244858 - RNA, 19 nt, Homo sapiens
  misc_RNA (1)...(19): siRNA sense strand
acaagggagccaacagcaa

SEQ ID NO: 2244859 - RNA, 19 nt, Homo sapiens
  misc_RNA (1)...(19): siRNA sense strand
ggcuuugagagaugaggaa

SEQ ID NO: 2244860 - RNA, 19 nt, Homo sapiens
  misc_RNA (1)...(19): siRNA sense strand
ccauuaugaaagcagauau

SEQ ID NO: 2244861 - RNA, 19 nt, Homo sapiens
  misc_RNA (1)...(19): siRNA sense strand
ccaaggauccagaaggcuu

SEQ ID NO: 2244862 - RNA, 19 nt, Homo sapiens
  misc_RNA (1)...(19): siRNA sense strand
aguuaagauaugccaacaa

SEQ ID NO: 2244863 - RNA, 19 nt, Homo sapiens
  misc_RNA (1)...(19): siRNA sense strand
uugaaaucgucauuggaga

SEQ ID NO: 2244864 - RNA, 19 nt, Homo sapiens
  misc_RNA (1)...(19): siRNA sense strand
ggaaguuaagauaugccaa

SEQ ID NO: 2244865 - RNA, 19 nt, Homo sapiens
  misc_RNA (1)...(19): siRNA sense strand
gcgugauggaggaacugaa

SEQ ID NO: 2244866 - RNA, 19 nt, Homo sapiens
  misc_RNA (1)...(19): siRNA sense strand
guggagagcuacagcguca

SEQ ID NO: 2244867 - RNA, 19 nt, Homo sapiens
  misc_RNA (1)...(19): siRNA sense strand
cuguugaauuugagaaagu

SEQ ID NO: 2244868 - RNA, 19 nt, Homo sapiens
  misc_RNA (1)...(19): siRNA sense strand
agaucuguguggaggaaga

SEQ ID NO: 2244869 - RNA, 19 nt, Homo sapiens
  misc_RNA (1)...(19): siRNA sense strand
aacuggaagcugugaguaa

SEQ ID NO: 2244870 - RNA, 19 nt, Homo sapiens
  misc_RNA (1)...(19): siRNA sense strand
gugugaggccagagaacuu

SEQ ID NO: 2244871 - RNA, 19 nt, Homo sapiens
  misc_RNA (1)...(19): siRNA sense strand
gccuguugaauuugagaaa

SEQ ID NO: 2244872 - RNA, 19 nt, Homo sapiens
  misc_RNA (1)...(19): siRNA sense strand
ccaucaaccagauaggcaa

SEQ ID NO: 2244873 - RNA, 19 nt, Homo sapiens
  misc_RNA (1)...(19): siRNA sense strand
uggugaaauuccaagccaa

SEQ ID NO: 2244874 - RNA, 19 nt, Homo sapiens
  misc_RNA (1)...(19): siRNA sense strand
cggcugacuucaagaccau

SEQ ID NO: 2244875 - RNA, 19 nt, Homo sapiens
  misc_RNA (1)...(19): siRNA sense strand
aagaaguugcagaagaaga

SEQ ID NO: 2244876 - RNA, 19 nt, Homo sapiens
  misc_RNA (1)...(19): siRNA sense strand
ggaugagcugagggaaaua

SEQ ID NO: 2244877 - RNA, 19 nt, Homo sapiens
  misc_RNA (1)...(19): siRNA sense strand
ccaagaaggccaaagaccu

SEQ ID NO: 2244878 - RNA, 19 nt, Homo sapiens
  misc_RNA (1)...(19): siRNA sense strand
gagugggcagcguggacaa

SEQ ID NO: 2244879 - RNA, 19 nt, Homo sapiens
  misc_RNA (1)...(19): siRNA sense strand
uuugagaaagugaagguau

SEQ ID NO: 2244880 - RNA, 19 nt, Homo sapiens
  misc_RNA (1)...(19): siRNA sense strand
cggaagacggugcaagaaa

SEQ ID NO: 2244881 - RNA, 19 nt, Homo sapiens
  misc_RNA (1)...(19): siRNA sense strand
aagaaaugacacagagaau

SEQ ID NO: 2244882 - RNA, 19 nt, Homo sapiens
  misc_RNA (1)...(19): siRNA sense strand
ucaacauggaggagagcua

SEQ ID NO: 2244883 - RNA, 19 nt, Homo sapiens
  misc_RNA (1)...(19): siRNA sense strand
ccaguaaagccaaggccaa

SEQ ID NO: 2244884 - RNA, 19 nt, Homo sapiens
  misc_RNA (1)...(19): siRNA sense strand
gaauggaagcccuggaaaa

SEQ ID NO: 2244885 - RNA, 19 nt, Homo sapiens
  misc_RNA (1)...(19): siRNA sense strand
gcuuagaagaaaugacaca

SEQ ID NO: 2244886 - RNA, 19 nt, Homo sapiens
  misc_RNA (1)...(19): siRNA sense strand
uggaaaaucgccugagaua

SEQ ID NO: 2244887 - RNA, 19 nt, Homo sapiens
  misc_RNA (1)...(19): siRNA sense strand
cugccaagcuauagaccau

SEQ ID NO: 2244888 - RNA, 19 nt, Homo sapiens
  misc_RNA (1)...(19): siRNA sense strand
ccugaauccagauaagaaa

SEQ ID NO: 2244889 - RNA, 19 nt, Homo sapiens
  misc_RNA (1)...(19): siRNA sense strand
cugcaaaugcucagaggga

SEQ ID NO: 2244890 - RNA, 19 nt, Homo sapiens
  misc_RNA (1)...(19): siRNA sense strand
guguguaagcagugaagau

SEQ ID NO: 2244891 - RNA, 19 nt, Homo sapiens
  misc_RNA (1)...(19): siRNA sense strand
cuggagaguuccugugaga

SEQ ID NO: 2244892 - RNA, 19 nt, Homo sapiens
  misc_RNA (1)...(19): siRNA sense strand
gguguguggcuguggacua

SEQ ID NO: 2244893 - RNA, 19 nt, Homo sapiens
  misc_RNA (1)...(19): siRNA sense strand
ccuccguguuccagaagaa

SEQ ID NO: 2244894 - RNA, 19 nt, Homo sapiens
  misc_RNA (1)...(19): siRNA sense strand
gaugggaagacgugugcaa

SEQ ID NO: 2244895 - RNA, 19 nt, Homo sapiens
  misc_RNA (1)...(19): siRNA sense strand
auggaugagauaagugaaa

SEQ ID NO: 2244896 - RNA, 19 nt, Homo sapiens
  misc_RNA (1)...(19): siRNA sense strand
caggaagcccuuuggaaga

SEQ ID NO: 2244897 - RNA, 19 nt, Homo sapiens
  misc_RNA (1)...(19): siRNA sense strand
gauaagaaaaccugcagaa

SEQ ID NO: 2244898 - RNA, 19 nt, Homo sapiens
  misc_RNA (1)...(19): siRNA sense strand
aagaaaaccugcagaagga

SEQ ID NO: 2244899 - RNA, 19 nt, Homo sapiens
  misc_RNA (1)...(19): siRNA sense strand
uuauauacuccgugaagau

SEQ ID NO: 2244900 - RNA, 19 nt, Homo sapiens
  misc_RNA (1)...(19): siRNA sense strand
aggaggaacuacaagagau

SEQ ID NO: 2244901 - RNA, 19 nt, Homo sapiens
  misc_RNA (1)...(19): siRNA sense strand
gagaaugugccacggguca

SEQ ID NO: 2244902 - RNA, 19 nt, Homo sapiens
  misc_RNA (1)...(19): siRNA sense strand
aagccaaggccaaugguau

SEQ ID NO: 2244903 - RNA, 19 nt, Homo sapiens
  misc_RNA (1)...(19): siRNA sense strand
agaagaaaugacacagaga

SEQ ID NO: 2244904 - RNA, 19 nt, Homo sapiens
  misc_RNA (1)...(19): siRNA sense strand
ugugaauacuccuguguca

SEQ ID NO: 2244905 - RNA, 19 nt, Homo sapiens
  misc_RNA (1)...(19): siRNA sense strand
ccaugaaggauuugcucuu

SEQ ID NO: 2244906 - RNA, 19 nt, Homo sapiens
  misc_RNA (1)...(19): siRNA sense strand
ugaccaugguugugaauac

SEQ ID NO: 2244907 - RNA, 19 nt, Homo sapiens
  misc_RNA (1)...(19): siRNA sense strand
ggaaagggcucuaugacug

SEQ ID NO: 2244908 - RNA, 19 nt, Homo sapiens
  misc_RNA (1)...(19): siRNA sense strand
aggaguucaucguggacau

SEQ ID NO: 2244909 - RNA, 19 nt, Homo sapiens
  misc_RNA (1)...(19): siRNA sense strand
gugcuuugaagguuauaua

SEQ ID NO: 2244910 - RNA, 19 nt, Homo sapiens
  misc_RNA (1)...(19): siRNA sense strand
aaggaaagaugucugccaa

SEQ ID NO: 2244911 - RNA, 19 nt, Homo sapiens
  misc_RNA (1)...(19): siRNA sense strand
cugugaagcucuagaagac

SEQ ID NO: 2244912 - RNA, 19 nt, Homo sapiens
  misc_RNA (1)...(19): siRNA sense strand
ccuugcaaacgaagaagua

SEQ ID NO: 2244913 - RNA, 19 nt, Homo sapiens
  misc_RNA (1)...(19): siRNA sense strand
gggaaagggcucuaugacu

SEQ ID NO: 2244914 - RNA, 19 nt, Homo sapiens
  misc_RNA (1)...(19): siRNA sense strand
cgaucaaugcaaaugugaa

SEQ ID NO: 2244915 - RNA, 19 nt, Homo sapiens
  misc_RNA (1)...(19): siRNA sense strand
ugggaagacgugugcaaaa

SEQ ID NO: 2244916 - RNA, 19 nt, Homo sapiens
  misc_RNA (1)...(19): siRNA sense strand
aggaaggaugucugcaaau

SEQ ID NO: 2244917 - RNA, 19 nt, Homo sapiens
  misc_RNA (1)...(19): siRNA sense strand
ucguggacaucuugcaauu

SEQ ID NO: 2244918 - RNA, 19 nt, Homo sapiens
  misc_RNA (1)...(19): siRNA sense strand
agaggaaguccgaggugga

SEQ ID NO: 2244919 - RNA, 19 nt, Homo sapiens
  misc_RNA (1)...(19): siRNA sense strand
ugaacaugaguguguaaau

SEQ ID NO: 2244920 - RNA, 19 nt, Homo sapiens
  misc_RNA (1)...(19): siRNA sense strand
gcucgcugaggaugggaaa

SEQ ID NO: 2244921 - RNA, 19 nt, Homo sapiens
  misc_RNA (1)...(19): siRNA sense strand
caguaaagccaaggccaau

SEQ ID NO: 2244922 - RNA, 19 nt, Homo sapiens
  misc_RNA (1)...(19): siRNA sense strand
ccauugaggaggaacuaca

SEQ ID NO: 2244923 - RNA, 19 nt, Homo sapiens
  misc_RNA (1)...(19): siRNA sense strand
cauccuaaucuuugccauu

SEQ ID NO: 2244924 - RNA, 19 nt, Homo sapiens
  misc_RNA (1)...(19): siRNA sense strand
aggcaucugugaagcucua

SEQ ID NO: 2244925 - RNA, 19 nt, Homo sapiens
  misc_RNA (1)...(19): siRNA sense strand
ugugaacaugaguguguaa

SEQ ID NO: 2244926 - RNA, 19 nt, Homo sapiens
  misc_RNA (1)...(19): siRNA sense strand
gaaaauuaacacagcgcuu

SEQ ID NO: 2244927 - RNA, 19 nt, Homo sapiens
  misc_RNA (1)...(19): siRNA sense strand
gugccauggaggaccacaa

SEQ ID NO: 2244928 - RNA, 19 nt, Homo sapiens
  misc_RNA (1)...(19): siRNA sense strand
ggaccauggcugugagcag

SEQ ID NO: 2244929 - RNA, 19 nt, Homo sapiens
  misc_RNA (1)...(19): siRNA sense strand
gcgucaacauggaggagag

SEQ ID NO: 2244930 - RNA, 19 nt, Homo sapiens
  misc_RNA (1)...(19): siRNA sense strand
gggaagacgugugcaaaau

SEQ ID NO: 2244931 - RNA, 19 nt, Homo sapiens
  misc_RNA (1)...(19): siRNA sense strand
cggaagacggugcaagaaa

SEQ ID NO: 2244932 - RNA, 19 nt, Homo sapiens
  misc_RNA (1)...(19): siRNA sense strand
aagaaaugacacagagaau

SEQ ID NO: 2244933 - RNA, 19 nt, Homo sapiens
  misc_RNA (1)...(19): siRNA sense strand
ucaacauggaggagagcua

SEQ ID NO: 2244934 - RNA, 19 nt, Homo sapiens
  misc_RNA (1)...(19): siRNA sense strand
ccaguaaagccaaggccaa

SEQ ID NO: 2244935 - RNA, 19 nt, Homo sapiens
  misc_RNA (1)...(19): siRNA sense strand
gaauggaagcccuggaaaa

SEQ ID NO: 2244936 - RNA, 19 nt, Homo sapiens
  misc_RNA (1)...(19): siRNA sense strand
gcuuagaagaaaugacaca

SEQ ID NO: 2244937 - RNA, 19 nt, Homo sapiens
  misc_RNA (1)...(19): siRNA sense strand
uggaaaaucgccugagaua

SEQ ID NO: 2244938 - RNA, 19 nt, Homo sapiens
  misc_RNA (1)...(19): siRNA sense strand
cugccaagcuauagaccau

SEQ ID NO: 2244939 - RNA, 19 nt, Homo sapiens
  misc_RNA (1)...(19): siRNA sense strand
ccugaauccagauaagaaa

SEQ ID NO: 2244940 - RNA, 19 nt, Homo sapiens
  misc_RNA (1)...(19): siRNA sense strand
cugcaaaugcucagaggga

SEQ ID NO: 2244941 - RNA, 19 nt, Homo sapiens
  misc_RNA (1)...(19): siRNA sense strand
guguguaagcagugaagau

SEQ ID NO: 2244942 - RNA, 19 nt, Homo sapiens
  misc_RNA (1)...(19): siRNA sense strand
cuggagaguuccugugaga

SEQ ID NO: 2244943 - RNA, 19 nt, Homo sapiens
  misc_RNA (1)...(19): siRNA sense strand
gguguguggcuguggacua

SEQ ID NO: 2244944 - RNA, 19 nt, Homo sapiens
  misc_RNA (1)...(19): siRNA sense strand
ccuccguguuccagaagaa

SEQ ID NO: 2244945 - RNA, 19 nt, Homo sapiens
  misc_RNA (1)...(19): siRNA sense strand
gaugggaagacgugugcaa

SEQ ID NO: 2244946 - RNA, 19 nt, Homo sapiens
  misc_RNA (1)...(19): siRNA sense strand
auggaugagauaagugaaa

SEQ ID NO: 2244947 - RNA, 19 nt, Homo sapiens
  misc_RNA (1)...(19): siRNA sense strand
caggaagcccuuuggaaga

SEQ ID NO: 2244948 - RNA, 19 nt, Homo sapiens
  misc_RNA (1)...(19): siRNA sense strand
gauaagaaaaccugcagaa

SEQ ID NO: 2244949 - RNA, 19 nt, Homo sapiens
  misc_RNA (1)...(19): siRNA sense strand
aagaaaaccugcagaagga

SEQ ID NO: 2244950 - RNA, 19 nt, Homo sapiens
  misc_RNA (1)...(19): siRNA sense strand
uuauauacuccgugaagau

SEQ ID NO: 2244951 - RNA, 19 nt, Homo sapiens
  misc_RNA (1)...(19): siRNA sense strand
aggaggaacuacaagagau

SEQ ID NO: 2244952 - RNA, 19 nt, Homo sapiens
  misc_RNA (1)...(19): siRNA sense strand
gagaaugugccacggguca

SEQ ID NO: 2244953 - RNA, 19 nt, Homo sapiens
  misc_RNA (1)...(19): siRNA sense strand
aagccaaggccaaugguau

SEQ ID NO: 2244954 - RNA, 19 nt, Homo sapiens
  misc_RNA (1)...(19): siRNA sense strand
agaagaaaugacacagaga

SEQ ID NO: 2244955 - RNA, 19 nt, Homo sapiens
  misc_RNA (1)...(19): siRNA sense strand
ugugaauacuccuguguca

SEQ ID NO: 2244956 - RNA, 19 nt, Homo sapiens
  misc_RNA (1)...(19): siRNA sense strand
ccaugaaggauuugcucuu

SEQ ID NO: 2244957 - RNA, 19 nt, Homo sapiens
  misc_RNA (1)...(19): siRNA sense strand
ugaccaugguugugaauac

SEQ ID NO: 2244958 - RNA, 19 nt, Homo sapiens
  misc_RNA (1)...(19): siRNA sense strand
ggaaagggcucuaugacug

SEQ ID NO: 2244959 - RNA, 19 nt, Homo sapiens
  misc_RNA (1)...(19): siRNA sense strand
aggaguucaucguggacau

SEQ ID NO: 2244960 - RNA, 19 nt, Homo sapiens
  misc_RNA (1)...(19): siRNA sense strand
gugcuuugaagguuauaua

SEQ ID NO: 2244961 - RNA, 19 nt, Homo sapiens
  misc_RNA (1)...(19): siRNA sense strand
aaggaaagaugucugccaa

SEQ ID NO: 2244962 - RNA, 19 nt, Homo sapiens
  misc_RNA (1)...(19): siRNA sense strand
cugugaagcucuagaagac

SEQ ID NO: 2244963 - RNA, 19 nt, Homo sapiens
  misc_RNA (1)...(19): siRNA sense strand
ccuugcaaacgaagaagua

SEQ ID NO: 2244964 - RNA, 19 nt, Homo sapiens
  misc_RNA (1)...(19): siRNA sense strand
gggaaagggcucuaugacu

SEQ ID NO: 2244965 - RNA, 19 nt, Homo sapiens
  misc_RNA (1)...(19): siRNA sense strand
cgaucaaugcaaaugugaa

SEQ ID NO: 2244966 - RNA, 19 nt, Homo sapiens
  misc_RNA (1)...(19): siRNA sense strand
ugggaagacgugugcaaaa

SEQ ID NO: 2244967 - RNA, 19 nt, Homo sapiens
  misc_RNA (1)...(19): siRNA sense strand
aggaaggaugucugcaaau

SEQ ID NO: 2244968 - RNA, 19 nt, Homo sapiens
  misc_RNA (1)...(19): siRNA sense strand
ucguggacaucuugcaauu

SEQ ID NO: 2244969 - RNA, 19 nt, Homo sapiens
  misc_RNA (1)...(19): siRNA sense strand
agaggaaguccgaggugga

SEQ ID NO: 2244970 - RNA, 19 nt, Homo sapiens
  misc_RNA (1)...(19): siRNA sense strand
ugaacaugaguguguaaau

SEQ ID NO: 2244971 - RNA, 19 nt, Homo sapiens
  misc_RNA (1)...(19): siRNA sense strand
gcucgcugaggaugggaaa

SEQ ID NO: 2244972 - RNA, 19 nt, Homo sapiens
  misc_RNA (1)...(19): siRNA sense strand
caguaaagccaaggccaau

SEQ ID NO: 2244973 - RNA, 19 nt, Homo sapiens
  misc_RNA (1)...(19): siRNA sense strand
ccauugaggaggaacuaca

SEQ ID NO: 2244974 - RNA, 19 nt, Homo sapiens
  misc_RNA (1)...(19): siRNA sense strand
cauccuaaucuuugccauu

SEQ ID NO: 2244975 - RNA, 19 nt, Homo sapiens
  misc_RNA (1)...(19): siRNA sense strand
aggcaucugugaagcucua

SEQ ID NO: 2244976 - RNA, 19 nt, Homo sapiens
  misc_RNA (1)...(19): siRNA sense strand
ugugaacaugaguguguaa

SEQ ID NO: 2244977 - RNA, 19 nt, Homo sapiens
  misc_RNA (1)...(19): siRNA sense strand
gaaaauuaacacagcgcuu

SEQ ID NO: 2244978 - RNA, 19 nt, Homo sapiens
  misc_RNA (1)...(19): siRNA sense strand
gugccauggaggaccacaa

SEQ ID NO: 2244979 - RNA, 19 nt, Homo sapiens
  misc_RNA (1)...(19): siRNA sense strand
ggaccauggcugugagcag

SEQ ID NO: 2244980 - RNA, 19 nt, Homo sapiens
  misc_RNA (1)...(19): siRNA sense strand
gcgucaacauggaggagag

SEQ ID NO: 2244981 - RNA, 19 nt, Homo sapiens
  misc_RNA (1)...(19): siRNA sense strand
gggaagacgugugcaaaau

SEQ ID NO: 2244982 - RNA, 19 nt, Homo sapiens
  misc_RNA (1)...(19): siRNA sense strand
gugaaugcuaugagggcua

SEQ ID NO: 2244983 - RNA, 19 nt, Homo sapiens
  misc_RNA (1)...(19): siRNA sense strand
acaccuuaaaugaggacaa

SEQ ID NO: 2244984 - RNA, 19 nt, Homo sapiens
  misc_RNA (1)...(19): siRNA sense strand
gauaaaugugcuuugggua

SEQ ID NO: 2244985 - RNA, 19 nt, Homo sapiens
  misc_RNA (1)...(19): siRNA sense strand
ccuugaaugaagacaggaa

SEQ ID NO: 2244986 - RNA, 19 nt, Homo sapiens
  misc_RNA (1)...(19): siRNA sense strand
gcucaagauaaaugugcuu

SEQ ID NO: 2244987 - RNA, 19 nt, Homo sapiens
  misc_RNA (1)...(19): siRNA sense strand
cagcaauggacgaagccuu

SEQ ID NO: 2244988 - RNA, 19 nt, Homo sapiens
  misc_RNA (1)...(19): siRNA sense strand
uggacaaauacaucguuaa

SEQ ID NO: 2244989 - RNA, 19 nt, Homo sapiens
  misc_RNA (1)...(19): siRNA sense strand
cugugaagaucgaguucca

SEQ ID NO: 2244990 - RNA, 19 nt, Homo sapiens
  misc_RNA (1)...(19): siRNA sense strand
ugauaguucucguagcgua

SEQ ID NO: 2244991 - RNA, 19 nt, Homo sapiens
  misc_RNA (1)...(19): siRNA sense strand
cuugaaugaagacaggaaa

SEQ ID NO: 2244992 - RNA, 19 nt, Homo sapiens
  misc_RNA (1)...(19): siRNA sense strand
uugaaugaagacaggaaaa

SEQ ID NO: 2244993 - RNA, 19 nt, Homo sapiens
  misc_RNA (1)...(19): siRNA sense strand
aggacaaggaggagaacaa

SEQ ID NO: 2244994 - RNA, 19 nt, Homo sapiens
  misc_RNA (1)...(19): siRNA sense strand
gggaugagaccaaggcuga

SEQ ID NO: 2244995 - RNA, 19 nt, Homo sapiens
  misc_RNA (1)...(19): siRNA sense strand
ccaagaggauuguggccau

SEQ ID NO: 2244996 - RNA, 19 nt, Homo sapiens
  misc_RNA (1)...(19): siRNA sense strand
aggaggacaaggaggagaa

SEQ ID NO: 2244997 - RNA, 19 nt, Homo sapiens
  misc_RNA (1)...(19): siRNA sense strand
gugcaaagacugucgagca

SEQ ID NO: 2244998 - RNA, 19 nt, Homo sapiens
  misc_RNA (1)...(19): siRNA sense strand
cagaggaggacaaggagga

SEQ ID NO: 2244999 - RNA, 19 nt, Homo sapiens
  misc_RNA (1)...(19): siRNA sense strand
cagcaagaagcgaaagaag

SEQ ID NO: 2245000 - RNA, 19 nt, Homo sapiens
  misc_RNA (1)...(19): siRNA sense strand
acccaaaggcagcggcuca

SEQ ID NO: 2245001 - RNA, 19 nt, Homo sapiens
  misc_RNA (1)...(19): siRNA sense strand
cugucagacccaagaggau

SEQ ID NO: 2245002 - RNA, 19 nt, Homo sapiens
  misc_RNA (1)...(19): siRNA sense strand
aggacaaggaggagaacaa

SEQ ID NO: 2245003 - RNA, 19 nt, Homo sapiens
  misc_RNA (1)...(19): siRNA sense strand
gggaugagaccaaggcuga

SEQ ID NO: 2245004 - RNA, 19 nt, Homo sapiens
  misc_RNA (1)...(19): siRNA sense strand
ccaagaggauuguggccau

SEQ ID NO: 2245005 - RNA, 19 nt, Homo sapiens
  misc_RNA (1)...(19): siRNA sense strand
aggaggacaaggaggagaa

SEQ ID NO: 2245006 - RNA, 19 nt, Homo sapiens
  misc_RNA (1)...(19): siRNA sense strand
gugcaaagacugucgagca

SEQ ID NO: 2245007 - RNA, 19 nt, Homo sapiens
  misc_RNA (1)...(19): siRNA sense strand
cagaggaggacaaggagga

SEQ ID NO: 2245008 - RNA, 19 nt, Homo sapiens
  misc_RNA (1)...(19): siRNA sense strand
cagcaagaagcgaaagaag

SEQ ID NO: 2245009 - RNA, 19 nt, Homo sapiens
  misc_RNA (1)...(19): siRNA sense strand
acccaaaggcagcggcuca

SEQ ID NO: 2245010 - RNA, 19 nt, Homo sapiens
  misc_RNA (1)...(19): siRNA sense strand
cugucagacccaagaggau

SEQ ID NO: 2245011 - RNA, 19 nt, Homo sapiens
  misc_RNA (1)...(19): siRNA sense strand
aggacaaggaggagaacaa

SEQ ID NO: 2245012 - RNA, 19 nt, Homo sapiens
  misc_RNA (1)...(19): siRNA sense strand
ggauguaaagugugggaga

SEQ ID NO: 2245013 - RNA, 19 nt, Homo sapiens
  misc_RNA (1)...(19): siRNA sense strand
agaagaagcuggugcccuu

SEQ ID NO: 2245014 - RNA, 19 nt, Homo sapiens
  misc_RNA (1)...(19): siRNA sense strand
gggaugagaccaaggcuga

SEQ ID NO: 2245015 - RNA, 19 nt, Homo sapiens
  misc_RNA (1)...(19): siRNA sense strand
ccaagaggauuguggccau

SEQ ID NO: 2245016 - RNA, 19 nt, Homo sapiens
  misc_RNA (1)...(19): siRNA sense strand
aggaggacaaggaggagaa

SEQ ID NO: 2245017 - RNA, 19 nt, Homo sapiens
  misc_RNA (1)...(19): siRNA sense strand
gugcaaagacugucgagca

SEQ ID NO: 2245018 - RNA, 19 nt, Homo sapiens
  misc_RNA (1)...(19): siRNA sense strand
cagaggaggacaaggagga

SEQ ID NO: 2245019 - RNA, 19 nt, Homo sapiens
  misc_RNA (1)...(19): siRNA sense strand
guaaagugugggagaccga

SEQ ID NO: 2245020 - RNA, 19 nt, Homo sapiens
  misc_RNA (1)...(19): siRNA sense strand
cagcaagaagcgaaagaag

SEQ ID NO: 2245021 - RNA, 19 nt, Homo sapiens
  misc_RNA (1)...(19): siRNA sense strand
acccaaaggcagcggcuca

SEQ ID NO: 2245022 - RNA, 19 nt, Homo sapiens
  misc_RNA (1)...(19): siRNA sense strand
cugucagacccaagaggau

SEQ ID NO: 2245023 - RNA, 19 nt, Homo sapiens
  misc_RNA (1)...(19): siRNA sense strand
aggacaaggaggagaacaa

SEQ ID NO: 2245024 - RNA, 19 nt, Homo sapiens
  misc_RNA (1)...(19): siRNA sense strand
gggaugagaccaaggcuga

SEQ ID NO: 2245025 - RNA, 19 nt, Homo sapiens
  misc_RNA (1)...(19): siRNA sense strand
ccaagaggauuguggccau

SEQ ID NO: 2245026 - RNA, 19 nt, Homo sapiens
  misc_RNA (1)...(19): siRNA sense strand
aggaggacaaggaggagaa

SEQ ID NO: 2245027 - RNA, 19 nt, Homo sapiens
  misc_RNA (1)...(19): siRNA sense strand
gugcaaagacugucgagca

SEQ ID NO: 2245028 - RNA, 19 nt, Homo sapiens
  misc_RNA (1)...(19): siRNA sense strand
cagaggaggacaaggagga

SEQ ID NO: 2245029 - RNA, 19 nt, Homo sapiens
  misc_RNA (1)...(19): siRNA sense strand
cagcaagaagcgaaagaag

SEQ ID NO: 2245030 - RNA, 19 nt, Homo sapiens
  misc_RNA (1)...(19): siRNA sense strand
acccaaaggcagcggcuca

SEQ ID NO: 2245031 - RNA, 19 nt, Homo sapiens
  misc_RNA (1)...(19): siRNA sense strand
cugucagacccaagaggau

SEQ ID NO: 2245032 - RNA, 19 nt, Homo sapiens
  misc_RNA (1)...(19): siRNA sense strand
aggacaaggaggagaacaa

SEQ ID NO: 2245033 - RNA, 19 nt, Homo sapiens
  misc_RNA (1)...(19): siRNA sense strand
gggaugagaccaaggcuga

SEQ ID NO: 2245034 - RNA, 19 nt, Homo sapiens
  misc_RNA (1)...(19): siRNA sense strand
ccaagaggauuguggccau

SEQ ID NO: 2245035 - RNA, 19 nt, Homo sapiens
  misc_RNA (1)...(19): siRNA sense strand
aggaggacaaggaggagaa

SEQ ID NO: 2245036 - RNA, 19 nt, Homo sapiens
  misc_RNA (1)...(19): siRNA sense strand
gugcaaagacugucgagca

SEQ ID NO: 2245037 - RNA, 19 nt, Homo sapiens
  misc_RNA (1)...(19): siRNA sense strand
cagaggaggacaaggagga

SEQ ID NO: 2245038 - RNA, 19 nt, Homo sapiens
  misc_RNA (1)...(19): siRNA sense strand
cagcaagaagcgaaagaag

SEQ ID NO: 2245039 - RNA, 19 nt, Homo sapiens
  misc_RNA (1)...(19): siRNA sense strand
acccaaaggcagcggcuca

SEQ ID NO: 2245040 - RNA, 19 nt, Homo sapiens
  misc_RNA (1)...(19): siRNA sense strand
cugucagacccaagaggau

SEQ ID NO: 2245041 - RNA, 19 nt, Homo sapiens
  misc_RNA (1)...(19): siRNA sense strand
agggaaaguaagugacaaa

SEQ ID NO: 2245042 - RNA, 19 nt, Homo sapiens
  misc_RNA (1)...(19): siRNA sense strand
aagugaagaaguagggaaa

SEQ ID NO: 2245043 - RNA, 19 nt, Homo sapiens
  misc_RNA (1)...(19): siRNA sense strand
cagagaacagauacagaaa

SEQ ID NO: 2245044 - RNA, 19 nt, Homo sapiens
  misc_RNA (1)...(19): siRNA sense strand
gguauauugugguggagau

SEQ ID NO: 2245045 - RNA, 19 nt, Homo sapiens
  misc_RNA (1)...(19): siRNA sense strand
aggugauugaagugggaaa

SEQ ID NO: 2245046 - RNA, 19 nt, Homo sapiens
  misc_RNA (1)...(19): siRNA sense strand
acauaauggugaagcaacu

SEQ ID NO: 2245047 - RNA, 19 nt, Homo sapiens
  misc_RNA (1)...(19): siRNA sense strand
cuauacaccuagaaguaau

SEQ ID NO: 2245048 - RNA, 19 nt, Homo sapiens
  misc_RNA (1)...(19): siRNA sense strand
gcaugcagcaggugcgcaa

SEQ ID NO: 2245049 - RNA, 19 nt, Homo sapiens
  misc_RNA (1)...(19): siRNA sense strand
ggucaguacauaaugguga

SEQ ID NO: 2245050 - RNA, 19 nt, Homo sapiens
  misc_RNA (1)...(19): siRNA sense strand
cuagagaagaugaagacuu

SEQ ID NO: 2245051 - RNA, 19 nt, Homo sapiens
  misc_RNA (1)...(19): siRNA sense strand
caagugaagaaguagggaa

SEQ ID NO: 2245052 - RNA, 19 nt, Homo sapiens
  misc_RNA (1)...(19): siRNA sense strand
ccuauuugcaagaaagaga

SEQ ID NO: 2245053 - RNA, 19 nt, Homo sapiens
  misc_RNA (1)...(19): siRNA sense strand
aggagcagcauaugguaua

SEQ ID NO: 2245054 - RNA, 19 nt, Homo sapiens
  misc_RNA (1)...(19): siRNA sense strand
ccugcaacucaguggaauu

SEQ ID NO: 2245055 - RNA, 19 nt, Homo sapiens
  misc_RNA (1)...(19): siRNA sense strand
cugaaagccaagagaccau

SEQ ID NO: 2245056 - RNA, 19 nt, Homo sapiens
  misc_RNA (1)...(19): siRNA sense strand
guggagaucuuuugggaga

SEQ ID NO: 2245057 - RNA, 19 nt, Homo sapiens
  misc_RNA (1)...(19): siRNA sense strand
aacuauacaccuagaagua

SEQ ID NO: 2245058 - RNA, 19 nt, Homo sapiens
  misc_RNA (1)...(19): siRNA sense strand
aagcaaagugcagaggaaa

SEQ ID NO: 2245059 - RNA, 19 nt, Homo sapiens
  misc_RNA (1)...(19): siRNA sense strand
guuguugggccuugaggaa

SEQ ID NO: 2245060 - RNA, 19 nt, Homo sapiens
  misc_RNA (1)...(19): siRNA sense strand
aguacauaauggugaagca

SEQ ID NO: 2245061 - RNA, 19 nt, Homo sapiens
  misc_RNA (1)...(19): siRNA sense strand
guacauaauggugaagcaa

SEQ ID NO: 2245062 - RNA, 19 nt, Homo sapiens
  misc_RNA (1)...(19): siRNA sense strand
aguugaagcugcugauacu

SEQ ID NO: 2245063 - RNA, 19 nt, Homo sapiens
  misc_RNA (1)...(19): siRNA sense strand
ggacaaaucaaucagguac

SEQ ID NO: 2245064 - RNA, 19 nt, Homo sapiens
  misc_RNA (1)...(19): siRNA sense strand
ucacugugccagaagacua

SEQ ID NO: 2245065 - RNA, 19 nt, Homo sapiens
  misc_RNA (1)...(19): siRNA sense strand
ucacaguucugaaagccaa

SEQ ID NO: 2245066 - RNA, 19 nt, Homo sapiens
  misc_RNA (1)...(19): siRNA sense strand
auguagcuuaugugagaaa

SEQ ID NO: 2245067 - RNA, 19 nt, Homo sapiens
  misc_RNA (1)...(19): siRNA sense strand
uggacaaaucaaucaggua

SEQ ID NO: 2245068 - RNA, 19 nt, Homo sapiens
  misc_RNA (1)...(19): siRNA sense strand
guguacugaaugcaagaaa

SEQ ID NO: 2245069 - RNA, 19 nt, Homo sapiens
  misc_RNA (1)...(19): siRNA sense strand
ggaaaaugaaggaaaugau

SEQ ID NO: 2245070 - RNA, 19 nt, Homo sapiens
  misc_RNA (1)...(19): siRNA sense strand
agaaagagauucagcuggu

SEQ ID NO: 2245071 - RNA, 19 nt, Homo sapiens
  misc_RNA (1)...(19): siRNA sense strand
uguacugaaugcaagaaau

SEQ ID NO: 2245072 - RNA, 19 nt, Homo sapiens
  misc_RNA (1)...(19): siRNA sense strand
ugaacagagaacagauaca

SEQ ID NO: 2245073 - RNA, 19 nt, Homo sapiens
  misc_RNA (1)...(19): siRNA sense strand
agucaguaucagagcaguu

SEQ ID NO: 2245074 - RNA, 19 nt, Homo sapiens
  misc_RNA (1)...(19): siRNA sense strand
auauugugguggagaucuu

SEQ ID NO: 2245075 - RNA, 19 nt, Homo sapiens
  misc_RNA (1)...(19): siRNA sense strand
accuagaaguaauggcuca

SEQ ID NO: 2245076 - RNA, 19 nt, Homo sapiens
  misc_RNA (1)...(19): siRNA sense strand
gaacauuauucauggaagg

SEQ ID NO: 2245077 - RNA, 19 nt, Homo sapiens
  misc_RNA (1)...(19): siRNA sense strand
guuagguguuggaauaaaa

SEQ ID NO: 2245078 - RNA, 19 nt, Homo sapiens
  misc_RNA (1)...(19): siRNA sense strand
gagaacagauacagaaaac

SEQ ID NO: 2245079 - RNA, 19 nt, Homo sapiens
  misc_RNA (1)...(19): siRNA sense strand
ccugauugucgaagaacca

SEQ ID NO: 2245080 - RNA, 19 nt, Homo sapiens
  misc_RNA (1)...(19): siRNA sense strand
ucgcacaggaucacaguau

SEQ ID NO: 2245081 - RNA, 19 nt, Homo sapiens
  misc_RNA (1)...(19): siRNA sense strand
agaaguagggaaaguaagu

SEQ ID NO: 2245082 - RNA, 19 nt, Homo sapiens
  misc_RNA (1)...(19): siRNA sense strand
cagcaggugcgcaagguga

SEQ ID NO: 2245083 - RNA, 19 nt, Homo sapiens
  misc_RNA (1)...(19): siRNA sense strand
gucaguacauaauggugaa

SEQ ID NO: 2245084 - RNA, 19 nt, Homo sapiens
  misc_RNA (1)...(19): siRNA sense strand
ggauuugaggagugggaug

SEQ ID NO: 2245085 - RNA, 19 nt, Homo sapiens
  misc_RNA (1)...(19): siRNA sense strand
caaaucaggauguggguac

SEQ ID NO: 2245086 - RNA, 19 nt, Homo sapiens
  misc_RNA (1)...(19): siRNA sense strand
aaguagggaaaguaaguga

SEQ ID NO: 2245087 - RNA, 19 nt, Homo sapiens
  misc_RNA (1)...(19): siRNA sense strand
uauuccaagucaagaccaa

SEQ ID NO: 2245088 - RNA, 19 nt, Homo sapiens
  misc_RNA (1)...(19): siRNA sense strand
cagaaucucuugaagccau

SEQ ID NO: 2245089 - RNA, 19 nt, Homo sapiens
  misc_RNA (1)...(19): siRNA sense strand
agacaacagcagugagcaa

SEQ ID NO: 2245090 - RNA, 19 nt, Homo sapiens
  misc_RNA (1)...(19): siRNA sense strand
ccacaaaucucgcugacca

SEQ ID NO: 2245091 - RNA, 19 nt, Homo sapiens
  misc_RNA (1)...(19): siRNA sense strand
gaagaauaguacagcccau

SEQ ID NO: 2245092 - RNA, 19 nt, Homo sapiens
  misc_RNA (1)...(19): siRNA sense strand
uauuaaugccagaagaaga

SEQ ID NO: 2245093 - RNA, 19 nt, Homo sapiens
  misc_RNA (1)...(19): siRNA sense strand
cauauaguccagaggguca

SEQ ID NO: 2245094 - RNA, 19 nt, Homo sapiens
  misc_RNA (1)...(19): siRNA sense strand
caacaaauaucaugagagc

SEQ ID NO: 2245095 - RNA, 19 nt, Homo sapiens
  misc_RNA (1)...(19): siRNA sense strand
gcuuuguguuggaugguca

SEQ ID NO: 2245096 - RNA, 19 nt, Homo sapiens
  misc_RNA (1)...(19): siRNA sense strand
ccagaagaaaagaggcauu

SEQ ID NO: 2245097 - RNA, 19 nt, Homo sapiens
  misc_RNA (1)...(19): siRNA sense strand
agucagaucaugaagaacu

SEQ ID NO: 2245098 - RNA, 19 nt, Homo sapiens
  misc_RNA (1)...(19): siRNA sense strand
guccacgaacugugcgaua

SEQ ID NO: 2245099 - RNA, 19 nt, Homo sapiens
  misc_RNA (1)...(19): siRNA sense strand
cagaagaagaauaguacag

SEQ ID NO: 2245100 - RNA, 19 nt, Homo sapiens
  misc_RNA (1)...(19): siRNA sense strand
agacaacagcagugagcaa

SEQ ID NO: 2245101 - RNA, 19 nt, Homo sapiens
  misc_RNA (1)...(19): siRNA sense strand
ccacaaaucucgcugacca

SEQ ID NO: 2245102 - RNA, 19 nt, Homo sapiens
  misc_RNA (1)...(19): siRNA sense strand
caacaaauaucaugagagc

SEQ ID NO: 2245103 - RNA, 19 nt, Homo sapiens
  misc_RNA (1)...(19): siRNA sense strand
ccagaagaaaagaggcauu

SEQ ID NO: 2245104 - RNA, 19 nt, Homo sapiens
  misc_RNA (1)...(19): siRNA sense strand
agucagaucaugaagaacu

SEQ ID NO: 2245105 - RNA, 19 nt, Homo sapiens
  misc_RNA (1)...(19): siRNA sense strand
guccacgaacugugcgaua

SEQ ID NO: 2245106 - RNA, 19 nt, Homo sapiens
  misc_RNA (1)...(19): siRNA sense strand
agacaacagcagugagcaa

SEQ ID NO: 2245107 - RNA, 19 nt, Homo sapiens
  misc_RNA (1)...(19): siRNA sense strand
ccacaaaucucgcugacca

SEQ ID NO: 2245108 - RNA, 19 nt, Homo sapiens
  misc_RNA (1)...(19): siRNA sense strand
gaagaauaguacagcccau

SEQ ID NO: 2245109 - RNA, 19 nt, Homo sapiens
  misc_RNA (1)...(19): siRNA sense strand
uauuaaugccagaagaaga

SEQ ID NO: 2245110 - RNA, 19 nt, Homo sapiens
  misc_RNA (1)...(19): siRNA sense strand
cauauaguccagaggguca

SEQ ID NO: 2245111 - RNA, 19 nt, Homo sapiens
  misc_RNA (1)...(19): siRNA sense strand
caacaaauaucaugagagc

SEQ ID NO: 2245112 - RNA, 19 nt, Homo sapiens
  misc_RNA (1)...(19): siRNA sense strand
gcuuuguguuggaugguca

SEQ ID NO: 2245113 - RNA, 19 nt, Homo sapiens
  misc_RNA (1)...(19): siRNA sense strand
ccagaagaaaagaggcauu

SEQ ID NO: 2245114 - RNA, 19 nt, Homo sapiens
  misc_RNA (1)...(19): siRNA sense strand
agucagaucaugaagaacu

SEQ ID NO: 2245115 - RNA, 19 nt, Homo sapiens
  misc_RNA (1)...(19): siRNA sense strand
guccacgaacugugcgaua

SEQ ID NO: 2245116 - RNA, 19 nt, Homo sapiens
  misc_RNA (1)...(19): siRNA sense strand
cagaagaagaauaguacag

SEQ ID NO: 2245117 - RNA, 19 nt, Homo sapiens
  misc_RNA (1)...(19): siRNA sense strand
agacaacagcagugagcaa

SEQ ID NO: 2245118 - RNA, 19 nt, Homo sapiens
  misc_RNA (1)...(19): siRNA sense strand
ccacaaaucucgcugacca

SEQ ID NO: 2245119 - RNA, 19 nt, Homo sapiens
  misc_RNA (1)...(19): siRNA sense strand
gaagaauaguacagcccau

SEQ ID NO: 2245120 - RNA, 19 nt, Homo sapiens
  misc_RNA (1)...(19): siRNA sense strand
uauuaaugccagaagaaga

SEQ ID NO: 2245121 - RNA, 19 nt, Homo sapiens
  misc_RNA (1)...(19): siRNA sense strand
cauauaguccagaggguca

SEQ ID NO: 2245122 - RNA, 19 nt, Homo sapiens
  misc_RNA (1)...(19): siRNA sense strand
caacaaauaucaugagagc

SEQ ID NO: 2245123 - RNA, 19 nt, Homo sapiens
  misc_RNA (1)...(19): siRNA sense strand
gcuuuguguuggaugguca

SEQ ID NO: 2245124 - RNA, 19 nt, Homo sapiens
  misc_RNA (1)...(19): siRNA sense strand
ccagaagaaaagaggcauu

SEQ ID NO: 2245125 - RNA, 19 nt, Homo sapiens
  misc_RNA (1)...(19): siRNA sense strand
agucagaucaugaagaacu

SEQ ID NO: 2245126 - RNA, 19 nt, Homo sapiens
  misc_RNA (1)...(19): siRNA sense strand
guccacgaacugugcgaua

SEQ ID NO: 2245127 - RNA, 19 nt, Homo sapiens
  misc_RNA (1)...(19): siRNA sense strand
cagaagaagaauaguacag

SEQ ID NO: 2245128 - RNA, 19 nt, Homo sapiens
  misc_RNA (1)...(19): siRNA sense strand
agacaacagcagugagcaa

SEQ ID NO: 2245129 - RNA, 19 nt, Homo sapiens
  misc_RNA (1)...(19): siRNA sense strand
ccacaaaucucgcugacca

SEQ ID NO: 2245130 - RNA, 19 nt, Homo sapiens
  misc_RNA (1)...(19): siRNA sense strand
gaagaauaguacagcccau

SEQ ID NO: 2245131 - RNA, 19 nt, Homo sapiens
  misc_RNA (1)...(19): siRNA sense strand
uauuaaugccagaagaaga

SEQ ID NO: 2245132 - RNA, 19 nt, Homo sapiens
  misc_RNA (1)...(19): siRNA sense strand
cauauaguccagaggguca

SEQ ID NO: 2245133 - RNA, 19 nt, Homo sapiens
  misc_RNA (1)...(19): siRNA sense strand
caacaaauaucaugagagc

SEQ ID NO: 2245134 - RNA, 19 nt, Homo sapiens
  misc_RNA (1)...(19): siRNA sense strand
gcuuuguguuggaugguca

SEQ ID NO: 2245135 - RNA, 19 nt, Homo sapiens
  misc_RNA (1)...(19): siRNA sense strand
ccagaagaaaagaggcauu

SEQ ID NO: 2245136 - RNA, 19 nt, Homo sapiens
  misc_RNA (1)...(19): siRNA sense strand
agucagaucaugaagaacu

SEQ ID NO: 2245137 - RNA, 19 nt, Homo sapiens
  misc_RNA (1)...(19): siRNA sense strand
guccacgaacugugcgaua

SEQ ID NO: 2245138 - RNA, 19 nt, Homo sapiens
  misc_RNA (1)...(19): siRNA sense strand
cagaagaagaauaguacag

SEQ ID NO: 2245139 - RNA, 19 nt, Homo sapiens
  misc_RNA (1)...(19): siRNA sense strand
agacaacagcagugagcaa

SEQ ID NO: 2245140 - RNA, 19 nt, Homo sapiens
  misc_RNA (1)...(19): siRNA sense strand
ccacaaaucucgcugacca

SEQ ID NO: 2245141 - RNA, 19 nt, Homo sapiens
  misc_RNA (1)...(19): siRNA sense strand
gaagaauaguacagcccau

SEQ ID NO: 2245142 - RNA, 19 nt, Homo sapiens
  misc_RNA (1)...(19): siRNA sense strand
uauuaaugccagaagaaga

SEQ ID NO: 2245143 - RNA, 19 nt, Homo sapiens
  misc_RNA (1)...(19): siRNA sense strand
cauauaguccagaggguca

SEQ ID NO: 2245144 - RNA, 19 nt, Homo sapiens
  misc_RNA (1)...(19): siRNA sense strand
caacaaauaucaugagagc

SEQ ID NO: 2245145 - RNA, 19 nt, Homo sapiens
  misc_RNA (1)...(19): siRNA sense strand
gcuuuguguuggaugguca

SEQ ID NO: 2245146 - RNA, 19 nt, Homo sapiens
  misc_RNA (1)...(19): siRNA sense strand
ccagaagaaaagaggcauu

SEQ ID NO: 2245147 - RNA, 19 nt, Homo sapiens
  misc_RNA (1)...(19): siRNA sense strand
agucagaucaugaagaacu

SEQ ID NO: 2245148 - RNA, 19 nt, Homo sapiens
  misc_RNA (1)...(19): siRNA sense strand
guccacgaacugugcgaua

SEQ ID NO: 2245149 - RNA, 19 nt, Homo sapiens
  misc_RNA (1)...(19): siRNA sense strand
cagaagaagaauaguacag

SEQ ID NO: 2245150 - RNA, 19 nt, Homo sapiens
  misc_RNA (1)...(19): siRNA sense strand
agacaacagcagugagcaa

SEQ ID NO: 2245151 - RNA, 19 nt, Homo sapiens
  misc_RNA (1)...(19): siRNA sense strand
ccacaaaucucgcugacca

SEQ ID NO: 2245152 - RNA, 19 nt, Homo sapiens
  misc_RNA (1)...(19): siRNA sense strand
gaagaauaguacagcccau

SEQ ID NO: 2245153 - RNA, 19 nt, Homo sapiens
  misc_RNA (1)...(19): siRNA sense strand
uauuaaugccagaagaaga

SEQ ID NO: 2245154 - RNA, 19 nt, Homo sapiens
  misc_RNA (1)...(19): siRNA sense strand
cauauaguccagaggguca

SEQ ID NO: 2245155 - RNA, 19 nt, Homo sapiens
  misc_RNA (1)...(19): siRNA sense strand
caacaaauaucaugagagc

SEQ ID NO: 2245156 - RNA, 19 nt, Homo sapiens
  misc_RNA (1)...(19): siRNA sense strand
gcuuuguguuggaugguca

SEQ ID NO: 2245157 - RNA, 19 nt, Homo sapiens
  misc_RNA (1)...(19): siRNA sense strand
ccagaagaaaagaggcauu

SEQ ID NO: 2245158 - RNA, 19 nt, Homo sapiens
  misc_RNA (1)...(19): siRNA sense strand
agucagaucaugaagaacu

SEQ ID NO: 2245159 - RNA, 19 nt, Homo sapiens
  misc_RNA (1)...(19): siRNA sense strand
guccacgaacugugcgaua

SEQ ID NO: 2245160 - RNA, 19 nt, Homo sapiens
  misc_RNA (1)...(19): siRNA sense strand
cagaagaagaauaguacag

SEQ ID NO: 2245161 - RNA, 19 nt, Homo sapiens
  misc_RNA (1)...(19): siRNA sense strand
agacaacagcagugagcaa

SEQ ID NO: 2245162 - RNA, 19 nt, Homo sapiens
  misc_RNA (1)...(19): siRNA sense strand
ccacaaaucucgcugacca

SEQ ID NO: 2245163 - RNA, 19 nt, Homo sapiens
  misc_RNA (1)...(19): siRNA sense strand
gaagaauaguacagcccau

SEQ ID NO: 2245164 - RNA, 19 nt, Homo sapiens
  misc_RNA (1)...(19): siRNA sense strand
uauuaaugccagaagaaga

SEQ ID NO: 2245165 - RNA, 19 nt, Homo sapiens
  misc_RNA (1)...(19): siRNA sense strand
cauauaguccagaggguca

SEQ ID NO: 2245166 - RNA, 19 nt, Homo sapiens
  misc_RNA (1)...(19): siRNA sense strand
caacaaauaucaugagagc

SEQ ID NO: 2245167 - RNA, 19 nt, Homo sapiens
  misc_RNA (1)...(19): siRNA sense strand
gcuuuguguuggaugguca

SEQ ID NO: 2245168 - RNA, 19 nt, Homo sapiens
  misc_RNA (1)...(19): siRNA sense strand
ccagaagaaaagaggcauu

SEQ ID NO: 2245169 - RNA, 19 nt, Homo sapiens
  misc_RNA (1)...(19): siRNA sense strand
agucagaucaugaagaacu

SEQ ID NO: 2245170 - RNA, 19 nt, Homo sapiens
  misc_RNA (1)...(19): siRNA sense strand
guccacgaacugugcgaua

SEQ ID NO: 2245171 - RNA, 19 nt, Homo sapiens
  misc_RNA (1)...(19): siRNA sense strand
cagaagaagaauaguacag

SEQ ID NO: 2245172 - RNA, 19 nt, Homo sapiens
  misc_RNA (1)...(19): siRNA sense strand
caugaaaagccuuaggaua

SEQ ID NO: 2245173 - RNA, 19 nt, Homo sapiens
  misc_RNA (1)...(19): siRNA sense strand
augaaaagccuuaggauau

SEQ ID NO: 2245174 - RNA, 19 nt, Homo sapiens
  misc_RNA (1)...(19): siRNA sense strand
cugacaacagacaggaaua

SEQ ID NO: 2245175 - RNA, 19 nt, Homo sapiens
  misc_RNA (1)...(19): siRNA sense strand
cgaaaguacacgcggcaga

SEQ ID NO: 2245176 - RNA, 19 nt, Homo sapiens
  misc_RNA (1)...(19): siRNA sense strand
ccgaauacggcgucaucaa

SEQ ID NO: 2245177 - RNA, 19 nt, Homo sapiens
  misc_RNA (1)...(19): siRNA sense strand
ggacuacagugauggcaga

SEQ ID NO: 2245178 - RNA, 19 nt, Homo sapiens
  misc_RNA (1)...(19): siRNA sense strand
gcgagauccaguugcuaaa

SEQ ID NO: 2245179 - RNA, 19 nt, Homo sapiens
  misc_RNA (1)...(19): siRNA sense strand
ggauauugcuguuguccca

SEQ ID NO: 2245180 - RNA, 19 nt, Homo sapiens
  misc_RNA (1)...(19): siRNA sense strand
cggugaaagaccaguugaa

SEQ ID NO: 2245181 - RNA, 19 nt, Homo sapiens
  misc_RNA (1)...(19): siRNA sense strand
ggcagauccuggagggcau

SEQ ID NO: 2245182 - RNA, 19 nt, Homo sapiens
  misc_RNA (1)...(19): siRNA sense strand
ugacaacaguauuuggaca

SEQ ID NO: 2245183 - RNA, 19 nt, Homo sapiens
  misc_RNA (1)...(19): siRNA sense strand
gaacaaagacacaggucac

SEQ ID NO: 2245184 - RNA, 19 nt, Homo sapiens
  misc_RNA (1)...(19): siRNA sense strand
ggaugagcccugaggugau

SEQ ID NO: 2245185 - RNA, 19 nt, Homo sapiens
  misc_RNA (1)...(19): siRNA sense strand
cagugauggcagaagaaca

SEQ ID NO: 2245186 - RNA, 19 nt, Homo sapiens
  misc_RNA (1)...(19): siRNA sense strand
caugaagaacaaagacaca

SEQ ID NO: 2245187 - RNA, 19 nt, Homo sapiens
  misc_RNA (1)...(19): siRNA sense strand
ugaucagcggcgagggcua

SEQ ID NO: 2245188 - RNA, 19 nt, Homo sapiens
  misc_RNA (1)...(19): siRNA sense strand
gaauacucagaucgggaaa

SEQ ID NO: 2245189 - RNA, 19 nt, Homo sapiens
  misc_RNA (1)...(19): siRNA sense strand
agugauggcagaagaacau

SEQ ID NO: 2245190 - RNA, 19 nt, Homo sapiens
  misc_RNA (1)...(19): siRNA sense strand
aauaugaagauguggagca

SEQ ID NO: 2245191 - RNA, 19 nt, Homo sapiens
  misc_RNA (1)...(19): siRNA sense strand
cugagaagacccugaccau

SEQ ID NO: 2245192 - RNA, 19 nt, Homo sapiens
  misc_RNA (1)...(19): siRNA sense strand
gagccaacauccuccgaga

SEQ ID NO: 2245193 - RNA, 19 nt, Homo sapiens
  misc_RNA (1)...(19): siRNA sense strand
cuaaagaacuugcagcaug

SEQ ID NO: 2245194 - RNA, 19 nt, Homo sapiens
  misc_RNA (1)...(19): siRNA sense strand
ggacauuaagggagccaac

SEQ ID NO: 2245195 - RNA, 19 nt, Homo sapiens
  misc_RNA (1)...(19): siRNA sense strand
agaacaaagacacagguca

SEQ ID NO: 2245196 - RNA, 19 nt, Homo sapiens
  misc_RNA (1)...(19): siRNA sense strand
augagaccaugaagaacaa

SEQ ID NO: 2245197 - RNA, 19 nt, Homo sapiens
  misc_RNA (1)...(19): siRNA sense strand
ugaaauaugaagaugugga

SEQ ID NO: 2245198 - RNA, 19 nt, Homo sapiens
  misc_RNA (1)...(19): siRNA sense strand
ccugagcagugcagaaaau

SEQ ID NO: 2245199 - RNA, 19 nt, Homo sapiens
  misc_RNA (1)...(19): siRNA sense strand
gagacaagcaaggagguga

SEQ ID NO: 2245200 - RNA, 19 nt, Homo sapiens
  misc_RNA (1)...(19): siRNA sense strand
caugaaaagccuuaggaua

SEQ ID NO: 2245201 - RNA, 19 nt, Homo sapiens
  misc_RNA (1)...(19): siRNA sense strand
augaaaagccuuaggauau

SEQ ID NO: 2245202 - RNA, 19 nt, Homo sapiens
  misc_RNA (1)...(19): siRNA sense strand
cugacaacagacaggaaua

SEQ ID NO: 2245203 - RNA, 19 nt, Homo sapiens
  misc_RNA (1)...(19): siRNA sense strand
cgaaaguacacgcggcaga

SEQ ID NO: 2245204 - RNA, 19 nt, Homo sapiens
  misc_RNA (1)...(19): siRNA sense strand
ccgaauacggcgucaucaa

SEQ ID NO: 2245205 - RNA, 19 nt, Homo sapiens
  misc_RNA (1)...(19): siRNA sense strand
ggacuacagugauggcaga

SEQ ID NO: 2245206 - RNA, 19 nt, Homo sapiens
  misc_RNA (1)...(19): siRNA sense strand
gcgagauccaguugcuaaa

SEQ ID NO: 2245207 - RNA, 19 nt, Homo sapiens
  misc_RNA (1)...(19): siRNA sense strand
ggauauugcuguuguccca

SEQ ID NO: 2245208 - RNA, 19 nt, Homo sapiens
  misc_RNA (1)...(19): siRNA sense strand
cggugaaagaccaguugaa

SEQ ID NO: 2245209 - RNA, 19 nt, Homo sapiens
  misc_RNA (1)...(19): siRNA sense strand
ggcagauccuggagggcau

SEQ ID NO: 2245210 - RNA, 19 nt, Homo sapiens
  misc_RNA (1)...(19): siRNA sense strand
ugacaacaguauuuggaca

SEQ ID NO: 2245211 - RNA, 19 nt, Homo sapiens
  misc_RNA (1)...(19): siRNA sense strand
gaacaaagacacaggucac

SEQ ID NO: 2245212 - RNA, 19 nt, Homo sapiens
  misc_RNA (1)...(19): siRNA sense strand
ggaugagcccugaggugau

SEQ ID NO: 2245213 - RNA, 19 nt, Homo sapiens
  misc_RNA (1)...(19): siRNA sense strand
cagugauggcagaagaaca

SEQ ID NO: 2245214 - RNA, 19 nt, Homo sapiens
  misc_RNA (1)...(19): siRNA sense strand
caugaagaacaaagacaca

SEQ ID NO: 2245215 - RNA, 19 nt, Homo sapiens
  misc_RNA (1)...(19): siRNA sense strand
ugaucagcggcgagggcua

SEQ ID NO: 2245216 - RNA, 19 nt, Homo sapiens
  misc_RNA (1)...(19): siRNA sense strand
gaauacucagaucgggaaa

SEQ ID NO: 2245217 - RNA, 19 nt, Homo sapiens
  misc_RNA (1)...(19): siRNA sense strand
agugauggcagaagaacau

SEQ ID NO: 2245218 - RNA, 19 nt, Homo sapiens
  misc_RNA (1)...(19): siRNA sense strand
aauaugaagauguggagca

SEQ ID NO: 2245219 - RNA, 19 nt, Homo sapiens
  misc_RNA (1)...(19): siRNA sense strand
cugagaagacccugaccau

SEQ ID NO: 2245220 - RNA, 19 nt, Homo sapiens
  misc_RNA (1)...(19): siRNA sense strand
gagccaacauccuccgaga

SEQ ID NO: 2245221 - RNA, 19 nt, Homo sapiens
  misc_RNA (1)...(19): siRNA sense strand
cuaaagaacuugcagcaug

SEQ ID NO: 2245222 - RNA, 19 nt, Homo sapiens
  misc_RNA (1)...(19): siRNA sense strand
ggacauuaagggagccaac

SEQ ID NO: 2245223 - RNA, 19 nt, Homo sapiens
  misc_RNA (1)...(19): siRNA sense strand
agaacaaagacacagguca

SEQ ID NO: 2245224 - RNA, 19 nt, Homo sapiens
  misc_RNA (1)...(19): siRNA sense strand
augagaccaugaagaacaa

SEQ ID NO: 2245225 - RNA, 19 nt, Homo sapiens
  misc_RNA (1)...(19): siRNA sense strand
ugaaauaugaagaugugga

SEQ ID NO: 2245226 - RNA, 19 nt, Homo sapiens
  misc_RNA (1)...(19): siRNA sense strand
ccugagcagugcagaaaau

SEQ ID NO: 2245227 - RNA, 19 nt, Homo sapiens
  misc_RNA (1)...(19): siRNA sense strand
gagacaagcaaggagguga

SEQ ID NO: 2245228 - RNA, 19 nt, Homo sapiens
  misc_RNA (1)...(19): siRNA sense strand
gcgcagaggaggauggcua

SEQ ID NO: 2245229 - RNA, 19 nt, Homo sapiens
  misc_RNA (1)...(19): siRNA sense strand
gaagagauucaauggcuca

SEQ ID NO: 2245230 - RNA, 19 nt, Homo sapiens
  misc_RNA (1)...(19): siRNA sense strand
cugcuugacacguggguuu

SEQ ID NO: 2245231 - RNA, 19 nt, Homo sapiens
  misc_RNA (1)...(19): siRNA sense strand
acucaacgucauuaagcua

SEQ ID NO: 2245232 - RNA, 19 nt, Homo sapiens
  misc_RNA (1)...(19): siRNA sense strand
cuucuuggccagugggcuu

SEQ ID NO: 2245233 - RNA, 19 nt, Homo sapiens
  misc_RNA (1)...(19): siRNA sense strand
cauccaugccucagagcca

SEQ ID NO: 2245234 - RNA, 19 nt, Homo sapiens
  misc_RNA (1)...(19): siRNA sense strand
ccguggugguggaggauga

SEQ ID NO: 2245235 - RNA, 19 nt, Homo sapiens
  misc_RNA (1)...(19): siRNA sense strand
caguauacgggcagggaca

SEQ ID NO: 2245236 - RNA, 19 nt, Homo sapiens
  misc_RNA (1)...(19): siRNA sense strand
guggagaaagugaggacca

SEQ ID NO: 2245237 - RNA, 19 nt, Homo sapiens
  misc_RNA (1)...(19): siRNA sense strand
gcuucaaggcuuucgccaa

SEQ ID NO: 2245238 - RNA, 19 nt, Homo sapiens
  misc_RNA (1)...(19): siRNA sense strand
gcaaggagcagauggugga

SEQ ID NO: 2245239 - RNA, 19 nt, Homo sapiens
  misc_RNA (1)...(19): siRNA sense strand
cugcauacgcccugagauc

SEQ ID NO: 2245240 - RNA, 19 nt, Homo sapiens
  misc_RNA (1)...(19): siRNA sense strand
accgcaaguuccagggcua

SEQ ID NO: 2245241 - RNA, 19 nt, Homo sapiens
  misc_RNA (1)...(19): siRNA sense strand
cggacuucuucgaguacuu

SEQ ID NO: 2245242 - RNA, 19 nt, Homo sapiens
  misc_RNA (1)...(19): siRNA sense strand
agggacagcuucaaggcuu

SEQ ID NO: 2245243 - RNA, 19 nt, Homo sapiens
  misc_RNA (1)...(19): siRNA sense strand
ccuggaaugacaacggcaa

SEQ ID NO: 2245244 - RNA, 19 nt, Homo sapiens
  misc_RNA (1)...(19): siRNA sense strand
cuaugauccuagcuggaau

SEQ ID NO: 2245245 - RNA, 19 nt, Homo sapiens
  misc_RNA (1)...(19): siRNA sense strand
ccaaauucucccagaccaa

SEQ ID NO: 2245246 - RNA, 19 nt, Homo sapiens
  misc_RNA (1)...(19): siRNA sense strand
acucuaacuaucagugaaa

SEQ ID NO: 2245247 - RNA, 19 nt, Homo sapiens
  misc_RNA (1)...(19): siRNA sense strand
ccucaaauuccuaggaucu

SEQ ID NO: 2245248 - RNA, 19 nt, Homo sapiens
  misc_RNA (1)...(19): siRNA sense strand
gugaaaauucuucgagauu

SEQ ID NO: 2245249 - RNA, 19 nt, Homo sapiens
  misc_RNA (1)...(19): siRNA sense strand
ccucuguggcugugggcau

SEQ ID NO: 2245250 - RNA, 19 nt, Homo sapiens
  misc_RNA (1)...(19): siRNA sense strand
aaacaucacugguggugga

SEQ ID NO: 2245251 - RNA, 19 nt, Homo sapiens
  misc_RNA (1)...(19): siRNA sense strand
cugcauuuugugugggaaa

SEQ ID NO: 2245252 - RNA, 19 nt, Homo sapiens
  misc_RNA (1)...(19): siRNA sense strand
ugugugggaaagagugaaa

SEQ ID NO: 2245253 - RNA, 19 nt, Homo sapiens
  misc_RNA (1)...(19): siRNA sense strand
cgacaaaggaagaacgagg

SEQ ID NO: 2245254 - RNA, 19 nt, Homo sapiens
  misc_RNA (1)...(19): siRNA sense strand
caauaugggucuagccuug

SEQ ID NO: 2245255 - RNA, 19 nt, Homo sapiens
  misc_RNA (1)...(19): siRNA sense strand
caagaaaaccuguagacca

SEQ ID NO: 2245256 - RNA, 19 nt, Homo sapiens
  misc_RNA (1)...(19): siRNA sense strand
cccugaggaauguagauaa

SEQ ID NO: 2245257 - RNA, 19 nt, Homo sapiens
  misc_RNA (1)...(19): siRNA sense strand
gccauuauagagaggccaa

SEQ ID NO: 2245258 - RNA, 19 nt, Homo sapiens
  misc_RNA (1)...(19): siRNA sense strand
gcaaguggguggagugcgu

SEQ ID NO: 2245259 - RNA, 19 nt, Homo sapiens
  misc_RNA (1)...(19): siRNA sense strand
uggacgaggcggaagucua

SEQ ID NO: 2245260 - RNA, 19 nt, Homo sapiens
  misc_RNA (1)...(19): siRNA sense strand
ccgcucaaguuccgggaga

SEQ ID NO: 2245261 - RNA, 19 nt, Homo sapiens
  misc_RNA (1)...(19): siRNA sense strand
gcaaacuggacgaggcgga

SEQ ID NO: 2245262 - RNA, 19 nt, Homo sapiens
  misc_RNA (1)...(19): siRNA sense strand
gcaccaagaugcuggagag

SEQ ID NO: 2245263 - RNA, 19 nt, Homo sapiens
  misc_RNA (1)...(19): siRNA sense strand
uguaugggcuggacggcau

SEQ ID NO: 2245264 - RNA, 19 nt, Homo sapiens
  misc_RNA (1)...(19): siRNA sense strand
ggggugacuacgaggacaa

SEQ ID NO: 2245265 - RNA, 19 nt, Homo sapiens
  misc_RNA (1)...(19): siRNA sense strand
gcuggaucgccgacgacua

SEQ ID NO: 2245266 - RNA, 19 nt, Homo sapiens
  misc_RNA (1)...(19): siRNA sense strand
gcuuaugaucugaagaaaa

SEQ ID NO: 2245267 - RNA, 19 nt, Homo sapiens
  misc_RNA (1)...(19): siRNA sense strand
auuuaagauugcagagaca

SEQ ID NO: 2245268 - RNA, 19 nt, Homo sapiens
  misc_RNA (1)...(19): siRNA sense strand
aggacaugcugaaguacaa

SEQ ID NO: 2245269 - RNA, 19 nt, Homo sapiens
  misc_RNA (1)...(19): siRNA sense strand
ucaacaaggacaaggacau

SEQ ID NO: 2245270 - RNA, 19 nt, Homo sapiens
  misc_RNA (1)...(19): siRNA sense strand
cauuuaccuuggagagcaa

SEQ ID NO: 2245271 - RNA, 19 nt, Homo sapiens
  misc_RNA (1)...(19): siRNA sense strand
agacagaauuguugagcuc

SEQ ID NO: 2245272 - RNA, 19 nt, Homo sapiens
  misc_RNA (1)...(19): siRNA sense strand
cuugguugcacuugagaaa

SEQ ID NO: 2245273 - RNA, 19 nt, Homo sapiens
  misc_RNA (1)...(19): siRNA sense strand
cauugauauuguaggacuu

SEQ ID NO: 2245274 - RNA, 19 nt, Homo sapiens
  misc_RNA (1)...(19): siRNA sense strand
cauaauucauuggcggaaa

SEQ ID NO: 2245275 - RNA, 19 nt, Homo sapiens
  misc_RNA (1)...(19): siRNA sense strand
aguucaauggagugauuua

SEQ ID NO: 2245276 - RNA, 19 nt, Homo sapiens
  misc_RNA (1)...(19): siRNA sense strand
aagaagaucuacuuggaca

SEQ ID NO: 2245277 - RNA, 19 nt, Homo sapiens
  misc_RNA (1)...(19): siRNA sense strand
agaucaaguggaugaaaga

SEQ ID NO: 2245278 - RNA, 19 nt, Homo sapiens
  misc_RNA (1)...(19): siRNA sense strand
acgcauggauccaagcaau

SEQ ID NO: 2245279 - RNA, 19 nt, Homo sapiens
  misc_RNA (1)...(19): siRNA sense strand
gggccaugacauuaggauu

SEQ ID NO: 2245280 - RNA, 19 nt, Homo sapiens
  misc_RNA (1)...(19): siRNA sense strand
aaauuaugcccaaucgaaa

SEQ ID NO: 2245281 - RNA, 19 nt, Homo sapiens
  misc_RNA (1)...(19): siRNA sense strand
uaucauuaacggagcucaa

SEQ ID NO: 2245282 - RNA, 19 nt, Homo sapiens
  misc_RNA (1)...(19): siRNA sense strand
caaucaagucccuggcaga

SEQ ID NO: 2245283 - RNA, 19 nt, Homo sapiens
  misc_RNA (1)...(19): siRNA sense strand
acacauacauggaagugca

SEQ ID NO: 2245284 - RNA, 19 nt, Homo sapiens
  misc_RNA (1)...(19): siRNA sense strand
ccgaauuuaaucaugcaaa

SEQ ID NO: 2245285 - RNA, 19 nt, Homo sapiens
  misc_RNA (1)...(19): siRNA sense strand
gcuccagcacaaagaauau

SEQ ID NO: 2245286 - RNA, 19 nt, Homo sapiens
  misc_RNA (1)...(19): siRNA sense strand
aggacaaggacaugcugaa

SEQ ID NO: 2245287 - RNA, 19 nt, Homo sapiens
  misc_RNA (1)...(19): siRNA sense strand
gguuugugguugagcagca

SEQ ID NO: 2245288 - RNA, 19 nt, Homo sapiens
  misc_RNA (1)...(19): siRNA sense strand
gaggaugcagugaaagcaa

SEQ ID NO: 2245289 - RNA, 19 nt, Homo sapiens
  misc_RNA (1)...(19): siRNA sense strand
ucaacaaucaggaggaagu

SEQ ID NO: 2245290 - RNA, 19 nt, Homo sapiens
  misc_RNA (1)...(19): siRNA sense strand
acaucaaggcacuggcaga

SEQ ID NO: 2245291 - RNA, 19 nt, Homo sapiens
  misc_RNA (1)...(19): siRNA sense strand
ugucaauggcaccggaaca

SEQ ID NO: 2245292 - RNA, 19 nt, Homo sapiens
  misc_RNA (1)...(19): siRNA sense strand
acagaauuguugagcucau

SEQ ID NO: 2245293 - RNA, 19 nt, Homo sapiens
  misc_RNA (1)...(19): siRNA sense strand
gcuccgaguccuugauuca

SEQ ID NO: 2245294 - RNA, 19 nt, Homo sapiens
  misc_RNA (1)...(19): siRNA sense strand
agaucuacuuggacauuau

SEQ ID NO: 2245295 - RNA, 19 nt, Homo sapiens
  misc_RNA (1)...(19): siRNA sense strand
aagaauaagcacugugugu

SEQ ID NO: 2245296 - RNA, 19 nt, Homo sapiens
  misc_RNA (1)...(19): siRNA sense strand
gggacuucaucaagggcca

SEQ ID NO: 2245297 - RNA, 19 nt, Homo sapiens
  misc_RNA (1)...(19): siRNA sense strand
augcugaaguacaagguga

SEQ ID NO: 2245298 - RNA, 19 nt, Homo sapiens
  misc_RNA (1)...(19): siRNA sense strand
cauuaggauuucagcuuca

SEQ ID NO: 2245299 - RNA, 19 nt, Homo sapiens
  misc_RNA (1)...(19): siRNA sense strand
uggaagaauaagaagaucu

SEQ ID NO: 2245300 - RNA, 19 nt, Homo sapiens
  misc_RNA (1)...(19): siRNA sense strand
cuacgaagaagcugaucau

SEQ ID NO: 2245301 - RNA, 19 nt, Homo sapiens
  misc_RNA (1)...(19): siRNA sense strand
aaagagaaagcggaagaaa

SEQ ID NO: 2245302 - RNA, 19 nt, Homo sapiens
  misc_RNA (1)...(19): siRNA sense strand
aggaaaucaugaagaaggu

SEQ ID NO: 2245303 - RNA, 19 nt, Homo sapiens
  misc_RNA (1)...(19): siRNA sense strand
aaguagaggaugcagugaa

SEQ ID NO: 2245304 - RNA, 19 nt, Homo sapiens
  misc_RNA (1)...(19): siRNA sense strand
augaaagacauguggcguu

SEQ ID NO: 2245305 - RNA, 19 nt, Homo sapiens
  misc_RNA (1)...(19): siRNA sense strand
ggaugcagugaaagcaauu

SEQ ID NO: 2245306 - RNA, 19 nt, Homo sapiens
  misc_RNA (1)...(19): siRNA sense strand
aggcacuggcagaagaaaa

SEQ ID NO: 2245307 - RNA, 19 nt, Homo sapiens
  misc_RNA (1)...(19): siRNA sense strand
gugauauccaccacauuaa

SEQ ID NO: 2245308 - RNA, 19 nt, Homo sapiens
  misc_RNA (1)...(19): siRNA sense strand
aagagaaagcggaagaaag

SEQ ID NO: 2245309 - RNA, 19 nt, Homo sapiens
  misc_RNA (1)...(19): siRNA sense strand
cuucacuggcugagcucaa

SEQ ID NO: 2245310 - RNA, 19 nt, Homo sapiens
  misc_RNA (1)...(19): siRNA sense strand
cuggcugagcucaaggaaa

SEQ ID NO: 2245311 - RNA, 19 nt, Homo sapiens
  misc_RNA (1)...(19): siRNA sense strand
aggggaugcuacagagaau

SEQ ID NO: 2245312 - RNA, 19 nt, Homo sapiens
  misc_RNA (1)...(19): siRNA sense strand
caucaaggcacuggcagaa

SEQ ID NO: 2245313 - RNA, 19 nt, Homo sapiens
  misc_RNA (1)...(19): siRNA sense strand
uggcagaagaaaacaggaa

SEQ ID NO: 2245314 - RNA, 19 nt, Homo sapiens
  misc_RNA (1)...(19): siRNA sense strand
auaauucauuggcggaaau

SEQ ID NO: 2245315 - RNA, 19 nt, Homo sapiens
  misc_RNA (1)...(19): siRNA sense strand
auggcaaaguggauagcuu

SEQ ID NO: 2245316 - RNA, 19 nt, Homo sapiens
  misc_RNA (1)...(19): siRNA sense strand
uggcccucuuggugaauua

SEQ ID NO: 2245317 - RNA, 19 nt, Homo sapiens
  misc_RNA (1)...(19): siRNA sense strand
aggaggaaguagaggaugc

SEQ ID NO: 2245318 - RNA, 19 nt, Homo sapiens
  misc_RNA (1)...(19): siRNA sense strand
uggagucgaagguggacaa

SEQ ID NO: 2245319 - RNA, 19 nt, Homo sapiens
  misc_RNA (1)...(19): siRNA sense strand
ggauuuaagauugcagaga

SEQ ID NO: 2245320 - RNA, 19 nt, Homo sapiens
  misc_RNA (1)...(19): siRNA sense strand
uugaaaagagaaagcggaa

SEQ ID NO: 2245321 - RNA, 19 nt, Homo sapiens
  misc_RNA (1)...(19): siRNA sense strand
uauuguaggacuugcucaa

SEQ ID NO: 2245322 - RNA, 19 nt, Homo sapiens
  misc_RNA (1)...(19): siRNA sense strand
uggacauuauucacacaua

SEQ ID NO: 2245323 - RNA, 19 nt, Homo sapiens
  misc_RNA (1)...(19): siRNA sense strand
gggaugcuacagagaauca

SEQ ID NO: 2245324 - RNA, 19 nt, Homo sapiens
  misc_RNA (1)...(19): siRNA sense strand
guauaaaggaagagaagga

SEQ ID NO: 2245325 - RNA, 19 nt, Homo sapiens
  misc_RNA (1)...(19): siRNA sense strand
aggcaagaagaaagggaaa

SEQ ID NO: 2245326 - RNA, 19 nt, Homo sapiens
  misc_RNA (1)...(19): siRNA sense strand
aggaagaggaaaagggaaa

SEQ ID NO: 2245327 - RNA, 19 nt, Homo sapiens
  misc_RNA (1)...(19): siRNA sense strand
aagaggaaguggaggaaga

SEQ ID NO: 2245328 - RNA, 19 nt, Homo sapiens
  misc_RNA (1)...(19): siRNA sense strand
ggaacaaagaucugugaau

SEQ ID NO: 2245329 - RNA, 19 nt, Homo sapiens
  misc_RNA (1)...(19): siRNA sense strand
gguuugugcuauaggaauu

SEQ ID NO: 2245330 - RNA, 19 nt, Homo sapiens
  misc_RNA (1)...(19): siRNA sense strand
gggaagagagcauggccaa

SEQ ID NO: 2245331 - RNA, 19 nt, Homo sapiens
  misc_RNA (1)...(19): siRNA sense strand
ggaaagugaaagaggaagu

SEQ ID NO: 2245332 - RNA, 19 nt, Homo sapiens
  misc_RNA (1)...(19): siRNA sense strand
ggugaaugcucuugaaaau

SEQ ID NO: 2245333 - RNA, 19 nt, Homo sapiens
  misc_RNA (1)...(19): siRNA sense strand
agaaagggaaagugaaaga

SEQ ID NO: 2245334 - RNA, 19 nt, Homo sapiens
  misc_RNA (1)...(19): siRNA sense strand
aggcaaacucagccagaaa

SEQ ID NO: 2245335 - RNA, 19 nt, Homo sapiens
  misc_RNA (1)...(19): siRNA sense strand
agggaaagugaaagaggaa

SEQ ID NO: 2245336 - RNA, 19 nt, Homo sapiens
  misc_RNA (1)...(19): siRNA sense strand
caaugagguuggaagaaau

SEQ ID NO: 2245337 - RNA, 19 nt, Homo sapiens
  misc_RNA (1)...(19): siRNA sense strand
cugugaagaaggcggaaua

SEQ ID NO: 2245338 - RNA, 19 nt, Homo sapiens
  misc_RNA (1)...(19): siRNA sense strand
ggaaagaugaugaucgaca

SEQ ID NO: 2245339 - RNA, 19 nt, Homo sapiens
  misc_RNA (1)...(19): siRNA sense strand
uggaaugacagcagaagaa

SEQ ID NO: 2245340 - RNA, 19 nt, Homo sapiens
  misc_RNA (1)...(19): siRNA sense strand
ugaaacaagucuuugggaa

SEQ ID NO: 2245341 - RNA, 19 nt, Homo sapiens
  misc_RNA (1)...(19): siRNA sense strand
ugaaagaggaaguggagga

SEQ ID NO: 2245342 - RNA, 19 nt, Homo sapiens
  misc_RNA (1)...(19): siRNA sense strand
cugcgaaggcugcuggaaa

SEQ ID NO: 2245343 - RNA, 19 nt, Homo sapiens
  misc_RNA (1)...(19): siRNA sense strand
caagggaggaagaggaaaa

SEQ ID NO: 2245344 - RNA, 19 nt, Homo sapiens
  misc_RNA (1)...(19): siRNA sense strand
aggaagaugaugaaagaca

SEQ ID NO: 2245345 - RNA, 19 nt, Homo sapiens
  misc_RNA (1)...(19): siRNA sense strand
augaggagaacgagcauaa

SEQ ID NO: 2245346 - RNA, 19 nt, Homo sapiens
  misc_RNA (1)...(19): siRNA sense strand
cuucaggaguacuggaaca

SEQ ID NO: 2245347 - RNA, 19 nt, Homo sapiens
  misc_RNA (1)...(19): siRNA sense strand
cagugcaagcugagcauaa

SEQ ID NO: 2245348 - RNA, 19 nt, Homo sapiens
  misc_RNA (1)...(19): siRNA sense strand
cagcaauugacgacggaau

SEQ ID NO: 2245349 - RNA, 19 nt, Homo sapiens
  misc_RNA (1)...(19): siRNA sense strand
gacagaaaugggauggaaa

SEQ ID NO: 2245350 - RNA, 19 nt, Homo sapiens
  misc_RNA (1)...(19): siRNA sense strand
ggggcaucguggagaauaa

SEQ ID NO: 2245351 - RNA, 19 nt, Homo sapiens
  misc_RNA (1)...(19): siRNA sense strand
caauuauaauggagugcau

SEQ ID NO: 2245352 - RNA, 19 nt, Homo sapiens
  misc_RNA (1)...(19): siRNA sense strand
ucacagaucucguggccau

SEQ ID NO: 2245353 - RNA, 19 nt, Homo sapiens
  misc_RNA (1)...(19): siRNA sense strand
aggaagagaaggacgugaa

SEQ ID NO: 2245354 - RNA, 19 nt, Homo sapiens
  misc_RNA (1)...(19): siRNA sense strand
gcugaaaggaacaaacgua

SEQ ID NO: 2245355 - RNA, 19 nt, Homo sapiens
  misc_RNA (1)...(19): siRNA sense strand
cgacaaauauagaaggcac

SEQ ID NO: 2245356 - RNA, 19 nt, Homo sapiens
  misc_RNA (1)...(19): siRNA sense strand
gggaaaggcaagaagaaag

SEQ ID NO: 2245357 - RNA, 19 nt, Homo sapiens
  misc_RNA (1)...(19): siRNA sense strand
caauaucauacuugggcua

SEQ ID NO: 2245358 - RNA, 19 nt, Homo sapiens
  misc_RNA (1)...(19): siRNA sense strand
aagaagaaagggaaaguga

SEQ ID NO: 2245359 - RNA, 19 nt, Homo sapiens
  misc_RNA (1)...(19): siRNA sense strand
cucuuaaacuucugggaau

SEQ ID NO: 2245360 - RNA, 19 nt, Homo sapiens
  misc_RNA (1)...(19): siRNA sense strand
uauaugaugaggagggcaa

SEQ ID NO: 2245361 - RNA, 19 nt, Homo sapiens
  misc_RNA (1)...(19): siRNA sense strand
guuaagaaagagaaagcuu

SEQ ID NO: 2245362 - RNA, 19 nt, Homo sapiens
  misc_RNA (1)...(19): siRNA sense strand
ugaugagccuccagcuaaa

SEQ ID NO: 2245363 - RNA, 19 nt, Homo sapiens
  misc_RNA (1)...(19): siRNA sense strand
gcugaugaaacgccagaaa

SEQ ID NO: 2245364 - RNA, 19 nt, Homo sapiens
  misc_RNA (1)...(19): siRNA sense strand
caguagaugacuuaaagaa

SEQ ID NO: 2245365 - RNA, 19 nt, Homo sapiens
  misc_RNA (1)...(19): siRNA sense strand
ggaaaauacggaugcaaau

SEQ ID NO: 2245366 - RNA, 19 nt, Homo sapiens
  misc_RNA (1)...(19): siRNA sense strand
uuucaaaggaagaugauga

SEQ ID NO: 2245367 - RNA, 19 nt, Homo sapiens
  misc_RNA (1)...(19): siRNA sense strand
gaugaaagacagacagacu

SEQ ID NO: 2245368 - RNA, 19 nt, Homo sapiens
  misc_RNA (1)...(19): siRNA sense strand
agggaaaggcaagaagaaa

SEQ ID NO: 2245369 - RNA, 19 nt, Homo sapiens
  misc_RNA (1)...(19): siRNA sense strand
aggaaaacgaggauggcaa

SEQ ID NO: 2245370 - RNA, 19 nt, Homo sapiens
  misc_RNA (1)...(19): siRNA sense strand
acgugaugaugauuggaaa

SEQ ID NO: 2245371 - RNA, 19 nt, Homo sapiens
  misc_RNA (1)...(19): siRNA sense strand
gggagaaggaggaugagca

SEQ ID NO: 2245372 - RNA, 19 nt, Homo sapiens
  misc_RNA (1)...(19): siRNA sense strand
agggaaaguuagacagauc

SEQ ID NO: 2245373 - RNA, 19 nt, Homo sapiens
  misc_RNA (1)...(19): siRNA sense strand
ccaacauccugcuggugaa

SEQ ID NO: 2245374 - RNA, 19 nt, Homo sapiens
  misc_RNA (1)...(19): siRNA sense strand
uugaaaaucuugcgggaau

SEQ ID NO: 2245375 - RNA, 19 nt, Homo sapiens
  misc_RNA (1)...(19): siRNA sense strand
cuuggaaacuggcccgaaa

SEQ ID NO: 2245376 - RNA, 19 nt, Homo sapiens
  misc_RNA (1)...(19): siRNA sense strand
ggauguaacaagaguguac

SEQ ID NO: 2245377 - RNA, 19 nt, Homo sapiens
  misc_RNA (1)...(19): siRNA sense strand
ggaagauagagcugcugaa

SEQ ID NO: 2245378 - RNA, 19 nt, Homo sapiens
  misc_RNA (1)...(19): siRNA sense strand
aggaaaauacggaugcaaa

SEQ ID NO: 2245379 - RNA, 19 nt, Homo sapiens
  misc_RNA (1)...(19): siRNA sense strand
ugucaaugagguuggaaga

SEQ ID NO: 2245380 - RNA, 19 nt, Homo sapiens
  misc_RNA (1)...(19): siRNA sense strand
gggacaggagucaggaaaa

SEQ ID NO: 2245381 - RNA, 19 nt, Homo sapiens
  misc_RNA (1)...(19): siRNA sense strand
uaacaguggaaacgacaaa

SEQ ID NO: 2245382 - RNA, 19 nt, Homo sapiens
  misc_RNA (1)...(19): siRNA sense strand
acagaaaugggauggaaaa

SEQ ID NO: 2245383 - RNA, 19 nt, Homo sapiens
  misc_RNA (1)...(19): siRNA sense strand
uggagugcaugaagaagaa

SEQ ID NO: 2245384 - RNA, 19 nt, Homo sapiens
  misc_RNA (1)...(19): siRNA sense strand
agaagaaagggaaagugaa

SEQ ID NO: 2245385 - RNA, 19 nt, Homo sapiens
  misc_RNA (1)...(19): siRNA sense strand
uguccaacccucuaaguaa

SEQ ID NO: 2245386 - RNA, 19 nt, Homo sapiens
  misc_RNA (1)...(19): siRNA sense strand
aagggaaaggcaagaagaa

SEQ ID NO: 2245387 - RNA, 19 nt, Homo sapiens
  misc_RNA (1)...(19): siRNA sense strand
ggaaaacgaggauggcaaa

SEQ ID NO: 2245388 - RNA, 19 nt, Homo sapiens
  misc_RNA (1)...(19): siRNA sense strand
ccguauaaaggaagagaag

SEQ ID NO: 2245389 - RNA, 19 nt, Homo sapiens
  misc_RNA (1)...(19): siRNA sense strand
gcuucaacgaggagacaca

SEQ ID NO: 2245390 - RNA, 19 nt, Homo sapiens
  misc_RNA (1)...(19): siRNA sense strand
ggguacgagugaaagccaa

SEQ ID NO: 2245391 - RNA, 19 nt, Homo sapiens
  misc_RNA (1)...(19): siRNA sense strand
aguggaaggacguugacaa

SEQ ID NO: 2245392 - RNA, 19 nt, Homo sapiens
  misc_RNA (1)...(19): siRNA sense strand
gagaccaaggaguggauga

SEQ ID NO: 2245393 - RNA, 19 nt, Homo sapiens
  misc_RNA (1)...(19): siRNA sense strand
gcuacuggcucuuucgaga

SEQ ID NO: 2245394 - RNA, 19 nt, Homo sapiens
  misc_RNA (1)...(19): siRNA sense strand
auccagaacuacacggaga

SEQ ID NO: 2245395 - RNA, 19 nt, Homo sapiens
  misc_RNA (1)...(19): siRNA sense strand
ggacggugaacguggugau

SEQ ID NO: 2245396 - RNA, 19 nt, Homo sapiens
  misc_RNA (1)...(19): siRNA sense strand
cggugaacguggugauggu

SEQ ID NO: 2245397 - RNA, 19 nt, Homo sapiens
  misc_RNA (1)...(19): siRNA sense strand
agaccaaggaguggaugaa

SEQ ID NO: 2245398 - RNA, 19 nt, Homo sapiens
  misc_RNA (1)...(19): siRNA sense strand
guucgggguacgagugaaa

SEQ ID NO: 2245399 - RNA, 19 nt, Homo sapiens
  misc_RNA (1)...(19): siRNA sense strand
gcgugguggugcagaugga

SEQ ID NO: 2245400 - RNA, 19 nt, Homo sapiens
  misc_RNA (1)...(19): siRNA sense strand
aggaagaagaagagacaga

SEQ ID NO: 2245401 - RNA, 19 nt, Homo sapiens
  misc_RNA (1)...(19): siRNA sense strand
agugauaagggaugaggaa

SEQ ID NO: 2245402 - RNA, 19 nt, Homo sapiens
  misc_RNA (1)...(19): siRNA sense strand
gagacaagguguggcgcua

SEQ ID NO: 2245403 - RNA, 19 nt, Homo sapiens
  misc_RNA (1)...(19): siRNA sense strand
ccaagaagcugaauagggu

SEQ ID NO: 2245404 - RNA, 19 nt, Homo sapiens
  misc_RNA (1)...(19): siRNA sense strand
ucuacuucuucaagggcaa

SEQ ID NO: 2245405 - RNA, 19 nt, Homo sapiens
  misc_RNA (1)...(19): siRNA sense strand
guagugaacuggaugccau

SEQ ID NO: 2245406 - RNA, 19 nt, Homo sapiens
  misc_RNA (1)...(19): siRNA sense strand
agagaaaggcuaucccaga

SEQ ID NO: 2245407 - RNA, 19 nt, Homo sapiens
  misc_RNA (1)...(19): siRNA sense strand
gcgcaucauugcagcccau

SEQ ID NO: 2245408 - RNA, 19 nt, Homo sapiens
  misc_RNA (1)...(19): siRNA sense strand
cagaugauguggcagggau

SEQ ID NO: 2245409 - RNA, 19 nt, Homo sapiens
  misc_RNA (1)...(19): siRNA sense strand
ucgaguagagaaaggcuau

SEQ ID NO: 2245410 - RNA, 19 nt, Homo sapiens
  misc_RNA (1)...(19): siRNA sense strand
aggcuaucccagaaauauu

SEQ ID NO: 2245411 - RNA, 19 nt, Homo sapiens
  misc_RNA (1)...(19): siRNA sense strand
aggaagaagaagagacaga

SEQ ID NO: 2245412 - RNA, 19 nt, Homo sapiens
  misc_RNA (1)...(19): siRNA sense strand
agugauaagggaugaggaa

SEQ ID NO: 2245413 - RNA, 19 nt, Homo sapiens
  misc_RNA (1)...(19): siRNA sense strand
guagugaacuggaugccau

SEQ ID NO: 2245414 - RNA, 19 nt, Homo sapiens
  misc_RNA (1)...(19): siRNA sense strand
gcgcaucauugcagcccau

SEQ ID NO: 2245415 - RNA, 19 nt, Homo sapiens
  misc_RNA (1)...(19): siRNA sense strand
cagaugauguggcagggau

SEQ ID NO: 2245416 - RNA, 19 nt, Homo sapiens
  misc_RNA (1)...(19): siRNA sense strand
gagacaagguguggcgcua

SEQ ID NO: 2245417 - RNA, 19 nt, Homo sapiens
  misc_RNA (1)...(19): siRNA sense strand
ccaagaagcugaauagggu

SEQ ID NO: 2245418 - RNA, 19 nt, Homo sapiens
  misc_RNA (1)...(19): siRNA sense strand
ucuacuucuucaagggcaa

SEQ ID NO: 2245419 - RNA, 19 nt, Homo sapiens
  misc_RNA (1)...(19): siRNA sense strand
agagaaaggcuaucccaga

SEQ ID NO: 2245420 - RNA, 19 nt, Homo sapiens
  misc_RNA (1)...(19): siRNA sense strand
ucgaguagagaaaggcuau

SEQ ID NO: 2245421 - RNA, 19 nt, Homo sapiens
  misc_RNA (1)...(19): siRNA sense strand
aggcuaucccagaaauauu

SEQ ID NO: 2245422 - RNA, 19 nt, Homo sapiens
  misc_RNA (1)...(19): siRNA sense strand
gcacagacgacguggguga

SEQ ID NO: 2245423 - RNA, 19 nt, Homo sapiens
  misc_RNA (1)...(19): siRNA sense strand
gagaggaacuuuaacgaga

SEQ ID NO: 2245424 - RNA, 19 nt, Homo sapiens
  misc_RNA (1)...(19): siRNA sense strand
gaaagaugccugugggucu

SEQ ID NO: 2245425 - RNA, 19 nt, Homo sapiens
  misc_RNA (1)...(19): siRNA sense strand
ccgucgacucgcuggaaua

SEQ ID NO: 2245426 - RNA, 19 nt, Homo sapiens
  misc_RNA (1)...(19): siRNA sense strand
ccuacaugaacguggccaa

SEQ ID NO: 2245427 - RNA, 19 nt, Homo sapiens
  misc_RNA (1)...(19): siRNA sense strand
aaacugagccagaacgaga

SEQ ID NO: 2245428 - RNA, 19 nt, Homo sapiens
  misc_RNA (1)...(19): siRNA sense strand
ccagagggcaagaggaaac

SEQ ID NO: 2245429 - RNA, 19 nt, Homo sapiens
  misc_RNA (1)...(19): siRNA sense strand
gcaaagaagcccacgaccu

SEQ ID NO: 2245430 - RNA, 19 nt, Homo sapiens
  misc_RNA (1)...(19): siRNA sense strand
gcaagaggaaacugagcca

SEQ ID NO: 2245431 - RNA, 19 nt, Homo sapiens
  misc_RNA (1)...(19): siRNA sense strand
guguguucuuugagagguu

SEQ ID NO: 2245432 - RNA, 19 nt, Homo sapiens
  misc_RNA (1)...(19): siRNA sense strand
cagcagcagcagcgccaaa

SEQ ID NO: 2245433 - RNA, 19 nt, Homo sapiens
  misc_RNA (1)...(19): siRNA sense strand
aagaggaaacugagccaga

SEQ ID NO: 2245434 - RNA, 19 nt, Homo sapiens
  misc_RNA (1)...(19): siRNA sense strand
cgaugaggaugcccggaga

SEQ ID NO: 2245435 - RNA, 19 nt, Homo sapiens
  misc_RNA (1)...(19): siRNA sense strand
aguuaaagcgagcaggagu

SEQ ID NO: 2245436 - RNA, 19 nt, Homo sapiens
  misc_RNA (1)...(19): siRNA sense strand
gcuaugagcacauggcgga

SEQ ID NO: 2245437 - RNA, 19 nt, Homo sapiens
  misc_RNA (1)...(19): siRNA sense strand
gcuucuaguccgacaaaau

SEQ ID NO: 2245438 - RNA, 19 nt, Homo sapiens
  misc_RNA (1)...(19): siRNA sense strand
aggacaaccuguucggcca

SEQ ID NO: 2245439 - RNA, 19 nt, Homo sapiens
  misc_RNA (1)...(19): siRNA sense strand
uggcgaaagcagugaacaa

SEQ ID NO: 2245440 - RNA, 19 nt, Homo sapiens
  misc_RNA (1)...(19): siRNA sense strand
aggaggaagucgaggagga

SEQ ID NO: 2245441 - RNA, 19 nt, Homo sapiens
  misc_RNA (1)...(19): siRNA sense strand
uccugaaauugaugagaaa

SEQ ID NO: 2245442 - RNA, 19 nt, Homo sapiens
  misc_RNA (1)...(19): siRNA sense strand
gugccaaacaggaugagaa

SEQ ID NO: 2245443 - RNA, 19 nt, Homo sapiens
  misc_RNA (1)...(19): siRNA sense strand
cugucaaggauuugcuaaa

SEQ ID NO: 2245444 - RNA, 19 nt, Homo sapiens
  misc_RNA (1)...(19): siRNA sense strand
agaagaaccaaauggaaaa

SEQ ID NO: 2245445 - RNA, 19 nt, Homo sapiens
  misc_RNA (1)...(19): siRNA sense strand
caugacugccacugagaaa

SEQ ID NO: 2245446 - RNA, 19 nt, Homo sapiens
  misc_RNA (1)...(19): siRNA sense strand
ggauuuuggucuggagaua

SEQ ID NO: 2245447 - RNA, 19 nt, Homo sapiens
  misc_RNA (1)...(19): siRNA sense strand
ugaaacuggauuuggaaga

SEQ ID NO: 2245448 - RNA, 19 nt, Homo sapiens
  misc_RNA (1)...(19): siRNA sense strand
gggaagagcauauaccuca

SEQ ID NO: 2245449 - RNA, 19 nt, Homo sapiens
  misc_RNA (1)...(19): siRNA sense strand
uugcuaaagaagaaccaaa

SEQ ID NO: 2245450 - RNA, 19 nt, Homo sapiens
  misc_RNA (1)...(19): siRNA sense strand
ggagcgaacccaaggagga

SEQ ID NO: 2245451 - RNA, 19 nt, Homo sapiens
  misc_RNA (1)...(19): siRNA sense strand
gguugaacuggaagacuau

SEQ ID NO: 2245452 - RNA, 19 nt, Homo sapiens
  misc_RNA (1)...(19): siRNA sense strand
cuggaagacuauaauguca

SEQ ID NO: 2245453 - RNA, 19 nt, Homo sapiens
  misc_RNA (1)...(19): siRNA sense strand
aggccgaggaggaggaagu

SEQ ID NO: 2245454 - RNA, 19 nt, Homo sapiens
  misc_RNA (1)...(19): siRNA sense strand
ccgcaaggagcuggagaau

SEQ ID NO: 2245455 - RNA, 19 nt, Homo sapiens
  misc_RNA (1)...(19): siRNA sense strand
aggaagucgaggaggagga

SEQ ID NO: 2245456 - RNA, 19 nt, Homo sapiens
  misc_RNA (1)...(19): siRNA sense strand
ucaucagggaagagcauau

SEQ ID NO: 2245457 - RNA, 19 nt, Homo sapiens
  misc_RNA (1)...(19): siRNA sense strand
ugaugaauuuggaaaggga

SEQ ID NO: 2245458 - RNA, 19 nt, Homo sapiens
  misc_RNA (1)...(19): siRNA sense strand
ugccaaacaggaugagaau

SEQ ID NO: 2245459 - RNA, 19 nt, Homo sapiens
  misc_RNA (1)...(19): siRNA sense strand
cgccagccucauugggaaa

SEQ ID NO: 2245460 - RNA, 19 nt, Homo sapiens
  misc_RNA (1)...(19): siRNA sense strand
gaguucuggaugagaucaa

SEQ ID NO: 2245461 - RNA, 19 nt, Homo sapiens
  misc_RNA (1)...(19): siRNA sense strand
uggugaacauagaucaaga

SEQ ID NO: 2245462 - RNA, 19 nt, Homo sapiens
  misc_RNA (1)...(19): siRNA sense strand
cauggagaccugugaggau

SEQ ID NO: 2245463 - RNA, 19 nt, Homo sapiens
  misc_RNA (1)...(19): siRNA sense strand
cugugugugcuguggaauu

SEQ ID NO: 2245464 - RNA, 19 nt, Homo sapiens
  misc_RNA (1)...(19): siRNA sense strand
gggacaaagggagggucaa

SEQ ID NO: 2245465 - RNA, 19 nt, Homo sapiens
  misc_RNA (1)...(19): siRNA sense strand
ccuucaugaucgaccucaa

SEQ ID NO: 2245466 - RNA, 19 nt, Homo sapiens
  misc_RNA (1)...(19): siRNA sense strand
gagagaagcugcucaggcu

SEQ ID NO: 2245467 - RNA, 19 nt, Homo sapiens
  misc_RNA (1)...(19): siRNA sense strand
ccgaggaggaggaagucga

SEQ ID NO: 2245468 - RNA, 19 nt, Homo sapiens
  misc_RNA (1)...(19): siRNA sense strand
ccaccaacuuucugagccu

SEQ ID NO: 2245469 - RNA, 19 nt, Homo sapiens
  misc_RNA (1)...(19): siRNA sense strand
cuaaaagaccugaaaucau

SEQ ID NO: 2245470 - RNA, 19 nt, Homo sapiens
  misc_RNA (1)...(19): siRNA sense strand
aagucgaggaggaggagga

SEQ ID NO: 2245471 - RNA, 19 nt, Homo sapiens
  misc_RNA (1)...(19): siRNA sense strand
caguauuugaccauggaga

SEQ ID NO: 2245472 - RNA, 19 nt, Homo sapiens
  misc_RNA (1)...(19): siRNA sense strand
uggcgaaagcagugaacaa

SEQ ID NO: 2245473 - RNA, 19 nt, Homo sapiens
  misc_RNA (1)...(19): siRNA sense strand
aggaggaagucgaggagga

SEQ ID NO: 2245474 - RNA, 19 nt, Homo sapiens
  misc_RNA (1)...(19): siRNA sense strand
uccugaaauugaugagaaa

SEQ ID NO: 2245475 - RNA, 19 nt, Homo sapiens
  misc_RNA (1)...(19): siRNA sense strand
gugccaaacaggaugagaa

SEQ ID NO: 2245476 - RNA, 19 nt, Homo sapiens
  misc_RNA (1)...(19): siRNA sense strand
cugucaaggauuugcuaaa

SEQ ID NO: 2245477 - RNA, 19 nt, Homo sapiens
  misc_RNA (1)...(19): siRNA sense strand
agaagaaccaaauggaaaa

SEQ ID NO: 2245478 - RNA, 19 nt, Homo sapiens
  misc_RNA (1)...(19): siRNA sense strand
caugacugccacugagaaa

SEQ ID NO: 2245479 - RNA, 19 nt, Homo sapiens
  misc_RNA (1)...(19): siRNA sense strand
ggauuuuggucuggagaua

SEQ ID NO: 2245480 - RNA, 19 nt, Homo sapiens
  misc_RNA (1)...(19): siRNA sense strand
ugaaacuggauuuggaaga

SEQ ID NO: 2245481 - RNA, 19 nt, Homo sapiens
  misc_RNA (1)...(19): siRNA sense strand
gggaagagcauauaccuca

SEQ ID NO: 2245482 - RNA, 19 nt, Homo sapiens
  misc_RNA (1)...(19): siRNA sense strand
uugcuaaagaagaaccaaa

SEQ ID NO: 2245483 - RNA, 19 nt, Homo sapiens
  misc_RNA (1)...(19): siRNA sense strand
ggagcgaacccaaggagga

SEQ ID NO: 2245484 - RNA, 19 nt, Homo sapiens
  misc_RNA (1)...(19): siRNA sense strand
gguugaacuggaagacuau

SEQ ID NO: 2245485 - RNA, 19 nt, Homo sapiens
  misc_RNA (1)...(19): siRNA sense strand
cuggaagacuauaauguca

SEQ ID NO: 2245486 - RNA, 19 nt, Homo sapiens
  misc_RNA (1)...(19): siRNA sense strand
aggccgaggaggaggaagu

SEQ ID NO: 2245487 - RNA, 19 nt, Homo sapiens
  misc_RNA (1)...(19): siRNA sense strand
ccgcaaggagcuggagaau

SEQ ID NO: 2245488 - RNA, 19 nt, Homo sapiens
  misc_RNA (1)...(19): siRNA sense strand
aggaagucgaggaggagga

SEQ ID NO: 2245489 - RNA, 19 nt, Homo sapiens
  misc_RNA (1)...(19): siRNA sense strand
ucaucagggaagagcauau

SEQ ID NO: 2245490 - RNA, 19 nt, Homo sapiens
  misc_RNA (1)...(19): siRNA sense strand
ugaugaauuuggaaaggga

SEQ ID NO: 2245491 - RNA, 19 nt, Homo sapiens
  misc_RNA (1)...(19): siRNA sense strand
ugccaaacaggaugagaau

SEQ ID NO: 2245492 - RNA, 19 nt, Homo sapiens
  misc_RNA (1)...(19): siRNA sense strand
cgccagccucauugggaaa

SEQ ID NO: 2245493 - RNA, 19 nt, Homo sapiens
  misc_RNA (1)...(19): siRNA sense strand
gaguucuggaugagaucaa

SEQ ID NO: 2245494 - RNA, 19 nt, Homo sapiens
  misc_RNA (1)...(19): siRNA sense strand
uggugaacauagaucaaga

SEQ ID NO: 2245495 - RNA, 19 nt, Homo sapiens
  misc_RNA (1)...(19): siRNA sense strand
cauggagaccugugaggau

SEQ ID NO: 2245496 - RNA, 19 nt, Homo sapiens
  misc_RNA (1)...(19): siRNA sense strand
cugugugugcuguggaauu

SEQ ID NO: 2245497 - RNA, 19 nt, Homo sapiens
  misc_RNA (1)...(19): siRNA sense strand
gggacaaagggagggucaa

SEQ ID NO: 2245498 - RNA, 19 nt, Homo sapiens
  misc_RNA (1)...(19): siRNA sense strand
ccuucaugaucgaccucaa

SEQ ID NO: 2245499 - RNA, 19 nt, Homo sapiens
  misc_RNA (1)...(19): siRNA sense strand
gagagaagcugcucaggcu

SEQ ID NO: 2245500 - RNA, 19 nt, Homo sapiens
  misc_RNA (1)...(19): siRNA sense strand
ccgaggaggaggaagucga

SEQ ID NO: 2245501 - RNA, 19 nt, Homo sapiens
  misc_RNA (1)...(19): siRNA sense strand
ccaccaacuuucugagccu

SEQ ID NO: 2245502 - RNA, 19 nt, Homo sapiens
  misc_RNA (1)...(19): siRNA sense strand
cuaaaagaccugaaaucau

SEQ ID NO: 2245503 - RNA, 19 nt, Homo sapiens
  misc_RNA (1)...(19): siRNA sense strand
aagucgaggaggaggagga

SEQ ID NO: 2245504 - RNA, 19 nt, Homo sapiens
  misc_RNA (1)...(19): siRNA sense strand
caguauuugaccauggaga

SEQ ID NO: 2245505 - RNA, 19 nt, Homo sapiens
  misc_RNA (1)...(19): siRNA sense strand
uggcgaaagcagugaacaa

SEQ ID NO: 2245506 - RNA, 19 nt, Homo sapiens
  misc_RNA (1)...(19): siRNA sense strand
aggaggaagucgaggagga

SEQ ID NO: 2245507 - RNA, 19 nt, Homo sapiens
  misc_RNA (1)...(19): siRNA sense strand
uccugaaauugaugagaaa

SEQ ID NO: 2245508 - RNA, 19 nt, Homo sapiens
  misc_RNA (1)...(19): siRNA sense strand
gugccaaacaggaugagaa

SEQ ID NO: 2245509 - RNA, 19 nt, Homo sapiens
  misc_RNA (1)...(19): siRNA sense strand
cugucaaggauuugcuaaa

SEQ ID NO: 2245510 - RNA, 19 nt, Homo sapiens
  misc_RNA (1)...(19): siRNA sense strand
agaagaaccaaauggaaaa

SEQ ID NO: 2245511 - RNA, 19 nt, Homo sapiens
  misc_RNA (1)...(19): siRNA sense strand
caugacugccacugagaaa

SEQ ID NO: 2245512 - RNA, 19 nt, Homo sapiens
  misc_RNA (1)...(19): siRNA sense strand
ggauuuuggucuggagaua

SEQ ID NO: 2245513 - RNA, 19 nt, Homo sapiens
  misc_RNA (1)...(19): siRNA sense strand
ugaaacuggauuuggaaga

SEQ ID NO: 2245514 - RNA, 19 nt, Homo sapiens
  misc_RNA (1)...(19): siRNA sense strand
gggaagagcauauaccuca

SEQ ID NO: 2245515 - RNA, 19 nt, Homo sapiens
  misc_RNA (1)...(19): siRNA sense strand
uugcuaaagaagaaccaaa

SEQ ID NO: 2245516 - RNA, 19 nt, Homo sapiens
  misc_RNA (1)...(19): siRNA sense strand
ggagcgaacccaaggagga

SEQ ID NO: 2245517 - RNA, 19 nt, Homo sapiens
  misc_RNA (1)...(19): siRNA sense strand
gguugaacuggaagacuau

SEQ ID NO: 2245518 - RNA, 19 nt, Homo sapiens
  misc_RNA (1)...(19): siRNA sense strand
cuggaagacuauaauguca

SEQ ID NO: 2245519 - RNA, 19 nt, Homo sapiens
  misc_RNA (1)...(19): siRNA sense strand
aggccgaggaggaggaagu

SEQ ID NO: 2245520 - RNA, 19 nt, Homo sapiens
  misc_RNA (1)...(19): siRNA sense strand
ccgcaaggagcuggagaau

SEQ ID NO: 2245521 - RNA, 19 nt, Homo sapiens
  misc_RNA (1)...(19): siRNA sense strand
aggaagucgaggaggagga

SEQ ID NO: 2245522 - RNA, 19 nt, Homo sapiens
  misc_RNA (1)...(19): siRNA sense strand
ucaucagggaagagcauau

SEQ ID NO: 2245523 - RNA, 19 nt, Homo sapiens
  misc_RNA (1)...(19): siRNA sense strand
ugaugaauuuggaaaggga

SEQ ID NO: 2245524 - RNA, 19 nt, Homo sapiens
  misc_RNA (1)...(19): siRNA sense strand
ugccaaacaggaugagaau

SEQ ID NO: 2245525 - RNA, 19 nt, Homo sapiens
  misc_RNA (1)...(19): siRNA sense strand
cgccagccucauugggaaa

SEQ ID NO: 2245526 - RNA, 19 nt, Homo sapiens
  misc_RNA (1)...(19): siRNA sense strand
gaguucuggaugagaucaa

SEQ ID NO: 2245527 - RNA, 19 nt, Homo sapiens
  misc_RNA (1)...(19): siRNA sense strand
uggugaacauagaucaaga

SEQ ID NO: 2245528 - RNA, 19 nt, Homo sapiens
  misc_RNA (1)...(19): siRNA sense strand
cauggagaccugugaggau

SEQ ID NO: 2245529 - RNA, 19 nt, Homo sapiens
  misc_RNA (1)...(19): siRNA sense strand
cugugugugcuguggaauu

SEQ ID NO: 2245530 - RNA, 19 nt, Homo sapiens
  misc_RNA (1)...(19): siRNA sense strand
gggacaaagggagggucaa

SEQ ID NO: 2245531 - RNA, 19 nt, Homo sapiens
  misc_RNA (1)...(19): siRNA sense strand
ccuucaugaucgaccucaa

SEQ ID NO: 2245532 - RNA, 19 nt, Homo sapiens
  misc_RNA (1)...(19): siRNA sense strand
gagagaagcugcucaggcu

SEQ ID NO: 2245533 - RNA, 19 nt, Homo sapiens
  misc_RNA (1)...(19): siRNA sense strand
ccgaggaggaggaagucga

SEQ ID NO: 2245534 - RNA, 19 nt, Homo sapiens
  misc_RNA (1)...(19): siRNA sense strand
ccaccaacuuucugagccu

SEQ ID NO: 2245535 - RNA, 19 nt, Homo sapiens
  misc_RNA (1)...(19): siRNA sense strand
cuaaaagaccugaaaucau

SEQ ID NO: 2245536 - RNA, 19 nt, Homo sapiens
  misc_RNA (1)...(19): siRNA sense strand
aagucgaggaggaggagga

SEQ ID NO: 2245537 - RNA, 19 nt, Homo sapiens
  misc_RNA (1)...(19): siRNA sense strand
caguauuugaccauggaga

SEQ ID NO: 2245538 - RNA, 19 nt, Homo sapiens
  misc_RNA (1)...(19): siRNA sense strand
uggcgaaagcagugaacaa

SEQ ID NO: 2245539 - RNA, 19 nt, Homo sapiens
  misc_RNA (1)...(19): siRNA sense strand
aggaggaagucgaggagga

SEQ ID NO: 2245540 - RNA, 19 nt, Homo sapiens
  misc_RNA (1)...(19): siRNA sense strand
uccugaaauugaugagaaa

SEQ ID NO: 2245541 - RNA, 19 nt, Homo sapiens
  misc_RNA (1)...(19): siRNA sense strand
gugccaaacaggaugagaa

SEQ ID NO: 2245542 - RNA, 19 nt, Homo sapiens
  misc_RNA (1)...(19): siRNA sense strand
cugucaaggauuugcuaaa

SEQ ID NO: 2245543 - RNA, 19 nt, Homo sapiens
  misc_RNA (1)...(19): siRNA sense strand
agaagaaccaaauggaaaa

SEQ ID NO: 2245544 - RNA, 19 nt, Homo sapiens
  misc_RNA (1)...(19): siRNA sense strand
caugacugccacugagaaa

SEQ ID NO: 2245545 - RNA, 19 nt, Homo sapiens
  misc_RNA (1)...(19): siRNA sense strand
ggauuuuggucuggagaua

SEQ ID NO: 2245546 - RNA, 19 nt, Homo sapiens
  misc_RNA (1)...(19): siRNA sense strand
ugaaacuggauuuggaaga

SEQ ID NO: 2245547 - RNA, 19 nt, Homo sapiens
  misc_RNA (1)...(19): siRNA sense strand
gggaagagcauauaccuca

SEQ ID NO: 2245548 - RNA, 19 nt, Homo sapiens
  misc_RNA (1)...(19): siRNA sense strand
uugcuaaagaagaaccaaa

SEQ ID NO: 2245549 - RNA, 19 nt, Homo sapiens
  misc_RNA (1)...(19): siRNA sense strand
ggagcgaacccaaggagga

SEQ ID NO: 2245550 - RNA, 19 nt, Homo sapiens
  misc_RNA (1)...(19): siRNA sense strand
gguugaacuggaagacuau

SEQ ID NO: 2245551 - RNA, 19 nt, Homo sapiens
  misc_RNA (1)...(19): siRNA sense strand
cuggaagacuauaauguca

SEQ ID NO: 2245552 - RNA, 19 nt, Homo sapiens
  misc_RNA (1)...(19): siRNA sense strand
aggccgaggaggaggaagu

SEQ ID NO: 2245553 - RNA, 19 nt, Homo sapiens
  misc_RNA (1)...(19): siRNA sense strand
ccgcaaggagcuggagaau

SEQ ID NO: 2245554 - RNA, 19 nt, Homo sapiens
  misc_RNA (1)...(19): siRNA sense strand
aggaagucgaggaggagga

SEQ ID NO: 2245555 - RNA, 19 nt, Homo sapiens
  misc_RNA (1)...(19): siRNA sense strand
ucaucagggaagagcauau

SEQ ID NO: 2245556 - RNA, 19 nt, Homo sapiens
  misc_RNA (1)...(19): siRNA sense strand
ugaugaauuuggaaaggga

SEQ ID NO: 2245557 - RNA, 19 nt, Homo sapiens
  misc_RNA (1)...(19): siRNA sense strand
ugccaaacaggaugagaau

SEQ ID NO: 2245558 - RNA, 19 nt, Homo sapiens
  misc_RNA (1)...(19): siRNA sense strand
cgccagccucauugggaaa

SEQ ID NO: 2245559 - RNA, 19 nt, Homo sapiens
  misc_RNA (1)...(19): siRNA sense strand
gaguucuggaugagaucaa

SEQ ID NO: 2245560 - RNA, 19 nt, Homo sapiens
  misc_RNA (1)...(19): siRNA sense strand
uggugaacauagaucaaga

SEQ ID NO: 2245561 - RNA, 19 nt, Homo sapiens
  misc_RNA (1)...(19): siRNA sense strand
cauggagaccugugaggau

SEQ ID NO: 2245562 - RNA, 19 nt, Homo sapiens
  misc_RNA (1)...(19): siRNA sense strand
cugugugugcuguggaauu

SEQ ID NO: 2245563 - RNA, 19 nt, Homo sapiens
  misc_RNA (1)...(19): siRNA sense strand
gggacaaagggagggucaa

SEQ ID NO: 2245564 - RNA, 19 nt, Homo sapiens
  misc_RNA (1)...(19): siRNA sense strand
ccuucaugaucgaccucaa

SEQ ID NO: 2245565 - RNA, 19 nt, Homo sapiens
  misc_RNA (1)...(19): siRNA sense strand
gagagaagcugcucaggcu

SEQ ID NO: 2245566 - RNA, 19 nt, Homo sapiens
  misc_RNA (1)...(19): siRNA sense strand
ccgaggaggaggaagucga

SEQ ID NO: 2245567 - RNA, 19 nt, Homo sapiens
  misc_RNA (1)...(19): siRNA sense strand
ccaccaacuuucugagccu

SEQ ID NO: 2245568 - RNA, 19 nt, Homo sapiens
  misc_RNA (1)...(19): siRNA sense strand
cuaaaagaccugaaaucau

SEQ ID NO: 2245569 - RNA, 19 nt, Homo sapiens
  misc_RNA (1)...(19): siRNA sense strand
aagucgaggaggaggagga

SEQ ID NO: 2245570 - RNA, 19 nt, Homo sapiens
  misc_RNA (1)...(19): siRNA sense strand
caguauuugaccauggaga

SEQ ID NO: 2245571 - RNA, 19 nt, Homo sapiens
  misc_RNA (1)...(19): siRNA sense strand
ggauaaagugcuggcgcaa

SEQ ID NO: 2245572 - RNA, 19 nt, Homo sapiens
  misc_RNA (1)...(19): siRNA sense strand
caggaagggcugcgcgaau

SEQ ID NO: 2245573 - RNA, 19 nt, Homo sapiens
  misc_RNA (1)...(19): siRNA sense strand
ggcugugguucgagggaca

SEQ ID NO: 2245574 - RNA, 19 nt, Homo sapiens
  misc_RNA (1)...(19): siRNA sense strand
cguuugagagugaggacau

SEQ ID NO: 2245575 - RNA, 19 nt, Homo sapiens
  misc_RNA (1)...(19): siRNA sense strand
gagucaugcccuacggaau

SEQ ID NO: 2245576 - RNA, 19 nt, Homo sapiens
  misc_RNA (1)...(19): siRNA sense strand
aggacaucguggagaaagu

SEQ ID NO: 2245577 - RNA, 19 nt, Homo sapiens
  misc_RNA (1)...(19): siRNA sense strand
gugaaggagugucugguga

SEQ ID NO: 2245578 - RNA, 19 nt, Homo sapiens
  misc_RNA (1)...(19): siRNA sense strand
cgguggaggacgugaagca

SEQ ID NO: 2245579 - RNA, 19 nt, Homo sapiens
  misc_RNA (1)...(19): siRNA sense strand
uggauaaagugcuggcgca

SEQ ID NO: 2245580 - RNA, 19 nt, Homo sapiens
  misc_RNA (1)...(19): siRNA sense strand
gcacagcccaagaugguga

SEQ ID NO: 2245581 - RNA, 19 nt, Homo sapiens
  misc_RNA (1)...(19): siRNA sense strand
ccaaaagagaaaagggaaa

SEQ ID NO: 2245582 - RNA, 19 nt, Homo sapiens
  misc_RNA (1)...(19): siRNA sense strand
gugucaaagaagagcauua

SEQ ID NO: 2245583 - RNA, 19 nt, Homo sapiens
  misc_RNA (1)...(19): siRNA sense strand
gagaaaagggaaagagauu

SEQ ID NO: 2245584 - RNA, 19 nt, Homo sapiens
  misc_RNA (1)...(19): siRNA sense strand
gcuauaauucaaagaggaa

SEQ ID NO: 2245585 - RNA, 19 nt, Homo sapiens
  misc_RNA (1)...(19): siRNA sense strand
ccauguugaucacgggaaa

SEQ ID NO: 2245586 - RNA, 19 nt, Homo sapiens
  misc_RNA (1)...(19): siRNA sense strand
gugacaaagcugaggcuga

SEQ ID NO: 2245587 - RNA, 19 nt, Homo sapiens
  misc_RNA (1)...(19): siRNA sense strand
aaacaauugaugaggccua

SEQ ID NO: 2245588 - RNA, 19 nt, Homo sapiens
  misc_RNA (1)...(19): siRNA sense strand
cuuaaagccaaaagagaaa

SEQ ID NO: 2245589 - RNA, 19 nt, Homo sapiens
  misc_RNA (1)...(19): siRNA sense strand
aguggaaggaacaguaaua

SEQ ID NO: 2245590 - RNA, 19 nt, Homo sapiens
  misc_RNA (1)...(19): siRNA sense strand
ccguaauggacauguaauu

SEQ ID NO: 2245591 - RNA, 19 nt, Homo sapiens
  misc_RNA (1)...(19): siRNA sense strand
ccagcaugccagugggaau

SEQ ID NO: 2245592 - RNA, 19 nt, Homo sapiens
  misc_RNA (1)...(19): siRNA sense strand
gaugaagacaauauggaau

SEQ ID NO: 2245593 - RNA, 19 nt, Homo sapiens
  misc_RNA (1)...(19): siRNA sense strand
gcuggaaaauguugggcaa

SEQ ID NO: 2245594 - RNA, 19 nt, Homo sapiens
  misc_RNA (1)...(19): siRNA sense strand
cuguggaagaagagaucaa

SEQ ID NO: 2245595 - RNA, 19 nt, Homo sapiens
  misc_RNA (1)...(19): siRNA sense strand
caaaagggacaguuagaaa

SEQ ID NO: 2245596 - RNA, 19 nt, Homo sapiens
  misc_RNA (1)...(19): siRNA sense strand
gggaauuacaggcuggaga

SEQ ID NO: 2245597 - RNA, 19 nt, Homo sapiens
  misc_RNA (1)...(19): siRNA sense strand
ugaacaagaacaggagaaa

SEQ ID NO: 2245598 - RNA, 19 nt, Homo sapiens
  misc_RNA (1)...(19): siRNA sense strand
uggaauuucaagugggaga

SEQ ID NO: 2245599 - RNA, 19 nt, Homo sapiens
  misc_RNA (1)...(19): siRNA sense strand
ccuuaaagccaaaagagaa

SEQ ID NO: 2245600 - RNA, 19 nt, Homo sapiens
  misc_RNA (1)...(19): siRNA sense strand
acaaauacccuuaaagcca

SEQ ID NO: 2245601 - RNA, 19 nt, Homo sapiens
  misc_RNA (1)...(19): siRNA sense strand
uggaaaauguugggcaaaa

SEQ ID NO: 2245602 - RNA, 19 nt, Homo sapiens
  misc_RNA (1)...(19): siRNA sense strand
augaacaagaacaggagaa

SEQ ID NO: 2245603 - RNA, 19 nt, Homo sapiens
  misc_RNA (1)...(19): siRNA sense strand
aagaaaagcgaaaggaaca

SEQ ID NO: 2245604 - RNA, 19 nt, Homo sapiens
  misc_RNA (1)...(19): siRNA sense strand
gggaugaaguuaaagugga

SEQ ID NO: 2245605 - RNA, 19 nt, Homo sapiens
  misc_RNA (1)...(19): siRNA sense strand
uguuagaauugaaagcaga

SEQ ID NO: 2245606 - RNA, 19 nt, Homo sapiens
  misc_RNA (1)...(19): siRNA sense strand
ccucauugaaacaccauaa

SEQ ID NO: 2245607 - RNA, 19 nt, Homo sapiens
  misc_RNA (1)...(19): siRNA sense strand
gggaauggauuguggucuc

SEQ ID NO: 2245608 - RNA, 19 nt, Homo sapiens
  misc_RNA (1)...(19): siRNA sense strand
cauugaaacaccauaaaga

SEQ ID NO: 2245609 - RNA, 19 nt, Homo sapiens
  misc_RNA (1)...(19): siRNA sense strand
ucuuguuacuacagcuaua

SEQ ID NO: 2245610 - RNA, 19 nt, Homo sapiens
  misc_RNA (1)...(19): siRNA sense strand
aaagaagagcauuaagaca

SEQ ID NO: 2245611 - RNA, 19 nt, Homo sapiens
  misc_RNA (1)...(19): siRNA sense strand
ccaggcagauccagcuuua

SEQ ID NO: 2245612 - RNA, 19 nt, Homo sapiens
  misc_RNA (1)...(19): siRNA sense strand
cagaugauggagugaugaa

SEQ ID NO: 2245613 - RNA, 19 nt, Homo sapiens
  misc_RNA (1)...(19): siRNA sense strand
gaaaagggaaagagauuca

SEQ ID NO: 2245614 - RNA, 19 nt, Homo sapiens
  misc_RNA (1)...(19): siRNA sense strand
cgaugugguaugugaagau

SEQ ID NO: 2245615 - RNA, 19 nt, Homo sapiens
  misc_RNA (1)...(19): siRNA sense strand
cuggaggaaauaugaacaa

SEQ ID NO: 2245616 - RNA, 19 nt, Homo sapiens
  misc_RNA (1)...(19): siRNA sense strand
agaagaaaagcgaaaggaa

SEQ ID NO: 2245617 - RNA, 19 nt, Homo sapiens
  misc_RNA (1)...(19): siRNA sense strand
augauggagugaugaaaca

SEQ ID NO: 2245618 - RNA, 19 nt, Homo sapiens
  misc_RNA (1)...(19): siRNA sense strand
cuauuauccuugccguaaa

SEQ ID NO: 2245619 - RNA, 19 nt, Homo sapiens
  misc_RNA (1)...(19): siRNA sense strand
ugaggcugauccugagaaa

SEQ ID NO: 2245620 - RNA, 19 nt, Homo sapiens
  misc_RNA (1)...(19): siRNA sense strand
aggagaaaggucaggagga

SEQ ID NO: 2245621 - RNA, 19 nt, Homo sapiens
  misc_RNA (1)...(19): siRNA sense strand
agaaaggucaggaggaucu

SEQ ID NO: 2245622 - RNA, 19 nt, Homo sapiens
  misc_RNA (1)...(19): siRNA sense strand
ucuugauacuccaggacau

SEQ ID NO: 2245623 - RNA, 19 nt, Homo sapiens
  misc_RNA (1)...(19): siRNA sense strand
aggcugauccugagaaagu

SEQ ID NO: 2245624 - RNA, 19 nt, Homo sapiens
  misc_RNA (1)...(19): siRNA sense strand
aguggaaacuggaggcauc

SEQ ID NO: 2245625 - RNA, 19 nt, Homo sapiens
  misc_RNA (1)...(19): siRNA sense strand
gauggagugaugaaacaaa

SEQ ID NO: 2245626 - RNA, 19 nt, Homo sapiens
  misc_RNA (1)...(19): siRNA sense strand
ugaagauuauggaggugau

SEQ ID NO: 2245627 - RNA, 19 nt, Homo sapiens
  misc_RNA (1)...(19): siRNA sense strand
aggaacaguaauagagucu

SEQ ID NO: 2245628 - RNA, 19 nt, Homo sapiens
  misc_RNA (1)...(19): siRNA sense strand
acgcuuaauguuugaugaa

SEQ ID NO: 2245629 - RNA, 19 nt, Homo sapiens
  misc_RNA (1)...(19): siRNA sense strand
caggaggaucugaaaauaa

SEQ ID NO: 2245630 - RNA, 19 nt, Homo sapiens
  misc_RNA (1)...(19): siRNA sense strand
uaaugugaaugcaggcaau

SEQ ID NO: 2245631 - RNA, 19 nt, Homo sapiens
  misc_RNA (1)...(19): siRNA sense strand
guaacagaagggaagaaaa

SEQ ID NO: 2245632 - RNA, 19 nt, Homo sapiens
  misc_RNA (1)...(19): siRNA sense strand
agaugaagacaauauggaa

SEQ ID NO: 2245633 - RNA, 19 nt, Homo sapiens
  misc_RNA (1)...(19): siRNA sense strand
gaggaacuggccagggcaa

SEQ ID NO: 2245634 - RNA, 19 nt, Homo sapiens
  misc_RNA (1)...(19): siRNA sense strand
ggaugaaguuaaaguggag

SEQ ID NO: 2245635 - RNA, 19 nt, Homo sapiens
  misc_RNA (1)...(19): siRNA sense strand
ugaaguagaaucugagcca

SEQ ID NO: 2245636 - RNA, 19 nt, Homo sapiens
  misc_RNA (1)...(19): siRNA sense strand
augaaguuaaaguggagua

SEQ ID NO: 2245637 - RNA, 19 nt, Homo sapiens
  misc_RNA (1)...(19): siRNA sense strand
uuauggaggugauguucaa

SEQ ID NO: 2245638 - RNA, 19 nt, Homo sapiens
  misc_RNA (1)...(19): siRNA sense strand
ggcgauaaucugauggcuu

SEQ ID NO: 2245639 - RNA, 19 nt, Homo sapiens
  misc_RNA (1)...(19): siRNA sense strand
uggagaacuugcuacgauu

SEQ ID NO: 2245640 - RNA, 19 nt, Homo sapiens
  misc_RNA (1)...(19): siRNA sense strand
ccaugaagacagcgggaaa

SEQ ID NO: 2245641 - RNA, 19 nt, Homo sapiens
  misc_RNA (1)...(19): siRNA sense strand
aggcauaaggauagggauu

SEQ ID NO: 2245642 - RNA, 19 nt, Homo sapiens
  misc_RNA (1)...(19): siRNA sense strand
agagaaacuccaagaacaa

SEQ ID NO: 2245643 - RNA, 19 nt, Homo sapiens
  misc_RNA (1)...(19): siRNA sense strand
ccgauaaguaugaccuaaa

SEQ ID NO: 2245644 - RNA, 19 nt, Homo sapiens
  misc_RNA (1)...(19): siRNA sense strand
ggagaugccuucagcguga

SEQ ID NO: 2245645 - RNA, 19 nt, Homo sapiens
  misc_RNA (1)...(19): siRNA sense strand
agaccauauucgugugcaa

SEQ ID NO: 2245646 - RNA, 19 nt, Homo sapiens
  misc_RNA (1)...(19): siRNA sense strand
gcagaggacaagaggagau

SEQ ID NO: 2245647 - RNA, 19 nt, Homo sapiens
  misc_RNA (1)...(19): siRNA sense strand
augcaaagaauauggccaa

SEQ ID NO: 2245648 - RNA, 19 nt, Homo sapiens
  misc_RNA (1)...(19): siRNA sense strand
ucuucaacauuguggaauu

SEQ ID NO: 2245649 - RNA, 19 nt, Homo sapiens
  misc_RNA (1)...(19): siRNA sense strand
ggggaagauaauugauaaa

SEQ ID NO: 2245650 - RNA, 19 nt, Homo sapiens
  misc_RNA (1)...(19): siRNA sense strand
ucuugaaauccgagcaauu

SEQ ID NO: 2245651 - RNA, 19 nt, Homo sapiens
  misc_RNA (1)...(19): siRNA sense strand
gguacaaagccuacuccaa

SEQ ID NO: 2245652 - RNA, 19 nt, Homo sapiens
  misc_RNA (1)...(19): siRNA sense strand
ggacuauaccagugacagu

SEQ ID NO: 2245653 - RNA, 19 nt, Homo sapiens
  misc_RNA (1)...(19): siRNA sense strand
agaaaagagcucagacauu

SEQ ID NO: 2245654 - RNA, 19 nt, Homo sapiens
  misc_RNA (1)...(19): siRNA sense strand
aaggaaauacagaaccaaa

SEQ ID NO: 2245655 - RNA, 19 nt, Homo sapiens
  misc_RNA (1)...(19): siRNA sense strand
acaugaugcccuugugcaa

SEQ ID NO: 2245656 - RNA, 19 nt, Homo sapiens
  misc_RNA (1)...(19): siRNA sense strand
auucgaugauucaggaaga

SEQ ID NO: 2245657 - RNA, 19 nt, Homo sapiens
  misc_RNA (1)...(19): siRNA sense strand
agaauauggccaaggaugu

SEQ ID NO: 2245658 - RNA, 19 nt, Homo sapiens
  misc_RNA (1)...(19): siRNA sense strand
agaaagcauuuuaggucaa

SEQ ID NO: 2245659 - RNA, 19 nt, Homo sapiens
  misc_RNA (1)...(19): siRNA sense strand
ggcugcaggcauaaggaua

SEQ ID NO: 2245660 - RNA, 19 nt, Homo sapiens
  misc_RNA (1)...(19): siRNA sense strand
uuaaggaaauacagaacca

SEQ ID NO: 2245661 - RNA, 19 nt, Homo sapiens
  misc_RNA (1)...(19): siRNA sense strand
gcggaagggaguauguaca

SEQ ID NO: 2245662 - RNA, 19 nt, Homo sapiens
  misc_RNA (1)...(19): siRNA sense strand
aacaacacccagauggaaa

SEQ ID NO: 2245663 - RNA, 19 nt, Homo sapiens
  misc_RNA (1)...(19): siRNA sense strand
cgcaaguuuguuaaggaaa

SEQ ID NO: 2245664 - RNA, 19 nt, Homo sapiens
  misc_RNA (1)...(19): siRNA sense strand
gugagcaagcugugguaca

SEQ ID NO: 2245665 - RNA, 19 nt, Homo sapiens
  misc_RNA (1)...(19): siRNA sense strand
gguauggguuacugggucu

SEQ ID NO: 2245666 - RNA, 19 nt, Homo sapiens
  misc_RNA (1)...(19): siRNA sense strand
ggauguacaugaugcccuu

SEQ ID NO: 2245667 - RNA, 19 nt, Homo sapiens
  misc_RNA (1)...(19): siRNA sense strand
cagaggacaagaggagaua

SEQ ID NO: 2245668 - RNA, 19 nt, Homo sapiens
  misc_RNA (1)...(19): siRNA sense strand
gauucaggaagaaaggauu

SEQ ID NO: 2245669 - RNA, 19 nt, Homo sapiens
  misc_RNA (1)...(19): siRNA sense strand
ggaucuuaacucaucuaaa

SEQ ID NO: 2245670 - RNA, 19 nt, Homo sapiens
  misc_RNA (1)...(19): siRNA sense strand
uaggucaagcagaggacaa

SEQ ID NO: 2245671 - RNA, 19 nt, Homo sapiens
  misc_RNA (1)...(19): siRNA sense strand
ggagcugugcaguaaacaa

SEQ ID NO: 2245672 - RNA, 19 nt, Homo sapiens
  misc_RNA (1)...(19): siRNA sense strand
aagcugugguacauggauu

SEQ ID NO: 2245673 - RNA, 19 nt, Homo sapiens
  misc_RNA (1)...(19): siRNA sense strand
gcaaaguauguacaagaca

SEQ ID NO: 2245674 - RNA, 19 nt, Homo sapiens
  misc_RNA (1)...(19): siRNA sense strand
gugcaaauaauaagcaaag

SEQ ID NO: 2245675 - RNA, 19 nt, Homo sapiens
  misc_RNA (1)...(19): siRNA sense strand
uguauuagugaauccgaua

SEQ ID NO: 2245676 - RNA, 19 nt, Homo sapiens
  misc_RNA (1)...(19): siRNA sense strand
ucaccugcgguauggguua

SEQ ID NO: 2245677 - RNA, 19 nt, Homo sapiens
  misc_RNA (1)...(19): siRNA sense strand
cagaugacuguguagguuu

SEQ ID NO: 2245678 - RNA, 19 nt, Homo sapiens
  misc_RNA (1)...(19): siRNA sense strand
cagaaagcauuuuagguca

SEQ ID NO: 2245679 - RNA, 19 nt, Homo sapiens
  misc_RNA (1)...(19): siRNA sense strand
ggguccaggaaccggcaua

SEQ ID NO: 2245680 - RNA, 19 nt, Homo sapiens
  misc_RNA (1)...(19): siRNA sense strand
cgaacaucuuccuaaacuu

SEQ ID NO: 2245681 - RNA, 19 nt, Homo sapiens
  misc_RNA (1)...(19): siRNA sense strand
aagacaacauccagcuuca

SEQ ID NO: 2245682 - RNA, 19 nt, Homo sapiens
  misc_RNA (1)...(19): siRNA sense strand
uggccaaggauguacauga

SEQ ID NO: 2245683 - RNA, 19 nt, Homo sapiens
  misc_RNA (1)...(19): siRNA sense strand
ccaugaagacagcgggaaa

SEQ ID NO: 2245684 - RNA, 19 nt, Homo sapiens
  misc_RNA (1)...(19): siRNA sense strand
aggcauaaggauagggauu

SEQ ID NO: 2245685 - RNA, 19 nt, Homo sapiens
  misc_RNA (1)...(19): siRNA sense strand
agagaaacuccaagaacaa

SEQ ID NO: 2245686 - RNA, 19 nt, Homo sapiens
  misc_RNA (1)...(19): siRNA sense strand
ccgauaaguaugaccuaaa

SEQ ID NO: 2245687 - RNA, 19 nt, Homo sapiens
  misc_RNA (1)...(19): siRNA sense strand
ggagaugccuucagcguga

SEQ ID NO: 2245688 - RNA, 19 nt, Homo sapiens
  misc_RNA (1)...(19): siRNA sense strand
agaccauauucgugugcaa

SEQ ID NO: 2245689 - RNA, 19 nt, Homo sapiens
  misc_RNA (1)...(19): siRNA sense strand
gcagaggacaagaggagau

SEQ ID NO: 2245690 - RNA, 19 nt, Homo sapiens
  misc_RNA (1)...(19): siRNA sense strand
augcaaagaauauggccaa

SEQ ID NO: 2245691 - RNA, 19 nt, Homo sapiens
  misc_RNA (1)...(19): siRNA sense strand
ucuucaacauuguggaauu

SEQ ID NO: 2245692 - RNA, 19 nt, Homo sapiens
  misc_RNA (1)...(19): siRNA sense strand
ggggaagauaauugauaaa

SEQ ID NO: 2245693 - RNA, 19 nt, Homo sapiens
  misc_RNA (1)...(19): siRNA sense strand
ucuugaaauccgagcaauu

SEQ ID NO: 2245694 - RNA, 19 nt, Homo sapiens
  misc_RNA (1)...(19): siRNA sense strand
gguacaaagccuacuccaa

SEQ ID NO: 2245695 - RNA, 19 nt, Homo sapiens
  misc_RNA (1)...(19): siRNA sense strand
ggacuauaccagugacagu

SEQ ID NO: 2245696 - RNA, 19 nt, Homo sapiens
  misc_RNA (1)...(19): siRNA sense strand
agaaaagagcucagacauu

SEQ ID NO: 2245697 - RNA, 19 nt, Homo sapiens
  misc_RNA (1)...(19): siRNA sense strand
aaggaaauacagaaccaaa

SEQ ID NO: 2245698 - RNA, 19 nt, Homo sapiens
  misc_RNA (1)...(19): siRNA sense strand
acaugaugcccuugugcaa

SEQ ID NO: 2245699 - RNA, 19 nt, Homo sapiens
  misc_RNA (1)...(19): siRNA sense strand
auucgaugauucaggaaga

SEQ ID NO: 2245700 - RNA, 19 nt, Homo sapiens
  misc_RNA (1)...(19): siRNA sense strand
agaauauggccaaggaugu

SEQ ID NO: 2245701 - RNA, 19 nt, Homo sapiens
  misc_RNA (1)...(19): siRNA sense strand
agaaagcauuuuaggucaa

SEQ ID NO: 2245702 - RNA, 19 nt, Homo sapiens
  misc_RNA (1)...(19): siRNA sense strand
ggcugcaggcauaaggaua

SEQ ID NO: 2245703 - RNA, 19 nt, Homo sapiens
  misc_RNA (1)...(19): siRNA sense strand
uuaaggaaauacagaacca

SEQ ID NO: 2245704 - RNA, 19 nt, Homo sapiens
  misc_RNA (1)...(19): siRNA sense strand
gcggaagggaguauguaca

SEQ ID NO: 2245705 - RNA, 19 nt, Homo sapiens
  misc_RNA (1)...(19): siRNA sense strand
aacaacacccagauggaaa

SEQ ID NO: 2245706 - RNA, 19 nt, Homo sapiens
  misc_RNA (1)...(19): siRNA sense strand
gugagcaagcugugguaca

SEQ ID NO: 2245707 - RNA, 19 nt, Homo sapiens
  misc_RNA (1)...(19): siRNA sense strand
cgcaaguuuguuaaggaaa

SEQ ID NO: 2245708 - RNA, 19 nt, Homo sapiens
  misc_RNA (1)...(19): siRNA sense strand
gguauggguuacugggucu

SEQ ID NO: 2245709 - RNA, 19 nt, Homo sapiens
  misc_RNA (1)...(19): siRNA sense strand
ggauguacaugaugcccuu

SEQ ID NO: 2245710 - RNA, 19 nt, Homo sapiens
  misc_RNA (1)...(19): siRNA sense strand
cagaggacaagaggagaua

SEQ ID NO: 2245711 - RNA, 19 nt, Homo sapiens
  misc_RNA (1)...(19): siRNA sense strand
gauucaggaagaaaggauu

SEQ ID NO: 2245712 - RNA, 19 nt, Homo sapiens
  misc_RNA (1)...(19): siRNA sense strand
ggaucuuaacucaucuaaa

SEQ ID NO: 2245713 - RNA, 19 nt, Homo sapiens
  misc_RNA (1)...(19): siRNA sense strand
uaggucaagcagaggacaa

SEQ ID NO: 2245714 - RNA, 19 nt, Homo sapiens
  misc_RNA (1)...(19): siRNA sense strand
ggagcugugcaguaaacaa

SEQ ID NO: 2245715 - RNA, 19 nt, Homo sapiens
  misc_RNA (1)...(19): siRNA sense strand
aagcugugguacauggauu

SEQ ID NO: 2245716 - RNA, 19 nt, Homo sapiens
  misc_RNA (1)...(19): siRNA sense strand
gcaaaguauguacaagaca

SEQ ID NO: 2245717 - RNA, 19 nt, Homo sapiens
  misc_RNA (1)...(19): siRNA sense strand
gugcaaauaauaagcaaag

SEQ ID NO: 2245718 - RNA, 19 nt, Homo sapiens
  misc_RNA (1)...(19): siRNA sense strand
uguauuagugaauccgaua

SEQ ID NO: 2245719 - RNA, 19 nt, Homo sapiens
  misc_RNA (1)...(19): siRNA sense strand
ucaccugcgguauggguua

SEQ ID NO: 2245720 - RNA, 19 nt, Homo sapiens
  misc_RNA (1)...(19): siRNA sense strand
cagaugacuguguagguuu

SEQ ID NO: 2245721 - RNA, 19 nt, Homo sapiens
  misc_RNA (1)...(19): siRNA sense strand
cagaaagcauuuuagguca

SEQ ID NO: 2245722 - RNA, 19 nt, Homo sapiens
  misc_RNA (1)...(19): siRNA sense strand
ggguccaggaaccggcaua

SEQ ID NO: 2245723 - RNA, 19 nt, Homo sapiens
  misc_RNA (1)...(19): siRNA sense strand
cgaacaucuuccuaaacuu

SEQ ID NO: 2245724 - RNA, 19 nt, Homo sapiens
  misc_RNA (1)...(19): siRNA sense strand
aagacaacauccagcuuca

SEQ ID NO: 2245725 - RNA, 19 nt, Homo sapiens
  misc_RNA (1)...(19): siRNA sense strand
uggccaaggauguacauga

SEQ ID NO: 2245726 - RNA, 19 nt, Homo sapiens
  misc_RNA (1)...(19): siRNA sense strand
gugaagaagaugaggaaga

SEQ ID NO: 2245727 - RNA, 19 nt, Homo sapiens
  misc_RNA (1)...(19): siRNA sense strand
gauuauugaaccagagaaa

SEQ ID NO: 2245728 - RNA, 19 nt, Homo sapiens
  misc_RNA (1)...(19): siRNA sense strand
augaagaagaagaaggaaa

SEQ ID NO: 2245729 - RNA, 19 nt, Homo sapiens
  misc_RNA (1)...(19): siRNA sense strand
gguagaaaauggagcaaau

SEQ ID NO: 2245730 - RNA, 19 nt, Homo sapiens
  misc_RNA (1)...(19): siRNA sense strand
gaaaagaaggagucagaaa

SEQ ID NO: 2245731 - RNA, 19 nt, Homo sapiens
  misc_RNA (1)...(19): siRNA sense strand
aaagagaagaggagaaaga

SEQ ID NO: 2245732 - RNA, 19 nt, Homo sapiens
  misc_RNA (1)...(19): siRNA sense strand
acgacgaccaagagagaaa

SEQ ID NO: 2245733 - RNA, 19 nt, Homo sapiens
  misc_RNA (1)...(19): siRNA sense strand
gagaaagauaguaaaggaa

SEQ ID NO: 2245734 - RNA, 19 nt, Homo sapiens
  misc_RNA (1)...(19): siRNA sense strand
ugaggauaguacugagaaa

SEQ ID NO: 2245735 - RNA, 19 nt, Homo sapiens
  misc_RNA (1)...(19): siRNA sense strand
gauaguacugagaaagaaa

SEQ ID NO: 2245736 - RNA, 19 nt, Homo sapiens
  misc_RNA (1)...(19): siRNA sense strand
aaauagucuuguaggcaua

SEQ ID NO: 2245737 - RNA, 19 nt, Homo sapiens
  misc_RNA (1)...(19): siRNA sense strand
cugaaacagauaagacaaa

SEQ ID NO: 2245738 - RNA, 19 nt, Homo sapiens
  misc_RNA (1)...(19): siRNA sense strand
aagaaaagguugaugaaga

SEQ ID NO: 2245739 - RNA, 19 nt, Homo sapiens
  misc_RNA (1)...(19): siRNA sense strand
ggauccaauaagaaagaaa

SEQ ID NO: 2245740 - RNA, 19 nt, Homo sapiens
  misc_RNA (1)...(19): siRNA sense strand
ugaacaaauucuagcugaa

SEQ ID NO: 2245741 - RNA, 19 nt, Homo sapiens
  misc_RNA (1)...(19): siRNA sense strand
agaaaagguugaugaagaa

SEQ ID NO: 2245742 - RNA, 19 nt, Homo sapiens
  misc_RNA (1)...(19): siRNA sense strand
aaagagggucagaaagaaa

SEQ ID NO: 2245743 - RNA, 19 nt, Homo sapiens
  misc_RNA (1)...(19): siRNA sense strand
caacagugaaggagauaca

SEQ ID NO: 2245744 - RNA, 19 nt, Homo sapiens
  misc_RNA (1)...(19): siRNA sense strand
agucugaaucccaaagaaa

SEQ ID NO: 2245745 - RNA, 19 nt, Homo sapiens
  misc_RNA (1)...(19): siRNA sense strand
ggguaaagaagaagcaugu

SEQ ID NO: 2245746 - RNA, 19 nt, Homo sapiens
  misc_RNA (1)...(19): siRNA sense strand
guggacaaucugugugaua

SEQ ID NO: 2245747 - RNA, 19 nt, Homo sapiens
  misc_RNA (1)...(19): siRNA sense strand
gguugaugaagaagaagaa

SEQ ID NO: 2245748 - RNA, 19 nt, Homo sapiens
  misc_RNA (1)...(19): siRNA sense strand
gagaaagaaaacagagauu

SEQ ID NO: 2245749 - RNA, 19 nt, Homo sapiens
  misc_RNA (1)...(19): siRNA sense strand
acacaaagcaguaccucaa

SEQ ID NO: 2245750 - RNA, 19 nt, Homo sapiens
  misc_RNA (1)...(19): siRNA sense strand
gcuaaaggcuauacggaag

SEQ ID NO: 2245751 - RNA, 19 nt, Homo sapiens
  misc_RNA (1)...(19): siRNA sense strand
ucuucaaguuugcgaacaa

SEQ ID NO: 2245752 - RNA, 19 nt, Homo sapiens
  misc_RNA (1)...(19): siRNA sense strand
gcucuagaaagaagaauau

SEQ ID NO: 2245753 - RNA, 19 nt, Homo sapiens
  misc_RNA (1)...(19): siRNA sense strand
aaaugaaguuaaucggcaa

SEQ ID NO: 2245754 - RNA, 19 nt, Homo sapiens
  misc_RNA (1)...(19): siRNA sense strand
aggagaagauaaaucacaa

SEQ ID NO: 2245755 - RNA, 19 nt, Homo sapiens
  misc_RNA (1)...(19): siRNA sense strand
ugauaaugaaggcuggaua

SEQ ID NO: 2245756 - RNA, 19 nt, Homo sapiens
  misc_RNA (1)...(19): siRNA sense strand
guucauauacaaggagaaa

SEQ ID NO: 2245757 - RNA, 19 nt, Homo sapiens
  misc_RNA (1)...(19): siRNA sense strand
gauagaucacuguuggaaa

SEQ ID NO: 2245758 - RNA, 19 nt, Homo sapiens
  misc_RNA (1)...(19): siRNA sense strand
acgcgaagcagaagcggaa

SEQ ID NO: 2245759 - RNA, 19 nt, Homo sapiens
  misc_RNA (1)...(19): siRNA sense strand
gcugaaacagauaagacaa

SEQ ID NO: 2245760 - RNA, 19 nt, Homo sapiens
  misc_RNA (1)...(19): siRNA sense strand
aaagaaacucagacggauu

SEQ ID NO: 2245761 - RNA, 19 nt, Homo sapiens
  misc_RNA (1)...(19): siRNA sense strand
aggaggaggcaauggaaga

SEQ ID NO: 2245762 - RNA, 19 nt, Homo sapiens
  misc_RNA (1)...(19): siRNA sense strand
ugagaaaacaauaggaaga

SEQ ID NO: 2245763 - RNA, 19 nt, Homo sapiens
  misc_RNA (1)...(19): siRNA sense strand
aaugaaagagagggagaaa

SEQ ID NO: 2245764 - RNA, 19 nt, Homo sapiens
  misc_RNA (1)...(19): siRNA sense strand
ccaauaagaaagaaacuca

SEQ ID NO: 2245765 - RNA, 19 nt, Homo sapiens
  misc_RNA (1)...(19): siRNA sense strand
auauagaagcagcucgaaa

SEQ ID NO: 2245766 - RNA, 19 nt, Homo sapiens
  misc_RNA (1)...(19): siRNA sense strand
augaaaagcugaaggcaca

SEQ ID NO: 2245767 - RNA, 19 nt, Homo sapiens
  misc_RNA (1)...(19): siRNA sense strand
ucccaaagaagaagagaga

SEQ ID NO: 2245768 - RNA, 19 nt, Homo sapiens
  misc_RNA (1)...(19): siRNA sense strand
uggugaaguuucugguaga

SEQ ID NO: 2245769 - RNA, 19 nt, Homo sapiens
  misc_RNA (1)...(19): siRNA sense strand
gcucuggaucauacaguua

SEQ ID NO: 2245770 - RNA, 19 nt, Homo sapiens
  misc_RNA (1)...(19): siRNA sense strand
ugucaacagugaaggagau

SEQ ID NO: 2245771 - RNA, 19 nt, Homo sapiens
  misc_RNA (1)...(19): siRNA sense strand
gccagaagaccaaggugaa

SEQ ID NO: 2245772 - RNA, 19 nt, Homo sapiens
  misc_RNA (1)...(19): siRNA sense strand
agguuaggacuuagaaaga

SEQ ID NO: 2245773 - RNA, 19 nt, Homo sapiens
  misc_RNA (1)...(19): siRNA sense strand
cgacgacgaccaagagaga

SEQ ID NO: 2245774 - RNA, 19 nt, Homo sapiens
  misc_RNA (1)...(19): siRNA sense strand
agaaagaaacucagacgga

SEQ ID NO: 2245775 - RNA, 19 nt, Homo sapiens
  misc_RNA (1)...(19): siRNA sense strand
ugaucagaguuauaagcaa

SEQ ID NO: 2245776 - RNA, 19 nt, Homo sapiens
  misc_RNA (1)...(19): siRNA sense strand
auauggagauggucaacaa

SEQ ID NO: 2245777 - RNA, 19 nt, Homo sapiens
  misc_RNA (1)...(19): siRNA sense strand
guauugaaucucuggaaca

SEQ ID NO: 2245778 - RNA, 19 nt, Homo sapiens
  misc_RNA (1)...(19): siRNA sense strand
uagugaagaagaugaggaa

SEQ ID NO: 2245779 - RNA, 19 nt, Homo sapiens
  misc_RNA (1)...(19): siRNA sense strand
aggauaguacugagaaaga

SEQ ID NO: 2245780 - RNA, 19 nt, Homo sapiens
  misc_RNA (1)...(19): siRNA sense strand
caaauagucuuguaggcau

SEQ ID NO: 2245781 - RNA, 19 nt, Homo sapiens
  misc_RNA (1)...(19): siRNA sense strand
gugauauggagauggucaa

SEQ ID NO: 2245782 - RNA, 19 nt, Homo sapiens
  misc_RNA (1)...(19): siRNA sense strand
aagaagaaggaaagaagga

SEQ ID NO: 2245783 - RNA, 19 nt, Homo sapiens
  misc_RNA (1)...(19): siRNA sense strand
acaucaacaccaacaguua

SEQ ID NO: 2245784 - RNA, 19 nt, Homo sapiens
  misc_RNA (1)...(19): siRNA sense strand
aaauggaagaagagcucaa

SEQ ID NO: 2245785 - RNA, 19 nt, Homo sapiens
  misc_RNA (1)...(19): siRNA sense strand
gaaaggaagaagaacggau

SEQ ID NO: 2245786 - RNA, 19 nt, Homo sapiens
  misc_RNA (1)...(19): siRNA sense strand
gggaaagggaugaagaaaa

SEQ ID NO: 2245787 - RNA, 19 nt, Homo sapiens
  misc_RNA (1)...(19): siRNA sense strand
guugauaacagaagagaau

SEQ ID NO: 2245788 - RNA, 19 nt, Homo sapiens
  misc_RNA (1)...(19): siRNA sense strand
ccauagaagaugaaguauu

SEQ ID NO: 2245789 - RNA, 19 nt, Homo sapiens
  misc_RNA (1)...(19): siRNA sense strand
acaugggauuugagugaaa

SEQ ID NO: 2245790 - RNA, 19 nt, Homo sapiens
  misc_RNA (1)...(19): siRNA sense strand
gcagaaaagcuaagaucaa

SEQ ID NO: 2245791 - RNA, 19 nt, Homo sapiens
  misc_RNA (1)...(19): siRNA sense strand
aagaugaaguauuggaaca

SEQ ID NO: 2245792 - RNA, 19 nt, Homo sapiens
  misc_RNA (1)...(19): siRNA sense strand
augcaaaucagcaagaaua

SEQ ID NO: 2245793 - RNA, 19 nt, Homo sapiens
  misc_RNA (1)...(19): siRNA sense strand
uguuguugauacaggaaua

SEQ ID NO: 2245794 - RNA, 19 nt, Homo sapiens
  misc_RNA (1)...(19): siRNA sense strand
ugacacagaaucagagcaa

SEQ ID NO: 2245795 - RNA, 19 nt, Homo sapiens
  misc_RNA (1)...(19): siRNA sense strand
augacaaacuucaggauga

SEQ ID NO: 2245796 - RNA, 19 nt, Homo sapiens
  misc_RNA (1)...(19): siRNA sense strand
ugucaugguaucagugaaa

SEQ ID NO: 2245797 - RNA, 19 nt, Homo sapiens
  misc_RNA (1)...(19): siRNA sense strand
acaaaucuucaaagggaaa

SEQ ID NO: 2245798 - RNA, 19 nt, Homo sapiens
  misc_RNA (1)...(19): siRNA sense strand
agugaaaggccaaaagaaa

SEQ ID NO: 2245799 - RNA, 19 nt, Homo sapiens
  misc_RNA (1)...(19): siRNA sense strand
ggauaugcuccaaaggcaa

SEQ ID NO: 2245800 - RNA, 19 nt, Homo sapiens
  misc_RNA (1)...(19): siRNA sense strand
ccaaggauggauauagaaa

SEQ ID NO: 2245801 - RNA, 19 nt, Homo sapiens
  misc_RNA (1)...(19): siRNA sense strand
aaggauggauauagaaaca

SEQ ID NO: 2245802 - RNA, 19 nt, Homo sapiens
  misc_RNA (1)...(19): siRNA sense strand
ucaucaugcucgaaagaau

SEQ ID NO: 2245803 - RNA, 19 nt, Homo sapiens
  misc_RNA (1)...(19): siRNA sense strand
ggcaggaaauggagguaca

SEQ ID NO: 2245804 - RNA, 19 nt, Homo sapiens
  misc_RNA (1)...(19): siRNA sense strand
ugauaacagaagagaauga

SEQ ID NO: 2245805 - RNA, 19 nt, Homo sapiens
  misc_RNA (1)...(19): siRNA sense strand
aaacaaaucuucaaaggga

SEQ ID NO: 2245806 - RNA, 19 nt, Homo sapiens
  misc_RNA (1)...(19): siRNA sense strand
gaacaguuauucaaggaca

SEQ ID NO: 2245807 - RNA, 19 nt, Homo sapiens
  misc_RNA (1)...(19): siRNA sense strand
auacaugggauuugaguga

SEQ ID NO: 2245808 - RNA, 19 nt, Homo sapiens
  misc_RNA (1)...(19): siRNA sense strand
agaccaacuccaucagaaa

SEQ ID NO: 2245809 - RNA, 19 nt, Homo sapiens
  misc_RNA (1)...(19): siRNA sense strand
gguugauaacagaagagaa

SEQ ID NO: 2245810 - RNA, 19 nt, Homo sapiens
  misc_RNA (1)...(19): siRNA sense strand
caggacggcaggaaagaaa

SEQ ID NO: 2245811 - RNA, 19 nt, Homo sapiens
  misc_RNA (1)...(19): siRNA sense strand
cggcaggaggagaaccaua

SEQ ID NO: 2245812 - RNA, 19 nt, Homo sapiens
  misc_RNA (1)...(19): siRNA sense strand
aaacaauuggacagaagaa

SEQ ID NO: 2245813 - RNA, 19 nt, Homo sapiens
  misc_RNA (1)...(19): siRNA sense strand
acacaaaaccagaguuaga

SEQ ID NO: 2245814 - RNA, 19 nt, Homo sapiens
  misc_RNA (1)...(19): siRNA sense strand
aguacaggauuaaagacaa

SEQ ID NO: 2245815 - RNA, 19 nt, Homo sapiens
  misc_RNA (1)...(19): siRNA sense strand
agagaaugaagaagaacau

SEQ ID NO: 2245816 - RNA, 19 nt, Homo sapiens
  misc_RNA (1)...(19): siRNA sense strand
caguacaggauuaaagaca

SEQ ID NO: 2245817 - RNA, 19 nt, Homo sapiens
  misc_RNA (1)...(19): siRNA sense strand
aggaaauggagguacaaaa

SEQ ID NO: 2245818 - RNA, 19 nt, Homo sapiens
  misc_RNA (1)...(19): siRNA sense strand
guuuagaugucucugggaa

SEQ ID NO: 2245819 - RNA, 19 nt, Homo sapiens
  misc_RNA (1)...(19): siRNA sense strand
uuuagaugucucugggaaa

SEQ ID NO: 2245820 - RNA, 19 nt, Homo sapiens
  misc_RNA (1)...(19): siRNA sense strand
uggaguguuuggaaguaaa

SEQ ID NO: 2245821 - RNA, 19 nt, Homo sapiens
  misc_RNA (1)...(19): siRNA sense strand
ggauuugagugaaaggcca

SEQ ID NO: 2245822 - RNA, 19 nt, Homo sapiens
  misc_RNA (1)...(19): siRNA sense strand
agggaaagggaugaagaaa

SEQ ID NO: 2245823 - RNA, 19 nt, Homo sapiens
  misc_RNA (1)...(19): siRNA sense strand
gugaaaggccaaaagaaau

SEQ ID NO: 2245824 - RNA, 19 nt, Homo sapiens
  misc_RNA (1)...(19): siRNA sense strand
cagcauaagaaauugaguu

SEQ ID NO: 2245825 - RNA, 19 nt, Homo sapiens
  misc_RNA (1)...(19): siRNA sense strand
gacaacaacuccaggacca

SEQ ID NO: 2245826 - RNA, 19 nt, Homo sapiens
  misc_RNA (1)...(19): siRNA sense strand
ggaaauggagguacaaaau

SEQ ID NO: 2245827 - RNA, 19 nt, Homo sapiens
  misc_RNA (1)...(19): siRNA sense strand
auugcaacuuggaggauuu

SEQ ID NO: 2245828 - RNA, 19 nt, Homo sapiens
  misc_RNA (1)...(19): siRNA sense strand
gccaaacagcauaagaaau

SEQ ID NO: 2245829 - RNA, 19 nt, Homo sapiens
  misc_RNA (1)...(19): siRNA sense strand
guacaggauuaaagacaac

SEQ ID NO: 2245830 - RNA, 19 nt, Homo sapiens
  misc_RNA (1)...(19): siRNA sense strand
gaggagaaccauacagacu

SEQ ID NO: 2245831 - RNA, 19 nt, Homo sapiens
  misc_RNA (1)...(19): siRNA sense strand
aagagaaugaagaagaaca

SEQ ID NO: 2245832 - RNA, 19 nt, Homo sapiens
  misc_RNA (1)...(19): siRNA sense strand
uaacaaacucacagaccuu

SEQ ID NO: 2245833 - RNA, 19 nt, Homo sapiens
  misc_RNA (1)...(19): siRNA sense strand
gcuccaaaggcaaggucuu

SEQ ID NO: 2245834 - RNA, 19 nt, Homo sapiens
  misc_RNA (1)...(19): siRNA sense strand
gauuugagugaaaggccaa

SEQ ID NO: 2245835 - RNA, 19 nt, Homo sapiens
  misc_RNA (1)...(19): siRNA sense strand
caguaaaucucaugcugca

SEQ ID NO: 2245836 - RNA, 19 nt, Homo sapiens
  misc_RNA (1)...(19): siRNA sense strand
aguuauucaaggacacaaa

SEQ ID NO: 2245837 - RNA, 19 nt, Homo sapiens
  misc_RNA (1)...(19): siRNA sense strand
ggaagaugucaauguuaga

SEQ ID NO: 2245838 - RNA, 19 nt, Homo sapiens
  misc_RNA (1)...(19): siRNA sense strand
ugccaaacagcauaagaaa

SEQ ID NO: 2245839 - RNA, 19 nt, Homo sapiens
  misc_RNA (1)...(19): siRNA sense strand
ugaugaagcaguaccagaa

SEQ ID NO: 2245840 - RNA, 19 nt, Homo sapiens
  misc_RNA (1)...(19): siRNA sense strand
ccagaaaguagcaaaauau

SEQ ID NO: 2245841 - RNA, 19 nt, Homo sapiens
  misc_RNA (1)...(19): siRNA sense strand
guaccagaaaguagcaaaa

SEQ ID NO: 2245842 - RNA, 19 nt, Homo sapiens
  misc_RNA (1)...(19): siRNA sense strand
gcgugucaguugaugaaaa

SEQ ID NO: 2245843 - RNA, 19 nt, Homo sapiens
  misc_RNA (1)...(19): siRNA sense strand
aagggaaagggaugaagaa

SEQ ID NO: 2245844 - RNA, 19 nt, Homo sapiens
  misc_RNA (1)...(19): siRNA sense strand
gagucaaacagaugaaauc

SEQ ID NO: 2245845 - RNA, 19 nt, Homo sapiens
  misc_RNA (1)...(19): siRNA sense strand
gcuaagaugagaaucccaa

SEQ ID NO: 2245846 - RNA, 19 nt, Homo sapiens
  misc_RNA (1)...(19): siRNA sense strand
aggaagaacaagauagaaa

SEQ ID NO: 2245847 - RNA, 19 nt, Homo sapiens
  misc_RNA (1)...(19): siRNA sense strand
aagaguaaacagagaagaa

SEQ ID NO: 2245848 - RNA, 19 nt, Homo sapiens
  misc_RNA (1)...(19): siRNA sense strand
gaagcgagcuggauggcaa

SEQ ID NO: 2245849 - RNA, 19 nt, Homo sapiens
  misc_RNA (1)...(19): siRNA sense strand
gaacaagauagaaagggua

SEQ ID NO: 2245850 - RNA, 19 nt, Homo sapiens
  misc_RNA (1)...(19): siRNA sense strand
ccuccagaaauuugggaaa

SEQ ID NO: 2245851 - RNA, 19 nt, Homo sapiens
  misc_RNA (1)...(19): siRNA sense strand
gaguaaacagagaagaaaa

SEQ ID NO: 2245852 - RNA, 19 nt, Homo sapiens
  misc_RNA (1)...(19): siRNA sense strand
ucaggauagcuuugggaaa

SEQ ID NO: 2245853 - RNA, 19 nt, Homo sapiens
  misc_RNA (1)...(19): siRNA sense strand
acuacaugguccugagaau

SEQ ID NO: 2245854 - RNA, 19 nt, Homo sapiens
  misc_RNA (1)...(19): siRNA sense strand
uggcaaggccugugcgaca

SEQ ID NO: 2245855 - RNA, 19 nt, Homo sapiens
  misc_RNA (1)...(19): siRNA sense strand
cauuugaagcugaaggaca

SEQ ID NO: 2245856 - RNA, 19 nt, Homo sapiens
  misc_RNA (1)...(19): siRNA sense strand
uggaauauggugaggaagu

SEQ ID NO: 2245857 - RNA, 19 nt, Homo sapiens
  misc_RNA (1)...(19): siRNA sense strand
caugaaagaaauaaggcuu

SEQ ID NO: 2245858 - RNA, 19 nt, Homo sapiens
  misc_RNA (1)...(19): siRNA sense strand
gcauaacacaccaagaaaa

SEQ ID NO: 2245859 - RNA, 19 nt, Homo sapiens
  misc_RNA (1)...(19): siRNA sense strand
gggaaaugaagcaagcaca

SEQ ID NO: 2245860 - RNA, 19 nt, Homo sapiens
  misc_RNA (1)...(19): siRNA sense strand
gaaaagugaaauugggaga

SEQ ID NO: 2245861 - RNA, 19 nt, Homo sapiens
  misc_RNA (1)...(19): siRNA sense strand
cugaaggacacuuguauau

SEQ ID NO: 2245862 - RNA, 19 nt, Homo sapiens
  misc_RNA (1)...(19): siRNA sense strand
ggacaguguugauggaggu

SEQ ID NO: 2245863 - RNA, 19 nt, Homo sapiens
  misc_RNA (1)...(19): siRNA sense strand
cggacuuugaggaggaaga

SEQ ID NO: 2245864 - RNA, 19 nt, Homo sapiens
  misc_RNA (1)...(19): siRNA sense strand
auuaaacagcagaaaggaa

SEQ ID NO: 2245865 - RNA, 19 nt, Homo sapiens
  misc_RNA (1)...(19): siRNA sense strand
agaggaagaacaagauaga

SEQ ID NO: 2245866 - RNA, 19 nt, Homo sapiens
  misc_RNA (1)...(19): siRNA sense strand
guuuaacagcagaggacga

SEQ ID NO: 2245867 - RNA, 19 nt, Homo sapiens
  misc_RNA (1)...(19): siRNA sense strand
acacggacuuugaggagga

SEQ ID NO: 2245868 - RNA, 19 nt, Homo sapiens
  misc_RNA (1)...(19): siRNA sense strand
acaagaaacgugugcuaca

SEQ ID NO: 2245869 - RNA, 19 nt, Homo sapiens
  misc_RNA (1)...(19): siRNA sense strand
caggcaaauaguuggaaaa

SEQ ID NO: 2245870 - RNA, 19 nt, Homo sapiens
  misc_RNA (1)...(19): siRNA sense strand
acagcagaaaggaaaguua

SEQ ID NO: 2245871 - RNA, 19 nt, Homo sapiens
  misc_RNA (1)...(19): siRNA sense strand
agugaaauugggagacuuu

SEQ ID NO: 2245872 - RNA, 19 nt, Homo sapiens
  misc_RNA (1)...(19): siRNA sense strand
agugcaagaggaagaacaa

SEQ ID NO: 2245873 - RNA, 19 nt, Homo sapiens
  misc_RNA (1)...(19): siRNA sense strand
agaacaagauagaaagggu

SEQ ID NO: 2245874 - RNA, 19 nt, Homo sapiens
  misc_RNA (1)...(19): siRNA sense strand
aguugaaagugcauugaga

SEQ ID NO: 2245875 - RNA, 19 nt, Homo sapiens
  misc_RNA (1)...(19): siRNA sense strand
acacagaauucuaggaagg

SEQ ID NO: 2245876 - RNA, 19 nt, Homo sapiens
  misc_RNA (1)...(19): siRNA sense strand
ucagaauggaaaagugaaa

SEQ ID NO: 2245877 - RNA, 19 nt, Homo sapiens
  misc_RNA (1)...(19): siRNA sense strand
cauagacgacagugggaga

SEQ ID NO: 2245878 - RNA, 19 nt, Homo sapiens
  misc_RNA (1)...(19): siRNA sense strand
aagcaguggcucaaagaga

SEQ ID NO: 2245879 - RNA, 19 nt, Homo sapiens
  misc_RNA (1)...(19): siRNA sense strand
guugaaagugcauugagaa

SEQ ID NO: 2245880 - RNA, 19 nt, Homo sapiens
  misc_RNA (1)...(19): siRNA sense strand
gaggaaagccaguucacca

SEQ ID NO: 2245881 - RNA, 19 nt, Homo sapiens
  misc_RNA (1)...(19): siRNA sense strand
agugcauugagaagaguaa

SEQ ID NO: 2245882 - RNA, 19 nt, Homo sapiens
  misc_RNA (1)...(19): siRNA sense strand
ggacgauagaggugguucu

SEQ ID NO: 2245883 - RNA, 19 nt, Homo sapiens
  misc_RNA (1)...(19): siRNA sense strand
acucguaagcaguggcuca

SEQ ID NO: 2245884 - RNA, 19 nt, Homo sapiens
  misc_RNA (1)...(19): siRNA sense strand
auguuugccaugaaagaaa

SEQ ID NO: 2245885 - RNA, 19 nt, Homo sapiens
  misc_RNA (1)...(19): siRNA sense strand
uugaggaggaagaugacaa

SEQ ID NO: 2245886 - RNA, 19 nt, Homo sapiens
  misc_RNA (1)...(19): siRNA sense strand
agaguaaacagagaagaaa

SEQ ID NO: 2245887 - RNA, 19 nt, Homo sapiens
  misc_RNA (1)...(19): siRNA sense strand
acuuugaggaggaagauga

SEQ ID NO: 2245888 - RNA, 19 nt, Homo sapiens
  misc_RNA (1)...(19): siRNA sense strand
aaaacaaaccccagcagaa

SEQ ID NO: 2245889 - RNA, 19 nt, Homo sapiens
  misc_RNA (1)...(19): siRNA sense strand
agccauacugauuuggaaa

SEQ ID NO: 2245890 - RNA, 19 nt, Homo sapiens
  misc_RNA (1)...(19): siRNA sense strand
ugcaagaggaagaacaaga

SEQ ID NO: 2245891 - RNA, 19 nt, Homo sapiens
  misc_RNA (1)...(19): siRNA sense strand
auacugauuuggaaagcau

SEQ ID NO: 2245892 - RNA, 19 nt, Homo sapiens
  misc_RNA (1)...(19): siRNA sense strand
aggaaagccaguucaccaa

SEQ ID NO: 2245893 - RNA, 19 nt, Homo sapiens
  misc_RNA (1)...(19): siRNA sense strand
aagaaucauuugaagcuga

SEQ ID NO: 2245894 - RNA, 19 nt, Homo sapiens
  misc_RNA (1)...(19): siRNA sense strand
gcagauguuuaaaaggaau

SEQ ID NO: 2245895 - RNA, 19 nt, Homo sapiens
  misc_RNA (1)...(19): siRNA sense strand
agagauaucaaguccaaga

SEQ ID NO: 2245896 - RNA, 19 nt, Homo sapiens
  misc_RNA (1)...(19): siRNA sense strand
guugaacauccuuaagaau

SEQ ID NO: 2245897 - RNA, 19 nt, Homo sapiens
  misc_RNA (1)...(19): siRNA sense strand
aguuauuuccugaagacau

SEQ ID NO: 2245898 - RNA, 19 nt, Homo sapiens
  misc_RNA (1)...(19): siRNA sense strand
uauuaugugccuccagaaa

SEQ ID NO: 2245899 - RNA, 19 nt, Homo sapiens
  misc_RNA (1)...(19): siRNA sense strand
agauagaaaggguagccau

SEQ ID NO: 2245900 - RNA, 19 nt, Homo sapiens
  misc_RNA (1)...(19): siRNA sense strand
acugauuuggaaagcauua

SEQ ID NO: 2245901 - RNA, 19 nt, Homo sapiens
  misc_RNA (1)...(19): siRNA sense strand
agauguuugccaugaaaga

SEQ ID NO: 2245902 - RNA, 19 nt, Homo sapiens
  misc_RNA (1)...(19): siRNA sense strand
auauagaccagguucagaa

SEQ ID NO: 2245903 - RNA, 19 nt, Homo sapiens
  misc_RNA (1)...(19): siRNA sense strand
aggaagaacaagauagaaa

SEQ ID NO: 2245904 - RNA, 19 nt, Homo sapiens
  misc_RNA (1)...(19): siRNA sense strand
aagaguaaacagagaagaa

SEQ ID NO: 2245905 - RNA, 19 nt, Homo sapiens
  misc_RNA (1)...(19): siRNA sense strand
gaagcgagcuggauggcaa

SEQ ID NO: 2245906 - RNA, 19 nt, Homo sapiens
  misc_RNA (1)...(19): siRNA sense strand
gaacaagauagaaagggua

SEQ ID NO: 2245907 - RNA, 19 nt, Homo sapiens
  misc_RNA (1)...(19): siRNA sense strand
ccuccagaaauuugggaaa

SEQ ID NO: 2245908 - RNA, 19 nt, Homo sapiens
  misc_RNA (1)...(19): siRNA sense strand
gaguaaacagagaagaaaa

SEQ ID NO: 2245909 - RNA, 19 nt, Homo sapiens
  misc_RNA (1)...(19): siRNA sense strand
ucaggauagcuuugggaaa

SEQ ID NO: 2245910 - RNA, 19 nt, Homo sapiens
  misc_RNA (1)...(19): siRNA sense strand
acuacaugguccugagaau

SEQ ID NO: 2245911 - RNA, 19 nt, Homo sapiens
  misc_RNA (1)...(19): siRNA sense strand
uggcaaggccugugcgaca

SEQ ID NO: 2245912 - RNA, 19 nt, Homo sapiens
  misc_RNA (1)...(19): siRNA sense strand
cauuugaagcugaaggaca

SEQ ID NO: 2245913 - RNA, 19 nt, Homo sapiens
  misc_RNA (1)...(19): siRNA sense strand
uggaauauggugaggaagu

SEQ ID NO: 2245914 - RNA, 19 nt, Homo sapiens
  misc_RNA (1)...(19): siRNA sense strand
caugaaagaaauaaggcuu

SEQ ID NO: 2245915 - RNA, 19 nt, Homo sapiens
  misc_RNA (1)...(19): siRNA sense strand
gcauaacacaccaagaaaa

SEQ ID NO: 2245916 - RNA, 19 nt, Homo sapiens
  misc_RNA (1)...(19): siRNA sense strand
gggaaaugaagcaagcaca

SEQ ID NO: 2245917 - RNA, 19 nt, Homo sapiens
  misc_RNA (1)...(19): siRNA sense strand
gaaaagugaaauugggaga

SEQ ID NO: 2245918 - RNA, 19 nt, Homo sapiens
  misc_RNA (1)...(19): siRNA sense strand
cugaaggacacuuguauau

SEQ ID NO: 2245919 - RNA, 19 nt, Homo sapiens
  misc_RNA (1)...(19): siRNA sense strand
ggacaguguugauggaggu

SEQ ID NO: 2245920 - RNA, 19 nt, Homo sapiens
  misc_RNA (1)...(19): siRNA sense strand
cggacuuugaggaggaaga

SEQ ID NO: 2245921 - RNA, 19 nt, Homo sapiens
  misc_RNA (1)...(19): siRNA sense strand
auuaaacagcagaaaggaa

SEQ ID NO: 2245922 - RNA, 19 nt, Homo sapiens
  misc_RNA (1)...(19): siRNA sense strand
agaggaagaacaagauaga

SEQ ID NO: 2245923 - RNA, 19 nt, Homo sapiens
  misc_RNA (1)...(19): siRNA sense strand
guuuaacagcagaggacga

SEQ ID NO: 2245924 - RNA, 19 nt, Homo sapiens
  misc_RNA (1)...(19): siRNA sense strand
acacggacuuugaggagga

SEQ ID NO: 2245925 - RNA, 19 nt, Homo sapiens
  misc_RNA (1)...(19): siRNA sense strand
acaagaaacgugugcuaca

SEQ ID NO: 2245926 - RNA, 19 nt, Homo sapiens
  misc_RNA (1)...(19): siRNA sense strand
caggcaaauaguuggaaaa

SEQ ID NO: 2245927 - RNA, 19 nt, Homo sapiens
  misc_RNA (1)...(19): siRNA sense strand
acagcagaaaggaaaguua

SEQ ID NO: 2245928 - RNA, 19 nt, Homo sapiens
  misc_RNA (1)...(19): siRNA sense strand
agugaaauugggagacuuu

SEQ ID NO: 2245929 - RNA, 19 nt, Homo sapiens
  misc_RNA (1)...(19): siRNA sense strand
agugcaagaggaagaacaa

SEQ ID NO: 2245930 - RNA, 19 nt, Homo sapiens
  misc_RNA (1)...(19): siRNA sense strand
agaacaagauagaaagggu

SEQ ID NO: 2245931 - RNA, 19 nt, Homo sapiens
  misc_RNA (1)...(19): siRNA sense strand
aguugaaagugcauugaga

SEQ ID NO: 2245932 - RNA, 19 nt, Homo sapiens
  misc_RNA (1)...(19): siRNA sense strand
acacagaauucuaggaagg

SEQ ID NO: 2245933 - RNA, 19 nt, Homo sapiens
  misc_RNA (1)...(19): siRNA sense strand
ucagaauggaaaagugaaa

SEQ ID NO: 2245934 - RNA, 19 nt, Homo sapiens
  misc_RNA (1)...(19): siRNA sense strand
cauagacgacagugggaga

SEQ ID NO: 2245935 - RNA, 19 nt, Homo sapiens
  misc_RNA (1)...(19): siRNA sense strand
aagcaguggcucaaagaga

SEQ ID NO: 2245936 - RNA, 19 nt, Homo sapiens
  misc_RNA (1)...(19): siRNA sense strand
guugaaagugcauugagaa

SEQ ID NO: 2245937 - RNA, 19 nt, Homo sapiens
  misc_RNA (1)...(19): siRNA sense strand
gaggaaagccaguucacca

SEQ ID NO: 2245938 - RNA, 19 nt, Homo sapiens
  misc_RNA (1)...(19): siRNA sense strand
agugcauugagaagaguaa

SEQ ID NO: 2245939 - RNA, 19 nt, Homo sapiens
  misc_RNA (1)...(19): siRNA sense strand
ggacgauagaggugguucu

SEQ ID NO: 2245940 - RNA, 19 nt, Homo sapiens
  misc_RNA (1)...(19): siRNA sense strand
acucguaagcaguggcuca

SEQ ID NO: 2245941 - RNA, 19 nt, Homo sapiens
  misc_RNA (1)...(19): siRNA sense strand
auguuugccaugaaagaaa

SEQ ID NO: 2245942 - RNA, 19 nt, Homo sapiens
  misc_RNA (1)...(19): siRNA sense strand
uugaggaggaagaugacaa

SEQ ID NO: 2245943 - RNA, 19 nt, Homo sapiens
  misc_RNA (1)...(19): siRNA sense strand
agaguaaacagagaagaaa

SEQ ID NO: 2245944 - RNA, 19 nt, Homo sapiens
  misc_RNA (1)...(19): siRNA sense strand
acuuugaggaggaagauga

SEQ ID NO: 2245945 - RNA, 19 nt, Homo sapiens
  misc_RNA (1)...(19): siRNA sense strand
aaaacaaaccccagcagaa

SEQ ID NO: 2245946 - RNA, 19 nt, Homo sapiens
  misc_RNA (1)...(19): siRNA sense strand
agccauacugauuuggaaa

SEQ ID NO: 2245947 - RNA, 19 nt, Homo sapiens
  misc_RNA (1)...(19): siRNA sense strand
ugcaagaggaagaacaaga

SEQ ID NO: 2245948 - RNA, 19 nt, Homo sapiens
  misc_RNA (1)...(19): siRNA sense strand
auacugauuuggaaagcau

SEQ ID NO: 2245949 - RNA, 19 nt, Homo sapiens
  misc_RNA (1)...(19): siRNA sense strand
aggaaagccaguucaccaa

SEQ ID NO: 2245950 - RNA, 19 nt, Homo sapiens
  misc_RNA (1)...(19): siRNA sense strand
aagaaucauuugaagcuga

SEQ ID NO: 2245951 - RNA, 19 nt, Homo sapiens
  misc_RNA (1)...(19): siRNA sense strand
gcagauguuuaaaaggaau

SEQ ID NO: 2245952 - RNA, 19 nt, Homo sapiens
  misc_RNA (1)...(19): siRNA sense strand
agagauaucaaguccaaga

SEQ ID NO: 2245953 - RNA, 19 nt, Homo sapiens
  misc_RNA (1)...(19): siRNA sense strand
guugaacauccuuaagaau

SEQ ID NO: 2245954 - RNA, 19 nt, Homo sapiens
  misc_RNA (1)...(19): siRNA sense strand
aguuauuuccugaagacau

SEQ ID NO: 2245955 - RNA, 19 nt, Homo sapiens
  misc_RNA (1)...(19): siRNA sense strand
uauuaugugccuccagaaa

SEQ ID NO: 2245956 - RNA, 19 nt, Homo sapiens
  misc_RNA (1)...(19): siRNA sense strand
agauagaaaggguagccau

SEQ ID NO: 2245957 - RNA, 19 nt, Homo sapiens
  misc_RNA (1)...(19): siRNA sense strand
acugauuuggaaagcauua

SEQ ID NO: 2245958 - RNA, 19 nt, Homo sapiens
  misc_RNA (1)...(19): siRNA sense strand
agauguuugccaugaaaga

SEQ ID NO: 2245959 - RNA, 19 nt, Homo sapiens
  misc_RNA (1)...(19): siRNA sense strand
auauagaccagguucagaa

SEQ ID NO: 2245960 - RNA, 19 nt, Homo sapiens
  misc_RNA (1)...(19): siRNA sense strand
gaacaagaccucauagcca

SEQ ID NO: 2245961 - RNA, 19 nt, Homo sapiens
  misc_RNA (1)...(19): siRNA sense strand
gcuaccagcccgagcacau

SEQ ID NO: 2245962 - RNA, 19 nt, Homo sapiens
  misc_RNA (1)...(19): siRNA sense strand
cguauuccgacgaggccaa

SEQ ID NO: 2245963 - RNA, 19 nt, Homo sapiens
  misc_RNA (1)...(19): siRNA sense strand
gaacaagcaaggagccaac

SEQ ID NO: 2245964 - RNA, 19 nt, Homo sapiens
  misc_RNA (1)...(19): siRNA sense strand
ucuccaaggcgcagaccua

SEQ ID NO: 2245965 - RNA, 19 nt, Homo sapiens
  misc_RNA (1)...(19): siRNA sense strand
ccgacgagucaccggacaa

SEQ ID NO: 2245966 - RNA, 19 nt, Homo sapiens
  misc_RNA (1)...(19): siRNA sense strand
ccucaggacucaagcucca

SEQ ID NO: 2245967 - RNA, 19 nt, Homo sapiens
  misc_RNA (1)...(19): siRNA sense strand
gagaaagguauggagguga

SEQ ID NO: 2245968 - RNA, 19 nt, Homo sapiens
  misc_RNA (1)...(19): siRNA sense strand
ugggaagggaggacagaca

SEQ ID NO: 2245969 - RNA, 19 nt, Homo sapiens
  misc_RNA (1)...(19): siRNA sense strand
cagcagaacgggacccaca

SEQ ID NO: 2245970 - RNA, 19 nt, Homo sapiens
  misc_RNA (1)...(19): siRNA sense strand
ugggaagggaggacagaca

SEQ ID NO: 2245971 - RNA, 19 nt, Homo sapiens
  misc_RNA (1)...(19): siRNA sense strand
cagcagaacgggacccaca

SEQ ID NO: 2245972 - RNA, 19 nt, Homo sapiens
  misc_RNA (1)...(19): siRNA sense strand
ugggaagggaggacagaca

SEQ ID NO: 2245973 - RNA, 19 nt, Homo sapiens
  misc_RNA (1)...(19): siRNA sense strand
cagcagaacgggacccaca

SEQ ID NO: 2245974 - RNA, 19 nt, Homo sapiens
  misc_RNA (1)...(19): siRNA sense strand
ccaccaagcugauggcaga

SEQ ID NO: 2245975 - RNA, 19 nt, Homo sapiens
  misc_RNA (1)...(19): siRNA sense strand
caaugaagucucagcgcaa

SEQ ID NO: 2245976 - RNA, 19 nt, Homo sapiens
  misc_RNA (1)...(19): siRNA sense strand
cagcaagacuggaagccuu

SEQ ID NO: 2245977 - RNA, 19 nt, Homo sapiens
  misc_RNA (1)...(19): siRNA sense strand
ccaucaaagaccagcuaga

SEQ ID NO: 2245978 - RNA, 19 nt, Homo sapiens
  misc_RNA (1)...(19): siRNA sense strand
gcaccaaccucuuugcaca

SEQ ID NO: 2245979 - RNA, 19 nt, Homo sapiens
  misc_RNA (1)...(19): siRNA sense strand
gaugaagaugagaaagaca

SEQ ID NO: 2245980 - RNA, 19 nt, Homo sapiens
  misc_RNA (1)...(19): siRNA sense strand
ucuuaaaggaaaugugcau

SEQ ID NO: 2245981 - RNA, 19 nt, Homo sapiens
  misc_RNA (1)...(19): siRNA sense strand
ggaauucacuucaaggcau

SEQ ID NO: 2245982 - RNA, 19 nt, Homo sapiens
  misc_RNA (1)...(19): siRNA sense strand
gcaccugcucagagaauca

SEQ ID NO: 2245983 - RNA, 19 nt, Homo sapiens
  misc_RNA (1)...(19): siRNA sense strand
gaugagaaagacagagcca

SEQ ID NO: 2245984 - RNA, 19 nt, Homo sapiens
  misc_RNA (1)...(19): siRNA sense strand
cuucauuaucgcagugaca

SEQ ID NO: 2245985 - RNA, 19 nt, Homo sapiens
  misc_RNA (1)...(19): siRNA sense strand
cagcuugaacccaaaggaa

SEQ ID NO: 2245986 - RNA, 19 nt, Homo sapiens
  misc_RNA (1)...(19): siRNA sense strand
gcauagcuuggaauggaaa

SEQ ID NO: 2245987 - RNA, 19 nt, Homo sapiens
  misc_RNA (1)...(19): siRNA sense strand
cggaugucauggaucagaa

SEQ ID NO: 2245988 - RNA, 19 nt, Homo sapiens
  misc_RNA (1)...(19): siRNA sense strand
acgaaccuuuagaggaauu

SEQ ID NO: 2245989 - RNA, 19 nt, Homo sapiens
  misc_RNA (1)...(19): siRNA sense strand
acuccaacguccagauguu

SEQ ID NO: 2245990 - RNA, 19 nt, Homo sapiens
  misc_RNA (1)...(19): siRNA sense strand
ucaaguacgcccagagcca

SEQ ID NO: 2245991 - RNA, 19 nt, Homo sapiens
  misc_RNA (1)...(19): siRNA sense strand
cggaaaucugugacauuca

SEQ ID NO: 2245992 - RNA, 19 nt, Homo sapiens
  misc_RNA (1)...(19): siRNA sense strand
agcugauguuggaggcauu

SEQ ID NO: 2245993 - RNA, 19 nt, Homo sapiens
  misc_RNA (1)...(19): siRNA sense strand
aaaccaccguguuggaaaa

SEQ ID NO: 2245994 - RNA, 19 nt, Homo sapiens
  misc_RNA (1)...(19): siRNA sense strand
ugagaaagacagagccaag

SEQ ID NO: 2245995 - RNA, 19 nt, Homo sapiens
  misc_RNA (1)...(19): siRNA sense strand
aguucaauguucucaucaa

SEQ ID NO: 2245996 - RNA, 19 nt, Homo sapiens
  misc_RNA (1)...(19): siRNA sense strand
ucgaugagcuggagaggca

SEQ ID NO: 2245997 - RNA, 19 nt, Homo sapiens
  misc_RNA (1)...(19): siRNA sense strand
gcaagaacaccaugggcga

SEQ ID NO: 2245998 - RNA, 19 nt, Homo sapiens
  misc_RNA (1)...(19): siRNA sense strand
ccaacuauauguaugccaa

SEQ ID NO: 2245999 - RNA, 19 nt, Homo sapiens
  misc_RNA (1)...(19): siRNA sense strand
aggagagggucaagaucga

SEQ ID NO: 2246000 - RNA, 19 nt, Homo sapiens
  misc_RNA (1)...(19): siRNA sense strand
ucaaugacaagguggccaa

SEQ ID NO: 2246001 - RNA, 19 nt, Homo sapiens
  misc_RNA (1)...(19): siRNA sense strand
cacucugggugguggguuu

SEQ ID NO: 2246002 - RNA, 19 nt, Homo sapiens
  misc_RNA (1)...(19): siRNA sense strand
auauguaugccaaggugaa

SEQ ID NO: 2246003 - RNA, 19 nt, Homo sapiens
  misc_RNA (1)...(19): siRNA sense strand
cggaagaagucgcugcaga

SEQ ID NO: 2246004 - RNA, 19 nt, Homo sapiens
  misc_RNA (1)...(19): siRNA sense strand
ccgucaaggucgucauaca

SEQ ID NO: 2246005 - RNA, 19 nt, Homo sapiens
  misc_RNA (1)...(19): siRNA sense strand
gccugaguguggagcgcua

SEQ ID NO: 2246006 - RNA, 19 nt, Homo sapiens
  misc_RNA (1)...(19): siRNA sense strand
ucaccaugggcgagcagaa

SEQ ID NO: 2246007 - RNA, 19 nt, Homo sapiens
  misc_RNA (1)...(19): siRNA sense strand
gcuacuacuuccugcgcga

SEQ ID NO: 2246008 - RNA, 19 nt, Homo sapiens
  misc_RNA (1)...(19): siRNA sense strand
acgugaacaccgacaucua

SEQ ID NO: 2246009 - RNA, 19 nt, Homo sapiens
  misc_RNA (1)...(19): siRNA sense strand
cagccaaaucucuggacaa

SEQ ID NO: 2246010 - RNA, 19 nt, Homo sapiens
  misc_RNA (1)...(19): siRNA sense strand
ccgugaaguuugaggucca

SEQ ID NO: 2246011 - RNA, 19 nt, Homo sapiens
  misc_RNA (1)...(19): siRNA sense strand
cagaaauaccccagccaaa

SEQ ID NO: 2246012 - RNA, 19 nt, Homo sapiens
  misc_RNA (1)...(19): siRNA sense strand
guaagaagaagcuugggaa

SEQ ID NO: 2246013 - RNA, 19 nt, Homo sapiens
  misc_RNA (1)...(19): siRNA sense strand
gguaaaggguggcuccuca

SEQ ID NO: 2246014 - RNA, 19 nt, Homo sapiens
  misc_RNA (1)...(19): siRNA sense strand
ggucuaugcuugggagcga

SEQ ID NO: 2246015 - RNA, 19 nt, Homo sapiens
  misc_RNA (1)...(19): siRNA sense strand
gagcgagggagcaugaaaa

SEQ ID NO: 2246016 - RNA, 19 nt, Homo sapiens
  misc_RNA (1)...(19): siRNA sense strand
ccuuugaugcccuggguca

SEQ ID NO: 2246017 - RNA, 19 nt, Homo sapiens
  misc_RNA (1)...(19): siRNA sense strand
ucauaaacuaccagcaacu

SEQ ID NO: 2246018 - RNA, 19 nt, Homo sapiens
  misc_RNA (1)...(19): siRNA sense strand
cagccaaaucucuggacaa

SEQ ID NO: 2246019 - RNA, 19 nt, Homo sapiens
  misc_RNA (1)...(19): siRNA sense strand
ccgugaaguuugaggucca

SEQ ID NO: 2246020 - RNA, 19 nt, Homo sapiens
  misc_RNA (1)...(19): siRNA sense strand
cagaaauaccccagccaaa

SEQ ID NO: 2246021 - RNA, 19 nt, Homo sapiens
  misc_RNA (1)...(19): siRNA sense strand
guaagaagaagcuugggaa

SEQ ID NO: 2246022 - RNA, 19 nt, Homo sapiens
  misc_RNA (1)...(19): siRNA sense strand
gguaaaggguggcuccuca

SEQ ID NO: 2246023 - RNA, 19 nt, Homo sapiens
  misc_RNA (1)...(19): siRNA sense strand
ggucuaugcuugggagcga

SEQ ID NO: 2246024 - RNA, 19 nt, Homo sapiens
  misc_RNA (1)...(19): siRNA sense strand
gagcgagggagcaugaaaa

SEQ ID NO: 2246025 - RNA, 19 nt, Homo sapiens
  misc_RNA (1)...(19): siRNA sense strand
ccuuugaugcccuggguca

SEQ ID NO: 2246026 - RNA, 19 nt, Homo sapiens
  misc_RNA (1)...(19): siRNA sense strand
ucauaaacuaccagcaacu

SEQ ID NO: 2246027 - RNA, 19 nt, Homo sapiens
  misc_RNA (1)...(19): siRNA sense strand
aggaauaccugaagcccua

SEQ ID NO: 2246028 - RNA, 19 nt, Homo sapiens
  misc_RNA (1)...(19): siRNA sense strand
cuggaaaacuaaaggauuu

SEQ ID NO: 2246029 - RNA, 19 nt, Homo sapiens
  misc_RNA (1)...(19): siRNA sense strand
cguacauuccuuaaagaaa

SEQ ID NO: 2246030 - RNA, 19 nt, Homo sapiens
  misc_RNA (1)...(19): siRNA sense strand
acaaaaucgucaaggaaau

SEQ ID NO: 2246031 - RNA, 19 nt, Homo sapiens
  misc_RNA (1)...(19): siRNA sense strand
gaaaggaaacugaagccaa

SEQ ID NO: 2246032 - RNA, 19 nt, Homo sapiens
  misc_RNA (1)...(19): siRNA sense strand
gggagaaggaggaggagcu

SEQ ID NO: 2246033 - RNA, 19 nt, Homo sapiens
  misc_RNA (1)...(19): siRNA sense strand
caauaaugugaguggagau

SEQ ID NO: 2246034 - RNA, 19 nt, Homo sapiens
  misc_RNA (1)...(19): siRNA sense strand
ugguacaaagagugugaaa

SEQ ID NO: 2246035 - RNA, 19 nt, Homo sapiens
  misc_RNA (1)...(19): siRNA sense strand
ggaucuaucgagagcucaa

SEQ ID NO: 2246036 - RNA, 19 nt, Homo sapiens
  misc_RNA (1)...(19): siRNA sense strand
ugaucaaaugccaggagaa

SEQ ID NO: 2246037 - RNA, 19 nt, Homo sapiens
  misc_RNA (1)...(19): siRNA sense strand
ggagggagaaggaggagga

SEQ ID NO: 2246038 - RNA, 19 nt, Homo sapiens
  misc_RNA (1)...(19): siRNA sense strand
ggaaguuucuacugagcca

SEQ ID NO: 2246039 - RNA, 19 nt, Homo sapiens
  misc_RNA (1)...(19): siRNA sense strand
ccuuuaaugcacuggguca

SEQ ID NO: 2246040 - RNA, 19 nt, Homo sapiens
  misc_RNA (1)...(19): siRNA sense strand
acaaagaagcaaagguuag

SEQ ID NO: 2246041 - RNA, 19 nt, Homo sapiens
  misc_RNA (1)...(19): siRNA sense strand
ggauaagacaaaugccagu

SEQ ID NO: 2246042 - RNA, 19 nt, Homo sapiens
  misc_RNA (1)...(19): siRNA sense strand
aauaaugugaguggagaua

SEQ ID NO: 2246043 - RNA, 19 nt, Homo sapiens
  misc_RNA (1)...(19): siRNA sense strand
gaucuuggacccaggcgaa

SEQ ID NO: 2246044 - RNA, 19 nt, Homo sapiens
  misc_RNA (1)...(19): siRNA sense strand
ggaucagaagagaagccaa

SEQ ID NO: 2246045 - RNA, 19 nt, Homo sapiens
  misc_RNA (1)...(19): siRNA sense strand
agauaaaauaugcuggcaa

SEQ ID NO: 2246046 - RNA, 19 nt, Homo sapiens
  misc_RNA (1)...(19): siRNA sense strand
ggaacaggggugcagaaaa

SEQ ID NO: 2246047 - RNA, 19 nt, Homo sapiens
  misc_RNA (1)...(19): siRNA sense strand
gaucagaagagaagccaac

SEQ ID NO: 2246048 - RNA, 19 nt, Homo sapiens
  misc_RNA (1)...(19): siRNA sense strand
ggaacauccugcugcacca

SEQ ID NO: 2246049 - RNA, 19 nt, Homo sapiens
  misc_RNA (1)...(19): siRNA sense strand
acuuugaagaugagaccau

SEQ ID NO: 2246050 - RNA, 19 nt, Homo sapiens
  misc_RNA (1)...(19): siRNA sense strand
cacaaaaucgucaaggaaa

SEQ ID NO: 2246051 - RNA, 19 nt, Homo sapiens
  misc_RNA (1)...(19): siRNA sense strand
aagagaagccaacgugaca

SEQ ID NO: 2246052 - RNA, 19 nt, Homo sapiens
  misc_RNA (1)...(19): siRNA sense strand
agacacugaucgacgagau

SEQ ID NO: 2246053 - RNA, 19 nt, Homo sapiens
  misc_RNA (1)...(19): siRNA sense strand
caaucagcgaggccaguaa

SEQ ID NO: 2246054 - RNA, 19 nt, Homo sapiens
  misc_RNA (1)...(19): siRNA sense strand
ccguacauuccuuaaagaa

SEQ ID NO: 2246055 - RNA, 19 nt, Homo sapiens
  misc_RNA (1)...(19): siRNA sense strand
cgucaaggaaauccaugaa

SEQ ID NO: 2246056 - RNA, 19 nt, Homo sapiens
  misc_RNA (1)...(19): siRNA sense strand
ccaauaaugugaguggaga

SEQ ID NO: 2246057 - RNA, 19 nt, Homo sapiens
  misc_RNA (1)...(19): siRNA sense strand
aggaauaccugaagcccua

SEQ ID NO: 2246058 - RNA, 19 nt, Homo sapiens
  misc_RNA (1)...(19): siRNA sense strand
cuggaaaacuaaaggauuu

SEQ ID NO: 2246059 - RNA, 19 nt, Homo sapiens
  misc_RNA (1)...(19): siRNA sense strand
cguacauuccuuaaagaaa

SEQ ID NO: 2246060 - RNA, 19 nt, Homo sapiens
  misc_RNA (1)...(19): siRNA sense strand
acaaaaucgucaaggaaau

SEQ ID NO: 2246061 - RNA, 19 nt, Homo sapiens
  misc_RNA (1)...(19): siRNA sense strand
gaaaggaaacugaagccaa

SEQ ID NO: 2246062 - RNA, 19 nt, Homo sapiens
  misc_RNA (1)...(19): siRNA sense strand
gggagaaggaggaggagcu

SEQ ID NO: 2246063 - RNA, 19 nt, Homo sapiens
  misc_RNA (1)...(19): siRNA sense strand
caauaaugugaguggagau

SEQ ID NO: 2246064 - RNA, 19 nt, Homo sapiens
  misc_RNA (1)...(19): siRNA sense strand
ugguacaaagagugugaaa

SEQ ID NO: 2246065 - RNA, 19 nt, Homo sapiens
  misc_RNA (1)...(19): siRNA sense strand
ggaucuaucgagagcucaa

SEQ ID NO: 2246066 - RNA, 19 nt, Homo sapiens
  misc_RNA (1)...(19): siRNA sense strand
ugaucaaaugccaggagaa

SEQ ID NO: 2246067 - RNA, 19 nt, Homo sapiens
  misc_RNA (1)...(19): siRNA sense strand
ggagggagaaggaggagga

SEQ ID NO: 2246068 - RNA, 19 nt, Homo sapiens
  misc_RNA (1)...(19): siRNA sense strand
ggaaguuucuacugagcca

SEQ ID NO: 2246069 - RNA, 19 nt, Homo sapiens
  misc_RNA (1)...(19): siRNA sense strand
ccuuuaaugcacuggguca

SEQ ID NO: 2246070 - RNA, 19 nt, Homo sapiens
  misc_RNA (1)...(19): siRNA sense strand
acaaagaagcaaagguuag

SEQ ID NO: 2246071 - RNA, 19 nt, Homo sapiens
  misc_RNA (1)...(19): siRNA sense strand
ggauaagacaaaugccagu

SEQ ID NO: 2246072 - RNA, 19 nt, Homo sapiens
  misc_RNA (1)...(19): siRNA sense strand
aauaaugugaguggagaua

SEQ ID NO: 2246073 - RNA, 19 nt, Homo sapiens
  misc_RNA (1)...(19): siRNA sense strand
gaucuuggacccaggcgaa

SEQ ID NO: 2246074 - RNA, 19 nt, Homo sapiens
  misc_RNA (1)...(19): siRNA sense strand
ggaucagaagagaagccaa

SEQ ID NO: 2246075 - RNA, 19 nt, Homo sapiens
  misc_RNA (1)...(19): siRNA sense strand
agauaaaauaugcuggcaa

SEQ ID NO: 2246076 - RNA, 19 nt, Homo sapiens
  misc_RNA (1)...(19): siRNA sense strand
ggaacaggggugcagaaaa

SEQ ID NO: 2246077 - RNA, 19 nt, Homo sapiens
  misc_RNA (1)...(19): siRNA sense strand
gaucagaagagaagccaac

SEQ ID NO: 2246078 - RNA, 19 nt, Homo sapiens
  misc_RNA (1)...(19): siRNA sense strand
ggaacauccugcugcacca

SEQ ID NO: 2246079 - RNA, 19 nt, Homo sapiens
  misc_RNA (1)...(19): siRNA sense strand
acuuugaagaugagaccau

SEQ ID NO: 2246080 - RNA, 19 nt, Homo sapiens
  misc_RNA (1)...(19): siRNA sense strand
cacaaaaucgucaaggaaa

SEQ ID NO: 2246081 - RNA, 19 nt, Homo sapiens
  misc_RNA (1)...(19): siRNA sense strand
aagagaagccaacgugaca

SEQ ID NO: 2246082 - RNA, 19 nt, Homo sapiens
  misc_RNA (1)...(19): siRNA sense strand
agacacugaucgacgagau

SEQ ID NO: 2246083 - RNA, 19 nt, Homo sapiens
  misc_RNA (1)...(19): siRNA sense strand
caaucagcgaggccaguaa

SEQ ID NO: 2246084 - RNA, 19 nt, Homo sapiens
  misc_RNA (1)...(19): siRNA sense strand
ccguacauuccuuaaagaa

SEQ ID NO: 2246085 - RNA, 19 nt, Homo sapiens
  misc_RNA (1)...(19): siRNA sense strand
cgucaaggaaauccaugaa

SEQ ID NO: 2246086 - RNA, 19 nt, Homo sapiens
  misc_RNA (1)...(19): siRNA sense strand
ccaauaaugugaguggaga

SEQ ID NO: 2246087 - RNA, 19 nt, Homo sapiens
  misc_RNA (1)...(19): siRNA sense strand
gggaagagcaggaagguca

SEQ ID NO: 2246088 - RNA, 19 nt, Homo sapiens
  misc_RNA (1)...(19): siRNA sense strand
gugaugagcuggaggagga

SEQ ID NO: 2246089 - RNA, 19 nt, Homo sapiens
  misc_RNA (1)...(19): siRNA sense strand
ucaagaagaugguuggaga

SEQ ID NO: 2246090 - RNA, 19 nt, Homo sapiens
  misc_RNA (1)...(19): siRNA sense strand
gucaaagagaacagagcaa

SEQ ID NO: 2246091 - RNA, 19 nt, Homo sapiens
  misc_RNA (1)...(19): siRNA sense strand
uggauaaagaauuggauga

SEQ ID NO: 2246092 - RNA, 19 nt, Homo sapiens
  misc_RNA (1)...(19): siRNA sense strand
cggaaguggcuauggcuau

SEQ ID NO: 2246093 - RNA, 19 nt, Homo sapiens
  misc_RNA (1)...(19): siRNA sense strand
gugaaaacucgaagaaaga

SEQ ID NO: 2246094 - RNA, 19 nt, Homo sapiens
  misc_RNA (1)...(19): siRNA sense strand
agguaugacaaguccaaua

SEQ ID NO: 2246095 - RNA, 19 nt, Homo sapiens
  misc_RNA (1)...(19): siRNA sense strand
cuauagagaagaaagugaa

SEQ ID NO: 2246096 - RNA, 19 nt, Homo sapiens
  misc_RNA (1)...(19): siRNA sense strand
ggaagagcaggaaggucaa

SEQ ID NO: 2246097 - RNA, 19 nt, Homo sapiens
  misc_RNA (1)...(19): siRNA sense strand
uggcuaugguuauggcuau

SEQ ID NO: 2246098 - RNA, 19 nt, Homo sapiens
  misc_RNA (1)...(19): siRNA sense strand
gaggacuggaucagggaau

SEQ ID NO: 2246099 - RNA, 19 nt, Homo sapiens
  misc_RNA (1)...(19): siRNA sense strand
cuauauaaugggagugaac

SEQ ID NO: 2246100 - RNA, 19 nt, Homo sapiens
  misc_RNA (1)...(19): siRNA sense strand
acucgaagaaagauggaca

SEQ ID NO: 2246101 - RNA, 19 nt, Homo sapiens
  misc_RNA (1)...(19): siRNA sense strand
cggugguaacuuugagaca

SEQ ID NO: 2246102 - RNA, 19 nt, Homo sapiens
  misc_RNA (1)...(19): siRNA sense strand
cuucagaucaacaaagaca

SEQ ID NO: 2246103 - RNA, 19 nt, Homo sapiens
  misc_RNA (1)...(19): siRNA sense strand
cuuacaggccugaugaauu

SEQ ID NO: 2246104 - RNA, 19 nt, Homo sapiens
  misc_RNA (1)...(19): siRNA sense strand
acuauagagaagaaaguga

SEQ ID NO: 2246105 - RNA, 19 nt, Homo sapiens
  misc_RNA (1)...(19): siRNA sense strand
aagaaagugaagaguacau

SEQ ID NO: 2246106 - RNA, 19 nt, Homo sapiens
  misc_RNA (1)...(19): siRNA sense strand
aaucauugcaagcaguuaa

SEQ ID NO: 2246107 - RNA, 19 nt, Homo sapiens
  misc_RNA (1)...(19): siRNA sense strand
cuuuguuaccaguguuaua

SEQ ID NO: 2246108 - RNA, 19 nt, Homo sapiens
  misc_RNA (1)...(19): siRNA sense strand
cugacuauguggaaagagu

SEQ ID NO: 2246109 - RNA, 19 nt, Homo sapiens
  misc_RNA (1)...(19): siRNA sense strand
auggcaaagugaaugacaa

SEQ ID NO: 2246110 - RNA, 19 nt, Homo sapiens
  misc_RNA (1)...(19): siRNA sense strand
aggacuggaucagggaaua

SEQ ID NO: 2246111 - RNA, 19 nt, Homo sapiens
  misc_RNA (1)...(19): siRNA sense strand
aagcaguuaaagagcaaau

SEQ ID NO: 2246112 - RNA, 19 nt, Homo sapiens
  misc_RNA (1)...(19): siRNA sense strand
guuaaagagcaaauuguca

SEQ ID NO: 2246113 - RNA, 19 nt, Homo sapiens
  misc_RNA (1)...(19): siRNA sense strand
agaagaugguuggagacua

SEQ ID NO: 2246114 - RNA, 19 nt, Homo sapiens
  misc_RNA (1)...(19): siRNA sense strand
ugacauauaugguggagag

SEQ ID NO: 2246115 - RNA, 19 nt, Homo sapiens
  misc_RNA (1)...(19): siRNA sense strand
caggaaggucaaagagaac

SEQ ID NO: 2246116 - RNA, 19 nt, Homo sapiens
  misc_RNA (1)...(19): siRNA sense strand
aaauauaugcccucugcaa

SEQ ID NO: 2246117 - RNA, 19 nt, Homo sapiens
  misc_RNA (1)...(19): siRNA sense strand
ccaucugacuauguggaaa

SEQ ID NO: 2246118 - RNA, 19 nt, Homo sapiens
  misc_RNA (1)...(19): siRNA sense strand
ugacacuggccuacaggaa

SEQ ID NO: 2246119 - RNA, 19 nt, Homo sapiens
  misc_RNA (1)...(19): siRNA sense strand
ugacuauagagaagaaagu

SEQ ID NO: 2246120 - RNA, 19 nt, Homo sapiens
  misc_RNA (1)...(19): siRNA sense strand
ugaagcaagugaagggauc

SEQ ID NO: 2246121 - RNA, 19 nt, Homo sapiens
  misc_RNA (1)...(19): siRNA sense strand
uggcuauggcuaugguuau

SEQ ID NO: 2246122 - RNA, 19 nt, Homo sapiens
  misc_RNA (1)...(19): siRNA sense strand
cugaugaauucaaaccgaa

SEQ ID NO: 2246123 - RNA, 19 nt, Homo sapiens
  misc_RNA (1)...(19): siRNA sense strand
ggacuggaucagggaauau

SEQ ID NO: 2246124 - RNA, 19 nt, Homo sapiens
  misc_RNA (1)...(19): siRNA sense strand
caagagcagcaaagggcuu

SEQ ID NO: 2246125 - RNA, 19 nt, Homo sapiens
  misc_RNA (1)...(19): siRNA sense strand
gacaacuguacaagaggaa

SEQ ID NO: 2246126 - RNA, 19 nt, Homo sapiens
  misc_RNA (1)...(19): siRNA sense strand
uuauggaggaaguggcuuu

SEQ ID NO: 2246127 - RNA, 19 nt, Homo sapiens
  misc_RNA (1)...(19): siRNA sense strand
uggcuauggcuauggcuau

SEQ ID NO: 2246128 - RNA, 19 nt, Homo sapiens
  misc_RNA (1)...(19): siRNA sense strand
ggucaaagagaacagagca

SEQ ID NO: 2246129 - RNA, 19 nt, Homo sapiens
  misc_RNA (1)...(19): siRNA sense strand
aacaaagacaacuguacaa

SEQ ID NO: 2246130 - RNA, 19 nt, Homo sapiens
  misc_RNA (1)...(19): siRNA sense strand
uuggaugacuauagagaag

SEQ ID NO: 2246131 - RNA, 19 nt, Homo sapiens
  misc_RNA (1)...(19): siRNA sense strand
ggacagagaacuaaggcaa

SEQ ID NO: 2246132 - RNA, 19 nt, Homo sapiens
  misc_RNA (1)...(19): siRNA sense strand
gagccauagaagaugagaa

SEQ ID NO: 2246133 - RNA, 19 nt, Homo sapiens
  misc_RNA (1)...(19): siRNA sense strand
uagaagaugagaagcgaga

SEQ ID NO: 2246134 - RNA, 19 nt, Homo sapiens
  misc_RNA (1)...(19): siRNA sense strand
aggaaagccaucagagcca

SEQ ID NO: 2246135 - RNA, 19 nt, Homo sapiens
  misc_RNA (1)...(19): siRNA sense strand
gugaaggauggaaagguau

SEQ ID NO: 2246136 - RNA, 19 nt, Homo sapiens
  misc_RNA (1)...(19): siRNA sense strand
acauaaagaagguggacag

SEQ ID NO: 2246137 - RNA, 19 nt, Homo sapiens
  misc_RNA (1)...(19): siRNA sense strand
acaaauagaauucuggcuu

SEQ ID NO: 2246138 - RNA, 19 nt, Homo sapiens
  misc_RNA (1)...(19): siRNA sense strand
ccaucagagccauagaaga

SEQ ID NO: 2246139 - RNA, 19 nt, Homo sapiens
  misc_RNA (1)...(19): siRNA sense strand
acugagaagaacaacaaau

SEQ ID NO: 2246140 - RNA, 19 nt, Homo sapiens
  misc_RNA (1)...(19): siRNA sense strand
caaacugagaagaacaaca

SEQ ID NO: 2246141 - RNA, 19 nt, Homo sapiens
  misc_RNA (1)...(19): siRNA sense strand
cgaucaagucaaaguucga

SEQ ID NO: 2246142 - RNA, 19 nt, Homo sapiens
  misc_RNA (1)...(19): siRNA sense strand
cgggagaacagguacgacu

SEQ ID NO: 2246143 - RNA, 19 nt, Homo sapiens
  misc_RNA (1)...(19): siRNA sense strand
agaacauagugguggaaau

SEQ ID NO: 2246144 - RNA, 19 nt, Homo sapiens
  misc_RNA (1)...(19): siRNA sense strand
agaaaugggcuuuaggaau

SEQ ID NO: 2246145 - RNA, 19 nt, Homo sapiens
  misc_RNA (1)...(19): siRNA sense strand
ugauuaaacccuuggaaaa

SEQ ID NO: 2246146 - RNA, 19 nt, Homo sapiens
  misc_RNA (1)...(19): siRNA sense strand
cauaauagugacugggaca

SEQ ID NO: 2246147 - RNA, 19 nt, Homo sapiens
  misc_RNA (1)...(19): siRNA sense strand
ugauaagacacuuggucaa

SEQ ID NO: 2246148 - RNA, 19 nt, Homo sapiens
  misc_RNA (1)...(19): siRNA sense strand
acaucaaauuccagaacau

SEQ ID NO: 2246149 - RNA, 19 nt, Homo sapiens
  misc_RNA (1)...(19): siRNA sense strand
cugauuaaacccuuggaaa

SEQ ID NO: 2246150 - RNA, 19 nt, Homo sapiens
  misc_RNA (1)...(19): siRNA sense strand
aguaugagaaagagaccaa

SEQ ID NO: 2246151 - RNA, 19 nt, Homo sapiens
  misc_RNA (1)...(19): siRNA sense strand
ggaucaagacagaaggguu

SEQ ID NO: 2246152 - RNA, 19 nt, Homo sapiens
  misc_RNA (1)...(19): siRNA sense strand
cagacuuccuggagaugaa

SEQ ID NO: 2246153 - RNA, 19 nt, Homo sapiens
  misc_RNA (1)...(19): siRNA sense strand
agaaagaaucucaguuaca

SEQ ID NO: 2246154 - RNA, 19 nt, Homo sapiens
  misc_RNA (1)...(19): siRNA sense strand
acacaagagaaaugggcuu

SEQ ID NO: 2246155 - RNA, 19 nt, Homo sapiens
  misc_RNA (1)...(19): siRNA sense strand
aggcagacuuccuggagau

SEQ ID NO: 2246156 - RNA, 19 nt, Homo sapiens
  misc_RNA (1)...(19): siRNA sense strand
aggaaguucucaaggcaga

SEQ ID NO: 2246157 - RNA, 19 nt, Homo sapiens
  misc_RNA (1)...(19): siRNA sense strand
ggaagagauggaagaacuu

SEQ ID NO: 2246158 - RNA, 19 nt, Homo sapiens
  misc_RNA (1)...(19): siRNA sense strand
guagaaaaugagaggauga

SEQ ID NO: 2246159 - RNA, 19 nt, Homo sapiens
  misc_RNA (1)...(19): siRNA sense strand
ggaaggaacaaauaggcuu

SEQ ID NO: 2246160 - RNA, 19 nt, Homo sapiens
  misc_RNA (1)...(19): siRNA sense strand
gaacuuaagaaaaggauga

SEQ ID NO: 2246161 - RNA, 19 nt, Homo sapiens
  misc_RNA (1)...(19): siRNA sense strand
agucugacaaccuggauua

SEQ ID NO: 2246162 - RNA, 19 nt, Homo sapiens
  misc_RNA (1)...(19): siRNA sense strand
gaucaagacagaaggguug

SEQ ID NO: 2246163 - RNA, 19 nt, Homo sapiens
  misc_RNA (1)...(19): siRNA sense strand
guuacaagaggcagaccua

SEQ ID NO: 2246164 - RNA, 19 nt, Homo sapiens
  misc_RNA (1)...(19): siRNA sense strand
gugagaaggaagacggagu

SEQ ID NO: 2246165 - RNA, 19 nt, Homo sapiens
  misc_RNA (1)...(19): siRNA sense strand
ggaccaacaaauucaucaa

SEQ ID NO: 2246166 - RNA, 19 nt, Homo sapiens
  misc_RNA (1)...(19): siRNA sense strand
ucaucaaagacguaaucaa

SEQ ID NO: 2246167 - RNA, 19 nt, Homo sapiens
  misc_RNA (1)...(19): siRNA sense strand
augaaagcgaagaugaaau

SEQ ID NO: 2246168 - RNA, 19 nt, Homo sapiens
  misc_RNA (1)...(19): siRNA sense strand
cccaaaagccagaaccaaa

SEQ ID NO: 2246169 - RNA, 19 nt, Homo sapiens
  misc_RNA (1)...(19): siRNA sense strand
uuaucagcgcuaugagaaa

SEQ ID NO: 2246170 - RNA, 19 nt, Homo sapiens
  misc_RNA (1)...(19): siRNA sense strand
acguaaucaaagacggcaa

SEQ ID NO: 2246171 - RNA, 19 nt, Homo sapiens
  misc_RNA (1)...(19): siRNA sense strand
uggaagaacuuaagaaaag

SEQ ID NO: 2246172 - RNA, 19 nt, Homo sapiens
  misc_RNA (1)...(19): siRNA sense strand
ccagaaaagaaccgagaga

SEQ ID NO: 2246173 - RNA, 19 nt, Homo sapiens
  misc_RNA (1)...(19): siRNA sense strand
agguagaaaaugagaggau

SEQ ID NO: 2246174 - RNA, 19 nt, Homo sapiens
  misc_RNA (1)...(19): siRNA sense strand
aagaaauggagcuaaauga

SEQ ID NO: 2246175 - RNA, 19 nt, Homo sapiens
  misc_RNA (1)...(19): siRNA sense strand
cagauauuguggcuggcaa

SEQ ID NO: 2246176 - RNA, 19 nt, Homo sapiens
  misc_RNA (1)...(19): siRNA sense strand
aagagauggaagaacuuaa

SEQ ID NO: 2246177 - RNA, 19 nt, Homo sapiens
  misc_RNA (1)...(19): siRNA sense strand
aggaaguucaggaguccaa

SEQ ID NO: 2246178 - RNA, 19 nt, Homo sapiens
  misc_RNA (1)...(19): siRNA sense strand
agcuaaaugaagugggcuu

SEQ ID NO: 2246179 - RNA, 19 nt, Homo sapiens
  misc_RNA (1)...(19): siRNA sense strand
acauagugguggaaauacu

SEQ ID NO: 2246180 - RNA, 19 nt, Homo sapiens
  misc_RNA (1)...(19): siRNA sense strand
cuggagaggaccaacaaau

SEQ ID NO: 2246181 - RNA, 19 nt, Homo sapiens
  misc_RNA (1)...(19): siRNA sense strand
gcgaagaugaaauccaaca

SEQ ID NO: 2246182 - RNA, 19 nt, Homo sapiens
  misc_RNA (1)...(19): siRNA sense strand
gcucaacgagguagaaaau

SEQ ID NO: 2246183 - RNA, 19 nt, Homo sapiens
  misc_RNA (1)...(19): siRNA sense strand
ggaaauacuaaucgagcac

SEQ ID NO: 2246184 - RNA, 19 nt, Homo sapiens
  misc_RNA (1)...(19): siRNA sense strand
aguccaagaaguucaauau

SEQ ID NO: 2246185 - RNA, 19 nt, Homo sapiens
  misc_RNA (1)...(19): siRNA sense strand
gaccaaagggaucaagaca

SEQ ID NO: 2246186 - RNA, 19 nt, Homo sapiens
  misc_RNA (1)...(19): siRNA sense strand
agaaaagaaccgagagaug

SEQ ID NO: 2246187 - RNA, 19 nt, Homo sapiens
  misc_RNA (1)...(19): siRNA sense strand
ggucaaugugugugagcac

SEQ ID NO: 2246188 - RNA, 19 nt, Homo sapiens
  misc_RNA (1)...(19): siRNA sense strand
uggaaauacuaaucgagca

SEQ ID NO: 2246189 - RNA, 19 nt, Homo sapiens
  misc_RNA (1)...(19): siRNA sense strand
aaauacuaaucgagcacuu

SEQ ID NO: 2246190 - RNA, 19 nt, Homo sapiens
  misc_RNA (1)...(19): siRNA sense strand
ggagaaaagccaaccauca

SEQ ID NO: 2246191 - RNA, 19 nt, Homo sapiens
  misc_RNA (1)...(19): siRNA sense strand
ucaacgagguagaaaauga

SEQ ID NO: 2246192 - RNA, 19 nt, Homo sapiens
  misc_RNA (1)...(19): siRNA sense strand
ugaaauuaacaucgcugaa

SEQ ID NO: 2246193 - RNA, 19 nt, Homo sapiens
  misc_RNA (1)...(19): siRNA sense strand
agaggaugaugaugguaca

SEQ ID NO: 2246194 - RNA, 19 nt, Homo sapiens
  misc_RNA (1)...(19): siRNA sense strand
agauggaagaacuuaagaa

SEQ ID NO: 2246195 - RNA, 19 nt, Homo sapiens
  misc_RNA (1)...(19): siRNA sense strand
gauuaaacccuuggaaaau

SEQ ID NO: 2246196 - RNA, 19 nt, Homo sapiens
  misc_RNA (1)...(19): siRNA sense strand
gaguccaagaaguucaaua

SEQ ID NO: 2246197 - RNA, 19 nt, Homo sapiens
  misc_RNA (1)...(19): siRNA sense strand
uggaugaaagcgaagauga

SEQ ID NO: 2246198 - RNA, 19 nt, Homo sapiens
  misc_RNA (1)...(19): siRNA sense strand
guggacaaggagaggcaca

SEQ ID NO: 2246199 - RNA, 19 nt, Homo sapiens
  misc_RNA (1)...(19): siRNA sense strand
aaauagaagaagugaguga

SEQ ID NO: 2246200 - RNA, 19 nt, Homo sapiens
  misc_RNA (1)...(19): siRNA sense strand
ggaaauucacagagagagu

SEQ ID NO: 2246201 - RNA, 19 nt, Homo sapiens
  misc_RNA (1)...(19): siRNA sense strand
gaugugaggcagugggcaa

SEQ ID NO: 2246202 - RNA, 19 nt, Homo sapiens
  misc_RNA (1)...(19): siRNA sense strand
uggaaagaacuucaggaaa

SEQ ID NO: 2246203 - RNA, 19 nt, Homo sapiens
  misc_RNA (1)...(19): siRNA sense strand
caggaaauucacagagaga

SEQ ID NO: 2246204 - RNA, 19 nt, Homo sapiens
  misc_RNA (1)...(19): siRNA sense strand
acucauggaaauagaagaa

SEQ ID NO: 2246205 - RNA, 19 nt, Homo sapiens
  misc_RNA (1)...(19): siRNA sense strand
auagaagaagugagugaaa

SEQ ID NO: 2246206 - RNA, 19 nt, Homo sapiens
  misc_RNA (1)...(19): siRNA sense strand
agaagauagaagugugcaa

SEQ ID NO: 2246207 - RNA, 19 nt, Homo sapiens
  misc_RNA (1)...(19): siRNA sense strand
cguaaaucaaagaguaaca

SEQ ID NO: 2246208 - RNA, 19 nt, Homo sapiens
  misc_RNA (1)...(19): siRNA sense strand
uugaaagaacucauggaaa

SEQ ID NO: 2246209 - RNA, 19 nt, Homo sapiens
  misc_RNA (1)...(19): siRNA sense strand
gucguaaaucaaagaguaa

SEQ ID NO: 2246210 - RNA, 19 nt, Homo sapiens
  misc_RNA (1)...(19): siRNA sense strand
aagaaguacuacagaagca

SEQ ID NO: 2246211 - RNA, 19 nt, Homo sapiens
  misc_RNA (1)...(19): siRNA sense strand
agaagaagugagugaaaau

SEQ ID NO: 2246212 - RNA, 19 nt, Homo sapiens
  misc_RNA (1)...(19): siRNA sense strand
uggaaaauguaguuggaga

SEQ ID NO: 2246213 - RNA, 19 nt, Homo sapiens
  misc_RNA (1)...(19): siRNA sense strand
ggaaaauguaguuggagau

SEQ ID NO: 2246214 - RNA, 19 nt, Homo sapiens
  misc_RNA (1)...(19): siRNA sense strand
gucuaucagucuuggaaau

SEQ ID NO: 2246215 - RNA, 19 nt, Homo sapiens
  misc_RNA (1)...(19): siRNA sense strand
gcugcagaucaaugacaaa

SEQ ID NO: 2246216 - RNA, 19 nt, Homo sapiens
  misc_RNA (1)...(19): siRNA sense strand
uagaagugugcaagaagua

SEQ ID NO: 2246217 - RNA, 19 nt, Homo sapiens
  misc_RNA (1)...(19): siRNA sense strand
auggaaagaacuucaggaa

SEQ ID NO: 2246218 - RNA, 19 nt, Homo sapiens
  misc_RNA (1)...(19): siRNA sense strand
agcauggacucgaaagcaa

SEQ ID NO: 2246219 - RNA, 19 nt, Homo sapiens
  misc_RNA (1)...(19): siRNA sense strand
ucuaugaggaagagccauu

SEQ ID NO: 2246220 - RNA, 19 nt, Homo sapiens
  misc_RNA (1)...(19): siRNA sense strand
ucauggaaauagaagaagu

SEQ ID NO: 2246221 - RNA, 19 nt, Homo sapiens
  misc_RNA (1)...(19): siRNA sense strand
ggucuaucagucuuggaaa

SEQ ID NO: 2246222 - RNA, 19 nt, Homo sapiens
  misc_RNA (1)...(19): siRNA sense strand
ugcuuuaaaucgaguaaca

SEQ ID NO: 2246223 - RNA, 19 nt, Homo sapiens
  misc_RNA (1)...(19): siRNA sense strand
cuuacauguagauuggaua

SEQ ID NO: 2246224 - RNA, 19 nt, Homo sapiens
  misc_RNA (1)...(19): siRNA sense strand
agugcaaguacaauacaaa

SEQ ID NO: 2246225 - RNA, 19 nt, Homo sapiens
  misc_RNA (1)...(19): siRNA sense strand
cugagaaguggaaugaaaa

SEQ ID NO: 2246226 - RNA, 19 nt, Homo sapiens
  misc_RNA (1)...(19): siRNA sense strand
aaauagaagaagugaguga

SEQ ID NO: 2246227 - RNA, 19 nt, Homo sapiens
  misc_RNA (1)...(19): siRNA sense strand
ggaaauucacagagagagu

SEQ ID NO: 2246228 - RNA, 19 nt, Homo sapiens
  misc_RNA (1)...(19): siRNA sense strand
gaugugaggcagugggcaa

SEQ ID NO: 2246229 - RNA, 19 nt, Homo sapiens
  misc_RNA (1)...(19): siRNA sense strand
uggaaagaacuucaggaaa

SEQ ID NO: 2246230 - RNA, 19 nt, Homo sapiens
  misc_RNA (1)...(19): siRNA sense strand
caggaaauucacagagaga

SEQ ID NO: 2246231 - RNA, 19 nt, Homo sapiens
  misc_RNA (1)...(19): siRNA sense strand
acucauggaaauagaagaa

SEQ ID NO: 2246232 - RNA, 19 nt, Homo sapiens
  misc_RNA (1)...(19): siRNA sense strand
auagaagaagugagugaaa

SEQ ID NO: 2246233 - RNA, 19 nt, Homo sapiens
  misc_RNA (1)...(19): siRNA sense strand
agaagauagaagugugcaa

SEQ ID NO: 2246234 - RNA, 19 nt, Homo sapiens
  misc_RNA (1)...(19): siRNA sense strand
cguaaaucaaagaguaaca

SEQ ID NO: 2246235 - RNA, 19 nt, Homo sapiens
  misc_RNA (1)...(19): siRNA sense strand
uugaaagaacucauggaaa

SEQ ID NO: 2246236 - RNA, 19 nt, Homo sapiens
  misc_RNA (1)...(19): siRNA sense strand
gucguaaaucaaagaguaa

SEQ ID NO: 2246237 - RNA, 19 nt, Homo sapiens
  misc_RNA (1)...(19): siRNA sense strand
aagaaguacuacagaagca

SEQ ID NO: 2246238 - RNA, 19 nt, Homo sapiens
  misc_RNA (1)...(19): siRNA sense strand
agaagaagugagugaaaau

SEQ ID NO: 2246239 - RNA, 19 nt, Homo sapiens
  misc_RNA (1)...(19): siRNA sense strand
uggaaaauguaguuggaga

SEQ ID NO: 2246240 - RNA, 19 nt, Homo sapiens
  misc_RNA (1)...(19): siRNA sense strand
ggaaaauguaguuggagau

SEQ ID NO: 2246241 - RNA, 19 nt, Homo sapiens
  misc_RNA (1)...(19): siRNA sense strand
gucuaucagucuuggaaau

SEQ ID NO: 2246242 - RNA, 19 nt, Homo sapiens
  misc_RNA (1)...(19): siRNA sense strand
gcugcagaucaaugacaaa

SEQ ID NO: 2246243 - RNA, 19 nt, Homo sapiens
  misc_RNA (1)...(19): siRNA sense strand
uagaagugugcaagaagua

SEQ ID NO: 2246244 - RNA, 19 nt, Homo sapiens
  misc_RNA (1)...(19): siRNA sense strand
auggaaagaacuucaggaa

SEQ ID NO: 2246245 - RNA, 19 nt, Homo sapiens
  misc_RNA (1)...(19): siRNA sense strand
agcauggacucgaaagcaa

SEQ ID NO: 2246246 - RNA, 19 nt, Homo sapiens
  misc_RNA (1)...(19): siRNA sense strand
ucuaugaggaagagccauu

SEQ ID NO: 2246247 - RNA, 19 nt, Homo sapiens
  misc_RNA (1)...(19): siRNA sense strand
ucauggaaauagaagaagu

SEQ ID NO: 2246248 - RNA, 19 nt, Homo sapiens
  misc_RNA (1)...(19): siRNA sense strand
ggucuaucagucuuggaaa

SEQ ID NO: 2246249 - RNA, 19 nt, Homo sapiens
  misc_RNA (1)...(19): siRNA sense strand
ugcuuuaaaucgaguaaca

SEQ ID NO: 2246250 - RNA, 19 nt, Homo sapiens
  misc_RNA (1)...(19): siRNA sense strand
cuuacauguagauuggaua

SEQ ID NO: 2246251 - RNA, 19 nt, Homo sapiens
  misc_RNA (1)...(19): siRNA sense strand
agugcaaguacaauacaaa

SEQ ID NO: 2246252 - RNA, 19 nt, Homo sapiens
  misc_RNA (1)...(19): siRNA sense strand
cugagaaguggaaugaaaa

SEQ ID NO: 2246253 - RNA, 19 nt, Homo sapiens
  misc_RNA (1)...(19): siRNA sense strand
aaauagaagaagugaguga

SEQ ID NO: 2246254 - RNA, 19 nt, Homo sapiens
  misc_RNA (1)...(19): siRNA sense strand
ggaaauucacagagagagu

SEQ ID NO: 2246255 - RNA, 19 nt, Homo sapiens
  misc_RNA (1)...(19): siRNA sense strand
gaugugaggcagugggcaa

SEQ ID NO: 2246256 - RNA, 19 nt, Homo sapiens
  misc_RNA (1)...(19): siRNA sense strand
uggaaagaacuucaggaaa

SEQ ID NO: 2246257 - RNA, 19 nt, Homo sapiens
  misc_RNA (1)...(19): siRNA sense strand
caggaaauucacagagaga

SEQ ID NO: 2246258 - RNA, 19 nt, Homo sapiens
  misc_RNA (1)...(19): siRNA sense strand
acucauggaaauagaagaa

SEQ ID NO: 2246259 - RNA, 19 nt, Homo sapiens
  misc_RNA (1)...(19): siRNA sense strand
auagaagaagugagugaaa

SEQ ID NO: 2246260 - RNA, 19 nt, Homo sapiens
  misc_RNA (1)...(19): siRNA sense strand
agaagauagaagugugcaa

SEQ ID NO: 2246261 - RNA, 19 nt, Homo sapiens
  misc_RNA (1)...(19): siRNA sense strand
cguaaaucaaagaguaaca

SEQ ID NO: 2246262 - RNA, 19 nt, Homo sapiens
  misc_RNA (1)...(19): siRNA sense strand
uugaaagaacucauggaaa

SEQ ID NO: 2246263 - RNA, 19 nt, Homo sapiens
  misc_RNA (1)...(19): siRNA sense strand
gucguaaaucaaagaguaa

SEQ ID NO: 2246264 - RNA, 19 nt, Homo sapiens
  misc_RNA (1)...(19): siRNA sense strand
aagaaguacuacagaagca

SEQ ID NO: 2246265 - RNA, 19 nt, Homo sapiens
  misc_RNA (1)...(19): siRNA sense strand
agaagaagugagugaaaau

SEQ ID NO: 2246266 - RNA, 19 nt, Homo sapiens
  misc_RNA (1)...(19): siRNA sense strand
uggaaaauguaguuggaga

SEQ ID NO: 2246267 - RNA, 19 nt, Homo sapiens
  misc_RNA (1)...(19): siRNA sense strand
ggaaaauguaguuggagau

SEQ ID NO: 2246268 - RNA, 19 nt, Homo sapiens
  misc_RNA (1)...(19): siRNA sense strand
gucuaucagucuuggaaau

SEQ ID NO: 2246269 - RNA, 19 nt, Homo sapiens
  misc_RNA (1)...(19): siRNA sense strand
gcugcagaucaaugacaaa

SEQ ID NO: 2246270 - RNA, 19 nt, Homo sapiens
  misc_RNA (1)...(19): siRNA sense strand
uagaagugugcaagaagua

SEQ ID NO: 2246271 - RNA, 19 nt, Homo sapiens
  misc_RNA (1)...(19): siRNA sense strand
auggaaagaacuucaggaa

SEQ ID NO: 2246272 - RNA, 19 nt, Homo sapiens
  misc_RNA (1)...(19): siRNA sense strand
agcauggacucgaaagcaa

SEQ ID NO: 2246273 - RNA, 19 nt, Homo sapiens
  misc_RNA (1)...(19): siRNA sense strand
ucuaugaggaagagccauu

SEQ ID NO: 2246274 - RNA, 19 nt, Homo sapiens
  misc_RNA (1)...(19): siRNA sense strand
ucauggaaauagaagaagu

SEQ ID NO: 2246275 - RNA, 19 nt, Homo sapiens
  misc_RNA (1)...(19): siRNA sense strand
ggucuaucagucuuggaaa

SEQ ID NO: 2246276 - RNA, 19 nt, Homo sapiens
  misc_RNA (1)...(19): siRNA sense strand
ugcuuuaaaucgaguaaca

SEQ ID NO: 2246277 - RNA, 19 nt, Homo sapiens
  misc_RNA (1)...(19): siRNA sense strand
cuuacauguagauuggaua

SEQ ID NO: 2246278 - RNA, 19 nt, Homo sapiens
  misc_RNA (1)...(19): siRNA sense strand
agugcaaguacaauacaaa

SEQ ID NO: 2246279 - RNA, 19 nt, Homo sapiens
  misc_RNA (1)...(19): siRNA sense strand
cugagaaguggaaugaaaa

SEQ ID NO: 2246280 - RNA, 19 nt, Homo sapiens
  misc_RNA (1)...(19): siRNA sense strand
cugggaaggccaagaggaa

SEQ ID NO: 2246281 - RNA, 19 nt, Homo sapiens
  misc_RNA (1)...(19): siRNA sense strand
cuucaagguguuugggauu

SEQ ID NO: 2246282 - RNA, 19 nt, Homo sapiens
  misc_RNA (1)...(19): siRNA sense strand
aagcagaagaaguucaaau

SEQ ID NO: 2246283 - RNA, 19 nt, Homo sapiens
  misc_RNA (1)...(19): siRNA sense strand
guaauaagaaggugggcgu

SEQ ID NO: 2246284 - RNA, 19 nt, Homo sapiens
  misc_RNA (1)...(19): siRNA sense strand
ccguggagguggaugacga

SEQ ID NO: 2246285 - RNA, 19 nt, Homo sapiens
  misc_RNA (1)...(19): siRNA sense strand
cgaagcagacucaaggcua

SEQ ID NO: 2246286 - RNA, 19 nt, Homo sapiens
  misc_RNA (1)...(19): siRNA sense strand
cugugaaacucaagggccu

SEQ ID NO: 2246287 - RNA, 19 nt, Homo sapiens
  misc_RNA (1)...(19): siRNA sense strand
acuacuacaagcagaagaa

SEQ ID NO: 2246288 - RNA, 19 nt, Homo sapiens
  misc_RNA (1)...(19): siRNA sense strand
agaggaaggcccaaggcau

SEQ ID NO: 2246289 - RNA, 19 nt, Homo sapiens
  misc_RNA (1)...(19): siRNA sense strand
uccgagaggccgagaacuu

SEQ ID NO: 2246290 - RNA, 19 nt, Homo sapiens
  misc_RNA (1)...(19): siRNA sense strand
ugggcuguacgaagagaaa

SEQ ID NO: 2246291 - RNA, 19 nt, Homo sapiens
  misc_RNA (1)...(19): siRNA sense strand
gaggaaggcccaaggcauc

SEQ ID NO: 2246292 - RNA, 19 nt, Homo sapiens
  misc_RNA (1)...(19): siRNA sense strand
acugugaagacgugugaga

SEQ ID NO: 2246293 - RNA, 19 nt, Homo sapiens
  misc_RNA (1)...(19): siRNA sense strand
ucuucaagguguuugggau

SEQ ID NO: 2246294 - RNA, 19 nt, Homo sapiens
  misc_RNA (1)...(19): siRNA sense strand
agugaggacucuaggcgga

SEQ ID NO: 2246295 - RNA, 19 nt, Homo sapiens
  misc_RNA (1)...(19): siRNA sense strand
agugaggacucuaggcgga

SEQ ID NO: 2246296 - RNA, 19 nt, Homo sapiens
  misc_RNA (1)...(19): siRNA sense strand
agugaggacucuaggcgga

SEQ ID NO: 2246297 - RNA, 19 nt, Homo sapiens
  misc_RNA (1)...(19): siRNA sense strand
gcagugagguggagcugga

SEQ ID NO: 2246298 - RNA, 19 nt, Homo sapiens
  misc_RNA (1)...(19): siRNA sense strand
ggacaaauaucgacgucag

SEQ ID NO: 2246299 - RNA, 19 nt, Homo sapiens
  misc_RNA (1)...(19): siRNA sense strand
acuucagaauccagagaaa

SEQ ID NO: 2246300 - RNA, 19 nt, Homo sapiens
  misc_RNA (1)...(19): siRNA sense strand
uggaaauggauguggaaaa

SEQ ID NO: 2246301 - RNA, 19 nt, Homo sapiens
  misc_RNA (1)...(19): siRNA sense strand
cuuuagcacuggaggcaaa

SEQ ID NO: 2246302 - RNA, 19 nt, Homo sapiens
  misc_RNA (1)...(19): siRNA sense strand
cuuuacuccuccugagaaa

SEQ ID NO: 2246303 - RNA, 19 nt, Homo sapiens
  misc_RNA (1)...(19): siRNA sense strand
acauauggucucuggguau

SEQ ID NO: 2246304 - RNA, 19 nt, Homo sapiens
  misc_RNA (1)...(19): siRNA sense strand
ccaaagaauuauuacagca

SEQ ID NO: 2246305 - RNA, 19 nt, Homo sapiens
  misc_RNA (1)...(19): siRNA sense strand
gaugaagagauuauggaga

SEQ ID NO: 2246306 - RNA, 19 nt, Homo sapiens
  misc_RNA (1)...(19): siRNA sense strand
gcacugaaugccaagggaa

SEQ ID NO: 2246307 - RNA, 19 nt, Homo sapiens
  misc_RNA (1)...(19): siRNA sense strand
acgagauucuggugaugaa

SEQ ID NO: 2246308 - RNA, 19 nt, Homo sapiens
  misc_RNA (1)...(19): siRNA sense strand
uugagaugguagaaggaga

SEQ ID NO: 2246309 - RNA, 19 nt, Homo sapiens
  misc_RNA (1)...(19): siRNA sense strand
ccuccauaccucaaugaaa

SEQ ID NO: 2246310 - RNA, 19 nt, Homo sapiens
  misc_RNA (1)...(19): siRNA sense strand
caguagugacagaggagga

SEQ ID NO: 2246311 - RNA, 19 nt, Homo sapiens
  misc_RNA (1)...(19): siRNA sense strand
acaauguacuuuugggaau

SEQ ID NO: 2246312 - RNA, 19 nt, Homo sapiens
  misc_RNA (1)...(19): siRNA sense strand
cuaagaugacagaugaaga

SEQ ID NO: 2246313 - RNA, 19 nt, Homo sapiens
  misc_RNA (1)...(19): siRNA sense strand
cagcuaaagaagcaaugaa

SEQ ID NO: 2246314 - RNA, 19 nt, Homo sapiens
  misc_RNA (1)...(19): siRNA sense strand
gaacugaucauuaacgaga

SEQ ID NO: 2246315 - RNA, 19 nt, Homo sapiens
  misc_RNA (1)...(19): siRNA sense strand
guuuacaggcauuggaguu

SEQ ID NO: 2246316 - RNA, 19 nt, Homo sapiens
  misc_RNA (1)...(19): siRNA sense strand
acagagaaaggaaguaaaa

SEQ ID NO: 2246317 - RNA, 19 nt, Homo sapiens
  misc_RNA (1)...(19): siRNA sense strand
cuccauaccucaaugaaaa

SEQ ID NO: 2246318 - RNA, 19 nt, Homo sapiens
  misc_RNA (1)...(19): siRNA sense strand
cacagagaaaggaaguaaa

SEQ ID NO: 2246319 - RNA, 19 nt, Homo sapiens
  misc_RNA (1)...(19): siRNA sense strand
cgaccggaucauacgaaau

SEQ ID NO: 2246320 - RNA, 19 nt, Homo sapiens
  misc_RNA (1)...(19): siRNA sense strand
gcauaaaaucaucuccaua

SEQ ID NO: 2246321 - RNA, 19 nt, Homo sapiens
  misc_RNA (1)...(19): siRNA sense strand
agauucuggugaugaaaga

SEQ ID NO: 2246322 - RNA, 19 nt, Homo sapiens
  misc_RNA (1)...(19): siRNA sense strand
aggaggaugaugaugaaga

SEQ ID NO: 2246323 - RNA, 19 nt, Homo sapiens
  misc_RNA (1)...(19): siRNA sense strand
cuuaaaucgauguuuggaa

SEQ ID NO: 2246324 - RNA, 19 nt, Homo sapiens
  misc_RNA (1)...(19): siRNA sense strand
gacuaagaugacagaugaa

SEQ ID NO: 2246325 - RNA, 19 nt, Homo sapiens
  misc_RNA (1)...(19): siRNA sense strand
auuuacagaaacagccaaa

SEQ ID NO: 2246326 - RNA, 19 nt, Homo sapiens
  misc_RNA (1)...(19): siRNA sense strand
acugaugugguaacagaaa

SEQ ID NO: 2246327 - RNA, 19 nt, Homo sapiens
  misc_RNA (1)...(19): siRNA sense strand
acagaaacgugcauggaug

SEQ ID NO: 2246328 - RNA, 19 nt, Homo sapiens
  misc_RNA (1)...(19): siRNA sense strand
cuguaugcagagaguguuu

SEQ ID NO: 2246329 - RNA, 19 nt, Homo sapiens
  misc_RNA (1)...(19): siRNA sense strand
agacauugcaacaggacaa

SEQ ID NO: 2246330 - RNA, 19 nt, Homo sapiens
  misc_RNA (1)...(19): siRNA sense strand
aggaagaagaagaagaaga

SEQ ID NO: 2246331 - RNA, 19 nt, Homo sapiens
  misc_RNA (1)...(19): siRNA sense strand
aagaagaugaagaggaaga

SEQ ID NO: 2246332 - RNA, 19 nt, Homo sapiens
  misc_RNA (1)...(19): siRNA sense strand
cagucaacaaccagaaaua

SEQ ID NO: 2246333 - RNA, 19 nt, Homo sapiens
  misc_RNA (1)...(19): siRNA sense strand
cugaagaagaagaugaaga

SEQ ID NO: 2246334 - RNA, 19 nt, Homo sapiens
  misc_RNA (1)...(19): siRNA sense strand
ucuggauaaugaagagaaa

SEQ ID NO: 2246335 - RNA, 19 nt, Homo sapiens
  misc_RNA (1)...(19): siRNA sense strand
aagaagaagaagaagauga

SEQ ID NO: 2246336 - RNA, 19 nt, Homo sapiens
  misc_RNA (1)...(19): siRNA sense strand
uugaaaugguggaagguga

SEQ ID NO: 2246337 - RNA, 19 nt, Homo sapiens
  misc_RNA (1)...(19): siRNA sense strand
gagaagaauaagaaagcca

SEQ ID NO: 2246338 - RNA, 19 nt, Homo sapiens
  misc_RNA (1)...(19): siRNA sense strand
agaugaagaggaagaagaa

SEQ ID NO: 2246339 - RNA, 19 nt, Homo sapiens
  misc_RNA (1)...(19): siRNA sense strand
augaagaggaagaagaaga

SEQ ID NO: 2246340 - RNA, 19 nt, Homo sapiens
  misc_RNA (1)...(19): siRNA sense strand
caaaauuggaacagaagaa

SEQ ID NO: 2246341 - RNA, 19 nt, Homo sapiens
  misc_RNA (1)...(19): siRNA sense strand
caauaagaagaaggagaaa

SEQ ID NO: 2246342 - RNA, 19 nt, Homo sapiens
  misc_RNA (1)...(19): siRNA sense strand
ccauaaagcagaugaaccu

SEQ ID NO: 2246343 - RNA, 19 nt, Homo sapiens
  misc_RNA (1)...(19): siRNA sense strand
accaauaagaagaaggaga

SEQ ID NO: 2246344 - RNA, 19 nt, Homo sapiens
  misc_RNA (1)...(19): siRNA sense strand
agagauauaaagagugaca

SEQ ID NO: 2246345 - RNA, 19 nt, Homo sapiens
  misc_RNA (1)...(19): siRNA sense strand
aauuggaacagaagaagaa

SEQ ID NO: 2246346 - RNA, 19 nt, Homo sapiens
  misc_RNA (1)...(19): siRNA sense strand
ugaaaugguggaaggugaa

SEQ ID NO: 2246347 - RNA, 19 nt, Homo sapiens
  misc_RNA (1)...(19): siRNA sense strand
aagaagaagaugaagagga

SEQ ID NO: 2246348 - RNA, 19 nt, Homo sapiens
  misc_RNA (1)...(19): siRNA sense strand
aagaugaagaggaagaaga

SEQ ID NO: 2246349 - RNA, 19 nt, Homo sapiens
  misc_RNA (1)...(19): siRNA sense strand
cagcaacccaagaaggaau

SEQ ID NO: 2246350 - RNA, 19 nt, Homo sapiens
  misc_RNA (1)...(19): siRNA sense strand
aagaggaagaagaagaaga

SEQ ID NO: 2246351 - RNA, 19 nt, Homo sapiens
  misc_RNA (1)...(19): siRNA sense strand
auucuggucaugagggaaa

SEQ ID NO: 2246352 - RNA, 19 nt, Homo sapiens
  misc_RNA (1)...(19): siRNA sense strand
gggauaaaaccaauaagaa

SEQ ID NO: 2246353 - RNA, 19 nt, Homo sapiens
  misc_RNA (1)...(19): siRNA sense strand
gggugaugaacuaugggua

SEQ ID NO: 2246354 - RNA, 19 nt, Homo sapiens
  misc_RNA (1)...(19): siRNA sense strand
acucaaaccaggugaucca

SEQ ID NO: 2246355 - RNA, 19 nt, Homo sapiens
  misc_RNA (1)...(19): siRNA sense strand
ccugaagagaagaauaaga

SEQ ID NO: 2246356 - RNA, 19 nt, Homo sapiens
  misc_RNA (1)...(19): siRNA sense strand
cuucagacuuugagcauac

SEQ ID NO: 2246357 - RNA, 19 nt, Homo sapiens
  misc_RNA (1)...(19): siRNA sense strand
aauaguaacaaccgggauu

SEQ ID NO: 2246358 - RNA, 19 nt, Homo sapiens
  misc_RNA (1)...(19): siRNA sense strand
ugucugaagaagaagauga

SEQ ID NO: 2246359 - RNA, 19 nt, Homo sapiens
  misc_RNA (1)...(19): siRNA sense strand
ggguagucauggaauacuu

SEQ ID NO: 2246360 - RNA, 19 nt, Homo sapiens
  misc_RNA (1)...(19): siRNA sense strand
gagcuuuacaucaggagau

SEQ ID NO: 2246361 - RNA, 19 nt, Homo sapiens
  misc_RNA (1)...(19): siRNA sense strand
ggauaaaaccaauaagaag

SEQ ID NO: 2246362 - RNA, 19 nt, Homo sapiens
  misc_RNA (1)...(19): siRNA sense strand
gggaaaauaagaacccuaa

SEQ ID NO: 2246363 - RNA, 19 nt, Homo sapiens
  misc_RNA (1)...(19): siRNA sense strand
cuaugauuccaaagaaaca

SEQ ID NO: 2246364 - RNA, 19 nt, Homo sapiens
  misc_RNA (1)...(19): siRNA sense strand
auagcuacuugguggguga

SEQ ID NO: 2246365 - RNA, 19 nt, Homo sapiens
  misc_RNA (1)...(19): siRNA sense strand
gcaaaguaaacgaagcacu

SEQ ID NO: 2246366 - RNA, 19 nt, Homo sapiens
  misc_RNA (1)...(19): siRNA sense strand
ccccugaagagaagaauaa

SEQ ID NO: 2246367 - RNA, 19 nt, Homo sapiens
  misc_RNA (1)...(19): siRNA sense strand
ccuguauggaugaaggaca

SEQ ID NO: 2246368 - RNA, 19 nt, Homo sapiens
  misc_RNA (1)...(19): siRNA sense strand
uauggaugaaggacagaua

SEQ ID NO: 2246369 - RNA, 19 nt, Homo sapiens
  misc_RNA (1)...(19): siRNA sense strand
cuacuuggugggugaugaa

SEQ ID NO: 2246370 - RNA, 19 nt, Homo sapiens
  misc_RNA (1)...(19): siRNA sense strand
auaaaagugcacauggaua

SEQ ID NO: 2246371 - RNA, 19 nt, Homo sapiens
  misc_RNA (1)...(19): siRNA sense strand
gucugaagaagaagaugaa

SEQ ID NO: 2246372 - RNA, 19 nt, Homo sapiens
  misc_RNA (1)...(19): siRNA sense strand
aggaacacagaucggcaaa

SEQ ID NO: 2246373 - RNA, 19 nt, Homo sapiens
  misc_RNA (1)...(19): siRNA sense strand
aagaaacagucaacaacca

SEQ ID NO: 2246374 - RNA, 19 nt, Homo sapiens
  misc_RNA (1)...(19): siRNA sense strand
cugaggaugaauaguaaca

SEQ ID NO: 2246375 - RNA, 19 nt, Homo sapiens
  misc_RNA (1)...(19): siRNA sense strand
agaugacagaugaggagau

SEQ ID NO: 2246376 - RNA, 19 nt, Homo sapiens
  misc_RNA (1)...(19): siRNA sense strand
gcuuaugguccgaaaguug

SEQ ID NO: 2246377 - RNA, 19 nt, Homo sapiens
  misc_RNA (1)...(19): siRNA sense strand
ccaagaugacagaugagga

SEQ ID NO: 2246378 - RNA, 19 nt, Homo sapiens
  misc_RNA (1)...(19): siRNA sense strand
agagaagcuaagaagcauu

SEQ ID NO: 2246379 - RNA, 19 nt, Homo sapiens
  misc_RNA (1)...(19): siRNA sense strand
ggucaaggggcaucaggua

SEQ ID NO: 2246380 - RNA, 19 nt, Homo sapiens
  misc_RNA (1)...(19): siRNA sense strand
cugagguggugacucgaaa

SEQ ID NO: 2246381 - RNA, 19 nt, Homo sapiens
  misc_RNA (1)...(19): siRNA sense strand
cugaaaagaaggagcgaua

SEQ ID NO: 2246382 - RNA, 19 nt, Homo sapiens
  misc_RNA (1)...(19): siRNA sense strand
aggaagagaagcagaucaa

SEQ ID NO: 2246383 - RNA, 19 nt, Homo sapiens
  misc_RNA (1)...(19): siRNA sense strand
gaacuuggauuuagagcca

SEQ ID NO: 2246384 - RNA, 19 nt, Homo sapiens
  misc_RNA (1)...(19): siRNA sense strand
ccaaagaacaggaggagcu

SEQ ID NO: 2246385 - RNA, 19 nt, Homo sapiens
  misc_RNA (1)...(19): siRNA sense strand
cugaauauauggggagaaa

SEQ ID NO: 2246386 - RNA, 19 nt, Homo sapiens
  misc_RNA (1)...(19): siRNA sense strand
aagaaagacaguuaagaga

SEQ ID NO: 2246387 - RNA, 19 nt, Homo sapiens
  misc_RNA (1)...(19): siRNA sense strand
agaugaagaagaacgcaaa

SEQ ID NO: 2246388 - RNA, 19 nt, Homo sapiens
  misc_RNA (1)...(19): siRNA sense strand
cagcacaguaggaaagaga

SEQ ID NO: 2246389 - RNA, 19 nt, Homo sapiens
  misc_RNA (1)...(19): siRNA sense strand
gaguuuaaagagaugacaa

SEQ ID NO: 2246390 - RNA, 19 nt, Homo sapiens
  misc_RNA (1)...(19): siRNA sense strand
gauacuaaauugauggcca

SEQ ID NO: 2246391 - RNA, 19 nt, Homo sapiens
  misc_RNA (1)...(19): siRNA sense strand
ggaaguauccgaaaggcau

SEQ ID NO: 2246392 - RNA, 19 nt, Homo sapiens
  misc_RNA (1)...(19): siRNA sense strand
caacacaucccuugcggaa

SEQ ID NO: 2246393 - RNA, 19 nt, Homo sapiens
  misc_RNA (1)...(19): siRNA sense strand
ggaccagacuugcagccua

SEQ ID NO: 2246394 - RNA, 19 nt, Homo sapiens
  misc_RNA (1)...(19): siRNA sense strand
acaguaggaaagagaaauu

SEQ ID NO: 2246395 - RNA, 19 nt, Homo sapiens
  misc_RNA (1)...(19): siRNA sense strand
aaagaagagagcagcagaa

SEQ ID NO: 2246396 - RNA, 19 nt, Homo sapiens
  misc_RNA (1)...(19): siRNA sense strand
aagaacaggaggagcugaa

SEQ ID NO: 2246397 - RNA, 19 nt, Homo sapiens
  misc_RNA (1)...(19): siRNA sense strand
gagagguaucagaagcuua

SEQ ID NO: 2246398 - RNA, 19 nt, Homo sapiens
  misc_RNA (1)...(19): siRNA sense strand
agaaaguggacugaagaua

SEQ ID NO: 2246399 - RNA, 19 nt, Homo sapiens
  misc_RNA (1)...(19): siRNA sense strand
gaagauagcuggaaggagg

SEQ ID NO: 2246400 - RNA, 19 nt, Homo sapiens
  misc_RNA (1)...(19): siRNA sense strand
cuuugaaguuccugacaca

SEQ ID NO: 2246401 - RNA, 19 nt, Homo sapiens
  misc_RNA (1)...(19): siRNA sense strand
aguuaagagagcaguauga

SEQ ID NO: 2246402 - RNA, 19 nt, Homo sapiens
  misc_RNA (1)...(19): siRNA sense strand
aggcauucauguugagacu

SEQ ID NO: 2246403 - RNA, 19 nt, Homo sapiens
  misc_RNA (1)...(19): siRNA sense strand
ugucaauaccagcaaauau

SEQ ID NO: 2246404 - RNA, 19 nt, Homo sapiens
  misc_RNA (1)...(19): siRNA sense strand
gugaagaaaacaagaacuu

SEQ ID NO: 2246405 - RNA, 19 nt, Homo sapiens
  misc_RNA (1)...(19): siRNA sense strand
uagaugaagaagaacgcaa

SEQ ID NO: 2246406 - RNA, 19 nt, Homo sapiens
  misc_RNA (1)...(19): siRNA sense strand
ccauagaggaggccgacuu

SEQ ID NO: 2246407 - RNA, 19 nt, Homo sapiens
  misc_RNA (1)...(19): siRNA sense strand
uugaaagugccgaagguuu

SEQ ID NO: 2246408 - RNA, 19 nt, Homo sapiens
  misc_RNA (1)...(19): siRNA sense strand
uguugagacuuuagaaacu

SEQ ID NO: 2246409 - RNA, 19 nt, Homo sapiens
  misc_RNA (1)...(19): siRNA sense strand
gaaaacaggaagagaagca

SEQ ID NO: 2246410 - RNA, 19 nt, Homo sapiens
  misc_RNA (1)...(19): siRNA sense strand
gagcuugagcagaccgauu

SEQ ID NO: 2246411 - RNA, 19 nt, Homo sapiens
  misc_RNA (1)...(19): siRNA sense strand
cauguugagacuuuagaaa

SEQ ID NO: 2246412 - RNA, 19 nt, Homo sapiens
  misc_RNA (1)...(19): siRNA sense strand
agaaacaugccaaagaaca

SEQ ID NO: 2246413 - RNA, 19 nt, Homo sapiens
  misc_RNA (1)...(19): siRNA sense strand
gcagcagaaacaugccaaa

SEQ ID NO: 2246414 - RNA, 19 nt, Homo sapiens
  misc_RNA (1)...(19): siRNA sense strand
gcagaaagcuaucggaucc

SEQ ID NO: 2246415 - RNA, 19 nt, Homo sapiens
  misc_RNA (1)...(19): siRNA sense strand
aaaucaggaagaagaaaga

SEQ ID NO: 2246416 - RNA, 19 nt, Homo sapiens
  misc_RNA (1)...(19): siRNA sense strand
gcugaaugaugcuguggga

SEQ ID NO: 2246417 - RNA, 19 nt, Homo sapiens
  misc_RNA (1)...(19): siRNA sense strand
uggaaaagcgguuaaaaga

SEQ ID NO: 2246418 - RNA, 19 nt, Homo sapiens
  misc_RNA (1)...(19): siRNA sense strand
ggagauaaucaggagcaau

SEQ ID NO: 2246419 - RNA, 19 nt, Homo sapiens
  misc_RNA (1)...(19): siRNA sense strand
acaauaugcucuuggacgu

SEQ ID NO: 2246420 - RNA, 19 nt, Homo sapiens
  misc_RNA (1)...(19): siRNA sense strand
gaauauauggggagaaaac

SEQ ID NO: 2246421 - RNA, 19 nt, Homo sapiens
  misc_RNA (1)...(19): siRNA sense strand
gagagcaguaugaugaaaa

SEQ ID NO: 2246422 - RNA, 19 nt, Homo sapiens
  misc_RNA (1)...(19): siRNA sense strand
aagaagagagcagcagaaa

SEQ ID NO: 2246423 - RNA, 19 nt, Homo sapiens
  misc_RNA (1)...(19): siRNA sense strand
acaaaguguaccaggccau

SEQ ID NO: 2246424 - RNA, 19 nt, Homo sapiens
  misc_RNA (1)...(19): siRNA sense strand
ccauguaccggguuccaaa

SEQ ID NO: 2246425 - RNA, 19 nt, Homo sapiens
  misc_RNA (1)...(19): siRNA sense strand
uaucagacuuugagcugga

SEQ ID NO: 2246426 - RNA, 19 nt, Homo sapiens
  misc_RNA (1)...(19): siRNA sense strand
ugaaagugccgaagguuuu

SEQ ID NO: 2246427 - RNA, 19 nt, Homo sapiens
  misc_RNA (1)...(19): siRNA sense strand
ccagaagagagguaucaga

SEQ ID NO: 2246428 - RNA, 19 nt, Homo sapiens
  misc_RNA (1)...(19): siRNA sense strand
cuuugguaacauucagaua

SEQ ID NO: 2246429 - RNA, 19 nt, Homo sapiens
  misc_RNA (1)...(19): siRNA sense strand
acacugagcuugagcagac

SEQ ID NO: 2246430 - RNA, 19 nt, Homo sapiens
  misc_RNA (1)...(19): siRNA sense strand
agauauucucgaacagaua

SEQ ID NO: 2246431 - RNA, 19 nt, Homo sapiens
  misc_RNA (1)...(19): siRNA sense strand
aggcgaaacgcgagaagau

SEQ ID NO: 2246432 - RNA, 19 nt, Homo sapiens
  misc_RNA (1)...(19): siRNA sense strand
agaaagagcggaaacgaga

SEQ ID NO: 2246433 - RNA, 19 nt, Homo sapiens
  misc_RNA (1)...(19): siRNA sense strand
uggaaaacucaaagaagaa

SEQ ID NO: 2246434 - RNA, 19 nt, Homo sapiens
  misc_RNA (1)...(19): siRNA sense strand
agcuaaagcaggaaaauaa

SEQ ID NO: 2246435 - RNA, 19 nt, Homo sapiens
  misc_RNA (1)...(19): siRNA sense strand
ugcaagauaaagaggaaau

SEQ ID NO: 2246436 - RNA, 19 nt, Homo sapiens
  misc_RNA (1)...(19): siRNA sense strand
aagaggaagcugcgggaga

SEQ ID NO: 2246437 - RNA, 19 nt, Homo sapiens
  misc_RNA (1)...(19): siRNA sense strand
uagaacaguuucaggcaga

SEQ ID NO: 2246438 - RNA, 19 nt, Homo sapiens
  misc_RNA (1)...(19): siRNA sense strand
ccuagaugacauagaagau

SEQ ID NO: 2246439 - RNA, 19 nt, Homo sapiens
  misc_RNA (1)...(19): siRNA sense strand
gggcagaaagagcggaaac

SEQ ID NO: 2246440 - RNA, 19 nt, Homo sapiens
  misc_RNA (1)...(19): siRNA sense strand
gggcagaucgagaagagga

SEQ ID NO: 2246441 - RNA, 19 nt, Homo sapiens
  misc_RNA (1)...(19): siRNA sense strand
agaugaaaaugaacagcua

SEQ ID NO: 2246442 - RNA, 19 nt, Homo sapiens
  misc_RNA (1)...(19): siRNA sense strand
agaggaaaugauuggaaaa

SEQ ID NO: 2246443 - RNA, 19 nt, Homo sapiens
  misc_RNA (1)...(19): siRNA sense strand
gcggaaacgagaagaugca

SEQ ID NO: 2246444 - RNA, 19 nt, Homo sapiens
  misc_RNA (1)...(19): siRNA sense strand
accuaagacuugugagacu

SEQ ID NO: 2246445 - RNA, 19 nt, Homo sapiens
  misc_RNA (1)...(19): siRNA sense strand
gcacacuggaaaagaaaau

SEQ ID NO: 2246446 - RNA, 19 nt, Homo sapiens
  misc_RNA (1)...(19): siRNA sense strand
ggcagaucgagaagaggaa

SEQ ID NO: 2246447 - RNA, 19 nt, Homo sapiens
  misc_RNA (1)...(19): siRNA sense strand
aguuucaggcagauauaaa

SEQ ID NO: 2246448 - RNA, 19 nt, Homo sapiens
  misc_RNA (1)...(19): siRNA sense strand
cuggaggaguggaaggcga

SEQ ID NO: 2246449 - RNA, 19 nt, Homo sapiens
  misc_RNA (1)...(19): siRNA sense strand
agaagaugcaauuacacaa

SEQ ID NO: 2246450 - RNA, 19 nt, Homo sapiens
  misc_RNA (1)...(19): siRNA sense strand
agauauaacagggaugcaa

SEQ ID NO: 2246451 - RNA, 19 nt, Homo sapiens
  misc_RNA (1)...(19): siRNA sense strand
cuuacuagauccaggcagu

SEQ ID NO: 2246452 - RNA, 19 nt, Homo sapiens
  misc_RNA (1)...(19): siRNA sense strand
augaacagcuaaagcagga

SEQ ID NO: 2246453 - RNA, 19 nt, Homo sapiens
  misc_RNA (1)...(19): siRNA sense strand
gcuaaagcaggaaaauaaa

SEQ ID NO: 2246454 - RNA, 19 nt, Homo sapiens
  misc_RNA (1)...(19): siRNA sense strand
uuuugaaaguuguggguca

SEQ ID NO: 2246455 - RNA, 19 nt, Homo sapiens
  misc_RNA (1)...(19): siRNA sense strand
uggaggaguggaaggcgaa

SEQ ID NO: 2246456 - RNA, 19 nt, Homo sapiens
  misc_RNA (1)...(19): siRNA sense strand
aguggguucccuagauaua

SEQ ID NO: 2246457 - RNA, 19 nt, Homo sapiens
  misc_RNA (1)...(19): siRNA sense strand
cagcuaaagcaggaaaaua

SEQ ID NO: 2246458 - RNA, 19 nt, Homo sapiens
  misc_RNA (1)...(19): siRNA sense strand
agauagaaguacaagacau

SEQ ID NO: 2246459 - RNA, 19 nt, Homo sapiens
  misc_RNA (1)...(19): siRNA sense strand
ccgagaugagggagagaau

SEQ ID NO: 2246460 - RNA, 19 nt, Homo sapiens
  misc_RNA (1)...(19): siRNA sense strand
gggcauagggcuagugacu

SEQ ID NO: 2246461 - RNA, 19 nt, Homo sapiens
  misc_RNA (1)...(19): siRNA sense strand
uggcaagacaggugacauu

SEQ ID NO: 2246462 - RNA, 19 nt, Homo sapiens
  misc_RNA (1)...(19): siRNA sense strand
ccgugaaggacaugaauga

SEQ ID NO: 2246463 - RNA, 19 nt, Homo sapiens
  misc_RNA (1)...(19): siRNA sense strand
ucucagaggauguggcaga

SEQ ID NO: 2246464 - RNA, 19 nt, Homo sapiens
  misc_RNA (1)...(19): siRNA sense strand
ccgugaagccaguggagga

SEQ ID NO: 2246465 - RNA, 19 nt, Homo sapiens
  misc_RNA (1)...(19): siRNA sense strand
acaaggugccggaggaaca

SEQ ID NO: 2246466 - RNA, 19 nt, Homo sapiens
  misc_RNA (1)...(19): siRNA sense strand
ggccaaugacucagaccaa

SEQ ID NO: 2246467 - RNA, 19 nt, Homo sapiens
  misc_RNA (1)...(19): siRNA sense strand
ucucaguggagcaggacaa

SEQ ID NO: 2246468 - RNA, 19 nt, Homo sapiens
  misc_RNA (1)...(19): siRNA sense strand
uggcagaggaccaggagga

SEQ ID NO: 2246469 - RNA, 19 nt, Homo sapiens
  misc_RNA (1)...(19): siRNA sense strand
gggccagauagaaguacaa

SEQ ID NO: 2246470 - RNA, 19 nt, Homo sapiens
  misc_RNA (1)...(19): siRNA sense strand
ccaucaaugugcuggacga

SEQ ID NO: 2246471 - RNA, 19 nt, Homo sapiens
  misc_RNA (1)...(19): siRNA sense strand
ggcaaggccuccaagggaa

SEQ ID NO: 2246472 - RNA, 19 nt, Homo sapiens
  misc_RNA (1)...(19): siRNA sense strand
gugaaggacaugaaugaca

SEQ ID NO: 2246473 - RNA, 19 nt, Homo sapiens
  misc_RNA (1)...(19): siRNA sense strand
ggauggagcaccugaggca

SEQ ID NO: 2246474 - RNA, 19 nt, Homo sapiens
  misc_RNA (1)...(19): siRNA sense strand
ccauugagauuguggcugu

SEQ ID NO: 2246475 - RNA, 19 nt, Homo sapiens
  misc_RNA (1)...(19): siRNA sense strand
cagaaaucgaauacacauu

SEQ ID NO: 2246476 - RNA, 19 nt, Homo sapiens
  misc_RNA (1)...(19): siRNA sense strand
ggccgaacuaucugagaau

SEQ ID NO: 2246477 - RNA, 19 nt, Homo sapiens
  misc_RNA (1)...(19): siRNA sense strand
ucaaugagacucuggccaa

SEQ ID NO: 2246478 - RNA, 19 nt, Homo sapiens
  misc_RNA (1)...(19): siRNA sense strand
gggagagcuaugaguugaa

SEQ ID NO: 2246479 - RNA, 19 nt, Homo sapiens
  misc_RNA (1)...(19): siRNA sense strand
aguucaaccugaugagcga

SEQ ID NO: 2246480 - RNA, 19 nt, Homo sapiens
  misc_RNA (1)...(19): siRNA sense strand
uagaaguacaagacaucaa

SEQ ID NO: 2246481 - RNA, 19 nt, Homo sapiens
  misc_RNA (1)...(19): siRNA sense strand
agacaggcagugacagcaa

SEQ ID NO: 2246482 - RNA, 19 nt, Homo sapiens
  misc_RNA (1)...(19): siRNA sense strand
gggagaaugcccaggugca

SEQ ID NO: 2246483 - RNA, 19 nt, Homo sapiens
  misc_RNA (1)...(19): siRNA sense strand
gaaacaaaagcaaaggcaa

SEQ ID NO: 2246484 - RNA, 19 nt, Homo sapiens
  misc_RNA (1)...(19): siRNA sense strand
gugacagcaagaagaagua

SEQ ID NO: 2246485 - RNA, 19 nt, Homo sapiens
  misc_RNA (1)...(19): siRNA sense strand
ucauccaggugaaggccaa

SEQ ID NO: 2246486 - RNA, 19 nt, Homo sapiens
  misc_RNA (1)...(19): siRNA sense strand
gcuuugaucgagagcaaca

SEQ ID NO: 2246487 - RNA, 19 nt, Homo sapiens
  misc_RNA (1)...(19): siRNA sense strand
uggcgguucuugugcgcua

SEQ ID NO: 2246488 - RNA, 19 nt, Homo sapiens
  misc_RNA (1)...(19): siRNA sense strand
aggccgaacuaucugagaa

SEQ ID NO: 2246489 - RNA, 19 nt, Homo sapiens
  misc_RNA (1)...(19): siRNA sense strand
uagacuacgagaaggucaa

SEQ ID NO: 2246490 - RNA, 19 nt, Homo sapiens
  misc_RNA (1)...(19): siRNA sense strand
gaucgggaacagcgggaga

SEQ ID NO: 2246491 - RNA, 19 nt, Homo sapiens
  misc_RNA (1)...(19): siRNA sense strand
guacaaggugccggaggaa

SEQ ID NO: 2246492 - RNA, 19 nt, Homo sapiens
  misc_RNA (1)...(19): siRNA sense strand
uguacaaggugccggagga

SEQ ID NO: 2246493 - RNA, 19 nt, Homo sapiens
  misc_RNA (1)...(19): siRNA sense strand
cauccuggaguuugaggua

SEQ ID NO: 2246494 - RNA, 19 nt, Homo sapiens
  misc_RNA (1)...(19): siRNA sense strand
gcuaugaguugaagguggu

SEQ ID NO: 2246495 - RNA, 19 nt, Homo sapiens
  misc_RNA (1)...(19): siRNA sense strand
gguccaucuuuaugucaau

SEQ ID NO: 2246496 - RNA, 19 nt, Homo sapiens
  misc_RNA (1)...(19): siRNA sense strand
agauagaaguacaagacau

SEQ ID NO: 2246497 - RNA, 19 nt, Homo sapiens
  misc_RNA (1)...(19): siRNA sense strand
ccgagaugagggagagaau

SEQ ID NO: 2246498 - RNA, 19 nt, Homo sapiens
  misc_RNA (1)...(19): siRNA sense strand
gggcauagggcuagugacu

SEQ ID NO: 2246499 - RNA, 19 nt, Homo sapiens
  misc_RNA (1)...(19): siRNA sense strand
uggcaagacaggugacauu

SEQ ID NO: 2246500 - RNA, 19 nt, Homo sapiens
  misc_RNA (1)...(19): siRNA sense strand
ccgugaaggacaugaauga

SEQ ID NO: 2246501 - RNA, 19 nt, Homo sapiens
  misc_RNA (1)...(19): siRNA sense strand
ucucagaggauguggcaga

SEQ ID NO: 2246502 - RNA, 19 nt, Homo sapiens
  misc_RNA (1)...(19): siRNA sense strand
ccgugaagccaguggagga

SEQ ID NO: 2246503 - RNA, 19 nt, Homo sapiens
  misc_RNA (1)...(19): siRNA sense strand
acaaggugccggaggaaca

SEQ ID NO: 2246504 - RNA, 19 nt, Homo sapiens
  misc_RNA (1)...(19): siRNA sense strand
ggccaaugacucagaccaa

SEQ ID NO: 2246505 - RNA, 19 nt, Homo sapiens
  misc_RNA (1)...(19): siRNA sense strand
ucucaguggagcaggacaa

SEQ ID NO: 2246506 - RNA, 19 nt, Homo sapiens
  misc_RNA (1)...(19): siRNA sense strand
uggcagaggaccaggagga

SEQ ID NO: 2246507 - RNA, 19 nt, Homo sapiens
  misc_RNA (1)...(19): siRNA sense strand
gggccagauagaaguacaa

SEQ ID NO: 2246508 - RNA, 19 nt, Homo sapiens
  misc_RNA (1)...(19): siRNA sense strand
ccaucaaugugcuggacga

SEQ ID NO: 2246509 - RNA, 19 nt, Homo sapiens
  misc_RNA (1)...(19): siRNA sense strand
ggcaaggccuccaagggaa

SEQ ID NO: 2246510 - RNA, 19 nt, Homo sapiens
  misc_RNA (1)...(19): siRNA sense strand
gugaaggacaugaaugaca

SEQ ID NO: 2246511 - RNA, 19 nt, Homo sapiens
  misc_RNA (1)...(19): siRNA sense strand
ggauggagcaccugaggca

SEQ ID NO: 2246512 - RNA, 19 nt, Homo sapiens
  misc_RNA (1)...(19): siRNA sense strand
ccauugagauuguggcugu

SEQ ID NO: 2246513 - RNA, 19 nt, Homo sapiens
  misc_RNA (1)...(19): siRNA sense strand
cagaaaucgaauacacauu

SEQ ID NO: 2246514 - RNA, 19 nt, Homo sapiens
  misc_RNA (1)...(19): siRNA sense strand
ggccgaacuaucugagaau

SEQ ID NO: 2246515 - RNA, 19 nt, Homo sapiens
  misc_RNA (1)...(19): siRNA sense strand
ucaaugagacucuggccaa

SEQ ID NO: 2246516 - RNA, 19 nt, Homo sapiens
  misc_RNA (1)...(19): siRNA sense strand
gggagagcuaugaguugaa

SEQ ID NO: 2246517 - RNA, 19 nt, Homo sapiens
  misc_RNA (1)...(19): siRNA sense strand
aguucaaccugaugagcga

SEQ ID NO: 2246518 - RNA, 19 nt, Homo sapiens
  misc_RNA (1)...(19): siRNA sense strand
uagaaguacaagacaucaa

SEQ ID NO: 2246519 - RNA, 19 nt, Homo sapiens
  misc_RNA (1)...(19): siRNA sense strand
agacaggcagugacagcaa

SEQ ID NO: 2246520 - RNA, 19 nt, Homo sapiens
  misc_RNA (1)...(19): siRNA sense strand
gggagaaugcccaggugca

SEQ ID NO: 2246521 - RNA, 19 nt, Homo sapiens
  misc_RNA (1)...(19): siRNA sense strand
gaaacaaaagcaaaggcaa

SEQ ID NO: 2246522 - RNA, 19 nt, Homo sapiens
  misc_RNA (1)...(19): siRNA sense strand
gugacagcaagaagaagua

SEQ ID NO: 2246523 - RNA, 19 nt, Homo sapiens
  misc_RNA (1)...(19): siRNA sense strand
ucauccaggugaaggccaa

SEQ ID NO: 2246524 - RNA, 19 nt, Homo sapiens
  misc_RNA (1)...(19): siRNA sense strand
gcuuugaucgagagcaaca

SEQ ID NO: 2246525 - RNA, 19 nt, Homo sapiens
  misc_RNA (1)...(19): siRNA sense strand
uggcgguucuugugcgcua

SEQ ID NO: 2246526 - RNA, 19 nt, Homo sapiens
  misc_RNA (1)...(19): siRNA sense strand
aggccgaacuaucugagaa

SEQ ID NO: 2246527 - RNA, 19 nt, Homo sapiens
  misc_RNA (1)...(19): siRNA sense strand
uagacuacgagaaggucaa

SEQ ID NO: 2246528 - RNA, 19 nt, Homo sapiens
  misc_RNA (1)...(19): siRNA sense strand
gaucgggaacagcgggaga

SEQ ID NO: 2246529 - RNA, 19 nt, Homo sapiens
  misc_RNA (1)...(19): siRNA sense strand
guacaaggugccggaggaa

SEQ ID NO: 2246530 - RNA, 19 nt, Homo sapiens
  misc_RNA (1)...(19): siRNA sense strand
uguacaaggugccggagga

SEQ ID NO: 2246531 - RNA, 19 nt, Homo sapiens
  misc_RNA (1)...(19): siRNA sense strand
cauccuggaguuugaggua

SEQ ID NO: 2246532 - RNA, 19 nt, Homo sapiens
  misc_RNA (1)...(19): siRNA sense strand
gcuaugaguugaagguggu

SEQ ID NO: 2246533 - RNA, 19 nt, Homo sapiens
  misc_RNA (1)...(19): siRNA sense strand
gguccaucuuuaugucaau

SEQ ID NO: 2246534 - RNA, 19 nt, Homo sapiens
  misc_RNA (1)...(19): siRNA sense strand
ggauauagcuggugaccca

SEQ ID NO: 2246535 - RNA, 19 nt, Homo sapiens
  misc_RNA (1)...(19): siRNA sense strand
cagcauugugggaggaaau

SEQ ID NO: 2246536 - RNA, 19 nt, Homo sapiens
  misc_RNA (1)...(19): siRNA sense strand
aguuaacgccaaagacaaa

SEQ ID NO: 2246537 - RNA, 19 nt, Homo sapiens
  misc_RNA (1)...(19): siRNA sense strand
gcaacggcaucgagcgcua

SEQ ID NO: 2246538 - RNA, 19 nt, Homo sapiens
  misc_RNA (1)...(19): siRNA sense strand
uguacauagaggagaacaa

SEQ ID NO: 2246539 - RNA, 19 nt, Homo sapiens
  misc_RNA (1)...(19): siRNA sense strand
gccuguacauagaggagaa

SEQ ID NO: 2246540 - RNA, 19 nt, Homo sapiens
  misc_RNA (1)...(19): siRNA sense strand
acaucaaagacgagaacga

SEQ ID NO: 2246541 - RNA, 19 nt, Homo sapiens
  misc_RNA (1)...(19): siRNA sense strand
ugaaauuagcaaacagaga

SEQ ID NO: 2246542 - RNA, 19 nt, Homo sapiens
  misc_RNA (1)...(19): siRNA sense strand
cugacagguaugaguuuaa

SEQ ID NO: 2246543 - RNA, 19 nt, Homo sapiens
  misc_RNA (1)...(19): siRNA sense strand
agccaaauggacagaggua

SEQ ID NO: 2246544 - RNA, 19 nt, Homo sapiens
  misc_RNA (1)...(19): siRNA sense strand
gcaagguacugcaggucca

SEQ ID NO: 2246545 - RNA, 19 nt, Homo sapiens
  misc_RNA (1)...(19): siRNA sense strand
cuucuaagccaaauggaca

SEQ ID NO: 2246546 - RNA, 19 nt, Homo sapiens
  misc_RNA (1)...(19): siRNA sense strand
ccgagggcgaccagaacaa

SEQ ID NO: 2246547 - RNA, 19 nt, Homo sapiens
  misc_RNA (1)...(19): siRNA sense strand
aaguuaacgccaaagacaa

SEQ ID NO: 2246548 - RNA, 19 nt, Homo sapiens
  misc_RNA (1)...(19): siRNA sense strand
cgcucacgguggaggagaa

SEQ ID NO: 2246549 - RNA, 19 nt, Homo sapiens
  misc_RNA (1)...(19): siRNA sense strand
gguugguggugcaagugaa

SEQ ID NO: 2246550 - RNA, 19 nt, Homo sapiens
  misc_RNA (1)...(19): siRNA sense strand
aagaaaacuugcagcccaa

SEQ ID NO: 2246551 - RNA, 19 nt, Homo sapiens
  misc_RNA (1)...(19): siRNA sense strand
cguacaagaucuaccacca

SEQ ID NO: 2246552 - RNA, 19 nt, Homo sapiens
  misc_RNA (1)...(19): siRNA sense strand
ccgaggacguucuggucga

SEQ ID NO: 2246553 - RNA, 19 nt, Homo sapiens
  misc_RNA (1)...(19): siRNA sense strand
ccaagcagcuccuccggua

SEQ ID NO: 2246554 - RNA, 19 nt, Homo sapiens
  misc_RNA (1)...(19): siRNA sense strand
acgccaaagacaaaggcau

SEQ ID NO: 2246555 - RNA, 19 nt, Homo sapiens
  misc_RNA (1)...(19): siRNA sense strand
aauaacaaguacagcaaac

SEQ ID NO: 2246556 - RNA, 19 nt, Homo sapiens
  misc_RNA (1)...(19): siRNA sense strand
uuuacuucccugagaacaa

SEQ ID NO: 2246557 - RNA, 19 nt, Homo sapiens
  misc_RNA (1)...(19): siRNA sense strand
ugggagacaccaacgacaa

SEQ ID NO: 2246558 - RNA, 19 nt, Homo sapiens
  misc_RNA (1)...(19): siRNA sense strand
ggcaacagacagugaugau

SEQ ID NO: 2246559 - RNA, 19 nt, Homo sapiens
  misc_RNA (1)...(19): siRNA sense strand
gcauuaugacggugauucu

SEQ ID NO: 2246560 - RNA, 19 nt, Homo sapiens
  misc_RNA (1)...(19): siRNA sense strand
cgccaaagacaaaggcauc

SEQ ID NO: 2246561 - RNA, 19 nt, Homo sapiens
  misc_RNA (1)...(19): siRNA sense strand
ggauauagcuggugaccca

SEQ ID NO: 2246562 - RNA, 19 nt, Homo sapiens
  misc_RNA (1)...(19): siRNA sense strand
cagcauugugggaggaaau

SEQ ID NO: 2246563 - RNA, 19 nt, Homo sapiens
  misc_RNA (1)...(19): siRNA sense strand
aguuaacgccaaagacaaa

SEQ ID NO: 2246564 - RNA, 19 nt, Homo sapiens
  misc_RNA (1)...(19): siRNA sense strand
gcaacggcaucgagcgcua

SEQ ID NO: 2246565 - RNA, 19 nt, Homo sapiens
  misc_RNA (1)...(19): siRNA sense strand
uguacauagaggagaacaa

SEQ ID NO: 2246566 - RNA, 19 nt, Homo sapiens
  misc_RNA (1)...(19): siRNA sense strand
gccuguacauagaggagaa

SEQ ID NO: 2246567 - RNA, 19 nt, Homo sapiens
  misc_RNA (1)...(19): siRNA sense strand
acaucaaagacgagaacga

SEQ ID NO: 2246568 - RNA, 19 nt, Homo sapiens
  misc_RNA (1)...(19): siRNA sense strand
ugaaauuagcaaacagaga

SEQ ID NO: 2246569 - RNA, 19 nt, Homo sapiens
  misc_RNA (1)...(19): siRNA sense strand
cugacagguaugaguuuaa

SEQ ID NO: 2246570 - RNA, 19 nt, Homo sapiens
  misc_RNA (1)...(19): siRNA sense strand
agccaaauggacagaggua

SEQ ID NO: 2246571 - RNA, 19 nt, Homo sapiens
  misc_RNA (1)...(19): siRNA sense strand
gcaagguacugcaggucca

SEQ ID NO: 2246572 - RNA, 19 nt, Homo sapiens
  misc_RNA (1)...(19): siRNA sense strand
cuucuaagccaaauggaca

SEQ ID NO: 2246573 - RNA, 19 nt, Homo sapiens
  misc_RNA (1)...(19): siRNA sense strand
ccgagggcgaccagaacaa

SEQ ID NO: 2246574 - RNA, 19 nt, Homo sapiens
  misc_RNA (1)...(19): siRNA sense strand
aaguuaacgccaaagacaa

SEQ ID NO: 2246575 - RNA, 19 nt, Homo sapiens
  misc_RNA (1)...(19): siRNA sense strand
cgcucacgguggaggagaa

SEQ ID NO: 2246576 - RNA, 19 nt, Homo sapiens
  misc_RNA (1)...(19): siRNA sense strand
gguugguggugcaagugaa

SEQ ID NO: 2246577 - RNA, 19 nt, Homo sapiens
  misc_RNA (1)...(19): siRNA sense strand
aagaaaacuugcagcccaa

SEQ ID NO: 2246578 - RNA, 19 nt, Homo sapiens
  misc_RNA (1)...(19): siRNA sense strand
cguacaagaucuaccacca

SEQ ID NO: 2246579 - RNA, 19 nt, Homo sapiens
  misc_RNA (1)...(19): siRNA sense strand
ccgaggacguucuggucga

SEQ ID NO: 2246580 - RNA, 19 nt, Homo sapiens
  misc_RNA (1)...(19): siRNA sense strand
ccaagcagcuccuccggua

SEQ ID NO: 2246581 - RNA, 19 nt, Homo sapiens
  misc_RNA (1)...(19): siRNA sense strand
acgccaaagacaaaggcau

SEQ ID NO: 2246582 - RNA, 19 nt, Homo sapiens
  misc_RNA (1)...(19): siRNA sense strand
aauaacaaguacagcaaac

SEQ ID NO: 2246583 - RNA, 19 nt, Homo sapiens
  misc_RNA (1)...(19): siRNA sense strand
uuuacuucccugagaacaa

SEQ ID NO: 2246584 - RNA, 19 nt, Homo sapiens
  misc_RNA (1)...(19): siRNA sense strand
ugggagacaccaacgacaa

SEQ ID NO: 2246585 - RNA, 19 nt, Homo sapiens
  misc_RNA (1)...(19): siRNA sense strand
ggcaacagacagugaugau

SEQ ID NO: 2246586 - RNA, 19 nt, Homo sapiens
  misc_RNA (1)...(19): siRNA sense strand
gcauuaugacggugauucu

SEQ ID NO: 2246587 - RNA, 19 nt, Homo sapiens
  misc_RNA (1)...(19): siRNA sense strand
cgccaaagacaaaggcauc

SEQ ID NO: 2246588 - RNA, 19 nt, Homo sapiens
  misc_RNA (1)...(19): siRNA sense strand
ggauauagcuggugaccca

SEQ ID NO: 2246589 - RNA, 19 nt, Homo sapiens
  misc_RNA (1)...(19): siRNA sense strand
cagcauugugggaggaaau

SEQ ID NO: 2246590 - RNA, 19 nt, Homo sapiens
  misc_RNA (1)...(19): siRNA sense strand
aguuaacgccaaagacaaa

SEQ ID NO: 2246591 - RNA, 19 nt, Homo sapiens
  misc_RNA (1)...(19): siRNA sense strand
gcaacggcaucgagcgcua

SEQ ID NO: 2246592 - RNA, 19 nt, Homo sapiens
  misc_RNA (1)...(19): siRNA sense strand
uguacauagaggagaacaa

SEQ ID NO: 2246593 - RNA, 19 nt, Homo sapiens
  misc_RNA (1)...(19): siRNA sense strand
gccuguacauagaggagaa

SEQ ID NO: 2246594 - RNA, 19 nt, Homo sapiens
  misc_RNA (1)...(19): siRNA sense strand
gggcgauacagguccguua

SEQ ID NO: 2246595 - RNA, 19 nt, Homo sapiens
  misc_RNA (1)...(19): siRNA sense strand
acaucaaagacgagaacga

SEQ ID NO: 2246596 - RNA, 19 nt, Homo sapiens
  misc_RNA (1)...(19): siRNA sense strand
ugaaauuagcaaacagaga

SEQ ID NO: 2246597 - RNA, 19 nt, Homo sapiens
  misc_RNA (1)...(19): siRNA sense strand
cugacagguaugaguuuaa

SEQ ID NO: 2246598 - RNA, 19 nt, Homo sapiens
  misc_RNA (1)...(19): siRNA sense strand
agccaaauggacagaggua

SEQ ID NO: 2246599 - RNA, 19 nt, Homo sapiens
  misc_RNA (1)...(19): siRNA sense strand
gcaagguacugcaggucca

SEQ ID NO: 2246600 - RNA, 19 nt, Homo sapiens
  misc_RNA (1)...(19): siRNA sense strand
cuucuaagccaaauggaca

SEQ ID NO: 2246601 - RNA, 19 nt, Homo sapiens
  misc_RNA (1)...(19): siRNA sense strand
ccgagggcgaccagaacaa

SEQ ID NO: 2246602 - RNA, 19 nt, Homo sapiens
  misc_RNA (1)...(19): siRNA sense strand
aaguuaacgccaaagacaa

SEQ ID NO: 2246603 - RNA, 19 nt, Homo sapiens
  misc_RNA (1)...(19): siRNA sense strand
cgcucacgguggaggagaa

SEQ ID NO: 2246604 - RNA, 19 nt, Homo sapiens
  misc_RNA (1)...(19): siRNA sense strand
gguugguggugcaagugaa

SEQ ID NO: 2246605 - RNA, 19 nt, Homo sapiens
  misc_RNA (1)...(19): siRNA sense strand
aagaaaacuugcagcccaa

SEQ ID NO: 2246606 - RNA, 19 nt, Homo sapiens
  misc_RNA (1)...(19): siRNA sense strand
cguacaagaucuaccacca

SEQ ID NO: 2246607 - RNA, 19 nt, Homo sapiens
  misc_RNA (1)...(19): siRNA sense strand
ccgaggacguucuggucga

SEQ ID NO: 2246608 - RNA, 19 nt, Homo sapiens
  misc_RNA (1)...(19): siRNA sense strand
ccaagcagcuccuccggua

SEQ ID NO: 2246609 - RNA, 19 nt, Homo sapiens
  misc_RNA (1)...(19): siRNA sense strand
acgccaaagacaaaggcau

SEQ ID NO: 2246610 - RNA, 19 nt, Homo sapiens
  misc_RNA (1)...(19): siRNA sense strand
aauaacaaguacagcaaac

SEQ ID NO: 2246611 - RNA, 19 nt, Homo sapiens
  misc_RNA (1)...(19): siRNA sense strand
uuuacuucccugagaacaa

SEQ ID NO: 2246612 - RNA, 19 nt, Homo sapiens
  misc_RNA (1)...(19): siRNA sense strand
ugggagacaccaacgacaa

SEQ ID NO: 2246613 - RNA, 19 nt, Homo sapiens
  misc_RNA (1)...(19): siRNA sense strand
ggcaacagacagugaugau

SEQ ID NO: 2246614 - RNA, 19 nt, Homo sapiens
  misc_RNA (1)...(19): siRNA sense strand
gcauuaugacggugauucu

SEQ ID NO: 2246615 - RNA, 19 nt, Homo sapiens
  misc_RNA (1)...(19): siRNA sense strand
cgccaaagacaaaggcauc

SEQ ID NO: 2246616 - RNA, 19 nt, Homo sapiens
  misc_RNA (1)...(19): siRNA sense strand
uggcgugguugcuggcauu

SEQ ID NO: 2246617 - RNA, 19 nt, Homo sapiens
  misc_RNA (1)...(19): siRNA sense strand
gcagagaaguucagcggca

SEQ ID NO: 2246618 - RNA, 19 nt, Homo sapiens
  misc_RNA (1)...(19): siRNA sense strand
ucucaguggcccagagcaa

SEQ ID NO: 2246619 - RNA, 19 nt, Homo sapiens
  misc_RNA (1)...(19): siRNA sense strand
auaugaaaguaucggguga

SEQ ID NO: 2246620 - RNA, 19 nt, Homo sapiens
  misc_RNA (1)...(19): siRNA sense strand
agagaaguucagcggcaaa

SEQ ID NO: 2246621 - RNA, 19 nt, Homo sapiens
  misc_RNA (1)...(19): siRNA sense strand
gguaaaggggacagugauu

SEQ ID NO: 2246622 - RNA, 19 nt, Homo sapiens
  misc_RNA (1)...(19): siRNA sense strand
gcaaggucaucgugcgcau

SEQ ID NO: 2246623 - RNA, 19 nt, Homo sapiens
  misc_RNA (1)...(19): siRNA sense strand
ugucggugcgcgagaacaa

SEQ ID NO: 2246624 - RNA, 19 nt, Homo sapiens
  misc_RNA (1)...(19): siRNA sense strand
uggcagagaagcagagaag

SEQ ID NO: 2246625 - RNA, 19 nt, Homo sapiens
  misc_RNA (1)...(19): siRNA sense strand
aguguaagauccugggcca

SEQ ID NO: 2246626 - RNA, 19 nt, Homo sapiens
  misc_RNA (1)...(19): siRNA sense strand
cagagaaguucagcggcaa

SEQ ID NO: 2246627 - RNA, 19 nt, Homo sapiens
  misc_RNA (1)...(19): siRNA sense strand
ccguggacuacgagcguca

SEQ ID NO: 2246628 - RNA, 19 nt, Homo sapiens
  misc_RNA (1)...(19): siRNA sense strand
cgugcaccgcugaguguaa

SEQ ID NO: 2246629 - RNA, 19 nt, Homo sapiens
  misc_RNA (1)...(19): siRNA sense strand
ccaccagcccagaugucaa

SEQ ID NO: 2246630 - RNA, 19 nt, Homo sapiens
  misc_RNA (1)...(19): siRNA sense strand
uggugcacguggagguaga

SEQ ID NO: 2246631 - RNA, 19 nt, Homo sapiens
  misc_RNA (1)...(19): siRNA sense strand
gcagagaaguucagcggca

SEQ ID NO: 2246632 - RNA, 19 nt, Homo sapiens
  misc_RNA (1)...(19): siRNA sense strand
ucucaguggcccagagcaa

SEQ ID NO: 2246633 - RNA, 19 nt, Homo sapiens
  misc_RNA (1)...(19): siRNA sense strand
auaugaaaguaucggguga

SEQ ID NO: 2246634 - RNA, 19 nt, Homo sapiens
  misc_RNA (1)...(19): siRNA sense strand
agagaaguucagcggcaaa

SEQ ID NO: 2246635 - RNA, 19 nt, Homo sapiens
  misc_RNA (1)...(19): siRNA sense strand
gguaaaggggacagugauu

SEQ ID NO: 2246636 - RNA, 19 nt, Homo sapiens
  misc_RNA (1)...(19): siRNA sense strand
gcaaggucaucgugcgcau

SEQ ID NO: 2246637 - RNA, 19 nt, Homo sapiens
  misc_RNA (1)...(19): siRNA sense strand
ugucggugcgcgagaacaa

SEQ ID NO: 2246638 - RNA, 19 nt, Homo sapiens
  misc_RNA (1)...(19): siRNA sense strand
uggcagagaagcagagaag

SEQ ID NO: 2246639 - RNA, 19 nt, Homo sapiens
  misc_RNA (1)...(19): siRNA sense strand
aguguaagauccugggcca

SEQ ID NO: 2246640 - RNA, 19 nt, Homo sapiens
  misc_RNA (1)...(19): siRNA sense strand
cagagaaguucagcggcaa

SEQ ID NO: 2246641 - RNA, 19 nt, Homo sapiens
  misc_RNA (1)...(19): siRNA sense strand
ccguggacuacgagcguca

SEQ ID NO: 2246642 - RNA, 19 nt, Homo sapiens
  misc_RNA (1)...(19): siRNA sense strand
cgugcaccgcugaguguaa

SEQ ID NO: 2246643 - RNA, 19 nt, Homo sapiens
  misc_RNA (1)...(19): siRNA sense strand
ccaccagcccagaugucaa

SEQ ID NO: 2246644 - RNA, 19 nt, Homo sapiens
  misc_RNA (1)...(19): siRNA sense strand
uggugcacguggagguaga

SEQ ID NO: 2246645 - RNA, 19 nt, Homo sapiens
  misc_RNA (1)...(19): siRNA sense strand
cugaggaggccgagaggaa

SEQ ID NO: 2246646 - RNA, 19 nt, Homo sapiens
  misc_RNA (1)...(19): siRNA sense strand
cuauggaggaggaggaaga

SEQ ID NO: 2246647 - RNA, 19 nt, Homo sapiens
  misc_RNA (1)...(19): siRNA sense strand
ucucagagcuggauggacu

SEQ ID NO: 2246648 - RNA, 19 nt, Homo sapiens
  misc_RNA (1)...(19): siRNA sense strand
ucaagcaggugcaggccaa

SEQ ID NO: 2246649 - RNA, 19 nt, Homo sapiens
  misc_RNA (1)...(19): siRNA sense strand
gcaugagucuagaggcgca

SEQ ID NO: 2246650 - RNA, 19 nt, Homo sapiens
  misc_RNA (1)...(19): siRNA sense strand
aggccaaccaggaauacua

SEQ ID NO: 2246651 - RNA, 19 nt, Homo sapiens
  misc_RNA (1)...(19): siRNA sense strand
ccaucguccaugugggaga

SEQ ID NO: 2246652 - RNA, 19 nt, Homo sapiens
  misc_RNA (1)...(19): siRNA sense strand
cuucaagcucucaggacuu

SEQ ID NO: 2246653 - RNA, 19 nt, Homo sapiens
  misc_RNA (1)...(19): siRNA sense strand
gcaaugaguccaacgggca

SEQ ID NO: 2246654 - RNA, 19 nt, Homo sapiens
  misc_RNA (1)...(19): siRNA sense strand
gcaaggacucagaaggaac

SEQ ID NO: 2246655 - RNA, 19 nt, Homo sapiens
  misc_RNA (1)...(19): siRNA sense strand
uggcuauggaggaggagga

SEQ ID NO: 2246656 - RNA, 19 nt, Homo sapiens
  misc_RNA (1)...(19): siRNA sense strand
ggaagaaggcaggagcuca

SEQ ID NO: 2246657 - RNA, 19 nt, Homo sapiens
  misc_RNA (1)...(19): siRNA sense strand
ggagcgaagcguuaaggaa

SEQ ID NO: 2246658 - RNA, 19 nt, Homo sapiens
  misc_RNA (1)...(19): siRNA sense strand
acagcuaaacagaacgaaa

SEQ ID NO: 2246659 - RNA, 19 nt, Homo sapiens
  misc_RNA (1)...(19): siRNA sense strand
cuuugguagaugagacuaa

SEQ ID NO: 2246660 - RNA, 19 nt, Homo sapiens
  misc_RNA (1)...(19): siRNA sense strand
aggugaagcucgcagacau

SEQ ID NO: 2246661 - RNA, 19 nt, Homo sapiens
  misc_RNA (1)...(19): siRNA sense strand
uguuagagaagcagaaaau

SEQ ID NO: 2246662 - RNA, 19 nt, Homo sapiens
  misc_RNA (1)...(19): siRNA sense strand
agccaaaguuauugacacu

SEQ ID NO: 2246663 - RNA, 19 nt, Homo sapiens
  misc_RNA (1)...(19): siRNA sense strand
uuacagauacagagaucau

SEQ ID NO: 2246664 - RNA, 19 nt, Homo sapiens
  misc_RNA (1)...(19): siRNA sense strand
agguguaggaagaauguuu

SEQ ID NO: 2246665 - RNA, 19 nt, Homo sapiens
  misc_RNA (1)...(19): siRNA sense strand
gaggacaacauccgggaga

SEQ ID NO: 2246666 - RNA, 19 nt, Homo sapiens
  misc_RNA (1)...(19): siRNA sense strand
gguguaggaagaauguuua

SEQ ID NO: 2246667 - RNA, 19 nt, Homo sapiens
  misc_RNA (1)...(19): siRNA sense strand
agaucaugacuuugguaga

SEQ ID NO: 2246668 - RNA, 19 nt, Homo sapiens
  misc_RNA (1)...(19): siRNA sense strand
gagcgaagcguuaaggaag

SEQ ID NO: 2246669 - RNA, 19 nt, Homo sapiens
  misc_RNA (1)...(19): siRNA sense strand
aguccuaccuggagcgaag

SEQ ID NO: 2246670 - RNA, 19 nt, Homo sapiens
  misc_RNA (1)...(19): siRNA sense strand
ucuuacagauacagagauc

SEQ ID NO: 2246671 - RNA, 19 nt, Homo sapiens
  misc_RNA (1)...(19): siRNA sense strand
agagaagacagcugaggau

SEQ ID NO: 2246672 - RNA, 19 nt, Homo sapiens
  misc_RNA (1)...(19): siRNA sense strand
uucaagaggaagauagauu

SEQ ID NO: 2246673 - RNA, 19 nt, Homo sapiens
  misc_RNA (1)...(19): siRNA sense strand
cugaggaugccaaggacuu

SEQ ID NO: 2246674 - RNA, 19 nt, Homo sapiens
  misc_RNA (1)...(19): siRNA sense strand
cuaaccaagcagauggaga

SEQ ID NO: 2246675 - RNA, 19 nt, Homo sapiens
  misc_RNA (1)...(19): siRNA sense strand
auggaaaugaugagucaga

SEQ ID NO: 2246676 - RNA, 19 nt, Homo sapiens
  misc_RNA (1)...(19): siRNA sense strand
agagaagacagcugaggau

SEQ ID NO: 2246677 - RNA, 19 nt, Homo sapiens
  misc_RNA (1)...(19): siRNA sense strand
uucaagaggaagauagauu

SEQ ID NO: 2246678 - RNA, 19 nt, Homo sapiens
  misc_RNA (1)...(19): siRNA sense strand
cugaggaugccaaggacuu

SEQ ID NO: 2246679 - RNA, 19 nt, Homo sapiens
  misc_RNA (1)...(19): siRNA sense strand
cuaaccaagcagauggaga

SEQ ID NO: 2246680 - RNA, 19 nt, Homo sapiens
  misc_RNA (1)...(19): siRNA sense strand
auggaaaugaugagucaga

SEQ ID NO: 2246681 - RNA, 19 nt, Homo sapiens
  misc_RNA (1)...(19): siRNA sense strand
cauuucagggagagagauu

SEQ ID NO: 2246682 - RNA, 19 nt, Homo sapiens
  misc_RNA (1)...(19): siRNA sense strand
uuucagggagagagauuaa

SEQ ID NO: 2246683 - RNA, 19 nt, Homo sapiens
  misc_RNA (1)...(19): siRNA sense strand
ggaaauguuuguuuggucu

SEQ ID NO: 2246684 - RNA, 19 nt, Homo sapiens
  misc_RNA (1)...(19): siRNA sense strand
ugguccaguuugaggauga

SEQ ID NO: 2246685 - RNA, 19 nt, Homo sapiens
  misc_RNA (1)...(19): siRNA sense strand
ccguuucauuucagggaga

SEQ ID NO: 2246686 - RNA, 19 nt, Homo sapiens
  misc_RNA (1)...(19): siRNA sense strand
gguucuauggaaagacauu

SEQ ID NO: 2246687 - RNA, 19 nt, Homo sapiens
  misc_RNA (1)...(19): siRNA sense strand
ggaggaggcagaaggggaa

SEQ ID NO: 2246688 - RNA, 19 nt, Homo sapiens
  misc_RNA (1)...(19): siRNA sense strand
cugagaauugggacaguuu

SEQ ID NO: 2246689 - RNA, 19 nt, Homo sapiens
  misc_RNA (1)...(19): siRNA sense strand
gggaguggaaccugaaaau

SEQ ID NO: 2246690 - RNA, 19 nt, Homo sapiens
  misc_RNA (1)...(19): siRNA sense strand
cauuucagggagagagauu

SEQ ID NO: 2246691 - RNA, 19 nt, Homo sapiens
  misc_RNA (1)...(19): siRNA sense strand
uuucagggagagagauuaa

SEQ ID NO: 2246692 - RNA, 19 nt, Homo sapiens
  misc_RNA (1)...(19): siRNA sense strand
ggaaauguuuguuuggucu

SEQ ID NO: 2246693 - RNA, 19 nt, Homo sapiens
  misc_RNA (1)...(19): siRNA sense strand
ugguccaguuugaggauga

SEQ ID NO: 2246694 - RNA, 19 nt, Homo sapiens
  misc_RNA (1)...(19): siRNA sense strand
ccguuucauuucagggaga

SEQ ID NO: 2246695 - RNA, 19 nt, Homo sapiens
  misc_RNA (1)...(19): siRNA sense strand
gguucuauggaaagacauu

SEQ ID NO: 2246696 - RNA, 19 nt, Homo sapiens
  misc_RNA (1)...(19): siRNA sense strand
ggaggaggcagaaggggaa

SEQ ID NO: 2246697 - RNA, 19 nt, Homo sapiens
  misc_RNA (1)...(19): siRNA sense strand
cugagaauugggacaguuu

SEQ ID NO: 2246698 - RNA, 19 nt, Homo sapiens
  misc_RNA (1)...(19): siRNA sense strand
gggaguggaaccugaaaau

SEQ ID NO: 2246699 - RNA, 19 nt, Homo sapiens
  misc_RNA (1)...(19): siRNA sense strand
gagcaaaagauguggacaa

SEQ ID NO: 2246700 - RNA, 19 nt, Homo sapiens
  misc_RNA (1)...(19): siRNA sense strand
cuuagaaacacuagagaau

SEQ ID NO: 2246701 - RNA, 19 nt, Homo sapiens
  misc_RNA (1)...(19): siRNA sense strand
ccuacaacuugauaagaaa

SEQ ID NO: 2246702 - RNA, 19 nt, Homo sapiens
  misc_RNA (1)...(19): siRNA sense strand
uggauaauguggagguauu

SEQ ID NO: 2246703 - RNA, 19 nt, Homo sapiens
  misc_RNA (1)...(19): siRNA sense strand
gaccagaagcuuugggcaa

SEQ ID NO: 2246704 - RNA, 19 nt, Homo sapiens
  misc_RNA (1)...(19): siRNA sense strand
gcagaguggcuaaggaaau

SEQ ID NO: 2246705 - RNA, 19 nt, Homo sapiens
  misc_RNA (1)...(19): siRNA sense strand
cauuagugaugaugagcua

SEQ ID NO: 2246706 - RNA, 19 nt, Homo sapiens
  misc_RNA (1)...(19): siRNA sense strand
ugauaagaaagcagacaaa

SEQ ID NO: 2246707 - RNA, 19 nt, Homo sapiens
  misc_RNA (1)...(19): siRNA sense strand
cuccaaagucugaggauau

SEQ ID NO: 2246708 - RNA, 19 nt, Homo sapiens
  misc_RNA (1)...(19): siRNA sense strand
guuuaagguuggugaagau

SEQ ID NO: 2246709 - RNA, 19 nt, Homo sapiens
  misc_RNA (1)...(19): siRNA sense strand
agggaaacuucuugauauu

SEQ ID NO: 2246710 - RNA, 19 nt, Homo sapiens
  misc_RNA (1)...(19): siRNA sense strand
ucuaaaaguuuguggucaa

SEQ ID NO: 2246711 - RNA, 19 nt, Homo sapiens
  misc_RNA (1)...(19): siRNA sense strand
gcaacauaacuuagaaaca

SEQ ID NO: 2246712 - RNA, 19 nt, Homo sapiens
  misc_RNA (1)...(19): siRNA sense strand
ccauugacauugaaggauu

SEQ ID NO: 2246713 - RNA, 19 nt, Homo sapiens
  misc_RNA (1)...(19): siRNA sense strand
agaccaugaggaagagaaa

SEQ ID NO: 2246714 - RNA, 19 nt, Homo sapiens
  misc_RNA (1)...(19): siRNA sense strand
gcuaaagagagcaguuaau

SEQ ID NO: 2246715 - RNA, 19 nt, Homo sapiens
  misc_RNA (1)...(19): siRNA sense strand
uguccagggcauugggaaa

SEQ ID NO: 2246716 - RNA, 19 nt, Homo sapiens
  misc_RNA (1)...(19): siRNA sense strand
aaacauaugcggagaaaau

SEQ ID NO: 2246717 - RNA, 19 nt, Homo sapiens
  misc_RNA (1)...(19): siRNA sense strand
cgaaaaugggacacagaaa

SEQ ID NO: 2246718 - RNA, 19 nt, Homo sapiens
  misc_RNA (1)...(19): siRNA sense strand
ccaaagaaguauggaacga

SEQ ID NO: 2246719 - RNA, 19 nt, Homo sapiens
  misc_RNA (1)...(19): siRNA sense strand
guuuauaacaagcaggauu

SEQ ID NO: 2246720 - RNA, 19 nt, Homo sapiens
  misc_RNA (1)...(19): siRNA sense strand
gcaaauugucaucuugaaa

SEQ ID NO: 2246721 - RNA, 19 nt, Homo sapiens
  misc_RNA (1)...(19): siRNA sense strand
ccuuggaagucaugagcau

SEQ ID NO: 2246722 - RNA, 19 nt, Homo sapiens
  misc_RNA (1)...(19): siRNA sense strand
uggaaagaauagugcuaca

SEQ ID NO: 2246723 - RNA, 19 nt, Homo sapiens
  misc_RNA (1)...(19): siRNA sense strand
gaauaguucauuagugcaa

SEQ ID NO: 2246724 - RNA, 19 nt, Homo sapiens
  misc_RNA (1)...(19): siRNA sense strand
uauuagaccaugaggaaga

SEQ ID NO: 2246725 - RNA, 19 nt, Homo sapiens
  misc_RNA (1)...(19): siRNA sense strand
aaguugaaguacagaauga

SEQ ID NO: 2246726 - RNA, 19 nt, Homo sapiens
  misc_RNA (1)...(19): siRNA sense strand
gcaagauauguuagcuuua

SEQ ID NO: 2246727 - RNA, 19 nt, Homo sapiens
  misc_RNA (1)...(19): siRNA sense strand
ccuaagacagcgagaacuu

SEQ ID NO: 2246728 - RNA, 19 nt, Homo sapiens
  misc_RNA (1)...(19): siRNA sense strand
aguuuguggucaagaggaa

SEQ ID NO: 2246729 - RNA, 19 nt, Homo sapiens
  misc_RNA (1)...(19): siRNA sense strand
cagaagcauuauacagcaa

SEQ ID NO: 2246730 - RNA, 19 nt, Homo sapiens
  misc_RNA (1)...(19): siRNA sense strand
uaggaugguucuaggaaga

SEQ ID NO: 2246731 - RNA, 19 nt, Homo sapiens
  misc_RNA (1)...(19): siRNA sense strand
aauaggaggagcugugaaa

SEQ ID NO: 2246732 - RNA, 19 nt, Homo sapiens
  misc_RNA (1)...(19): siRNA sense strand
acaccgagcaguagaucaa

SEQ ID NO: 2246733 - RNA, 19 nt, Homo sapiens
  misc_RNA (1)...(19): siRNA sense strand
ggaaccaacaagagcaaaa

SEQ ID NO: 2246734 - RNA, 19 nt, Homo sapiens
  misc_RNA (1)...(19): siRNA sense strand
gcuuguauacaguggauau

SEQ ID NO: 2246735 - RNA, 19 nt, Homo sapiens
  misc_RNA (1)...(19): siRNA sense strand
gggaaagcaaggacugauu

SEQ ID NO: 2246736 - RNA, 19 nt, Homo sapiens
  misc_RNA (1)...(19): siRNA sense strand
aagaggaagugcugcagaa

SEQ ID NO: 2246737 - RNA, 19 nt, Homo sapiens
  misc_RNA (1)...(19): siRNA sense strand
cauggaaagaauagugcua

SEQ ID NO: 2246738 - RNA, 19 nt, Homo sapiens
  misc_RNA (1)...(19): siRNA sense strand
agaaacauaugcggagaaa

SEQ ID NO: 2246739 - RNA, 19 nt, Homo sapiens
  misc_RNA (1)...(19): siRNA sense strand
cguuagagaugcacuucaa

SEQ ID NO: 2246740 - RNA, 19 nt, Homo sapiens
  misc_RNA (1)...(19): siRNA sense strand
gggccauauaucucagaaa

SEQ ID NO: 2246741 - RNA, 19 nt, Homo sapiens
  misc_RNA (1)...(19): siRNA sense strand
uagcaagagugucaaggaa

SEQ ID NO: 2246742 - RNA, 19 nt, Homo sapiens
  misc_RNA (1)...(19): siRNA sense strand
ggagauaacagauucaaaa

SEQ ID NO: 2246743 - RNA, 19 nt, Homo sapiens
  misc_RNA (1)...(19): siRNA sense strand
ggagaagacacuagcagga

SEQ ID NO: 2246744 - RNA, 19 nt, Homo sapiens
  misc_RNA (1)...(19): siRNA sense strand
augaaacacccguggauuu

SEQ ID NO: 2246745 - RNA, 19 nt, Homo sapiens
  misc_RNA (1)...(19): siRNA sense strand
aguaaagaagcuaaagaga

SEQ ID NO: 2246746 - RNA, 19 nt, Homo sapiens
  misc_RNA (1)...(19): siRNA sense strand
auacaaucccucugaagaa

SEQ ID NO: 2246747 - RNA, 19 nt, Homo sapiens
  misc_RNA (1)...(19): siRNA sense strand
aagaaauacaacccagaua

SEQ ID NO: 2246748 - RNA, 19 nt, Homo sapiens
  misc_RNA (1)...(19): siRNA sense strand
acaguuacuuacagaguuu

SEQ ID NO: 2246749 - RNA, 19 nt, Homo sapiens
  misc_RNA (1)...(19): siRNA sense strand
augacaguuucgagacuaa

SEQ ID NO: 2246750 - RNA, 19 nt, Homo sapiens
  misc_RNA (1)...(19): siRNA sense strand
agcagaagaugaugaaaca

SEQ ID NO: 2246751 - RNA, 19 nt, Homo sapiens
  misc_RNA (1)...(19): siRNA sense strand
gcagagaaagggaccagaa

SEQ ID NO: 2246752 - RNA, 19 nt, Homo sapiens
  misc_RNA (1)...(19): siRNA sense strand
cagcaacauaacuuagaaa

SEQ ID NO: 2246753 - RNA, 19 nt, Homo sapiens
  misc_RNA (1)...(19): siRNA sense strand
gcuuaaagaaggacuagau

SEQ ID NO: 2246754 - RNA, 19 nt, Homo sapiens
  misc_RNA (1)...(19): siRNA sense strand
uggcagagaucgaggcaug

SEQ ID NO: 2246755 - RNA, 19 nt, Homo sapiens
  misc_RNA (1)...(19): siRNA sense strand
ccaaaugggaccaguaguu

SEQ ID NO: 2246756 - RNA, 19 nt, Homo sapiens
  misc_RNA (1)...(19): siRNA sense strand
aaaccaacaccgagcagua

SEQ ID NO: 2246757 - RNA, 19 nt, Homo sapiens
  misc_RNA (1)...(19): siRNA sense strand
cgacacaaugacaauauaa

SEQ ID NO: 2246758 - RNA, 19 nt, Homo sapiens
  misc_RNA (1)...(19): siRNA sense strand
uuuacuucgugaugagaaa

SEQ ID NO: 2246759 - RNA, 19 nt, Homo sapiens
  misc_RNA (1)...(19): siRNA sense strand
ucaaguaagcauaaaccaa

SEQ ID NO: 2246760 - RNA, 19 nt, Homo sapiens
  misc_RNA (1)...(19): siRNA sense strand
cauuacagauggaagcaga

SEQ ID NO: 2246761 - RNA, 19 nt, Homo sapiens
  misc_RNA (1)...(19): siRNA sense strand
cggauguagcagaguguga

SEQ ID NO: 2246762 - RNA, 19 nt, Homo sapiens
  misc_RNA (1)...(19): siRNA sense strand
uaggaggagcugugaaauu

SEQ ID NO: 2246763 - RNA, 19 nt, Homo sapiens
  misc_RNA (1)...(19): siRNA sense strand
agaaacuauugcuggauga

SEQ ID NO: 2246764 - RNA, 19 nt, Homo sapiens
  misc_RNA (1)...(19): siRNA sense strand
gggaagaagaccagcgcaa

SEQ ID NO: 2246765 - RNA, 19 nt, Homo sapiens
  misc_RNA (1)...(19): siRNA sense strand
ugguaaaggugaugcgaga

SEQ ID NO: 2246766 - RNA, 19 nt, Homo sapiens
  misc_RNA (1)...(19): siRNA sense strand
gagcagggauucugggaga

SEQ ID NO: 2246767 - RNA, 19 nt, Homo sapiens
  misc_RNA (1)...(19): siRNA sense strand
augagaaggcuguggagaa

SEQ ID NO: 2246768 - RNA, 19 nt, Homo sapiens
  misc_RNA (1)...(19): siRNA sense strand
ccacguacgucuugggcau

SEQ ID NO: 2246769 - RNA, 19 nt, Homo sapiens
  misc_RNA (1)...(19): siRNA sense strand
ggaauguggacguggguga

SEQ ID NO: 2246770 - RNA, 19 nt, Homo sapiens
  misc_RNA (1)...(19): siRNA sense strand
gugucugacuugagaguga

SEQ ID NO: 2246771 - RNA, 19 nt, Homo sapiens
  misc_RNA (1)...(19): siRNA sense strand
ggguagacuuuuacagcaa

SEQ ID NO: 2246772 - RNA, 19 nt, Homo sapiens
  misc_RNA (1)...(19): siRNA sense strand
ccgcaaagaacuagcgaug

SEQ ID NO: 2246773 - RNA, 19 nt, Homo sapiens
  misc_RNA (1)...(19): siRNA sense strand
gagagaaggucguggaagc

SEQ ID NO: 2246774 - RNA, 19 nt, Homo sapiens
  misc_RNA (1)...(19): siRNA sense strand
gagaagaguuuaaccgcca

SEQ ID NO: 2246775 - RNA, 19 nt, Homo sapiens
  misc_RNA (1)...(19): siRNA sense strand
agaacagagccaagcagaa

SEQ ID NO: 2246776 - RNA, 19 nt, Homo sapiens
  misc_RNA (1)...(19): siRNA sense strand
gggaggacgaguaugagaa

SEQ ID NO: 2246777 - RNA, 19 nt, Homo sapiens
  misc_RNA (1)...(19): siRNA sense strand
ggcaugacaaggaggagaa

SEQ ID NO: 2246778 - RNA, 19 nt, Homo sapiens
  misc_RNA (1)...(19): siRNA sense strand
aagaagcgccugugggaga

SEQ ID NO: 2246779 - RNA, 19 nt, Homo sapiens
  misc_RNA (1)...(19): siRNA sense strand
ugacauugacauucggcua

SEQ ID NO: 2246780 - RNA, 19 nt, Homo sapiens
  misc_RNA (1)...(19): siRNA sense strand
ccuacaaccucauucgcaa

SEQ ID NO: 2246781 - RNA, 19 nt, Homo sapiens
  misc_RNA (1)...(19): siRNA sense strand
ugggugacuuugugcuaaa

SEQ ID NO: 2246782 - RNA, 19 nt, Homo sapiens
  misc_RNA (1)...(19): siRNA sense strand
ugguggagcuguacugcaa

SEQ ID NO: 2246783 - RNA, 19 nt, Homo sapiens
  misc_RNA (1)...(19): siRNA sense strand
augcugagacccugcguaa

SEQ ID NO: 2246784 - RNA, 19 nt, Homo sapiens
  misc_RNA (1)...(19): siRNA sense strand
acaaugagguggaugccuu

SEQ ID NO: 2246785 - RNA, 19 nt, Homo sapiens
  misc_RNA (1)...(19): siRNA sense strand
ggcugagagaagaguuuaa

SEQ ID NO: 2246786 - RNA, 19 nt, Homo sapiens
  misc_RNA (1)...(19): siRNA sense strand
gcgcaagcuuaaagacauc

SEQ ID NO: 2246787 - RNA, 19 nt, Homo sapiens
  misc_RNA (1)...(19): siRNA sense strand
ucucagaccuggaggaccu

SEQ ID NO: 2246788 - RNA, 19 nt, Homo sapiens
  misc_RNA (1)...(19): siRNA sense strand
gcggagauguugcgggaug

SEQ ID NO: 2246789 - RNA, 19 nt, Homo sapiens
  misc_RNA (1)...(19): siRNA sense strand
aagacaucaugcagaaaga

SEQ ID NO: 2246790 - RNA, 19 nt, Homo sapiens
  misc_RNA (1)...(19): siRNA sense strand
cagaagagagagaugagga

SEQ ID NO: 2246791 - RNA, 19 nt, Homo sapiens
  misc_RNA (1)...(19): siRNA sense strand
ugacaggcuucaagaggca

SEQ ID NO: 2246792 - RNA, 19 nt, Homo sapiens
  misc_RNA (1)...(19): siRNA sense strand
gccugugggagaagcgaua

SEQ ID NO: 2246793 - RNA, 19 nt, Homo sapiens
  misc_RNA (1)...(19): siRNA sense strand
ggcggagggaggagcuaaa

SEQ ID NO: 2246794 - RNA, 19 nt, Homo sapiens
  misc_RNA (1)...(19): siRNA sense strand
ccuaugaugcggagauguu

SEQ ID NO: 2246795 - RNA, 19 nt, Homo sapiens
  misc_RNA (1)...(19): siRNA sense strand
gugacuguguugugugaca

SEQ ID NO: 2246796 - RNA, 19 nt, Homo sapiens
  misc_RNA (1)...(19): siRNA sense strand
ggaauugugcccagggacu

SEQ ID NO: 2246797 - RNA, 19 nt, Homo sapiens
  misc_RNA (1)...(19): siRNA sense strand
gagccaagcagaacgcaga

SEQ ID NO: 2246798 - RNA, 19 nt, Homo sapiens
  misc_RNA (1)...(19): siRNA sense strand
aggaagaggugcugggagg

SEQ ID NO: 2246799 - RNA, 19 nt, Homo sapiens
  misc_RNA (1)...(19): siRNA sense strand
agucaugaguacauccaau

SEQ ID NO: 2246800 - RNA, 19 nt, Homo sapiens
  misc_RNA (1)...(19): siRNA sense strand
ccgucaaggccaucugcaa

SEQ ID NO: 2246801 - RNA, 19 nt, Homo sapiens
  misc_RNA (1)...(19): siRNA sense strand
cagaaagaguccuuguacu

SEQ ID NO: 2246802 - RNA, 19 nt, Homo sapiens
  misc_RNA (1)...(19): siRNA sense strand
cgaccuaugaugcggagau

SEQ ID NO: 2246803 - RNA, 19 nt, Homo sapiens
  misc_RNA (1)...(19): siRNA sense strand
cugagguggccgaguguga

SEQ ID NO: 2246804 - RNA, 19 nt, Homo sapiens
  misc_RNA (1)...(19): siRNA sense strand
gggaaaaccgagagaaggu

SEQ ID NO: 2246805 - RNA, 19 nt, Homo sapiens
  misc_RNA (1)...(19): siRNA sense strand
ggcuacagcugauggagca

SEQ ID NO: 2246806 - RNA, 19 nt, Homo sapiens
  misc_RNA (1)...(19): siRNA sense strand
cagcgcaagcuuaaagaca

SEQ ID NO: 2246807 - RNA, 19 nt, Homo sapiens
  misc_RNA (1)...(19): siRNA sense strand
gugucauccugcagauuga

SEQ ID NO: 2246808 - RNA, 19 nt, Homo sapiens
  misc_RNA (1)...(19): siRNA sense strand
cuuaaagacaucaugcaga

SEQ ID NO: 2246809 - RNA, 19 nt, Homo sapiens
  misc_RNA (1)...(19): siRNA sense strand
ugucaaugcccuggccaaa

SEQ ID NO: 2246810 - RNA, 19 nt, Homo sapiens
  misc_RNA (1)...(19): siRNA sense strand
agaaaaccacuaagaggaa

SEQ ID NO: 2246811 - RNA, 19 nt, Homo sapiens
  misc_RNA (1)...(19): siRNA sense strand
cggcaugacaaggaggaga

SEQ ID NO: 2246812 - RNA, 19 nt, Homo sapiens
  misc_RNA (1)...(19): siRNA sense strand
ccacuguagacuugcuuau

SEQ ID NO: 2246813 - RNA, 19 nt, Homo sapiens
  misc_RNA (1)...(19): siRNA sense strand
gcucagacuccgaggauga

SEQ ID NO: 2246814 - RNA, 19 nt, Homo sapiens
  misc_RNA (1)...(19): siRNA sense strand
gagaagcaguggaaggaca

SEQ ID NO: 2246815 - RNA, 19 nt, Homo sapiens
  misc_RNA (1)...(19): siRNA sense strand
acacagaagccauugggaa

SEQ ID NO: 2246816 - RNA, 19 nt, Homo sapiens
  misc_RNA (1)...(19): siRNA sense strand
ccacugagaucgagcgucu

SEQ ID NO: 2246817 - RNA, 19 nt, Homo sapiens
  misc_RNA (1)...(19): siRNA sense strand
gagagaacagcguggccaa

SEQ ID NO: 2246818 - RNA, 19 nt, Homo sapiens
  misc_RNA (1)...(19): siRNA sense strand
gguacgacaagaugggcua

SEQ ID NO: 2246819 - RNA, 19 nt, Homo sapiens
  misc_RNA (1)...(19): siRNA sense strand
cccuaaaggcgacgagaga

SEQ ID NO: 2246820 - RNA, 19 nt, Homo sapiens
  misc_RNA (1)...(19): siRNA sense strand
gagagaagcggcugcguga

SEQ ID NO: 2246821 - RNA, 19 nt, Homo sapiens
  misc_RNA (1)...(19): siRNA sense strand
cgugaagacauaagcauca

SEQ ID NO: 2246822 - RNA, 19 nt, Homo sapiens
  misc_RNA (1)...(19): siRNA sense strand
ggugaagcgauguggaguu

SEQ ID NO: 2246823 - RNA, 19 nt, Homo sapiens
  misc_RNA (1)...(19): siRNA sense strand
gcucugaccaaguggagau

SEQ ID NO: 2246824 - RNA, 19 nt, Homo sapiens
  misc_RNA (1)...(19): siRNA sense strand
agaccaggccggagagaac

SEQ ID NO: 2246825 - RNA, 19 nt, Homo sapiens
  misc_RNA (1)...(19): siRNA sense strand
ccaacaugacugagcgcga

SEQ ID NO: 2246826 - RNA, 19 nt, Homo sapiens
  misc_RNA (1)...(19): siRNA sense strand
agaagcaguggaaggacaa

SEQ ID NO: 2246827 - RNA, 19 nt, Homo sapiens
  misc_RNA (1)...(19): siRNA sense strand
cugaccaaguggagaucuu

SEQ ID NO: 2246828 - RNA, 19 nt, Homo sapiens
  misc_RNA (1)...(19): siRNA sense strand
cggcaaucucggcugggaa

SEQ ID NO: 2246829 - RNA, 19 nt, Homo sapiens
  misc_RNA (1)...(19): siRNA sense strand
ccagcaacccugaggccau

SEQ ID NO: 2246830 - RNA, 19 nt, Homo sapiens
  misc_RNA (1)...(19): siRNA sense strand
aggacagacacaacggcaa

SEQ ID NO: 2246831 - RNA, 19 nt, Homo sapiens
  misc_RNA (1)...(19): siRNA sense strand
gugaugugccugaagcaau

SEQ ID NO: 2246832 - RNA, 19 nt, Homo sapiens
  misc_RNA (1)...(19): siRNA sense strand
ccaucuucaaggugggaga

SEQ ID NO: 2246833 - RNA, 19 nt, Homo sapiens
  misc_RNA (1)...(19): siRNA sense strand
cucuugaagcacagguuua

SEQ ID NO: 2246834 - RNA, 19 nt, Homo sapiens
  misc_RNA (1)...(19): siRNA sense strand
ugucugaagugaaggugca

SEQ ID NO: 2246835 - RNA, 19 nt, Homo sapiens
  misc_RNA (1)...(19): siRNA sense strand
ggaaggacaacgugaaccu

SEQ ID NO: 2246836 - RNA, 19 nt, Homo sapiens
  misc_RNA (1)...(19): siRNA sense strand
gaguauauucugugggcag

SEQ ID NO: 2246837 - RNA, 19 nt, Homo sapiens
  misc_RNA (1)...(19): siRNA sense strand
ggaccuacgacaugaucca

SEQ ID NO: 2246838 - RNA, 19 nt, Homo sapiens
  misc_RNA (1)...(19): siRNA sense strand
gggugaaaguccugcgguc

SEQ ID NO: 2246839 - RNA, 19 nt, Homo sapiens
  misc_RNA (1)...(19): siRNA sense strand
gcgauguggaguuagugaa

SEQ ID NO: 2246840 - RNA, 19 nt, Homo sapiens
  misc_RNA (1)...(19): siRNA sense strand
ccuguuuucugcugagaua

SEQ ID NO: 2246841 - RNA, 19 nt, Homo sapiens
  misc_RNA (1)...(19): siRNA sense strand
gcaaucaaguuccugguca

SEQ ID NO: 2246842 - RNA, 19 nt, Homo sapiens
  misc_RNA (1)...(19): siRNA sense strand
gggcuaugugcgggaguau

SEQ ID NO: 2246843 - RNA, 19 nt, Homo sapiens
  misc_RNA (1)...(19): siRNA sense strand
augaagagggccaccagaa

SEQ ID NO: 2246844 - RNA, 19 nt, Homo sapiens
  misc_RNA (1)...(19): siRNA sense strand
gcucagacuccgaggauga

SEQ ID NO: 2246845 - RNA, 19 nt, Homo sapiens
  misc_RNA (1)...(19): siRNA sense strand
gagaagcaguggaaggaca

SEQ ID NO: 2246846 - RNA, 19 nt, Homo sapiens
  misc_RNA (1)...(19): siRNA sense strand
acacagaagccauugggaa

SEQ ID NO: 2246847 - RNA, 19 nt, Homo sapiens
  misc_RNA (1)...(19): siRNA sense strand
ccacugagaucgagcgucu

SEQ ID NO: 2246848 - RNA, 19 nt, Homo sapiens
  misc_RNA (1)...(19): siRNA sense strand
gagagaacagcguggccaa

SEQ ID NO: 2246849 - RNA, 19 nt, Homo sapiens
  misc_RNA (1)...(19): siRNA sense strand
gguacgacaagaugggcua

SEQ ID NO: 2246850 - RNA, 19 nt, Homo sapiens
  misc_RNA (1)...(19): siRNA sense strand
cccuaaaggcgacgagaga

SEQ ID NO: 2246851 - RNA, 19 nt, Homo sapiens
  misc_RNA (1)...(19): siRNA sense strand
gagagaagcggcugcguga

SEQ ID NO: 2246852 - RNA, 19 nt, Homo sapiens
  misc_RNA (1)...(19): siRNA sense strand
cgugaagacauaagcauca

SEQ ID NO: 2246853 - RNA, 19 nt, Homo sapiens
  misc_RNA (1)...(19): siRNA sense strand
ggugaagcgauguggaguu

SEQ ID NO: 2246854 - RNA, 19 nt, Homo sapiens
  misc_RNA (1)...(19): siRNA sense strand
gcucugaccaaguggagau

SEQ ID NO: 2246855 - RNA, 19 nt, Homo sapiens
  misc_RNA (1)...(19): siRNA sense strand
agaccaggccggagagaac

SEQ ID NO: 2246856 - RNA, 19 nt, Homo sapiens
  misc_RNA (1)...(19): siRNA sense strand
ccaacaugacugagcgcga

SEQ ID NO: 2246857 - RNA, 19 nt, Homo sapiens
  misc_RNA (1)...(19): siRNA sense strand
agaagcaguggaaggacaa

SEQ ID NO: 2246858 - RNA, 19 nt, Homo sapiens
  misc_RNA (1)...(19): siRNA sense strand
cugaccaaguggagaucuu

SEQ ID NO: 2246859 - RNA, 19 nt, Homo sapiens
  misc_RNA (1)...(19): siRNA sense strand
cggcaaucucggcugggaa

SEQ ID NO: 2246860 - RNA, 19 nt, Homo sapiens
  misc_RNA (1)...(19): siRNA sense strand
ccagcaacccugaggccau

SEQ ID NO: 2246861 - RNA, 19 nt, Homo sapiens
  misc_RNA (1)...(19): siRNA sense strand
aggacagacacaacggcaa

SEQ ID NO: 2246862 - RNA, 19 nt, Homo sapiens
  misc_RNA (1)...(19): siRNA sense strand
gugaugugccugaagcaau

SEQ ID NO: 2246863 - RNA, 19 nt, Homo sapiens
  misc_RNA (1)...(19): siRNA sense strand
ccaucuucaaggugggaga

SEQ ID NO: 2246864 - RNA, 19 nt, Homo sapiens
  misc_RNA (1)...(19): siRNA sense strand
cucuugaagcacagguuua

SEQ ID NO: 2246865 - RNA, 19 nt, Homo sapiens
  misc_RNA (1)...(19): siRNA sense strand
ugucugaagugaaggugca

SEQ ID NO: 2246866 - RNA, 19 nt, Homo sapiens
  misc_RNA (1)...(19): siRNA sense strand
ggaaggacaacgugaaccu

SEQ ID NO: 2246867 - RNA, 19 nt, Homo sapiens
  misc_RNA (1)...(19): siRNA sense strand
gaguauauucugugggcag

SEQ ID NO: 2246868 - RNA, 19 nt, Homo sapiens
  misc_RNA (1)...(19): siRNA sense strand
ggaccuacgacaugaucca

SEQ ID NO: 2246869 - RNA, 19 nt, Homo sapiens
  misc_RNA (1)...(19): siRNA sense strand
gggugaaaguccugcgguc

SEQ ID NO: 2246870 - RNA, 19 nt, Homo sapiens
  misc_RNA (1)...(19): siRNA sense strand
gcgauguggaguuagugaa

SEQ ID NO: 2246871 - RNA, 19 nt, Homo sapiens
  misc_RNA (1)...(19): siRNA sense strand
gcaaucaaguuccugguca

SEQ ID NO: 2246872 - RNA, 19 nt, Homo sapiens
  misc_RNA (1)...(19): siRNA sense strand
gggcuaugugcgggaguau

SEQ ID NO: 2246873 - RNA, 19 nt, Homo sapiens
  misc_RNA (1)...(19): siRNA sense strand
augaagagggccaccagaa

SEQ ID NO: 2246874 - RNA, 19 nt, Homo sapiens
  misc_RNA (1)...(19): siRNA sense strand
ccuguuuucugcugagaua

SEQ ID NO: 2246875 - RNA, 19 nt, Homo sapiens
  misc_RNA (1)...(19): siRNA sense strand
gcacagagauuugggcgaa

SEQ ID NO: 2246876 - RNA, 19 nt, Homo sapiens
  misc_RNA (1)...(19): siRNA sense strand
uuacaaaggcacauggcua

SEQ ID NO: 2246877 - RNA, 19 nt, Homo sapiens
  misc_RNA (1)...(19): siRNA sense strand
ccgaaaggauguccggaga

SEQ ID NO: 2246878 - RNA, 19 nt, Homo sapiens
  misc_RNA (1)...(19): siRNA sense strand
cauaugaagaagagucaca

SEQ ID NO: 2246879 - RNA, 19 nt, Homo sapiens
  misc_RNA (1)...(19): siRNA sense strand
augacaugcccaauagaua

SEQ ID NO: 2246880 - RNA, 19 nt, Homo sapiens
  misc_RNA (1)...(19): siRNA sense strand
aguauugugcacagagauu

SEQ ID NO: 2246881 - RNA, 19 nt, Homo sapiens
  misc_RNA (1)...(19): siRNA sense strand
gaaacguaagcguggugaa

SEQ ID NO: 2246882 - RNA, 19 nt, Homo sapiens
  misc_RNA (1)...(19): siRNA sense strand
ccuagaugauggugcagga

SEQ ID NO: 2246883 - RNA, 19 nt, Homo sapiens
  misc_RNA (1)...(19): siRNA sense strand
ccacacaaacacaggaucu

SEQ ID NO: 2246884 - RNA, 19 nt, Homo sapiens
  misc_RNA (1)...(19): siRNA sense strand
ugcaaacacuauagggcuu

SEQ ID NO: 2246885 - RNA, 19 nt, Homo sapiens
  misc_RNA (1)...(19): siRNA sense strand
gagucacaaucaagagcuu

SEQ ID NO: 2246886 - RNA, 19 nt, Homo sapiens
  misc_RNA (1)...(19): siRNA sense strand
aguacaaauuacaaaggca

SEQ ID NO: 2246887 - RNA, 19 nt, Homo sapiens
  misc_RNA (1)...(19): siRNA sense strand
uugucagaaguaagagaua

SEQ ID NO: 2246888 - RNA, 19 nt, Homo sapiens
  misc_RNA (1)...(19): siRNA sense strand
cuguaagguauguuugcaa

SEQ ID NO: 2246889 - RNA, 19 nt, Homo sapiens
  misc_RNA (1)...(19): siRNA sense strand
ggagacacaugguggugca

SEQ ID NO: 2246890 - RNA, 19 nt, Homo sapiens
  misc_RNA (1)...(19): siRNA sense strand
agaaaacccacaaguguaa

SEQ ID NO: 2246891 - RNA, 19 nt, Homo sapiens
  misc_RNA (1)...(19): siRNA sense strand
gcgaagaauguggcaagaa

SEQ ID NO: 2246892 - RNA, 19 nt, Homo sapiens
  misc_RNA (1)...(19): siRNA sense strand
guuuaagugcgaagaaugu

SEQ ID NO: 2246893 - RNA, 19 nt, Homo sapiens
  misc_RNA (1)...(19): siRNA sense strand
gagauuugggcgaaaggau

SEQ ID NO: 2246894 - RNA, 19 nt, Homo sapiens
  misc_RNA (1)...(19): siRNA sense strand
caguuaaaccucuacaaca

SEQ ID NO: 2246895 - RNA, 19 nt, Homo sapiens
  misc_RNA (1)...(19): siRNA sense strand
gugaaaccaaaccaagaaa

SEQ ID NO: 2246896 - RNA, 19 nt, Homo sapiens
  misc_RNA (1)...(19): siRNA sense strand
guugagaaauuaaagguuc

SEQ ID NO: 2246897 - RNA, 19 nt, Homo sapiens
  misc_RNA (1)...(19): siRNA sense strand
gagaguuaccugauggagu

SEQ ID NO: 2246898 - RNA, 19 nt, Homo sapiens
  misc_RNA (1)...(19): siRNA sense strand
cacagagauuugggcgaaa

SEQ ID NO: 2246899 - RNA, 19 nt, Homo sapiens
  misc_RNA (1)...(19): siRNA sense strand
cgacauaugaagaagaguc

SEQ ID NO: 2246900 - RNA, 19 nt, Homo sapiens
  misc_RNA (1)...(19): siRNA sense strand
gacauaugaagaagaguca

SEQ ID NO: 2246901 - RNA, 19 nt, Homo sapiens
  misc_RNA (1)...(19): siRNA sense strand
aguuaaaccucuacaacac

SEQ ID NO: 2246902 - RNA, 19 nt, Homo sapiens
  misc_RNA (1)...(19): siRNA sense strand
aguucuaccucauaugcaa

SEQ ID NO: 2246903 - RNA, 19 nt, Homo sapiens
  misc_RNA (1)...(19): siRNA sense strand
aguuuaagcacaaguacca

SEQ ID NO: 2246904 - RNA, 19 nt, Homo sapiens
  misc_RNA (1)...(19): siRNA sense strand
augcaaagcaggaggagga

SEQ ID NO: 2246905 - RNA, 19 nt, Homo sapiens
  misc_RNA (1)...(19): siRNA sense strand
gcaaggaccaucugcggaa

SEQ ID NO: 2246906 - RNA, 19 nt, Homo sapiens
  misc_RNA (1)...(19): siRNA sense strand
cagucagugugaaggaaga

SEQ ID NO: 2246907 - RNA, 19 nt, Homo sapiens
  misc_RNA (1)...(19): siRNA sense strand
caaccagagcagagaccau

SEQ ID NO: 2246908 - RNA, 19 nt, Homo sapiens
  misc_RNA (1)...(19): siRNA sense strand
gugccaaggagaagaagca

SEQ ID NO: 2246909 - RNA, 19 nt, Homo sapiens
  misc_RNA (1)...(19): siRNA sense strand
agucaagugaagugccaau

SEQ ID NO: 2246910 - RNA, 19 nt, Homo sapiens
  misc_RNA (1)...(19): siRNA sense strand
cuguauaggcacauggcca

SEQ ID NO: 2246911 - RNA, 19 nt, Homo sapiens
  misc_RNA (1)...(19): siRNA sense strand
acaauacgaagcugggcua

SEQ ID NO: 2246912 - RNA, 19 nt, Homo sapiens
  misc_RNA (1)...(19): siRNA sense strand
auaagauguuucaccgcaa

SEQ ID NO: 2246913 - RNA, 19 nt, Homo sapiens
  misc_RNA (1)...(19): siRNA sense strand
gaggccuggucaugggcua

SEQ ID NO: 2246914 - RNA, 19 nt, Homo sapiens
  misc_RNA (1)...(19): siRNA sense strand
ugcucaagaucaagacaga

SEQ ID NO: 2246915 - RNA, 19 nt, Homo sapiens
  misc_RNA (1)...(19): siRNA sense strand
ggauaaaucuauaagcaca

SEQ ID NO: 2246916 - RNA, 19 nt, Homo sapiens
  misc_RNA (1)...(19): siRNA sense strand
guuaaaugaaggugaggaa

SEQ ID NO: 2246917 - RNA, 19 nt, Homo sapiens
  misc_RNA (1)...(19): siRNA sense strand
gcgcgagauuguggagaaa

SEQ ID NO: 2246918 - RNA, 19 nt, Homo sapiens
  misc_RNA (1)...(19): siRNA sense strand
caggaauuaaugagacaaa

SEQ ID NO: 2246919 - RNA, 19 nt, Homo sapiens
  misc_RNA (1)...(19): siRNA sense strand
ucguagaagugaaaccaaa

SEQ ID NO: 2246920 - RNA, 19 nt, Homo sapiens
  misc_RNA (1)...(19): siRNA sense strand
uugcaugcuuaaugggaaa

SEQ ID NO: 2246921 - RNA, 19 nt, Homo sapiens
  misc_RNA (1)...(19): siRNA sense strand
ugaauuuacuggaaggaga

SEQ ID NO: 2246922 - RNA, 19 nt, Homo sapiens
  misc_RNA (1)...(19): siRNA sense strand
gcgagauuguggagaaaau

SEQ ID NO: 2246923 - RNA, 19 nt, Homo sapiens
  misc_RNA (1)...(19): siRNA sense strand
augaaagagccaucaauaa

SEQ ID NO: 2246924 - RNA, 19 nt, Homo sapiens
  misc_RNA (1)...(19): siRNA sense strand
cuacaaggugcgcgagauu

SEQ ID NO: 2246925 - RNA, 19 nt, Homo sapiens
  misc_RNA (1)...(19): siRNA sense strand
cagcaacaaagauggcaaa

SEQ ID NO: 2246926 - RNA, 19 nt, Homo sapiens
  misc_RNA (1)...(19): siRNA sense strand
cagcaaaacauuccgaaaa

SEQ ID NO: 2246927 - RNA, 19 nt, Homo sapiens
  misc_RNA (1)...(19): siRNA sense strand
ggaugaauuccuugggagu

SEQ ID NO: 2246928 - RNA, 19 nt, Homo sapiens
  misc_RNA (1)...(19): siRNA sense strand
gugaggaacuagaggagcu

SEQ ID NO: 2246929 - RNA, 19 nt, Homo sapiens
  misc_RNA (1)...(19): siRNA sense strand
agaugugguuucaggcaau

SEQ ID NO: 2246930 - RNA, 19 nt, Homo sapiens
  misc_RNA (1)...(19): siRNA sense strand
aagaaaugaucaggagaga

SEQ ID NO: 2246931 - RNA, 19 nt, Homo sapiens
  misc_RNA (1)...(19): siRNA sense strand
aaggagagagcaaggaaga

SEQ ID NO: 2246932 - RNA, 19 nt, Homo sapiens
  misc_RNA (1)...(19): siRNA sense strand
gaccuaaaugaaaggaauu

SEQ ID NO: 2246933 - RNA, 19 nt, Homo sapiens
  misc_RNA (1)...(19): siRNA sense strand
agauaaacugggcugcaaa

SEQ ID NO: 2246934 - RNA, 19 nt, Homo sapiens
  misc_RNA (1)...(19): siRNA sense strand
uuuccagcuucaaggauaa

SEQ ID NO: 2246935 - RNA, 19 nt, Homo sapiens
  misc_RNA (1)...(19): siRNA sense strand
cagaugugguuucaggcaa

SEQ ID NO: 2246936 - RNA, 19 nt, Homo sapiens
  misc_RNA (1)...(19): siRNA sense strand
agagcaaggaagagagaac

SEQ ID NO: 2246937 - RNA, 19 nt, Homo sapiens
  misc_RNA (1)...(19): siRNA sense strand
auaauuaacaagagggaag

SEQ ID NO: 2246938 - RNA, 19 nt, Homo sapiens
  misc_RNA (1)...(19): siRNA sense strand
gggaagaacaaggccaaau

SEQ ID NO: 2246939 - RNA, 19 nt, Homo sapiens
  misc_RNA (1)...(19): siRNA sense strand
ggauauaugcauuaccuga

SEQ ID NO: 2246940 - RNA, 19 nt, Homo sapiens
  misc_RNA (1)...(19): siRNA sense strand
guaacuaugcaguggaacu

SEQ ID NO: 2246941 - RNA, 19 nt, Homo sapiens
  misc_RNA (1)...(19): siRNA sense strand
acuuaucugaugaggacaa

SEQ ID NO: 2246942 - RNA, 19 nt, Homo sapiens
  misc_RNA (1)...(19): siRNA sense strand
cugaugaggacaagcugaa

SEQ ID NO: 2246943 - RNA, 19 nt, Homo sapiens
  misc_RNA (1)...(19): siRNA sense strand
auuaaggacucgagagccu

SEQ ID NO: 2246944 - RNA, 19 nt, Homo sapiens
  misc_RNA (1)...(19): siRNA sense strand
gauuacugcuauuggagga

SEQ ID NO: 2246945 - RNA, 19 nt, Homo sapiens
  misc_RNA (1)...(19): siRNA sense strand
uaaaugaaggugaggaacu

SEQ ID NO: 2246946 - RNA, 19 nt, Homo sapiens
  misc_RNA (1)...(19): siRNA sense strand
guacagugaccuugcagau

SEQ ID NO: 2246947 - RNA, 19 nt, Homo sapiens
  misc_RNA (1)...(19): siRNA sense strand
aagaacuacaagaggcauu

SEQ ID NO: 2246948 - RNA, 19 nt, Homo sapiens
  misc_RNA (1)...(19): siRNA sense strand
gcauucuuauucagaggaa

SEQ ID NO: 2246949 - RNA, 19 nt, Homo sapiens
  misc_RNA (1)...(19): siRNA sense strand
ugaacuaccaucugaccaa

SEQ ID NO: 2246950 - RNA, 19 nt, Homo sapiens
  misc_RNA (1)...(19): siRNA sense strand
augagaagguacacauuga

SEQ ID NO: 2246951 - RNA, 19 nt, Homo sapiens
  misc_RNA (1)...(19): siRNA sense strand
auuuccagcuucaaggaua

SEQ ID NO: 2246952 - RNA, 19 nt, Homo sapiens
  misc_RNA (1)...(19): siRNA sense strand
aggaauuacugcugcgaug

SEQ ID NO: 2246953 - RNA, 19 nt, Homo sapiens
  misc_RNA (1)...(19): siRNA sense strand
aggcaauccuaaacuuaau

SEQ ID NO: 2246954 - RNA, 19 nt, Homo sapiens
  misc_RNA (1)...(19): siRNA sense strand
aaagcaaagauaucagcaa

SEQ ID NO: 2246955 - RNA, 19 nt, Homo sapiens
  misc_RNA (1)...(19): siRNA sense strand
agggaagggauuacugcua

SEQ ID NO: 2246956 - RNA, 19 nt, Homo sapiens
  misc_RNA (1)...(19): siRNA sense strand
ugaagaacuacaagaggca

SEQ ID NO: 2246957 - RNA, 19 nt, Homo sapiens
  misc_RNA (1)...(19): siRNA sense strand
cuguaacuaugcaguggaa

SEQ ID NO: 2246958 - RNA, 19 nt, Homo sapiens
  misc_RNA (1)...(19): siRNA sense strand
cagcugaugagaagguaca

SEQ ID NO: 2246959 - RNA, 19 nt, Homo sapiens
  misc_RNA (1)...(19): siRNA sense strand
cauugaccuuucaggaauu

SEQ ID NO: 2246960 - RNA, 19 nt, Homo sapiens
  misc_RNA (1)...(19): siRNA sense strand
cgaauaauaaugacaucga

SEQ ID NO: 2246961 - RNA, 19 nt, Homo sapiens
  misc_RNA (1)...(19): siRNA sense strand
cugaugaccucguagaagu

SEQ ID NO: 2246962 - RNA, 19 nt, Homo sapiens
  misc_RNA (1)...(19): siRNA sense strand
ugucacuaaugcaagaauu

SEQ ID NO: 2246963 - RNA, 19 nt, Homo sapiens
  misc_RNA (1)...(19): siRNA sense strand
cagaucucaaagaaggaaa

SEQ ID NO: 2246964 - RNA, 19 nt, Homo sapiens
  misc_RNA (1)...(19): siRNA sense strand
acgacgaggaggagacgua

SEQ ID NO: 2246965 - RNA, 19 nt, Homo sapiens
  misc_RNA (1)...(19): siRNA sense strand
ccaaguacauccuggagca

SEQ ID NO: 2246966 - RNA, 19 nt, Homo sapiens
  misc_RNA (1)...(19): siRNA sense strand
aguacauccuggagcaguu

SEQ ID NO: 2246967 - RNA, 19 nt, Homo sapiens
  misc_RNA (1)...(19): siRNA sense strand
auauaagcuccgagagaac

SEQ ID NO: 2246968 - RNA, 19 nt, Homo sapiens
  misc_RNA (1)...(19): siRNA sense strand
ggcagguggugaagaucau

SEQ ID NO: 2246969 - RNA, 19 nt, Homo sapiens
  misc_RNA (1)...(19): siRNA sense strand
gcacagggaaguauggcuu

SEQ ID NO: 2246970 - RNA, 19 nt, Homo sapiens
  misc_RNA (1)...(19): siRNA sense strand
ccaguuaaguacaaggcca

SEQ ID NO: 2246971 - RNA, 19 nt, Homo sapiens
  misc_RNA (1)...(19): siRNA sense strand
gcuuaaagauuguggggac

SEQ ID NO: 2246972 - RNA, 19 nt, Homo sapiens
  misc_RNA (1)...(19): siRNA sense strand
caguuaaguacaaggccau

SEQ ID NO: 2246973 - RNA, 19 nt, Homo sapiens
  misc_RNA (1)...(19): siRNA sense strand
cggugaagcagaagcucuu

SEQ ID NO: 2246974 - RNA, 19 nt, Homo sapiens
  misc_RNA (1)...(19): siRNA sense strand
acguaaagaugaaggaaaa

SEQ ID NO: 2246975 - RNA, 19 nt, Homo sapiens
  misc_RNA (1)...(19): siRNA sense strand
ccagagaagaagagggaga

SEQ ID NO: 2246976 - RNA, 19 nt, Homo sapiens
  misc_RNA (1)...(19): siRNA sense strand
ugacagaggugaaggcuga

SEQ ID NO: 2246977 - RNA, 19 nt, Homo sapiens
  misc_RNA (1)...(19): siRNA sense strand
gguuggagguggugggcau

SEQ ID NO: 2246978 - RNA, 19 nt, Homo sapiens
  misc_RNA (1)...(19): siRNA sense strand
ggguggaagugguggacau

SEQ ID NO: 2246979 - RNA, 19 nt, Homo sapiens
  misc_RNA (1)...(19): siRNA sense strand
aggcaaacugagagaauau

SEQ ID NO: 2246980 - RNA, 19 nt, Homo sapiens
  misc_RNA (1)...(19): siRNA sense strand
cugagaaagauaagaagaa

SEQ ID NO: 2246981 - RNA, 19 nt, Homo sapiens
  misc_RNA (1)...(19): siRNA sense strand
gggcaacagcaguggacau

SEQ ID NO: 2246982 - RNA, 19 nt, Homo sapiens
  misc_RNA (1)...(19): siRNA sense strand
uggugaagcagcugagcaa

SEQ ID NO: 2246983 - RNA, 19 nt, Homo sapiens
  misc_RNA (1)...(19): siRNA sense strand
cggaaaggcaggaagagga

SEQ ID NO: 2246984 - RNA, 19 nt, Homo sapiens
  misc_RNA (1)...(19): siRNA sense strand
ugaugaaggaagcacgaaa

SEQ ID NO: 2246985 - RNA, 19 nt, Homo sapiens
  misc_RNA (1)...(19): siRNA sense strand
ccgacaugcauuugagaca

SEQ ID NO: 2246986 - RNA, 19 nt, Homo sapiens
  misc_RNA (1)...(19): siRNA sense strand
uggcaugggaagugggcau

SEQ ID NO: 2246987 - RNA, 19 nt, Homo sapiens
  misc_RNA (1)...(19): siRNA sense strand
gugaauaagaucaaggacu

SEQ ID NO: 2246988 - RNA, 19 nt, Homo sapiens
  misc_RNA (1)...(19): siRNA sense strand
gggcaugguuggagguggu

SEQ ID NO: 2246989 - RNA, 19 nt, Homo sapiens
  misc_RNA (1)...(19): siRNA sense strand
ccuuggugccugugaagaa

SEQ ID NO: 2246990 - RNA, 19 nt, Homo sapiens
  misc_RNA (1)...(19): siRNA sense strand
caaccagacuauucggaca

SEQ ID NO: 2246991 - RNA, 19 nt, Homo sapiens
  misc_RNA (1)...(19): siRNA sense strand
gagaaagauaagaagaaac

SEQ ID NO: 2246992 - RNA, 19 nt, Homo sapiens
  misc_RNA (1)...(19): siRNA sense strand
aacguaaagaugaaggaaa

SEQ ID NO: 2246993 - RNA, 19 nt, Homo sapiens
  misc_RNA (1)...(19): siRNA sense strand
ccuaaugccaccaaagaga

SEQ ID NO: 2246994 - RNA, 19 nt, Homo sapiens
  misc_RNA (1)...(19): siRNA sense strand
ugaaacugaacgaguaaau

SEQ ID NO: 2246995 - RNA, 19 nt, Homo sapiens
  misc_RNA (1)...(19): siRNA sense strand
cauuaauguccaagagauc

SEQ ID NO: 2246996 - RNA, 19 nt, Homo sapiens
  misc_RNA (1)...(19): siRNA sense strand
cugcugagaaagauaagaa

SEQ ID NO: 2246997 - RNA, 19 nt, Homo sapiens
  misc_RNA (1)...(19): siRNA sense strand
agucaagugaggaugaaga

SEQ ID NO: 2246998 - RNA, 19 nt, Homo sapiens
  misc_RNA (1)...(19): siRNA sense strand
agaaccaagcacagccaaa

SEQ ID NO: 2246999 - RNA, 19 nt, Homo sapiens
  misc_RNA (1)...(19): siRNA sense strand
gcccaauagccaaugguuu

SEQ ID NO: 2247000 - RNA, 19 nt, Homo sapiens
  misc_RNA (1)...(19): siRNA sense strand
agaagagggagaagcccaa

SEQ ID NO: 2247001 - RNA, 19 nt, Homo sapiens
  misc_RNA (1)...(19): siRNA sense strand
cccucaaacgucagagcaa

SEQ ID NO: 2247002 - RNA, 19 nt, Homo sapiens
  misc_RNA (1)...(19): siRNA sense strand
ugaacgaguaaaugugaau

SEQ ID NO: 2247003 - RNA, 19 nt, Homo sapiens
  misc_RNA (1)...(19): siRNA sense strand
agaucaaggacuuugguga

SEQ ID NO: 2247004 - RNA, 19 nt, Homo sapiens
  misc_RNA (1)...(19): siRNA sense strand
aggaaggcaaacugagaga

SEQ ID NO: 2247005 - RNA, 19 nt, Homo sapiens
  misc_RNA (1)...(19): siRNA sense strand
acugaaacaaccagacuau

SEQ ID NO: 2247006 - RNA, 19 nt, Homo sapiens
  misc_RNA (1)...(19): siRNA sense strand
auucaaagacaaccaacaa

SEQ ID NO: 2247007 - RNA, 19 nt, Homo sapiens
  misc_RNA (1)...(19): siRNA sense strand
aggaagaggaaaaguguga

SEQ ID NO: 2247008 - RNA, 19 nt, Homo sapiens
  misc_RNA (1)...(19): siRNA sense strand
cugacguauucaaagacaa

SEQ ID NO: 2247009 - RNA, 19 nt, Homo sapiens
  misc_RNA (1)...(19): siRNA sense strand
cuucuuaacaauuggcuga

SEQ ID NO: 2247010 - RNA, 19 nt, Homo sapiens
  misc_RNA (1)...(19): siRNA sense strand
ccucaguccuugucagcga

SEQ ID NO: 2247011 - RNA, 19 nt, Homo sapiens
  misc_RNA (1)...(19): siRNA sense strand
cagagaagaagagggagaa

SEQ ID NO: 2247012 - RNA, 19 nt, Homo sapiens
  misc_RNA (1)...(19): siRNA sense strand
cugacaaguacaaccuuaa

SEQ ID NO: 2247013 - RNA, 19 nt, Homo sapiens
  misc_RNA (1)...(19): siRNA sense strand
ccacuggacuagagcugga

SEQ ID NO: 2247014 - RNA, 19 nt, Homo sapiens
  misc_RNA (1)...(19): siRNA sense strand
caaaaguguggaugggauu

SEQ ID NO: 2247015 - RNA, 19 nt, Homo sapiens
  misc_RNA (1)...(19): siRNA sense strand
gagaaggugcccugggugu

SEQ ID NO: 2247016 - RNA, 19 nt, Homo sapiens
  misc_RNA (1)...(19): siRNA sense strand
ggagaguccucaugagccu

SEQ ID NO: 2247017 - RNA, 19 nt, Homo sapiens
  misc_RNA (1)...(19): siRNA sense strand
cccuggaggaggaggcauu

SEQ ID NO: 2247018 - RNA, 19 nt, Homo sapiens
  misc_RNA (1)...(19): siRNA sense strand
gugaagcagcugagcaagu

SEQ ID NO: 2247019 - RNA, 19 nt, Homo sapiens
  misc_RNA (1)...(19): siRNA sense strand
gcucauggauacagccucu

SEQ ID NO: 2247020 - RNA, 19 nt, Homo sapiens
  misc_RNA (1)...(19): siRNA sense strand
caacugacccggaaaggca

SEQ ID NO: 2247021 - RNA, 19 nt, Homo sapiens
  misc_RNA (1)...(19): siRNA sense strand
aaaggcaggaagaggaaaa

SEQ ID NO: 2247022 - RNA, 19 nt, Homo sapiens
  misc_RNA (1)...(19): siRNA sense strand
gaagaagaaugccagcaca

SEQ ID NO: 2247023 - RNA, 19 nt, Homo sapiens
  misc_RNA (1)...(19): siRNA sense strand
uggccgaggaggaaacgaa

SEQ ID NO: 2247024 - RNA, 19 nt, Homo sapiens
  misc_RNA (1)...(19): siRNA sense strand
ccaccaaagagaucaaagu

SEQ ID NO: 2247025 - RNA, 19 nt, Homo sapiens
  misc_RNA (1)...(19): siRNA sense strand
cugaacgaguaaaugugaa

SEQ ID NO: 2247026 - RNA, 19 nt, Homo sapiens
  misc_RNA (1)...(19): siRNA sense strand
gcugagcgggagaagggaa

SEQ ID NO: 2247027 - RNA, 19 nt, Homo sapiens
  misc_RNA (1)...(19): siRNA sense strand
uggcaucagugguggcagu

SEQ ID NO: 2247028 - RNA, 19 nt, Homo sapiens
  misc_RNA (1)...(19): siRNA sense strand
gagaagaaauacaagccac

SEQ ID NO: 2247029 - RNA, 19 nt, Homo sapiens
  misc_RNA (1)...(19): siRNA sense strand
aagcaauagucaggagcga

SEQ ID NO: 2247030 - RNA, 19 nt, Homo sapiens
  misc_RNA (1)...(19): siRNA sense strand
ugacauuauucgagcacca

SEQ ID NO: 2247031 - RNA, 19 nt, Homo sapiens
  misc_RNA (1)...(19): siRNA sense strand
gcuucagacaugagaacau

SEQ ID NO: 2247032 - RNA, 19 nt, Homo sapiens
  misc_RNA (1)...(19): siRNA sense strand
uguugaauuccaagggcua

SEQ ID NO: 2247033 - RNA, 19 nt, Homo sapiens
  misc_RNA (1)...(19): siRNA sense strand
aggaaaagcucaaagaacu

SEQ ID NO: 2247034 - RNA, 19 nt, Homo sapiens
  misc_RNA (1)...(19): siRNA sense strand
cgagcaaaugaaagaugua

SEQ ID NO: 2247035 - RNA, 19 nt, Homo sapiens
  misc_RNA (1)...(19): siRNA sense strand
ccucauggaaacagaucuu

SEQ ID NO: 2247036 - RNA, 19 nt, Homo sapiens
  misc_RNA (1)...(19): siRNA sense strand
gcucuggacuuauuggaca

SEQ ID NO: 2247037 - RNA, 19 nt, Homo sapiens
  misc_RNA (1)...(19): siRNA sense strand
aauaaggugccauggaaca

SEQ ID NO: 2247038 - RNA, 19 nt, Homo sapiens
  misc_RNA (1)...(19): siRNA sense strand
ugguacagggcuccagaaa

SEQ ID NO: 2247039 - RNA, 19 nt, Homo sapiens
  misc_RNA (1)...(19): siRNA sense strand
ucgacauggaauuggauga

SEQ ID NO: 2247040 - RNA, 19 nt, Homo sapiens
  misc_RNA (1)...(19): siRNA sense strand
caucacaagaagaccugaa

SEQ ID NO: 2247041 - RNA, 19 nt, Homo sapiens
  misc_RNA (1)...(19): siRNA sense strand
ucaaguucgacauggaauu

SEQ ID NO: 2247042 - RNA, 19 nt, Homo sapiens
  misc_RNA (1)...(19): siRNA sense strand
augacuugccuaaggaaaa

SEQ ID NO: 2247043 - RNA, 19 nt, Homo sapiens
  misc_RNA (1)...(19): siRNA sense strand
ugacauuauucgagcacca

SEQ ID NO: 2247044 - RNA, 19 nt, Homo sapiens
  misc_RNA (1)...(19): siRNA sense strand
gcuucagacaugagaacau

SEQ ID NO: 2247045 - RNA, 19 nt, Homo sapiens
  misc_RNA (1)...(19): siRNA sense strand
uguugaauuccaagggcua

SEQ ID NO: 2247046 - RNA, 19 nt, Homo sapiens
  misc_RNA (1)...(19): siRNA sense strand
aggaaaagcucaaagaacu

SEQ ID NO: 2247047 - RNA, 19 nt, Homo sapiens
  misc_RNA (1)...(19): siRNA sense strand
cgagcaaaugaaagaugua

SEQ ID NO: 2247048 - RNA, 19 nt, Homo sapiens
  misc_RNA (1)...(19): siRNA sense strand
ccucauggaaacagaucuu

SEQ ID NO: 2247049 - RNA, 19 nt, Homo sapiens
  misc_RNA (1)...(19): siRNA sense strand
gcucuggacuuauuggaca

SEQ ID NO: 2247050 - RNA, 19 nt, Homo sapiens
  misc_RNA (1)...(19): siRNA sense strand
aauaaggugccauggaaca

SEQ ID NO: 2247051 - RNA, 19 nt, Homo sapiens
  misc_RNA (1)...(19): siRNA sense strand
ugguacagggcuccagaaa

SEQ ID NO: 2247052 - RNA, 19 nt, Homo sapiens
  misc_RNA (1)...(19): siRNA sense strand
ucgacauggaauuggauga

SEQ ID NO: 2247053 - RNA, 19 nt, Homo sapiens
  misc_RNA (1)...(19): siRNA sense strand
caucacaagaagaccugaa

SEQ ID NO: 2247054 - RNA, 19 nt, Homo sapiens
  misc_RNA (1)...(19): siRNA sense strand
ucaaguucgacauggaauu

SEQ ID NO: 2247055 - RNA, 19 nt, Homo sapiens
  misc_RNA (1)...(19): siRNA sense strand
augacuugccuaaggaaaa

SEQ ID NO: 2247056 - RNA, 19 nt, Homo sapiens
  misc_RNA (1)...(19): siRNA sense strand
gcacugaccugcaggguga

SEQ ID NO: 2247057 - RNA, 19 nt, Homo sapiens
  misc_RNA (1)...(19): siRNA sense strand
gggaggaagacaaggacga

SEQ ID NO: 2247058 - RNA, 19 nt, Homo sapiens
  misc_RNA (1)...(19): siRNA sense strand
cuguaauccgggaggaaga

SEQ ID NO: 2247059 - RNA, 19 nt, Homo sapiens
  misc_RNA (1)...(19): siRNA sense strand
aggaguacauggagaccga

SEQ ID NO: 2247060 - RNA, 19 nt, Homo sapiens
  misc_RNA (1)...(19): siRNA sense strand
guaacaaagugguaccguu

SEQ ID NO: 2247061 - RNA, 19 nt, Homo sapiens
  misc_RNA (1)...(19): siRNA sense strand
cgccagugucuauggguau

SEQ ID NO: 2247062 - RNA, 19 nt, Homo sapiens
  misc_RNA (1)...(19): siRNA sense strand
gguugguaacaaaguggua

SEQ ID NO: 2247063 - RNA, 19 nt, Homo sapiens
  misc_RNA (1)...(19): siRNA sense strand
aggaccugccggacaauaa

SEQ ID NO: 2247064 - RNA, 19 nt, Homo sapiens
  misc_RNA (1)...(19): siRNA sense strand
acaccaaagccaucgacau

SEQ ID NO: 2247065 - RNA, 19 nt, Homo sapiens
  misc_RNA (1)...(19): siRNA sense strand
agacaaugacugugacaaa

SEQ ID NO: 2247066 - RNA, 19 nt, Homo sapiens
  misc_RNA (1)...(19): siRNA sense strand
cggaagacuuggugcugaa

SEQ ID NO: 2247067 - RNA, 19 nt, Homo sapiens
  misc_RNA (1)...(19): siRNA sense strand
aggaaggauuucugaacaa

SEQ ID NO: 2247068 - RNA, 19 nt, Homo sapiens
  misc_RNA (1)...(19): siRNA sense strand
aggaauuagucgagaagca

SEQ ID NO: 2247069 - RNA, 19 nt, Homo sapiens
  misc_RNA (1)...(19): siRNA sense strand
gguaaggaaggaugaacaa

SEQ ID NO: 2247070 - RNA, 19 nt, Homo sapiens
  misc_RNA (1)...(19): siRNA sense strand
ccaugauaacauugugaaa

SEQ ID NO: 2247071 - RNA, 19 nt, Homo sapiens
  misc_RNA (1)...(19): siRNA sense strand
gaaaauauuuggauggaga

SEQ ID NO: 2247072 - RNA, 19 nt, Homo sapiens
  misc_RNA (1)...(19): siRNA sense strand
ugugaaaguguuugagauu

SEQ ID NO: 2247073 - RNA, 19 nt, Homo sapiens
  misc_RNA (1)...(19): siRNA sense strand
aggaguacauggagacaga

SEQ ID NO: 2247074 - RNA, 19 nt, Homo sapiens
  misc_RNA (1)...(19): siRNA sense strand
aggaaagaagauacugaaa

SEQ ID NO: 2247075 - RNA, 19 nt, Homo sapiens
  misc_RNA (1)...(19): siRNA sense strand
augaacaaguugagaagga

SEQ ID NO: 2247076 - RNA, 19 nt, Homo sapiens
  misc_RNA (1)...(19): siRNA sense strand
guucaggaguacauggaga

SEQ ID NO: 2247077 - RNA, 19 nt, Homo sapiens
  misc_RNA (1)...(19): siRNA sense strand
ugaugaagaagaaguacaa

SEQ ID NO: 2247078 - RNA, 19 nt, Homo sapiens
  misc_RNA (1)...(19): siRNA sense strand
caucaaacauacagcagca

SEQ ID NO: 2247079 - RNA, 19 nt, Homo sapiens
  misc_RNA (1)...(19): siRNA sense strand
ugaaaguguuugagauucu

SEQ ID NO: 2247080 - RNA, 19 nt, Homo sapiens
  misc_RNA (1)...(19): siRNA sense strand
gcugaagauaggugacuuu

SEQ ID NO: 2247081 - RNA, 19 nt, Homo sapiens
  misc_RNA (1)...(19): siRNA sense strand
ugucacugaugaagaagaa

SEQ ID NO: 2247082 - RNA, 19 nt, Homo sapiens
  misc_RNA (1)...(19): siRNA sense strand
gcuggaaaagaaagggaaa

SEQ ID NO: 2247083 - RNA, 19 nt, Homo sapiens
  misc_RNA (1)...(19): siRNA sense strand
ugaaaugcugacugguaaa

SEQ ID NO: 2247084 - RNA, 19 nt, Homo sapiens
  misc_RNA (1)...(19): siRNA sense strand
gguucuagguauauggacu

SEQ ID NO: 2247085 - RNA, 19 nt, Homo sapiens
  misc_RNA (1)...(19): siRNA sense strand
uuggaaagaacaaagcaaa

SEQ ID NO: 2247086 - RNA, 19 nt, Homo sapiens
  misc_RNA (1)...(19): siRNA sense strand
agaggaagcaucacagcaa

SEQ ID NO: 2247087 - RNA, 19 nt, Homo sapiens
  misc_RNA (1)...(19): siRNA sense strand
gggaaaaguaucuggagga

SEQ ID NO: 2247088 - RNA, 19 nt, Homo sapiens
  misc_RNA (1)...(19): siRNA sense strand
aggaugaacaaguugagaa

SEQ ID NO: 2247089 - RNA, 19 nt, Homo sapiens
  misc_RNA (1)...(19): siRNA sense strand
agguaaggaaggaugaaca

SEQ ID NO: 2247090 - RNA, 19 nt, Homo sapiens
  misc_RNA (1)...(19): siRNA sense strand
uugaaagucucaugaacau

SEQ ID NO: 2247091 - RNA, 19 nt, Homo sapiens
  misc_RNA (1)...(19): siRNA sense strand
uaucaaagucaguaagcca

SEQ ID NO: 2247092 - RNA, 19 nt, Homo sapiens
  misc_RNA (1)...(19): siRNA sense strand
gauacugaaaugcuagaaa

SEQ ID NO: 2247093 - RNA, 19 nt, Homo sapiens
  misc_RNA (1)...(19): siRNA sense strand
guauauucacucugcaaau

SEQ ID NO: 2247094 - RNA, 19 nt, Homo sapiens
  misc_RNA (1)...(19): siRNA sense strand
ucgguuaacagcagaagaa

SEQ ID NO: 2247095 - RNA, 19 nt, Homo sapiens
  misc_RNA (1)...(19): siRNA sense strand
cuguuguacaugaggaaga

SEQ ID NO: 2247096 - RNA, 19 nt, Homo sapiens
  misc_RNA (1)...(19): siRNA sense strand
cauccuuacaugagcauau

SEQ ID NO: 2247097 - RNA, 19 nt, Homo sapiens
  misc_RNA (1)...(19): siRNA sense strand
ggaugaacaaguugagaag

SEQ ID NO: 2247098 - RNA, 19 nt, Homo sapiens
  misc_RNA (1)...(19): siRNA sense strand
gaggacaugaggaaggauu

SEQ ID NO: 2247099 - RNA, 19 nt, Homo sapiens
  misc_RNA (1)...(19): siRNA sense strand
ccucaaauuccucaucaaa

SEQ ID NO: 2247100 - RNA, 19 nt, Homo sapiens
  misc_RNA (1)...(19): siRNA sense strand
guuaacagcagaagaagca

SEQ ID NO: 2247101 - RNA, 19 nt, Homo sapiens
  misc_RNA (1)...(19): siRNA sense strand
aaaggaauggauugguuaa

SEQ ID NO: 2247102 - RNA, 19 nt, Homo sapiens
  misc_RNA (1)...(19): siRNA sense strand
cacauuuauaacugggaaa

SEQ ID NO: 2247103 - RNA, 19 nt, Homo sapiens
  misc_RNA (1)...(19): siRNA sense strand
cugaugaagaagaaguaca

SEQ ID NO: 2247104 - RNA, 19 nt, Homo sapiens
  misc_RNA (1)...(19): siRNA sense strand
acuaugaacccaagcuuau

SEQ ID NO: 2247105 - RNA, 19 nt, Homo sapiens
  misc_RNA (1)...(19): siRNA sense strand
acacuaguuacuuggacaa

SEQ ID NO: 2247106 - RNA, 19 nt, Homo sapiens
  misc_RNA (1)...(19): siRNA sense strand
uauuagaagacuugaccau

SEQ ID NO: 2247107 - RNA, 19 nt, Homo sapiens
  misc_RNA (1)...(19): siRNA sense strand
uggagacagacuuggcuaa

SEQ ID NO: 2247108 - RNA, 19 nt, Homo sapiens
  misc_RNA (1)...(19): siRNA sense strand
gucgagaagcacuggauuu

SEQ ID NO: 2247109 - RNA, 19 nt, Homo sapiens
  misc_RNA (1)...(19): siRNA sense strand
aagaaagggaaaagaauca

SEQ ID NO: 2247110 - RNA, 19 nt, Homo sapiens
  misc_RNA (1)...(19): siRNA sense strand
ucacaguccaguuggguca

SEQ ID NO: 2247111 - RNA, 19 nt, Homo sapiens
  misc_RNA (1)...(19): siRNA sense strand
guuacuaaaugguacagau

SEQ ID NO: 2247112 - RNA, 19 nt, Homo sapiens
  misc_RNA (1)...(19): siRNA sense strand
gaugaaacucacagucaca

SEQ ID NO: 2247113 - RNA, 19 nt, Homo sapiens
  misc_RNA (1)...(19): siRNA sense strand
augauuggccuguacauaa

SEQ ID NO: 2247114 - RNA, 19 nt, Homo sapiens
  misc_RNA (1)...(19): siRNA sense strand
acaaaagaguagccaucaa

SEQ ID NO: 2247115 - RNA, 19 nt, Homo sapiens
  misc_RNA (1)...(19): siRNA sense strand
caggaaagaagauacugaa

SEQ ID NO: 2247116 - RNA, 19 nt, Homo sapiens
  misc_RNA (1)...(19): siRNA sense strand
aggacaugaggaaggauuu

SEQ ID NO: 2247117 - RNA, 19 nt, Homo sapiens
  misc_RNA (1)...(19): siRNA sense strand
ugaucuggguucuagguau

SEQ ID NO: 2247118 - RNA, 19 nt, Homo sapiens
  misc_RNA (1)...(19): siRNA sense strand
ggaagaucgucaggagcuu

SEQ ID NO: 2247119 - RNA, 19 nt, Homo sapiens
  misc_RNA (1)...(19): siRNA sense strand
uggauauagcuuugagaaa

SEQ ID NO: 2247120 - RNA, 19 nt, Homo sapiens
  misc_RNA (1)...(19): siRNA sense strand
acacaauagaagaguggaa

SEQ ID NO: 2247121 - RNA, 19 nt, Homo sapiens
  misc_RNA (1)...(19): siRNA sense strand
gcaguuagaugaaagggaa

SEQ ID NO: 2247122 - RNA, 19 nt, Homo sapiens
  misc_RNA (1)...(19): siRNA sense strand
caacaaacuuaaagccagu

SEQ ID NO: 2247123 - RNA, 19 nt, Homo sapiens
  misc_RNA (1)...(19): siRNA sense strand
cugaauucaugaagaaacu

SEQ ID NO: 2247124 - RNA, 19 nt, Homo sapiens
  misc_RNA (1)...(19): siRNA sense strand
acuuaaagccagucaggca

SEQ ID NO: 2247125 - RNA, 19 nt, Homo sapiens
  misc_RNA (1)...(19): siRNA sense strand
agcuagaucaugaaagaau

SEQ ID NO: 2247126 - RNA, 19 nt, Homo sapiens
  misc_RNA (1)...(19): siRNA sense strand
guugcaaucaagaagcuaa

SEQ ID NO: 2247127 - RNA, 19 nt, Homo sapiens
  misc_RNA (1)...(19): siRNA sense strand
uuuaaaaccuauaggcuca

SEQ ID NO: 2247128 - RNA, 19 nt, Homo sapiens
  misc_RNA (1)...(19): siRNA sense strand
augaagaaacugcaaccaa

SEQ ID NO: 2247129 - RNA, 19 nt, Homo sapiens
  misc_RNA (1)...(19): siRNA sense strand
cuuaaagccagucaggcaa

SEQ ID NO: 2247130 - RNA, 19 nt, Homo sapiens
  misc_RNA (1)...(19): siRNA sense strand
acauagucauggagcucau

SEQ ID NO: 2247131 - RNA, 19 nt, Homo sapiens
  misc_RNA (1)...(19): siRNA sense strand
uggcaugggcuacaaggaa

SEQ ID NO: 2247132 - RNA, 19 nt, Homo sapiens
  misc_RNA (1)...(19): siRNA sense strand
cguugaaaacagaccuaaa

SEQ ID NO: 2247133 - RNA, 19 nt, Homo sapiens
  misc_RNA (1)...(19): siRNA sense strand
gggacuuaaagcccaguaa

SEQ ID NO: 2247134 - RNA, 19 nt, Homo sapiens
  misc_RNA (1)...(19): siRNA sense strand
gcaugggcuacaaggaaaa

SEQ ID NO: 2247135 - RNA, 19 nt, Homo sapiens
  misc_RNA (1)...(19): siRNA sense strand
uguagagauuggagauucu

SEQ ID NO: 2247136 - RNA, 19 nt, Homo sapiens
  misc_RNA (1)...(19): siRNA sense strand
aauuauucaucgggacuua

SEQ ID NO: 2247137 - RNA, 19 nt, Homo sapiens
  misc_RNA (1)...(19): siRNA sense strand
augaaagggaacacacaau

SEQ ID NO: 2247138 - RNA, 19 nt, Homo sapiens
  misc_RNA (1)...(19): siRNA sense strand
acucagaacacaacaaacu

SEQ ID NO: 2247139 - RNA, 19 nt, Homo sapiens
  misc_RNA (1)...(19): siRNA sense strand
agaaccaagaauggaguua

SEQ ID NO: 2247140 - RNA, 19 nt, Homo sapiens
  misc_RNA (1)...(19): siRNA sense strand
ggaggagagaaccaagaau

SEQ ID NO: 2247141 - RNA, 19 nt, Homo sapiens
  misc_RNA (1)...(19): siRNA sense strand
uggauauagcuuugagaaa

SEQ ID NO: 2247142 - RNA, 19 nt, Homo sapiens
  misc_RNA (1)...(19): siRNA sense strand
acacaauagaagaguggaa

SEQ ID NO: 2247143 - RNA, 19 nt, Homo sapiens
  misc_RNA (1)...(19): siRNA sense strand
gcaguuagaugaaagggaa

SEQ ID NO: 2247144 - RNA, 19 nt, Homo sapiens
  misc_RNA (1)...(19): siRNA sense strand
caacaaacuuaaagccagu

SEQ ID NO: 2247145 - RNA, 19 nt, Homo sapiens
  misc_RNA (1)...(19): siRNA sense strand
cugaauucaugaagaaacu

SEQ ID NO: 2247146 - RNA, 19 nt, Homo sapiens
  misc_RNA (1)...(19): siRNA sense strand
acuuaaagccagucaggca

SEQ ID NO: 2247147 - RNA, 19 nt, Homo sapiens
  misc_RNA (1)...(19): siRNA sense strand
agcuagaucaugaaagaau

SEQ ID NO: 2247148 - RNA, 19 nt, Homo sapiens
  misc_RNA (1)...(19): siRNA sense strand
guugcaaucaagaagcuaa

SEQ ID NO: 2247149 - RNA, 19 nt, Homo sapiens
  misc_RNA (1)...(19): siRNA sense strand
uuuaaaaccuauaggcuca

SEQ ID NO: 2247150 - RNA, 19 nt, Homo sapiens
  misc_RNA (1)...(19): siRNA sense strand
augaagaaacugcaaccaa

SEQ ID NO: 2247151 - RNA, 19 nt, Homo sapiens
  misc_RNA (1)...(19): siRNA sense strand
cuuaaagccagucaggcaa

SEQ ID NO: 2247152 - RNA, 19 nt, Homo sapiens
  misc_RNA (1)...(19): siRNA sense strand
acauagucauggagcucau

SEQ ID NO: 2247153 - RNA, 19 nt, Homo sapiens
  misc_RNA (1)...(19): siRNA sense strand
uggcaugggcuacaaggaa

SEQ ID NO: 2247154 - RNA, 19 nt, Homo sapiens
  misc_RNA (1)...(19): siRNA sense strand
cguugaaaacagaccuaaa

SEQ ID NO: 2247155 - RNA, 19 nt, Homo sapiens
  misc_RNA (1)...(19): siRNA sense strand
gggacuuaaagcccaguaa

SEQ ID NO: 2247156 - RNA, 19 nt, Homo sapiens
  misc_RNA (1)...(19): siRNA sense strand
gcaugggcuacaaggaaaa

SEQ ID NO: 2247157 - RNA, 19 nt, Homo sapiens
  misc_RNA (1)...(19): siRNA sense strand
uguagagauuggagauucu

SEQ ID NO: 2247158 - RNA, 19 nt, Homo sapiens
  misc_RNA (1)...(19): siRNA sense strand
aauuauucaucgggacuua

SEQ ID NO: 2247159 - RNA, 19 nt, Homo sapiens
  misc_RNA (1)...(19): siRNA sense strand
augaaagggaacacacaau

SEQ ID NO: 2247160 - RNA, 19 nt, Homo sapiens
  misc_RNA (1)...(19): siRNA sense strand
acucagaacacaacaaacu

SEQ ID NO: 2247161 - RNA, 19 nt, Homo sapiens
  misc_RNA (1)...(19): siRNA sense strand
agaaccaagaauggaguua

SEQ ID NO: 2247162 - RNA, 19 nt, Homo sapiens
  misc_RNA (1)...(19): siRNA sense strand
ggaggagagaaccaagaau

SEQ ID NO: 2247163 - RNA, 19 nt, Homo sapiens
  misc_RNA (1)...(19): siRNA sense strand
uggauauagcuuugagaaa

SEQ ID NO: 2247164 - RNA, 19 nt, Homo sapiens
  misc_RNA (1)...(19): siRNA sense strand
acacaauagaagaguggaa

SEQ ID NO: 2247165 - RNA, 19 nt, Homo sapiens
  misc_RNA (1)...(19): siRNA sense strand
gcaguuagaugaaagggaa

SEQ ID NO: 2247166 - RNA, 19 nt, Homo sapiens
  misc_RNA (1)...(19): siRNA sense strand
caacaaacuuaaagccagu

SEQ ID NO: 2247167 - RNA, 19 nt, Homo sapiens
  misc_RNA (1)...(19): siRNA sense strand
cugaauucaugaagaaacu

SEQ ID NO: 2247168 - RNA, 19 nt, Homo sapiens
  misc_RNA (1)...(19): siRNA sense strand
gaucaauggcucucagcau

SEQ ID NO: 2247169 - RNA, 19 nt, Homo sapiens
  misc_RNA (1)...(19): siRNA sense strand
acuuaaagccagucaggca

SEQ ID NO: 2247170 - RNA, 19 nt, Homo sapiens
  misc_RNA (1)...(19): siRNA sense strand
agcuagaucaugaaagaau

SEQ ID NO: 2247171 - RNA, 19 nt, Homo sapiens
  misc_RNA (1)...(19): siRNA sense strand
guugcaaucaagaagcuaa

SEQ ID NO: 2247172 - RNA, 19 nt, Homo sapiens
  misc_RNA (1)...(19): siRNA sense strand
augaagaaacugcaaccaa

SEQ ID NO: 2247173 - RNA, 19 nt, Homo sapiens
  misc_RNA (1)...(19): siRNA sense strand
cuuaaagccagucaggcaa

SEQ ID NO: 2247174 - RNA, 19 nt, Homo sapiens
  misc_RNA (1)...(19): siRNA sense strand
uuuaaaaccuauaggcuca

SEQ ID NO: 2247175 - RNA, 19 nt, Homo sapiens
  misc_RNA (1)...(19): siRNA sense strand
acauagucauggagcucau

SEQ ID NO: 2247176 - RNA, 19 nt, Homo sapiens
  misc_RNA (1)...(19): siRNA sense strand
uggcaugggcuacaaggaa

SEQ ID NO: 2247177 - RNA, 19 nt, Homo sapiens
  misc_RNA (1)...(19): siRNA sense strand
cguugaaaacagaccuaaa

SEQ ID NO: 2247178 - RNA, 19 nt, Homo sapiens
  misc_RNA (1)...(19): siRNA sense strand
gggacuuaaagcccaguaa

SEQ ID NO: 2247179 - RNA, 19 nt, Homo sapiens
  misc_RNA (1)...(19): siRNA sense strand
gcaugggcuacaaggaaaa

SEQ ID NO: 2247180 - RNA, 19 nt, Homo sapiens
  misc_RNA (1)...(19): siRNA sense strand
uguagagauuggagauucu

SEQ ID NO: 2247181 - RNA, 19 nt, Homo sapiens
  misc_RNA (1)...(19): siRNA sense strand
aauuauucaucgggacuua

SEQ ID NO: 2247182 - RNA, 19 nt, Homo sapiens
  misc_RNA (1)...(19): siRNA sense strand
augaaagggaacacacaau

SEQ ID NO: 2247183 - RNA, 19 nt, Homo sapiens
  misc_RNA (1)...(19): siRNA sense strand
acucagaacacaacaaacu

SEQ ID NO: 2247184 - RNA, 19 nt, Homo sapiens
  misc_RNA (1)...(19): siRNA sense strand
agaaccaagaauggaguua

SEQ ID NO: 2247185 - RNA, 19 nt, Homo sapiens
  misc_RNA (1)...(19): siRNA sense strand
ggaggagagaaccaagaau

SEQ ID NO: 2247186 - RNA, 19 nt, Homo sapiens
  misc_RNA (1)...(19): siRNA sense strand
uggauauagcuuugagaaa

SEQ ID NO: 2247187 - RNA, 19 nt, Homo sapiens
  misc_RNA (1)...(19): siRNA sense strand
acacaauagaagaguggaa

SEQ ID NO: 2247188 - RNA, 19 nt, Homo sapiens
  misc_RNA (1)...(19): siRNA sense strand
gcaguuagaugaaagggaa

SEQ ID NO: 2247189 - RNA, 19 nt, Homo sapiens
  misc_RNA (1)...(19): siRNA sense strand
caacaaacuuaaagccagu

SEQ ID NO: 2247190 - RNA, 19 nt, Homo sapiens
  misc_RNA (1)...(19): siRNA sense strand
cugaauucaugaagaaacu

SEQ ID NO: 2247191 - RNA, 19 nt, Homo sapiens
  misc_RNA (1)...(19): siRNA sense strand
gaucaauggcucucagcau

SEQ ID NO: 2247192 - RNA, 19 nt, Homo sapiens
  misc_RNA (1)...(19): siRNA sense strand
acuuaaagccagucaggca

SEQ ID NO: 2247193 - RNA, 19 nt, Homo sapiens
  misc_RNA (1)...(19): siRNA sense strand
agcuagaucaugaaagaau

SEQ ID NO: 2247194 - RNA, 19 nt, Homo sapiens
  misc_RNA (1)...(19): siRNA sense strand
guugcaaucaagaagcuaa

SEQ ID NO: 2247195 - RNA, 19 nt, Homo sapiens
  misc_RNA (1)...(19): siRNA sense strand
augaagaaacugcaaccaa

SEQ ID NO: 2247196 - RNA, 19 nt, Homo sapiens
  misc_RNA (1)...(19): siRNA sense strand
cuuaaagccagucaggcaa

SEQ ID NO: 2247197 - RNA, 19 nt, Homo sapiens
  misc_RNA (1)...(19): siRNA sense strand
uuuaaaaccuauaggcuca

SEQ ID NO: 2247198 - RNA, 19 nt, Homo sapiens
  misc_RNA (1)...(19): siRNA sense strand
acauagucauggagcucau

SEQ ID NO: 2247199 - RNA, 19 nt, Homo sapiens
  misc_RNA (1)...(19): siRNA sense strand
uggcaugggcuacaaggaa

SEQ ID NO: 2247200 - RNA, 19 nt, Homo sapiens
  misc_RNA (1)...(19): siRNA sense strand
cguugaaaacagaccuaaa

SEQ ID NO: 2247201 - RNA, 19 nt, Homo sapiens
  misc_RNA (1)...(19): siRNA sense strand
gggacuuaaagcccaguaa

SEQ ID NO: 2247202 - RNA, 19 nt, Homo sapiens
  misc_RNA (1)...(19): siRNA sense strand
gcaugggcuacaaggaaaa

SEQ ID NO: 2247203 - RNA, 19 nt, Homo sapiens
  misc_RNA (1)...(19): siRNA sense strand
uguagagauuggagauucu

SEQ ID NO: 2247204 - RNA, 19 nt, Homo sapiens
  misc_RNA (1)...(19): siRNA sense strand
aauuauucaucgggacuua

SEQ ID NO: 2247205 - RNA, 19 nt, Homo sapiens
  misc_RNA (1)...(19): siRNA sense strand
augaaagggaacacacaau

SEQ ID NO: 2247206 - RNA, 19 nt, Homo sapiens
  misc_RNA (1)...(19): siRNA sense strand
acucagaacacaacaaacu

SEQ ID NO: 2247207 - RNA, 19 nt, Homo sapiens
  misc_RNA (1)...(19): siRNA sense strand
agaaccaagaauggaguua

SEQ ID NO: 2247208 - RNA, 19 nt, Homo sapiens
  misc_RNA (1)...(19): siRNA sense strand
ggaggagagaaccaagaau

SEQ ID NO: 2247209 - RNA, 19 nt, Homo sapiens
  misc_RNA (1)...(19): siRNA sense strand
ggaauuagaccaugagcga

SEQ ID NO: 2247210 - RNA, 19 nt, Homo sapiens
  misc_RNA (1)...(19): siRNA sense strand
aauuagaccaugagcgaau

SEQ ID NO: 2247211 - RNA, 19 nt, Homo sapiens
  misc_RNA (1)...(19): siRNA sense strand
gggaugggcuacaaggaga

SEQ ID NO: 2247212 - RNA, 19 nt, Homo sapiens
  misc_RNA (1)...(19): siRNA sense strand
cacaauugaagaauggaaa

SEQ ID NO: 2247213 - RNA, 19 nt, Homo sapiens
  misc_RNA (1)...(19): siRNA sense strand
augacaagcaguuggauga

SEQ ID NO: 2247214 - RNA, 19 nt, Homo sapiens
  misc_RNA (1)...(19): siRNA sense strand
guaagaaacuauguggaga

SEQ ID NO: 2247215 - RNA, 19 nt, Homo sapiens
  misc_RNA (1)...(19): siRNA sense strand
acacaauugaagaauggaa

SEQ ID NO: 2247216 - RNA, 19 nt, Homo sapiens
  misc_RNA (1)...(19): siRNA sense strand
ggaugggcuacaaggagaa

SEQ ID NO: 2247217 - RNA, 19 nt, Homo sapiens
  misc_RNA (1)...(19): siRNA sense strand
ugggaugcauuaugggaga

SEQ ID NO: 2247218 - RNA, 19 nt, Homo sapiens
  misc_RNA (1)...(19): siRNA sense strand
agaacacacaauugaagaa

SEQ ID NO: 2247219 - RNA, 19 nt, Homo sapiens
  misc_RNA (1)...(19): siRNA sense strand
aauugaacaacuaggaaca

SEQ ID NO: 2247220 - RNA, 19 nt, Homo sapiens
  misc_RNA (1)...(19): siRNA sense strand
aaagaauaucaguggacga

SEQ ID NO: 2247221 - RNA, 19 nt, Homo sapiens
  misc_RNA (1)...(19): siRNA sense strand
ggauauauggucuguggga

SEQ ID NO: 2247222 - RNA, 19 nt, Homo sapiens
  misc_RNA (1)...(19): siRNA sense strand
gaacuuaucuacaaggaag

SEQ ID NO: 2247223 - RNA, 19 nt, Homo sapiens
  misc_RNA (1)...(19): siRNA sense strand
ucuacaaggaaguaaugaa

SEQ ID NO: 2247224 - RNA, 19 nt, Homo sapiens
  misc_RNA (1)...(19): siRNA sense strand
gucaaagaugcuagugauu

SEQ ID NO: 2247225 - RNA, 19 nt, Homo sapiens
  misc_RNA (1)...(19): siRNA sense strand
ggaugcauuaugggagaaa

SEQ ID NO: 2247226 - RNA, 19 nt, Homo sapiens
  misc_RNA (1)...(19): siRNA sense strand
uggaacugauggaugccaa

SEQ ID NO: 2247227 - RNA, 19 nt, Homo sapiens
  misc_RNA (1)...(19): siRNA sense strand
ggagaaaugguucgccaca

SEQ ID NO: 2247228 - RNA, 19 nt, Homo sapiens
  misc_RNA (1)...(19): siRNA sense strand
ucaugaagugugugaacca

SEQ ID NO: 2247229 - RNA, 19 nt, Homo sapiens
  misc_RNA (1)...(19): siRNA sense strand
caauugaagaauggaaaga

SEQ ID NO: 2247230 - RNA, 19 nt, Homo sapiens
  misc_RNA (1)...(19): siRNA sense strand
cauugaaaauccuggacuu

SEQ ID NO: 2247231 - RNA, 19 nt, Homo sapiens
  misc_RNA (1)...(19): siRNA sense strand
gaacguggauauauggucu

SEQ ID NO: 2247232 - RNA, 19 nt, Homo sapiens
  misc_RNA (1)...(19): siRNA sense strand
agugauugacccagcaaaa

SEQ ID NO: 2247233 - RNA, 19 nt, Homo sapiens
  misc_RNA (1)...(19): siRNA sense strand
augaaagagaacacacaau

SEQ ID NO: 2247234 - RNA, 19 nt, Homo sapiens
  misc_RNA (1)...(19): siRNA sense strand
acacaugccaagagagcgu

SEQ ID NO: 2247235 - RNA, 19 nt, Homo sapiens
  misc_RNA (1)...(19): siRNA sense strand
cacaauaaacucaaagcca

SEQ ID NO: 2247236 - RNA, 19 nt, Homo sapiens
  misc_RNA (1)...(19): siRNA sense strand
ggaauuagaccaugagcga

SEQ ID NO: 2247237 - RNA, 19 nt, Homo sapiens
  misc_RNA (1)...(19): siRNA sense strand
aauuagaccaugagcgaau

SEQ ID NO: 2247238 - RNA, 19 nt, Homo sapiens
  misc_RNA (1)...(19): siRNA sense strand
gggaugggcuacaaggaga

SEQ ID NO: 2247239 - RNA, 19 nt, Homo sapiens
  misc_RNA (1)...(19): siRNA sense strand
cacaauugaagaauggaaa

SEQ ID NO: 2247240 - RNA, 19 nt, Homo sapiens
  misc_RNA (1)...(19): siRNA sense strand
augacaagcaguuggauga

SEQ ID NO: 2247241 - RNA, 19 nt, Homo sapiens
  misc_RNA (1)...(19): siRNA sense strand
guaagaaacuauguggaga

SEQ ID NO: 2247242 - RNA, 19 nt, Homo sapiens
  misc_RNA (1)...(19): siRNA sense strand
acacaauugaagaauggaa

SEQ ID NO: 2247243 - RNA, 19 nt, Homo sapiens
  misc_RNA (1)...(19): siRNA sense strand
ggaugggcuacaaggagaa

SEQ ID NO: 2247244 - RNA, 19 nt, Homo sapiens
  misc_RNA (1)...(19): siRNA sense strand
ugggaugcauuaugggaga

SEQ ID NO: 2247245 - RNA, 19 nt, Homo sapiens
  misc_RNA (1)...(19): siRNA sense strand
agaacacacaauugaagaa

SEQ ID NO: 2247246 - RNA, 19 nt, Homo sapiens
  misc_RNA (1)...(19): siRNA sense strand
aauugaacaacuaggaaca

SEQ ID NO: 2247247 - RNA, 19 nt, Homo sapiens
  misc_RNA (1)...(19): siRNA sense strand
aaagaauaucaguggacga

SEQ ID NO: 2247248 - RNA, 19 nt, Homo sapiens
  misc_RNA (1)...(19): siRNA sense strand
ggauauauggucuguggga

SEQ ID NO: 2247249 - RNA, 19 nt, Homo sapiens
  misc_RNA (1)...(19): siRNA sense strand
gaacuuaucuacaaggaag

SEQ ID NO: 2247250 - RNA, 19 nt, Homo sapiens
  misc_RNA (1)...(19): siRNA sense strand
ucuacaaggaaguaaugaa

SEQ ID NO: 2247251 - RNA, 19 nt, Homo sapiens
  misc_RNA (1)...(19): siRNA sense strand
gucaaagaugcuagugauu

SEQ ID NO: 2247252 - RNA, 19 nt, Homo sapiens
  misc_RNA (1)...(19): siRNA sense strand
ggaugcauuaugggagaaa

SEQ ID NO: 2247253 - RNA, 19 nt, Homo sapiens
  misc_RNA (1)...(19): siRNA sense strand
uggaacugauggaugccaa

SEQ ID NO: 2247254 - RNA, 19 nt, Homo sapiens
  misc_RNA (1)...(19): siRNA sense strand
ggagaaaugguucgccaca

SEQ ID NO: 2247255 - RNA, 19 nt, Homo sapiens
  misc_RNA (1)...(19): siRNA sense strand
ucaugaagugugugaacca

SEQ ID NO: 2247256 - RNA, 19 nt, Homo sapiens
  misc_RNA (1)...(19): siRNA sense strand
caauugaagaauggaaaga

SEQ ID NO: 2247257 - RNA, 19 nt, Homo sapiens
  misc_RNA (1)...(19): siRNA sense strand
cauugaaaauccuggacuu

SEQ ID NO: 2247258 - RNA, 19 nt, Homo sapiens
  misc_RNA (1)...(19): siRNA sense strand
gaacguggauauauggucu

SEQ ID NO: 2247259 - RNA, 19 nt, Homo sapiens
  misc_RNA (1)...(19): siRNA sense strand
agugauugacccagcaaaa

SEQ ID NO: 2247260 - RNA, 19 nt, Homo sapiens
  misc_RNA (1)...(19): siRNA sense strand
augaaagagaacacacaau

SEQ ID NO: 2247261 - RNA, 19 nt, Homo sapiens
  misc_RNA (1)...(19): siRNA sense strand
acacaugccaagagagcgu

SEQ ID NO: 2247262 - RNA, 19 nt, Homo sapiens
  misc_RNA (1)...(19): siRNA sense strand
cacaauaaacucaaagcca

SEQ ID NO: 2247263 - RNA, 19 nt, Homo sapiens
  misc_RNA (1)...(19): siRNA sense strand
ggaauuagaccaugagcga

SEQ ID NO: 2247264 - RNA, 19 nt, Homo sapiens
  misc_RNA (1)...(19): siRNA sense strand
aauuagaccaugagcgaau

SEQ ID NO: 2247265 - RNA, 19 nt, Homo sapiens
  misc_RNA (1)...(19): siRNA sense strand
gggaugggcuacaaggaga

SEQ ID NO: 2247266 - RNA, 19 nt, Homo sapiens
  misc_RNA (1)...(19): siRNA sense strand
cacaauugaagaauggaaa

SEQ ID NO: 2247267 - RNA, 19 nt, Homo sapiens
  misc_RNA (1)...(19): siRNA sense strand
augacaagcaguuggauga

SEQ ID NO: 2247268 - RNA, 19 nt, Homo sapiens
  misc_RNA (1)...(19): siRNA sense strand
guaagaaacuauguggaga

SEQ ID NO: 2247269 - RNA, 19 nt, Homo sapiens
  misc_RNA (1)...(19): siRNA sense strand
acacaauugaagaauggaa

SEQ ID NO: 2247270 - RNA, 19 nt, Homo sapiens
  misc_RNA (1)...(19): siRNA sense strand
ggaugggcuacaaggagaa

SEQ ID NO: 2247271 - RNA, 19 nt, Homo sapiens
  misc_RNA (1)...(19): siRNA sense strand
ugggaugcauuaugggaga

SEQ ID NO: 2247272 - RNA, 19 nt, Homo sapiens
  misc_RNA (1)...(19): siRNA sense strand
agaacacacaauugaagaa

SEQ ID NO: 2247273 - RNA, 19 nt, Homo sapiens
  misc_RNA (1)...(19): siRNA sense strand
aauugaacaacuaggaaca

SEQ ID NO: 2247274 - RNA, 19 nt, Homo sapiens
  misc_RNA (1)...(19): siRNA sense strand
aaagaauaucaguggacga

SEQ ID NO: 2247275 - RNA, 19 nt, Homo sapiens
  misc_RNA (1)...(19): siRNA sense strand
ggauauauggucuguggga

SEQ ID NO: 2247276 - RNA, 19 nt, Homo sapiens
  misc_RNA (1)...(19): siRNA sense strand
gaacuuaucuacaaggaag

SEQ ID NO: 2247277 - RNA, 19 nt, Homo sapiens
  misc_RNA (1)...(19): siRNA sense strand
ucuacaaggaaguaaugaa

SEQ ID NO: 2247278 - RNA, 19 nt, Homo sapiens
  misc_RNA (1)...(19): siRNA sense strand
gucaaagaugcuagugauu

SEQ ID NO: 2247279 - RNA, 19 nt, Homo sapiens
  misc_RNA (1)...(19): siRNA sense strand
ggaugcauuaugggagaaa

SEQ ID NO: 2247280 - RNA, 19 nt, Homo sapiens
  misc_RNA (1)...(19): siRNA sense strand
ggagaaaugguucgccaca

SEQ ID NO: 2247281 - RNA, 19 nt, Homo sapiens
  misc_RNA (1)...(19): siRNA sense strand
caauugaagaauggaaaga

SEQ ID NO: 2247282 - RNA, 19 nt, Homo sapiens
  misc_RNA (1)...(19): siRNA sense strand
cauugaaaauccuggacuu

SEQ ID NO: 2247283 - RNA, 19 nt, Homo sapiens
  misc_RNA (1)...(19): siRNA sense strand
gaacguggauauauggucu

SEQ ID NO: 2247284 - RNA, 19 nt, Homo sapiens
  misc_RNA (1)...(19): siRNA sense strand
agugauugacccagcaaaa

SEQ ID NO: 2247285 - RNA, 19 nt, Homo sapiens
  misc_RNA (1)...(19): siRNA sense strand
augaaagagaacacacaau

SEQ ID NO: 2247286 - RNA, 19 nt, Homo sapiens
  misc_RNA (1)...(19): siRNA sense strand
cacaauaaacucaaagcca

SEQ ID NO: 2247287 - RNA, 19 nt, Homo sapiens
  misc_RNA (1)...(19): siRNA sense strand
ggaauuagaccaugagcga

SEQ ID NO: 2247288 - RNA, 19 nt, Homo sapiens
  misc_RNA (1)...(19): siRNA sense strand
aauuagaccaugagcgaau

SEQ ID NO: 2247289 - RNA, 19 nt, Homo sapiens
  misc_RNA (1)...(19): siRNA sense strand
gggaugggcuacaaggaga

SEQ ID NO: 2247290 - RNA, 19 nt, Homo sapiens
  misc_RNA (1)...(19): siRNA sense strand
cacaauugaagaauggaaa

SEQ ID NO: 2247291 - RNA, 19 nt, Homo sapiens
  misc_RNA (1)...(19): siRNA sense strand
augacaagcaguuggauga

SEQ ID NO: 2247292 - RNA, 19 nt, Homo sapiens
  misc_RNA (1)...(19): siRNA sense strand
guaagaaacuauguggaga

SEQ ID NO: 2247293 - RNA, 19 nt, Homo sapiens
  misc_RNA (1)...(19): siRNA sense strand
acacaauugaagaauggaa

SEQ ID NO: 2247294 - RNA, 19 nt, Homo sapiens
  misc_RNA (1)...(19): siRNA sense strand
ggaugggcuacaaggagaa

SEQ ID NO: 2247295 - RNA, 19 nt, Homo sapiens
  misc_RNA (1)...(19): siRNA sense strand
ugggaugcauuaugggaga

SEQ ID NO: 2247296 - RNA, 19 nt, Homo sapiens
  misc_RNA (1)...(19): siRNA sense strand
agaacacacaauugaagaa

SEQ ID NO: 2247297 - RNA, 19 nt, Homo sapiens
  misc_RNA (1)...(19): siRNA sense strand
aauugaacaacuaggaaca

SEQ ID NO: 2247298 - RNA, 19 nt, Homo sapiens
  misc_RNA (1)...(19): siRNA sense strand
aaagaauaucaguggacga

SEQ ID NO: 2247299 - RNA, 19 nt, Homo sapiens
  misc_RNA (1)...(19): siRNA sense strand
ggauauauggucuguggga

SEQ ID NO: 2247300 - RNA, 19 nt, Homo sapiens
  misc_RNA (1)...(19): siRNA sense strand
gaacuuaucuacaaggaag

SEQ ID NO: 2247301 - RNA, 19 nt, Homo sapiens
  misc_RNA (1)...(19): siRNA sense strand
ucuacaaggaaguaaugaa

SEQ ID NO: 2247302 - RNA, 19 nt, Homo sapiens
  misc_RNA (1)...(19): siRNA sense strand
gucaaagaugcuagugauu

SEQ ID NO: 2247303 - RNA, 19 nt, Homo sapiens
  misc_RNA (1)...(19): siRNA sense strand
ggaugcauuaugggagaaa

SEQ ID NO: 2247304 - RNA, 19 nt, Homo sapiens
  misc_RNA (1)...(19): siRNA sense strand
uggaacugauggaugccaa

SEQ ID NO: 2247305 - RNA, 19 nt, Homo sapiens
  misc_RNA (1)...(19): siRNA sense strand
ggagaaaugguucgccaca

SEQ ID NO: 2247306 - RNA, 19 nt, Homo sapiens
  misc_RNA (1)...(19): siRNA sense strand
ucaugaagugugugaacca

SEQ ID NO: 2247307 - RNA, 19 nt, Homo sapiens
  misc_RNA (1)...(19): siRNA sense strand
caauugaagaauggaaaga

SEQ ID NO: 2247308 - RNA, 19 nt, Homo sapiens
  misc_RNA (1)...(19): siRNA sense strand
cauugaaaauccuggacuu

SEQ ID NO: 2247309 - RNA, 19 nt, Homo sapiens
  misc_RNA (1)...(19): siRNA sense strand
gaacguggauauauggucu

SEQ ID NO: 2247310 - RNA, 19 nt, Homo sapiens
  misc_RNA (1)...(19): siRNA sense strand
agugauugacccagcaaaa

SEQ ID NO: 2247311 - RNA, 19 nt, Homo sapiens
  misc_RNA (1)...(19): siRNA sense strand
augaaagagaacacacaau

SEQ ID NO: 2247312 - RNA, 19 nt, Homo sapiens
  misc_RNA (1)...(19): siRNA sense strand
acacaugccaagagagcgu

SEQ ID NO: 2247313 - RNA, 19 nt, Homo sapiens
  misc_RNA (1)...(19): siRNA sense strand
cacaauaaacucaaagcca

SEQ ID NO: 2247314 - RNA, 19 nt, Homo sapiens
  misc_RNA (1)...(19): siRNA sense strand
cugacauaucugagggaga

SEQ ID NO: 2247315 - RNA, 19 nt, Homo sapiens
  misc_RNA (1)...(19): siRNA sense strand
augcugaggaaguggauuu

SEQ ID NO: 2247316 - RNA, 19 nt, Homo sapiens
  misc_RNA (1)...(19): siRNA sense strand
agaagcagaaggugggaga

SEQ ID NO: 2247317 - RNA, 19 nt, Homo sapiens
  misc_RNA (1)...(19): siRNA sense strand
ccugaagaaagcuggaaga

SEQ ID NO: 2247318 - RNA, 19 nt, Homo sapiens
  misc_RNA (1)...(19): siRNA sense strand
ggugccagguggaaggaga

SEQ ID NO: 2247319 - RNA, 19 nt, Homo sapiens
  misc_RNA (1)...(19): siRNA sense strand
agggagaagcacaagauca

SEQ ID NO: 2247320 - RNA, 19 nt, Homo sapiens
  misc_RNA (1)...(19): siRNA sense strand
acuuggaggccuugcagaa

SEQ ID NO: 2247321 - RNA, 19 nt, Homo sapiens
  misc_RNA (1)...(19): siRNA sense strand
augacgacuuugagaagau

SEQ ID NO: 2247322 - RNA, 19 nt, Homo sapiens
  misc_RNA (1)...(19): siRNA sense strand
cugaagaaagcuggaagaa

SEQ ID NO: 2247323 - RNA, 19 nt, Homo sapiens
  misc_RNA (1)...(19): siRNA sense strand
aagaagaagccgacgccca

SEQ ID NO: 2247324 - RNA, 19 nt, Homo sapiens
  misc_RNA (1)...(19): siRNA sense strand
ggaaccagaucauaaggga

SEQ ID NO: 2247325 - RNA, 19 nt, Homo sapiens
  misc_RNA (1)...(19): siRNA sense strand
guaucugcauggagcacau

SEQ ID NO: 2247326 - RNA, 19 nt, Homo sapiens
  misc_RNA (1)...(19): siRNA sense strand
aggaugacgacuuugagaa

SEQ ID NO: 2247327 - RNA, 19 nt, Homo sapiens
  misc_RNA (1)...(19): siRNA sense strand
uguucaaggucucccacaa

SEQ ID NO: 2247328 - RNA, 19 nt, Homo sapiens
  misc_RNA (1)...(19): siRNA sense strand
uggaaggagaugcggcuga

SEQ ID NO: 2247329 - RNA, 19 nt, Homo sapiens
  misc_RNA (1)...(19): siRNA sense strand
ccaaagagcuggaggccau

SEQ ID NO: 2247330 - RNA, 19 nt, Homo sapiens
  misc_RNA (1)...(19): siRNA sense strand
gggaagaaggagagccuca

SEQ ID NO: 2247331 - RNA, 19 nt, Homo sapiens
  misc_RNA (1)...(19): siRNA sense strand
aggcaaaccugguggaccu

SEQ ID NO: 2247332 - RNA, 19 nt, Homo sapiens
  misc_RNA (1)...(19): siRNA sense strand
agguggaagaaguggauuu

SEQ ID NO: 2247333 - RNA, 19 nt, Homo sapiens
  misc_RNA (1)...(19): siRNA sense strand
ucauagacuccauggccaa

SEQ ID NO: 2247334 - RNA, 19 nt, Homo sapiens
  misc_RNA (1)...(19): siRNA sense strand
uugacgagcagcagaagaa

SEQ ID NO: 2247335 - RNA, 19 nt, Homo sapiens
  misc_RNA (1)...(19): siRNA sense strand
acgaugacuucgaaaggau

SEQ ID NO: 2247336 - RNA, 19 nt, Homo sapiens
  misc_RNA (1)...(19): siRNA sense strand
cgccguacaucgugggcuu

SEQ ID NO: 2247337 - RNA, 19 nt, Homo sapiens
  misc_RNA (1)...(19): siRNA sense strand
cagaagaagcggcuggaag

SEQ ID NO: 2247338 - RNA, 19 nt, Homo sapiens
  misc_RNA (1)...(19): siRNA sense strand
cgaaaggaucucagagcug

SEQ ID NO: 2247339 - RNA, 19 nt, Homo sapiens
  misc_RNA (1)...(19): siRNA sense strand
ugacaauuccagaggacau

SEQ ID NO: 2247340 - RNA, 19 nt, Homo sapiens
  misc_RNA (1)...(19): siRNA sense strand
acagaaacuuugaggugga

SEQ ID NO: 2247341 - RNA, 19 nt, Homo sapiens
  misc_RNA (1)...(19): siRNA sense strand
acuuugagguggaggcuga

SEQ ID NO: 2247342 - RNA, 19 nt, Homo sapiens
  misc_RNA (1)...(19): siRNA sense strand
uggacaaguucuaccggaa

SEQ ID NO: 2247343 - RNA, 19 nt, Homo sapiens
  misc_RNA (1)...(19): siRNA sense strand
ugaagcaggugguggagga

SEQ ID NO: 2247344 - RNA, 19 nt, Homo sapiens
  misc_RNA (1)...(19): siRNA sense strand
ucaccauuggagacagaaa

SEQ ID NO: 2247345 - RNA, 19 nt, Homo sapiens
  misc_RNA (1)...(19): siRNA sense strand
gcuacaaugucaaguccga

SEQ ID NO: 2247346 - RNA, 19 nt, Homo sapiens
  misc_RNA (1)...(19): siRNA sense strand
ggaucugcauggagcucau

SEQ ID NO: 2247347 - RNA, 19 nt, Homo sapiens
  misc_RNA (1)...(19): siRNA sense strand
ugguagagaaggugcggca

SEQ ID NO: 2247348 - RNA, 19 nt, Homo sapiens
  misc_RNA (1)...(19): siRNA sense strand
agcugaaccagaagggcua

SEQ ID NO: 2247349 - RNA, 19 nt, Homo sapiens
  misc_RNA (1)...(19): siRNA sense strand
agacagaaacuuugaggug

SEQ ID NO: 2247350 - RNA, 19 nt, Homo sapiens
  misc_RNA (1)...(19): siRNA sense strand
ccggaaggugcuggauaaa

SEQ ID NO: 2247351 - RNA, 19 nt, Homo sapiens
  misc_RNA (1)...(19): siRNA sense strand
agguggaggcugaugacuu

SEQ ID NO: 2247352 - RNA, 19 nt, Homo sapiens
  misc_RNA (1)...(19): siRNA sense strand
gagagggagacguguggau

SEQ ID NO: 2247353 - RNA, 19 nt, Homo sapiens
  misc_RNA (1)...(19): siRNA sense strand
ccuauggggugguagagaa

SEQ ID NO: 2247354 - RNA, 19 nt, Homo sapiens
  misc_RNA (1)...(19): siRNA sense strand
uggacacauccuuggacaa

SEQ ID NO: 2247355 - RNA, 19 nt, Homo sapiens
  misc_RNA (1)...(19): siRNA sense strand
ggaaaauccaagaggaaga

SEQ ID NO: 2247356 - RNA, 19 nt, Homo sapiens
  misc_RNA (1)...(19): siRNA sense strand
ugacaauuccagaggacau

SEQ ID NO: 2247357 - RNA, 19 nt, Homo sapiens
  misc_RNA (1)...(19): siRNA sense strand
acagaaacuuugaggugga

SEQ ID NO: 2247358 - RNA, 19 nt, Homo sapiens
  misc_RNA (1)...(19): siRNA sense strand
acuuugagguggaggcuga

SEQ ID NO: 2247359 - RNA, 19 nt, Homo sapiens
  misc_RNA (1)...(19): siRNA sense strand
uggacaaguucuaccggaa

SEQ ID NO: 2247360 - RNA, 19 nt, Homo sapiens
  misc_RNA (1)...(19): siRNA sense strand
ggaagaaggaucuacggau

SEQ ID NO: 2247361 - RNA, 19 nt, Homo sapiens
  misc_RNA (1)...(19): siRNA sense strand
ugaagcaggugguggagga

SEQ ID NO: 2247362 - RNA, 19 nt, Homo sapiens
  misc_RNA (1)...(19): siRNA sense strand
ucaccauuggagacagaaa

SEQ ID NO: 2247363 - RNA, 19 nt, Homo sapiens
  misc_RNA (1)...(19): siRNA sense strand
gcuacaaugucaaguccga

SEQ ID NO: 2247364 - RNA, 19 nt, Homo sapiens
  misc_RNA (1)...(19): siRNA sense strand
ggaucugcauggagcucau

SEQ ID NO: 2247365 - RNA, 19 nt, Homo sapiens
  misc_RNA (1)...(19): siRNA sense strand
ugguagagaaggugcggca

SEQ ID NO: 2247366 - RNA, 19 nt, Homo sapiens
  misc_RNA (1)...(19): siRNA sense strand
agcugaaccagaagggcua

SEQ ID NO: 2247367 - RNA, 19 nt, Homo sapiens
  misc_RNA (1)...(19): siRNA sense strand
agacagaaacuuugaggug

SEQ ID NO: 2247368 - RNA, 19 nt, Homo sapiens
  misc_RNA (1)...(19): siRNA sense strand
ccggaaggugcuggauaaa

SEQ ID NO: 2247369 - RNA, 19 nt, Homo sapiens
  misc_RNA (1)...(19): siRNA sense strand
agguggaggcugaugacuu

SEQ ID NO: 2247370 - RNA, 19 nt, Homo sapiens
  misc_RNA (1)...(19): siRNA sense strand
gagagggagacguguggau

SEQ ID NO: 2247371 - RNA, 19 nt, Homo sapiens
  misc_RNA (1)...(19): siRNA sense strand
ccuauggggugguagagaa

SEQ ID NO: 2247372 - RNA, 19 nt, Homo sapiens
  misc_RNA (1)...(19): siRNA sense strand
uggacacauccuuggacaa

SEQ ID NO: 2247373 - RNA, 19 nt, Homo sapiens
  misc_RNA (1)...(19): siRNA sense strand
ggaaaauccaagaggaaga

SEQ ID NO: 2247374 - RNA, 19 nt, Homo sapiens
  misc_RNA (1)...(19): siRNA sense strand
ugacaauuccagaggacau

SEQ ID NO: 2247375 - RNA, 19 nt, Homo sapiens
  misc_RNA (1)...(19): siRNA sense strand
acagaaacuuugaggugga

SEQ ID NO: 2247376 - RNA, 19 nt, Homo sapiens
  misc_RNA (1)...(19): siRNA sense strand
acuuugagguggaggcuga

SEQ ID NO: 2247377 - RNA, 19 nt, Homo sapiens
  misc_RNA (1)...(19): siRNA sense strand
uggacaaguucuaccggaa

SEQ ID NO: 2247378 - RNA, 19 nt, Homo sapiens
  misc_RNA (1)...(19): siRNA sense strand
ggaagaaggaucuacggau

SEQ ID NO: 2247379 - RNA, 19 nt, Homo sapiens
  misc_RNA (1)...(19): siRNA sense strand
ugaagcaggugguggagga

SEQ ID NO: 2247380 - RNA, 19 nt, Homo sapiens
  misc_RNA (1)...(19): siRNA sense strand
ucaccauuggagacagaaa

SEQ ID NO: 2247381 - RNA, 19 nt, Homo sapiens
  misc_RNA (1)...(19): siRNA sense strand
gcuacaaugucaaguccga

SEQ ID NO: 2247382 - RNA, 19 nt, Homo sapiens
  misc_RNA (1)...(19): siRNA sense strand
ggaucugcauggagcucau

SEQ ID NO: 2247383 - RNA, 19 nt, Homo sapiens
  misc_RNA (1)...(19): siRNA sense strand
ugguagagaaggugcggca

SEQ ID NO: 2247384 - RNA, 19 nt, Homo sapiens
  misc_RNA (1)...(19): siRNA sense strand
agcugaaccagaagggcua

SEQ ID NO: 2247385 - RNA, 19 nt, Homo sapiens
  misc_RNA (1)...(19): siRNA sense strand
agacagaaacuuugaggug

SEQ ID NO: 2247386 - RNA, 19 nt, Homo sapiens
  misc_RNA (1)...(19): siRNA sense strand
ccggaaggugcuggauaaa

SEQ ID NO: 2247387 - RNA, 19 nt, Homo sapiens
  misc_RNA (1)...(19): siRNA sense strand
agguggaggcugaugacuu

SEQ ID NO: 2247388 - RNA, 19 nt, Homo sapiens
  misc_RNA (1)...(19): siRNA sense strand
gagagggagacguguggau

SEQ ID NO: 2247389 - RNA, 19 nt, Homo sapiens
  misc_RNA (1)...(19): siRNA sense strand
ccuauggggugguagagaa

SEQ ID NO: 2247390 - RNA, 19 nt, Homo sapiens
  misc_RNA (1)...(19): siRNA sense strand
uggacacauccuuggacaa

SEQ ID NO: 2247391 - RNA, 19 nt, Homo sapiens
  misc_RNA (1)...(19): siRNA sense strand
cugaagaauugaugggcca

SEQ ID NO: 2247392 - RNA, 19 nt, Homo sapiens
  misc_RNA (1)...(19): siRNA sense strand
agaacauguccuuggaaga

SEQ ID NO: 2247393 - RNA, 19 nt, Homo sapiens
  misc_RNA (1)...(19): siRNA sense strand
ccuuggaagaauugcagua

SEQ ID NO: 2247394 - RNA, 19 nt, Homo sapiens
  misc_RNA (1)...(19): siRNA sense strand
cuuuggauguauauaggaa

SEQ ID NO: 2247395 - RNA, 19 nt, Homo sapiens
  misc_RNA (1)...(19): siRNA sense strand
cuuacuuauuuguggaguu

SEQ ID NO: 2247396 - RNA, 19 nt, Homo sapiens
  misc_RNA (1)...(19): siRNA sense strand
uugcaguagcaguuguuaa

SEQ ID NO: 2247397 - RNA, 19 nt, Homo sapiens
  misc_RNA (1)...(19): siRNA sense strand
guacagaauucauggaugg

SEQ ID NO: 2247398 - RNA, 19 nt, Homo sapiens
  misc_RNA (1)...(19): siRNA sense strand
aggucauacuacuagauau

SEQ ID NO: 2247399 - RNA, 19 nt, Homo sapiens
  misc_RNA (1)...(19): siRNA sense strand
cguucaucgugcaguucaa

SEQ ID NO: 2247400 - RNA, 19 nt, Homo sapiens
  misc_RNA (1)...(19): siRNA sense strand
gcuaguaaacacaagagga

SEQ ID NO: 2247401 - RNA, 19 nt, Homo sapiens
  misc_RNA (1)...(19): siRNA sense strand
cugaagaauugaugggcca

SEQ ID NO: 2247402 - RNA, 19 nt, Homo sapiens
  misc_RNA (1)...(19): siRNA sense strand
agaacauguccuuggaaga

SEQ ID NO: 2247403 - RNA, 19 nt, Homo sapiens
  misc_RNA (1)...(19): siRNA sense strand
ccuuggaagaauugcagua

SEQ ID NO: 2247404 - RNA, 19 nt, Homo sapiens
  misc_RNA (1)...(19): siRNA sense strand
cuuuggauguauauaggaa

SEQ ID NO: 2247405 - RNA, 19 nt, Homo sapiens
  misc_RNA (1)...(19): siRNA sense strand
cuuacuuauuuguggaguu

SEQ ID NO: 2247406 - RNA, 19 nt, Homo sapiens
  misc_RNA (1)...(19): siRNA sense strand
uugcaguagcaguuguuaa

SEQ ID NO: 2247407 - RNA, 19 nt, Homo sapiens
  misc_RNA (1)...(19): siRNA sense strand
guacagaauucauggaugg

SEQ ID NO: 2247408 - RNA, 19 nt, Homo sapiens
  misc_RNA (1)...(19): siRNA sense strand
aggucauacuacuagauau

SEQ ID NO: 2247409 - RNA, 19 nt, Homo sapiens
  misc_RNA (1)...(19): siRNA sense strand
cguucaucgugcaguucaa

SEQ ID NO: 2247410 - RNA, 19 nt, Homo sapiens
  misc_RNA (1)...(19): siRNA sense strand
gcuaguaaacacaagagga

SEQ ID NO: 2247411 - RNA, 19 nt, Homo sapiens
  misc_RNA (1)...(19): siRNA sense strand
cugaagaauugaugggcca

SEQ ID NO: 2247412 - RNA, 19 nt, Homo sapiens
  misc_RNA (1)...(19): siRNA sense strand
agaacauguccuuggaaga

SEQ ID NO: 2247413 - RNA, 19 nt, Homo sapiens
  misc_RNA (1)...(19): siRNA sense strand
ccuuggaagaauugcagua

SEQ ID NO: 2247414 - RNA, 19 nt, Homo sapiens
  misc_RNA (1)...(19): siRNA sense strand
cuuuggauguauauaggaa

SEQ ID NO: 2247415 - RNA, 19 nt, Homo sapiens
  misc_RNA (1)...(19): siRNA sense strand
cuuacuuauuuguggaguu

SEQ ID NO: 2247416 - RNA, 19 nt, Homo sapiens
  misc_RNA (1)...(19): siRNA sense strand
uugcaguagcaguuguuaa

SEQ ID NO: 2247417 - RNA, 19 nt, Homo sapiens
  misc_RNA (1)...(19): siRNA sense strand
guacagaauucauggaugg

SEQ ID NO: 2247418 - RNA, 19 nt, Homo sapiens
  misc_RNA (1)...(19): siRNA sense strand
aggucauacuacuagauau

SEQ ID NO: 2247419 - RNA, 19 nt, Homo sapiens
  misc_RNA (1)...(19): siRNA sense strand
cguucaucgugcaguucaa

SEQ ID NO: 2247420 - RNA, 19 nt, Homo sapiens
  misc_RNA (1)...(19): siRNA sense strand
gcuaguaaacacaagagga

SEQ ID NO: 2247421 - RNA, 19 nt, Homo sapiens
  misc_RNA (1)...(19): siRNA sense strand
cugaagaauugaugggcca

SEQ ID NO: 2247422 - RNA, 19 nt, Homo sapiens
  misc_RNA (1)...(19): siRNA sense strand
agaacauguccuuggaaga

SEQ ID NO: 2247423 - RNA, 19 nt, Homo sapiens
  misc_RNA (1)...(19): siRNA sense strand
ccuuggaagaauugcagua

SEQ ID NO: 2247424 - RNA, 19 nt, Homo sapiens
  misc_RNA (1)...(19): siRNA sense strand
cuuuggauguauauaggaa

SEQ ID NO: 2247425 - RNA, 19 nt, Homo sapiens
  misc_RNA (1)...(19): siRNA sense strand
cuuacuuauuuguggaguu

SEQ ID NO: 2247426 - RNA, 19 nt, Homo sapiens
  misc_RNA (1)...(19): siRNA sense strand
uugcaguagcaguuguuaa

SEQ ID NO: 2247427 - RNA, 19 nt, Homo sapiens
  misc_RNA (1)...(19): siRNA sense strand
guacagaauucauggaugg

SEQ ID NO: 2247428 - RNA, 19 nt, Homo sapiens
  misc_RNA (1)...(19): siRNA sense strand
aggucauacuacuagauau

SEQ ID NO: 2247429 - RNA, 19 nt, Homo sapiens
  misc_RNA (1)...(19): siRNA sense strand
cguucaucgugcaguucaa

SEQ ID NO: 2247430 - RNA, 19 nt, Homo sapiens
  misc_RNA (1)...(19): siRNA sense strand
gcuaguaaacacaagagga

SEQ ID NO: 2247431 - RNA, 19 nt, Homo sapiens
  misc_RNA (1)...(19): siRNA sense strand
agacaauuccagaggacau

SEQ ID NO: 2247432 - RNA, 19 nt, Homo sapiens
  misc_RNA (1)...(19): siRNA sense strand
caguaaauagccaggaaca

SEQ ID NO: 2247433 - RNA, 19 nt, Homo sapiens
  misc_RNA (1)...(19): siRNA sense strand
cagaggacaucuuagggaa

SEQ ID NO: 2247434 - RNA, 19 nt, Homo sapiens
  misc_RNA (1)...(19): siRNA sense strand
agaggacaucuuagggaaa

SEQ ID NO: 2247435 - RNA, 19 nt, Homo sapiens
  misc_RNA (1)...(19): siRNA sense strand
acaugaauccaaaggaaca

SEQ ID NO: 2247436 - RNA, 19 nt, Homo sapiens
  misc_RNA (1)...(19): siRNA sense strand
acuuugaggugaaggcaga

SEQ ID NO: 2247437 - RNA, 19 nt, Homo sapiens
  misc_RNA (1)...(19): siRNA sense strand
agcucaaccagaagggaua

SEQ ID NO: 2247438 - RNA, 19 nt, Homo sapiens
  misc_RNA (1)...(19): siRNA sense strand
gauuuagacuccaaggcuu

SEQ ID NO: 2247439 - RNA, 19 nt, Homo sapiens
  misc_RNA (1)...(19): siRNA sense strand
cguacggggugguggagaa

SEQ ID NO: 2247440 - RNA, 19 nt, Homo sapiens
  misc_RNA (1)...(19): siRNA sense strand
ucaaacaggugguagagga

SEQ ID NO: 2247441 - RNA, 19 nt, Homo sapiens
  misc_RNA (1)...(19): siRNA sense strand
uugauaaaggccagacaau

SEQ ID NO: 2247442 - RNA, 19 nt, Homo sapiens
  misc_RNA (1)...(19): siRNA sense strand
cugaaagaauaaacccaga

SEQ ID NO: 2247443 - RNA, 19 nt, Homo sapiens
  misc_RNA (1)...(19): siRNA sense strand
aucagaacuuugaggugaa

SEQ ID NO: 2247444 - RNA, 19 nt, Homo sapiens
  misc_RNA (1)...(19): siRNA sense strand
aagaauaaacccagagcuc

SEQ ID NO: 2247445 - RNA, 19 nt, Homo sapiens
  misc_RNA (1)...(19): siRNA sense strand
aaucagaacuuugagguga

SEQ ID NO: 2247446 - RNA, 19 nt, Homo sapiens
  misc_RNA (1)...(19): siRNA sense strand
ggaucugcauggagcucau

SEQ ID NO: 2247447 - RNA, 19 nt, Homo sapiens
  misc_RNA (1)...(19): siRNA sense strand
gagcucaaccagaagggau

SEQ ID NO: 2247448 - RNA, 19 nt, Homo sapiens
  misc_RNA (1)...(19): siRNA sense strand
gccuacauacccagagcua

SEQ ID NO: 2247449 - RNA, 19 nt, Homo sapiens
  misc_RNA (1)...(19): siRNA sense strand
caaaggaacagauguggca

SEQ ID NO: 2247450 - RNA, 19 nt, Homo sapiens
  misc_RNA (1)...(19): siRNA sense strand
agacaauuccagaggacau

SEQ ID NO: 2247451 - RNA, 19 nt, Homo sapiens
  misc_RNA (1)...(19): siRNA sense strand
caguaaauagccaggaaca

SEQ ID NO: 2247452 - RNA, 19 nt, Homo sapiens
  misc_RNA (1)...(19): siRNA sense strand
cagaggacaucuuagggaa

SEQ ID NO: 2247453 - RNA, 19 nt, Homo sapiens
  misc_RNA (1)...(19): siRNA sense strand
agaggacaucuuagggaaa

SEQ ID NO: 2247454 - RNA, 19 nt, Homo sapiens
  misc_RNA (1)...(19): siRNA sense strand
acaugaauccaaaggaaca

SEQ ID NO: 2247455 - RNA, 19 nt, Homo sapiens
  misc_RNA (1)...(19): siRNA sense strand
agcucaaccagaagggaua

SEQ ID NO: 2247456 - RNA, 19 nt, Homo sapiens
  misc_RNA (1)...(19): siRNA sense strand
ucaaacaggugguagagga

SEQ ID NO: 2247457 - RNA, 19 nt, Homo sapiens
  misc_RNA (1)...(19): siRNA sense strand
cguacggggugguggagaa

SEQ ID NO: 2247458 - RNA, 19 nt, Homo sapiens
  misc_RNA (1)...(19): siRNA sense strand
uugauaaaggccagacaau

SEQ ID NO: 2247459 - RNA, 19 nt, Homo sapiens
  misc_RNA (1)...(19): siRNA sense strand
cugaaagaauaaacccaga

SEQ ID NO: 2247460 - RNA, 19 nt, Homo sapiens
  misc_RNA (1)...(19): siRNA sense strand
aagaauaaacccagagcuc

SEQ ID NO: 2247461 - RNA, 19 nt, Homo sapiens
  misc_RNA (1)...(19): siRNA sense strand
ggaucugcauggagcucau

SEQ ID NO: 2247462 - RNA, 19 nt, Homo sapiens
  misc_RNA (1)...(19): siRNA sense strand
gagcucaaccagaagggau

SEQ ID NO: 2247463 - RNA, 19 nt, Homo sapiens
  misc_RNA (1)...(19): siRNA sense strand
gccuacauacccagagcua

SEQ ID NO: 2247464 - RNA, 19 nt, Homo sapiens
  misc_RNA (1)...(19): siRNA sense strand
caaaggaacagauguggca

SEQ ID NO: 2247465 - RNA, 19 nt, Homo sapiens
  misc_RNA (1)...(19): siRNA sense strand
agaaggaaauucagggcuu

SEQ ID NO: 2247466 - RNA, 19 nt, Homo sapiens
  misc_RNA (1)...(19): siRNA sense strand
augcaguaaucguggccaa

SEQ ID NO: 2247467 - RNA, 19 nt, Homo sapiens
  misc_RNA (1)...(19): siRNA sense strand
aguacaaauucaagagucu

SEQ ID NO: 2247468 - RNA, 19 nt, Homo sapiens
  misc_RNA (1)...(19): siRNA sense strand
caggaaccuaacagagaaa

SEQ ID NO: 2247469 - RNA, 19 nt, Homo sapiens
  misc_RNA (1)...(19): siRNA sense strand
aagcagugcaagaugagaa

SEQ ID NO: 2247470 - RNA, 19 nt, Homo sapiens
  misc_RNA (1)...(19): siRNA sense strand
augcugauuccuaaagaaa

SEQ ID NO: 2247471 - RNA, 19 nt, Homo sapiens
  misc_RNA (1)...(19): siRNA sense strand
ugauguuggaggaaggauu

SEQ ID NO: 2247472 - RNA, 19 nt, Homo sapiens
  misc_RNA (1)...(19): siRNA sense strand
uuagaaaccaagaugaaca

SEQ ID NO: 2247473 - RNA, 19 nt, Homo sapiens
  misc_RNA (1)...(19): siRNA sense strand
uugcagugauucauggaga

SEQ ID NO: 2247474 - RNA, 19 nt, Homo sapiens
  misc_RNA (1)...(19): siRNA sense strand
ccugaaggaaagaggugca

SEQ ID NO: 2247475 - RNA, 19 nt, Homo sapiens
  misc_RNA (1)...(19): siRNA sense strand
ccuacuuuccuuacagcaa

SEQ ID NO: 2247476 - RNA, 19 nt, Homo sapiens
  misc_RNA (1)...(19): siRNA sense strand
guauauucaagaagagauc

SEQ ID NO: 2247477 - RNA, 19 nt, Homo sapiens
  misc_RNA (1)...(19): siRNA sense strand
uguacaacaucgacgccaa

SEQ ID NO: 2247478 - RNA, 19 nt, Homo sapiens
  misc_RNA (1)...(19): siRNA sense strand
aggaagccuaugaggucaa

SEQ ID NO: 2247479 - RNA, 19 nt, Homo sapiens
  misc_RNA (1)...(19): siRNA sense strand
agucccagcccgacagcaa

SEQ ID NO: 2247480 - RNA, 19 nt, Homo sapiens
  misc_RNA (1)...(19): siRNA sense strand
gggaugagaaguacgggaa

SEQ ID NO: 2247481 - RNA, 19 nt, Homo sapiens
  misc_RNA (1)...(19): siRNA sense strand
gcaagacagcagaugguga

SEQ ID NO: 2247482 - RNA, 19 nt, Homo sapiens
  misc_RNA (1)...(19): siRNA sense strand
ccgugaggagugugagcau

SEQ ID NO: 2247483 - RNA, 19 nt, Homo sapiens
  misc_RNA (1)...(19): siRNA sense strand
agccaggagucuacaccaa

SEQ ID NO: 2247484 - RNA, 19 nt, Homo sapiens
  misc_RNA (1)...(19): siRNA sense strand
gugcuggggaugagaagua

SEQ ID NO: 2247485 - RNA, 19 nt, Homo sapiens
  misc_RNA (1)...(19): siRNA sense strand
ccuguggaucaaaggagaa

SEQ ID NO: 2247486 - RNA, 19 nt, Homo sapiens
  misc_RNA (1)...(19): siRNA sense strand
uaguaaaccuggacgguga

SEQ ID NO: 2247487 - RNA, 19 nt, Homo sapiens
  misc_RNA (1)...(19): siRNA sense strand
cggugaagugauuggaauu

SEQ ID NO: 2247488 - RNA, 19 nt, Homo sapiens
  misc_RNA (1)...(19): siRNA sense strand
cggacgugguggagaagau

SEQ ID NO: 2247489 - RNA, 19 nt, Homo sapiens
  misc_RNA (1)...(19): siRNA sense strand
ccgacaggccaaaggaaaa

SEQ ID NO: 2247490 - RNA, 19 nt, Homo sapiens
  misc_RNA (1)...(19): siRNA sense strand
aaauugaccaccagggcaa

SEQ ID NO: 2247491 - RNA, 19 nt, Homo sapiens
  misc_RNA (1)...(19): siRNA sense strand
auggacugaucgugacaaa

SEQ ID NO: 2247492 - RNA, 19 nt, Homo sapiens
  misc_RNA (1)...(19): siRNA sense strand
gaagauggacugaucguga

SEQ ID NO: 2247493 - RNA, 19 nt, Homo sapiens
  misc_RNA (1)...(19): siRNA sense strand
ugaaagugacagcuggaau

SEQ ID NO: 2247494 - RNA, 19 nt, Homo sapiens
  misc_RNA (1)...(19): siRNA sense strand
cagugauucccgaagaaau

SEQ ID NO: 2247495 - RNA, 19 nt, Homo sapiens
  misc_RNA (1)...(19): siRNA sense strand
ccaaagagcugaaggaccg

SEQ ID NO: 2247496 - RNA, 19 nt, Homo sapiens
  misc_RNA (1)...(19): siRNA sense strand
ccgcagggguaaugaagau

SEQ ID NO: 2247497 - RNA, 19 nt, Homo sapiens
  misc_RNA (1)...(19): siRNA sense strand
ccaacaagcaccgggucaa

SEQ ID NO: 2247498 - RNA, 19 nt, Homo sapiens
  misc_RNA (1)...(19): siRNA sense strand
aggaaaacgacgucauaau

SEQ ID NO: 2247499 - RNA, 19 nt, Homo sapiens
  misc_RNA (1)...(19): siRNA sense strand
ggcuagugggucuggguuu

SEQ ID NO: 2247500 - RNA, 19 nt, Homo sapiens
  misc_RNA (1)...(19): siRNA sense strand
accgacaggccaaaggaaa

SEQ ID NO: 2247501 - RNA, 19 nt, Homo sapiens
  misc_RNA (1)...(19): siRNA sense strand
aagccaucaccaagaagaa

SEQ ID NO: 2247502 - RNA, 19 nt, Homo sapiens
  misc_RNA (1)...(19): siRNA sense strand
cugaugaaccaauggaaca

SEQ ID NO: 2247503 - RNA, 19 nt, Homo sapiens
  misc_RNA (1)...(19): siRNA sense strand
uaaacaagguucagccaca

SEQ ID NO: 2247504 - RNA, 19 nt, Homo sapiens
  misc_RNA (1)...(19): siRNA sense strand
gcucguacuuacuuggaga

SEQ ID NO: 2247505 - RNA, 19 nt, Homo sapiens
  misc_RNA (1)...(19): siRNA sense strand
augcaauggaagcuguuaa

SEQ ID NO: 2247506 - RNA, 19 nt, Homo sapiens
  misc_RNA (1)...(19): siRNA sense strand
cugaugaaccugcagaaaa

SEQ ID NO: 2247507 - RNA, 19 nt, Homo sapiens
  misc_RNA (1)...(19): siRNA sense strand
agcaagacccagauaccaa

SEQ ID NO: 2247508 - RNA, 19 nt, Homo sapiens
  misc_RNA (1)...(19): siRNA sense strand
cugaugaaccaauggaaca

SEQ ID NO: 2247509 - RNA, 19 nt, Homo sapiens
  misc_RNA (1)...(19): siRNA sense strand
uaaacaagguucagccaca

SEQ ID NO: 2247510 - RNA, 19 nt, Homo sapiens
  misc_RNA (1)...(19): siRNA sense strand
gcucguacuuacuuggaga

SEQ ID NO: 2247511 - RNA, 19 nt, Homo sapiens
  misc_RNA (1)...(19): siRNA sense strand
augcaauggaagcuguuaa

SEQ ID NO: 2247512 - RNA, 19 nt, Homo sapiens
  misc_RNA (1)...(19): siRNA sense strand
cugaugaaccugcagaaaa

SEQ ID NO: 2247513 - RNA, 19 nt, Homo sapiens
  misc_RNA (1)...(19): siRNA sense strand
agcaagacccagauaccaa

SEQ ID NO: 2247514 - RNA, 19 nt, Homo sapiens
  misc_RNA (1)...(19): siRNA sense strand
aggaagaacuugaagaggu

SEQ ID NO: 2247515 - RNA, 19 nt, Homo sapiens
  misc_RNA (1)...(19): siRNA sense strand
aagccagaguggagacaca

SEQ ID NO: 2247516 - RNA, 19 nt, Homo sapiens
  misc_RNA (1)...(19): siRNA sense strand
ucaaacaaguaauggagga

SEQ ID NO: 2247517 - RNA, 19 nt, Homo sapiens
  misc_RNA (1)...(19): siRNA sense strand
ggcuaauugcugaugcuaa

SEQ ID NO: 2247518 - RNA, 19 nt, Homo sapiens
  misc_RNA (1)...(19): siRNA sense strand
ggaauaugccauugaggcu

SEQ ID NO: 2247519 - RNA, 19 nt, Homo sapiens
  misc_RNA (1)...(19): siRNA sense strand
uagcuguggagaagagaau

SEQ ID NO: 2247520 - RNA, 19 nt, Homo sapiens
  misc_RNA (1)...(19): siRNA sense strand
ugauaaagccagaguggag

SEQ ID NO: 2247521 - RNA, 19 nt, Homo sapiens
  misc_RNA (1)...(19): siRNA sense strand
gaguggagacacagaacca

SEQ ID NO: 2247522 - RNA, 19 nt, Homo sapiens
  misc_RNA (1)...(19): siRNA sense strand
caacaaacauugagcuagc

SEQ ID NO: 2247523 - RNA, 19 nt, Homo sapiens
  misc_RNA (1)...(19): siRNA sense strand
ugcaacaaacauugagcua

SEQ ID NO: 2247524 - RNA, 19 nt, Homo sapiens
  misc_RNA (1)...(19): siRNA sense strand
ccagcagcauugagaaaau

SEQ ID NO: 2247525 - RNA, 19 nt, Homo sapiens
  misc_RNA (1)...(19): siRNA sense strand
uuguagagauugaugcuca

SEQ ID NO: 2247526 - RNA, 19 nt, Homo sapiens
  misc_RNA (1)...(19): siRNA sense strand
ggagaagcugaaugcaaca

SEQ ID NO: 2247527 - RNA, 19 nt, Homo sapiens
  misc_RNA (1)...(19): siRNA sense strand
gaagauuauuucaagugga

SEQ ID NO: 2247528 - RNA, 19 nt, Homo sapiens
  misc_RNA (1)...(19): siRNA sense strand
aaguaauggaggagaagcu

SEQ ID NO: 2247529 - RNA, 19 nt, Homo sapiens
  misc_RNA (1)...(19): siRNA sense strand
uuacagaagcagagauuga

SEQ ID NO: 2247530 - RNA, 19 nt, Homo sapiens
  misc_RNA (1)...(19): siRNA sense strand
gaagaaauuugauuggaca

SEQ ID NO: 2247531 - RNA, 19 nt, Homo sapiens
  misc_RNA (1)...(19): siRNA sense strand
aguagcugucagagggaaa

SEQ ID NO: 2247532 - RNA, 19 nt, Homo sapiens
  misc_RNA (1)...(19): siRNA sense strand
gaauaugcuuuuaaggcua

SEQ ID NO: 2247533 - RNA, 19 nt, Homo sapiens
  misc_RNA (1)...(19): siRNA sense strand
cagaaauagaaguuggagu

SEQ ID NO: 2247534 - RNA, 19 nt, Homo sapiens
  misc_RNA (1)...(19): siRNA sense strand
gaguagugacaguugaaaa

SEQ ID NO: 2247535 - RNA, 19 nt, Homo sapiens
  misc_RNA (1)...(19): siRNA sense strand
ccuaaauucaggauucuua

SEQ ID NO: 2247536 - RNA, 19 nt, Homo sapiens
  misc_RNA (1)...(19): siRNA sense strand
ucuuacagaagcagagauu

SEQ ID NO: 2247537 - RNA, 19 nt, Homo sapiens
  misc_RNA (1)...(19): siRNA sense strand
agaaguuggaguagugaca

SEQ ID NO: 2247538 - RNA, 19 nt, Homo sapiens
  misc_RNA (1)...(19): siRNA sense strand
cugacaaauuauuggauuc

SEQ ID NO: 2247539 - RNA, 19 nt, Homo sapiens
  misc_RNA (1)...(19): siRNA sense strand
ggacauuugaacagacagu

SEQ ID NO: 2247540 - RNA, 19 nt, Homo sapiens
  misc_RNA (1)...(19): siRNA sense strand
ccgauauuucucaggucua

SEQ ID NO: 2247541 - RNA, 19 nt, Homo sapiens
  misc_RNA (1)...(19): siRNA sense strand
ucuagcagagagagacuaa

SEQ ID NO: 2247542 - RNA, 19 nt, Homo sapiens
  misc_RNA (1)...(19): siRNA sense strand
gcgaguuccuggagaagaa

SEQ ID NO: 2247543 - RNA, 19 nt, Homo sapiens
  misc_RNA (1)...(19): siRNA sense strand
agaagaagucaguggccaa

SEQ ID NO: 2247544 - RNA, 19 nt, Homo sapiens
  misc_RNA (1)...(19): siRNA sense strand
ugucaugaggcgagaucaa

SEQ ID NO: 2247545 - RNA, 19 nt, Homo sapiens
  misc_RNA (1)...(19): siRNA sense strand
augaaagaacagugcggaa

SEQ ID NO: 2247546 - RNA, 19 nt, Homo sapiens
  misc_RNA (1)...(19): siRNA sense strand
gguucagucagguggcaaa

SEQ ID NO: 2247547 - RNA, 19 nt, Homo sapiens
  misc_RNA (1)...(19): siRNA sense strand
cguuauacgcagagcaaug

SEQ ID NO: 2247548 - RNA, 19 nt, Homo sapiens
  misc_RNA (1)...(19): siRNA sense strand
uguucgaggaagagacauu

SEQ ID NO: 2247549 - RNA, 19 nt, Homo sapiens
  misc_RNA (1)...(19): siRNA sense strand
gaagaacuauacugacgaa

SEQ ID NO: 2247550 - RNA, 19 nt, Homo sapiens
  misc_RNA (1)...(19): siRNA sense strand
gugccaagucagugcgcga

SEQ ID NO: 2247551 - RNA, 19 nt, Homo sapiens
  misc_RNA (1)...(19): siRNA sense strand
gagaagaagucaguggcca

SEQ ID NO: 2247552 - RNA, 19 nt, Homo sapiens
  misc_RNA (1)...(19): siRNA sense strand
agaagaagucaguggccaa

SEQ ID NO: 2247553 - RNA, 19 nt, Homo sapiens
  misc_RNA (1)...(19): siRNA sense strand
augaaagaacagugcggaa

SEQ ID NO: 2247554 - RNA, 19 nt, Homo sapiens
  misc_RNA (1)...(19): siRNA sense strand
cguuauacgcagagcaaug

SEQ ID NO: 2247555 - RNA, 19 nt, Homo sapiens
  misc_RNA (1)...(19): siRNA sense strand
uguucgaggaagagacauu

SEQ ID NO: 2247556 - RNA, 19 nt, Homo sapiens
  misc_RNA (1)...(19): siRNA sense strand
gagaagaagucaguggcca

SEQ ID NO: 2247557 - RNA, 19 nt, Homo sapiens
  misc_RNA (1)...(19): siRNA sense strand
cuucaaggcuggaggcuca

SEQ ID NO: 2247558 - RNA, 19 nt, Homo sapiens
  misc_RNA (1)...(19): siRNA sense strand
gacuugaugaagaaggaaa

SEQ ID NO: 2247559 - RNA, 19 nt, Homo sapiens
  misc_RNA (1)...(19): siRNA sense strand
ccaaagagggcaucaggga

SEQ ID NO: 2247560 - RNA, 19 nt, Homo sapiens
  misc_RNA (1)...(19): siRNA sense strand
augaggagcuucugggaga

SEQ ID NO: 2247561 - RNA, 19 nt, Homo sapiens
  misc_RNA (1)...(19): siRNA sense strand
ggaucuagguccagggagu

SEQ ID NO: 2247562 - RNA, 19 nt, Homo sapiens
  misc_RNA (1)...(19): siRNA sense strand
gcagcugacuccagggcua

SEQ ID NO: 2247563 - RNA, 19 nt, Homo sapiens
  misc_RNA (1)...(19): siRNA sense strand
cggugaagaaggugauaga

SEQ ID NO: 2247564 - RNA, 19 nt, Homo sapiens
  misc_RNA (1)...(19): siRNA sense strand
ccuccaaacugcuugccaa

SEQ ID NO: 2247565 - RNA, 19 nt, Homo sapiens
  misc_RNA (1)...(19): siRNA sense strand
uggaaguggagcaggccua

SEQ ID NO: 2247566 - RNA, 19 nt, Homo sapiens
  misc_RNA (1)...(19): siRNA sense strand
ccucccagacggugaagaa

SEQ ID NO: 2247567 - RNA, 19 nt, Homo sapiens
  misc_RNA (1)...(19): siRNA sense strand
ucgaaaugcuucauggaac

SEQ ID NO: 2247568 - RNA, 19 nt, Homo sapiens
  misc_RNA (1)...(19): siRNA sense strand
aucuaugagcuucgaaaua

SEQ ID NO: 2247569 - RNA, 19 nt, Homo sapiens
  misc_RNA (1)...(19): siRNA sense strand
cugaucuacaugagaagua

SEQ ID NO: 2247570 - RNA, 19 nt, Homo sapiens
  misc_RNA (1)...(19): siRNA sense strand
caugagaaguauaguggcu

SEQ ID NO: 2247571 - RNA, 19 nt, Homo sapiens
  misc_RNA (1)...(19): siRNA sense strand
agugaagggaaccggauuu

SEQ ID NO: 2247572 - RNA, 19 nt, Homo sapiens
  misc_RNA (1)...(19): siRNA sense strand
ccuaugaccuggaagugga

SEQ ID NO: 2247573 - RNA, 19 nt, Homo sapiens
  misc_RNA (1)...(19): siRNA sense strand
gcuccuacaucuauggcua

SEQ ID NO: 2247574 - RNA, 19 nt, Homo sapiens
  misc_RNA (1)...(19): siRNA sense strand
cugggaaagccgagaaguu

SEQ ID NO: 2247575 - RNA, 19 nt, Homo sapiens
  misc_RNA (1)...(19): siRNA sense strand
ggcaaguacuuuugggaga

SEQ ID NO: 2247576 - RNA, 19 nt, Homo sapiens
  misc_RNA (1)...(19): siRNA sense strand
aagaaggagggcaggugua

SEQ ID NO: 2247577 - RNA, 19 nt, Homo sapiens
  misc_RNA (1)...(19): siRNA sense strand
ugaccaaggaagagugucu

SEQ ID NO: 2247578 - RNA, 19 nt, Homo sapiens
  misc_RNA (1)...(19): siRNA sense strand
aggagauguguuaccgaua

SEQ ID NO: 2247579 - RNA, 19 nt, Homo sapiens
  misc_RNA (1)...(19): siRNA sense strand
ggguagagcggcaaguacu

SEQ ID NO: 2247580 - RNA, 19 nt, Homo sapiens
  misc_RNA (1)...(19): siRNA sense strand
ccaagaaucuggugagcga

SEQ ID NO: 2247581 - RNA, 19 nt, Homo sapiens
  misc_RNA (1)...(19): siRNA sense strand
uggcauaguucuuggagca

SEQ ID NO: 2247582 - RNA, 19 nt, Homo sapiens
  misc_RNA (1)...(19): siRNA sense strand
ggagcagauacaagagcaa

SEQ ID NO: 2247583 - RNA, 19 nt, Homo sapiens
  misc_RNA (1)...(19): siRNA sense strand
ggccagacauggaggagga

SEQ ID NO: 2247584 - RNA, 19 nt, Homo sapiens
  misc_RNA (1)...(19): siRNA sense strand
ccgguacaggugugagaaa

SEQ ID NO: 2247585 - RNA, 19 nt, Homo sapiens
  misc_RNA (1)...(19): siRNA sense strand
gaagauaaguuuaggccag

SEQ ID NO: 2247586 - RNA, 19 nt, Homo sapiens
  misc_RNA (1)...(19): siRNA sense strand
uuacauuggugcagcccua

SEQ ID NO: 2247587 - RNA, 19 nt, Homo sapiens
  misc_RNA (1)...(19): siRNA sense strand
uggaggaggaggaagccaa

SEQ ID NO: 2247588 - RNA, 19 nt, Homo sapiens
  misc_RNA (1)...(19): siRNA sense strand
cagacauggaggaggagga

SEQ ID NO: 2247589 - RNA, 19 nt, Homo sapiens
  misc_RNA (1)...(19): siRNA sense strand
gcccauacacagugcccaa

SEQ ID NO: 2247590 - RNA, 19 nt, Homo sapiens
  misc_RNA (1)...(19): siRNA sense strand
aggaggaagccaagaaucu

SEQ ID NO: 2247591 - RNA, 19 nt, Homo sapiens
  misc_RNA (1)...(19): siRNA sense strand
aggaggaggaagccaagaa

SEQ ID NO: 2247592 - RNA, 19 nt, Homo sapiens
  misc_RNA (1)...(19): siRNA sense strand
cauaguucuuggagcagau

SEQ ID NO: 2247593 - RNA, 19 nt, Homo sapiens
  misc_RNA (1)...(19): siRNA sense strand
aggcuauggagguggagua

SEQ ID NO: 2247594 - RNA, 19 nt, Homo sapiens
  misc_RNA (1)...(19): siRNA sense strand
ucgagaacugccaaagaaa

SEQ ID NO: 2247595 - RNA, 19 nt, Homo sapiens
  misc_RNA (1)...(19): siRNA sense strand
gaggaaacugugcaggcua

SEQ ID NO: 2247596 - RNA, 19 nt, Homo sapiens
  misc_RNA (1)...(19): siRNA sense strand
gcggacaagagcugcgaga

SEQ ID NO: 2247597 - RNA, 19 nt, Homo sapiens
  misc_RNA (1)...(19): siRNA sense strand
cugccaaagaaaugcauca

SEQ ID NO: 2247598 - RNA, 19 nt, Homo sapiens
  misc_RNA (1)...(19): siRNA sense strand
cccuggagcuaguggagga

SEQ ID NO: 2247599 - RNA, 19 nt, Homo sapiens
  misc_RNA (1)...(19): siRNA sense strand
agagaaauucagcgaacaa

SEQ ID NO: 2247600 - RNA, 19 nt, Homo sapiens
  misc_RNA (1)...(19): siRNA sense strand
agaaggaugacaaggacaa

SEQ ID NO: 2247601 - RNA, 19 nt, Homo sapiens
  misc_RNA (1)...(19): siRNA sense strand
uacugaaguuagagagaau

SEQ ID NO: 2247602 - RNA, 19 nt, Homo sapiens
  misc_RNA (1)...(19): siRNA sense strand
caguaggaaccuuggaaga

SEQ ID NO: 2247603 - RNA, 19 nt, Homo sapiens
  misc_RNA (1)...(19): siRNA sense strand
uagccaaagcaguagcaaa

SEQ ID NO: 2247604 - RNA, 19 nt, Homo sapiens
  misc_RNA (1)...(19): siRNA sense strand
gguaaaaccuuguuagcca

SEQ ID NO: 2247605 - RNA, 19 nt, Homo sapiens
  misc_RNA (1)...(19): siRNA sense strand
aagaaaagcaagaggagga

SEQ ID NO: 2247606 - RNA, 19 nt, Homo sapiens
  misc_RNA (1)...(19): siRNA sense strand
gcccaaacucguacgggaa

SEQ ID NO: 2247607 - RNA, 19 nt, Homo sapiens
  misc_RNA (1)...(19): siRNA sense strand
agagagaaauucagcgaac

SEQ ID NO: 2247608 - RNA, 19 nt, Homo sapiens
  misc_RNA (1)...(19): siRNA sense strand
ggucaaagucagaguggug

SEQ ID NO: 2247609 - RNA, 19 nt, Homo sapiens
  misc_RNA (1)...(19): siRNA sense strand
auuaugaagagauggguau

SEQ ID NO: 2247610 - RNA, 19 nt, Homo sapiens
  misc_RNA (1)...(19): siRNA sense strand
guggcaagaaggaugacaa

SEQ ID NO: 2247611 - RNA, 19 nt, Homo sapiens
  misc_RNA (1)...(19): siRNA sense strand
ucugguggugagagagaaa

SEQ ID NO: 2247612 - RNA, 19 nt, Homo sapiens
  misc_RNA (1)...(19): siRNA sense strand
cauuagaagaaaagcaaga

SEQ ID NO: 2247613 - RNA, 19 nt, Homo sapiens
  misc_RNA (1)...(19): siRNA sense strand
acguagaaugaaaguaaca

SEQ ID NO: 2247614 - RNA, 19 nt, Homo sapiens
  misc_RNA (1)...(19): siRNA sense strand
aggaugacaaggacaagaa

SEQ ID NO: 2247615 - RNA, 19 nt, Homo sapiens
  misc_RNA (1)...(19): siRNA sense strand
uguuggaacugcugaacca

SEQ ID NO: 2247616 - RNA, 19 nt, Homo sapiens
  misc_RNA (1)...(19): siRNA sense strand
ucauuagaaaucaggaaca

SEQ ID NO: 2247617 - RNA, 19 nt, Homo sapiens
  misc_RNA (1)...(19): siRNA sense strand
aagucagagugguggucau

SEQ ID NO: 2247618 - RNA, 19 nt, Homo sapiens
  misc_RNA (1)...(19): siRNA sense strand
agccaaagcaguagcaaac

SEQ ID NO: 2247619 - RNA, 19 nt, Homo sapiens
  misc_RNA (1)...(19): siRNA sense strand
ugguggugagagagaaauu

SEQ ID NO: 2247620 - RNA, 19 nt, Homo sapiens
  misc_RNA (1)...(19): siRNA sense strand
ccaacuagaguggggaaaa

SEQ ID NO: 2247621 - RNA, 19 nt, Homo sapiens
  misc_RNA (1)...(19): siRNA sense strand
cagugaugaagguagaaaa

SEQ ID NO: 2247622 - RNA, 19 nt, Homo sapiens
  misc_RNA (1)...(19): siRNA sense strand
gaauagaaacuuuggaucc

SEQ ID NO: 2247623 - RNA, 19 nt, Homo sapiens
  misc_RNA (1)...(19): siRNA sense strand
ccgcauugacaggaagauu

SEQ ID NO: 2247624 - RNA, 19 nt, Homo sapiens
  misc_RNA (1)...(19): siRNA sense strand
ggugcugacaucaaggcaa

SEQ ID NO: 2247625 - RNA, 19 nt, Homo sapiens
  misc_RNA (1)...(19): siRNA sense strand
agaccaaagaggaugagaa

SEQ ID NO: 2247626 - RNA, 19 nt, Homo sapiens
  misc_RNA (1)...(19): siRNA sense strand
gcggaagaccaaagaggau

SEQ ID NO: 2247627 - RNA, 19 nt, Homo sapiens
  misc_RNA (1)...(19): siRNA sense strand
ccaugaugcagguggaaga

SEQ ID NO: 2247628 - RNA, 19 nt, Homo sapiens
  misc_RNA (1)...(19): siRNA sense strand
aaugaagugcagagaacaa

SEQ ID NO: 2247629 - RNA, 19 nt, Homo sapiens
  misc_RNA (1)...(19): siRNA sense strand
gaugcagguggaagagaaa

SEQ ID NO: 2247630 - RNA, 19 nt, Homo sapiens
  misc_RNA (1)...(19): siRNA sense strand
aggaugagaaggacgacaa

SEQ ID NO: 2247631 - RNA, 19 nt, Homo sapiens
  misc_RNA (1)...(19): siRNA sense strand
acguaaagcaguuugccaa

SEQ ID NO: 2247632 - RNA, 19 nt, Homo sapiens
  misc_RNA (1)...(19): siRNA sense strand
cugagcuuguacagaaaua

SEQ ID NO: 2247633 - RNA, 19 nt, Homo sapiens
  misc_RNA (1)...(19): siRNA sense strand
aguuauuggaucugagcuu

SEQ ID NO: 2247634 - RNA, 19 nt, Homo sapiens
  misc_RNA (1)...(19): siRNA sense strand
uuugaaauggccagaacaa

SEQ ID NO: 2247635 - RNA, 19 nt, Homo sapiens
  misc_RNA (1)...(19): siRNA sense strand
aggccagggagauuggaua

SEQ ID NO: 2247636 - RNA, 19 nt, Homo sapiens
  misc_RNA (1)...(19): siRNA sense strand
caauguuggaacugaucaa

SEQ ID NO: 2247637 - RNA, 19 nt, Homo sapiens
  misc_RNA (1)...(19): siRNA sense strand
caaagauaaucaaugcuga

SEQ ID NO: 2247638 - RNA, 19 nt, Homo sapiens
  misc_RNA (1)...(19): siRNA sense strand
acuuauggucagagcacuu

SEQ ID NO: 2247639 - RNA, 19 nt, Homo sapiens
  misc_RNA (1)...(19): siRNA sense strand
agauugagaaacugcgaga

SEQ ID NO: 2247640 - RNA, 19 nt, Homo sapiens
  misc_RNA (1)...(19): siRNA sense strand
acugaugaggccagggaga

SEQ ID NO: 2247641 - RNA, 19 nt, Homo sapiens
  misc_RNA (1)...(19): siRNA sense strand
ccgaucagcggaagaccaa

SEQ ID NO: 2247642 - RNA, 19 nt, Homo sapiens
  misc_RNA (1)...(19): siRNA sense strand
uugaagaagggaugagagu

SEQ ID NO: 2247643 - RNA, 19 nt, Homo sapiens
  misc_RNA (1)...(19): siRNA sense strand
cauucgaguuauuggaucu

SEQ ID NO: 2247644 - RNA, 19 nt, Homo sapiens
  misc_RNA (1)...(19): siRNA sense strand
ugacauugaagaagggaug

SEQ ID NO: 2247645 - RNA, 19 nt, Homo sapiens
  misc_RNA (1)...(19): siRNA sense strand
gauuagaagcgucugcaca

SEQ ID NO: 2247646 - RNA, 19 nt, Homo sapiens
  misc_RNA (1)...(19): siRNA sense strand
gaagaagggaugagagugg

SEQ ID NO: 2247647 - RNA, 19 nt, Homo sapiens
  misc_RNA (1)...(19): siRNA sense strand
uguaaggaacagauugaga

SEQ ID NO: 2247648 - RNA, 19 nt, Homo sapiens
  misc_RNA (1)...(19): siRNA sense strand
ccaucagagcacggcgaaa

SEQ ID NO: 2247649 - RNA, 19 nt, Homo sapiens
  misc_RNA (1)...(19): siRNA sense strand
caucagagcacggcgaaaa

SEQ ID NO: 2247650 - RNA, 19 nt, Homo sapiens
  misc_RNA (1)...(19): siRNA sense strand
gggcaagaauggugaggga

SEQ ID NO: 2247651 - RNA, 19 nt, Homo sapiens
  misc_RNA (1)...(19): siRNA sense strand
gugaaugauaagagccaaa

SEQ ID NO: 2247652 - RNA, 19 nt, Homo sapiens
  misc_RNA (1)...(19): siRNA sense strand
gggccauggauaagaagaa

SEQ ID NO: 2247653 - RNA, 19 nt, Homo sapiens
  misc_RNA (1)...(19): siRNA sense strand
agguacauccugaagguaa

SEQ ID NO: 2247654 - RNA, 19 nt, Homo sapiens
  misc_RNA (1)...(19): siRNA sense strand
gggcugaagugaagggcgu

SEQ ID NO: 2247655 - RNA, 19 nt, Homo sapiens
  misc_RNA (1)...(19): siRNA sense strand
acagaaauucauaggggaa

SEQ ID NO: 2247656 - RNA, 19 nt, Homo sapiens
  misc_RNA (1)...(19): siRNA sense strand
gcacagaagcuggcaugua

SEQ ID NO: 2247657 - RNA, 19 nt, Homo sapiens
  misc_RNA (1)...(19): siRNA sense strand
augcagaaggacagugaga

SEQ ID NO: 2247658 - RNA, 19 nt, Homo sapiens
  misc_RNA (1)...(19): siRNA sense strand
aagaagaaaguguugguca

SEQ ID NO: 2247659 - RNA, 19 nt, Homo sapiens
  misc_RNA (1)...(19): siRNA sense strand
aaguguuggucaagguaca

SEQ ID NO: 2247660 - RNA, 19 nt, Homo sapiens
  misc_RNA (1)...(19): siRNA sense strand
gcgagaacggcgaguccau

SEQ ID NO: 2247661 - RNA, 19 nt, Homo sapiens
  misc_RNA (1)...(19): siRNA sense strand
guaaauuuguuguagacgu

SEQ ID NO: 2247662 - RNA, 19 nt, Homo sapiens
  misc_RNA (1)...(19): siRNA sense strand
cacagaagcuggcauguau

SEQ ID NO: 2247663 - RNA, 19 nt, Homo sapiens
  misc_RNA (1)...(19): siRNA sense strand
cucuaaggaaugacagcua

SEQ ID NO: 2247664 - RNA, 19 nt, Homo sapiens
  misc_RNA (1)...(19): siRNA sense strand
ggcugcaggcacagaggaa

SEQ ID NO: 2247665 - RNA, 19 nt, Homo sapiens
  misc_RNA (1)...(19): siRNA sense strand
auggauaagaagaaagugu

SEQ ID NO: 2247666 - RNA, 19 nt, Homo sapiens
  misc_RNA (1)...(19): siRNA sense strand
gcaagaauggugagggagc

SEQ ID NO: 2247667 - RNA, 19 nt, Homo sapiens
  misc_RNA (1)...(19): siRNA sense strand
ucaugaaagcagucagaaa

SEQ ID NO: 2247668 - RNA, 19 nt, Homo sapiens
  misc_RNA (1)...(19): siRNA sense strand
gcucguuugaucagagaaa

SEQ ID NO: 2247669 - RNA, 19 nt, Homo sapiens
  misc_RNA (1)...(19): siRNA sense strand
ucuuacaaacccagaguua

SEQ ID NO: 2247670 - RNA, 19 nt, Homo sapiens
  misc_RNA (1)...(19): siRNA sense strand
auuucagcguguaggaaua

SEQ ID NO: 2247671 - RNA, 19 nt, Homo sapiens
  misc_RNA (1)...(19): siRNA sense strand
caagauauguuguggguug

SEQ ID NO: 2247672 - RNA, 19 nt, Homo sapiens
  misc_RNA (1)...(19): siRNA sense strand
gggaauuaagagaggugau

SEQ ID NO: 2247673 - RNA, 19 nt, Homo sapiens
  misc_RNA (1)...(19): siRNA sense strand
aauuaagagaggugauaga

SEQ ID NO: 2247674 - RNA, 19 nt, Homo sapiens
  misc_RNA (1)...(19): siRNA sense strand
agacaaguacauuggugaa

SEQ ID NO: 2247675 - RNA, 19 nt, Homo sapiens
  misc_RNA (1)...(19): siRNA sense strand
cguccaggaagauuagaua

SEQ ID NO: 2247676 - RNA, 19 nt, Homo sapiens
  misc_RNA (1)...(19): siRNA sense strand
gccaaaugaacaagcaaga

SEQ ID NO: 2247677 - RNA, 19 nt, Homo sapiens
  misc_RNA (1)...(19): siRNA sense strand
caugaaagcagucagaaaa

SEQ ID NO: 2247678 - RNA, 19 nt, Homo sapiens
  misc_RNA (1)...(19): siRNA sense strand
gcauggugaaauagauuau

SEQ ID NO: 2247679 - RNA, 19 nt, Homo sapiens
  misc_RNA (1)...(19): siRNA sense strand
agaacagauccgggaauua

SEQ ID NO: 2247680 - RNA, 19 nt, Homo sapiens
  misc_RNA (1)...(19): siRNA sense strand
cagagaacguuaauggagu

SEQ ID NO: 2247681 - RNA, 19 nt, Homo sapiens
  misc_RNA (1)...(19): siRNA sense strand
ucaugaggacccugggaau

SEQ ID NO: 2247682 - RNA, 19 nt, Homo sapiens
  misc_RNA (1)...(19): siRNA sense strand
cguuaauggaguuacugaa

SEQ ID NO: 2247683 - RNA, 19 nt, Homo sapiens
  misc_RNA (1)...(19): siRNA sense strand
aggaauaauaccuccaaaa

SEQ ID NO: 2247684 - RNA, 19 nt, Homo sapiens
  misc_RNA (1)...(19): siRNA sense strand
guuaaaaugaucauggcua

SEQ ID NO: 2247685 - RNA, 19 nt, Homo sapiens
  misc_RNA (1)...(19): siRNA sense strand
auggagcagaucugagaaa

SEQ ID NO: 2247686 - RNA, 19 nt, Homo sapiens
  misc_RNA (1)...(19): siRNA sense strand
cuuaccaagcaguaugaaa

SEQ ID NO: 2247687 - RNA, 19 nt, Homo sapiens
  misc_RNA (1)...(19): siRNA sense strand
agagauucagagaacguua

SEQ ID NO: 2247688 - RNA, 19 nt, Homo sapiens
  misc_RNA (1)...(19): siRNA sense strand
uggcuuuaauggagcagau

SEQ ID NO: 2247689 - RNA, 19 nt, Homo sapiens
  misc_RNA (1)...(19): siRNA sense strand
aagcaagauuagacauacu

SEQ ID NO: 2247690 - RNA, 19 nt, Homo sapiens
  misc_RNA (1)...(19): siRNA sense strand
uuaagagaggugauagaau

SEQ ID NO: 2247691 - RNA, 19 nt, Homo sapiens
  misc_RNA (1)...(19): siRNA sense strand
auuacaaagcauggugaaa

SEQ ID NO: 2247692 - RNA, 19 nt, Homo sapiens
  misc_RNA (1)...(19): siRNA sense strand
uuaccaagcaguaugaaaa

SEQ ID NO: 2247693 - RNA, 19 nt, Homo sapiens
  misc_RNA (1)...(19): siRNA sense strand
cuaccaauggaccaagaua

SEQ ID NO: 2247694 - RNA, 19 nt, Homo sapiens
  misc_RNA (1)...(19): siRNA sense strand
cauuacaaagcauggugaa

SEQ ID NO: 2247695 - RNA, 19 nt, Homo sapiens
  misc_RNA (1)...(19): siRNA sense strand
ggagcagaucugagaaaug

SEQ ID NO: 2247696 - RNA, 19 nt, Homo sapiens
  misc_RNA (1)...(19): siRNA sense strand
aagcauggugaaauagauu

SEQ ID NO: 2247697 - RNA, 19 nt, Homo sapiens
  misc_RNA (1)...(19): siRNA sense strand
uucugagauuggagggcua

SEQ ID NO: 2247698 - RNA, 19 nt, Homo sapiens
  misc_RNA (1)...(19): siRNA sense strand
cgcaauucgugcugaucau

SEQ ID NO: 2247699 - RNA, 19 nt, Homo sapiens
  misc_RNA (1)...(19): siRNA sense strand
acaagaguugcuuuggaua

SEQ ID NO: 2247700 - RNA, 19 nt, Homo sapiens
  misc_RNA (1)...(19): siRNA sense strand
uuggauaugacuacacuaa

SEQ ID NO: 2247701 - RNA, 19 nt, Homo sapiens
  misc_RNA (1)...(19): siRNA sense strand
caguaugaaaagucugaaa

SEQ ID NO: 2247702 - RNA, 19 nt, Homo sapiens
  misc_RNA (1)...(19): siRNA sense strand
gacaaguacauuggugaaa

SEQ ID NO: 2247703 - RNA, 19 nt, Homo sapiens
  misc_RNA (1)...(19): siRNA sense strand
cagcugacagagagauuca

SEQ ID NO: 2247704 - RNA, 19 nt, Homo sapiens
  misc_RNA (1)...(19): siRNA sense strand
gcugcguccaggaagauua

SEQ ID NO: 2247705 - RNA, 19 nt, Homo sapiens
  misc_RNA (1)...(19): siRNA sense strand
gagugauaucuuagagaaa

SEQ ID NO: 2247706 - RNA, 19 nt, Homo sapiens
  misc_RNA (1)...(19): siRNA sense strand
agaaacugguaaaggaaga

SEQ ID NO: 2247707 - RNA, 19 nt, Homo sapiens
  misc_RNA (1)...(19): siRNA sense strand
gcuuaaggaauuugcacua

SEQ ID NO: 2247708 - RNA, 19 nt, Homo sapiens
  misc_RNA (1)...(19): siRNA sense strand
ccaaacaauguguggaaaa

SEQ ID NO: 2247709 - RNA, 19 nt, Homo sapiens
  misc_RNA (1)...(19): siRNA sense strand
ucuuagagaaacugguaaa

SEQ ID NO: 2247710 - RNA, 19 nt, Homo sapiens
  misc_RNA (1)...(19): siRNA sense strand
cuuuguugucagagaguua

SEQ ID NO: 2247711 - RNA, 19 nt, Homo sapiens
  misc_RNA (1)...(19): siRNA sense strand
cuacaugaacuuggagaaa

SEQ ID NO: 2247712 - RNA, 19 nt, Homo sapiens
  misc_RNA (1)...(19): siRNA sense strand
gaccaguuucuuagagaua

SEQ ID NO: 2247713 - RNA, 19 nt, Homo sapiens
  misc_RNA (1)...(19): siRNA sense strand
cgauggaaacagaagaaaa

SEQ ID NO: 2247714 - RNA, 19 nt, Homo sapiens
  misc_RNA (1)...(19): siRNA sense strand
agauuugccugaaggagaa

SEQ ID NO: 2247715 - RNA, 19 nt, Homo sapiens
  misc_RNA (1)...(19): siRNA sense strand
aaaucgaggaggaggaaca

SEQ ID NO: 2247716 - RNA, 19 nt, Homo sapiens
  misc_RNA (1)...(19): siRNA sense strand
aagaugaaccacagcuuaa

SEQ ID NO: 2247717 - RNA, 19 nt, Homo sapiens
  misc_RNA (1)...(19): siRNA sense strand
agaccauacuggagucgaa

SEQ ID NO: 2247718 - RNA, 19 nt, Homo sapiens
  misc_RNA (1)...(19): siRNA sense strand
uggaaguggaugaggcaga

SEQ ID NO: 2247719 - RNA, 19 nt, Homo sapiens
  misc_RNA (1)...(19): siRNA sense strand
ugcuagaaccaaugacaaa

SEQ ID NO: 2247720 - RNA, 19 nt, Homo sapiens
  misc_RNA (1)...(19): siRNA sense strand
agaaaauggaaguggauga

SEQ ID NO: 2247721 - RNA, 19 nt, Homo sapiens
  misc_RNA (1)...(19): siRNA sense strand
aaaaggaggaggagaaaau

SEQ ID NO: 2247722 - RNA, 19 nt, Homo sapiens
  misc_RNA (1)...(19): siRNA sense strand
gugaagacauugaggagcu

SEQ ID NO: 2247723 - RNA, 19 nt, Homo sapiens
  misc_RNA (1)...(19): siRNA sense strand
cagauuugccugaaggaga

SEQ ID NO: 2247724 - RNA, 19 nt, Homo sapiens
  misc_RNA (1)...(19): siRNA sense strand
agagaaacugguaaaggaa

SEQ ID NO: 2247725 - RNA, 19 nt, Homo sapiens
  misc_RNA (1)...(19): siRNA sense strand
guguaauucauaaggguca

SEQ ID NO: 2247726 - RNA, 19 nt, Homo sapiens
  misc_RNA (1)...(19): siRNA sense strand
ccaguuucuuagagauaau

SEQ ID NO: 2247727 - RNA, 19 nt, Homo sapiens
  misc_RNA (1)...(19): siRNA sense strand
cuauaacugccaaggcuaa

SEQ ID NO: 2247728 - RNA, 19 nt, Homo sapiens
  misc_RNA (1)...(19): siRNA sense strand
ggaggauggaagaggcuga

SEQ ID NO: 2247729 - RNA, 19 nt, Homo sapiens
  misc_RNA (1)...(19): siRNA sense strand
caccaaacaauguguggaa

SEQ ID NO: 2247730 - RNA, 19 nt, Homo sapiens
  misc_RNA (1)...(19): siRNA sense strand
gugauaucuuagagaaacu

SEQ ID NO: 2247731 - RNA, 19 nt, Homo sapiens
  misc_RNA (1)...(19): siRNA sense strand
aaacaaaccuuuaucagga

SEQ ID NO: 2247732 - RNA, 19 nt, Homo sapiens
  misc_RNA (1)...(19): siRNA sense strand
cuagaugaucacaaguaua

SEQ ID NO: 2247733 - RNA, 19 nt, Homo sapiens
  misc_RNA (1)...(19): siRNA sense strand
cugcaaccguuauagcaaa

SEQ ID NO: 2247734 - RNA, 19 nt, Homo sapiens
  misc_RNA (1)...(19): siRNA sense strand
aguggaugaggcagagaaa

SEQ ID NO: 2247735 - RNA, 19 nt, Homo sapiens
  misc_RNA (1)...(19): siRNA sense strand
cccagaaccauuugaguau

SEQ ID NO: 2247736 - RNA, 19 nt, Homo sapiens
  misc_RNA (1)...(19): siRNA sense strand
uggcauugcucuggagaca

SEQ ID NO: 2247737 - RNA, 19 nt, Homo sapiens
  misc_RNA (1)...(19): siRNA sense strand
ccgaaaguucaguauaaau

SEQ ID NO: 2247738 - RNA, 19 nt, Homo sapiens
  misc_RNA (1)...(19): siRNA sense strand
uggaaguaccaaaagaaaa

SEQ ID NO: 2247739 - RNA, 19 nt, Homo sapiens
  misc_RNA (1)...(19): siRNA sense strand
caaacgaccccgugaacua

SEQ ID NO: 2247740 - RNA, 19 nt, Homo sapiens
  misc_RNA (1)...(19): siRNA sense strand
aggaggaacaagagccaga

SEQ ID NO: 2247741 - RNA, 19 nt, Homo sapiens
  misc_RNA (1)...(19): siRNA sense strand
caaaggaugcaguacggaa

SEQ ID NO: 2247742 - RNA, 19 nt, Homo sapiens
  misc_RNA (1)...(19): siRNA sense strand
gauuggaaggcaucguaaa

SEQ ID NO: 2247743 - RNA, 19 nt, Homo sapiens
  misc_RNA (1)...(19): siRNA sense strand
aaagacaagcagugcauuu

SEQ ID NO: 2247744 - RNA, 19 nt, Homo sapiens
  misc_RNA (1)...(19): siRNA sense strand
cgucaagauguuuaugauu

SEQ ID NO: 2247745 - RNA, 19 nt, Homo sapiens
  misc_RNA (1)...(19): siRNA sense strand
uauacgaagaugaagguuu

SEQ ID NO: 2247746 - RNA, 19 nt, Homo sapiens
  misc_RNA (1)...(19): siRNA sense strand
ggaaacagaagaaaagaca

SEQ ID NO: 2247747 - RNA, 19 nt, Homo sapiens
  misc_RNA (1)...(19): siRNA sense strand
ugucauacugcaaccguua

SEQ ID NO: 2247748 - RNA, 19 nt, Homo sapiens
  misc_RNA (1)...(19): siRNA sense strand
caggagggcagcaguagaa

SEQ ID NO: 2247749 - RNA, 19 nt, Homo sapiens
  misc_RNA (1)...(19): siRNA sense strand
gugaaauggcuauugaguu

SEQ ID NO: 2247750 - RNA, 19 nt, Homo sapiens
  misc_RNA (1)...(19): siRNA sense strand
cguuagacacgguggcagu

SEQ ID NO: 2247751 - RNA, 19 nt, Homo sapiens
  misc_RNA (1)...(19): siRNA sense strand
uggucuugcaguuggcaua

SEQ ID NO: 2247752 - RNA, 19 nt, Homo sapiens
  misc_RNA (1)...(19): siRNA sense strand
ggaggaggaacaagagcca

SEQ ID NO: 2247753 - RNA, 19 nt, Homo sapiens
  misc_RNA (1)...(19): siRNA sense strand
ccagcgaugucuagaugau

SEQ ID NO: 2247754 - RNA, 19 nt, Homo sapiens
  misc_RNA (1)...(19): siRNA sense strand
ugguaacaacaaagcaauu

SEQ ID NO: 2247755 - RNA, 19 nt, Homo sapiens
  misc_RNA (1)...(19): siRNA sense strand
ggucauaaugucacaaucu

SEQ ID NO: 2247756 - RNA, 19 nt, Homo sapiens
  misc_RNA (1)...(19): siRNA sense strand
guuucggaauaaaguacua

SEQ ID NO: 2247757 - RNA, 19 nt, Homo sapiens
  misc_RNA (1)...(19): siRNA sense strand
ucuacaugaacuuggagaa

SEQ ID NO: 2247758 - RNA, 19 nt, Homo sapiens
  misc_RNA (1)...(19): siRNA sense strand
guuaaugacuucugggcag

SEQ ID NO: 2247759 - RNA, 19 nt, Homo sapiens
  misc_RNA (1)...(19): siRNA sense strand
agaugaagguuuccggagu

SEQ ID NO: 2247760 - RNA, 19 nt, Homo sapiens
  misc_RNA (1)...(19): siRNA sense strand
ccgugaacuacgugaggca

SEQ ID NO: 2247761 - RNA, 19 nt, Homo sapiens
  misc_RNA (1)...(19): siRNA sense strand
acugaaaucacuuguccaa

SEQ ID NO: 2247762 - RNA, 19 nt, Homo sapiens
  misc_RNA (1)...(19): siRNA sense strand
acaaguauaaacaggcuau

SEQ ID NO: 2247763 - RNA, 19 nt, Homo sapiens
  misc_RNA (1)...(19): siRNA sense strand
cagcuguauuccaaaguca

SEQ ID NO: 2247764 - RNA, 19 nt, Homo sapiens
  misc_RNA (1)...(19): siRNA sense strand
aaccaauugaccagagauu

SEQ ID NO: 2247765 - RNA, 19 nt, Homo sapiens
  misc_RNA (1)...(19): siRNA sense strand
ugucaggagggcagcagua

SEQ ID NO: 2247766 - RNA, 19 nt, Homo sapiens
  misc_RNA (1)...(19): siRNA sense strand
ggacuuaaagaugccgaaa

SEQ ID NO: 2247767 - RNA, 19 nt, Homo sapiens
  misc_RNA (1)...(19): siRNA sense strand
ggagaaaauggaaguggau

SEQ ID NO: 2247768 - RNA, 19 nt, Homo sapiens
  misc_RNA (1)...(19): siRNA sense strand
ucgaggaggaggaacaaga

SEQ ID NO: 2247769 - RNA, 19 nt, Homo sapiens
  misc_RNA (1)...(19): siRNA sense strand
gggagaaguuucaagcaga

SEQ ID NO: 2247770 - RNA, 19 nt, Homo sapiens
  misc_RNA (1)...(19): siRNA sense strand
ccgaagaugcagaguucau

SEQ ID NO: 2247771 - RNA, 19 nt, Homo sapiens
  misc_RNA (1)...(19): siRNA sense strand
ggacaggaaaccuagccaa

SEQ ID NO: 2247772 - RNA, 19 nt, Homo sapiens
  misc_RNA (1)...(19): siRNA sense strand
aggagauggcagaagauga

SEQ ID NO: 2247773 - RNA, 19 nt, Homo sapiens
  misc_RNA (1)...(19): siRNA sense strand
cugucaaggccaugagguu

SEQ ID NO: 2247774 - RNA, 19 nt, Homo sapiens
  misc_RNA (1)...(19): siRNA sense strand
caggcaaggagccgagauu

SEQ ID NO: 2247775 - RNA, 19 nt, Homo sapiens
  misc_RNA (1)...(19): siRNA sense strand
cuuggagucugcagaggaa

SEQ ID NO: 2247776 - RNA, 19 nt, Homo sapiens
  misc_RNA (1)...(19): siRNA sense strand
acgugaaacagcuagagaa

SEQ ID NO: 2247777 - RNA, 19 nt, Homo sapiens
  misc_RNA (1)...(19): siRNA sense strand
aggauguggagaugaaaga

SEQ ID NO: 2247778 - RNA, 19 nt, Homo sapiens
  misc_RNA (1)...(19): siRNA sense strand
ugaugaacagcaagcgcua

SEQ ID NO: 2247779 - RNA, 19 nt, Homo sapiens
  misc_RNA (1)...(19): siRNA sense strand
aggaacggcgugagcgaga

SEQ ID NO: 2247780 - RNA, 19 nt, Homo sapiens
  misc_RNA (1)...(19): siRNA sense strand
cgugauuaagacaggugua

SEQ ID NO: 2247781 - RNA, 19 nt, Homo sapiens
  misc_RNA (1)...(19): siRNA sense strand
gcuuguacgaccaggcuga

SEQ ID NO: 2247782 - RNA, 19 nt, Homo sapiens
  misc_RNA (1)...(19): siRNA sense strand
gcacacagcugucggcuuc

SEQ ID NO: 2247783 - RNA, 19 nt, Homo sapiens
  misc_RNA (1)...(19): siRNA sense strand
cuggaagagcccauggaca

SEQ ID NO: 2247784 - RNA, 19 nt, Homo sapiens
  misc_RNA (1)...(19): siRNA sense strand
uggaggacaucaaggagca

SEQ ID NO: 2247785 - RNA, 19 nt, Homo sapiens
  misc_RNA (1)...(19): siRNA sense strand
uggaagagcccauggacac

SEQ ID NO: 2247786 - RNA, 19 nt, Homo sapiens
  misc_RNA (1)...(19): siRNA sense strand
acaucaaggagcacgugaa

SEQ ID NO: 2247787 - RNA, 19 nt, Homo sapiens
  misc_RNA (1)...(19): siRNA sense strand
ugccugaaguggaagccua

SEQ ID NO: 2247788 - RNA, 19 nt, Homo sapiens
  misc_RNA (1)...(19): siRNA sense strand
agaggaacggcgugagcga

SEQ ID NO: 2247789 - RNA, 19 nt, Homo sapiens
  misc_RNA (1)...(19): siRNA sense strand
acaagaaggaggaagacaa

SEQ ID NO: 2247790 - RNA, 19 nt, Homo sapiens
  misc_RNA (1)...(19): siRNA sense strand
gcaagaaggacaagaagga

SEQ ID NO: 2247791 - RNA, 19 nt, Homo sapiens
  misc_RNA (1)...(19): siRNA sense strand
aggacaagaaggaggaaga

SEQ ID NO: 2247792 - RNA, 19 nt, Homo sapiens
  misc_RNA (1)...(19): siRNA sense strand
cucaagaaggagaaaguaa

SEQ ID NO: 2247793 - RNA, 19 nt, Homo sapiens
  misc_RNA (1)...(19): siRNA sense strand
agaaggaggaagacaagaa

SEQ ID NO: 2247794 - RNA, 19 nt, Homo sapiens
  misc_RNA (1)...(19): siRNA sense strand
augagaaggaucuggugaa

SEQ ID NO: 2247795 - RNA, 19 nt, Homo sapiens
  misc_RNA (1)...(19): siRNA sense strand
cuguccaacccaagggcaa

SEQ ID NO: 2247796 - RNA, 19 nt, Homo sapiens
  misc_RNA (1)...(19): siRNA sense strand
cauuaucaauuuuggggaa

SEQ ID NO: 2247797 - RNA, 19 nt, Homo sapiens
  misc_RNA (1)...(19): siRNA sense strand
cuuugaauuuggaguagau

SEQ ID NO: 2247798 - RNA, 19 nt, Homo sapiens
  misc_RNA (1)...(19): siRNA sense strand
guaaacacguugaauggca

SEQ ID NO: 2247799 - RNA, 19 nt, Homo sapiens
  misc_RNA (1)...(19): siRNA sense strand
caucauugccuuuguggga

SEQ ID NO: 2247800 - RNA, 19 nt, Homo sapiens
  misc_RNA (1)...(19): siRNA sense strand
uggacaacagugaguauau

SEQ ID NO: 2247801 - RNA, 19 nt, Homo sapiens
  misc_RNA (1)...(19): siRNA sense strand
ccgaguuccuucagagugu

SEQ ID NO: 2247802 - RNA, 19 nt, Homo sapiens
  misc_RNA (1)...(19): siRNA sense strand
cuaugguguguguggacaa

SEQ ID NO: 2247803 - RNA, 19 nt, Homo sapiens
  misc_RNA (1)...(19): siRNA sense strand
gccucaagaaggagaaagu

SEQ ID NO: 2247804 - RNA, 19 nt, Homo sapiens
  misc_RNA (1)...(19): siRNA sense strand
acggcaagaaggacaagaa

SEQ ID NO: 2247805 - RNA, 19 nt, Homo sapiens
  misc_RNA (1)...(19): siRNA sense strand
guugaauggcaaagaugga

SEQ ID NO: 2247806 - RNA, 19 nt, Homo sapiens
  misc_RNA (1)...(19): siRNA sense strand
cucaagaaggagaaaguaa

SEQ ID NO: 2247807 - RNA, 19 nt, Homo sapiens
  misc_RNA (1)...(19): siRNA sense strand
augagaaggaucuggugaa

SEQ ID NO: 2247808 - RNA, 19 nt, Homo sapiens
  misc_RNA (1)...(19): siRNA sense strand
cuguccaacccaagggcaa

SEQ ID NO: 2247809 - RNA, 19 nt, Homo sapiens
  misc_RNA (1)...(19): siRNA sense strand
cauuaucaauuuuggggaa

SEQ ID NO: 2247810 - RNA, 19 nt, Homo sapiens
  misc_RNA (1)...(19): siRNA sense strand
cuuugaauuuggaguagau

SEQ ID NO: 2247811 - RNA, 19 nt, Homo sapiens
  misc_RNA (1)...(19): siRNA sense strand
guaaacacguugaauggca

SEQ ID NO: 2247812 - RNA, 19 nt, Homo sapiens
  misc_RNA (1)...(19): siRNA sense strand
uggacaacagugaguauau

SEQ ID NO: 2247813 - RNA, 19 nt, Homo sapiens
  misc_RNA (1)...(19): siRNA sense strand
caucauugccuuuguggga

SEQ ID NO: 2247814 - RNA, 19 nt, Homo sapiens
  misc_RNA (1)...(19): siRNA sense strand
cuaugguguguguggacaa

SEQ ID NO: 2247815 - RNA, 19 nt, Homo sapiens
  misc_RNA (1)...(19): siRNA sense strand
gccucaagaaggagaaagu

SEQ ID NO: 2247816 - RNA, 19 nt, Homo sapiens
  misc_RNA (1)...(19): siRNA sense strand
guugaauggcaaagaugga

SEQ ID NO: 2247817 - RNA, 19 nt, Homo sapiens
  misc_RNA (1)...(19): siRNA sense strand
aggauaggaaagaggacaa

SEQ ID NO: 2247818 - RNA, 19 nt, Homo sapiens
  misc_RNA (1)...(19): siRNA sense strand
uggaaaacauguauggaau

SEQ ID NO: 2247819 - RNA, 19 nt, Homo sapiens
  misc_RNA (1)...(19): siRNA sense strand
aggaaagaggacaaggaga

SEQ ID NO: 2247820 - RNA, 19 nt, Homo sapiens
  misc_RNA (1)...(19): siRNA sense strand
agucaaugccagggaaaga

SEQ ID NO: 2247821 - RNA, 19 nt, Homo sapiens
  misc_RNA (1)...(19): siRNA sense strand
cguacauuucaguggaaga

SEQ ID NO: 2247822 - RNA, 19 nt, Homo sapiens
  misc_RNA (1)...(19): siRNA sense strand
cagagaagaaagaagggca

SEQ ID NO: 2247823 - RNA, 19 nt, Homo sapiens
  misc_RNA (1)...(19): siRNA sense strand
gcguguuguuggugugcuu

SEQ ID NO: 2247824 - RNA, 19 nt, Homo sapiens
  misc_RNA (1)...(19): siRNA sense strand
gggaaagaauaguuggcug

SEQ ID NO: 2247825 - RNA, 19 nt, Homo sapiens
  misc_RNA (1)...(19): siRNA sense strand
aagauaaggaaaagaguga

SEQ ID NO: 2247826 - RNA, 19 nt, Homo sapiens
  misc_RNA (1)...(19): siRNA sense strand
ccaucaaccaccagaucau

SEQ ID NO: 2247827 - RNA, 19 nt, Homo sapiens
  misc_RNA (1)...(19): siRNA sense strand
aaagucaaugccagggaaa

SEQ ID NO: 2247828 - RNA, 19 nt, Homo sapiens
  misc_RNA (1)...(19): siRNA sense strand
ccuuuuaccugaagaccaa

SEQ ID NO: 2247829 - RNA, 19 nt, Homo sapiens
  misc_RNA (1)...(19): siRNA sense strand
ggucauggcaaaagaaagu

SEQ ID NO: 2247830 - RNA, 19 nt, Homo sapiens
  misc_RNA (1)...(19): siRNA sense strand
augaaaagauacuguccua

SEQ ID NO: 2247831 - RNA, 19 nt, Homo sapiens
  misc_RNA (1)...(19): siRNA sense strand
gagcagaggaagcugagga

SEQ ID NO: 2247832 - RNA, 19 nt, Homo sapiens
  misc_RNA (1)...(19): siRNA sense strand
ggacugaacuccaagcuuc

SEQ ID NO: 2247833 - RNA, 19 nt, Homo sapiens
  misc_RNA (1)...(19): siRNA sense strand
agauggugguaguguacuu

SEQ ID NO: 2247834 - RNA, 19 nt, Homo sapiens
  misc_RNA (1)...(19): siRNA sense strand
uugaugaagaugacaaaga

SEQ ID NO: 2247835 - RNA, 19 nt, Homo sapiens
  misc_RNA (1)...(19): siRNA sense strand
aagaauaguuggcugguac

SEQ ID NO: 2247836 - RNA, 19 nt, Homo sapiens
  misc_RNA (1)...(19): siRNA sense strand
ucauugaugugaagccgaa

SEQ ID NO: 2247837 - RNA, 19 nt, Homo sapiens
  misc_RNA (1)...(19): siRNA sense strand
ugcagaaggugguggucca

SEQ ID NO: 2247838 - RNA, 19 nt, Homo sapiens
  misc_RNA (1)...(19): siRNA sense strand
aagaaagaagggcaggaga

SEQ ID NO: 2247839 - RNA, 19 nt, Homo sapiens
  misc_RNA (1)...(19): siRNA sense strand
cggagcuggcagugcagaa

SEQ ID NO: 2247840 - RNA, 19 nt, Homo sapiens
  misc_RNA (1)...(19): siRNA sense strand
cuggaagaguugaaggaga

SEQ ID NO: 2247841 - RNA, 19 nt, Homo sapiens
  misc_RNA (1)...(19): siRNA sense strand
agagaguggaagaagcaaa

SEQ ID NO: 2247842 - RNA, 19 nt, Homo sapiens
  misc_RNA (1)...(19): siRNA sense strand
aagaguugaaggagaguau

SEQ ID NO: 2247843 - RNA, 19 nt, Homo sapiens
  misc_RNA (1)...(19): siRNA sense strand
cauuaugaggcuacagcaa

SEQ ID NO: 2247844 - RNA, 19 nt, Homo sapiens
  misc_RNA (1)...(19): siRNA sense strand
ggguuuaauacucaagaga

SEQ ID NO: 2247845 - RNA, 19 nt, Homo sapiens
  misc_RNA (1)...(19): siRNA sense strand
agugaaugauaaagacgau

SEQ ID NO: 2247846 - RNA, 19 nt, Homo sapiens
  misc_RNA (1)...(19): siRNA sense strand
uggaagaguugaaggagag

SEQ ID NO: 2247847 - RNA, 19 nt, Homo sapiens
  misc_RNA (1)...(19): siRNA sense strand
gaguauucuggccgauaaa

SEQ ID NO: 2247848 - RNA, 19 nt, Homo sapiens
  misc_RNA (1)...(19): siRNA sense strand
ugaugaggagagaguggaa

SEQ ID NO: 2247849 - RNA, 19 nt, Homo sapiens
  misc_RNA (1)...(19): siRNA sense strand
augaggagagaguggaaga

SEQ ID NO: 2247850 - RNA, 19 nt, Homo sapiens
  misc_RNA (1)...(19): siRNA sense strand
acauuaugcagcuucgaaa

SEQ ID NO: 2247851 - RNA, 19 nt, Homo sapiens
  misc_RNA (1)...(19): siRNA sense strand
gggcaugcucagcuggaca

SEQ ID NO: 2247852 - RNA, 19 nt, Homo sapiens
  misc_RNA (1)...(19): siRNA sense strand
agcuggacauacagaaauu

SEQ ID NO: 2247853 - RNA, 19 nt, Homo sapiens
  misc_RNA (1)...(19): siRNA sense strand
uuggagugccagugaauga

SEQ ID NO: 2247854 - RNA, 19 nt, Homo sapiens
  misc_RNA (1)...(19): siRNA sense strand
cuggaagaguugaaggaga

SEQ ID NO: 2247855 - RNA, 19 nt, Homo sapiens
  misc_RNA (1)...(19): siRNA sense strand
aagaguugaaggagaguau

SEQ ID NO: 2247856 - RNA, 19 nt, Homo sapiens
  misc_RNA (1)...(19): siRNA sense strand
cauuaugaggcuacagcaa

SEQ ID NO: 2247857 - RNA, 19 nt, Homo sapiens
  misc_RNA (1)...(19): siRNA sense strand
agugaaugauaaagacgau

SEQ ID NO: 2247858 - RNA, 19 nt, Homo sapiens
  misc_RNA (1)...(19): siRNA sense strand
uggaagaguugaaggagag

SEQ ID NO: 2247859 - RNA, 19 nt, Homo sapiens
  misc_RNA (1)...(19): siRNA sense strand
gaguauucuggccgauaaa

SEQ ID NO: 2247860 - RNA, 19 nt, Homo sapiens
  misc_RNA (1)...(19): siRNA sense strand
acauuaugcagcuucgaaa

SEQ ID NO: 2247861 - RNA, 19 nt, Homo sapiens
  misc_RNA (1)...(19): siRNA sense strand
gggcaugcucagcuggaca

SEQ ID NO: 2247862 - RNA, 19 nt, Homo sapiens
  misc_RNA (1)...(19): siRNA sense strand
agcuggacauacagaaauu

SEQ ID NO: 2247863 - RNA, 19 nt, Homo sapiens
  misc_RNA (1)...(19): siRNA sense strand
uuggagugccagugaauga

SEQ ID NO: 2247864 - RNA, 19 nt, Homo sapiens
  misc_RNA (1)...(19): siRNA sense strand
cgaugaagaggcagugcaa

SEQ ID NO: 2247865 - RNA, 19 nt, Homo sapiens
  misc_RNA (1)...(19): siRNA sense strand
gguuaugacuccaucgaca

SEQ ID NO: 2247866 - RNA, 19 nt, Homo sapiens
  misc_RNA (1)...(19): siRNA sense strand
aggccgacguggaaaggaa

SEQ ID NO: 2247867 - RNA, 19 nt, Homo sapiens
  misc_RNA (1)...(19): siRNA sense strand
acaacaaagccaagaaacu

SEQ ID NO: 2247868 - RNA, 19 nt, Homo sapiens
  misc_RNA (1)...(19): siRNA sense strand
acaagaaauuucaugggau

SEQ ID NO: 2247869 - RNA, 19 nt, Homo sapiens
  misc_RNA (1)...(19): siRNA sense strand
ggaaaacgaugaagaggca

SEQ ID NO: 2247870 - RNA, 19 nt, Homo sapiens
  misc_RNA (1)...(19): siRNA sense strand
augaagaggcagugcaagu

SEQ ID NO: 2247871 - RNA, 19 nt, Homo sapiens
  misc_RNA (1)...(19): siRNA sense strand
cuacagggcaggaggucga

SEQ ID NO: 2247872 - RNA, 19 nt, Homo sapiens
  misc_RNA (1)...(19): siRNA sense strand
aagucaaagagcagagcau

SEQ ID NO: 2247873 - RNA, 19 nt, Homo sapiens
  misc_RNA (1)...(19): siRNA sense strand
aggcagugcaagucaaaga

SEQ ID NO: 2247874 - RNA, 19 nt, Homo sapiens
  misc_RNA (1)...(19): siRNA sense strand
cgguaugcagggaggcaga

SEQ ID NO: 2247875 - RNA, 19 nt, Homo sapiens
  misc_RNA (1)...(19): siRNA sense strand
cagcaaggcuaaagcagcu

SEQ ID NO: 2247876 - RNA, 19 nt, Homo sapiens
  misc_RNA (1)...(19): siRNA sense strand
cuuuguacuuugauaccaa

SEQ ID NO: 2247877 - RNA, 19 nt, Homo sapiens
  misc_RNA (1)...(19): siRNA sense strand
ggaagcagcuacagggcag

SEQ ID NO: 2247878 - RNA, 19 nt, Homo sapiens
  misc_RNA (1)...(19): siRNA sense strand
cagcagaagagaaggacug

SEQ ID NO: 2247879 - RNA, 19 nt, Homo sapiens
  misc_RNA (1)...(19): siRNA sense strand
aagcgugacauucaggaaa

SEQ ID NO: 2247880 - RNA, 19 nt, Homo sapiens
  misc_RNA (1)...(19): siRNA sense strand
ggguauuauccaugcagca

SEQ ID NO: 2247881 - RNA, 19 nt, Homo sapiens
  misc_RNA (1)...(19): siRNA sense strand
auucagaacaugagcaaag

SEQ ID NO: 2247882 - RNA, 19 nt, Homo sapiens
  misc_RNA (1)...(19): siRNA sense strand
gggccaagucagagaaaag

SEQ ID NO: 2247883 - RNA, 19 nt, Homo sapiens
  misc_RNA (1)...(19): siRNA sense strand
uggacaugcagucggguau

SEQ ID NO: 2247884 - RNA, 19 nt, Homo sapiens
  misc_RNA (1)...(19): siRNA sense strand
agaagagaaggacuggaaa

SEQ ID NO: 2247885 - RNA, 19 nt, Homo sapiens
  misc_RNA (1)...(19): siRNA sense strand
uguuuagagugcaucgaau

SEQ ID NO: 2247886 - RNA, 19 nt, Homo sapiens
  misc_RNA (1)...(19): siRNA sense strand
cauaccaugcccugagcaa

SEQ ID NO: 2247887 - RNA, 19 nt, Homo sapiens
  misc_RNA (1)...(19): siRNA sense strand
ugauauggaagcagcuaca

SEQ ID NO: 2247888 - RNA, 19 nt, Homo sapiens
  misc_RNA (1)...(19): siRNA sense strand
ggucaauggaaaagaaaga

SEQ ID NO: 2247889 - RNA, 19 nt, Homo sapiens
  misc_RNA (1)...(19): siRNA sense strand
ucaagauggagguggacua

SEQ ID NO: 2247890 - RNA, 19 nt, Homo sapiens
  misc_RNA (1)...(19): siRNA sense strand
aggcaagauuuauguugaa

SEQ ID NO: 2247891 - RNA, 19 nt, Homo sapiens
  misc_RNA (1)...(19): siRNA sense strand
acaaaucaucagcaagaaa

SEQ ID NO: 2247892 - RNA, 19 nt, Homo sapiens
  misc_RNA (1)...(19): siRNA sense strand
gugacaagaaguuagaaga

SEQ ID NO: 2247893 - RNA, 19 nt, Homo sapiens
  misc_RNA (1)...(19): siRNA sense strand
gguggaaaccuacggguca

SEQ ID NO: 2247894 - RNA, 19 nt, Homo sapiens
  misc_RNA (1)...(19): siRNA sense strand
agaugugcuaugaggcuaa

SEQ ID NO: 2247895 - RNA, 19 nt, Homo sapiens
  misc_RNA (1)...(19): siRNA sense strand
caguagugaagaugugcua

SEQ ID NO: 2247896 - RNA, 19 nt, Homo sapiens
  misc_RNA (1)...(19): siRNA sense strand
gaggcuaaagaaugggauu

SEQ ID NO: 2247897 - RNA, 19 nt, Homo sapiens
  misc_RNA (1)...(19): siRNA sense strand
auacaggcagaaagugaaa

SEQ ID NO: 2247898 - RNA, 19 nt, Homo sapiens
  misc_RNA (1)...(19): siRNA sense strand
ucgucaagauggaggugga

SEQ ID NO: 2247899 - RNA, 19 nt, Homo sapiens
  misc_RNA (1)...(19): siRNA sense strand
guggaaaccuacgggucaa

SEQ ID NO: 2247900 - RNA, 19 nt, Homo sapiens
  misc_RNA (1)...(19): siRNA sense strand
gaaugguuaccgaaggcaa

SEQ ID NO: 2247901 - RNA, 19 nt, Homo sapiens
  misc_RNA (1)...(19): siRNA sense strand
uagccaaagaggagaugau

SEQ ID NO: 2247902 - RNA, 19 nt, Homo sapiens
  misc_RNA (1)...(19): siRNA sense strand
uggaaaagaaagagcgagu

SEQ ID NO: 2247903 - RNA, 19 nt, Homo sapiens
  misc_RNA (1)...(19): siRNA sense strand
cuguacuuauguugaggaa

SEQ ID NO: 2247904 - RNA, 19 nt, Homo sapiens
  misc_RNA (1)...(19): siRNA sense strand
aggacuauggaauggaauu

SEQ ID NO: 2247905 - RNA, 19 nt, Homo sapiens
  misc_RNA (1)...(19): siRNA sense strand
aggcuaaagaaugggauuu

SEQ ID NO: 2247906 - RNA, 19 nt, Homo sapiens
  misc_RNA (1)...(19): siRNA sense strand
ugaaauugagcgugcgcga

SEQ ID NO: 2247907 - RNA, 19 nt, Homo sapiens
  misc_RNA (1)...(19): siRNA sense strand
ggaauuuauuuuggagcaa

SEQ ID NO: 2247908 - RNA, 19 nt, Homo sapiens
  misc_RNA (1)...(19): siRNA sense strand
caaaaggcggagucaguua

SEQ ID NO: 2247909 - RNA, 19 nt, Homo sapiens
  misc_RNA (1)...(19): siRNA sense strand
ggauaacaaugaaaaggau

SEQ ID NO: 2247910 - RNA, 19 nt, Homo sapiens
  misc_RNA (1)...(19): siRNA sense strand
ugcuaaaguagacagauua

SEQ ID NO: 2247911 - RNA, 19 nt, Homo sapiens
  misc_RNA (1)...(19): siRNA sense strand
guguuguacucuauguuau

SEQ ID NO: 2247912 - RNA, 19 nt, Homo sapiens
  misc_RNA (1)...(19): siRNA sense strand
uagacagauuagcaggaau

SEQ ID NO: 2247913 - RNA, 19 nt, Homo sapiens
  misc_RNA (1)...(19): siRNA sense strand
accuacgggucaauggaaa

SEQ ID NO: 2247914 - RNA, 19 nt, Homo sapiens
  misc_RNA (1)...(19): siRNA sense strand
ccuacgggucaauggaaaa

SEQ ID NO: 2247915 - RNA, 19 nt, Homo sapiens
  misc_RNA (1)...(19): siRNA sense strand
cuacagaggaaggugaaaa

SEQ ID NO: 2247916 - RNA, 19 nt, Homo sapiens
  misc_RNA (1)...(19): siRNA sense strand
ggucaauggaaaagaaaga

SEQ ID NO: 2247917 - RNA, 19 nt, Homo sapiens
  misc_RNA (1)...(19): siRNA sense strand
ucaagauggagguggacua

SEQ ID NO: 2247918 - RNA, 19 nt, Homo sapiens
  misc_RNA (1)...(19): siRNA sense strand
aggcaagauuuauguugaa

SEQ ID NO: 2247919 - RNA, 19 nt, Homo sapiens
  misc_RNA (1)...(19): siRNA sense strand
acaaaucaucagcaagaaa

SEQ ID NO: 2247920 - RNA, 19 nt, Homo sapiens
  misc_RNA (1)...(19): siRNA sense strand
gugacaagaaguuagaaga

SEQ ID NO: 2247921 - RNA, 19 nt, Homo sapiens
  misc_RNA (1)...(19): siRNA sense strand
gguggaaaccuacggguca

SEQ ID NO: 2247922 - RNA, 19 nt, Homo sapiens
  misc_RNA (1)...(19): siRNA sense strand
agaugugcuaugaggcuaa

SEQ ID NO: 2247923 - RNA, 19 nt, Homo sapiens
  misc_RNA (1)...(19): siRNA sense strand
caguagugaagaugugcua

SEQ ID NO: 2247924 - RNA, 19 nt, Homo sapiens
  misc_RNA (1)...(19): siRNA sense strand
gaggcuaaagaaugggauu

SEQ ID NO: 2247925 - RNA, 19 nt, Homo sapiens
  misc_RNA (1)...(19): siRNA sense strand
auacaggcagaaagugaaa

SEQ ID NO: 2247926 - RNA, 19 nt, Homo sapiens
  misc_RNA (1)...(19): siRNA sense strand
ucgucaagauggaggugga

SEQ ID NO: 2247927 - RNA, 19 nt, Homo sapiens
  misc_RNA (1)...(19): siRNA sense strand
guggaaaccuacgggucaa

SEQ ID NO: 2247928 - RNA, 19 nt, Homo sapiens
  misc_RNA (1)...(19): siRNA sense strand
gaaugguuaccgaaggcaa

SEQ ID NO: 2247929 - RNA, 19 nt, Homo sapiens
  misc_RNA (1)...(19): siRNA sense strand
uagccaaagaggagaugau

SEQ ID NO: 2247930 - RNA, 19 nt, Homo sapiens
  misc_RNA (1)...(19): siRNA sense strand
uggaaaagaaagagcgagu

SEQ ID NO: 2247931 - RNA, 19 nt, Homo sapiens
  misc_RNA (1)...(19): siRNA sense strand
cuguacuuauguugaggaa

SEQ ID NO: 2247932 - RNA, 19 nt, Homo sapiens
  misc_RNA (1)...(19): siRNA sense strand
aggacuauggaauggaauu

SEQ ID NO: 2247933 - RNA, 19 nt, Homo sapiens
  misc_RNA (1)...(19): siRNA sense strand
aggcuaaagaaugggauuu

SEQ ID NO: 2247934 - RNA, 19 nt, Homo sapiens
  misc_RNA (1)...(19): siRNA sense strand
ugaaauugagcgugcgcga

SEQ ID NO: 2247935 - RNA, 19 nt, Homo sapiens
  misc_RNA (1)...(19): siRNA sense strand
ggaauuuauuuuggagcaa

SEQ ID NO: 2247936 - RNA, 19 nt, Homo sapiens
  misc_RNA (1)...(19): siRNA sense strand
caaaaggcggagucaguua

SEQ ID NO: 2247937 - RNA, 19 nt, Homo sapiens
  misc_RNA (1)...(19): siRNA sense strand
ggauaacaaugaaaaggau

SEQ ID NO: 2247938 - RNA, 19 nt, Homo sapiens
  misc_RNA (1)...(19): siRNA sense strand
ugcuaaaguagacagauua

SEQ ID NO: 2247939 - RNA, 19 nt, Homo sapiens
  misc_RNA (1)...(19): siRNA sense strand
guguuguacucuauguuau

SEQ ID NO: 2247940 - RNA, 19 nt, Homo sapiens
  misc_RNA (1)...(19): siRNA sense strand
uagacagauuagcaggaau

SEQ ID NO: 2247941 - RNA, 19 nt, Homo sapiens
  misc_RNA (1)...(19): siRNA sense strand
accuacgggucaauggaaa

SEQ ID NO: 2247942 - RNA, 19 nt, Homo sapiens
  misc_RNA (1)...(19): siRNA sense strand
ccuacgggucaauggaaaa

SEQ ID NO: 2247943 - RNA, 19 nt, Homo sapiens
  misc_RNA (1)...(19): siRNA sense strand
cuacagaggaaggugaaaa

SEQ ID NO: 2247944 - RNA, 19 nt, Homo sapiens
  misc_RNA (1)...(19): siRNA sense strand
acgaagaaguuguggcauc

SEQ ID NO: 2247945 - RNA, 19 nt, Homo sapiens
  misc_RNA (1)...(19): siRNA sense strand
cggcaguggcugauugaca

SEQ ID NO: 2247946 - RNA, 19 nt, Homo sapiens
  misc_RNA (1)...(19): siRNA sense strand
gaaaaguagugaugaggca

SEQ ID NO: 2247947 - RNA, 19 nt, Homo sapiens
  misc_RNA (1)...(19): siRNA sense strand
guggcaacguagagcgguu

SEQ ID NO: 2247948 - RNA, 19 nt, Homo sapiens
  misc_RNA (1)...(19): siRNA sense strand
uggauuugcaacagaucaa

SEQ ID NO: 2247949 - RNA, 19 nt, Homo sapiens
  misc_RNA (1)...(19): siRNA sense strand
acaaagaugcucugcgguu

SEQ ID NO: 2247950 - RNA, 19 nt, Homo sapiens
  misc_RNA (1)...(19): siRNA sense strand
cgugagaaggugaaaagua

SEQ ID NO: 2247951 - RNA, 19 nt, Homo sapiens
  misc_RNA (1)...(19): siRNA sense strand
gugcuuugcccaaggagau

SEQ ID NO: 2247952 - RNA, 19 nt, Homo sapiens
  misc_RNA (1)...(19): siRNA sense strand
agguggagcuucuggugau

SEQ ID NO: 2247953 - RNA, 19 nt, Homo sapiens
  misc_RNA (1)...(19): siRNA sense strand
gcaguauagacgaggugga

SEQ ID NO: 2247954 - RNA, 19 nt, Homo sapiens
  misc_RNA (1)...(19): siRNA sense strand
acuaucaaacaaucggaaa

SEQ ID NO: 2247955 - RNA, 19 nt, Homo sapiens
  misc_RNA (1)...(19): siRNA sense strand
ggagaugacuuucacacga

SEQ ID NO: 2247956 - RNA, 19 nt, Homo sapiens
  misc_RNA (1)...(19): siRNA sense strand
agaucaagggaaugaagga

SEQ ID NO: 2247957 - RNA, 19 nt, Homo sapiens
  misc_RNA (1)...(19): siRNA sense strand
gaugugaagagcauggaga

SEQ ID NO: 2247958 - RNA, 19 nt, Homo sapiens
  misc_RNA (1)...(19): siRNA sense strand
cggcaguggcugauugaca

SEQ ID NO: 2247959 - RNA, 19 nt, Homo sapiens
  misc_RNA (1)...(19): siRNA sense strand
gaaaaguagugaugaggca

SEQ ID NO: 2247960 - RNA, 19 nt, Homo sapiens
  misc_RNA (1)...(19): siRNA sense strand
guggcaacguagagcgguu

SEQ ID NO: 2247961 - RNA, 19 nt, Homo sapiens
  misc_RNA (1)...(19): siRNA sense strand
uggauuugcaacagaucaa

SEQ ID NO: 2247962 - RNA, 19 nt, Homo sapiens
  misc_RNA (1)...(19): siRNA sense strand
acaaagaugcucugcgguu

SEQ ID NO: 2247963 - RNA, 19 nt, Homo sapiens
  misc_RNA (1)...(19): siRNA sense strand
cgugagaaggugaaaagua

SEQ ID NO: 2247964 - RNA, 19 nt, Homo sapiens
  misc_RNA (1)...(19): siRNA sense strand
agguggagcuucuggugau

SEQ ID NO: 2247965 - RNA, 19 nt, Homo sapiens
  misc_RNA (1)...(19): siRNA sense strand
gcaguauagacgaggugga

SEQ ID NO: 2247966 - RNA, 19 nt, Homo sapiens
  misc_RNA (1)...(19): siRNA sense strand
acuaucaaacaaucggaaa

SEQ ID NO: 2247967 - RNA, 19 nt, Homo sapiens
  misc_RNA (1)...(19): siRNA sense strand
ggagaugacuuucacacga

SEQ ID NO: 2247968 - RNA, 19 nt, Homo sapiens
  misc_RNA (1)...(19): siRNA sense strand
agaucaagggaaugaagga

SEQ ID NO: 2247969 - RNA, 19 nt, Homo sapiens
  misc_RNA (1)...(19): siRNA sense strand
gaugugaagagcauggaga

SEQ ID NO: 2247970 - RNA, 19 nt, Homo sapiens
  misc_RNA (1)...(19): siRNA sense strand
ccaagauugaagauggaaa

SEQ ID NO: 2247971 - RNA, 19 nt, Homo sapiens
  misc_RNA (1)...(19): siRNA sense strand
ccuucuaugcugagcuuua

SEQ ID NO: 2247972 - RNA, 19 nt, Homo sapiens
  misc_RNA (1)...(19): siRNA sense strand
aaggaugaugagauggaaa

SEQ ID NO: 2247973 - RNA, 19 nt, Homo sapiens
  misc_RNA (1)...(19): siRNA sense strand
agaaggugcuggagagggu

SEQ ID NO: 2247974 - RNA, 19 nt, Homo sapiens
  misc_RNA (1)...(19): siRNA sense strand
ccuuggugcaugagcgaga

SEQ ID NO: 2247975 - RNA, 19 nt, Homo sapiens
  misc_RNA (1)...(19): siRNA sense strand
agaaaauugucaacccaaa

SEQ ID NO: 2247976 - RNA, 19 nt, Homo sapiens
  misc_RNA (1)...(19): siRNA sense strand
gaaacagauaagcaggaga

SEQ ID NO: 2247977 - RNA, 19 nt, Homo sapiens
  misc_RNA (1)...(19): siRNA sense strand
caggagaaggugcuggaga

SEQ ID NO: 2247978 - RNA, 19 nt, Homo sapiens
  misc_RNA (1)...(19): siRNA sense strand
aggagaaggugcuggagag

SEQ ID NO: 2247979 - RNA, 19 nt, Homo sapiens
  misc_RNA (1)...(19): siRNA sense strand
aguccagggcugagaagaa

SEQ ID NO: 2247980 - RNA, 19 nt, Homo sapiens
  misc_RNA (1)...(19): siRNA sense strand
cucaagaggcagaagagaa

SEQ ID NO: 2247981 - RNA, 19 nt, Homo sapiens
  misc_RNA (1)...(19): siRNA sense strand
augaauggcucaagaggca

SEQ ID NO: 2247982 - RNA, 19 nt, Homo sapiens
  misc_RNA (1)...(19): siRNA sense strand
acaccuacuuccaggccaa

SEQ ID NO: 2247983 - RNA, 19 nt, Homo sapiens
  misc_RNA (1)...(19): siRNA sense strand
aggcagaagagaaauaaaa

SEQ ID NO: 2247984 - RNA, 19 nt, Homo sapiens
  misc_RNA (1)...(19): siRNA sense strand
aggaagcagccaaggccaa

SEQ ID NO: 2247985 - RNA, 19 nt, Homo sapiens
  misc_RNA (1)...(19): siRNA sense strand
cugggaagccugagaugau

SEQ ID NO: 2247986 - RNA, 19 nt, Homo sapiens
  misc_RNA (1)...(19): siRNA sense strand
gaggcagaagagaaauaaa

SEQ ID NO: 2247987 - RNA, 19 nt, Homo sapiens
  misc_RNA (1)...(19): siRNA sense strand
gcuccaagcagcuggucga

SEQ ID NO: 2247988 - RNA, 19 nt, Homo sapiens
  misc_RNA (1)...(19): siRNA sense strand
ggcccuuaguccagaacuu

SEQ ID NO: 2247989 - RNA, 19 nt, Homo sapiens
  misc_RNA (1)...(19): siRNA sense strand
gugcaggcagcucggcaaa

SEQ ID NO: 2247990 - RNA, 19 nt, Homo sapiens
  misc_RNA (1)...(19): siRNA sense strand
ccaagcuggaggagauuga

SEQ ID NO: 2247991 - RNA, 19 nt, Homo sapiens
  misc_RNA (1)...(19): siRNA sense strand
cagccaaggccaaggaggu

SEQ ID NO: 2247992 - RNA, 19 nt, Homo sapiens
  misc_RNA (1)...(19): siRNA sense strand
ugaaaugggcagagagaaa

SEQ ID NO: 2247993 - RNA, 19 nt, Homo sapiens
  misc_RNA (1)...(19): siRNA sense strand
gaagaaagaucaaggguga

SEQ ID NO: 2247994 - RNA, 19 nt, Homo sapiens
  misc_RNA (1)...(19): siRNA sense strand
caguauauccuaagggaau

SEQ ID NO: 2247995 - RNA, 19 nt, Homo sapiens
  misc_RNA (1)...(19): siRNA sense strand
ccucaaauaaugugggaga

SEQ ID NO: 2247996 - RNA, 19 nt, Homo sapiens
  misc_RNA (1)...(19): siRNA sense strand
aauagaaacgggagagaau

SEQ ID NO: 2247997 - RNA, 19 nt, Homo sapiens
  misc_RNA (1)...(19): siRNA sense strand
ccacauugaaagauugaaa

SEQ ID NO: 2247998 - RNA, 19 nt, Homo sapiens
  misc_RNA (1)...(19): siRNA sense strand
ucaaauaaugugggagaaa

SEQ ID NO: 2247999 - RNA, 19 nt, Homo sapiens
  misc_RNA (1)...(19): siRNA sense strand
ucuuuaugaugaugggaaa

SEQ ID NO: 2248000 - RNA, 19 nt, Homo sapiens
  misc_RNA (1)...(19): siRNA sense strand
gguucaaacagaagaccaa

SEQ ID NO: 2248001 - RNA, 19 nt, Homo sapiens
  misc_RNA (1)...(19): siRNA sense strand
ccgaagugccagcuagaaa

SEQ ID NO: 2248002 - RNA, 19 nt, Homo sapiens
  misc_RNA (1)...(19): siRNA sense strand
ccaacuacauagaugggua

SEQ ID NO: 2248003 - RNA, 19 nt, Homo sapiens
  misc_RNA (1)...(19): siRNA sense strand
ggaaaaugguagaagaagu

SEQ ID NO: 2248004 - RNA, 19 nt, Homo sapiens
  misc_RNA (1)...(19): siRNA sense strand
aagaaugguucaagugaga

SEQ ID NO: 2248005 - RNA, 19 nt, Homo sapiens
  misc_RNA (1)...(19): siRNA sense strand
agaagagagaagugagaca

SEQ ID NO: 2248006 - RNA, 19 nt, Homo sapiens
  misc_RNA (1)...(19): siRNA sense strand
cgugaaaugggcagagaga

SEQ ID NO: 2248007 - RNA, 19 nt, Homo sapiens
  misc_RNA (1)...(19): siRNA sense strand
acuccaaaguggucaagaa

SEQ ID NO: 2248008 - RNA, 19 nt, Homo sapiens
  misc_RNA (1)...(19): siRNA sense strand
gauugaaagcaaaugacaa

SEQ ID NO: 2248009 - RNA, 19 nt, Homo sapiens
  misc_RNA (1)...(19): siRNA sense strand
gguaauagaguuugacgau

SEQ ID NO: 2248010 - RNA, 19 nt, Homo sapiens
  misc_RNA (1)...(19): siRNA sense strand
guucaagugagaagagaga

SEQ ID NO: 2248011 - RNA, 19 nt, Homo sapiens
  misc_RNA (1)...(19): siRNA sense strand
ccuccaagguuuacacgaa

SEQ ID NO: 2248012 - RNA, 19 nt, Homo sapiens
  misc_RNA (1)...(19): siRNA sense strand
gaaggaaccugaagagcca

SEQ ID NO: 2248013 - RNA, 19 nt, Homo sapiens
  misc_RNA (1)...(19): siRNA sense strand
cugaagagccaaauggaca

SEQ ID NO: 2248014 - RNA, 19 nt, Homo sapiens
  misc_RNA (1)...(19): siRNA sense strand
aaggaaagaaagucagcaa

SEQ ID NO: 2248015 - RNA, 19 nt, Homo sapiens
  misc_RNA (1)...(19): siRNA sense strand
uggcaugauuacugugcaa

SEQ ID NO: 2248016 - RNA, 19 nt, Homo sapiens
  misc_RNA (1)...(19): siRNA sense strand
ggagagaaugucacaggaa

SEQ ID NO: 2248017 - RNA, 19 nt, Homo sapiens
  misc_RNA (1)...(19): siRNA sense strand
augaaggaguuguagauau

SEQ ID NO: 2248018 - RNA, 19 nt, Homo sapiens
  misc_RNA (1)...(19): siRNA sense strand
caaccugaagccugagaaa

SEQ ID NO: 2248019 - RNA, 19 nt, Homo sapiens
  misc_RNA (1)...(19): siRNA sense strand
cagaaagccuacaucgcua

SEQ ID NO: 2248020 - RNA, 19 nt, Homo sapiens
  misc_RNA (1)...(19): siRNA sense strand
cagcuaugguacagacaga

SEQ ID NO: 2248021 - RNA, 19 nt, Homo sapiens
  misc_RNA (1)...(19): siRNA sense strand
cuacagugucgcuggacua

SEQ ID NO: 2248022 - RNA, 19 nt, Homo sapiens
  misc_RNA (1)...(19): siRNA sense strand
ggguaugccugcagccuau

SEQ ID NO: 2248023 - RNA, 19 nt, Homo sapiens
  misc_RNA (1)...(19): siRNA sense strand
gauguaagacagucagcaa

SEQ ID NO: 2248024 - RNA, 19 nt, Homo sapiens
  misc_RNA (1)...(19): siRNA sense strand
ggagaaugauaugggaaca

SEQ ID NO: 2248025 - RNA, 19 nt, Homo sapiens
  misc_RNA (1)...(19): siRNA sense strand
uuucuuacguagagucaaa

SEQ ID NO: 2248026 - RNA, 19 nt, Homo sapiens
  misc_RNA (1)...(19): siRNA sense strand
ugauaugccaauaggaaga

SEQ ID NO: 2248027 - RNA, 19 nt, Homo sapiens
  misc_RNA (1)...(19): siRNA sense strand
cugcaaggacugaaaccaa

SEQ ID NO: 2248028 - RNA, 19 nt, Homo sapiens
  misc_RNA (1)...(19): siRNA sense strand
augcagagucuaagaugua

SEQ ID NO: 2248029 - RNA, 19 nt, Homo sapiens
  misc_RNA (1)...(19): siRNA sense strand
cggaugaagaagaaggcuu

SEQ ID NO: 2248030 - RNA, 19 nt, Homo sapiens
  misc_RNA (1)...(19): siRNA sense strand
gagaaugauaugggaacaa

SEQ ID NO: 2248031 - RNA, 19 nt, Homo sapiens
  misc_RNA (1)...(19): siRNA sense strand
cuauaugguucaaacagaa

SEQ ID NO: 2248032 - RNA, 19 nt, Homo sapiens
  misc_RNA (1)...(19): siRNA sense strand
cuagaaacuuguaugccua

SEQ ID NO: 2248033 - RNA, 19 nt, Homo sapiens
  misc_RNA (1)...(19): siRNA sense strand
gggagaguccagaugaaau

SEQ ID NO: 2248034 - RNA, 19 nt, Homo sapiens
  misc_RNA (1)...(19): siRNA sense strand
caccaaugccuuauguaaa

SEQ ID NO: 2248035 - RNA, 19 nt, Homo sapiens
  misc_RNA (1)...(19): siRNA sense strand
gcacagaaacccacggacu

SEQ ID NO: 2248036 - RNA, 19 nt, Homo sapiens
  misc_RNA (1)...(19): siRNA sense strand
aggaagugacuaugugaau

SEQ ID NO: 2248037 - RNA, 19 nt, Homo sapiens
  misc_RNA (1)...(19): siRNA sense strand
uaaugagagcccagaggaa

SEQ ID NO: 2248038 - RNA, 19 nt, Homo sapiens
  misc_RNA (1)...(19): siRNA sense strand
agcagugacuuguggaaau

SEQ ID NO: 2248039 - RNA, 19 nt, Homo sapiens
  misc_RNA (1)...(19): siRNA sense strand
cuucauaacgcuaagcauu

SEQ ID NO: 2248040 - RNA, 19 nt, Homo sapiens
  misc_RNA (1)...(19): siRNA sense strand
uggaacaugcagagucuaa

SEQ ID NO: 2248041 - RNA, 19 nt, Homo sapiens
  misc_RNA (1)...(19): siRNA sense strand
ccgcacggaugcugagaca

SEQ ID NO: 2248042 - RNA, 19 nt, Homo sapiens
  misc_RNA (1)...(19): siRNA sense strand
ugguacagacagaggauca

SEQ ID NO: 2248043 - RNA, 19 nt, Homo sapiens
  misc_RNA (1)...(19): siRNA sense strand
gagugaagagucugaccaa

SEQ ID NO: 2248044 - RNA, 19 nt, Homo sapiens
  misc_RNA (1)...(19): siRNA sense strand
aacacaaaccucagagcaa

SEQ ID NO: 2248045 - RNA, 19 nt, Homo sapiens
  misc_RNA (1)...(19): siRNA sense strand
gagucuaagauguaugcaa

SEQ ID NO: 2248046 - RNA, 19 nt, Homo sapiens
  misc_RNA (1)...(19): siRNA sense strand
gagauaugaaggaguugua

SEQ ID NO: 2248047 - RNA, 19 nt, Homo sapiens
  misc_RNA (1)...(19): siRNA sense strand
gauuaugaauucaggguug

SEQ ID NO: 2248048 - RNA, 19 nt, Homo sapiens
  misc_RNA (1)...(19): siRNA sense strand
acgaauuaccauugagcca

SEQ ID NO: 2248049 - RNA, 19 nt, Homo sapiens
  misc_RNA (1)...(19): siRNA sense strand
ugacaaaacuagaagaaag

SEQ ID NO: 2248050 - RNA, 19 nt, Homo sapiens
  misc_RNA (1)...(19): siRNA sense strand
ugagaagagagaagugaga

SEQ ID NO: 2248051 - RNA, 19 nt, Homo sapiens
  misc_RNA (1)...(19): siRNA sense strand
gcugacaaaucguggaaac

SEQ ID NO: 2248052 - RNA, 19 nt, Homo sapiens
  misc_RNA (1)...(19): siRNA sense strand
gcgcagaagcauccguuau

SEQ ID NO: 2248053 - RNA, 19 nt, Homo sapiens
  misc_RNA (1)...(19): siRNA sense strand
ggguuguugcugucaauaa

SEQ ID NO: 2248054 - RNA, 19 nt, Homo sapiens
  misc_RNA (1)...(19): siRNA sense strand
ccaacuaugaacuggucua

SEQ ID NO: 2248055 - RNA, 19 nt, Homo sapiens
  misc_RNA (1)...(19): siRNA sense strand
gggugaagugugaccagua

SEQ ID NO: 2248056 - RNA, 19 nt, Homo sapiens
  misc_RNA (1)...(19): siRNA sense strand
augccauguuagaaagaau

SEQ ID NO: 2248057 - RNA, 19 nt, Homo sapiens
  misc_RNA (1)...(19): siRNA sense strand
cggcaaagacugcaccaga

SEQ ID NO: 2248058 - RNA, 19 nt, Homo sapiens
  misc_RNA (1)...(19): siRNA sense strand
gcauuaugguggauuuaca

SEQ ID NO: 2248059 - RNA, 19 nt, Homo sapiens
  misc_RNA (1)...(19): siRNA sense strand
acauagauggguauaggaa

SEQ ID NO: 2248060 - RNA, 19 nt, Homo sapiens
  misc_RNA (1)...(19): siRNA sense strand
ugaaaugggcagagagaaa

SEQ ID NO: 2248061 - RNA, 19 nt, Homo sapiens
  misc_RNA (1)...(19): siRNA sense strand
gaagaaagaucaaggguga

SEQ ID NO: 2248062 - RNA, 19 nt, Homo sapiens
  misc_RNA (1)...(19): siRNA sense strand
caguauauccuaagggaau

SEQ ID NO: 2248063 - RNA, 19 nt, Homo sapiens
  misc_RNA (1)...(19): siRNA sense strand
ccucaaauaaugugggaga

SEQ ID NO: 2248064 - RNA, 19 nt, Homo sapiens
  misc_RNA (1)...(19): siRNA sense strand
aauagaaacgggagagaau

SEQ ID NO: 2248065 - RNA, 19 nt, Homo sapiens
  misc_RNA (1)...(19): siRNA sense strand
ccacauugaaagauugaaa

SEQ ID NO: 2248066 - RNA, 19 nt, Homo sapiens
  misc_RNA (1)...(19): siRNA sense strand
ucaaauaaugugggagaaa

SEQ ID NO: 2248067 - RNA, 19 nt, Homo sapiens
  misc_RNA (1)...(19): siRNA sense strand
ucuuuaugaugaugggaaa

SEQ ID NO: 2248068 - RNA, 19 nt, Homo sapiens
  misc_RNA (1)...(19): siRNA sense strand
gguucaaacagaagaccaa

SEQ ID NO: 2248069 - RNA, 19 nt, Homo sapiens
  misc_RNA (1)...(19): siRNA sense strand
ccgaagugccagcuagaaa

SEQ ID NO: 2248070 - RNA, 19 nt, Homo sapiens
  misc_RNA (1)...(19): siRNA sense strand
ccaacuacauagaugggua

SEQ ID NO: 2248071 - RNA, 19 nt, Homo sapiens
  misc_RNA (1)...(19): siRNA sense strand
ggaaaaugguagaagaagu

SEQ ID NO: 2248072 - RNA, 19 nt, Homo sapiens
  misc_RNA (1)...(19): siRNA sense strand
aagaaugguucaagugaga

SEQ ID NO: 2248073 - RNA, 19 nt, Homo sapiens
  misc_RNA (1)...(19): siRNA sense strand
agaagagagaagugagaca

SEQ ID NO: 2248074 - RNA, 19 nt, Homo sapiens
  misc_RNA (1)...(19): siRNA sense strand
cgugaaaugggcagagaga

SEQ ID NO: 2248075 - RNA, 19 nt, Homo sapiens
  misc_RNA (1)...(19): siRNA sense strand
acuccaaaguggucaagaa

SEQ ID NO: 2248076 - RNA, 19 nt, Homo sapiens
  misc_RNA (1)...(19): siRNA sense strand
gauugaaagcaaaugacaa

SEQ ID NO: 2248077 - RNA, 19 nt, Homo sapiens
  misc_RNA (1)...(19): siRNA sense strand
gguaauagaguuugacgau

SEQ ID NO: 2248078 - RNA, 19 nt, Homo sapiens
  misc_RNA (1)...(19): siRNA sense strand
guucaagugagaagagaga

SEQ ID NO: 2248079 - RNA, 19 nt, Homo sapiens
  misc_RNA (1)...(19): siRNA sense strand
ccuccaagguuuacacgaa

SEQ ID NO: 2248080 - RNA, 19 nt, Homo sapiens
  misc_RNA (1)...(19): siRNA sense strand
gaaggaaccugaagagcca

SEQ ID NO: 2248081 - RNA, 19 nt, Homo sapiens
  misc_RNA (1)...(19): siRNA sense strand
cugaagagccaaauggaca

SEQ ID NO: 2248082 - RNA, 19 nt, Homo sapiens
  misc_RNA (1)...(19): siRNA sense strand
aaggaaagaaagucagcaa

SEQ ID NO: 2248083 - RNA, 19 nt, Homo sapiens
  misc_RNA (1)...(19): siRNA sense strand
uggcaugauuacugugcaa

SEQ ID NO: 2248084 - RNA, 19 nt, Homo sapiens
  misc_RNA (1)...(19): siRNA sense strand
ggagagaaugucacaggaa

SEQ ID NO: 2248085 - RNA, 19 nt, Homo sapiens
  misc_RNA (1)...(19): siRNA sense strand
augaaggaguuguagauau

SEQ ID NO: 2248086 - RNA, 19 nt, Homo sapiens
  misc_RNA (1)...(19): siRNA sense strand
caaccugaagccugagaaa

SEQ ID NO: 2248087 - RNA, 19 nt, Homo sapiens
  misc_RNA (1)...(19): siRNA sense strand
cagaaagccuacaucgcua

SEQ ID NO: 2248088 - RNA, 19 nt, Homo sapiens
  misc_RNA (1)...(19): siRNA sense strand
cagcuaugguacagacaga

SEQ ID NO: 2248089 - RNA, 19 nt, Homo sapiens
  misc_RNA (1)...(19): siRNA sense strand
cuacagugucgcuggacua

SEQ ID NO: 2248090 - RNA, 19 nt, Homo sapiens
  misc_RNA (1)...(19): siRNA sense strand
ggguaugccugcagccuau

SEQ ID NO: 2248091 - RNA, 19 nt, Homo sapiens
  misc_RNA (1)...(19): siRNA sense strand
gauguaagacagucagcaa

SEQ ID NO: 2248092 - RNA, 19 nt, Homo sapiens
  misc_RNA (1)...(19): siRNA sense strand
ggagaaugauaugggaaca

SEQ ID NO: 2248093 - RNA, 19 nt, Homo sapiens
  misc_RNA (1)...(19): siRNA sense strand
uuucuuacguagagucaaa

SEQ ID NO: 2248094 - RNA, 19 nt, Homo sapiens
  misc_RNA (1)...(19): siRNA sense strand
ugauaugccaauaggaaga

SEQ ID NO: 2248095 - RNA, 19 nt, Homo sapiens
  misc_RNA (1)...(19): siRNA sense strand
cugcaaggacugaaaccaa

SEQ ID NO: 2248096 - RNA, 19 nt, Homo sapiens
  misc_RNA (1)...(19): siRNA sense strand
augcagagucuaagaugua

SEQ ID NO: 2248097 - RNA, 19 nt, Homo sapiens
  misc_RNA (1)...(19): siRNA sense strand
cggaugaagaagaaggcuu

SEQ ID NO: 2248098 - RNA, 19 nt, Homo sapiens
  misc_RNA (1)...(19): siRNA sense strand
gagaaugauaugggaacaa

SEQ ID NO: 2248099 - RNA, 19 nt, Homo sapiens
  misc_RNA (1)...(19): siRNA sense strand
cuauaugguucaaacagaa

SEQ ID NO: 2248100 - RNA, 19 nt, Homo sapiens
  misc_RNA (1)...(19): siRNA sense strand
cuagaaacuuguaugccua

SEQ ID NO: 2248101 - RNA, 19 nt, Homo sapiens
  misc_RNA (1)...(19): siRNA sense strand
gggagaguccagaugaaau

SEQ ID NO: 2248102 - RNA, 19 nt, Homo sapiens
  misc_RNA (1)...(19): siRNA sense strand
caccaaugccuuauguaaa

SEQ ID NO: 2248103 - RNA, 19 nt, Homo sapiens
  misc_RNA (1)...(19): siRNA sense strand
gcacagaaacccacggacu

SEQ ID NO: 2248104 - RNA, 19 nt, Homo sapiens
  misc_RNA (1)...(19): siRNA sense strand
aggaagugacuaugugaau

SEQ ID NO: 2248105 - RNA, 19 nt, Homo sapiens
  misc_RNA (1)...(19): siRNA sense strand
uaaugagagcccagaggaa

SEQ ID NO: 2248106 - RNA, 19 nt, Homo sapiens
  misc_RNA (1)...(19): siRNA sense strand
agcagugacuuguggaaau

SEQ ID NO: 2248107 - RNA, 19 nt, Homo sapiens
  misc_RNA (1)...(19): siRNA sense strand
cuucauaacgcuaagcauu

SEQ ID NO: 2248108 - RNA, 19 nt, Homo sapiens
  misc_RNA (1)...(19): siRNA sense strand
uggaacaugcagagucuaa

SEQ ID NO: 2248109 - RNA, 19 nt, Homo sapiens
  misc_RNA (1)...(19): siRNA sense strand
ccgcacggaugcugagaca

SEQ ID NO: 2248110 - RNA, 19 nt, Homo sapiens
  misc_RNA (1)...(19): siRNA sense strand
ugguacagacagaggauca

SEQ ID NO: 2248111 - RNA, 19 nt, Homo sapiens
  misc_RNA (1)...(19): siRNA sense strand
gagugaagagucugaccaa

SEQ ID NO: 2248112 - RNA, 19 nt, Homo sapiens
  misc_RNA (1)...(19): siRNA sense strand
aacacaaaccucagagcaa

SEQ ID NO: 2248113 - RNA, 19 nt, Homo sapiens
  misc_RNA (1)...(19): siRNA sense strand
gagucuaagauguaugcaa

SEQ ID NO: 2248114 - RNA, 19 nt, Homo sapiens
  misc_RNA (1)...(19): siRNA sense strand
gagauaugaaggaguugua

SEQ ID NO: 2248115 - RNA, 19 nt, Homo sapiens
  misc_RNA (1)...(19): siRNA sense strand
gauuaugaauucaggguug

SEQ ID NO: 2248116 - RNA, 19 nt, Homo sapiens
  misc_RNA (1)...(19): siRNA sense strand
acgaauuaccauugagcca

SEQ ID NO: 2248117 - RNA, 19 nt, Homo sapiens
  misc_RNA (1)...(19): siRNA sense strand
ugacaaaacuagaagaaag

SEQ ID NO: 2248118 - RNA, 19 nt, Homo sapiens
  misc_RNA (1)...(19): siRNA sense strand
ugagaagagagaagugaga

SEQ ID NO: 2248119 - RNA, 19 nt, Homo sapiens
  misc_RNA (1)...(19): siRNA sense strand
gcugacaaaucguggaaac

SEQ ID NO: 2248120 - RNA, 19 nt, Homo sapiens
  misc_RNA (1)...(19): siRNA sense strand
gcgcagaagcauccguuau

SEQ ID NO: 2248121 - RNA, 19 nt, Homo sapiens
  misc_RNA (1)...(19): siRNA sense strand
ggguuguugcugucaauaa

SEQ ID NO: 2248122 - RNA, 19 nt, Homo sapiens
  misc_RNA (1)...(19): siRNA sense strand
ccaacuaugaacuggucua

SEQ ID NO: 2248123 - RNA, 19 nt, Homo sapiens
  misc_RNA (1)...(19): siRNA sense strand
gggugaagugugaccagua

SEQ ID NO: 2248124 - RNA, 19 nt, Homo sapiens
  misc_RNA (1)...(19): siRNA sense strand
augccauguuagaaagaau

SEQ ID NO: 2248125 - RNA, 19 nt, Homo sapiens
  misc_RNA (1)...(19): siRNA sense strand
cggcaaagacugcaccaga

SEQ ID NO: 2248126 - RNA, 19 nt, Homo sapiens
  misc_RNA (1)...(19): siRNA sense strand
gcauuaugguggauuuaca

SEQ ID NO: 2248127 - RNA, 19 nt, Homo sapiens
  misc_RNA (1)...(19): siRNA sense strand
acauagauggguauaggaa

SEQ ID NO: 2248128 - RNA, 19 nt, Homo sapiens
  misc_RNA (1)...(19): siRNA sense strand
ugaaaugggcagagagaaa

SEQ ID NO: 2248129 - RNA, 19 nt, Homo sapiens
  misc_RNA (1)...(19): siRNA sense strand
gaagaaagaucaaggguga

SEQ ID NO: 2248130 - RNA, 19 nt, Homo sapiens
  misc_RNA (1)...(19): siRNA sense strand
caguauauccuaagggaau

SEQ ID NO: 2248131 - RNA, 19 nt, Homo sapiens
  misc_RNA (1)...(19): siRNA sense strand
ccucaaauaaugugggaga

SEQ ID NO: 2248132 - RNA, 19 nt, Homo sapiens
  misc_RNA (1)...(19): siRNA sense strand
aauagaaacgggagagaau

SEQ ID NO: 2248133 - RNA, 19 nt, Homo sapiens
  misc_RNA (1)...(19): siRNA sense strand
ccacauugaaagauugaaa

SEQ ID NO: 2248134 - RNA, 19 nt, Homo sapiens
  misc_RNA (1)...(19): siRNA sense strand
ucaaauaaugugggagaaa

SEQ ID NO: 2248135 - RNA, 19 nt, Homo sapiens
  misc_RNA (1)...(19): siRNA sense strand
ucuuuaugaugaugggaaa

SEQ ID NO: 2248136 - RNA, 19 nt, Homo sapiens
  misc_RNA (1)...(19): siRNA sense strand
gguucaaacagaagaccaa

SEQ ID NO: 2248137 - RNA, 19 nt, Homo sapiens
  misc_RNA (1)...(19): siRNA sense strand
ccgaagugccagcuagaaa

SEQ ID NO: 2248138 - RNA, 19 nt, Homo sapiens
  misc_RNA (1)...(19): siRNA sense strand
ccaacuacauagaugggua

SEQ ID NO: 2248139 - RNA, 19 nt, Homo sapiens
  misc_RNA (1)...(19): siRNA sense strand
ggaaaaugguagaagaagu

SEQ ID NO: 2248140 - RNA, 19 nt, Homo sapiens
  misc_RNA (1)...(19): siRNA sense strand
aagaaugguucaagugaga

SEQ ID NO: 2248141 - RNA, 19 nt, Homo sapiens
  misc_RNA (1)...(19): siRNA sense strand
agaagagagaagugagaca

SEQ ID NO: 2248142 - RNA, 19 nt, Homo sapiens
  misc_RNA (1)...(19): siRNA sense strand
cgugaaaugggcagagaga

SEQ ID NO: 2248143 - RNA, 19 nt, Homo sapiens
  misc_RNA (1)...(19): siRNA sense strand
acuccaaaguggucaagaa

SEQ ID NO: 2248144 - RNA, 19 nt, Homo sapiens
  misc_RNA (1)...(19): siRNA sense strand
gauugaaagcaaaugacaa

SEQ ID NO: 2248145 - RNA, 19 nt, Homo sapiens
  misc_RNA (1)...(19): siRNA sense strand
gguaauagaguuugacgau

SEQ ID NO: 2248146 - RNA, 19 nt, Homo sapiens
  misc_RNA (1)...(19): siRNA sense strand
guucaagugagaagagaga

SEQ ID NO: 2248147 - RNA, 19 nt, Homo sapiens
  misc_RNA (1)...(19): siRNA sense strand
ccuccaagguuuacacgaa

SEQ ID NO: 2248148 - RNA, 19 nt, Homo sapiens
  misc_RNA (1)...(19): siRNA sense strand
gaaggaaccugaagagcca

SEQ ID NO: 2248149 - RNA, 19 nt, Homo sapiens
  misc_RNA (1)...(19): siRNA sense strand
cugaagagccaaauggaca

SEQ ID NO: 2248150 - RNA, 19 nt, Homo sapiens
  misc_RNA (1)...(19): siRNA sense strand
aaggaaagaaagucagcaa

SEQ ID NO: 2248151 - RNA, 19 nt, Homo sapiens
  misc_RNA (1)...(19): siRNA sense strand
uggcaugauuacugugcaa

SEQ ID NO: 2248152 - RNA, 19 nt, Homo sapiens
  misc_RNA (1)...(19): siRNA sense strand
ggagagaaugucacaggaa

SEQ ID NO: 2248153 - RNA, 19 nt, Homo sapiens
  misc_RNA (1)...(19): siRNA sense strand
augaaggaguuguagauau

SEQ ID NO: 2248154 - RNA, 19 nt, Homo sapiens
  misc_RNA (1)...(19): siRNA sense strand
caaccugaagccugagaaa

SEQ ID NO: 2248155 - RNA, 19 nt, Homo sapiens
  misc_RNA (1)...(19): siRNA sense strand
cagaaagccuacaucgcua

SEQ ID NO: 2248156 - RNA, 19 nt, Homo sapiens
  misc_RNA (1)...(19): siRNA sense strand
cagcuaugguacagacaga

SEQ ID NO: 2248157 - RNA, 19 nt, Homo sapiens
  misc_RNA (1)...(19): siRNA sense strand
cuacagugucgcuggacua

SEQ ID NO: 2248158 - RNA, 19 nt, Homo sapiens
  misc_RNA (1)...(19): siRNA sense strand
ggguaugccugcagccuau

SEQ ID NO: 2248159 - RNA, 19 nt, Homo sapiens
  misc_RNA (1)...(19): siRNA sense strand
gauguaagacagucagcaa

SEQ ID NO: 2248160 - RNA, 19 nt, Homo sapiens
  misc_RNA (1)...(19): siRNA sense strand
ggagaaugauaugggaaca

SEQ ID NO: 2248161 - RNA, 19 nt, Homo sapiens
  misc_RNA (1)...(19): siRNA sense strand
uuucuuacguagagucaaa

SEQ ID NO: 2248162 - RNA, 19 nt, Homo sapiens
  misc_RNA (1)...(19): siRNA sense strand
ugauaugccaauaggaaga

SEQ ID NO: 2248163 - RNA, 19 nt, Homo sapiens
  misc_RNA (1)...(19): siRNA sense strand
cugcaaggacugaaaccaa

SEQ ID NO: 2248164 - RNA, 19 nt, Homo sapiens
  misc_RNA (1)...(19): siRNA sense strand
augcagagucuaagaugua

SEQ ID NO: 2248165 - RNA, 19 nt, Homo sapiens
  misc_RNA (1)...(19): siRNA sense strand
cggaugaagaagaaggcuu

SEQ ID NO: 2248166 - RNA, 19 nt, Homo sapiens
  misc_RNA (1)...(19): siRNA sense strand
gagaaugauaugggaacaa

SEQ ID NO: 2248167 - RNA, 19 nt, Homo sapiens
  misc_RNA (1)...(19): siRNA sense strand
cuauaugguucaaacagaa

SEQ ID NO: 2248168 - RNA, 19 nt, Homo sapiens
  misc_RNA (1)...(19): siRNA sense strand
cuagaaacuuguaugccua

SEQ ID NO: 2248169 - RNA, 19 nt, Homo sapiens
  misc_RNA (1)...(19): siRNA sense strand
gggagaguccagaugaaau

SEQ ID NO: 2248170 - RNA, 19 nt, Homo sapiens
  misc_RNA (1)...(19): siRNA sense strand
caccaaugccuuauguaaa

SEQ ID NO: 2248171 - RNA, 19 nt, Homo sapiens
  misc_RNA (1)...(19): siRNA sense strand
gcacagaaacccacggacu

SEQ ID NO: 2248172 - RNA, 19 nt, Homo sapiens
  misc_RNA (1)...(19): siRNA sense strand
aggaagugacuaugugaau

SEQ ID NO: 2248173 - RNA, 19 nt, Homo sapiens
  misc_RNA (1)...(19): siRNA sense strand
uaaugagagcccagaggaa

SEQ ID NO: 2248174 - RNA, 19 nt, Homo sapiens
  misc_RNA (1)...(19): siRNA sense strand
agcagugacuuguggaaau

SEQ ID NO: 2248175 - RNA, 19 nt, Homo sapiens
  misc_RNA (1)...(19): siRNA sense strand
cuucauaacgcuaagcauu

SEQ ID NO: 2248176 - RNA, 19 nt, Homo sapiens
  misc_RNA (1)...(19): siRNA sense strand
uggaacaugcagagucuaa

SEQ ID NO: 2248177 - RNA, 19 nt, Homo sapiens
  misc_RNA (1)...(19): siRNA sense strand
ccgcacggaugcugagaca

SEQ ID NO: 2248178 - RNA, 19 nt, Homo sapiens
  misc_RNA (1)...(19): siRNA sense strand
ugguacagacagaggauca

SEQ ID NO: 2248179 - RNA, 19 nt, Homo sapiens
  misc_RNA (1)...(19): siRNA sense strand
gagugaagagucugaccaa

SEQ ID NO: 2248180 - RNA, 19 nt, Homo sapiens
  misc_RNA (1)...(19): siRNA sense strand
aacacaaaccucagagcaa

SEQ ID NO: 2248181 - RNA, 19 nt, Homo sapiens
  misc_RNA (1)...(19): siRNA sense strand
gagucuaagauguaugcaa

SEQ ID NO: 2248182 - RNA, 19 nt, Homo sapiens
  misc_RNA (1)...(19): siRNA sense strand
gagauaugaaggaguugua

SEQ ID NO: 2248183 - RNA, 19 nt, Homo sapiens
  misc_RNA (1)...(19): siRNA sense strand
gauuaugaauucaggguug

SEQ ID NO: 2248184 - RNA, 19 nt, Homo sapiens
  misc_RNA (1)...(19): siRNA sense strand
acgaauuaccauugagcca

SEQ ID NO: 2248185 - RNA, 19 nt, Homo sapiens
  misc_RNA (1)...(19): siRNA sense strand
ugacaaaacuagaagaaag

SEQ ID NO: 2248186 - RNA, 19 nt, Homo sapiens
  misc_RNA (1)...(19): siRNA sense strand
ugagaagagagaagugaga

SEQ ID NO: 2248187 - RNA, 19 nt, Homo sapiens
  misc_RNA (1)...(19): siRNA sense strand
gcugacaaaucguggaaac

SEQ ID NO: 2248188 - RNA, 19 nt, Homo sapiens
  misc_RNA (1)...(19): siRNA sense strand
gcgcagaagcauccguuau

SEQ ID NO: 2248189 - RNA, 19 nt, Homo sapiens
  misc_RNA (1)...(19): siRNA sense strand
ggguuguugcugucaauaa

SEQ ID NO: 2248190 - RNA, 19 nt, Homo sapiens
  misc_RNA (1)...(19): siRNA sense strand
ccaacuaugaacuggucua

SEQ ID NO: 2248191 - RNA, 19 nt, Homo sapiens
  misc_RNA (1)...(19): siRNA sense strand
gggugaagugugaccagua

SEQ ID NO: 2248192 - RNA, 19 nt, Homo sapiens
  misc_RNA (1)...(19): siRNA sense strand
augccauguuagaaagaau

SEQ ID NO: 2248193 - RNA, 19 nt, Homo sapiens
  misc_RNA (1)...(19): siRNA sense strand
cggcaaagacugcaccaga

SEQ ID NO: 2248194 - RNA, 19 nt, Homo sapiens
  misc_RNA (1)...(19): siRNA sense strand
gcauuaugguggauuuaca

SEQ ID NO: 2248195 - RNA, 19 nt, Homo sapiens
  misc_RNA (1)...(19): siRNA sense strand
acauagauggguauaggaa

SEQ ID NO: 2248196 - RNA, 19 nt, Homo sapiens
  misc_RNA (1)...(19): siRNA sense strand
ugaaaugggcagagagaaa

SEQ ID NO: 2248197 - RNA, 19 nt, Homo sapiens
  misc_RNA (1)...(19): siRNA sense strand
gaagaaagaucaaggguga

SEQ ID NO: 2248198 - RNA, 19 nt, Homo sapiens
  misc_RNA (1)...(19): siRNA sense strand
caguauauccuaagggaau

SEQ ID NO: 2248199 - RNA, 19 nt, Homo sapiens
  misc_RNA (1)...(19): siRNA sense strand
ccucaaauaaugugggaga

SEQ ID NO: 2248200 - RNA, 19 nt, Homo sapiens
  misc_RNA (1)...(19): siRNA sense strand
aauagaaacgggagagaau

SEQ ID NO: 2248201 - RNA, 19 nt, Homo sapiens
  misc_RNA (1)...(19): siRNA sense strand
ccacauugaaagauugaaa

SEQ ID NO: 2248202 - RNA, 19 nt, Homo sapiens
  misc_RNA (1)...(19): siRNA sense strand
ucaaauaaugugggagaaa

SEQ ID NO: 2248203 - RNA, 19 nt, Homo sapiens
  misc_RNA (1)...(19): siRNA sense strand
ucuuuaugaugaugggaaa

SEQ ID NO: 2248204 - RNA, 19 nt, Homo sapiens
  misc_RNA (1)...(19): siRNA sense strand
gguucaaacagaagaccaa

SEQ ID NO: 2248205 - RNA, 19 nt, Homo sapiens
  misc_RNA (1)...(19): siRNA sense strand
ccgaagugccagcuagaaa

SEQ ID NO: 2248206 - RNA, 19 nt, Homo sapiens
  misc_RNA (1)...(19): siRNA sense strand
ccaacuacauagaugggua

SEQ ID NO: 2248207 - RNA, 19 nt, Homo sapiens
  misc_RNA (1)...(19): siRNA sense strand
ggaaaaugguagaagaagu

SEQ ID NO: 2248208 - RNA, 19 nt, Homo sapiens
  misc_RNA (1)...(19): siRNA sense strand
aagaaugguucaagugaga

SEQ ID NO: 2248209 - RNA, 19 nt, Homo sapiens
  misc_RNA (1)...(19): siRNA sense strand
agaagagagaagugagaca

SEQ ID NO: 2248210 - RNA, 19 nt, Homo sapiens
  misc_RNA (1)...(19): siRNA sense strand
cgugaaaugggcagagaga

SEQ ID NO: 2248211 - RNA, 19 nt, Homo sapiens
  misc_RNA (1)...(19): siRNA sense strand
acuccaaaguggucaagaa

SEQ ID NO: 2248212 - RNA, 19 nt, Homo sapiens
  misc_RNA (1)...(19): siRNA sense strand
gauugaaagcaaaugacaa

SEQ ID NO: 2248213 - RNA, 19 nt, Homo sapiens
  misc_RNA (1)...(19): siRNA sense strand
gguaauagaguuugacgau

SEQ ID NO: 2248214 - RNA, 19 nt, Homo sapiens
  misc_RNA (1)...(19): siRNA sense strand
guucaagugagaagagaga

SEQ ID NO: 2248215 - RNA, 19 nt, Homo sapiens
  misc_RNA (1)...(19): siRNA sense strand
ccuccaagguuuacacgaa

SEQ ID NO: 2248216 - RNA, 19 nt, Homo sapiens
  misc_RNA (1)...(19): siRNA sense strand
gaaggaaccugaagagcca

SEQ ID NO: 2248217 - RNA, 19 nt, Homo sapiens
  misc_RNA (1)...(19): siRNA sense strand
cugaagagccaaauggaca

SEQ ID NO: 2248218 - RNA, 19 nt, Homo sapiens
  misc_RNA (1)...(19): siRNA sense strand
aaggaaagaaagucagcaa

SEQ ID NO: 2248219 - RNA, 19 nt, Homo sapiens
  misc_RNA (1)...(19): siRNA sense strand
uggcaugauuacugugcaa

SEQ ID NO: 2248220 - RNA, 19 nt, Homo sapiens
  misc_RNA (1)...(19): siRNA sense strand
ggagagaaugucacaggaa

SEQ ID NO: 2248221 - RNA, 19 nt, Homo sapiens
  misc_RNA (1)...(19): siRNA sense strand
augaaggaguuguagauau

SEQ ID NO: 2248222 - RNA, 19 nt, Homo sapiens
  misc_RNA (1)...(19): siRNA sense strand
caaccugaagccugagaaa

SEQ ID NO: 2248223 - RNA, 19 nt, Homo sapiens
  misc_RNA (1)...(19): siRNA sense strand
cagaaagccuacaucgcua

SEQ ID NO: 2248224 - RNA, 19 nt, Homo sapiens
  misc_RNA (1)...(19): siRNA sense strand
cagcuaugguacagacaga

SEQ ID NO: 2248225 - RNA, 19 nt, Homo sapiens
  misc_RNA (1)...(19): siRNA sense strand
cuacagugucgcuggacua

SEQ ID NO: 2248226 - RNA, 19 nt, Homo sapiens
  misc_RNA (1)...(19): siRNA sense strand
ggguaugccugcagccuau

SEQ ID NO: 2248227 - RNA, 19 nt, Homo sapiens
  misc_RNA (1)...(19): siRNA sense strand
gauguaagacagucagcaa

SEQ ID NO: 2248228 - RNA, 19 nt, Homo sapiens
  misc_RNA (1)...(19): siRNA sense strand
ggagaaugauaugggaaca

SEQ ID NO: 2248229 - RNA, 19 nt, Homo sapiens
  misc_RNA (1)...(19): siRNA sense strand
uuucuuacguagagucaaa

SEQ ID NO: 2248230 - RNA, 19 nt, Homo sapiens
  misc_RNA (1)...(19): siRNA sense strand
ugauaugccaauaggaaga

SEQ ID NO: 2248231 - RNA, 19 nt, Homo sapiens
  misc_RNA (1)...(19): siRNA sense strand
cugcaaggacugaaaccaa

SEQ ID NO: 2248232 - RNA, 19 nt, Homo sapiens
  misc_RNA (1)...(19): siRNA sense strand
augcagagucuaagaugua

SEQ ID NO: 2248233 - RNA, 19 nt, Homo sapiens
  misc_RNA (1)...(19): siRNA sense strand
cggaugaagaagaaggcuu

SEQ ID NO: 2248234 - RNA, 19 nt, Homo sapiens
  misc_RNA (1)...(19): siRNA sense strand
gagaaugauaugggaacaa

SEQ ID NO: 2248235 - RNA, 19 nt, Homo sapiens
  misc_RNA (1)...(19): siRNA sense strand
cuauaugguucaaacagaa

SEQ ID NO: 2248236 - RNA, 19 nt, Homo sapiens
  misc_RNA (1)...(19): siRNA sense strand
cuagaaacuuguaugccua

SEQ ID NO: 2248237 - RNA, 19 nt, Homo sapiens
  misc_RNA (1)...(19): siRNA sense strand
gggagaguccagaugaaau

SEQ ID NO: 2248238 - RNA, 19 nt, Homo sapiens
  misc_RNA (1)...(19): siRNA sense strand
caccaaugccuuauguaaa

SEQ ID NO: 2248239 - RNA, 19 nt, Homo sapiens
  misc_RNA (1)...(19): siRNA sense strand
gcacagaaacccacggacu

SEQ ID NO: 2248240 - RNA, 19 nt, Homo sapiens
  misc_RNA (1)...(19): siRNA sense strand
aggaagugacuaugugaau

SEQ ID NO: 2248241 - RNA, 19 nt, Homo sapiens
  misc_RNA (1)...(19): siRNA sense strand
uaaugagagcccagaggaa

SEQ ID NO: 2248242 - RNA, 19 nt, Homo sapiens
  misc_RNA (1)...(19): siRNA sense strand
agcagugacuuguggaaau

SEQ ID NO: 2248243 - RNA, 19 nt, Homo sapiens
  misc_RNA (1)...(19): siRNA sense strand
cuucauaacgcuaagcauu

SEQ ID NO: 2248244 - RNA, 19 nt, Homo sapiens
  misc_RNA (1)...(19): siRNA sense strand
uggaacaugcagagucuaa

SEQ ID NO: 2248245 - RNA, 19 nt, Homo sapiens
  misc_RNA (1)...(19): siRNA sense strand
ccgcacggaugcugagaca

SEQ ID NO: 2248246 - RNA, 19 nt, Homo sapiens
  misc_RNA (1)...(19): siRNA sense strand
ugguacagacagaggauca

SEQ ID NO: 2248247 - RNA, 19 nt, Homo sapiens
  misc_RNA (1)...(19): siRNA sense strand
gagugaagagucugaccaa

SEQ ID NO: 2248248 - RNA, 19 nt, Homo sapiens
  misc_RNA (1)...(19): siRNA sense strand
aacacaaaccucagagcaa

SEQ ID NO: 2248249 - RNA, 19 nt, Homo sapiens
  misc_RNA (1)...(19): siRNA sense strand
gagucuaagauguaugcaa

SEQ ID NO: 2248250 - RNA, 19 nt, Homo sapiens
  misc_RNA (1)...(19): siRNA sense strand
gagauaugaaggaguugua

SEQ ID NO: 2248251 - RNA, 19 nt, Homo sapiens
  misc_RNA (1)...(19): siRNA sense strand
gauuaugaauucaggguug

SEQ ID NO: 2248252 - RNA, 19 nt, Homo sapiens
  misc_RNA (1)...(19): siRNA sense strand
acgaauuaccauugagcca

SEQ ID NO: 2248253 - RNA, 19 nt, Homo sapiens
  misc_RNA (1)...(19): siRNA sense strand
ugacaaaacuagaagaaag

SEQ ID NO: 2248254 - RNA, 19 nt, Homo sapiens
  misc_RNA (1)...(19): siRNA sense strand
ugagaagagagaagugaga

SEQ ID NO: 2248255 - RNA, 19 nt, Homo sapiens
  misc_RNA (1)...(19): siRNA sense strand
gcugacaaaucguggaaac

SEQ ID NO: 2248256 - RNA, 19 nt, Homo sapiens
  misc_RNA (1)...(19): siRNA sense strand
gcgcagaagcauccguuau

SEQ ID NO: 2248257 - RNA, 19 nt, Homo sapiens
  misc_RNA (1)...(19): siRNA sense strand
ggguuguugcugucaauaa

SEQ ID NO: 2248258 - RNA, 19 nt, Homo sapiens
  misc_RNA (1)...(19): siRNA sense strand
ccaacuaugaacuggucua

SEQ ID NO: 2248259 - RNA, 19 nt, Homo sapiens
  misc_RNA (1)...(19): siRNA sense strand
gggugaagugugaccagua

SEQ ID NO: 2248260 - RNA, 19 nt, Homo sapiens
  misc_RNA (1)...(19): siRNA sense strand
augccauguuagaaagaau

SEQ ID NO: 2248261 - RNA, 19 nt, Homo sapiens
  misc_RNA (1)...(19): siRNA sense strand
cggcaaagacugcaccaga

SEQ ID NO: 2248262 - RNA, 19 nt, Homo sapiens
  misc_RNA (1)...(19): siRNA sense strand
gcauuaugguggauuuaca

SEQ ID NO: 2248263 - RNA, 19 nt, Homo sapiens
  misc_RNA (1)...(19): siRNA sense strand
acauagauggguauaggaa

SEQ ID NO: 2248264 - RNA, 19 nt, Homo sapiens
  misc_RNA (1)...(19): siRNA sense strand
gauagagagcagugaggaa

SEQ ID NO: 2248265 - RNA, 19 nt, Homo sapiens
  misc_RNA (1)...(19): siRNA sense strand
ccaacuacaucgauggcua

SEQ ID NO: 2248266 - RNA, 19 nt, Homo sapiens
  misc_RNA (1)...(19): siRNA sense strand
agcugaaggugguggagaa

SEQ ID NO: 2248267 - RNA, 19 nt, Homo sapiens
  misc_RNA (1)...(19): siRNA sense strand
cggcagaggacgaagacca

SEQ ID NO: 2248268 - RNA, 19 nt, Homo sapiens
  misc_RNA (1)...(19): siRNA sense strand
ccggagaugcuguggguga

SEQ ID NO: 2248269 - RNA, 19 nt, Homo sapiens
  misc_RNA (1)...(19): siRNA sense strand
acgaagaccaacagcacaa

SEQ ID NO: 2248270 - RNA, 19 nt, Homo sapiens
  misc_RNA (1)...(19): siRNA sense strand
ucuagaagccaucgagcaa

SEQ ID NO: 2248271 - RNA, 19 nt, Homo sapiens
  misc_RNA (1)...(19): siRNA sense strand
ccaagacaggcgagggauu

SEQ ID NO: 2248272 - RNA, 19 nt, Homo sapiens
  misc_RNA (1)...(19): siRNA sense strand
cggaugagaucguggucca

SEQ ID NO: 2248273 - RNA, 19 nt, Homo sapiens
  misc_RNA (1)...(19): siRNA sense strand
acgagaagacgguggacau

SEQ ID NO: 2248274 - RNA, 19 nt, Homo sapiens
  misc_RNA (1)...(19): siRNA sense strand
cagcaguucacgugggaga

SEQ ID NO: 2248275 - RNA, 19 nt, Homo sapiens
  misc_RNA (1)...(19): siRNA sense strand
cagcaaaggcucuggccca

SEQ ID NO: 2248276 - RNA, 19 nt, Homo sapiens
  misc_RNA (1)...(19): siRNA sense strand
ggaugaagcacgagaagac

SEQ ID NO: 2248277 - RNA, 19 nt, Homo sapiens
  misc_RNA (1)...(19): siRNA sense strand
cuggagaaguggacggagu

SEQ ID NO: 2248278 - RNA, 19 nt, Homo sapiens
  misc_RNA (1)...(19): siRNA sense strand
ccgaggaacuggagcugga

SEQ ID NO: 2248279 - RNA, 19 nt, Homo sapiens
  misc_RNA (1)...(19): siRNA sense strand
ccauggaccagaagcgcua

SEQ ID NO: 2248280 - RNA, 19 nt, Homo sapiens
  misc_RNA (1)...(19): siRNA sense strand
ccugagauuucuugguuca

SEQ ID NO: 2248281 - RNA, 19 nt, Homo sapiens
  misc_RNA (1)...(19): siRNA sense strand
guggagaugcggaggcuca

SEQ ID NO: 2248282 - RNA, 19 nt, Homo sapiens
  misc_RNA (1)...(19): siRNA sense strand
ccacagaacuggccuggga

SEQ ID NO: 2248283 - RNA, 19 nt, Homo sapiens
  misc_RNA (1)...(19): siRNA sense strand
cagaacaucacgacagaca

SEQ ID NO: 2248284 - RNA, 19 nt, Homo sapiens
  misc_RNA (1)...(19): siRNA sense strand
cagaaggugauguguguga

SEQ ID NO: 2248285 - RNA, 19 nt, Homo sapiens
  misc_RNA (1)...(19): siRNA sense strand
ccauggaguuccugaguac

SEQ ID NO: 2248286 - RNA, 19 nt, Homo sapiens
  misc_RNA (1)...(19): siRNA sense strand
gcaucguccuggagcgcau

SEQ ID NO: 2248287 - RNA, 19 nt, Homo sapiens
  misc_RNA (1)...(19): siRNA sense strand
cagugaaagcucuuccaaa

SEQ ID NO: 2248288 - RNA, 19 nt, Homo sapiens
  misc_RNA (1)...(19): siRNA sense strand
ccucugacccuguggagau

SEQ ID NO: 2248289 - RNA, 19 nt, Homo sapiens
  misc_RNA (1)...(19): siRNA sense strand
aggagaagucccggguaaa

SEQ ID NO: 2248290 - RNA, 19 nt, Homo sapiens
  misc_RNA (1)...(19): siRNA sense strand
ggguaaaaugugaucagua

SEQ ID NO: 2248291 - RNA, 19 nt, Homo sapiens
  misc_RNA (1)...(19): siRNA sense strand
gggagaaaugccaccagua

SEQ ID NO: 2248292 - RNA, 19 nt, Homo sapiens
  misc_RNA (1)...(19): siRNA sense strand
cagagagcaccgaggacuu

SEQ ID NO: 2248293 - RNA, 19 nt, Homo sapiens
  misc_RNA (1)...(19): siRNA sense strand
ucaucgggcaggugcauaa

SEQ ID NO: 2248294 - RNA, 19 nt, Homo sapiens
  misc_RNA (1)...(19): siRNA sense strand
ucucagugcucgaagagga

SEQ ID NO: 2248295 - RNA, 19 nt, Homo sapiens
  misc_RNA (1)...(19): siRNA sense strand
cagugcuggcggagaggaa

SEQ ID NO: 2248296 - RNA, 19 nt, Homo sapiens
  misc_RNA (1)...(19): siRNA sense strand
ugaaggaacccauggacca

SEQ ID NO: 2248297 - RNA, 19 nt, Homo sapiens
  misc_RNA (1)...(19): siRNA sense strand
cggacaacaucgagcgccu

SEQ ID NO: 2248298 - RNA, 19 nt, Homo sapiens
  misc_RNA (1)...(19): siRNA sense strand
ccaagaaccgcuaugcgaa

SEQ ID NO: 2248299 - RNA, 19 nt, Homo sapiens
  misc_RNA (1)...(19): siRNA sense strand
ggcagaggacgaagaccaa

SEQ ID NO: 2248300 - RNA, 19 nt, Homo sapiens
  misc_RNA (1)...(19): siRNA sense strand
gugacuacaucaaugccaa

SEQ ID NO: 2248301 - RNA, 19 nt, Homo sapiens
  misc_RNA (1)...(19): siRNA sense strand
cuacuaacagccuggguga

SEQ ID NO: 2248302 - RNA, 19 nt, Homo sapiens
  misc_RNA (1)...(19): siRNA sense strand
agaaccggcuggugaacau

SEQ ID NO: 2248303 - RNA, 19 nt, Homo sapiens
  misc_RNA (1)...(19): siRNA sense strand
ccucaggagcggaucauca

SEQ ID NO: 2248304 - RNA, 19 nt, Homo sapiens
  misc_RNA (1)...(19): siRNA sense strand
gcggaaauccagacccuga

SEQ ID NO: 2248305 - RNA, 19 nt, Homo sapiens
  misc_RNA (1)...(19): siRNA sense strand
ucaccaaggaggaugagau

SEQ ID NO: 2248306 - RNA, 19 nt, Homo sapiens
  misc_RNA (1)...(19): siRNA sense strand
uggagaaguggacggagua

SEQ ID NO: 2248307 - RNA, 19 nt, Homo sapiens
  misc_RNA (1)...(19): siRNA sense strand
caagaaccgcuaugcgaau

SEQ ID NO: 2248308 - RNA, 19 nt, Homo sapiens
  misc_RNA (1)...(19): siRNA sense strand
gcaugcgaucacagaggaa

SEQ ID NO: 2248309 - RNA, 19 nt, Homo sapiens
  misc_RNA (1)...(19): siRNA sense strand
acaucaugcccuacgaauu

SEQ ID NO: 2248310 - RNA, 19 nt, Homo sapiens
  misc_RNA (1)...(19): siRNA sense strand
acaccauagauuucggcaa

SEQ ID NO: 2248311 - RNA, 19 nt, Homo sapiens
  misc_RNA (1)...(19): siRNA sense strand
gccaacaggagcugcagaa

SEQ ID NO: 2248312 - RNA, 19 nt, Homo sapiens
  misc_RNA (1)...(19): siRNA sense strand
ucaagaaccggcuggugaa

SEQ ID NO: 2248313 - RNA, 19 nt, Homo sapiens
  misc_RNA (1)...(19): siRNA sense strand
uggugaacaucaugcccua

SEQ ID NO: 2248314 - RNA, 19 nt, Homo sapiens
  misc_RNA (1)...(19): siRNA sense strand
cugcgugaguucaagguca

SEQ ID NO: 2248315 - RNA, 19 nt, Homo sapiens
  misc_RNA (1)...(19): siRNA sense strand
aucuaugaguguacagcua

SEQ ID NO: 2248316 - RNA, 19 nt, Homo sapiens
  misc_RNA (1)...(19): siRNA sense strand
caguauauccugcgugagu

SEQ ID NO: 2248317 - RNA, 19 nt, Homo sapiens
  misc_RNA (1)...(19): siRNA sense strand
ggaugaagaaggggaagaa

SEQ ID NO: 2248318 - RNA, 19 nt, Homo sapiens
  misc_RNA (1)...(19): siRNA sense strand
ggcaugugguggauggcau

SEQ ID NO: 2248319 - RNA, 19 nt, Homo sapiens
  misc_RNA (1)...(19): siRNA sense strand
gggcaggugcauaagacca

SEQ ID NO: 2248320 - RNA, 19 nt, Homo sapiens
  misc_RNA (1)...(19): siRNA sense strand
aggaauccgaccaaggcaa

SEQ ID NO: 2248321 - RNA, 19 nt, Homo sapiens
  misc_RNA (1)...(19): siRNA sense strand
acgccaagguggagcacac

SEQ ID NO: 2248322 - RNA, 19 nt, Homo sapiens
  misc_RNA (1)...(19): siRNA sense strand
gaucaacacuagugccaag

SEQ ID NO: 2248323 - RNA, 19 nt, Homo sapiens
  misc_RNA (1)...(19): siRNA sense strand
acgaguguguggcgaccaa

SEQ ID NO: 2248324 - RNA, 19 nt, Homo sapiens
  misc_RNA (1)...(19): siRNA sense strand
acgccuggcacaagcacaa

SEQ ID NO: 2248325 - RNA, 19 nt, Homo sapiens
  misc_RNA (1)...(19): siRNA sense strand
ccaaggaacugccuggcga

SEQ ID NO: 2248326 - RNA, 19 nt, Homo sapiens
  misc_RNA (1)...(19): siRNA sense strand
gaggaguucgagaaggaga

SEQ ID NO: 2248327 - RNA, 19 nt, Homo sapiens
  misc_RNA (1)...(19): siRNA sense strand
ggaacuacauggugcagac

SEQ ID NO: 2248328 - RNA, 19 nt, Homo sapiens
  misc_RNA (1)...(19): siRNA sense strand
auagacagcagaaggccua

SEQ ID NO: 2248329 - RNA, 19 nt, Homo sapiens
  misc_RNA (1)...(19): siRNA sense strand
gauagagagcagugaggaa

SEQ ID NO: 2248330 - RNA, 19 nt, Homo sapiens
  misc_RNA (1)...(19): siRNA sense strand
ccaacuacaucgauggcua

SEQ ID NO: 2248331 - RNA, 19 nt, Homo sapiens
  misc_RNA (1)...(19): siRNA sense strand
agcugaaggugguggagaa

SEQ ID NO: 2248332 - RNA, 19 nt, Homo sapiens
  misc_RNA (1)...(19): siRNA sense strand
cggcagaggacgaagacca

SEQ ID NO: 2248333 - RNA, 19 nt, Homo sapiens
  misc_RNA (1)...(19): siRNA sense strand
ccggagaugcuguggguga

SEQ ID NO: 2248334 - RNA, 19 nt, Homo sapiens
  misc_RNA (1)...(19): siRNA sense strand
acgaagaccaacagcacaa

SEQ ID NO: 2248335 - RNA, 19 nt, Homo sapiens
  misc_RNA (1)...(19): siRNA sense strand
ucuagaagccaucgagcaa

SEQ ID NO: 2248336 - RNA, 19 nt, Homo sapiens
  misc_RNA (1)...(19): siRNA sense strand
ccaagacaggcgagggauu

SEQ ID NO: 2248337 - RNA, 19 nt, Homo sapiens
  misc_RNA (1)...(19): siRNA sense strand
cggaugagaucguggucca

SEQ ID NO: 2248338 - RNA, 19 nt, Homo sapiens
  misc_RNA (1)...(19): siRNA sense strand
acgagaagacgguggacau

SEQ ID NO: 2248339 - RNA, 19 nt, Homo sapiens
  misc_RNA (1)...(19): siRNA sense strand
cagcaguucacgugggaga

SEQ ID NO: 2248340 - RNA, 19 nt, Homo sapiens
  misc_RNA (1)...(19): siRNA sense strand
cagcaaaggcucuggccca

SEQ ID NO: 2248341 - RNA, 19 nt, Homo sapiens
  misc_RNA (1)...(19): siRNA sense strand
ggaugaagcacgagaagac

SEQ ID NO: 2248342 - RNA, 19 nt, Homo sapiens
  misc_RNA (1)...(19): siRNA sense strand
cuggagaaguggacggagu

SEQ ID NO: 2248343 - RNA, 19 nt, Homo sapiens
  misc_RNA (1)...(19): siRNA sense strand
ccgaggaacuggagcugga

SEQ ID NO: 2248344 - RNA, 19 nt, Homo sapiens
  misc_RNA (1)...(19): siRNA sense strand
ccauggaccagaagcgcua

SEQ ID NO: 2248345 - RNA, 19 nt, Homo sapiens
  misc_RNA (1)...(19): siRNA sense strand
ccugagauuucuugguuca

SEQ ID NO: 2248346 - RNA, 19 nt, Homo sapiens
  misc_RNA (1)...(19): siRNA sense strand
guggagaugcggaggcuca

SEQ ID NO: 2248347 - RNA, 19 nt, Homo sapiens
  misc_RNA (1)...(19): siRNA sense strand
ccacagaacuggccuggga

SEQ ID NO: 2248348 - RNA, 19 nt, Homo sapiens
  misc_RNA (1)...(19): siRNA sense strand
cagaacaucacgacagaca

SEQ ID NO: 2248349 - RNA, 19 nt, Homo sapiens
  misc_RNA (1)...(19): siRNA sense strand
cagaaggugauguguguga

SEQ ID NO: 2248350 - RNA, 19 nt, Homo sapiens
  misc_RNA (1)...(19): siRNA sense strand
ccauggaguuccugaguac

SEQ ID NO: 2248351 - RNA, 19 nt, Homo sapiens
  misc_RNA (1)...(19): siRNA sense strand
gcaucguccuggagcgcau

SEQ ID NO: 2248352 - RNA, 19 nt, Homo sapiens
  misc_RNA (1)...(19): siRNA sense strand
cagugaaagcucuuccaaa

SEQ ID NO: 2248353 - RNA, 19 nt, Homo sapiens
  misc_RNA (1)...(19): siRNA sense strand
ccucugacccuguggagau

SEQ ID NO: 2248354 - RNA, 19 nt, Homo sapiens
  misc_RNA (1)...(19): siRNA sense strand
aggagaagucccggguaaa

SEQ ID NO: 2248355 - RNA, 19 nt, Homo sapiens
  misc_RNA (1)...(19): siRNA sense strand
ggguaaaaugugaucagua

SEQ ID NO: 2248356 - RNA, 19 nt, Homo sapiens
  misc_RNA (1)...(19): siRNA sense strand
gggagaaaugccaccagua

SEQ ID NO: 2248357 - RNA, 19 nt, Homo sapiens
  misc_RNA (1)...(19): siRNA sense strand
cagagagcaccgaggacuu

SEQ ID NO: 2248358 - RNA, 19 nt, Homo sapiens
  misc_RNA (1)...(19): siRNA sense strand
ucaucgggcaggugcauaa

SEQ ID NO: 2248359 - RNA, 19 nt, Homo sapiens
  misc_RNA (1)...(19): siRNA sense strand
ucucagugcucgaagagga

SEQ ID NO: 2248360 - RNA, 19 nt, Homo sapiens
  misc_RNA (1)...(19): siRNA sense strand
cagugcuggcggagaggaa

SEQ ID NO: 2248361 - RNA, 19 nt, Homo sapiens
  misc_RNA (1)...(19): siRNA sense strand
ugaaggaacccauggacca

SEQ ID NO: 2248362 - RNA, 19 nt, Homo sapiens
  misc_RNA (1)...(19): siRNA sense strand
cggacaacaucgagcgccu

SEQ ID NO: 2248363 - RNA, 19 nt, Homo sapiens
  misc_RNA (1)...(19): siRNA sense strand
ccaagaaccgcuaugcgaa

SEQ ID NO: 2248364 - RNA, 19 nt, Homo sapiens
  misc_RNA (1)...(19): siRNA sense strand
ggcagaggacgaagaccaa

SEQ ID NO: 2248365 - RNA, 19 nt, Homo sapiens
  misc_RNA (1)...(19): siRNA sense strand
gugacuacaucaaugccaa

SEQ ID NO: 2248366 - RNA, 19 nt, Homo sapiens
  misc_RNA (1)...(19): siRNA sense strand
cuacuaacagccuggguga

SEQ ID NO: 2248367 - RNA, 19 nt, Homo sapiens
  misc_RNA (1)...(19): siRNA sense strand
agaaccggcuggugaacau

SEQ ID NO: 2248368 - RNA, 19 nt, Homo sapiens
  misc_RNA (1)...(19): siRNA sense strand
ccucaggagcggaucauca

SEQ ID NO: 2248369 - RNA, 19 nt, Homo sapiens
  misc_RNA (1)...(19): siRNA sense strand
gcggaaauccagacccuga

SEQ ID NO: 2248370 - RNA, 19 nt, Homo sapiens
  misc_RNA (1)...(19): siRNA sense strand
ucaccaaggaggaugagau

SEQ ID NO: 2248371 - RNA, 19 nt, Homo sapiens
  misc_RNA (1)...(19): siRNA sense strand
uggagaaguggacggagua

SEQ ID NO: 2248372 - RNA, 19 nt, Homo sapiens
  misc_RNA (1)...(19): siRNA sense strand
caagaaccgcuaugcgaau

SEQ ID NO: 2248373 - RNA, 19 nt, Homo sapiens
  misc_RNA (1)...(19): siRNA sense strand
gcaugcgaucacagaggaa

SEQ ID NO: 2248374 - RNA, 19 nt, Homo sapiens
  misc_RNA (1)...(19): siRNA sense strand
acaucaugcccuacgaauu

SEQ ID NO: 2248375 - RNA, 19 nt, Homo sapiens
  misc_RNA (1)...(19): siRNA sense strand
acaccauagauuucggcaa

SEQ ID NO: 2248376 - RNA, 19 nt, Homo sapiens
  misc_RNA (1)...(19): siRNA sense strand
gccaacaggagcugcagaa

SEQ ID NO: 2248377 - RNA, 19 nt, Homo sapiens
  misc_RNA (1)...(19): siRNA sense strand
ucaagaaccggcuggugaa

SEQ ID NO: 2248378 - RNA, 19 nt, Homo sapiens
  misc_RNA (1)...(19): siRNA sense strand
uggugaacaucaugcccua

SEQ ID NO: 2248379 - RNA, 19 nt, Homo sapiens
  misc_RNA (1)...(19): siRNA sense strand
cugcgugaguucaagguca

SEQ ID NO: 2248380 - RNA, 19 nt, Homo sapiens
  misc_RNA (1)...(19): siRNA sense strand
aucuaugaguguacagcua

SEQ ID NO: 2248381 - RNA, 19 nt, Homo sapiens
  misc_RNA (1)...(19): siRNA sense strand
caguauauccugcgugagu

SEQ ID NO: 2248382 - RNA, 19 nt, Homo sapiens
  misc_RNA (1)...(19): siRNA sense strand
ggaugaagaaggggaagaa

SEQ ID NO: 2248383 - RNA, 19 nt, Homo sapiens
  misc_RNA (1)...(19): siRNA sense strand
ggcaugugguggauggcau

SEQ ID NO: 2248384 - RNA, 19 nt, Homo sapiens
  misc_RNA (1)...(19): siRNA sense strand
gggcaggugcauaagacca

SEQ ID NO: 2248385 - RNA, 19 nt, Homo sapiens
  misc_RNA (1)...(19): siRNA sense strand
aggaauccgaccaaggcaa

SEQ ID NO: 2248386 - RNA, 19 nt, Homo sapiens
  misc_RNA (1)...(19): siRNA sense strand
acgccaagguggagcacac

SEQ ID NO: 2248387 - RNA, 19 nt, Homo sapiens
  misc_RNA (1)...(19): siRNA sense strand
gaucaacacuagugccaag

SEQ ID NO: 2248388 - RNA, 19 nt, Homo sapiens
  misc_RNA (1)...(19): siRNA sense strand
acgaguguguggcgaccaa

SEQ ID NO: 2248389 - RNA, 19 nt, Homo sapiens
  misc_RNA (1)...(19): siRNA sense strand
acgccuggcacaagcacaa

SEQ ID NO: 2248390 - RNA, 19 nt, Homo sapiens
  misc_RNA (1)...(19): siRNA sense strand
ccaaggaacugccuggcga

SEQ ID NO: 2248391 - RNA, 19 nt, Homo sapiens
  misc_RNA (1)...(19): siRNA sense strand
gaggaguucgagaaggaga

SEQ ID NO: 2248392 - RNA, 19 nt, Homo sapiens
  misc_RNA (1)...(19): siRNA sense strand
ggaacuacauggugcagac

SEQ ID NO: 2248393 - RNA, 19 nt, Homo sapiens
  misc_RNA (1)...(19): siRNA sense strand
auagacagcagaaggccua

SEQ ID NO: 2248394 - RNA, 19 nt, Homo sapiens
  misc_RNA (1)...(19): siRNA sense strand
ccucauaagaacagaagaa

SEQ ID NO: 2248395 - RNA, 19 nt, Homo sapiens
  misc_RNA (1)...(19): siRNA sense strand
gcguaugguuugggagaaa

SEQ ID NO: 2248396 - RNA, 19 nt, Homo sapiens
  misc_RNA (1)...(19): siRNA sense strand
caaauaagacaaagggaga

SEQ ID NO: 2248397 - RNA, 19 nt, Homo sapiens
  misc_RNA (1)...(19): siRNA sense strand
acucaagacuucaggucaa

SEQ ID NO: 2248398 - RNA, 19 nt, Homo sapiens
  misc_RNA (1)...(19): siRNA sense strand
ugaaauugacguugggaau

SEQ ID NO: 2248399 - RNA, 19 nt, Homo sapiens
  misc_RNA (1)...(19): siRNA sense strand
ggucaaguucaguggauuu

SEQ ID NO: 2248400 - RNA, 19 nt, Homo sapiens
  misc_RNA (1)...(19): siRNA sense strand
aggaaagaugcaaagaaua

SEQ ID NO: 2248401 - RNA, 19 nt, Homo sapiens
  misc_RNA (1)...(19): siRNA sense strand
guaaagcauaagauggaaa

SEQ ID NO: 2248402 - RNA, 19 nt, Homo sapiens
  misc_RNA (1)...(19): siRNA sense strand
aggaauaggcaaugagacu

SEQ ID NO: 2248403 - RNA, 19 nt, Homo sapiens
  misc_RNA (1)...(19): siRNA sense strand
gccauagaguucaggacaa

SEQ ID NO: 2248404 - RNA, 19 nt, Homo sapiens
  misc_RNA (1)...(19): siRNA sense strand
cuuuaauggugcagacaga

SEQ ID NO: 2248405 - RNA, 19 nt, Homo sapiens
  misc_RNA (1)...(19): siRNA sense strand
uuuaagaacaccugaacaa

SEQ ID NO: 2248406 - RNA, 19 nt, Homo sapiens
  misc_RNA (1)...(19): siRNA sense strand
ugagaauagaggaaagaau

SEQ ID NO: 2248407 - RNA, 19 nt, Homo sapiens
  misc_RNA (1)...(19): siRNA sense strand
caucauacacaguggagau

SEQ ID NO: 2248408 - RNA, 19 nt, Homo sapiens
  misc_RNA (1)...(19): siRNA sense strand
ugagaauggcacugaguau

SEQ ID NO: 2248409 - RNA, 19 nt, Homo sapiens
  misc_RNA (1)...(19): siRNA sense strand
ccaucauuauguugacuaa

SEQ ID NO: 2248410 - RNA, 19 nt, Homo sapiens
  misc_RNA (1)...(19): siRNA sense strand
gaacaaggaucuaauggga

SEQ ID NO: 2248411 - RNA, 19 nt, Homo sapiens
  misc_RNA (1)...(19): siRNA sense strand
ggguagaaauaaccaccaa

SEQ ID NO: 2248412 - RNA, 19 nt, Homo sapiens
  misc_RNA (1)...(19): siRNA sense strand
agaaagaagaggaaagaug

SEQ ID NO: 2248413 - RNA, 19 nt, Homo sapiens
  misc_RNA (1)...(19): siRNA sense strand
guggguucgcagaggaaua

SEQ ID NO: 2248414 - RNA, 19 nt, Homo sapiens
  misc_RNA (1)...(19): siRNA sense strand
agaagaggaaagaugcaaa

SEQ ID NO: 2248415 - RNA, 19 nt, Homo sapiens
  misc_RNA (1)...(19): siRNA sense strand
aggaaagaaucgcuauaau

SEQ ID NO: 2248416 - RNA, 19 nt, Homo sapiens
  misc_RNA (1)...(19): siRNA sense strand
ugauauuucccgugucaaa

SEQ ID NO: 2248417 - RNA, 19 nt, Homo sapiens
  misc_RNA (1)...(19): siRNA sense strand
gagacauaacuguggcaau

SEQ ID NO: 2248418 - RNA, 19 nt, Homo sapiens
  misc_RNA (1)...(19): siRNA sense strand
agaaauaaccaccaaccaa

SEQ ID NO: 2248419 - RNA, 19 nt, Homo sapiens
  misc_RNA (1)...(19): siRNA sense strand
gcucaggacuauggagaca

SEQ ID NO: 2248420 - RNA, 19 nt, Homo sapiens
  misc_RNA (1)...(19): siRNA sense strand
guguaacaucacaggcuua

SEQ ID NO: 2248421 - RNA, 19 nt, Homo sapiens
  misc_RNA (1)...(19): siRNA sense strand
ucgcagaggaauacgaaga

SEQ ID NO: 2248422 - RNA, 19 nt, Homo sapiens
  misc_RNA (1)...(19): siRNA sense strand
acacaagcacguaugacaa

SEQ ID NO: 2248423 - RNA, 19 nt, Homo sapiens
  misc_RNA (1)...(19): siRNA sense strand
acaauucaguaaaggucaa

SEQ ID NO: 2248424 - RNA, 19 nt, Homo sapiens
  misc_RNA (1)...(19): siRNA sense strand
ucugaagcuuguuggaauu

SEQ ID NO: 2248425 - RNA, 19 nt, Homo sapiens
  misc_RNA (1)...(19): siRNA sense strand
acagaauggaacuggaaca

SEQ ID NO: 2248426 - RNA, 19 nt, Homo sapiens
  misc_RNA (1)...(19): siRNA sense strand
uggagaaagaagaggaaag

SEQ ID NO: 2248427 - RNA, 19 nt, Homo sapiens
  misc_RNA (1)...(19): siRNA sense strand
aguuaaucagaguggagaa

SEQ ID NO: 2248428 - RNA, 19 nt, Homo sapiens
  misc_RNA (1)...(19): siRNA sense strand
uaguaaagcauaagaugga

SEQ ID NO: 2248429 - RNA, 19 nt, Homo sapiens
  misc_RNA (1)...(19): siRNA sense strand
agaggaaagaaucgcuaua

SEQ ID NO: 2248430 - RNA, 19 nt, Homo sapiens
  misc_RNA (1)...(19): siRNA sense strand
aggaauacgaagaucugaa

SEQ ID NO: 2248431 - RNA, 19 nt, Homo sapiens
  misc_RNA (1)...(19): siRNA sense strand
agauagagaaugagaacac

SEQ ID NO: 2248432 - RNA, 19 nt, Homo sapiens
  misc_RNA (1)...(19): siRNA sense strand
agauguggcuggacuggaa

SEQ ID NO: 2248433 - RNA, 19 nt, Homo sapiens
  misc_RNA (1)...(19): siRNA sense strand
accuaaauaugcagcagaa

SEQ ID NO: 2248434 - RNA, 19 nt, Homo sapiens
  misc_RNA (1)...(19): siRNA sense strand
ugaacagggaagaaccaaa

SEQ ID NO: 2248435 - RNA, 19 nt, Homo sapiens
  misc_RNA (1)...(19): siRNA sense strand
ccacugaccugcucaucaa

SEQ ID NO: 2248436 - RNA, 19 nt, Homo sapiens
  misc_RNA (1)...(19): siRNA sense strand
uggaaaaugagaagacaau

SEQ ID NO: 2248437 - RNA, 19 nt, Homo sapiens
  misc_RNA (1)...(19): siRNA sense strand
gagcaauggcaauggcacu

SEQ ID NO: 2248438 - RNA, 19 nt, Homo sapiens
  misc_RNA (1)...(19): siRNA sense strand
auaauaauguucugcccua

SEQ ID NO: 2248439 - RNA, 19 nt, Homo sapiens
  misc_RNA (1)...(19): siRNA sense strand
ccagauagagaaugagaac

SEQ ID NO: 2248440 - RNA, 19 nt, Homo sapiens
  misc_RNA (1)...(19): siRNA sense strand
cauacacaguggagaucuu

SEQ ID NO: 2248441 - RNA, 19 nt, Homo sapiens
  misc_RNA (1)...(19): siRNA sense strand
agaggaaagaugcaaagaa

SEQ ID NO: 2248442 - RNA, 19 nt, Homo sapiens
  misc_RNA (1)...(19): siRNA sense strand
guggcaaugacaucagaaa

SEQ ID NO: 2248443 - RNA, 19 nt, Homo sapiens
  misc_RNA (1)...(19): siRNA sense strand
acaaggaucuaaugggacu

SEQ ID NO: 2248444 - RNA, 19 nt, Homo sapiens
  misc_RNA (1)...(19): siRNA sense strand
aguccugcuugucggguua

SEQ ID NO: 2248445 - RNA, 19 nt, Homo sapiens
  misc_RNA (1)...(19): siRNA sense strand
uggagaauuuugaggccua

SEQ ID NO: 2248446 - RNA, 19 nt, Homo sapiens
  misc_RNA (1)...(19): siRNA sense strand
gaaucauuucagaugcaua

SEQ ID NO: 2248447 - RNA, 19 nt, Homo sapiens
  misc_RNA (1)...(19): siRNA sense strand
caguaaaggucaaguucag

SEQ ID NO: 2248448 - RNA, 19 nt, Homo sapiens
  misc_RNA (1)...(19): siRNA sense strand
cgaauggcacagaaggaca

SEQ ID NO: 2248449 - RNA, 19 nt, Homo sapiens
  misc_RNA (1)...(19): siRNA sense strand
agucacggacauuggaauu

SEQ ID NO: 2248450 - RNA, 19 nt, Homo sapiens
  misc_RNA (1)...(19): siRNA sense strand
uggcaaugacaucagaaau

SEQ ID NO: 2248451 - RNA, 19 nt, Homo sapiens
  misc_RNA (1)...(19): siRNA sense strand
guucaggacaaaugcuauu

SEQ ID NO: 2248452 - RNA, 19 nt, Homo sapiens
  misc_RNA (1)...(19): siRNA sense strand
aagcauggcucuaaccaca

SEQ ID NO: 2248453 - RNA, 19 nt, Homo sapiens
  misc_RNA (1)...(19): siRNA sense strand
gaguauagaacggaaguca

SEQ ID NO: 2248454 - RNA, 19 nt, Homo sapiens
  misc_RNA (1)...(19): siRNA sense strand
gugacauaccucauaagaa

SEQ ID NO: 2248455 - RNA, 19 nt, Homo sapiens
  misc_RNA (1)...(19): siRNA sense strand
ccaacuacaugccuggcua

SEQ ID NO: 2248456 - RNA, 19 nt, Homo sapiens
  misc_RNA (1)...(19): siRNA sense strand
acaaguauguaguaaagca

SEQ ID NO: 2248457 - RNA, 19 nt, Homo sapiens
  misc_RNA (1)...(19): siRNA sense strand
caacacaaguagucacgga

SEQ ID NO: 2248458 - RNA, 19 nt, Homo sapiens
  misc_RNA (1)...(19): siRNA sense strand
uggaauuacugacgcuaca

SEQ ID NO: 2248459 - RNA, 19 nt, Homo sapiens
  misc_RNA (1)...(19): siRNA sense strand
aaacagaauggaacuggaa

SEQ ID NO: 2248460 - RNA, 19 nt, Homo sapiens
  misc_RNA (1)...(19): siRNA sense strand
acgaaauggagaagauaua

SEQ ID NO: 2248461 - RNA, 19 nt, Homo sapiens
  misc_RNA (1)...(19): siRNA sense strand
caauaugagaucagcuaua

SEQ ID NO: 2248462 - RNA, 19 nt, Homo sapiens
  misc_RNA (1)...(19): siRNA sense strand
caucaaucauagaagguuu

SEQ ID NO: 2248463 - RNA, 19 nt, Homo sapiens
  misc_RNA (1)...(19): siRNA sense strand
gugcauugccacagggaga

SEQ ID NO: 2248464 - RNA, 19 nt, Homo sapiens
  misc_RNA (1)...(19): siRNA sense strand
gggaauacccggcaggaga

SEQ ID NO: 2248465 - RNA, 19 nt, Homo sapiens
  misc_RNA (1)...(19): siRNA sense strand
ccaacuauauugauggcua

SEQ ID NO: 2248466 - RNA, 19 nt, Homo sapiens
  misc_RNA (1)...(19): siRNA sense strand
gcaaagaugccauggggaa

SEQ ID NO: 2248467 - RNA, 19 nt, Homo sapiens
  misc_RNA (1)...(19): siRNA sense strand
cuacaaugaaggagaacga

SEQ ID NO: 2248468 - RNA, 19 nt, Homo sapiens
  misc_RNA (1)...(19): siRNA sense strand
ccaaugaauaucagguaau

SEQ ID NO: 2248469 - RNA, 19 nt, Homo sapiens
  misc_RNA (1)...(19): siRNA sense strand
ccagagacgaaauggagaa

SEQ ID NO: 2248470 - RNA, 19 nt, Homo sapiens
  misc_RNA (1)...(19): siRNA sense strand
acauccaaguacugaguua

SEQ ID NO: 2248471 - RNA, 19 nt, Homo sapiens
  misc_RNA (1)...(19): siRNA sense strand
caaugaaauccgugaaguu

SEQ ID NO: 2248472 - RNA, 19 nt, Homo sapiens
  misc_RNA (1)...(19): siRNA sense strand
agggaaggaaggagaguga

SEQ ID NO: 2248473 - RNA, 19 nt, Homo sapiens
  misc_RNA (1)...(19): siRNA sense strand
ggugaaaauagcaggaauu

SEQ ID NO: 2248474 - RNA, 19 nt, Homo sapiens
  misc_RNA (1)...(19): siRNA sense strand
gauugcaagaagugacaaa

SEQ ID NO: 2248475 - RNA, 19 nt, Homo sapiens
  misc_RNA (1)...(19): siRNA sense strand
cagaagaaccagaagugau

SEQ ID NO: 2248476 - RNA, 19 nt, Homo sapiens
  misc_RNA (1)...(19): siRNA sense strand
agacagaggaacaguacau

SEQ ID NO: 2248477 - RNA, 19 nt, Homo sapiens
  misc_RNA (1)...(19): siRNA sense strand
ggggaaggccggacgauua

SEQ ID NO: 2248478 - RNA, 19 nt, Homo sapiens
  misc_RNA (1)...(19): siRNA sense strand
gugcagaaccuaugagaac

SEQ ID NO: 2248479 - RNA, 19 nt, Homo sapiens
  misc_RNA (1)...(19): siRNA sense strand
cagacagaguggugaaaau

SEQ ID NO: 2248480 - RNA, 19 nt, Homo sapiens
  misc_RNA (1)...(19): siRNA sense strand
agacagacagaguggugaa

SEQ ID NO: 2248481 - RNA, 19 nt, Homo sapiens
  misc_RNA (1)...(19): siRNA sense strand
agaggugaaugcagggcaa

SEQ ID NO: 2248482 - RNA, 19 nt, Homo sapiens
  misc_RNA (1)...(19): siRNA sense strand
agguaauauuugaagcuga

SEQ ID NO: 2248483 - RNA, 19 nt, Homo sapiens
  misc_RNA (1)...(19): siRNA sense strand
cccaaagacauuaaagauu

SEQ ID NO: 2248484 - RNA, 19 nt, Homo sapiens
  misc_RNA (1)...(19): siRNA sense strand
guaaaagacuucuggagau

SEQ ID NO: 2248485 - RNA, 19 nt, Homo sapiens
  misc_RNA (1)...(19): siRNA sense strand
cccaaugaauaucagguaa

SEQ ID NO: 2248486 - RNA, 19 nt, Homo sapiens
  misc_RNA (1)...(19): siRNA sense strand
ccugaaagaaguagaguac

SEQ ID NO: 2248487 - RNA, 19 nt, Homo sapiens
  misc_RNA (1)...(19): siRNA sense strand
cugcuuauguggagaaacu

SEQ ID NO: 2248488 - RNA, 19 nt, Homo sapiens
  misc_RNA (1)...(19): siRNA sense strand
acugggaauccuuggguua

SEQ ID NO: 2248489 - RNA, 19 nt, Homo sapiens
  misc_RNA (1)...(19): siRNA sense strand
guguggagaaggaaacuaa

SEQ ID NO: 2248490 - RNA, 19 nt, Homo sapiens
  misc_RNA (1)...(19): siRNA sense strand
gguucaaagaggaauauga

SEQ ID NO: 2248491 - RNA, 19 nt, Homo sapiens
  misc_RNA (1)...(19): siRNA sense strand
aagaggaauaugagagcuu

SEQ ID NO: 2248492 - RNA, 19 nt, Homo sapiens
  misc_RNA (1)...(19): siRNA sense strand
auacugaaguuuaugguga

SEQ ID NO: 2248493 - RNA, 19 nt, Homo sapiens
  misc_RNA (1)...(19): siRNA sense strand
cacaauacccucugccaaa

SEQ ID NO: 2248494 - RNA, 19 nt, Homo sapiens
  misc_RNA (1)...(19): siRNA sense strand
ccagagggaaggaaggaga

SEQ ID NO: 2248495 - RNA, 19 nt, Homo sapiens
  misc_RNA (1)...(19): siRNA sense strand
gaugauuuggcaagaacaa

SEQ ID NO: 2248496 - RNA, 19 nt, Homo sapiens
  misc_RNA (1)...(19): siRNA sense strand
ugucaaagccuuaagaucu

SEQ ID NO: 2248497 - RNA, 19 nt, Homo sapiens
  misc_RNA (1)...(19): siRNA sense strand
cauauuaguuagggugaau

SEQ ID NO: 2248498 - RNA, 19 nt, Homo sapiens
  misc_RNA (1)...(19): siRNA sense strand
gagaccagcacaagccaaa

SEQ ID NO: 2248499 - RNA, 19 nt, Homo sapiens
  misc_RNA (1)...(19): siRNA sense strand
uggcauguucugugcuaua

SEQ ID NO: 2248500 - RNA, 19 nt, Homo sapiens
  misc_RNA (1)...(19): siRNA sense strand
gaucacgacccuggagaaa

SEQ ID NO: 2248501 - RNA, 19 nt, Homo sapiens
  misc_RNA (1)...(19): siRNA sense strand
gcuccaacuuacaaauuau

SEQ ID NO: 2248502 - RNA, 19 nt, Homo sapiens
  misc_RNA (1)...(19): siRNA sense strand
ggaucgaaguuaugcugau

SEQ ID NO: 2248503 - RNA, 19 nt, Homo sapiens
  misc_RNA (1)...(19): siRNA sense strand
uaugagaaccacagugcua

SEQ ID NO: 2248504 - RNA, 19 nt, Homo sapiens
  misc_RNA (1)...(19): siRNA sense strand
uuaauaugguccagacaga

SEQ ID NO: 2248505 - RNA, 19 nt, Homo sapiens
  misc_RNA (1)...(19): siRNA sense strand
ccuccauugugauguuaaa

SEQ ID NO: 2248506 - RNA, 19 nt, Homo sapiens
  misc_RNA (1)...(19): siRNA sense strand
gcaggaggaaugcgaggaa

SEQ ID NO: 2248507 - RNA, 19 nt, Homo sapiens
  misc_RNA (1)...(19): siRNA sense strand
ggugcauguuagugcucaa

SEQ ID NO: 2248508 - RNA, 19 nt, Homo sapiens
  misc_RNA (1)...(19): siRNA sense strand
cuacauauuugcugaucca

SEQ ID NO: 2248509 - RNA, 19 nt, Homo sapiens
  misc_RNA (1)...(19): siRNA sense strand
guguaugauuucuggagga

SEQ ID NO: 2248510 - RNA, 19 nt, Homo sapiens
  misc_RNA (1)...(19): siRNA sense strand
augaaauccgugaaguuaa

SEQ ID NO: 2248511 - RNA, 19 nt, Homo sapiens
  misc_RNA (1)...(19): siRNA sense strand
ggaaggaaggagagugaag

SEQ ID NO: 2248512 - RNA, 19 nt, Homo sapiens
  misc_RNA (1)...(19): siRNA sense strand
cgaugagcaguguggagaa

SEQ ID NO: 2248513 - RNA, 19 nt, Homo sapiens
  misc_RNA (1)...(19): siRNA sense strand
cugaugauacugaaguuua

SEQ ID NO: 2248514 - RNA, 19 nt, Homo sapiens
  misc_RNA (1)...(19): siRNA sense strand
ugaaauggugaaacggcaa

SEQ ID NO: 2248515 - RNA, 19 nt, Homo sapiens
  misc_RNA (1)...(19): siRNA sense strand
ggacagaaacccaugcagu

SEQ ID NO: 2248516 - RNA, 19 nt, Homo sapiens
  misc_RNA (1)...(19): siRNA sense strand
aggagagugaagagacaau

SEQ ID NO: 2248517 - RNA, 19 nt, Homo sapiens
  misc_RNA (1)...(19): siRNA sense strand
uggaagaacugcacccaca

SEQ ID NO: 2248518 - RNA, 19 nt, Homo sapiens
  misc_RNA (1)...(19): siRNA sense strand
gauuuguaucgcuguguaa

SEQ ID NO: 2248519 - RNA, 19 nt, Homo sapiens
  misc_RNA (1)...(19): siRNA sense strand
aggcagacuguuuggacau

SEQ ID NO: 2248520 - RNA, 19 nt, Homo sapiens
  misc_RNA (1)...(19): siRNA sense strand
gagagaagccggagccaug

SEQ ID NO: 2248521 - RNA, 19 nt, Homo sapiens
  misc_RNA (1)...(19): siRNA sense strand
uagacauggcugaaagaga

SEQ ID NO: 2248522 - RNA, 19 nt, Homo sapiens
  misc_RNA (1)...(19): siRNA sense strand
agacuaagaacaucaauca

SEQ ID NO: 2248523 - RNA, 19 nt, Homo sapiens
  misc_RNA (1)...(19): siRNA sense strand
aagaaguagaguaccgaau

SEQ ID NO: 2248524 - RNA, 19 nt, Homo sapiens
  misc_RNA (1)...(19): siRNA sense strand
ugcaauggaucgaaguuau

SEQ ID NO: 2248525 - RNA, 19 nt, Homo sapiens
  misc_RNA (1)...(19): siRNA sense strand
cugauuuacugcagcacau

SEQ ID NO: 2248526 - RNA, 19 nt, Homo sapiens
  misc_RNA (1)...(19): siRNA sense strand
gccuuaagaucucggcgua

SEQ ID NO: 2248527 - RNA, 19 nt, Homo sapiens
  misc_RNA (1)...(19): siRNA sense strand
gaaauggugaaacggcaaa

SEQ ID NO: 2248528 - RNA, 19 nt, Homo sapiens
  misc_RNA (1)...(19): siRNA sense strand
gcaaaauguugucgauguu

SEQ ID NO: 2248529 - RNA, 19 nt, Homo sapiens
  misc_RNA (1)...(19): siRNA sense strand
acaaguggcaagaggaaua

SEQ ID NO: 2248530 - RNA, 19 nt, Homo sapiens
  misc_RNA (1)...(19): siRNA sense strand
ggacauggccgaaagggaa

SEQ ID NO: 2248531 - RNA, 19 nt, Homo sapiens
  misc_RNA (1)...(19): siRNA sense strand
caauagaaggagacacaaa

SEQ ID NO: 2248532 - RNA, 19 nt, Homo sapiens
  misc_RNA (1)...(19): siRNA sense strand
gaauauaucuggagaccca

SEQ ID NO: 2248533 - RNA, 19 nt, Homo sapiens
  misc_RNA (1)...(19): siRNA sense strand
uagaaguaguggaggucaa

SEQ ID NO: 2248534 - RNA, 19 nt, Homo sapiens
  misc_RNA (1)...(19): siRNA sense strand
gugaagacacugaggaaca

SEQ ID NO: 2248535 - RNA, 19 nt, Homo sapiens
  misc_RNA (1)...(19): siRNA sense strand
agaacaagugcgagaagaa

SEQ ID NO: 2248536 - RNA, 19 nt, Homo sapiens
  misc_RNA (1)...(19): siRNA sense strand
acucaauggacaagagcua

SEQ ID NO: 2248537 - RNA, 19 nt, Homo sapiens
  misc_RNA (1)...(19): siRNA sense strand
augcagaguugguaguuaa

SEQ ID NO: 2248538 - RNA, 19 nt, Homo sapiens
  misc_RNA (1)...(19): siRNA sense strand
cagaaaucuuaaagugcua

SEQ ID NO: 2248539 - RNA, 19 nt, Homo sapiens
  misc_RNA (1)...(19): siRNA sense strand
aaacagaacuacuggcaga

SEQ ID NO: 2248540 - RNA, 19 nt, Homo sapiens
  misc_RNA (1)...(19): siRNA sense strand
aaauaguuguugaggaaga

SEQ ID NO: 2248541 - RNA, 19 nt, Homo sapiens
  misc_RNA (1)...(19): siRNA sense strand
ggauacagcucaacgccaa

SEQ ID NO: 2248542 - RNA, 19 nt, Homo sapiens
  misc_RNA (1)...(19): siRNA sense strand
gccaagaagcggaaagaga

SEQ ID NO: 2248543 - RNA, 19 nt, Homo sapiens
  misc_RNA (1)...(19): siRNA sense strand
ggugaaugccucugggaga

SEQ ID NO: 2248544 - RNA, 19 nt, Homo sapiens
  misc_RNA (1)...(19): siRNA sense strand
agugauaacuucuggacau

SEQ ID NO: 2248545 - RNA, 19 nt, Homo sapiens
  misc_RNA (1)...(19): siRNA sense strand
cggcuaagaaagaugagaa

SEQ ID NO: 2248546 - RNA, 19 nt, Homo sapiens
  misc_RNA (1)...(19): siRNA sense strand
gcaugaaauccgagagauc

SEQ ID NO: 2248547 - RNA, 19 nt, Homo sapiens
  misc_RNA (1)...(19): siRNA sense strand
gggaauccuaucuggaaua

SEQ ID NO: 2248548 - RNA, 19 nt, Homo sapiens
  misc_RNA (1)...(19): siRNA sense strand
caccaaugucagugugaaa

SEQ ID NO: 2248549 - RNA, 19 nt, Homo sapiens
  misc_RNA (1)...(19): siRNA sense strand
cagacaaacucaagccaga

SEQ ID NO: 2248550 - RNA, 19 nt, Homo sapiens
  misc_RNA (1)...(19): siRNA sense strand
agaaagaugagaacagaau

SEQ ID NO: 2248551 - RNA, 19 nt, Homo sapiens
  misc_RNA (1)...(19): siRNA sense strand
acaaauacacugagcacau

SEQ ID NO: 2248552 - RNA, 19 nt, Homo sapiens
  misc_RNA (1)...(19): siRNA sense strand
gacaauagaaggagacaca

SEQ ID NO: 2248553 - RNA, 19 nt, Homo sapiens
  misc_RNA (1)...(19): siRNA sense strand
aggugaagguguuaggaca

SEQ ID NO: 2248554 - RNA, 19 nt, Homo sapiens
  misc_RNA (1)...(19): siRNA sense strand
gacaagaacaagugcgaga

SEQ ID NO: 2248555 - RNA, 19 nt, Homo sapiens
  misc_RNA (1)...(19): siRNA sense strand
cagacagaccauacaguua

SEQ ID NO: 2248556 - RNA, 19 nt, Homo sapiens
  misc_RNA (1)...(19): siRNA sense strand
gccagaugacacagagaua

SEQ ID NO: 2248557 - RNA, 19 nt, Homo sapiens
  misc_RNA (1)...(19): siRNA sense strand
aguuggaggacaagaacaa

SEQ ID NO: 2248558 - RNA, 19 nt, Homo sapiens
  misc_RNA (1)...(19): siRNA sense strand
aaucagaguggaagaguuu

SEQ ID NO: 2248559 - RNA, 19 nt, Homo sapiens
  misc_RNA (1)...(19): siRNA sense strand
acagaaugaagaacagaua

SEQ ID NO: 2248560 - RNA, 19 nt, Homo sapiens
  misc_RNA (1)...(19): siRNA sense strand
gcucucaggacaagaacaa

SEQ ID NO: 2248561 - RNA, 19 nt, Homo sapiens
  misc_RNA (1)...(19): siRNA sense strand
gcacaaucugaaugggaga

SEQ ID NO: 2248562 - RNA, 19 nt, Homo sapiens
  misc_RNA (1)...(19): siRNA sense strand
acucaaacauaugguguaa

SEQ ID NO: 2248563 - RNA, 19 nt, Homo sapiens
  misc_RNA (1)...(19): siRNA sense strand
gcagaauaugugauaagaa

SEQ ID NO: 2248564 - RNA, 19 nt, Homo sapiens
  misc_RNA (1)...(19): siRNA sense strand
aagccagauuaaagaggaa

SEQ ID NO: 2248565 - RNA, 19 nt, Homo sapiens
  misc_RNA (1)...(19): siRNA sense strand
cugugaagacacugaggaa

SEQ ID NO: 2248566 - RNA, 19 nt, Homo sapiens
  misc_RNA (1)...(19): siRNA sense strand
guauagcacauguggauau

SEQ ID NO: 2248567 - RNA, 19 nt, Homo sapiens
  misc_RNA (1)...(19): siRNA sense strand
ucccagaacccgagaaaca

SEQ ID NO: 2248568 - RNA, 19 nt, Homo sapiens
  misc_RNA (1)...(19): siRNA sense strand
aguuaaugcuggccaguuu

SEQ ID NO: 2248569 - RNA, 19 nt, Homo sapiens
  misc_RNA (1)...(19): siRNA sense strand
caaaauagacuguguccaa

SEQ ID NO: 2248570 - RNA, 19 nt, Homo sapiens
  misc_RNA (1)...(19): siRNA sense strand
gguaaugaagaaaaggaaa

SEQ ID NO: 2248571 - RNA, 19 nt, Homo sapiens
  misc_RNA (1)...(19): siRNA sense strand
ggaaagagaccaugagcag

SEQ ID NO: 2248572 - RNA, 19 nt, Homo sapiens
  misc_RNA (1)...(19): siRNA sense strand
ugaagugugcggagggcua

SEQ ID NO: 2248573 - RNA, 19 nt, Homo sapiens
  misc_RNA (1)...(19): siRNA sense strand
aggaggaauacgagagcuu

SEQ ID NO: 2248574 - RNA, 19 nt, Homo sapiens
  misc_RNA (1)...(19): siRNA sense strand
acgagguggcccuggaaua

SEQ ID NO: 2248575 - RNA, 19 nt, Homo sapiens
  misc_RNA (1)...(19): siRNA sense strand
ccguauagcacauguggau

SEQ ID NO: 2248576 - RNA, 19 nt, Homo sapiens
  misc_RNA (1)...(19): siRNA sense strand
ccuuugaagagaagauauu

SEQ ID NO: 2248577 - RNA, 19 nt, Homo sapiens
  misc_RNA (1)...(19): siRNA sense strand
ccaaacgagaugcuggaaa

SEQ ID NO: 2248578 - RNA, 19 nt, Homo sapiens
  misc_RNA (1)...(19): siRNA sense strand
cagaguugguaguuaaaga

SEQ ID NO: 2248579 - RNA, 19 nt, Homo sapiens
  misc_RNA (1)...(19): siRNA sense strand
acacaaacucagacuauau

SEQ ID NO: 2248580 - RNA, 19 nt, Homo sapiens
  misc_RNA (1)...(19): siRNA sense strand
cagacuauaucaauggcaa

SEQ ID NO: 2248581 - RNA, 19 nt, Homo sapiens
  misc_RNA (1)...(19): siRNA sense strand
ggugaagguguuaggacau

SEQ ID NO: 2248582 - RNA, 19 nt, Homo sapiens
  misc_RNA (1)...(19): siRNA sense strand
cauccguaguuaugcuaaa

SEQ ID NO: 2248583 - RNA, 19 nt, Homo sapiens
  misc_RNA (1)...(19): siRNA sense strand
aagugaacaccuugacuaa

SEQ ID NO: 2248584 - RNA, 19 nt, Homo sapiens
  misc_RNA (1)...(19): siRNA sense strand
caucaaggcuaucucgcua

SEQ ID NO: 2248585 - RNA, 19 nt, Homo sapiens
  misc_RNA (1)...(19): siRNA sense strand
agacacaaacucagacuau

SEQ ID NO: 2248586 - RNA, 19 nt, Homo sapiens
  misc_RNA (1)...(19): siRNA sense strand
ccucauggacagcuauaaa

SEQ ID NO: 2248587 - RNA, 19 nt, Homo sapiens
  misc_RNA (1)...(19): siRNA sense strand
ugccaaacacagugaaaga

SEQ ID NO: 2248588 - RNA, 19 nt, Homo sapiens
  misc_RNA (1)...(19): siRNA sense strand
gggaaggggucguagacau

SEQ ID NO: 2248589 - RNA, 19 nt, Homo sapiens
  misc_RNA (1)...(19): siRNA sense strand
caaucagaguggaagaguu

SEQ ID NO: 2248590 - RNA, 19 nt, Homo sapiens
  misc_RNA (1)...(19): siRNA sense strand
ugucagugucuaucaaaua

SEQ ID NO: 2248591 - RNA, 19 nt, Homo sapiens
  misc_RNA (1)...(19): siRNA sense strand
gaagaacagauacgggaau

SEQ ID NO: 2248592 - RNA, 19 nt, Homo sapiens
  misc_RNA (1)...(19): siRNA sense strand
ccgagagaucagacaguuu

SEQ ID NO: 2248593 - RNA, 19 nt, Homo sapiens
  misc_RNA (1)...(19): siRNA sense strand
gggacucggcuaagaaaga

SEQ ID NO: 2248594 - RNA, 19 nt, Homo sapiens
  misc_RNA (1)...(19): siRNA sense strand
aaagaugagaacagaauga

SEQ ID NO: 2248595 - RNA, 19 nt, Homo sapiens
  misc_RNA (1)...(19): siRNA sense strand
gggugaacauggugcaaac

SEQ ID NO: 2248596 - RNA, 19 nt, Homo sapiens
  misc_RNA (1)...(19): siRNA sense strand
ugaacaaacuggauccaca

SEQ ID NO: 2248597 - RNA, 19 nt, Homo sapiens
  misc_RNA (1)...(19): siRNA sense strand
cgagugaggcugcagacaa

SEQ ID NO: 2248598 - RNA, 19 nt, Homo sapiens
  misc_RNA (1)...(19): siRNA sense strand
uggccgauguacagggaca

SEQ ID NO: 2248599 - RNA, 19 nt, Homo sapiens
  misc_RNA (1)...(19): siRNA sense strand
cugaaggagguguuggaau

SEQ ID NO: 2248600 - RNA, 19 nt, Homo sapiens
  misc_RNA (1)...(19): siRNA sense strand
gggaggagaacgugcccaa

SEQ ID NO: 2248601 - RNA, 19 nt, Homo sapiens
  misc_RNA (1)...(19): siRNA sense strand
uggcagauggugugggaga

SEQ ID NO: 2248602 - RNA, 19 nt, Homo sapiens
  misc_RNA (1)...(19): siRNA sense strand
uggagaacgucaagagcca

SEQ ID NO: 2248603 - RNA, 19 nt, Homo sapiens
  misc_RNA (1)...(19): siRNA sense strand
ccagaugagcucagcccua

SEQ ID NO: 2248604 - RNA, 19 nt, Homo sapiens
  misc_RNA (1)...(19): siRNA sense strand
agcacaggcugaaggagaa

SEQ ID NO: 2248605 - RNA, 19 nt, Homo sapiens
  misc_RNA (1)...(19): siRNA sense strand
ugaaggaccugcagaggca

SEQ ID NO: 2248606 - RNA, 19 nt, Homo sapiens
  misc_RNA (1)...(19): siRNA sense strand
ccggcaugguccagacgaa

SEQ ID NO: 2248607 - RNA, 19 nt, Homo sapiens
  misc_RNA (1)...(19): siRNA sense strand
ccaaagaucugcuggggca

SEQ ID NO: 2248608 - RNA, 19 nt, Homo sapiens
  misc_RNA (1)...(19): siRNA sense strand
cuucaaagugagcgccaau

SEQ ID NO: 2248609 - RNA, 19 nt, Homo sapiens
  misc_RNA (1)...(19): siRNA sense strand
cgaaggaggagcagagccu

SEQ ID NO: 2248610 - RNA, 19 nt, Homo sapiens
  misc_RNA (1)...(19): siRNA sense strand
cgccauagcucucagcaca

SEQ ID NO: 2248611 - RNA, 19 nt, Homo sapiens
  misc_RNA (1)...(19): siRNA sense strand
ucgacaugguucucaacaa

SEQ ID NO: 2248612 - RNA, 19 nt, Homo sapiens
  misc_RNA (1)...(19): siRNA sense strand
gcagaagcuuuccggcaca

SEQ ID NO: 2248613 - RNA, 19 nt, Homo sapiens
  misc_RNA (1)...(19): siRNA sense strand
aggcguggaccauggagua

SEQ ID NO: 2248614 - RNA, 19 nt, Homo sapiens
  misc_RNA (1)...(19): siRNA sense strand
acaaagacaaacuggagga

SEQ ID NO: 2248615 - RNA, 19 nt, Homo sapiens
  misc_RNA (1)...(19): siRNA sense strand
cgaugauagacuuuaccaa

SEQ ID NO: 2248616 - RNA, 19 nt, Homo sapiens
  misc_RNA (1)...(19): siRNA sense strand
cugaagaaccugcagacca

SEQ ID NO: 2248617 - RNA, 19 nt, Homo sapiens
  misc_RNA (1)...(19): siRNA sense strand
aaaguaaacaagugcuaca

SEQ ID NO: 2248618 - RNA, 19 nt, Homo sapiens
  misc_RNA (1)...(19): siRNA sense strand
ggaccauggaguagcucga

SEQ ID NO: 2248619 - RNA, 19 nt, Homo sapiens
  misc_RNA (1)...(19): siRNA sense strand
ggaaggugccagaagguuc

SEQ ID NO: 2248620 - RNA, 19 nt, Homo sapiens
  misc_RNA (1)...(19): siRNA sense strand
aggcgauggagcacggauu

SEQ ID NO: 2248621 - RNA, 19 nt, Homo sapiens
  misc_RNA (1)...(19): siRNA sense strand
cuggagaaggagugggaag

SEQ ID NO: 2248622 - RNA, 19 nt, Homo sapiens
  misc_RNA (1)...(19): siRNA sense strand
gggaggagaacgugcccaa

SEQ ID NO: 2248623 - RNA, 19 nt, Homo sapiens
  misc_RNA (1)...(19): siRNA sense strand
uggcagauggugugggaga

SEQ ID NO: 2248624 - RNA, 19 nt, Homo sapiens
  misc_RNA (1)...(19): siRNA sense strand
uggagaacgucaagagcca

SEQ ID NO: 2248625 - RNA, 19 nt, Homo sapiens
  misc_RNA (1)...(19): siRNA sense strand
ccagaugagcucagcccua

SEQ ID NO: 2248626 - RNA, 19 nt, Homo sapiens
  misc_RNA (1)...(19): siRNA sense strand
agcacaggcugaaggagaa

SEQ ID NO: 2248627 - RNA, 19 nt, Homo sapiens
  misc_RNA (1)...(19): siRNA sense strand
ugaaggaccugcagaggca

SEQ ID NO: 2248628 - RNA, 19 nt, Homo sapiens
  misc_RNA (1)...(19): siRNA sense strand
ccggcaugguccagacgaa

SEQ ID NO: 2248629 - RNA, 19 nt, Homo sapiens
  misc_RNA (1)...(19): siRNA sense strand
ccaaagaucugcuggggca

SEQ ID NO: 2248630 - RNA, 19 nt, Homo sapiens
  misc_RNA (1)...(19): siRNA sense strand
cuucaaagugagcgccaau

SEQ ID NO: 2248631 - RNA, 19 nt, Homo sapiens
  misc_RNA (1)...(19): siRNA sense strand
cgaaggaggagcagagccu

SEQ ID NO: 2248632 - RNA, 19 nt, Homo sapiens
  misc_RNA (1)...(19): siRNA sense strand
cgccauagcucucagcaca

SEQ ID NO: 2248633 - RNA, 19 nt, Homo sapiens
  misc_RNA (1)...(19): siRNA sense strand
ucgacaugguucucaacaa

SEQ ID NO: 2248634 - RNA, 19 nt, Homo sapiens
  misc_RNA (1)...(19): siRNA sense strand
gcagaagcuuuccggcaca

SEQ ID NO: 2248635 - RNA, 19 nt, Homo sapiens
  misc_RNA (1)...(19): siRNA sense strand
aggcguggaccauggagua

SEQ ID NO: 2248636 - RNA, 19 nt, Homo sapiens
  misc_RNA (1)...(19): siRNA sense strand
acaaagacaaacuggagga

SEQ ID NO: 2248637 - RNA, 19 nt, Homo sapiens
  misc_RNA (1)...(19): siRNA sense strand
cgaugauagacuuuaccaa

SEQ ID NO: 2248638 - RNA, 19 nt, Homo sapiens
  misc_RNA (1)...(19): siRNA sense strand
cugaagaaccugcagacca

SEQ ID NO: 2248639 - RNA, 19 nt, Homo sapiens
  misc_RNA (1)...(19): siRNA sense strand
aaaguaaacaagugcuaca

SEQ ID NO: 2248640 - RNA, 19 nt, Homo sapiens
  misc_RNA (1)...(19): siRNA sense strand
ggaccauggaguagcucga

SEQ ID NO: 2248641 - RNA, 19 nt, Homo sapiens
  misc_RNA (1)...(19): siRNA sense strand
ggaaggugccagaagguuc

SEQ ID NO: 2248642 - RNA, 19 nt, Homo sapiens
  misc_RNA (1)...(19): siRNA sense strand
aggcgauggagcacggauu

SEQ ID NO: 2248643 - RNA, 19 nt, Homo sapiens
  misc_RNA (1)...(19): siRNA sense strand
cuggagaaggagugggaag

SEQ ID NO: 2248644 - RNA, 19 nt, Homo sapiens
  misc_RNA (1)...(19): siRNA sense strand
gggaggagaacgugcccaa

SEQ ID NO: 2248645 - RNA, 19 nt, Homo sapiens
  misc_RNA (1)...(19): siRNA sense strand
uggcagauggugugggaga

SEQ ID NO: 2248646 - RNA, 19 nt, Homo sapiens
  misc_RNA (1)...(19): siRNA sense strand
uggagaacgucaagagcca

SEQ ID NO: 2248647 - RNA, 19 nt, Homo sapiens
  misc_RNA (1)...(19): siRNA sense strand
ccagaugagcucagcccua

SEQ ID NO: 2248648 - RNA, 19 nt, Homo sapiens
  misc_RNA (1)...(19): siRNA sense strand
agcacaggcugaaggagaa

SEQ ID NO: 2248649 - RNA, 19 nt, Homo sapiens
  misc_RNA (1)...(19): siRNA sense strand
ugaaggaccugcagaggca

SEQ ID NO: 2248650 - RNA, 19 nt, Homo sapiens
  misc_RNA (1)...(19): siRNA sense strand
ccggcaugguccagacgaa

SEQ ID NO: 2248651 - RNA, 19 nt, Homo sapiens
  misc_RNA (1)...(19): siRNA sense strand
ccaaagaucugcuggggca

SEQ ID NO: 2248652 - RNA, 19 nt, Homo sapiens
  misc_RNA (1)...(19): siRNA sense strand
cuucaaagugagcgccaau

SEQ ID NO: 2248653 - RNA, 19 nt, Homo sapiens
  misc_RNA (1)...(19): siRNA sense strand
cgaaggaggagcagagccu

SEQ ID NO: 2248654 - RNA, 19 nt, Homo sapiens
  misc_RNA (1)...(19): siRNA sense strand
cgccauagcucucagcaca

SEQ ID NO: 2248655 - RNA, 19 nt, Homo sapiens
  misc_RNA (1)...(19): siRNA sense strand
ucgacaugguucucaacaa

SEQ ID NO: 2248656 - RNA, 19 nt, Homo sapiens
  misc_RNA (1)...(19): siRNA sense strand
gcagaagcuuuccggcaca

SEQ ID NO: 2248657 - RNA, 19 nt, Homo sapiens
  misc_RNA (1)...(19): siRNA sense strand
aggcguggaccauggagua

SEQ ID NO: 2248658 - RNA, 19 nt, Homo sapiens
  misc_RNA (1)...(19): siRNA sense strand
acaaagacaaacuggagga

SEQ ID NO: 2248659 - RNA, 19 nt, Homo sapiens
  misc_RNA (1)...(19): siRNA sense strand
cgaugauagacuuuaccaa

SEQ ID NO: 2248660 - RNA, 19 nt, Homo sapiens
  misc_RNA (1)...(19): siRNA sense strand
cugaagaaccugcagacca

SEQ ID NO: 2248661 - RNA, 19 nt, Homo sapiens
  misc_RNA (1)...(19): siRNA sense strand
aaaguaaacaagugcuaca

SEQ ID NO: 2248662 - RNA, 19 nt, Homo sapiens
  misc_RNA (1)...(19): siRNA sense strand
ggaccauggaguagcucga

SEQ ID NO: 2248663 - RNA, 19 nt, Homo sapiens
  misc_RNA (1)...(19): siRNA sense strand
ggaaggugccagaagguuc

SEQ ID NO: 2248664 - RNA, 19 nt, Homo sapiens
  misc_RNA (1)...(19): siRNA sense strand
aggcgauggagcacggauu

SEQ ID NO: 2248665 - RNA, 19 nt, Homo sapiens
  misc_RNA (1)...(19): siRNA sense strand
cuggagaaggagugggaag

SEQ ID NO: 2248666 - RNA, 19 nt, Homo sapiens
  misc_RNA (1)...(19): siRNA sense strand
ccuuagagagggauggaaa

SEQ ID NO: 2248667 - RNA, 19 nt, Homo sapiens
  misc_RNA (1)...(19): siRNA sense strand
cggaagaaccuauagccua

SEQ ID NO: 2248668 - RNA, 19 nt, Homo sapiens
  misc_RNA (1)...(19): siRNA sense strand
acacaugguccgacagcaa

SEQ ID NO: 2248669 - RNA, 19 nt, Homo sapiens
  misc_RNA (1)...(19): siRNA sense strand
aguuugaggaguugaaauu

SEQ ID NO: 2248670 - RNA, 19 nt, Homo sapiens
  misc_RNA (1)...(19): siRNA sense strand
ggaugaagaagaagcagca

SEQ ID NO: 2248671 - RNA, 19 nt, Homo sapiens
  misc_RNA (1)...(19): siRNA sense strand
cagaggaagagcaggacga

SEQ ID NO: 2248672 - RNA, 19 nt, Homo sapiens
  misc_RNA (1)...(19): siRNA sense strand
agaugauuucagaggaaga

SEQ ID NO: 2248673 - RNA, 19 nt, Homo sapiens
  misc_RNA (1)...(19): siRNA sense strand
aagaagaggaaacugacaa

SEQ ID NO: 2248674 - RNA, 19 nt, Homo sapiens
  misc_RNA (1)...(19): siRNA sense strand
cugcagauggcuagggagu

SEQ ID NO: 2248675 - RNA, 19 nt, Homo sapiens
  misc_RNA (1)...(19): siRNA sense strand
uuacagagaugaaucccaa

SEQ ID NO: 2248676 - RNA, 19 nt, Homo sapiens
  misc_RNA (1)...(19): siRNA sense strand
cagacuacaucaaugccaa

SEQ ID NO: 2248677 - RNA, 19 nt, Homo sapiens
  misc_RNA (1)...(19): siRNA sense strand
uggaagagggaguagcuga

SEQ ID NO: 2248678 - RNA, 19 nt, Homo sapiens
  misc_RNA (1)...(19): siRNA sense strand
cgguucaacuggaugacuu

SEQ ID NO: 2248679 - RNA, 19 nt, Homo sapiens
  misc_RNA (1)...(19): siRNA sense strand
uggaugacuuugaugccua

SEQ ID NO: 2248680 - RNA, 19 nt, Homo sapiens
  misc_RNA (1)...(19): siRNA sense strand
gagaaaaggagggugaaau

SEQ ID NO: 2248681 - RNA, 19 nt, Homo sapiens
  misc_RNA (1)...(19): siRNA sense strand
gagacaucacuguggagau

SEQ ID NO: 2248682 - RNA, 19 nt, Homo sapiens
  misc_RNA (1)...(19): siRNA sense strand
uuucagaggaagagcagga

SEQ ID NO: 2248683 - RNA, 19 nt, Homo sapiens
  misc_RNA (1)...(19): siRNA sense strand
cugauguggaugaagaaga

SEQ ID NO: 2248684 - RNA, 19 nt, Homo sapiens
  misc_RNA (1)...(19): siRNA sense strand
caaugguuacagagaugaa

SEQ ID NO: 2248685 - RNA, 19 nt, Homo sapiens
  misc_RNA (1)...(19): siRNA sense strand
gaaugaagaggaaggugca

SEQ ID NO: 2248686 - RNA, 19 nt, Homo sapiens
  misc_RNA (1)...(19): siRNA sense strand
uauuaaggauauggccaaa

SEQ ID NO: 2248687 - RNA, 19 nt, Homo sapiens
  misc_RNA (1)...(19): siRNA sense strand
ugguacagacagaggagca

SEQ ID NO: 2248688 - RNA, 19 nt, Homo sapiens
  misc_RNA (1)...(19): siRNA sense strand
uauacgagaauguuagcaa

SEQ ID NO: 2248689 - RNA, 19 nt, Homo sapiens
  misc_RNA (1)...(19): siRNA sense strand
aaugagaaaaggaggguga

SEQ ID NO: 2248690 - RNA, 19 nt, Homo sapiens
  misc_RNA (1)...(19): siRNA sense strand
ucaacaaugguuacagaga

SEQ ID NO: 2248691 - RNA, 19 nt, Homo sapiens
  misc_RNA (1)...(19): siRNA sense strand
ccuuagagagggauggaaa

SEQ ID NO: 2248692 - RNA, 19 nt, Homo sapiens
  misc_RNA (1)...(19): siRNA sense strand
cggaagaaccuauagccua

SEQ ID NO: 2248693 - RNA, 19 nt, Homo sapiens
  misc_RNA (1)...(19): siRNA sense strand
acacaugguccgacagcaa

SEQ ID NO: 2248694 - RNA, 19 nt, Homo sapiens
  misc_RNA (1)...(19): siRNA sense strand
aguuugaggaguugaaauu

SEQ ID NO: 2248695 - RNA, 19 nt, Homo sapiens
  misc_RNA (1)...(19): siRNA sense strand
ggaugaagaagaagcagca

SEQ ID NO: 2248696 - RNA, 19 nt, Homo sapiens
  misc_RNA (1)...(19): siRNA sense strand
cagaggaagagcaggacga

SEQ ID NO: 2248697 - RNA, 19 nt, Homo sapiens
  misc_RNA (1)...(19): siRNA sense strand
agaugauuucagaggaaga

SEQ ID NO: 2248698 - RNA, 19 nt, Homo sapiens
  misc_RNA (1)...(19): siRNA sense strand
aagaagaggaaacugacaa

SEQ ID NO: 2248699 - RNA, 19 nt, Homo sapiens
  misc_RNA (1)...(19): siRNA sense strand
cugcagauggcuagggagu

SEQ ID NO: 2248700 - RNA, 19 nt, Homo sapiens
  misc_RNA (1)...(19): siRNA sense strand
uuacagagaugaaucccaa

SEQ ID NO: 2248701 - RNA, 19 nt, Homo sapiens
  misc_RNA (1)...(19): siRNA sense strand
cagacuacaucaaugccaa

SEQ ID NO: 2248702 - RNA, 19 nt, Homo sapiens
  misc_RNA (1)...(19): siRNA sense strand
uggaagagggaguagcuga

SEQ ID NO: 2248703 - RNA, 19 nt, Homo sapiens
  misc_RNA (1)...(19): siRNA sense strand
cgguucaacuggaugacuu

SEQ ID NO: 2248704 - RNA, 19 nt, Homo sapiens
  misc_RNA (1)...(19): siRNA sense strand
uggaugacuuugaugccua

SEQ ID NO: 2248705 - RNA, 19 nt, Homo sapiens
  misc_RNA (1)...(19): siRNA sense strand
gagaaaaggagggugaaau

SEQ ID NO: 2248706 - RNA, 19 nt, Homo sapiens
  misc_RNA (1)...(19): siRNA sense strand
gagacaucacuguggagau

SEQ ID NO: 2248707 - RNA, 19 nt, Homo sapiens
  misc_RNA (1)...(19): siRNA sense strand
uuucagaggaagagcagga

SEQ ID NO: 2248708 - RNA, 19 nt, Homo sapiens
  misc_RNA (1)...(19): siRNA sense strand
cugauguggaugaagaaga

SEQ ID NO: 2248709 - RNA, 19 nt, Homo sapiens
  misc_RNA (1)...(19): siRNA sense strand
caaugguuacagagaugaa

SEQ ID NO: 2248710 - RNA, 19 nt, Homo sapiens
  misc_RNA (1)...(19): siRNA sense strand
gaaugaagaggaaggugca

SEQ ID NO: 2248711 - RNA, 19 nt, Homo sapiens
  misc_RNA (1)...(19): siRNA sense strand
uauuaaggauauggccaaa

SEQ ID NO: 2248712 - RNA, 19 nt, Homo sapiens
  misc_RNA (1)...(19): siRNA sense strand
ugguacagacagaggagca

SEQ ID NO: 2248713 - RNA, 19 nt, Homo sapiens
  misc_RNA (1)...(19): siRNA sense strand
uauacgagaauguuagcaa

SEQ ID NO: 2248714 - RNA, 19 nt, Homo sapiens
  misc_RNA (1)...(19): siRNA sense strand
aaugagaaaaggaggguga

SEQ ID NO: 2248715 - RNA, 19 nt, Homo sapiens
  misc_RNA (1)...(19): siRNA sense strand
ucaacaaugguuacagaga

SEQ ID NO: 2248716 - RNA, 19 nt, Homo sapiens
  misc_RNA (1)...(19): siRNA sense strand
ccuuagagagggauggaaa

SEQ ID NO: 2248717 - RNA, 19 nt, Homo sapiens
  misc_RNA (1)...(19): siRNA sense strand
cggaagaaccuauagccua

SEQ ID NO: 2248718 - RNA, 19 nt, Homo sapiens
  misc_RNA (1)...(19): siRNA sense strand
acacaugguccgacagcaa

SEQ ID NO: 2248719 - RNA, 19 nt, Homo sapiens
  misc_RNA (1)...(19): siRNA sense strand
aguuugaggaguugaaauu

SEQ ID NO: 2248720 - RNA, 19 nt, Homo sapiens
  misc_RNA (1)...(19): siRNA sense strand
ggaugaagaagaagcagca

SEQ ID NO: 2248721 - RNA, 19 nt, Homo sapiens
  misc_RNA (1)...(19): siRNA sense strand
cagaggaagagcaggacga

SEQ ID NO: 2248722 - RNA, 19 nt, Homo sapiens
  misc_RNA (1)...(19): siRNA sense strand
agaugauuucagaggaaga

SEQ ID NO: 2248723 - RNA, 19 nt, Homo sapiens
  misc_RNA (1)...(19): siRNA sense strand
aagaagaggaaacugacaa

SEQ ID NO: 2248724 - RNA, 19 nt, Homo sapiens
  misc_RNA (1)...(19): siRNA sense strand
cugcagauggcuagggagu

SEQ ID NO: 2248725 - RNA, 19 nt, Homo sapiens
  misc_RNA (1)...(19): siRNA sense strand
uuacagagaugaaucccaa

SEQ ID NO: 2248726 - RNA, 19 nt, Homo sapiens
  misc_RNA (1)...(19): siRNA sense strand
cagacuacaucaaugccaa

SEQ ID NO: 2248727 - RNA, 19 nt, Homo sapiens
  misc_RNA (1)...(19): siRNA sense strand
cgguucaacuggaugacuu

SEQ ID NO: 2248728 - RNA, 19 nt, Homo sapiens
  misc_RNA (1)...(19): siRNA sense strand
uggaugacuuugaugccua

SEQ ID NO: 2248729 - RNA, 19 nt, Homo sapiens
  misc_RNA (1)...(19): siRNA sense strand
gagaaaaggagggugaaau

SEQ ID NO: 2248730 - RNA, 19 nt, Homo sapiens
  misc_RNA (1)...(19): siRNA sense strand
gagacaucacuguggagau

SEQ ID NO: 2248731 - RNA, 19 nt, Homo sapiens
  misc_RNA (1)...(19): siRNA sense strand
uuucagaggaagagcagga

SEQ ID NO: 2248732 - RNA, 19 nt, Homo sapiens
  misc_RNA (1)...(19): siRNA sense strand
cugauguggaugaagaaga

SEQ ID NO: 2248733 - RNA, 19 nt, Homo sapiens
  misc_RNA (1)...(19): siRNA sense strand
gaaugaagaggaaggugca

SEQ ID NO: 2248734 - RNA, 19 nt, Homo sapiens
  misc_RNA (1)...(19): siRNA sense strand
uauuaaggauauggccaaa

SEQ ID NO: 2248735 - RNA, 19 nt, Homo sapiens
  misc_RNA (1)...(19): siRNA sense strand
ugguacagacagaggagca

SEQ ID NO: 2248736 - RNA, 19 nt, Homo sapiens
  misc_RNA (1)...(19): siRNA sense strand
uauacgagaauguuagcaa

SEQ ID NO: 2248737 - RNA, 19 nt, Homo sapiens
  misc_RNA (1)...(19): siRNA sense strand
aaugagaaaaggaggguga

SEQ ID NO: 2248738 - RNA, 19 nt, Homo sapiens
  misc_RNA (1)...(19): siRNA sense strand
ccuuagagagggauggaaa

SEQ ID NO: 2248739 - RNA, 19 nt, Homo sapiens
  misc_RNA (1)...(19): siRNA sense strand
cggaagaaccuauagccua

SEQ ID NO: 2248740 - RNA, 19 nt, Homo sapiens
  misc_RNA (1)...(19): siRNA sense strand
acacaugguccgacagcaa

SEQ ID NO: 2248741 - RNA, 19 nt, Homo sapiens
  misc_RNA (1)...(19): siRNA sense strand
aguuugaggaguugaaauu

SEQ ID NO: 2248742 - RNA, 19 nt, Homo sapiens
  misc_RNA (1)...(19): siRNA sense strand
ggaugaagaagaagcagca

SEQ ID NO: 2248743 - RNA, 19 nt, Homo sapiens
  misc_RNA (1)...(19): siRNA sense strand
cagaggaagagcaggacga

SEQ ID NO: 2248744 - RNA, 19 nt, Homo sapiens
  misc_RNA (1)...(19): siRNA sense strand
agaugauuucagaggaaga

SEQ ID NO: 2248745 - RNA, 19 nt, Homo sapiens
  misc_RNA (1)...(19): siRNA sense strand
aagaagaggaaacugacaa

SEQ ID NO: 2248746 - RNA, 19 nt, Homo sapiens
  misc_RNA (1)...(19): siRNA sense strand
cugcagauggcuagggagu

SEQ ID NO: 2248747 - RNA, 19 nt, Homo sapiens
  misc_RNA (1)...(19): siRNA sense strand
uuacagagaugaaucccaa

SEQ ID NO: 2248748 - RNA, 19 nt, Homo sapiens
  misc_RNA (1)...(19): siRNA sense strand
cagacuacaucaaugccaa

SEQ ID NO: 2248749 - RNA, 19 nt, Homo sapiens
  misc_RNA (1)...(19): siRNA sense strand
cgguucaacuggaugacuu

SEQ ID NO: 2248750 - RNA, 19 nt, Homo sapiens
  misc_RNA (1)...(19): siRNA sense strand
uggaugacuuugaugccua

SEQ ID NO: 2248751 - RNA, 19 nt, Homo sapiens
  misc_RNA (1)...(19): siRNA sense strand
gagaaaaggagggugaaau

SEQ ID NO: 2248752 - RNA, 19 nt, Homo sapiens
  misc_RNA (1)...(19): siRNA sense strand
gagacaucacuguggagau

SEQ ID NO: 2248753 - RNA, 19 nt, Homo sapiens
  misc_RNA (1)...(19): siRNA sense strand
uuucagaggaagagcagga

SEQ ID NO: 2248754 - RNA, 19 nt, Homo sapiens
  misc_RNA (1)...(19): siRNA sense strand
cugauguggaugaagaaga

SEQ ID NO: 2248755 - RNA, 19 nt, Homo sapiens
  misc_RNA (1)...(19): siRNA sense strand
gaaugaagaggaaggugca

SEQ ID NO: 2248756 - RNA, 19 nt, Homo sapiens
  misc_RNA (1)...(19): siRNA sense strand
uauuaaggauauggccaaa

SEQ ID NO: 2248757 - RNA, 19 nt, Homo sapiens
  misc_RNA (1)...(19): siRNA sense strand
ugguacagacagaggagca

SEQ ID NO: 2248758 - RNA, 19 nt, Homo sapiens
  misc_RNA (1)...(19): siRNA sense strand
uauacgagaauguuagcaa

SEQ ID NO: 2248759 - RNA, 19 nt, Homo sapiens
  misc_RNA (1)...(19): siRNA sense strand
aaugagaaaaggaggguga

SEQ ID NO: 2248760 - RNA, 19 nt, Homo sapiens
  misc_RNA (1)...(19): siRNA sense strand
ccuuagagagggauggaaa

SEQ ID NO: 2248761 - RNA, 19 nt, Homo sapiens
  misc_RNA (1)...(19): siRNA sense strand
cggaagaaccuauagccua

SEQ ID NO: 2248762 - RNA, 19 nt, Homo sapiens
  misc_RNA (1)...(19): siRNA sense strand
acacaugguccgacagcaa

SEQ ID NO: 2248763 - RNA, 19 nt, Homo sapiens
  misc_RNA (1)...(19): siRNA sense strand
aguuugaggaguugaaauu

SEQ ID NO: 2248764 - RNA, 19 nt, Homo sapiens
  misc_RNA (1)...(19): siRNA sense strand
ggaugaagaagaagcagca

SEQ ID NO: 2248765 - RNA, 19 nt, Homo sapiens
  misc_RNA (1)...(19): siRNA sense strand
cagaggaagagcaggacga

SEQ ID NO: 2248766 - RNA, 19 nt, Homo sapiens
  misc_RNA (1)...(19): siRNA sense strand
agaugauuucagaggaaga

SEQ ID NO: 2248767 - RNA, 19 nt, Homo sapiens
  misc_RNA (1)...(19): siRNA sense strand
aagaagaggaaacugacaa

SEQ ID NO: 2248768 - RNA, 19 nt, Homo sapiens
  misc_RNA (1)...(19): siRNA sense strand
cugcagauggcuagggagu

SEQ ID NO: 2248769 - RNA, 19 nt, Homo sapiens
  misc_RNA (1)...(19): siRNA sense strand
uuacagagaugaaucccaa

SEQ ID NO: 2248770 - RNA, 19 nt, Homo sapiens
  misc_RNA (1)...(19): siRNA sense strand
cagacuacaucaaugccaa

SEQ ID NO: 2248771 - RNA, 19 nt, Homo sapiens
  misc_RNA (1)...(19): siRNA sense strand
cgguucaacuggaugacuu

SEQ ID NO: 2248772 - RNA, 19 nt, Homo sapiens
  misc_RNA (1)...(19): siRNA sense strand
uggaugacuuugaugccua

SEQ ID NO: 2248773 - RNA, 19 nt, Homo sapiens
  misc_RNA (1)...(19): siRNA sense strand
gagaaaaggagggugaaau

SEQ ID NO: 2248774 - RNA, 19 nt, Homo sapiens
  misc_RNA (1)...(19): siRNA sense strand
gagacaucacuguggagau

SEQ ID NO: 2248775 - RNA, 19 nt, Homo sapiens
  misc_RNA (1)...(19): siRNA sense strand
uuucagaggaagagcagga

SEQ ID NO: 2248776 - RNA, 19 nt, Homo sapiens
  misc_RNA (1)...(19): siRNA sense strand
cugauguggaugaagaaga

SEQ ID NO: 2248777 - RNA, 19 nt, Homo sapiens
  misc_RNA (1)...(19): siRNA sense strand
gaaugaagaggaaggugca

SEQ ID NO: 2248778 - RNA, 19 nt, Homo sapiens
  misc_RNA (1)...(19): siRNA sense strand
uauuaaggauauggccaaa

SEQ ID NO: 2248779 - RNA, 19 nt, Homo sapiens
  misc_RNA (1)...(19): siRNA sense strand
ugguacagacagaggagca

SEQ ID NO: 2248780 - RNA, 19 nt, Homo sapiens
  misc_RNA (1)...(19): siRNA sense strand
uauacgagaauguuagcaa

SEQ ID NO: 2248781 - RNA, 19 nt, Homo sapiens
  misc_RNA (1)...(19): siRNA sense strand
aaugagaaaaggaggguga

SEQ ID NO: 2248782 - RNA, 19 nt, Homo sapiens
  misc_RNA (1)...(19): siRNA sense strand
ccuuagagagggauggaaa

SEQ ID NO: 2248783 - RNA, 19 nt, Homo sapiens
  misc_RNA (1)...(19): siRNA sense strand
cggaagaaccuauagccua

SEQ ID NO: 2248784 - RNA, 19 nt, Homo sapiens
  misc_RNA (1)...(19): siRNA sense strand
acacaugguccgacagcaa

SEQ ID NO: 2248785 - RNA, 19 nt, Homo sapiens
  misc_RNA (1)...(19): siRNA sense strand
aguuugaggaguugaaauu

SEQ ID NO: 2248786 - RNA, 19 nt, Homo sapiens
  misc_RNA (1)...(19): siRNA sense strand
ggaugaagaagaagcagca

SEQ ID NO: 2248787 - RNA, 19 nt, Homo sapiens
  misc_RNA (1)...(19): siRNA sense strand
cagaggaagagcaggacga

SEQ ID NO: 2248788 - RNA, 19 nt, Homo sapiens
  misc_RNA (1)...(19): siRNA sense strand
agaugauuucagaggaaga

SEQ ID NO: 2248789 - RNA, 19 nt, Homo sapiens
  misc_RNA (1)...(19): siRNA sense strand
aagaagaggaaacugacaa

SEQ ID NO: 2248790 - RNA, 19 nt, Homo sapiens
  misc_RNA (1)...(19): siRNA sense strand
cugcagauggcuagggagu

SEQ ID NO: 2248791 - RNA, 19 nt, Homo sapiens
  misc_RNA (1)...(19): siRNA sense strand
uuacagagaugaaucccaa

SEQ ID NO: 2248792 - RNA, 19 nt, Homo sapiens
  misc_RNA (1)...(19): siRNA sense strand
cagacuacaucaaugccaa

SEQ ID NO: 2248793 - RNA, 19 nt, Homo sapiens
  misc_RNA (1)...(19): siRNA sense strand
cgguucaacuggaugacuu

SEQ ID NO: 2248794 - RNA, 19 nt, Homo sapiens
  misc_RNA (1)...(19): siRNA sense strand
uggaugacuuugaugccua

SEQ ID NO: 2248795 - RNA, 19 nt, Homo sapiens
  misc_RNA (1)...(19): siRNA sense strand
gagaaaaggagggugaaau

SEQ ID NO: 2248796 - RNA, 19 nt, Homo sapiens
  misc_RNA (1)...(19): siRNA sense strand
gagacaucacuguggagau

SEQ ID NO: 2248797 - RNA, 19 nt, Homo sapiens
  misc_RNA (1)...(19): siRNA sense strand
uuucagaggaagagcagga

SEQ ID NO: 2248798 - RNA, 19 nt, Homo sapiens
  misc_RNA (1)...(19): siRNA sense strand
cugauguggaugaagaaga

SEQ ID NO: 2248799 - RNA, 19 nt, Homo sapiens
  misc_RNA (1)...(19): siRNA sense strand
gaaugaagaggaaggugca

SEQ ID NO: 2248800 - RNA, 19 nt, Homo sapiens
  misc_RNA (1)...(19): siRNA sense strand
uauuaaggauauggccaaa

SEQ ID NO: 2248801 - RNA, 19 nt, Homo sapiens
  misc_RNA (1)...(19): siRNA sense strand
ugguacagacagaggagca

SEQ ID NO: 2248802 - RNA, 19 nt, Homo sapiens
  misc_RNA (1)...(19): siRNA sense strand
uauacgagaauguuagcaa

SEQ ID NO: 2248803 - RNA, 19 nt, Homo sapiens
  misc_RNA (1)...(19): siRNA sense strand
aaugagaaaaggaggguga

SEQ ID NO: 2248804 - RNA, 19 nt, Homo sapiens
  misc_RNA (1)...(19): siRNA sense strand
gauugaaagcagugaggaa

SEQ ID NO: 2248805 - RNA, 19 nt, Homo sapiens
  misc_RNA (1)...(19): siRNA sense strand
cggaacagggugugccaaa

SEQ ID NO: 2248806 - RNA, 19 nt, Homo sapiens
  misc_RNA (1)...(19): siRNA sense strand
ucaaagaacccaaggacca

SEQ ID NO: 2248807 - RNA, 19 nt, Homo sapiens
  misc_RNA (1)...(19): siRNA sense strand
agacagaggaugaguacca

SEQ ID NO: 2248808 - RNA, 19 nt, Homo sapiens
  misc_RNA (1)...(19): siRNA sense strand
cccaagaacuucaagguga

SEQ ID NO: 2248809 - RNA, 19 nt, Homo sapiens
  misc_RNA (1)...(19): siRNA sense strand
cggccauggugcagacaga

SEQ ID NO: 2248810 - RNA, 19 nt, Homo sapiens
  misc_RNA (1)...(19): siRNA sense strand
aggaaaccgaccagggcaa

SEQ ID NO: 2248811 - RNA, 19 nt, Homo sapiens
  misc_RNA (1)...(19): siRNA sense strand
gcaucgugcuggagcggau

SEQ ID NO: 2248812 - RNA, 19 nt, Homo sapiens
  misc_RNA (1)...(19): siRNA sense strand
ggaucaagccagagaagac

SEQ ID NO: 2248813 - RNA, 19 nt, Homo sapiens
  misc_RNA (1)...(19): siRNA sense strand
ccuggaacaagaagggcaa

SEQ ID NO: 2248814 - RNA, 19 nt, Homo sapiens
  misc_RNA (1)...(19): siRNA sense strand
cagcaauggacgcaucaaa

SEQ ID NO: 2248815 - RNA, 19 nt, Homo sapiens
  misc_RNA (1)...(19): siRNA sense strand
caguauauccugcgagagu

SEQ ID NO: 2248816 - RNA, 19 nt, Homo sapiens
  misc_RNA (1)...(19): siRNA sense strand
augaaggcgugguggacau

SEQ ID NO: 2248817 - RNA, 19 nt, Homo sapiens
  misc_RNA (1)...(19): siRNA sense strand
aguucaagcggcuggcuaa

SEQ ID NO: 2248818 - RNA, 19 nt, Homo sapiens
  misc_RNA (1)...(19): siRNA sense strand
aagaagggcaagaagguca

SEQ ID NO: 2248819 - RNA, 19 nt, Homo sapiens
  misc_RNA (1)...(19): siRNA sense strand
aauauaaauccaagagcca

SEQ ID NO: 2248820 - RNA, 19 nt, Homo sapiens
  misc_RNA (1)...(19): siRNA sense strand
cgaagaaccgcuaugccaa

SEQ ID NO: 2248821 - RNA, 19 nt, Homo sapiens
  misc_RNA (1)...(19): siRNA sense strand
gcacggagaccuacggcuu

SEQ ID NO: 2248822 - RNA, 19 nt, Homo sapiens
  misc_RNA (1)...(19): siRNA sense strand
ggccaagugcauaagacua

SEQ ID NO: 2248823 - RNA, 19 nt, Homo sapiens
  misc_RNA (1)...(19): siRNA sense strand
ccaaccuggaagugaacaa

SEQ ID NO: 2248824 - RNA, 19 nt, Homo sapiens
  misc_RNA (1)...(19): siRNA sense strand
acgccaugcuugagcggau

SEQ ID NO: 2248825 - RNA, 19 nt, Homo sapiens
  misc_RNA (1)...(19): siRNA sense strand
uggaggaccugaagcccaa

SEQ ID NO: 2248826 - RNA, 19 nt, Homo sapiens
  misc_RNA (1)...(19): siRNA sense strand
cuucauuggccaagugcau

SEQ ID NO: 2248827 - RNA, 19 nt, Homo sapiens
  misc_RNA (1)...(19): siRNA sense strand
gguaugaaggcguggugga

SEQ ID NO: 2248828 - RNA, 19 nt, Homo sapiens
  misc_RNA (1)...(19): siRNA sense strand
aggacauggaucuggaaga

SEQ ID NO: 2248829 - RNA, 19 nt, Homo sapiens
  misc_RNA (1)...(19): siRNA sense strand
cugcgagaguucaagguca

SEQ ID NO: 2248830 - RNA, 19 nt, Homo sapiens
  misc_RNA (1)...(19): siRNA sense strand
ccaagaagcucaucacgca

SEQ ID NO: 2248831 - RNA, 19 nt, Homo sapiens
  misc_RNA (1)...(19): siRNA sense strand
gcaugcugugggagaacaa

SEQ ID NO: 2248832 - RNA, 19 nt, Homo sapiens
  misc_RNA (1)...(19): siRNA sense strand
auugaaagcagugaggaaa

SEQ ID NO: 2248833 - RNA, 19 nt, Homo sapiens
  misc_RNA (1)...(19): siRNA sense strand
ugguagauccgauggcaga

SEQ ID NO: 2248834 - RNA, 19 nt, Homo sapiens
  misc_RNA (1)...(19): siRNA sense strand
ccacgagugaccuggaaca

SEQ ID NO: 2248835 - RNA, 19 nt, Homo sapiens
  misc_RNA (1)...(19): siRNA sense strand
acagaggcacggagaccua

SEQ ID NO: 2248836 - RNA, 19 nt, Homo sapiens
  misc_RNA (1)...(19): siRNA sense strand
cagaauacaacaugccuca

SEQ ID NO: 2248837 - RNA, 19 nt, Homo sapiens
  misc_RNA (1)...(19): siRNA sense strand
ucacagaugucaaggacuc

SEQ ID NO: 2248838 - RNA, 19 nt, Homo sapiens
  misc_RNA (1)...(19): siRNA sense strand
ucaugaggucccagcgcaa

SEQ ID NO: 2248839 - RNA, 19 nt, Homo sapiens
  misc_RNA (1)...(19): siRNA sense strand
cuuugagacgauugaguuu

SEQ ID NO: 2248840 - RNA, 19 nt, Homo sapiens
  misc_RNA (1)...(19): siRNA sense strand
ucacgugggacucgggcaa

SEQ ID NO: 2248841 - RNA, 19 nt, Homo sapiens
  misc_RNA (1)...(19): siRNA sense strand
ccagcuucauugauggcua

SEQ ID NO: 2248842 - RNA, 19 nt, Homo sapiens
  misc_RNA (1)...(19): siRNA sense strand
cggcaggagaguaucauca

SEQ ID NO: 2248843 - RNA, 19 nt, Homo sapiens
  misc_RNA (1)...(19): siRNA sense strand
gcccagaggacauggaucu

SEQ ID NO: 2248844 - RNA, 19 nt, Homo sapiens
  misc_RNA (1)...(19): siRNA sense strand
ucgcagacauggcggagca

SEQ ID NO: 2248845 - RNA, 19 nt, Homo sapiens
  misc_RNA (1)...(19): siRNA sense strand
ccgaagaaccgcuaugcca

SEQ ID NO: 2248846 - RNA, 19 nt, Homo sapiens
  misc_RNA (1)...(19): siRNA sense strand
uggugaacaucaugcccua

SEQ ID NO: 2248847 - RNA, 19 nt, Homo sapiens
  misc_RNA (1)...(19): siRNA sense strand
ucauuggccaagugcauaa

SEQ ID NO: 2248848 - RNA, 19 nt, Homo sapiens
  misc_RNA (1)...(19): siRNA sense strand
gcaucaaacagcugcgauc

SEQ ID NO: 2248849 - RNA, 19 nt, Homo sapiens
  misc_RNA (1)...(19): siRNA sense strand
ugccauacgugaaguggau

SEQ ID NO: 2248850 - RNA, 19 nt, Homo sapiens
  misc_RNA (1)...(19): siRNA sense strand
gugaaaaugaucaugaaga

SEQ ID NO: 2248851 - RNA, 19 nt, Homo sapiens
  misc_RNA (1)...(19): siRNA sense strand
uggaagugaacaagccgaa

SEQ ID NO: 2248852 - RNA, 19 nt, Homo sapiens
  misc_RNA (1)...(19): siRNA sense strand
cggaggaccaguacagcuu

SEQ ID NO: 2248853 - RNA, 19 nt, Homo sapiens
  misc_RNA (1)...(19): siRNA sense strand
gugcaagcccggaugcuca

SEQ ID NO: 2248854 - RNA, 19 nt, Homo sapiens
  misc_RNA (1)...(19): siRNA sense strand
aggccuacaucgcgacaca

SEQ ID NO: 2248855 - RNA, 19 nt, Homo sapiens
  misc_RNA (1)...(19): siRNA sense strand
ucggaagcuuugaccacua

SEQ ID NO: 2248856 - RNA, 19 nt, Homo sapiens
  misc_RNA (1)...(19): siRNA sense strand
gauugaguuugaugagagu

SEQ ID NO: 2248857 - RNA, 19 nt, Homo sapiens
  misc_RNA (1)...(19): siRNA sense strand
gcgaacacgucacuggcau

SEQ ID NO: 2248858 - RNA, 19 nt, Homo sapiens
  misc_RNA (1)...(19): siRNA sense strand
uggugcagacagaggauga

SEQ ID NO: 2248859 - RNA, 19 nt, Homo sapiens
  misc_RNA (1)...(19): siRNA sense strand
gauugaaagcagugaggaa

SEQ ID NO: 2248860 - RNA, 19 nt, Homo sapiens
  misc_RNA (1)...(19): siRNA sense strand
cggaacagggugugccaaa

SEQ ID NO: 2248861 - RNA, 19 nt, Homo sapiens
  misc_RNA (1)...(19): siRNA sense strand
ucaaagaacccaaggacca

SEQ ID NO: 2248862 - RNA, 19 nt, Homo sapiens
  misc_RNA (1)...(19): siRNA sense strand
agacagaggaugaguacca

SEQ ID NO: 2248863 - RNA, 19 nt, Homo sapiens
  misc_RNA (1)...(19): siRNA sense strand
cccaagaacuucaagguga

SEQ ID NO: 2248864 - RNA, 19 nt, Homo sapiens
  misc_RNA (1)...(19): siRNA sense strand
cggccauggugcagacaga

SEQ ID NO: 2248865 - RNA, 19 nt, Homo sapiens
  misc_RNA (1)...(19): siRNA sense strand
aggaaaccgaccagggcaa

SEQ ID NO: 2248866 - RNA, 19 nt, Homo sapiens
  misc_RNA (1)...(19): siRNA sense strand
gcaucgugcuggagcggau

SEQ ID NO: 2248867 - RNA, 19 nt, Homo sapiens
  misc_RNA (1)...(19): siRNA sense strand
ggaucaagccagagaagac

SEQ ID NO: 2248868 - RNA, 19 nt, Homo sapiens
  misc_RNA (1)...(19): siRNA sense strand
ccuggaacaagaagggcaa

SEQ ID NO: 2248869 - RNA, 19 nt, Homo sapiens
  misc_RNA (1)...(19): siRNA sense strand
cagcaauggacgcaucaaa

SEQ ID NO: 2248870 - RNA, 19 nt, Homo sapiens
  misc_RNA (1)...(19): siRNA sense strand
caguauauccugcgagagu

SEQ ID NO: 2248871 - RNA, 19 nt, Homo sapiens
  misc_RNA (1)...(19): siRNA sense strand
augaaggcgugguggacau

SEQ ID NO: 2248872 - RNA, 19 nt, Homo sapiens
  misc_RNA (1)...(19): siRNA sense strand
aguucaagcggcuggcuaa

SEQ ID NO: 2248873 - RNA, 19 nt, Homo sapiens
  misc_RNA (1)...(19): siRNA sense strand
aagaagggcaagaagguca

SEQ ID NO: 2248874 - RNA, 19 nt, Homo sapiens
  misc_RNA (1)...(19): siRNA sense strand
aauauaaauccaagagcca

SEQ ID NO: 2248875 - RNA, 19 nt, Homo sapiens
  misc_RNA (1)...(19): siRNA sense strand
cgaagaaccgcuaugccaa

SEQ ID NO: 2248876 - RNA, 19 nt, Homo sapiens
  misc_RNA (1)...(19): siRNA sense strand
gcacggagaccuacggcuu

SEQ ID NO: 2248877 - RNA, 19 nt, Homo sapiens
  misc_RNA (1)...(19): siRNA sense strand
ggccaagugcauaagacua

SEQ ID NO: 2248878 - RNA, 19 nt, Homo sapiens
  misc_RNA (1)...(19): siRNA sense strand
ccaaccuggaagugaacaa

SEQ ID NO: 2248879 - RNA, 19 nt, Homo sapiens
  misc_RNA (1)...(19): siRNA sense strand
acgccaugcuugagcggau

SEQ ID NO: 2248880 - RNA, 19 nt, Homo sapiens
  misc_RNA (1)...(19): siRNA sense strand
uggaggaccugaagcccaa

SEQ ID NO: 2248881 - RNA, 19 nt, Homo sapiens
  misc_RNA (1)...(19): siRNA sense strand
cuucauuggccaagugcau

SEQ ID NO: 2248882 - RNA, 19 nt, Homo sapiens
  misc_RNA (1)...(19): siRNA sense strand
gguaugaaggcguggugga

SEQ ID NO: 2248883 - RNA, 19 nt, Homo sapiens
  misc_RNA (1)...(19): siRNA sense strand
aggacauggaucuggaaga

SEQ ID NO: 2248884 - RNA, 19 nt, Homo sapiens
  misc_RNA (1)...(19): siRNA sense strand
cugcgagaguucaagguca

SEQ ID NO: 2248885 - RNA, 19 nt, Homo sapiens
  misc_RNA (1)...(19): siRNA sense strand
ccaagaagcucaucacgca

SEQ ID NO: 2248886 - RNA, 19 nt, Homo sapiens
  misc_RNA (1)...(19): siRNA sense strand
gcaugcugugggagaacaa

SEQ ID NO: 2248887 - RNA, 19 nt, Homo sapiens
  misc_RNA (1)...(19): siRNA sense strand
auugaaagcagugaggaaa

SEQ ID NO: 2248888 - RNA, 19 nt, Homo sapiens
  misc_RNA (1)...(19): siRNA sense strand
ugguagauccgauggcaga

SEQ ID NO: 2248889 - RNA, 19 nt, Homo sapiens
  misc_RNA (1)...(19): siRNA sense strand
ccacgagugaccuggaaca

SEQ ID NO: 2248890 - RNA, 19 nt, Homo sapiens
  misc_RNA (1)...(19): siRNA sense strand
acagaggcacggagaccua

SEQ ID NO: 2248891 - RNA, 19 nt, Homo sapiens
  misc_RNA (1)...(19): siRNA sense strand
cagaauacaacaugccuca

SEQ ID NO: 2248892 - RNA, 19 nt, Homo sapiens
  misc_RNA (1)...(19): siRNA sense strand
ucacagaugucaaggacuc

SEQ ID NO: 2248893 - RNA, 19 nt, Homo sapiens
  misc_RNA (1)...(19): siRNA sense strand
ucaugaggucccagcgcaa

SEQ ID NO: 2248894 - RNA, 19 nt, Homo sapiens
  misc_RNA (1)...(19): siRNA sense strand
cuuugagacgauugaguuu

SEQ ID NO: 2248895 - RNA, 19 nt, Homo sapiens
  misc_RNA (1)...(19): siRNA sense strand
ucacgugggacucgggcaa

SEQ ID NO: 2248896 - RNA, 19 nt, Homo sapiens
  misc_RNA (1)...(19): siRNA sense strand
ccagcuucauugauggcua

SEQ ID NO: 2248897 - RNA, 19 nt, Homo sapiens
  misc_RNA (1)...(19): siRNA sense strand
cggcaggagaguaucauca

SEQ ID NO: 2248898 - RNA, 19 nt, Homo sapiens
  misc_RNA (1)...(19): siRNA sense strand
gcccagaggacauggaucu

SEQ ID NO: 2248899 - RNA, 19 nt, Homo sapiens
  misc_RNA (1)...(19): siRNA sense strand
ucgcagacauggcggagca

SEQ ID NO: 2248900 - RNA, 19 nt, Homo sapiens
  misc_RNA (1)...(19): siRNA sense strand
ccgaagaaccgcuaugcca

SEQ ID NO: 2248901 - RNA, 19 nt, Homo sapiens
  misc_RNA (1)...(19): siRNA sense strand
uggugaacaucaugcccua

SEQ ID NO: 2248902 - RNA, 19 nt, Homo sapiens
  misc_RNA (1)...(19): siRNA sense strand
ucauuggccaagugcauaa

SEQ ID NO: 2248903 - RNA, 19 nt, Homo sapiens
  misc_RNA (1)...(19): siRNA sense strand
gcaucaaacagcugcgauc

SEQ ID NO: 2248904 - RNA, 19 nt, Homo sapiens
  misc_RNA (1)...(19): siRNA sense strand
ugccauacgugaaguggau

SEQ ID NO: 2248905 - RNA, 19 nt, Homo sapiens
  misc_RNA (1)...(19): siRNA sense strand
gugaaaaugaucaugaaga

SEQ ID NO: 2248906 - RNA, 19 nt, Homo sapiens
  misc_RNA (1)...(19): siRNA sense strand
uggaagugaacaagccgaa

SEQ ID NO: 2248907 - RNA, 19 nt, Homo sapiens
  misc_RNA (1)...(19): siRNA sense strand
cggaggaccaguacagcuu

SEQ ID NO: 2248908 - RNA, 19 nt, Homo sapiens
  misc_RNA (1)...(19): siRNA sense strand
gugcaagcccggaugcuca

SEQ ID NO: 2248909 - RNA, 19 nt, Homo sapiens
  misc_RNA (1)...(19): siRNA sense strand
aggccuacaucgcgacaca

SEQ ID NO: 2248910 - RNA, 19 nt, Homo sapiens
  misc_RNA (1)...(19): siRNA sense strand
ucggaagcuuugaccacua

SEQ ID NO: 2248911 - RNA, 19 nt, Homo sapiens
  misc_RNA (1)...(19): siRNA sense strand
gauugaguuugaugagagu

SEQ ID NO: 2248912 - RNA, 19 nt, Homo sapiens
  misc_RNA (1)...(19): siRNA sense strand
gcgaacacgucacuggcau

SEQ ID NO: 2248913 - RNA, 19 nt, Homo sapiens
  misc_RNA (1)...(19): siRNA sense strand
uggugcagacagaggauga

SEQ ID NO: 2248914 - RNA, 19 nt, Homo sapiens
  misc_RNA (1)...(19): siRNA sense strand
gauugaaagcagugaggaa

SEQ ID NO: 2248915 - RNA, 19 nt, Homo sapiens
  misc_RNA (1)...(19): siRNA sense strand
cggaacagggugugccaaa

SEQ ID NO: 2248916 - RNA, 19 nt, Homo sapiens
  misc_RNA (1)...(19): siRNA sense strand
ucaaagaacccaaggacca

SEQ ID NO: 2248917 - RNA, 19 nt, Homo sapiens
  misc_RNA (1)...(19): siRNA sense strand
agacagaggaugaguacca

SEQ ID NO: 2248918 - RNA, 19 nt, Homo sapiens
  misc_RNA (1)...(19): siRNA sense strand
cccaagaacuucaagguga

SEQ ID NO: 2248919 - RNA, 19 nt, Homo sapiens
  misc_RNA (1)...(19): siRNA sense strand
cggccauggugcagacaga

SEQ ID NO: 2248920 - RNA, 19 nt, Homo sapiens
  misc_RNA (1)...(19): siRNA sense strand
aggaaaccgaccagggcaa

SEQ ID NO: 2248921 - RNA, 19 nt, Homo sapiens
  misc_RNA (1)...(19): siRNA sense strand
gcaucgugcuggagcggau

SEQ ID NO: 2248922 - RNA, 19 nt, Homo sapiens
  misc_RNA (1)...(19): siRNA sense strand
ggaucaagccagagaagac

SEQ ID NO: 2248923 - RNA, 19 nt, Homo sapiens
  misc_RNA (1)...(19): siRNA sense strand
ccuggaacaagaagggcaa

SEQ ID NO: 2248924 - RNA, 19 nt, Homo sapiens
  misc_RNA (1)...(19): siRNA sense strand
cagcaauggacgcaucaaa

SEQ ID NO: 2248925 - RNA, 19 nt, Homo sapiens
  misc_RNA (1)...(19): siRNA sense strand
caguauauccugcgagagu

SEQ ID NO: 2248926 - RNA, 19 nt, Homo sapiens
  misc_RNA (1)...(19): siRNA sense strand
augaaggcgugguggacau

SEQ ID NO: 2248927 - RNA, 19 nt, Homo sapiens
  misc_RNA (1)...(19): siRNA sense strand
aguucaagcggcuggcuaa

SEQ ID NO: 2248928 - RNA, 19 nt, Homo sapiens
  misc_RNA (1)...(19): siRNA sense strand
aagaagggcaagaagguca

SEQ ID NO: 2248929 - RNA, 19 nt, Homo sapiens
  misc_RNA (1)...(19): siRNA sense strand
aauauaaauccaagagcca

SEQ ID NO: 2248930 - RNA, 19 nt, Homo sapiens
  misc_RNA (1)...(19): siRNA sense strand
cgaagaaccgcuaugccaa

SEQ ID NO: 2248931 - RNA, 19 nt, Homo sapiens
  misc_RNA (1)...(19): siRNA sense strand
gcacggagaccuacggcuu

SEQ ID NO: 2248932 - RNA, 19 nt, Homo sapiens
  misc_RNA (1)...(19): siRNA sense strand
ggccaagugcauaagacua

SEQ ID NO: 2248933 - RNA, 19 nt, Homo sapiens
  misc_RNA (1)...(19): siRNA sense strand
ccaaccuggaagugaacaa

SEQ ID NO: 2248934 - RNA, 19 nt, Homo sapiens
  misc_RNA (1)...(19): siRNA sense strand
acgccaugcuugagcggau

SEQ ID NO: 2248935 - RNA, 19 nt, Homo sapiens
  misc_RNA (1)...(19): siRNA sense strand
uggaggaccugaagcccaa

SEQ ID NO: 2248936 - RNA, 19 nt, Homo sapiens
  misc_RNA (1)...(19): siRNA sense strand
cuucauuggccaagugcau

SEQ ID NO: 2248937 - RNA, 19 nt, Homo sapiens
  misc_RNA (1)...(19): siRNA sense strand
gguaugaaggcguggugga

SEQ ID NO: 2248938 - RNA, 19 nt, Homo sapiens
  misc_RNA (1)...(19): siRNA sense strand
aggacauggaucuggaaga

SEQ ID NO: 2248939 - RNA, 19 nt, Homo sapiens
  misc_RNA (1)...(19): siRNA sense strand
cugcgagaguucaagguca

SEQ ID NO: 2248940 - RNA, 19 nt, Homo sapiens
  misc_RNA (1)...(19): siRNA sense strand
ccaagaagcucaucacgca

SEQ ID NO: 2248941 - RNA, 19 nt, Homo sapiens
  misc_RNA (1)...(19): siRNA sense strand
gcaugcugugggagaacaa

SEQ ID NO: 2248942 - RNA, 19 nt, Homo sapiens
  misc_RNA (1)...(19): siRNA sense strand
auugaaagcagugaggaaa

SEQ ID NO: 2248943 - RNA, 19 nt, Homo sapiens
  misc_RNA (1)...(19): siRNA sense strand
ugguagauccgauggcaga

SEQ ID NO: 2248944 - RNA, 19 nt, Homo sapiens
  misc_RNA (1)...(19): siRNA sense strand
ccacgagugaccuggaaca

SEQ ID NO: 2248945 - RNA, 19 nt, Homo sapiens
  misc_RNA (1)...(19): siRNA sense strand
acagaggcacggagaccua

SEQ ID NO: 2248946 - RNA, 19 nt, Homo sapiens
  misc_RNA (1)...(19): siRNA sense strand
cagaauacaacaugccuca

SEQ ID NO: 2248947 - RNA, 19 nt, Homo sapiens
  misc_RNA (1)...(19): siRNA sense strand
ucacagaugucaaggacuc

SEQ ID NO: 2248948 - RNA, 19 nt, Homo sapiens
  misc_RNA (1)...(19): siRNA sense strand
ucaugaggucccagcgcaa

SEQ ID NO: 2248949 - RNA, 19 nt, Homo sapiens
  misc_RNA (1)...(19): siRNA sense strand
cuuugagacgauugaguuu

SEQ ID NO: 2248950 - RNA, 19 nt, Homo sapiens
  misc_RNA (1)...(19): siRNA sense strand
ucacgugggacucgggcaa

SEQ ID NO: 2248951 - RNA, 19 nt, Homo sapiens
  misc_RNA (1)...(19): siRNA sense strand
ccagcuucauugauggcua

SEQ ID NO: 2248952 - RNA, 19 nt, Homo sapiens
  misc_RNA (1)...(19): siRNA sense strand
cggcaggagaguaucauca

SEQ ID NO: 2248953 - RNA, 19 nt, Homo sapiens
  misc_RNA (1)...(19): siRNA sense strand
gcccagaggacauggaucu

SEQ ID NO: 2248954 - RNA, 19 nt, Homo sapiens
  misc_RNA (1)...(19): siRNA sense strand
ucgcagacauggcggagca

SEQ ID NO: 2248955 - RNA, 19 nt, Homo sapiens
  misc_RNA (1)...(19): siRNA sense strand
ccgaagaaccgcuaugcca

SEQ ID NO: 2248956 - RNA, 19 nt, Homo sapiens
  misc_RNA (1)...(19): siRNA sense strand
uggugaacaucaugcccua

SEQ ID NO: 2248957 - RNA, 19 nt, Homo sapiens
  misc_RNA (1)...(19): siRNA sense strand
ucauuggccaagugcauaa

SEQ ID NO: 2248958 - RNA, 19 nt, Homo sapiens
  misc_RNA (1)...(19): siRNA sense strand
gcaucaaacagcugcgauc

SEQ ID NO: 2248959 - RNA, 19 nt, Homo sapiens
  misc_RNA (1)...(19): siRNA sense strand
ugccauacgugaaguggau

SEQ ID NO: 2248960 - RNA, 19 nt, Homo sapiens
  misc_RNA (1)...(19): siRNA sense strand
gugaaaaugaucaugaaga

SEQ ID NO: 2248961 - RNA, 19 nt, Homo sapiens
  misc_RNA (1)...(19): siRNA sense strand
uggaagugaacaagccgaa

SEQ ID NO: 2248962 - RNA, 19 nt, Homo sapiens
  misc_RNA (1)...(19): siRNA sense strand
cggaggaccaguacagcuu

SEQ ID NO: 2248963 - RNA, 19 nt, Homo sapiens
  misc_RNA (1)...(19): siRNA sense strand
gugcaagcccggaugcuca

SEQ ID NO: 2248964 - RNA, 19 nt, Homo sapiens
  misc_RNA (1)...(19): siRNA sense strand
aggccuacaucgcgacaca

SEQ ID NO: 2248965 - RNA, 19 nt, Homo sapiens
  misc_RNA (1)...(19): siRNA sense strand
ucggaagcuuugaccacua

SEQ ID NO: 2248966 - RNA, 19 nt, Homo sapiens
  misc_RNA (1)...(19): siRNA sense strand
gauugaguuugaugagagu

SEQ ID NO: 2248967 - RNA, 19 nt, Homo sapiens
  misc_RNA (1)...(19): siRNA sense strand
gcgaacacgucacuggcau

SEQ ID NO: 2248968 - RNA, 19 nt, Homo sapiens
  misc_RNA (1)...(19): siRNA sense strand
uggugcagacagaggauga

SEQ ID NO: 2248969 - RNA, 19 nt, Homo sapiens
  misc_RNA (1)...(19): siRNA sense strand
gauugaaagcagugaggaa

SEQ ID NO: 2248970 - RNA, 19 nt, Homo sapiens
  misc_RNA (1)...(19): siRNA sense strand
cggaacagggugugccaaa

SEQ ID NO: 2248971 - RNA, 19 nt, Homo sapiens
  misc_RNA (1)...(19): siRNA sense strand
ucaaagaacccaaggacca

SEQ ID NO: 2248972 - RNA, 19 nt, Homo sapiens
  misc_RNA (1)...(19): siRNA sense strand
agacagaggaugaguacca

SEQ ID NO: 2248973 - RNA, 19 nt, Homo sapiens
  misc_RNA (1)...(19): siRNA sense strand
cccaagaacuucaagguga

SEQ ID NO: 2248974 - RNA, 19 nt, Homo sapiens
  misc_RNA (1)...(19): siRNA sense strand
cggccauggugcagacaga

SEQ ID NO: 2248975 - RNA, 19 nt, Homo sapiens
  misc_RNA (1)...(19): siRNA sense strand
aggaaaccgaccagggcaa

SEQ ID NO: 2248976 - RNA, 19 nt, Homo sapiens
  misc_RNA (1)...(19): siRNA sense strand
gcaucgugcuggagcggau

SEQ ID NO: 2248977 - RNA, 19 nt, Homo sapiens
  misc_RNA (1)...(19): siRNA sense strand
ggaucaagccagagaagac

SEQ ID NO: 2248978 - RNA, 19 nt, Homo sapiens
  misc_RNA (1)...(19): siRNA sense strand
ccuggaacaagaagggcaa

SEQ ID NO: 2248979 - RNA, 19 nt, Homo sapiens
  misc_RNA (1)...(19): siRNA sense strand
cagcaauggacgcaucaaa

SEQ ID NO: 2248980 - RNA, 19 nt, Homo sapiens
  misc_RNA (1)...(19): siRNA sense strand
caguauauccugcgagagu

SEQ ID NO: 2248981 - RNA, 19 nt, Homo sapiens
  misc_RNA (1)...(19): siRNA sense strand
augaaggcgugguggacau

SEQ ID NO: 2248982 - RNA, 19 nt, Homo sapiens
  misc_RNA (1)...(19): siRNA sense strand
aguucaagcggcuggcuaa

SEQ ID NO: 2248983 - RNA, 19 nt, Homo sapiens
  misc_RNA (1)...(19): siRNA sense strand
aagaagggcaagaagguca

SEQ ID NO: 2248984 - RNA, 19 nt, Homo sapiens
  misc_RNA (1)...(19): siRNA sense strand
aauauaaauccaagagcca

SEQ ID NO: 2248985 - RNA, 19 nt, Homo sapiens
  misc_RNA (1)...(19): siRNA sense strand
cgaagaaccgcuaugccaa

SEQ ID NO: 2248986 - RNA, 19 nt, Homo sapiens
  misc_RNA (1)...(19): siRNA sense strand
gcacggagaccuacggcuu

SEQ ID NO: 2248987 - RNA, 19 nt, Homo sapiens
  misc_RNA (1)...(19): siRNA sense strand
ggccaagugcauaagacua

SEQ ID NO: 2248988 - RNA, 19 nt, Homo sapiens
  misc_RNA (1)...(19): siRNA sense strand
ccaaccuggaagugaacaa

SEQ ID NO: 2248989 - RNA, 19 nt, Homo sapiens
  misc_RNA (1)...(19): siRNA sense strand
acgccaugcuugagcggau

SEQ ID NO: 2248990 - RNA, 19 nt, Homo sapiens
  misc_RNA (1)...(19): siRNA sense strand
uggaggaccugaagcccaa

SEQ ID NO: 2248991 - RNA, 19 nt, Homo sapiens
  misc_RNA (1)...(19): siRNA sense strand
cuucauuggccaagugcau

SEQ ID NO: 2248992 - RNA, 19 nt, Homo sapiens
  misc_RNA (1)...(19): siRNA sense strand
gguaugaaggcguggugga

SEQ ID NO: 2248993 - RNA, 19 nt, Homo sapiens
  misc_RNA (1)...(19): siRNA sense strand
aggacauggaucuggaaga

SEQ ID NO: 2248994 - RNA, 19 nt, Homo sapiens
  misc_RNA (1)...(19): siRNA sense strand
cugcgagaguucaagguca

SEQ ID NO: 2248995 - RNA, 19 nt, Homo sapiens
  misc_RNA (1)...(19): siRNA sense strand
ccaagaagcucaucacgca

SEQ ID NO: 2248996 - RNA, 19 nt, Homo sapiens
  misc_RNA (1)...(19): siRNA sense strand
gcaugcugugggagaacaa

SEQ ID NO: 2248997 - RNA, 19 nt, Homo sapiens
  misc_RNA (1)...(19): siRNA sense strand
auugaaagcagugaggaaa

SEQ ID NO: 2248998 - RNA, 19 nt, Homo sapiens
  misc_RNA (1)...(19): siRNA sense strand
ugguagauccgauggcaga

SEQ ID NO: 2248999 - RNA, 19 nt, Homo sapiens
  misc_RNA (1)...(19): siRNA sense strand
ccacgagugaccuggaaca

SEQ ID NO: 2249000 - RNA, 19 nt, Homo sapiens
  misc_RNA (1)...(19): siRNA sense strand
acagaggcacggagaccua

SEQ ID NO: 2249001 - RNA, 19 nt, Homo sapiens
  misc_RNA (1)...(19): siRNA sense strand
cagaauacaacaugccuca

SEQ ID NO: 2249002 - RNA, 19 nt, Homo sapiens
  misc_RNA (1)...(19): siRNA sense strand
ucacagaugucaaggacuc

SEQ ID NO: 2249003 - RNA, 19 nt, Homo sapiens
  misc_RNA (1)...(19): siRNA sense strand
ucaugaggucccagcgcaa

SEQ ID NO: 2249004 - RNA, 19 nt, Homo sapiens
  misc_RNA (1)...(19): siRNA sense strand
cuuugagacgauugaguuu

SEQ ID NO: 2249005 - RNA, 19 nt, Homo sapiens
  misc_RNA (1)...(19): siRNA sense strand
ucacgugggacucgggcaa

SEQ ID NO: 2249006 - RNA, 19 nt, Homo sapiens
  misc_RNA (1)...(19): siRNA sense strand
ccagcuucauugauggcua

SEQ ID NO: 2249007 - RNA, 19 nt, Homo sapiens
  misc_RNA (1)...(19): siRNA sense strand
cggcaggagaguaucauca

SEQ ID NO: 2249008 - RNA, 19 nt, Homo sapiens
  misc_RNA (1)...(19): siRNA sense strand
gcccagaggacauggaucu

SEQ ID NO: 2249009 - RNA, 19 nt, Homo sapiens
  misc_RNA (1)...(19): siRNA sense strand
ucgcagacauggcggagca

SEQ ID NO: 2249010 - RNA, 19 nt, Homo sapiens
  misc_RNA (1)...(19): siRNA sense strand
ccgaagaaccgcuaugcca

SEQ ID NO: 2249011 - RNA, 19 nt, Homo sapiens
  misc_RNA (1)...(19): siRNA sense strand
uggugaacaucaugcccua

SEQ ID NO: 2249012 - RNA, 19 nt, Homo sapiens
  misc_RNA (1)...(19): siRNA sense strand
ucauuggccaagugcauaa

SEQ ID NO: 2249013 - RNA, 19 nt, Homo sapiens
  misc_RNA (1)...(19): siRNA sense strand
gcaucaaacagcugcgauc

SEQ ID NO: 2249014 - RNA, 19 nt, Homo sapiens
  misc_RNA (1)...(19): siRNA sense strand
ugccauacgugaaguggau

SEQ ID NO: 2249015 - RNA, 19 nt, Homo sapiens
  misc_RNA (1)...(19): siRNA sense strand
gugaaaaugaucaugaaga

SEQ ID NO: 2249016 - RNA, 19 nt, Homo sapiens
  misc_RNA (1)...(19): siRNA sense strand
uggaagugaacaagccgaa

SEQ ID NO: 2249017 - RNA, 19 nt, Homo sapiens
  misc_RNA (1)...(19): siRNA sense strand
cggaggaccaguacagcuu

SEQ ID NO: 2249018 - RNA, 19 nt, Homo sapiens
  misc_RNA (1)...(19): siRNA sense strand
gugcaagcccggaugcuca

SEQ ID NO: 2249019 - RNA, 19 nt, Homo sapiens
  misc_RNA (1)...(19): siRNA sense strand
aggccuacaucgcgacaca

SEQ ID NO: 2249020 - RNA, 19 nt, Homo sapiens
  misc_RNA (1)...(19): siRNA sense strand
ucggaagcuuugaccacua

SEQ ID NO: 2249021 - RNA, 19 nt, Homo sapiens
  misc_RNA (1)...(19): siRNA sense strand
gauugaguuugaugagagu

SEQ ID NO: 2249022 - RNA, 19 nt, Homo sapiens
  misc_RNA (1)...(19): siRNA sense strand
gcgaacacgucacuggcau

SEQ ID NO: 2249023 - RNA, 19 nt, Homo sapiens
  misc_RNA (1)...(19): siRNA sense strand
uggugcagacagaggauga

SEQ ID NO: 2249024 - RNA, 19 nt, Homo sapiens
  misc_RNA (1)...(19): siRNA sense strand
ucaaaguaacaguggaaaa

SEQ ID NO: 2249025 - RNA, 19 nt, Homo sapiens
  misc_RNA (1)...(19): siRNA sense strand
uagaaaugaagauggacaa

SEQ ID NO: 2249026 - RNA, 19 nt, Homo sapiens
  misc_RNA (1)...(19): siRNA sense strand
ggaagaaggaggaguggug

SEQ ID NO: 2249027 - RNA, 19 nt, Homo sapiens
  misc_RNA (1)...(19): siRNA sense strand
agaaaugaagauggacaaa

SEQ ID NO: 2249028 - RNA, 19 nt, Homo sapiens
  misc_RNA (1)...(19): siRNA sense strand
uuagaaaugaagauggaca

SEQ ID NO: 2249029 - RNA, 19 nt, Homo sapiens
  misc_RNA (1)...(19): siRNA sense strand
cugaggagacccuggacuu

SEQ ID NO: 2249030 - RNA, 19 nt, Homo sapiens
  misc_RNA (1)...(19): siRNA sense strand
aagccuuauuucagguuau

SEQ ID NO: 2249031 - RNA, 19 nt, Homo sapiens
  misc_RNA (1)...(19): siRNA sense strand
ccuuauuucagguuaucua

SEQ ID NO: 2249032 - RNA, 19 nt, Homo sapiens
  misc_RNA (1)...(19): siRNA sense strand
uagaaaugaagauggacaa

SEQ ID NO: 2249033 - RNA, 19 nt, Homo sapiens
  misc_RNA (1)...(19): siRNA sense strand
ggaagaaggaggaguggug

SEQ ID NO: 2249034 - RNA, 19 nt, Homo sapiens
  misc_RNA (1)...(19): siRNA sense strand
agaaaugaagauggacaaa

SEQ ID NO: 2249035 - RNA, 19 nt, Homo sapiens
  misc_RNA (1)...(19): siRNA sense strand
uuagaaaugaagauggaca

SEQ ID NO: 2249036 - RNA, 19 nt, Homo sapiens
  misc_RNA (1)...(19): siRNA sense strand
cugaggagacccuggacuu

SEQ ID NO: 2249037 - RNA, 19 nt, Homo sapiens
  misc_RNA (1)...(19): siRNA sense strand
aagccuuauuucagguuau

SEQ ID NO: 2249038 - RNA, 19 nt, Homo sapiens
  misc_RNA (1)...(19): siRNA sense strand
ccuuauuucagguuaucua

SEQ ID NO: 2249039 - RNA, 19 nt, Homo sapiens
  misc_RNA (1)...(19): siRNA sense strand
ucaaaguaacaguggaaaa

SEQ ID NO: 2249040 - RNA, 19 nt, Homo sapiens
  misc_RNA (1)...(19): siRNA sense strand
uagaaaugaagauggacaa

SEQ ID NO: 2249041 - RNA, 19 nt, Homo sapiens
  misc_RNA (1)...(19): siRNA sense strand
ggaagaaggaggaguggug

SEQ ID NO: 2249042 - RNA, 19 nt, Homo sapiens
  misc_RNA (1)...(19): siRNA sense strand
agaaaugaagauggacaaa

SEQ ID NO: 2249043 - RNA, 19 nt, Homo sapiens
  misc_RNA (1)...(19): siRNA sense strand
uuagaaaugaagauggaca

SEQ ID NO: 2249044 - RNA, 19 nt, Homo sapiens
  misc_RNA (1)...(19): siRNA sense strand
cugaggagacccuggacuu

SEQ ID NO: 2249045 - RNA, 19 nt, Homo sapiens
  misc_RNA (1)...(19): siRNA sense strand
aagccuuauuucagguuau

SEQ ID NO: 2249046 - RNA, 19 nt, Homo sapiens
  misc_RNA (1)...(19): siRNA sense strand
ccuuauuucagguuaucua

SEQ ID NO: 2249047 - RNA, 19 nt, Homo sapiens
  misc_RNA (1)...(19): siRNA sense strand
ggguauugaaggaguacaa

SEQ ID NO: 2249048 - RNA, 19 nt, Homo sapiens
  misc_RNA (1)...(19): siRNA sense strand
cgguaagaaaaguggaaaa

SEQ ID NO: 2249049 - RNA, 19 nt, Homo sapiens
  misc_RNA (1)...(19): siRNA sense strand
ugacaauaacugagcaaaa

SEQ ID NO: 2249050 - RNA, 19 nt, Homo sapiens
  misc_RNA (1)...(19): siRNA sense strand
ccguguucuuggugaauua

SEQ ID NO: 2249051 - RNA, 19 nt, Homo sapiens
  misc_RNA (1)...(19): siRNA sense strand
accuaguacugaaggaaua

SEQ ID NO: 2249052 - RNA, 19 nt, Homo sapiens
  misc_RNA (1)...(19): siRNA sense strand
ggacaacagaauagcuaau

SEQ ID NO: 2249053 - RNA, 19 nt, Homo sapiens
  misc_RNA (1)...(19): siRNA sense strand
uggaacacuucgagaucaa

SEQ ID NO: 2249054 - RNA, 19 nt, Homo sapiens
  misc_RNA (1)...(19): siRNA sense strand
agaagauacaguugaguuu

SEQ ID NO: 2249055 - RNA, 19 nt, Homo sapiens
  misc_RNA (1)...(19): siRNA sense strand
caaagaauggcgauggcaa

SEQ ID NO: 2249056 - RNA, 19 nt, Homo sapiens
  misc_RNA (1)...(19): siRNA sense strand
acagauaacagaagauaca

SEQ ID NO: 2249057 - RNA, 19 nt, Homo sapiens
  misc_RNA (1)...(19): siRNA sense strand
cguacucagugguggagaa

SEQ ID NO: 2249058 - RNA, 19 nt, Homo sapiens
  misc_RNA (1)...(19): siRNA sense strand
gugucgacguggaaggcua

SEQ ID NO: 2249059 - RNA, 19 nt, Homo sapiens
  misc_RNA (1)...(19): siRNA sense strand
gaucagaaaaggaagggaa

SEQ ID NO: 2249060 - RNA, 19 nt, Homo sapiens
  misc_RNA (1)...(19): siRNA sense strand
aggaauacuuagacaaugu

SEQ ID NO: 2249061 - RNA, 19 nt, Homo sapiens
  misc_RNA (1)...(19): siRNA sense strand
uuacaugacccuuggaaca

SEQ ID NO: 2249062 - RNA, 19 nt, Homo sapiens
  misc_RNA (1)...(19): siRNA sense strand
gaugacaauaacugagcaa

SEQ ID NO: 2249063 - RNA, 19 nt, Homo sapiens
  misc_RNA (1)...(19): siRNA sense strand
cggccugcacgguaagaaa

SEQ ID NO: 2249064 - RNA, 19 nt, Homo sapiens
  misc_RNA (1)...(19): siRNA sense strand
gguccaaauggcugcggaa

SEQ ID NO: 2249065 - RNA, 19 nt, Homo sapiens
  misc_RNA (1)...(19): siRNA sense strand
acaaugagaaagaggggaa

SEQ ID NO: 2249066 - RNA, 19 nt, Homo sapiens
  misc_RNA (1)...(19): siRNA sense strand
uggacgagaagaucagaaa

SEQ ID NO: 2249067 - RNA, 19 nt, Homo sapiens
  misc_RNA (1)...(19): siRNA sense strand
ugaaggaauacuuagacaa

SEQ ID NO: 2249068 - RNA, 19 nt, Homo sapiens
  misc_RNA (1)...(19): siRNA sense strand
ccaaaguggaagaaugcuu

SEQ ID NO: 2249069 - RNA, 19 nt, Homo sapiens
  misc_RNA (1)...(19): siRNA sense strand
gagaaaucauuauugcaga

SEQ ID NO: 2249070 - RNA, 19 nt, Homo sapiens
  misc_RNA (1)...(19): siRNA sense strand
cagaaaaggaagggaauuu

SEQ ID NO: 2249071 - RNA, 19 nt, Homo sapiens
  misc_RNA (1)...(19): siRNA sense strand
cugaaggaauacuuagaca

SEQ ID NO: 2249072 - RNA, 19 nt, Homo sapiens
  misc_RNA (1)...(19): siRNA sense strand
cauuggucguagcaggaaa

SEQ ID NO: 2249073 - RNA, 19 nt, Homo sapiens
  misc_RNA (1)...(19): siRNA sense strand
cgugaaggaggcugggaca

SEQ ID NO: 2249074 - RNA, 19 nt, Homo sapiens
  misc_RNA (1)...(19): siRNA sense strand
augcaaguacugaaggauu

SEQ ID NO: 2249075 - RNA, 19 nt, Homo sapiens
  misc_RNA (1)...(19): siRNA sense strand
gauuacuaccaaaguggaa

SEQ ID NO: 2249076 - RNA, 19 nt, Homo sapiens
  misc_RNA (1)...(19): siRNA sense strand
gauaccuggugcuggagaa

SEQ ID NO: 2249077 - RNA, 19 nt, Homo sapiens
  misc_RNA (1)...(19): siRNA sense strand
ggacguacucaguggugga

SEQ ID NO: 2249078 - RNA, 19 nt, Homo sapiens
  misc_RNA (1)...(19): siRNA sense strand
cagcgagcaugauggccua

SEQ ID NO: 2249079 - RNA, 19 nt, Homo sapiens
  misc_RNA (1)...(19): siRNA sense strand
uaagaaaaguggaaaacca

SEQ ID NO: 2249080 - RNA, 19 nt, Homo sapiens
  misc_RNA (1)...(19): siRNA sense strand
caaacagauaacagaagau

SEQ ID NO: 2249081 - RNA, 19 nt, Homo sapiens
  misc_RNA (1)...(19): siRNA sense strand
ggcaaauaugagcgcacaa

SEQ ID NO: 2249082 - RNA, 19 nt, Homo sapiens
  misc_RNA (1)...(19): siRNA sense strand
cagugaagaaauugccuuu

SEQ ID NO: 2249083 - RNA, 19 nt, Homo sapiens
  misc_RNA (1)...(19): siRNA sense strand
cuagaggauuacuaccaaa

SEQ ID NO: 2249084 - RNA, 19 nt, Homo sapiens
  misc_RNA (1)...(19): siRNA sense strand
ccgaguaaggcucacuaaa

SEQ ID NO: 2249085 - RNA, 19 nt, Homo sapiens
  misc_RNA (1)...(19): siRNA sense strand
cuugguuguuucugggcua

SEQ ID NO: 2249086 - RNA, 19 nt, Homo sapiens
  misc_RNA (1)...(19): siRNA sense strand
cagaauuaaugcaaguacu

SEQ ID NO: 2249087 - RNA, 19 nt, Homo sapiens
  misc_RNA (1)...(19): siRNA sense strand
uccgaaaacugguggaaca

SEQ ID NO: 2249088 - RNA, 19 nt, Homo sapiens
  misc_RNA (1)...(19): siRNA sense strand
acguggaaggcuacauuua

SEQ ID NO: 2249089 - RNA, 19 nt, Homo sapiens
  misc_RNA (1)...(19): siRNA sense strand
acuaaaccugaaagaggaa

SEQ ID NO: 2249090 - RNA, 19 nt, Homo sapiens
  misc_RNA (1)...(19): siRNA sense strand
aggaaaucucuuuggaaac

SEQ ID NO: 2249091 - RNA, 19 nt, Homo sapiens
  misc_RNA (1)...(19): siRNA sense strand
agcaaaaguaugaaggaga

SEQ ID NO: 2249092 - RNA, 19 nt, Homo sapiens
  misc_RNA (1)...(19): siRNA sense strand
uacagaacaaugagaaaga

SEQ ID NO: 2249093 - RNA, 19 nt, Homo sapiens
  misc_RNA (1)...(19): siRNA sense strand
uguucuaauuuguggucca

SEQ ID NO: 2249094 - RNA, 19 nt, Homo sapiens
  misc_RNA (1)...(19): siRNA sense strand
cgucuaacuaaaccugaaa

SEQ ID NO: 2249095 - RNA, 19 nt, Homo sapiens
  misc_RNA (1)...(19): siRNA sense strand
auucaaaaugggacacuaa

SEQ ID NO: 2249096 - RNA, 19 nt, Homo sapiens
  misc_RNA (1)...(19): siRNA sense strand
cuggacaacagaauagcua

SEQ ID NO: 2249097 - RNA, 19 nt, Homo sapiens
  misc_RNA (1)...(19): siRNA sense strand
cuugauaccuggugcugga

SEQ ID NO: 2249098 - RNA, 19 nt, Homo sapiens
  misc_RNA (1)...(19): siRNA sense strand
uagaagacuacgagaguga

SEQ ID NO: 2249099 - RNA, 19 nt, Homo sapiens
  misc_RNA (1)...(19): siRNA sense strand
cuacgagagugaugggaca

SEQ ID NO: 2249100 - RNA, 19 nt, Homo sapiens
  misc_RNA (1)...(19): siRNA sense strand
ugauaucagaagugcaaua

SEQ ID NO: 2249101 - RNA, 19 nt, Homo sapiens
  misc_RNA (1)...(19): siRNA sense strand
cuucagagcuuuggggaaa

SEQ ID NO: 2249102 - RNA, 19 nt, Homo sapiens
  misc_RNA (1)...(19): siRNA sense strand
aggacauucugcagaggaa

SEQ ID NO: 2249103 - RNA, 19 nt, Homo sapiens
  misc_RNA (1)...(19): siRNA sense strand
cuucaaaaggagaaaacaa

SEQ ID NO: 2249104 - RNA, 19 nt, Homo sapiens
  misc_RNA (1)...(19): siRNA sense strand
ccaacaaagcccgaggaua

SEQ ID NO: 2249105 - RNA, 19 nt, Homo sapiens
  misc_RNA (1)...(19): siRNA sense strand
aaggagacauggaagaaaa

SEQ ID NO: 2249106 - RNA, 19 nt, Homo sapiens
  misc_RNA (1)...(19): siRNA sense strand
cuaacaagaauggaggaaa

SEQ ID NO: 2249107 - RNA, 19 nt, Homo sapiens
  misc_RNA (1)...(19): siRNA sense strand
acacuuuggaagauugaaa

SEQ ID NO: 2249108 - RNA, 19 nt, Homo sapiens
  misc_RNA (1)...(19): siRNA sense strand
ccagcuuaauggaggacau

SEQ ID NO: 2249109 - RNA, 19 nt, Homo sapiens
  misc_RNA (1)...(19): siRNA sense strand
uugccaaggaggaggauca

SEQ ID NO: 2249110 - RNA, 19 nt, Homo sapiens
  misc_RNA (1)...(19): siRNA sense strand
gcuaacaagaauggaggaa

SEQ ID NO: 2249111 - RNA, 19 nt, Homo sapiens
  misc_RNA (1)...(19): siRNA sense strand
gaaaacaacuuacggccaa

SEQ ID NO: 2249112 - RNA, 19 nt, Homo sapiens
  misc_RNA (1)...(19): siRNA sense strand
ucagaauaugaacgggaua

SEQ ID NO: 2249113 - RNA, 19 nt, Homo sapiens
  misc_RNA (1)...(19): siRNA sense strand
gaugauauugugagagcca

SEQ ID NO: 2249114 - RNA, 19 nt, Homo sapiens
  misc_RNA (1)...(19): siRNA sense strand
cuaagagcgacaaaguaua

SEQ ID NO: 2249115 - RNA, 19 nt, Homo sapiens
  misc_RNA (1)...(19): siRNA sense strand
gggaacauggaaugauaga

SEQ ID NO: 2249116 - RNA, 19 nt, Homo sapiens
  misc_RNA (1)...(19): siRNA sense strand
acaugaaguucuaaggaag

SEQ ID NO: 2249117 - RNA, 19 nt, Homo sapiens
  misc_RNA (1)...(19): siRNA sense strand
cagaauagugccagugaac

SEQ ID NO: 2249118 - RNA, 19 nt, Homo sapiens
  misc_RNA (1)...(19): siRNA sense strand
guuacaaaugcuuggagau

SEQ ID NO: 2249119 - RNA, 19 nt, Homo sapiens
  misc_RNA (1)...(19): siRNA sense strand
aggauaugcucauugccaa

SEQ ID NO: 2249120 - RNA, 19 nt, Homo sapiens
  misc_RNA (1)...(19): siRNA sense strand
cccaaggagacauggaaga

SEQ ID NO: 2249121 - RNA, 19 nt, Homo sapiens
  misc_RNA (1)...(19): siRNA sense strand
uaaggaaguaugugaggau

SEQ ID NO: 2249122 - RNA, 19 nt, Homo sapiens
  misc_RNA (1)...(19): siRNA sense strand
gauaauucugguugaagau

SEQ ID NO: 2249123 - RNA, 19 nt, Homo sapiens
  misc_RNA (1)...(19): siRNA sense strand
ggauacauuacuuguugaa

SEQ ID NO: 2249124 - RNA, 19 nt, Homo sapiens
  misc_RNA (1)...(19): siRNA sense strand
aguuacaaaugcuuggaga

SEQ ID NO: 2249125 - RNA, 19 nt, Homo sapiens
  misc_RNA (1)...(19): siRNA sense strand
ucccaaagaaauucaggaa

SEQ ID NO: 2249126 - RNA, 19 nt, Homo sapiens
  misc_RNA (1)...(19): siRNA sense strand
agacauggaagaaaacaua

SEQ ID NO: 2249127 - RNA, 19 nt, Homo sapiens
  misc_RNA (1)...(19): siRNA sense strand
guuucuacuaagagcgaca

SEQ ID NO: 2249128 - RNA, 19 nt, Homo sapiens
  misc_RNA (1)...(19): siRNA sense strand
augaacuugcugugcauaa

SEQ ID NO: 2249129 - RNA, 19 nt, Homo sapiens
  misc_RNA (1)...(19): siRNA sense strand
gaaaauugaagaagucgaa

SEQ ID NO: 2249130 - RNA, 19 nt, Homo sapiens
  misc_RNA (1)...(19): siRNA sense strand
aucaagagguccaagcuau

SEQ ID NO: 2249131 - RNA, 19 nt, Homo sapiens
  misc_RNA (1)...(19): siRNA sense strand
ucaagagguccaagcuauu

SEQ ID NO: 2249132 - RNA, 19 nt, Homo sapiens
  misc_RNA (1)...(19): siRNA sense strand
ccaaggaggaggaucaagu

SEQ ID NO: 2249133 - RNA, 19 nt, Homo sapiens
  misc_RNA (1)...(19): siRNA sense strand
aaauggaagcccugacuga

SEQ ID NO: 2249134 - RNA, 19 nt, Homo sapiens
  misc_RNA (1)...(19): siRNA sense strand
guggaaagacaacgaccuu

SEQ ID NO: 2249135 - RNA, 19 nt, Homo sapiens
  misc_RNA (1)...(19): siRNA sense strand
cugagaacugauaagaaga

SEQ ID NO: 2249136 - RNA, 19 nt, Homo sapiens
  misc_RNA (1)...(19): siRNA sense strand
agaaauucaggaagagugu

SEQ ID NO: 2249137 - RNA, 19 nt, Homo sapiens
  misc_RNA (1)...(19): siRNA sense strand
ugacuauagaagcuaacaa

SEQ ID NO: 2249138 - RNA, 19 nt, Homo sapiens
  misc_RNA (1)...(19): siRNA sense strand
cagggauguucuggugaua

SEQ ID NO: 2249139 - RNA, 19 nt, Homo sapiens
  misc_RNA (1)...(19): siRNA sense strand
cugacagggaacauggaau

SEQ ID NO: 2249140 - RNA, 19 nt, Homo sapiens
  misc_RNA (1)...(19): siRNA sense strand
uagaagacuacgagaguga

SEQ ID NO: 2249141 - RNA, 19 nt, Homo sapiens
  misc_RNA (1)...(19): siRNA sense strand
cuacgagagugaugggaca

SEQ ID NO: 2249142 - RNA, 19 nt, Homo sapiens
  misc_RNA (1)...(19): siRNA sense strand
ugauaucagaagugcaaua

SEQ ID NO: 2249143 - RNA, 19 nt, Homo sapiens
  misc_RNA (1)...(19): siRNA sense strand
cuucagagcuuuggggaaa

SEQ ID NO: 2249144 - RNA, 19 nt, Homo sapiens
  misc_RNA (1)...(19): siRNA sense strand
aggacauucugcagaggaa

SEQ ID NO: 2249145 - RNA, 19 nt, Homo sapiens
  misc_RNA (1)...(19): siRNA sense strand
cuucaaaaggagaaaacaa

SEQ ID NO: 2249146 - RNA, 19 nt, Homo sapiens
  misc_RNA (1)...(19): siRNA sense strand
ccaacaaagcccgaggaua

SEQ ID NO: 2249147 - RNA, 19 nt, Homo sapiens
  misc_RNA (1)...(19): siRNA sense strand
aaggagacauggaagaaaa

SEQ ID NO: 2249148 - RNA, 19 nt, Homo sapiens
  misc_RNA (1)...(19): siRNA sense strand
cuaacaagaauggaggaaa

SEQ ID NO: 2249149 - RNA, 19 nt, Homo sapiens
  misc_RNA (1)...(19): siRNA sense strand
acacuuuggaagauugaaa

SEQ ID NO: 2249150 - RNA, 19 nt, Homo sapiens
  misc_RNA (1)...(19): siRNA sense strand
ccagcuuaauggaggacau

SEQ ID NO: 2249151 - RNA, 19 nt, Homo sapiens
  misc_RNA (1)...(19): siRNA sense strand
uugccaaggaggaggauca

SEQ ID NO: 2249152 - RNA, 19 nt, Homo sapiens
  misc_RNA (1)...(19): siRNA sense strand
gcuaacaagaauggaggaa

SEQ ID NO: 2249153 - RNA, 19 nt, Homo sapiens
  misc_RNA (1)...(19): siRNA sense strand
gaaaacaacuuacggccaa

SEQ ID NO: 2249154 - RNA, 19 nt, Homo sapiens
  misc_RNA (1)...(19): siRNA sense strand
ucagaauaugaacgggaua

SEQ ID NO: 2249155 - RNA, 19 nt, Homo sapiens
  misc_RNA (1)...(19): siRNA sense strand
gaugauauugugagagcca

SEQ ID NO: 2249156 - RNA, 19 nt, Homo sapiens
  misc_RNA (1)...(19): siRNA sense strand
cuaagagcgacaaaguaua

SEQ ID NO: 2249157 - RNA, 19 nt, Homo sapiens
  misc_RNA (1)...(19): siRNA sense strand
gggaacauggaaugauaga

SEQ ID NO: 2249158 - RNA, 19 nt, Homo sapiens
  misc_RNA (1)...(19): siRNA sense strand
acaugaaguucuaaggaag

SEQ ID NO: 2249159 - RNA, 19 nt, Homo sapiens
  misc_RNA (1)...(19): siRNA sense strand
cagaauagugccagugaac

SEQ ID NO: 2249160 - RNA, 19 nt, Homo sapiens
  misc_RNA (1)...(19): siRNA sense strand
guuacaaaugcuuggagau

SEQ ID NO: 2249161 - RNA, 19 nt, Homo sapiens
  misc_RNA (1)...(19): siRNA sense strand
aggauaugcucauugccaa

SEQ ID NO: 2249162 - RNA, 19 nt, Homo sapiens
  misc_RNA (1)...(19): siRNA sense strand
cccaaggagacauggaaga

SEQ ID NO: 2249163 - RNA, 19 nt, Homo sapiens
  misc_RNA (1)...(19): siRNA sense strand
uaaggaaguaugugaggau

SEQ ID NO: 2249164 - RNA, 19 nt, Homo sapiens
  misc_RNA (1)...(19): siRNA sense strand
gauaauucugguugaagau

SEQ ID NO: 2249165 - RNA, 19 nt, Homo sapiens
  misc_RNA (1)...(19): siRNA sense strand
ggauacauuacuuguugaa

SEQ ID NO: 2249166 - RNA, 19 nt, Homo sapiens
  misc_RNA (1)...(19): siRNA sense strand
aguuacaaaugcuuggaga

SEQ ID NO: 2249167 - RNA, 19 nt, Homo sapiens
  misc_RNA (1)...(19): siRNA sense strand
ucccaaagaaauucaggaa

SEQ ID NO: 2249168 - RNA, 19 nt, Homo sapiens
  misc_RNA (1)...(19): siRNA sense strand
agacauggaagaaaacaua

SEQ ID NO: 2249169 - RNA, 19 nt, Homo sapiens
  misc_RNA (1)...(19): siRNA sense strand
guuucuacuaagagcgaca

SEQ ID NO: 2249170 - RNA, 19 nt, Homo sapiens
  misc_RNA (1)...(19): siRNA sense strand
augaacuugcugugcauaa

SEQ ID NO: 2249171 - RNA, 19 nt, Homo sapiens
  misc_RNA (1)...(19): siRNA sense strand
gaaaauugaagaagucgaa

SEQ ID NO: 2249172 - RNA, 19 nt, Homo sapiens
  misc_RNA (1)...(19): siRNA sense strand
aucaagagguccaagcuau

SEQ ID NO: 2249173 - RNA, 19 nt, Homo sapiens
  misc_RNA (1)...(19): siRNA sense strand
ucaagagguccaagcuauu

SEQ ID NO: 2249174 - RNA, 19 nt, Homo sapiens
  misc_RNA (1)...(19): siRNA sense strand
ccaaggaggaggaucaagu

SEQ ID NO: 2249175 - RNA, 19 nt, Homo sapiens
  misc_RNA (1)...(19): siRNA sense strand
aaauggaagcccugacuga

SEQ ID NO: 2249176 - RNA, 19 nt, Homo sapiens
  misc_RNA (1)...(19): siRNA sense strand
guggaaagacaacgaccuu

SEQ ID NO: 2249177 - RNA, 19 nt, Homo sapiens
  misc_RNA (1)...(19): siRNA sense strand
cugagaacugauaagaaga

SEQ ID NO: 2249178 - RNA, 19 nt, Homo sapiens
  misc_RNA (1)...(19): siRNA sense strand
agaaauucaggaagagugu

SEQ ID NO: 2249179 - RNA, 19 nt, Homo sapiens
  misc_RNA (1)...(19): siRNA sense strand
ugacuauagaagcuaacaa

SEQ ID NO: 2249180 - RNA, 19 nt, Homo sapiens
  misc_RNA (1)...(19): siRNA sense strand
cagggauguucuggugaua

SEQ ID NO: 2249181 - RNA, 19 nt, Homo sapiens
  misc_RNA (1)...(19): siRNA sense strand
cugacagggaacauggaau

SEQ ID NO: 2249182 - RNA, 19 nt, Homo sapiens
  misc_RNA (1)...(19): siRNA sense strand
uagaagacuacgagaguga

SEQ ID NO: 2249183 - RNA, 19 nt, Homo sapiens
  misc_RNA (1)...(19): siRNA sense strand
cuacgagagugaugggaca

SEQ ID NO: 2249184 - RNA, 19 nt, Homo sapiens
  misc_RNA (1)...(19): siRNA sense strand
ugauaucagaagugcaaua

SEQ ID NO: 2249185 - RNA, 19 nt, Homo sapiens
  misc_RNA (1)...(19): siRNA sense strand
cuucagagcuuuggggaaa

SEQ ID NO: 2249186 - RNA, 19 nt, Homo sapiens
  misc_RNA (1)...(19): siRNA sense strand
aggacauucugcagaggaa

SEQ ID NO: 2249187 - RNA, 19 nt, Homo sapiens
  misc_RNA (1)...(19): siRNA sense strand
cuucaaaaggagaaaacaa

SEQ ID NO: 2249188 - RNA, 19 nt, Homo sapiens
  misc_RNA (1)...(19): siRNA sense strand
ccaacaaagcccgaggaua

SEQ ID NO: 2249189 - RNA, 19 nt, Homo sapiens
  misc_RNA (1)...(19): siRNA sense strand
aaggagacauggaagaaaa

SEQ ID NO: 2249190 - RNA, 19 nt, Homo sapiens
  misc_RNA (1)...(19): siRNA sense strand
cuaacaagaauggaggaaa

SEQ ID NO: 2249191 - RNA, 19 nt, Homo sapiens
  misc_RNA (1)...(19): siRNA sense strand
acacuuuggaagauugaaa

SEQ ID NO: 2249192 - RNA, 19 nt, Homo sapiens
  misc_RNA (1)...(19): siRNA sense strand
ccagcuuaauggaggacau

SEQ ID NO: 2249193 - RNA, 19 nt, Homo sapiens
  misc_RNA (1)...(19): siRNA sense strand
uugccaaggaggaggauca

SEQ ID NO: 2249194 - RNA, 19 nt, Homo sapiens
  misc_RNA (1)...(19): siRNA sense strand
gcuaacaagaauggaggaa

SEQ ID NO: 2249195 - RNA, 19 nt, Homo sapiens
  misc_RNA (1)...(19): siRNA sense strand
gaaaacaacuuacggccaa

SEQ ID NO: 2249196 - RNA, 19 nt, Homo sapiens
  misc_RNA (1)...(19): siRNA sense strand
ucagaauaugaacgggaua

SEQ ID NO: 2249197 - RNA, 19 nt, Homo sapiens
  misc_RNA (1)...(19): siRNA sense strand
gaugauauugugagagcca

SEQ ID NO: 2249198 - RNA, 19 nt, Homo sapiens
  misc_RNA (1)...(19): siRNA sense strand
cuaagagcgacaaaguaua

SEQ ID NO: 2249199 - RNA, 19 nt, Homo sapiens
  misc_RNA (1)...(19): siRNA sense strand
gggaacauggaaugauaga

SEQ ID NO: 2249200 - RNA, 19 nt, Homo sapiens
  misc_RNA (1)...(19): siRNA sense strand
acaugaaguucuaaggaag

SEQ ID NO: 2249201 - RNA, 19 nt, Homo sapiens
  misc_RNA (1)...(19): siRNA sense strand
cagaauagugccagugaac

SEQ ID NO: 2249202 - RNA, 19 nt, Homo sapiens
  misc_RNA (1)...(19): siRNA sense strand
guuacaaaugcuuggagau

SEQ ID NO: 2249203 - RNA, 19 nt, Homo sapiens
  misc_RNA (1)...(19): siRNA sense strand
aggauaugcucauugccaa

SEQ ID NO: 2249204 - RNA, 19 nt, Homo sapiens
  misc_RNA (1)...(19): siRNA sense strand
cccaaggagacauggaaga

SEQ ID NO: 2249205 - RNA, 19 nt, Homo sapiens
  misc_RNA (1)...(19): siRNA sense strand
uaaggaaguaugugaggau

SEQ ID NO: 2249206 - RNA, 19 nt, Homo sapiens
  misc_RNA (1)...(19): siRNA sense strand
gauaauucugguugaagau

SEQ ID NO: 2249207 - RNA, 19 nt, Homo sapiens
  misc_RNA (1)...(19): siRNA sense strand
ggauacauuacuuguugaa

SEQ ID NO: 2249208 - RNA, 19 nt, Homo sapiens
  misc_RNA (1)...(19): siRNA sense strand
aguuacaaaugcuuggaga

SEQ ID NO: 2249209 - RNA, 19 nt, Homo sapiens
  misc_RNA (1)...(19): siRNA sense strand
ucccaaagaaauucaggaa

SEQ ID NO: 2249210 - RNA, 19 nt, Homo sapiens
  misc_RNA (1)...(19): siRNA sense strand
agacauggaagaaaacaua

SEQ ID NO: 2249211 - RNA, 19 nt, Homo sapiens
  misc_RNA (1)...(19): siRNA sense strand
guuucuacuaagagcgaca

SEQ ID NO: 2249212 - RNA, 19 nt, Homo sapiens
  misc_RNA (1)...(19): siRNA sense strand
augaacuugcugugcauaa

SEQ ID NO: 2249213 - RNA, 19 nt, Homo sapiens
  misc_RNA (1)...(19): siRNA sense strand
gaaaauugaagaagucgaa

SEQ ID NO: 2249214 - RNA, 19 nt, Homo sapiens
  misc_RNA (1)...(19): siRNA sense strand
aucaagagguccaagcuau

SEQ ID NO: 2249215 - RNA, 19 nt, Homo sapiens
  misc_RNA (1)...(19): siRNA sense strand
ucaagagguccaagcuauu

SEQ ID NO: 2249216 - RNA, 19 nt, Homo sapiens
  misc_RNA (1)...(19): siRNA sense strand
ccaaggaggaggaucaagu

SEQ ID NO: 2249217 - RNA, 19 nt, Homo sapiens
  misc_RNA (1)...(19): siRNA sense strand
aaauggaagcccugacuga

SEQ ID NO: 2249218 - RNA, 19 nt, Homo sapiens
  misc_RNA (1)...(19): siRNA sense strand
guggaaagacaacgaccuu

SEQ ID NO: 2249219 - RNA, 19 nt, Homo sapiens
  misc_RNA (1)...(19): siRNA sense strand
cugagaacugauaagaaga

SEQ ID NO: 2249220 - RNA, 19 nt, Homo sapiens
  misc_RNA (1)...(19): siRNA sense strand
agaaauucaggaagagugu

SEQ ID NO: 2249221 - RNA, 19 nt, Homo sapiens
  misc_RNA (1)...(19): siRNA sense strand
ugacuauagaagcuaacaa

SEQ ID NO: 2249222 - RNA, 19 nt, Homo sapiens
  misc_RNA (1)...(19): siRNA sense strand
cagggauguucuggugaua

SEQ ID NO: 2249223 - RNA, 19 nt, Homo sapiens
  misc_RNA (1)...(19): siRNA sense strand
cugacagggaacauggaau

SEQ ID NO: 2249224 - RNA, 19 nt, Homo sapiens
  misc_RNA (1)...(19): siRNA sense strand
uagaagacuacgagaguga

SEQ ID NO: 2249225 - RNA, 19 nt, Homo sapiens
  misc_RNA (1)...(19): siRNA sense strand
cuacgagagugaugggaca

SEQ ID NO: 2249226 - RNA, 19 nt, Homo sapiens
  misc_RNA (1)...(19): siRNA sense strand
ugauaucagaagugcaaua

SEQ ID NO: 2249227 - RNA, 19 nt, Homo sapiens
  misc_RNA (1)...(19): siRNA sense strand
cuucagagcuuuggggaaa

SEQ ID NO: 2249228 - RNA, 19 nt, Homo sapiens
  misc_RNA (1)...(19): siRNA sense strand
aggacauucugcagaggaa

SEQ ID NO: 2249229 - RNA, 19 nt, Homo sapiens
  misc_RNA (1)...(19): siRNA sense strand
cuucaaaaggagaaaacaa

SEQ ID NO: 2249230 - RNA, 19 nt, Homo sapiens
  misc_RNA (1)...(19): siRNA sense strand
ccaacaaagcccgaggaua

SEQ ID NO: 2249231 - RNA, 19 nt, Homo sapiens
  misc_RNA (1)...(19): siRNA sense strand
aaggagacauggaagaaaa

SEQ ID NO: 2249232 - RNA, 19 nt, Homo sapiens
  misc_RNA (1)...(19): siRNA sense strand
cuaacaagaauggaggaaa

SEQ ID NO: 2249233 - RNA, 19 nt, Homo sapiens
  misc_RNA (1)...(19): siRNA sense strand
acacuuuggaagauugaaa

SEQ ID NO: 2249234 - RNA, 19 nt, Homo sapiens
  misc_RNA (1)...(19): siRNA sense strand
ccagcuuaauggaggacau

SEQ ID NO: 2249235 - RNA, 19 nt, Homo sapiens
  misc_RNA (1)...(19): siRNA sense strand
uugccaaggaggaggauca

SEQ ID NO: 2249236 - RNA, 19 nt, Homo sapiens
  misc_RNA (1)...(19): siRNA sense strand
gcuaacaagaauggaggaa

SEQ ID NO: 2249237 - RNA, 19 nt, Homo sapiens
  misc_RNA (1)...(19): siRNA sense strand
gaaaacaacuuacggccaa

SEQ ID NO: 2249238 - RNA, 19 nt, Homo sapiens
  misc_RNA (1)...(19): siRNA sense strand
ucagaauaugaacgggaua

SEQ ID NO: 2249239 - RNA, 19 nt, Homo sapiens
  misc_RNA (1)...(19): siRNA sense strand
gaugauauugugagagcca

SEQ ID NO: 2249240 - RNA, 19 nt, Homo sapiens
  misc_RNA (1)...(19): siRNA sense strand
cuaagagcgacaaaguaua

SEQ ID NO: 2249241 - RNA, 19 nt, Homo sapiens
  misc_RNA (1)...(19): siRNA sense strand
gggaacauggaaugauaga

SEQ ID NO: 2249242 - RNA, 19 nt, Homo sapiens
  misc_RNA (1)...(19): siRNA sense strand
acaugaaguucuaaggaag

SEQ ID NO: 2249243 - RNA, 19 nt, Homo sapiens
  misc_RNA (1)...(19): siRNA sense strand
cagaauagugccagugaac

SEQ ID NO: 2249244 - RNA, 19 nt, Homo sapiens
  misc_RNA (1)...(19): siRNA sense strand
guuacaaaugcuuggagau

SEQ ID NO: 2249245 - RNA, 19 nt, Homo sapiens
  misc_RNA (1)...(19): siRNA sense strand
aggauaugcucauugccaa

SEQ ID NO: 2249246 - RNA, 19 nt, Homo sapiens
  misc_RNA (1)...(19): siRNA sense strand
cccaaggagacauggaaga

SEQ ID NO: 2249247 - RNA, 19 nt, Homo sapiens
  misc_RNA (1)...(19): siRNA sense strand
uaaggaaguaugugaggau

SEQ ID NO: 2249248 - RNA, 19 nt, Homo sapiens
  misc_RNA (1)...(19): siRNA sense strand
gauaauucugguugaagau

SEQ ID NO: 2249249 - RNA, 19 nt, Homo sapiens
  misc_RNA (1)...(19): siRNA sense strand
ggauacauuacuuguugaa

SEQ ID NO: 2249250 - RNA, 19 nt, Homo sapiens
  misc_RNA (1)...(19): siRNA sense strand
aguuacaaaugcuuggaga

SEQ ID NO: 2249251 - RNA, 19 nt, Homo sapiens
  misc_RNA (1)...(19): siRNA sense strand
ucccaaagaaauucaggaa

SEQ ID NO: 2249252 - RNA, 19 nt, Homo sapiens
  misc_RNA (1)...(19): siRNA sense strand
agacauggaagaaaacaua

SEQ ID NO: 2249253 - RNA, 19 nt, Homo sapiens
  misc_RNA (1)...(19): siRNA sense strand
guuucuacuaagagcgaca

SEQ ID NO: 2249254 - RNA, 19 nt, Homo sapiens
  misc_RNA (1)...(19): siRNA sense strand
aucaagagguccaagcuau

SEQ ID NO: 2249255 - RNA, 19 nt, Homo sapiens
  misc_RNA (1)...(19): siRNA sense strand
ucaagagguccaagcuauu

SEQ ID NO: 2249256 - RNA, 19 nt, Homo sapiens
  misc_RNA (1)...(19): siRNA sense strand
ccaaggaggaggaucaagu

SEQ ID NO: 2249257 - RNA, 19 nt, Homo sapiens
  misc_RNA (1)...(19): siRNA sense strand
aaauggaagcccugacuga

SEQ ID NO: 2249258 - RNA, 19 nt, Homo sapiens
  misc_RNA (1)...(19): siRNA sense strand
cugagaacugauaagaaga

SEQ ID NO: 2249259 - RNA, 19 nt, Homo sapiens
  misc_RNA (1)...(19): siRNA sense strand
agaaauucaggaagagugu

SEQ ID NO: 2249260 - RNA, 19 nt, Homo sapiens
  misc_RNA (1)...(19): siRNA sense strand
ugacuauagaagcuaacaa

SEQ ID NO: 2249261 - RNA, 19 nt, Homo sapiens
  misc_RNA (1)...(19): siRNA sense strand
cagggauguucuggugaua

SEQ ID NO: 2249262 - RNA, 19 nt, Homo sapiens
  misc_RNA (1)...(19): siRNA sense strand
cugacagggaacauggaau

SEQ ID NO: 2249263 - RNA, 19 nt, Homo sapiens
  misc_RNA (1)...(19): siRNA sense strand
uagaagacuacgagaguga

SEQ ID NO: 2249264 - RNA, 19 nt, Homo sapiens
  misc_RNA (1)...(19): siRNA sense strand
cuacgagagugaugggaca

SEQ ID NO: 2249265 - RNA, 19 nt, Homo sapiens
  misc_RNA (1)...(19): siRNA sense strand
ugauaucagaagugcaaua

SEQ ID NO: 2249266 - RNA, 19 nt, Homo sapiens
  misc_RNA (1)...(19): siRNA sense strand
cuucagagcuuuggggaaa

SEQ ID NO: 2249267 - RNA, 19 nt, Homo sapiens
  misc_RNA (1)...(19): siRNA sense strand
aggacauucugcagaggaa

SEQ ID NO: 2249268 - RNA, 19 nt, Homo sapiens
  misc_RNA (1)...(19): siRNA sense strand
cuucaaaaggagaaaacaa

SEQ ID NO: 2249269 - RNA, 19 nt, Homo sapiens
  misc_RNA (1)...(19): siRNA sense strand
ccaacaaagcccgaggaua

SEQ ID NO: 2249270 - RNA, 19 nt, Homo sapiens
  misc_RNA (1)...(19): siRNA sense strand
aaggagacauggaagaaaa

SEQ ID NO: 2249271 - RNA, 19 nt, Homo sapiens
  misc_RNA (1)...(19): siRNA sense strand
cuaacaagaauggaggaaa

SEQ ID NO: 2249272 - RNA, 19 nt, Homo sapiens
  misc_RNA (1)...(19): siRNA sense strand
acacuuuggaagauugaaa

SEQ ID NO: 2249273 - RNA, 19 nt, Homo sapiens
  misc_RNA (1)...(19): siRNA sense strand
ccagcuuaauggaggacau

SEQ ID NO: 2249274 - RNA, 19 nt, Homo sapiens
  misc_RNA (1)...(19): siRNA sense strand
uugccaaggaggaggauca

SEQ ID NO: 2249275 - RNA, 19 nt, Homo sapiens
  misc_RNA (1)...(19): siRNA sense strand
gcuaacaagaauggaggaa

SEQ ID NO: 2249276 - RNA, 19 nt, Homo sapiens
  misc_RNA (1)...(19): siRNA sense strand
gaaaacaacuuacggccaa

SEQ ID NO: 2249277 - RNA, 19 nt, Homo sapiens
  misc_RNA (1)...(19): siRNA sense strand
ucagaauaugaacgggaua

SEQ ID NO: 2249278 - RNA, 19 nt, Homo sapiens
  misc_RNA (1)...(19): siRNA sense strand
gaugauauugugagagcca

SEQ ID NO: 2249279 - RNA, 19 nt, Homo sapiens
  misc_RNA (1)...(19): siRNA sense strand
cuaagagcgacaaaguaua

SEQ ID NO: 2249280 - RNA, 19 nt, Homo sapiens
  misc_RNA (1)...(19): siRNA sense strand
gggaacauggaaugauaga

SEQ ID NO: 2249281 - RNA, 19 nt, Homo sapiens
  misc_RNA (1)...(19): siRNA sense strand
acaugaaguucuaaggaag

SEQ ID NO: 2249282 - RNA, 19 nt, Homo sapiens
  misc_RNA (1)...(19): siRNA sense strand
cagaauagugccagugaac

SEQ ID NO: 2249283 - RNA, 19 nt, Homo sapiens
  misc_RNA (1)...(19): siRNA sense strand
guuacaaaugcuuggagau

SEQ ID NO: 2249284 - RNA, 19 nt, Homo sapiens
  misc_RNA (1)...(19): siRNA sense strand
aggauaugcucauugccaa

SEQ ID NO: 2249285 - RNA, 19 nt, Homo sapiens
  misc_RNA (1)...(19): siRNA sense strand
cccaaggagacauggaaga

SEQ ID NO: 2249286 - RNA, 19 nt, Homo sapiens
  misc_RNA (1)...(19): siRNA sense strand
uaaggaaguaugugaggau

SEQ ID NO: 2249287 - RNA, 19 nt, Homo sapiens
  misc_RNA (1)...(19): siRNA sense strand
gauaauucugguugaagau

SEQ ID NO: 2249288 - RNA, 19 nt, Homo sapiens
  misc_RNA (1)...(19): siRNA sense strand
ggauacauuacuuguugaa

SEQ ID NO: 2249289 - RNA, 19 nt, Homo sapiens
  misc_RNA (1)...(19): siRNA sense strand
aguuacaaaugcuuggaga

SEQ ID NO: 2249290 - RNA, 19 nt, Homo sapiens
  misc_RNA (1)...(19): siRNA sense strand
ucccaaagaaauucaggaa

SEQ ID NO: 2249291 - RNA, 19 nt, Homo sapiens
  misc_RNA (1)...(19): siRNA sense strand
agacauggaagaaaacaua

SEQ ID NO: 2249292 - RNA, 19 nt, Homo sapiens
  misc_RNA (1)...(19): siRNA sense strand
guuucuacuaagagcgaca

SEQ ID NO: 2249293 - RNA, 19 nt, Homo sapiens
  misc_RNA (1)...(19): siRNA sense strand
augaacuugcugugcauaa

SEQ ID NO: 2249294 - RNA, 19 nt, Homo sapiens
  misc_RNA (1)...(19): siRNA sense strand
gaaaauugaagaagucgaa

SEQ ID NO: 2249295 - RNA, 19 nt, Homo sapiens
  misc_RNA (1)...(19): siRNA sense strand
aucaagagguccaagcuau

SEQ ID NO: 2249296 - RNA, 19 nt, Homo sapiens
  misc_RNA (1)...(19): siRNA sense strand
ucaagagguccaagcuauu

SEQ ID NO: 2249297 - RNA, 19 nt, Homo sapiens
  misc_RNA (1)...(19): siRNA sense strand
ccaaggaggaggaucaagu

SEQ ID NO: 2249298 - RNA, 19 nt, Homo sapiens
  misc_RNA (1)...(19): siRNA sense strand
aaauggaagcccugacuga

SEQ ID NO: 2249299 - RNA, 19 nt, Homo sapiens
  misc_RNA (1)...(19): siRNA sense strand
guggaaagacaacgaccuu

SEQ ID NO: 2249300 - RNA, 19 nt, Homo sapiens
  misc_RNA (1)...(19): siRNA sense strand
cugagaacugauaagaaga

SEQ ID NO: 2249301 - RNA, 19 nt, Homo sapiens
  misc_RNA (1)...(19): siRNA sense strand
agaaauucaggaagagugu

SEQ ID NO: 2249302 - RNA, 19 nt, Homo sapiens
  misc_RNA (1)...(19): siRNA sense strand
ugacuauagaagcuaacaa

SEQ ID NO: 2249303 - RNA, 19 nt, Homo sapiens
  misc_RNA (1)...(19): siRNA sense strand
cagggauguucuggugaua

SEQ ID NO: 2249304 - RNA, 19 nt, Homo sapiens
  misc_RNA (1)...(19): siRNA sense strand
cugacagggaacauggaau

SEQ ID NO: 2249305 - RNA, 19 nt, Homo sapiens
  misc_RNA (1)...(19): siRNA sense strand
uagaagacuacgagaguga

SEQ ID NO: 2249306 - RNA, 19 nt, Homo sapiens
  misc_RNA (1)...(19): siRNA sense strand
cuacgagagugaugggaca

SEQ ID NO: 2249307 - RNA, 19 nt, Homo sapiens
  misc_RNA (1)...(19): siRNA sense strand
ugauaucagaagugcaaua

SEQ ID NO: 2249308 - RNA, 19 nt, Homo sapiens
  misc_RNA (1)...(19): siRNA sense strand
cuucagagcuuuggggaaa

SEQ ID NO: 2249309 - RNA, 19 nt, Homo sapiens
  misc_RNA (1)...(19): siRNA sense strand
aggacauucugcagaggaa

SEQ ID NO: 2249310 - RNA, 19 nt, Homo sapiens
  misc_RNA (1)...(19): siRNA sense strand
cuucaaaaggagaaaacaa

SEQ ID NO: 2249311 - RNA, 19 nt, Homo sapiens
  misc_RNA (1)...(19): siRNA sense strand
ccaacaaagcccgaggaua

SEQ ID NO: 2249312 - RNA, 19 nt, Homo sapiens
  misc_RNA (1)...(19): siRNA sense strand
aaggagacauggaagaaaa

SEQ ID NO: 2249313 - RNA, 19 nt, Homo sapiens
  misc_RNA (1)...(19): siRNA sense strand
cuaacaagaauggaggaaa

SEQ ID NO: 2249314 - RNA, 19 nt, Homo sapiens
  misc_RNA (1)...(19): siRNA sense strand
acacuuuggaagauugaaa

SEQ ID NO: 2249315 - RNA, 19 nt, Homo sapiens
  misc_RNA (1)...(19): siRNA sense strand
ccagcuuaauggaggacau

SEQ ID NO: 2249316 - RNA, 19 nt, Homo sapiens
  misc_RNA (1)...(19): siRNA sense strand
uugccaaggaggaggauca

SEQ ID NO: 2249317 - RNA, 19 nt, Homo sapiens
  misc_RNA (1)...(19): siRNA sense strand
gcuaacaagaauggaggaa

SEQ ID NO: 2249318 - RNA, 19 nt, Homo sapiens
  misc_RNA (1)...(19): siRNA sense strand
gaaaacaacuuacggccaa

SEQ ID NO: 2249319 - RNA, 19 nt, Homo sapiens
  misc_RNA (1)...(19): siRNA sense strand
ucagaauaugaacgggaua

SEQ ID NO: 2249320 - RNA, 19 nt, Homo sapiens
  misc_RNA (1)...(19): siRNA sense strand
gaugauauugugagagcca

SEQ ID NO: 2249321 - RNA, 19 nt, Homo sapiens
  misc_RNA (1)...(19): siRNA sense strand
cuaagagcgacaaaguaua

SEQ ID NO: 2249322 - RNA, 19 nt, Homo sapiens
  misc_RNA (1)...(19): siRNA sense strand
gggaacauggaaugauaga

SEQ ID NO: 2249323 - RNA, 19 nt, Homo sapiens
  misc_RNA (1)...(19): siRNA sense strand
acaugaaguucuaaggaag

SEQ ID NO: 2249324 - RNA, 19 nt, Homo sapiens
  misc_RNA (1)...(19): siRNA sense strand
cagaauagugccagugaac

SEQ ID NO: 2249325 - RNA, 19 nt, Homo sapiens
  misc_RNA (1)...(19): siRNA sense strand
guuacaaaugcuuggagau

SEQ ID NO: 2249326 - RNA, 19 nt, Homo sapiens
  misc_RNA (1)...(19): siRNA sense strand
aggauaugcucauugccaa

SEQ ID NO: 2249327 - RNA, 19 nt, Homo sapiens
  misc_RNA (1)...(19): siRNA sense strand
cccaaggagacauggaaga

SEQ ID NO: 2249328 - RNA, 19 nt, Homo sapiens
  misc_RNA (1)...(19): siRNA sense strand
uaaggaaguaugugaggau

SEQ ID NO: 2249329 - RNA, 19 nt, Homo sapiens
  misc_RNA (1)...(19): siRNA sense strand
gauaauucugguugaagau

SEQ ID NO: 2249330 - RNA, 19 nt, Homo sapiens
  misc_RNA (1)...(19): siRNA sense strand
ggauacauuacuuguugaa

SEQ ID NO: 2249331 - RNA, 19 nt, Homo sapiens
  misc_RNA (1)...(19): siRNA sense strand
aguuacaaaugcuuggaga

SEQ ID NO: 2249332 - RNA, 19 nt, Homo sapiens
  misc_RNA (1)...(19): siRNA sense strand
ucccaaagaaauucaggaa

SEQ ID NO: 2249333 - RNA, 19 nt, Homo sapiens
  misc_RNA (1)...(19): siRNA sense strand
agacauggaagaaaacaua

SEQ ID NO: 2249334 - RNA, 19 nt, Homo sapiens
  misc_RNA (1)...(19): siRNA sense strand
guuucuacuaagagcgaca

SEQ ID NO: 2249335 - RNA, 19 nt, Homo sapiens
  misc_RNA (1)...(19): siRNA sense strand
augaacuugcugugcauaa

SEQ ID NO: 2249336 - RNA, 19 nt, Homo sapiens
  misc_RNA (1)...(19): siRNA sense strand
gaaaauugaagaagucgaa

SEQ ID NO: 2249337 - RNA, 19 nt, Homo sapiens
  misc_RNA (1)...(19): siRNA sense strand
aucaagagguccaagcuau

SEQ ID NO: 2249338 - RNA, 19 nt, Homo sapiens
  misc_RNA (1)...(19): siRNA sense strand
ucaagagguccaagcuauu

SEQ ID NO: 2249339 - RNA, 19 nt, Homo sapiens
  misc_RNA (1)...(19): siRNA sense strand
ccaaggaggaggaucaagu

SEQ ID NO: 2249340 - RNA, 19 nt, Homo sapiens
  misc_RNA (1)...(19): siRNA sense strand
aaauggaagcccugacuga

SEQ ID NO: 2249341 - RNA, 19 nt, Homo sapiens
  misc_RNA (1)...(19): siRNA sense strand
guggaaagacaacgaccuu

SEQ ID NO: 2249342 - RNA, 19 nt, Homo sapiens
  misc_RNA (1)...(19): siRNA sense strand
cugagaacugauaagaaga

SEQ ID NO: 2249343 - RNA, 19 nt, Homo sapiens
  misc_RNA (1)...(19): siRNA sense strand
agaaauucaggaagagugu

SEQ ID NO: 2249344 - RNA, 19 nt, Homo sapiens
  misc_RNA (1)...(19): siRNA sense strand
ugacuauagaagcuaacaa

SEQ ID NO: 2249345 - RNA, 19 nt, Homo sapiens
  misc_RNA (1)...(19): siRNA sense strand
cagggauguucuggugaua

SEQ ID NO: 2249346 - RNA, 19 nt, Homo sapiens
  misc_RNA (1)...(19): siRNA sense strand
cugacagggaacauggaau

SEQ ID NO: 2249347 - RNA, 19 nt, Homo sapiens
  misc_RNA (1)...(19): siRNA sense strand
uagaagacuacgagaguga

SEQ ID NO: 2249348 - RNA, 19 nt, Homo sapiens
  misc_RNA (1)...(19): siRNA sense strand
cuacgagagugaugggaca

SEQ ID NO: 2249349 - RNA, 19 nt, Homo sapiens
  misc_RNA (1)...(19): siRNA sense strand
ugauaucagaagugcaaua

SEQ ID NO: 2249350 - RNA, 19 nt, Homo sapiens
  misc_RNA (1)...(19): siRNA sense strand
cuucagagcuuuggggaaa

SEQ ID NO: 2249351 - RNA, 19 nt, Homo sapiens
  misc_RNA (1)...(19): siRNA sense strand
aggacauucugcagaggaa

SEQ ID NO: 2249352 - RNA, 19 nt, Homo sapiens
  misc_RNA (1)...(19): siRNA sense strand
cuucaaaaggagaaaacaa

SEQ ID NO: 2249353 - RNA, 19 nt, Homo sapiens
  misc_RNA (1)...(19): siRNA sense strand
ccaacaaagcccgaggaua

SEQ ID NO: 2249354 - RNA, 19 nt, Homo sapiens
  misc_RNA (1)...(19): siRNA sense strand
aaggagacauggaagaaaa

SEQ ID NO: 2249355 - RNA, 19 nt, Homo sapiens
  misc_RNA (1)...(19): siRNA sense strand
cuaacaagaauggaggaaa

SEQ ID NO: 2249356 - RNA, 19 nt, Homo sapiens
  misc_RNA (1)...(19): siRNA sense strand
acacuuuggaagauugaaa

SEQ ID NO: 2249357 - RNA, 19 nt, Homo sapiens
  misc_RNA (1)...(19): siRNA sense strand
ccagcuuaauggaggacau

SEQ ID NO: 2249358 - RNA, 19 nt, Homo sapiens
  misc_RNA (1)...(19): siRNA sense strand
uugccaaggaggaggauca

SEQ ID NO: 2249359 - RNA, 19 nt, Homo sapiens
  misc_RNA (1)...(19): siRNA sense strand
gcuaacaagaauggaggaa

SEQ ID NO: 2249360 - RNA, 19 nt, Homo sapiens
  misc_RNA (1)...(19): siRNA sense strand
gaaaacaacuuacggccaa

SEQ ID NO: 2249361 - RNA, 19 nt, Homo sapiens
  misc_RNA (1)...(19): siRNA sense strand
ucagaauaugaacgggaua

SEQ ID NO: 2249362 - RNA, 19 nt, Homo sapiens
  misc_RNA (1)...(19): siRNA sense strand
gaugauauugugagagcca

SEQ ID NO: 2249363 - RNA, 19 nt, Homo sapiens
  misc_RNA (1)...(19): siRNA sense strand
cuaagagcgacaaaguaua

SEQ ID NO: 2249364 - RNA, 19 nt, Homo sapiens
  misc_RNA (1)...(19): siRNA sense strand
gggaacauggaaugauaga

SEQ ID NO: 2249365 - RNA, 19 nt, Homo sapiens
  misc_RNA (1)...(19): siRNA sense strand
acaugaaguucuaaggaag

SEQ ID NO: 2249366 - RNA, 19 nt, Homo sapiens
  misc_RNA (1)...(19): siRNA sense strand
cagaauagugccagugaac

SEQ ID NO: 2249367 - RNA, 19 nt, Homo sapiens
  misc_RNA (1)...(19): siRNA sense strand
guuacaaaugcuuggagau

SEQ ID NO: 2249368 - RNA, 19 nt, Homo sapiens
  misc_RNA (1)...(19): siRNA sense strand
aggauaugcucauugccaa

SEQ ID NO: 2249369 - RNA, 19 nt, Homo sapiens
  misc_RNA (1)...(19): siRNA sense strand
cccaaggagacauggaaga

SEQ ID NO: 2249370 - RNA, 19 nt, Homo sapiens
  misc_RNA (1)...(19): siRNA sense strand
uaaggaaguaugugaggau

SEQ ID NO: 2249371 - RNA, 19 nt, Homo sapiens
  misc_RNA (1)...(19): siRNA sense strand
gauaauucugguugaagau

SEQ ID NO: 2249372 - RNA, 19 nt, Homo sapiens
  misc_RNA (1)...(19): siRNA sense strand
ggauacauuacuuguugaa

SEQ ID NO: 2249373 - RNA, 19 nt, Homo sapiens
  misc_RNA (1)...(19): siRNA sense strand
aguuacaaaugcuuggaga

SEQ ID NO: 2249374 - RNA, 19 nt, Homo sapiens
  misc_RNA (1)...(19): siRNA sense strand
ucccaaagaaauucaggaa

SEQ ID NO: 2249375 - RNA, 19 nt, Homo sapiens
  misc_RNA (1)...(19): siRNA sense strand
agacauggaagaaaacaua

SEQ ID NO: 2249376 - RNA, 19 nt, Homo sapiens
  misc_RNA (1)...(19): siRNA sense strand
guuucuacuaagagcgaca

SEQ ID NO: 2249377 - RNA, 19 nt, Homo sapiens
  misc_RNA (1)...(19): siRNA sense strand
augaacuugcugugcauaa

SEQ ID NO: 2249378 - RNA, 19 nt, Homo sapiens
  misc_RNA (1)...(19): siRNA sense strand
gaaaauugaagaagucgaa

SEQ ID NO: 2249379 - RNA, 19 nt, Homo sapiens
  misc_RNA (1)...(19): siRNA sense strand
aucaagagguccaagcuau

SEQ ID NO: 2249380 - RNA, 19 nt, Homo sapiens
  misc_RNA (1)...(19): siRNA sense strand
ucaagagguccaagcuauu

SEQ ID NO: 2249381 - RNA, 19 nt, Homo sapiens
  misc_RNA (1)...(19): siRNA sense strand
ccaaggaggaggaucaagu

SEQ ID NO: 2249382 - RNA, 19 nt, Homo sapiens
  misc_RNA (1)...(19): siRNA sense strand
aaauggaagcccugacuga

SEQ ID NO: 2249383 - RNA, 19 nt, Homo sapiens
  misc_RNA (1)...(19): siRNA sense strand
guggaaagacaacgaccuu

SEQ ID NO: 2249384 - RNA, 19 nt, Homo sapiens
  misc_RNA (1)...(19): siRNA sense strand
cugagaacugauaagaaga

SEQ ID NO: 2249385 - RNA, 19 nt, Homo sapiens
  misc_RNA (1)...(19): siRNA sense strand
agaaauucaggaagagugu

SEQ ID NO: 2249386 - RNA, 19 nt, Homo sapiens
  misc_RNA (1)...(19): siRNA sense strand
ugacuauagaagcuaacaa

SEQ ID NO: 2249387 - RNA, 19 nt, Homo sapiens
  misc_RNA (1)...(19): siRNA sense strand
cagggauguucuggugaua

SEQ ID NO: 2249388 - RNA, 19 nt, Homo sapiens
  misc_RNA (1)...(19): siRNA sense strand
cugacagggaacauggaau

SEQ ID NO: 2249389 - RNA, 19 nt, Homo sapiens
  misc_RNA (1)...(19): siRNA sense strand
uagaagacuacgagaguga

SEQ ID NO: 2249390 - RNA, 19 nt, Homo sapiens
  misc_RNA (1)...(19): siRNA sense strand
cuacgagagugaugggaca

SEQ ID NO: 2249391 - RNA, 19 nt, Homo sapiens
  misc_RNA (1)...(19): siRNA sense strand
ugauaucagaagugcaaua

SEQ ID NO: 2249392 - RNA, 19 nt, Homo sapiens
  misc_RNA (1)...(19): siRNA sense strand
cuucagagcuuuggggaaa

SEQ ID NO: 2249393 - RNA, 19 nt, Homo sapiens
  misc_RNA (1)...(19): siRNA sense strand
aggacauucugcagaggaa

SEQ ID NO: 2249394 - RNA, 19 nt, Homo sapiens
  misc_RNA (1)...(19): siRNA sense strand
cuucaaaaggagaaaacaa

SEQ ID NO: 2249395 - RNA, 19 nt, Homo sapiens
  misc_RNA (1)...(19): siRNA sense strand
ccaacaaagcccgaggaua

SEQ ID NO: 2249396 - RNA, 19 nt, Homo sapiens
  misc_RNA (1)...(19): siRNA sense strand
aaggagacauggaagaaaa

SEQ ID NO: 2249397 - RNA, 19 nt, Homo sapiens
  misc_RNA (1)...(19): siRNA sense strand
cuaacaagaauggaggaaa

SEQ ID NO: 2249398 - RNA, 19 nt, Homo sapiens
  misc_RNA (1)...(19): siRNA sense strand
acacuuuggaagauugaaa

SEQ ID NO: 2249399 - RNA, 19 nt, Homo sapiens
  misc_RNA (1)...(19): siRNA sense strand
ccagcuuaauggaggacau

SEQ ID NO: 2249400 - RNA, 19 nt, Homo sapiens
  misc_RNA (1)...(19): siRNA sense strand
uugccaaggaggaggauca

SEQ ID NO: 2249401 - RNA, 19 nt, Homo sapiens
  misc_RNA (1)...(19): siRNA sense strand
gcuaacaagaauggaggaa

SEQ ID NO: 2249402 - RNA, 19 nt, Homo sapiens
  misc_RNA (1)...(19): siRNA sense strand
gaaaacaacuuacggccaa

SEQ ID NO: 2249403 - RNA, 19 nt, Homo sapiens
  misc_RNA (1)...(19): siRNA sense strand
ucagaauaugaacgggaua

SEQ ID NO: 2249404 - RNA, 19 nt, Homo sapiens
  misc_RNA (1)...(19): siRNA sense strand
gaugauauugugagagcca

SEQ ID NO: 2249405 - RNA, 19 nt, Homo sapiens
  misc_RNA (1)...(19): siRNA sense strand
cuaagagcgacaaaguaua

SEQ ID NO: 2249406 - RNA, 19 nt, Homo sapiens
  misc_RNA (1)...(19): siRNA sense strand
gggaacauggaaugauaga

SEQ ID NO: 2249407 - RNA, 19 nt, Homo sapiens
  misc_RNA (1)...(19): siRNA sense strand
acaugaaguucuaaggaag

SEQ ID NO: 2249408 - RNA, 19 nt, Homo sapiens
  misc_RNA (1)...(19): siRNA sense strand
cagaauagugccagugaac

SEQ ID NO: 2249409 - RNA, 19 nt, Homo sapiens
  misc_RNA (1)...(19): siRNA sense strand
guuacaaaugcuuggagau

SEQ ID NO: 2249410 - RNA, 19 nt, Homo sapiens
  misc_RNA (1)...(19): siRNA sense strand
aggauaugcucauugccaa

SEQ ID NO: 2249411 - RNA, 19 nt, Homo sapiens
  misc_RNA (1)...(19): siRNA sense strand
cccaaggagacauggaaga

SEQ ID NO: 2249412 - RNA, 19 nt, Homo sapiens
  misc_RNA (1)...(19): siRNA sense strand
uaaggaaguaugugaggau

SEQ ID NO: 2249413 - RNA, 19 nt, Homo sapiens
  misc_RNA (1)...(19): siRNA sense strand
gauaauucugguugaagau

SEQ ID NO: 2249414 - RNA, 19 nt, Homo sapiens
  misc_RNA (1)...(19): siRNA sense strand
ggauacauuacuuguugaa

SEQ ID NO: 2249415 - RNA, 19 nt, Homo sapiens
  misc_RNA (1)...(19): siRNA sense strand
aguuacaaaugcuuggaga

SEQ ID NO: 2249416 - RNA, 19 nt, Homo sapiens
  misc_RNA (1)...(19): siRNA sense strand
ucccaaagaaauucaggaa

SEQ ID NO: 2249417 - RNA, 19 nt, Homo sapiens
  misc_RNA (1)...(19): siRNA sense strand
agacauggaagaaaacaua

SEQ ID NO: 2249418 - RNA, 19 nt, Homo sapiens
  misc_RNA (1)...(19): siRNA sense strand
guuucuacuaagagcgaca

SEQ ID NO: 2249419 - RNA, 19 nt, Homo sapiens
  misc_RNA (1)...(19): siRNA sense strand
augaacuugcugugcauaa

SEQ ID NO: 2249420 - RNA, 19 nt, Homo sapiens
  misc_RNA (1)...(19): siRNA sense strand
gaaaauugaagaagucgaa

SEQ ID NO: 2249421 - RNA, 19 nt, Homo sapiens
  misc_RNA (1)...(19): siRNA sense strand
aucaagagguccaagcuau

SEQ ID NO: 2249422 - RNA, 19 nt, Homo sapiens
  misc_RNA (1)...(19): siRNA sense strand
ucaagagguccaagcuauu

SEQ ID NO: 2249423 - RNA, 19 nt, Homo sapiens
  misc_RNA (1)...(19): siRNA sense strand
ccaaggaggaggaucaagu

SEQ ID NO: 2249424 - RNA, 19 nt, Homo sapiens
  misc_RNA (1)...(19): siRNA sense strand
aaauggaagcccugacuga

SEQ ID NO: 2249425 - RNA, 19 nt, Homo sapiens
  misc_RNA (1)...(19): siRNA sense strand
guggaaagacaacgaccuu

SEQ ID NO: 2249426 - RNA, 19 nt, Homo sapiens
  misc_RNA (1)...(19): siRNA sense strand
cugagaacugauaagaaga

SEQ ID NO: 2249427 - RNA, 19 nt, Homo sapiens
  misc_RNA (1)...(19): siRNA sense strand
agaaauucaggaagagugu

SEQ ID NO: 2249428 - RNA, 19 nt, Homo sapiens
  misc_RNA (1)...(19): siRNA sense strand
ugacuauagaagcuaacaa

SEQ ID NO: 2249429 - RNA, 19 nt, Homo sapiens
  misc_RNA (1)...(19): siRNA sense strand
cagggauguucuggugaua

SEQ ID NO: 2249430 - RNA, 19 nt, Homo sapiens
  misc_RNA (1)...(19): siRNA sense strand
cugacagggaacauggaau

SEQ ID NO: 2249431 - RNA, 19 nt, Homo sapiens
  misc_RNA (1)...(19): siRNA sense strand
gcuuugaaaugcagcggga

SEQ ID NO: 2249432 - RNA, 19 nt, Homo sapiens
  misc_RNA (1)...(19): siRNA sense strand
uuugaaaugcagcgggauu

SEQ ID NO: 2249433 - RNA, 19 nt, Homo sapiens
  misc_RNA (1)...(19): siRNA sense strand
agcagaagccuuagaaacu

SEQ ID NO: 2249434 - RNA, 19 nt, Homo sapiens
  misc_RNA (1)...(19): siRNA sense strand
aagcagaagccuuagaaac

SEQ ID NO: 2249435 - RNA, 19 nt, Homo sapiens
  misc_RNA (1)...(19): siRNA sense strand
gcuuugaaaugcagcggga

SEQ ID NO: 2249436 - RNA, 19 nt, Homo sapiens
  misc_RNA (1)...(19): siRNA sense strand
uuugaaaugcagcgggauu

SEQ ID NO: 2249437 - RNA, 19 nt, Homo sapiens
  misc_RNA (1)...(19): siRNA sense strand
agcagaagccuuagaaacu

SEQ ID NO: 2249438 - RNA, 19 nt, Homo sapiens
  misc_RNA (1)...(19): siRNA sense strand
aagcagaagccuuagaaac

SEQ ID NO: 2249439 - RNA, 19 nt, Homo sapiens
  misc_RNA (1)...(19): siRNA sense strand
gcuuugaaaugcagcggga

SEQ ID NO: 2249440 - RNA, 19 nt, Homo sapiens
  misc_RNA (1)...(19): siRNA sense strand
uuugaaaugcagcgggauu

SEQ ID NO: 2249441 - RNA, 19 nt, Homo sapiens
  misc_RNA (1)...(19): siRNA sense strand
agcagaagccuuagaaacu

SEQ ID NO: 2249442 - RNA, 19 nt, Homo sapiens
  misc_RNA (1)...(19): siRNA sense strand
aagcagaagccuuagaaac

SEQ ID NO: 2249443 - RNA, 19 nt, Homo sapiens
  misc_RNA (1)...(19): siRNA sense strand
gaaaggaguuugaugcaca

SEQ ID NO: 2249444 - RNA, 19 nt, Homo sapiens
  misc_RNA (1)...(19): siRNA sense strand
aggcaaucucaaagaaaga

SEQ ID NO: 2249445 - RNA, 19 nt, Homo sapiens
  misc_RNA (1)...(19): siRNA sense strand
augcacaacuucaaggcaa

SEQ ID NO: 2249446 - RNA, 19 nt, Homo sapiens
  misc_RNA (1)...(19): siRNA sense strand
ccaaagaugcaaacggcuu

SEQ ID NO: 2249447 - RNA, 19 nt, Homo sapiens
  misc_RNA (1)...(19): siRNA sense strand
aguauuuggcugaggaguu

SEQ ID NO: 2249448 - RNA, 19 nt, Homo sapiens
  misc_RNA (1)...(19): siRNA sense strand
ccuugaaguauuuggcuga

SEQ ID NO: 2249449 - RNA, 19 nt, Homo sapiens
  misc_RNA (1)...(19): siRNA sense strand
gauaaaagcacaaaggucu

SEQ ID NO: 2249450 - RNA, 19 nt, Homo sapiens
  misc_RNA (1)...(19): siRNA sense strand
gcaagaaacuaaaacgagu

SEQ ID NO: 2249451 - RNA, 19 nt, Homo sapiens
  misc_RNA (1)...(19): siRNA sense strand
gauucagagagaagacaga

SEQ ID NO: 2249452 - RNA, 19 nt, Homo sapiens
  misc_RNA (1)...(19): siRNA sense strand
ugauagccgcacuaggaaa

SEQ ID NO: 2249453 - RNA, 19 nt, Homo sapiens
  misc_RNA (1)...(19): siRNA sense strand
ugcacaacuucaaggcaau

SEQ ID NO: 2249454 - RNA, 19 nt, Homo sapiens
  misc_RNA (1)...(19): siRNA sense strand
gaaaggaguuugaugcaca

SEQ ID NO: 2249455 - RNA, 19 nt, Homo sapiens
  misc_RNA (1)...(19): siRNA sense strand
aggcaaucucaaagaaaga

SEQ ID NO: 2249456 - RNA, 19 nt, Homo sapiens
  misc_RNA (1)...(19): siRNA sense strand
augcacaacuucaaggcaa

SEQ ID NO: 2249457 - RNA, 19 nt, Homo sapiens
  misc_RNA (1)...(19): siRNA sense strand
ccaaagaugcaaacggcuu

SEQ ID NO: 2249458 - RNA, 19 nt, Homo sapiens
  misc_RNA (1)...(19): siRNA sense strand
aguauuuggcugaggaguu

SEQ ID NO: 2249459 - RNA, 19 nt, Homo sapiens
  misc_RNA (1)...(19): siRNA sense strand
ccuugaaguauuuggcuga

SEQ ID NO: 2249460 - RNA, 19 nt, Homo sapiens
  misc_RNA (1)...(19): siRNA sense strand
gauaaaagcacaaaggucu

SEQ ID NO: 2249461 - RNA, 19 nt, Homo sapiens
  misc_RNA (1)...(19): siRNA sense strand
gcaagaaacuaaaacgagu

SEQ ID NO: 2249462 - RNA, 19 nt, Homo sapiens
  misc_RNA (1)...(19): siRNA sense strand
gauucagagagaagacaga

SEQ ID NO: 2249463 - RNA, 19 nt, Homo sapiens
  misc_RNA (1)...(19): siRNA sense strand
ugauagccgcacuaggaaa

SEQ ID NO: 2249464 - RNA, 19 nt, Homo sapiens
  misc_RNA (1)...(19): siRNA sense strand
ugcacaacuucaaggcaau

SEQ ID NO: 2249465 - RNA, 19 nt, Homo sapiens
  misc_RNA (1)...(19): siRNA sense strand
gaaaggaguuugaugcaca

SEQ ID NO: 2249466 - RNA, 19 nt, Homo sapiens
  misc_RNA (1)...(19): siRNA sense strand
aggcaaucucaaagaaaga

SEQ ID NO: 2249467 - RNA, 19 nt, Homo sapiens
  misc_RNA (1)...(19): siRNA sense strand
augcacaacuucaaggcaa

SEQ ID NO: 2249468 - RNA, 19 nt, Homo sapiens
  misc_RNA (1)...(19): siRNA sense strand
ccaaagaugcaaacggcuu

SEQ ID NO: 2249469 - RNA, 19 nt, Homo sapiens
  misc_RNA (1)...(19): siRNA sense strand
aguauuuggcugaggaguu

SEQ ID NO: 2249470 - RNA, 19 nt, Homo sapiens
  misc_RNA (1)...(19): siRNA sense strand
ccuugaaguauuuggcuga

SEQ ID NO: 2249471 - RNA, 19 nt, Homo sapiens
  misc_RNA (1)...(19): siRNA sense strand
gauaaaagcacaaaggucu

SEQ ID NO: 2249472 - RNA, 19 nt, Homo sapiens
  misc_RNA (1)...(19): siRNA sense strand
gcaagaaacuaaaacgagu

SEQ ID NO: 2249473 - RNA, 19 nt, Homo sapiens
  misc_RNA (1)...(19): siRNA sense strand
gauucagagagaagacaga

SEQ ID NO: 2249474 - RNA, 19 nt, Homo sapiens
  misc_RNA (1)...(19): siRNA sense strand
ugauagccgcacuaggaaa

SEQ ID NO: 2249475 - RNA, 19 nt, Homo sapiens
  misc_RNA (1)...(19): siRNA sense strand
ugcacaacuucaaggcaau

SEQ ID NO: 2249476 - RNA, 19 nt, Homo sapiens
  misc_RNA (1)...(19): siRNA sense strand
cagaagaagaggaggagga

SEQ ID NO: 2249477 - RNA, 19 nt, Homo sapiens
  misc_RNA (1)...(19): siRNA sense strand
aggaaggagaagaggaaga

SEQ ID NO: 2249478 - RNA, 19 nt, Homo sapiens
  misc_RNA (1)...(19): siRNA sense strand
aggaggaagaugaggaaga

SEQ ID NO: 2249479 - RNA, 19 nt, Homo sapiens
  misc_RNA (1)...(19): siRNA sense strand
aggaagaagaggaggagga

SEQ ID NO: 2249480 - RNA, 19 nt, Homo sapiens
  misc_RNA (1)...(19): siRNA sense strand
aggaggaggaggaggaaga

SEQ ID NO: 2249481 - RNA, 19 nt, Homo sapiens
  misc_RNA (1)...(19): siRNA sense strand
gagaagaggaagaagagga

SEQ ID NO: 2249482 - RNA, 19 nt, Homo sapiens
  misc_RNA (1)...(19): siRNA sense strand
aagaagaggaggaggagga

SEQ ID NO: 2249483 - RNA, 19 nt, Homo sapiens
  misc_RNA (1)...(19): siRNA sense strand
aggaagaagaggaagcaga

SEQ ID NO: 2249484 - RNA, 19 nt, Homo sapiens
  misc_RNA (1)...(19): siRNA sense strand
aagcagaagaagaggagga

SEQ ID NO: 2249485 - RNA, 19 nt, Homo sapiens
  misc_RNA (1)...(19): siRNA sense strand
aggaggugcuggagggcuu

SEQ ID NO: 2249486 - RNA, 19 nt, Homo sapiens
  misc_RNA (1)...(19): siRNA sense strand
gagcuggacuuaagcgaca

SEQ ID NO: 2249487 - RNA, 19 nt, Homo sapiens
  misc_RNA (1)...(19): siRNA sense strand
ccggaaauccagugcccaa

SEQ ID NO: 2249488 - RNA, 19 nt, Homo sapiens
  misc_RNA (1)...(19): siRNA sense strand
augaggaagaggaggaaga

SEQ ID NO: 2249489 - RNA, 19 nt, Homo sapiens
  misc_RNA (1)...(19): siRNA sense strand
aggaggaggaggaaggaga

SEQ ID NO: 2249490 - RNA, 19 nt, Homo sapiens
  misc_RNA (1)...(19): siRNA sense strand
aagacaaggucaaggccau

SEQ ID NO: 2249491 - RNA, 19 nt, Homo sapiens
  misc_RNA (1)...(19): siRNA sense strand
aggaggaggaggaagaaga

SEQ ID NO: 2249492 - RNA, 19 nt, Homo sapiens
  misc_RNA (1)...(19): siRNA sense strand
aaggagaagaggaagaaga

SEQ ID NO: 2249493 - RNA, 19 nt, Homo sapiens
  misc_RNA (1)...(19): siRNA sense strand
aagaggaagcagaagaaga

SEQ ID NO: 2249494 - RNA, 19 nt, Homo sapiens
  misc_RNA (1)...(19): siRNA sense strand
gcagaagcuuuuaggguca

SEQ ID NO: 2249495 - RNA, 19 nt, Homo sapiens
  misc_RNA (1)...(19): siRNA sense strand
ggcagguggaggugauuaa

SEQ ID NO: 2249496 - RNA, 19 nt, Homo sapiens
  misc_RNA (1)...(19): siRNA sense strand
agagugaagacaaggucaa

SEQ ID NO: 2249497 - RNA, 19 nt, Homo sapiens
  misc_RNA (1)...(19): siRNA sense strand
aggaggaagaagaggagga

SEQ ID NO: 2249498 - RNA, 19 nt, Homo sapiens
  misc_RNA (1)...(19): siRNA sense strand
aagaugaggaagaggagga

SEQ ID NO: 2249499 - RNA, 19 nt, Homo sapiens
  misc_RNA (1)...(19): siRNA sense strand
ucgccaaggccuuagagaa

SEQ ID NO: 2249500 - RNA, 19 nt, Homo sapiens
  misc_RNA (1)...(19): siRNA sense strand
aggacgaggaggaggagga

SEQ ID NO: 2249501 - RNA, 19 nt, Homo sapiens
  misc_RNA (1)...(19): siRNA sense strand
acgaggaggaggaggagga

SEQ ID NO: 2249502 - RNA, 19 nt, Homo sapiens
  misc_RNA (1)...(19): siRNA sense strand
aagaggaggaggaggagga

SEQ ID NO: 2249503 - RNA, 19 nt, Homo sapiens
  misc_RNA (1)...(19): siRNA sense strand
aggaagaugaggaagagga

SEQ ID NO: 2249504 - RNA, 19 nt, Homo sapiens
  misc_RNA (1)...(19): siRNA sense strand
cgccaaggccuuagagaag

SEQ ID NO: 2249505 - RNA, 19 nt, Homo sapiens
  misc_RNA (1)...(19): siRNA sense strand
acauggugcagcaggacua

SEQ ID NO: 2249506 - RNA, 19 nt, Homo sapiens
  misc_RNA (1)...(19): siRNA sense strand
gcuucgaggcccugcucaa

SEQ ID NO: 2249507 - RNA, 19 nt, Homo sapiens
  misc_RNA (1)...(19): siRNA sense strand
ugugaaaucaagagggaug

SEQ ID NO: 2249508 - RNA, 19 nt, Homo sapiens
  misc_RNA (1)...(19): siRNA sense strand
cagagaagcugcugcgccu

SEQ ID NO: 2249509 - RNA, 19 nt, Homo sapiens
  misc_RNA (1)...(19): siRNA sense strand
caucuguguucaaggacga

SEQ ID NO: 2249510 - RNA, 19 nt, Homo sapiens
  misc_RNA (1)...(19): siRNA sense strand
ggagaaugauggcgccacu

SEQ ID NO: 2249511 - RNA, 19 nt, Homo sapiens
  misc_RNA (1)...(19): siRNA sense strand
cagcugaguuucaaaggca

SEQ ID NO: 2249512 - RNA, 19 nt, Homo sapiens
  misc_RNA (1)...(19): siRNA sense strand
ggucaaggccauugccaac

SEQ ID NO: 2249513 - RNA, 19 nt, Homo sapiens
  misc_RNA (1)...(19): siRNA sense strand
cagccagggucaucgccaa

SEQ ID NO: 2249514 - RNA, 19 nt, Homo sapiens
  misc_RNA (1)...(19): siRNA sense strand
agaagaagaggaggaggaa

SEQ ID NO: 2249515 - RNA, 19 nt, Homo sapiens
  misc_RNA (1)...(19): siRNA sense strand
ggacgaagcuacugugagg

SEQ ID NO: 2249516 - RNA, 19 nt, Homo sapiens
  misc_RNA (1)...(19): siRNA sense strand
augacgaggacgaggagga

SEQ ID NO: 2249517 - RNA, 19 nt, Homo sapiens
  misc_RNA (1)...(19): siRNA sense strand
acgaggacgaggaggagga

SEQ ID NO: 2249518 - RNA, 19 nt, Homo sapiens
  misc_RNA (1)...(19): siRNA sense strand
ccuugaagaccuugcggca

SEQ ID NO: 2249519 - RNA, 19 nt, Homo sapiens
  misc_RNA (1)...(19): siRNA sense strand
ccaugauccuggugggcaa

SEQ ID NO: 2249520 - RNA, 19 nt, Homo sapiens
  misc_RNA (1)...(19): siRNA sense strand
gcaaggagauugaggugga

SEQ ID NO: 2249521 - RNA, 19 nt, Homo sapiens
  misc_RNA (1)...(19): siRNA sense strand
cagcagagcuuccaggaca

SEQ ID NO: 2249522 - RNA, 19 nt, Homo sapiens
  misc_RNA (1)...(19): siRNA sense strand
ucaagaacggccagggcuu

SEQ ID NO: 2249523 - RNA, 19 nt, Homo sapiens
  misc_RNA (1)...(19): siRNA sense strand
aguacaaagugguggugcu

SEQ ID NO: 2249524 - RNA, 19 nt, Homo sapiens
  misc_RNA (1)...(19): siRNA sense strand
agugugaggcaguggguaa

SEQ ID NO: 2249525 - RNA, 19 nt, Homo sapiens
  misc_RNA (1)...(19): siRNA sense strand
agaccaaccaucaauguaa

SEQ ID NO: 2249526 - RNA, 19 nt, Homo sapiens
  misc_RNA (1)...(19): siRNA sense strand
ccuuggaaauagucagcau

SEQ ID NO: 2249527 - RNA, 19 nt, Homo sapiens
  misc_RNA (1)...(19): siRNA sense strand
ucuuacgugaugugggaaa

SEQ ID NO: 2249528 - RNA, 19 nt, Homo sapiens
  misc_RNA (1)...(19): siRNA sense strand
gcucuuacgugauguggga

SEQ ID NO: 2249529 - RNA, 19 nt, Homo sapiens
  misc_RNA (1)...(19): siRNA sense strand
aggauuaccugcuuuacaa

SEQ ID NO: 2249530 - RNA, 19 nt, Homo sapiens
  misc_RNA (1)...(19): siRNA sense strand
cuuggaagcucuuacguga

SEQ ID NO: 2249531 - RNA, 19 nt, Homo sapiens
  misc_RNA (1)...(19): siRNA sense strand
caaugggaggaaacggaaa

SEQ ID NO: 2249532 - RNA, 19 nt, Homo sapiens
  misc_RNA (1)...(19): siRNA sense strand
agguggcccuggaggaauu

SEQ ID NO: 2249533 - RNA, 19 nt, Homo sapiens
  misc_RNA (1)...(19): siRNA sense strand
uugugaggcuggaauuuaa

SEQ ID NO: 2249534 - RNA, 19 nt, Homo sapiens
  misc_RNA (1)...(19): siRNA sense strand
cuggaauauuugugaggcu

SEQ ID NO: 2249535 - RNA, 19 nt, Homo sapiens
  misc_RNA (1)...(19): siRNA sense strand
ccauagagacccaaguucu

SEQ ID NO: 2249536 - RNA, 19 nt, Homo sapiens
  misc_RNA (1)...(19): siRNA sense strand
caggagacccagugccuca

SEQ ID NO: 2249537 - RNA, 19 nt, Homo sapiens
  misc_RNA (1)...(19): siRNA sense strand
cauccgaacuggagggaca

SEQ ID NO: 2249538 - RNA, 19 nt, Homo sapiens
  misc_RNA (1)...(19): siRNA sense strand
ggauauaaacgcaggacca

SEQ ID NO: 2249539 - RNA, 19 nt, Homo sapiens
  misc_RNA (1)...(19): siRNA sense strand
cuuuaugggaucugcguaa

SEQ ID NO: 2249540 - RNA, 19 nt, Homo sapiens
  misc_RNA (1)...(19): siRNA sense strand
aaucaaucacgaaggagaa

SEQ ID NO: 2249541 - RNA, 19 nt, Homo sapiens
  misc_RNA (1)...(19): siRNA sense strand
gggaagaacaaucagcaga

SEQ ID NO: 2249542 - RNA, 19 nt, Homo sapiens
  misc_RNA (1)...(19): siRNA sense strand
acuguuugucugugggaua

SEQ ID NO: 2249543 - RNA, 19 nt, Homo sapiens
  misc_RNA (1)...(19): siRNA sense strand
agaacaaucagcagaagau

SEQ ID NO: 2249544 - RNA, 19 nt, Homo sapiens
  misc_RNA (1)...(19): siRNA sense strand
aaacuuaugauaugggaca

SEQ ID NO: 2249545 - RNA, 19 nt, Homo sapiens
  misc_RNA (1)...(19): siRNA sense strand
gaggauaacaucaugcaga

SEQ ID NO: 2249546 - RNA, 19 nt, Homo sapiens
  misc_RNA (1)...(19): siRNA sense strand
aaaucaaucacgaaggaga

SEQ ID NO: 2249547 - RNA, 19 nt, Homo sapiens
  misc_RNA (1)...(19): siRNA sense strand
agauauggcaaauggcuga

SEQ ID NO: 2249548 - RNA, 19 nt, Homo sapiens
  misc_RNA (1)...(19): siRNA sense strand
aaguaaaauuggggaagaa

SEQ ID NO: 2249549 - RNA, 19 nt, Homo sapiens
  misc_RNA (1)...(19): siRNA sense strand
ggcaaauggcugaaaauau

SEQ ID NO: 2249550 - RNA, 19 nt, Homo sapiens
  misc_RNA (1)...(19): siRNA sense strand
ccaccggcucugcggauaa

SEQ ID NO: 2249551 - RNA, 19 nt, Homo sapiens
  misc_RNA (1)...(19): siRNA sense strand
uaaaauuggggaagaacaa

SEQ ID NO: 2249552 - RNA, 19 nt, Homo sapiens
  misc_RNA (1)...(19): siRNA sense strand
cgccugaaugugugggauu

SEQ ID NO: 2249553 - RNA, 19 nt, Homo sapiens
  misc_RNA (1)...(19): siRNA sense strand
gguuaugacccaugcucuu

SEQ ID NO: 2249554 - RNA, 19 nt, Homo sapiens
  misc_RNA (1)...(19): siRNA sense strand
gauuaagaggucaccagaa

SEQ ID NO: 2249555 - RNA, 19 nt, Homo sapiens
  misc_RNA (1)...(19): siRNA sense strand
caaaauuguggaugcuaaa

SEQ ID NO: 2249556 - RNA, 19 nt, Homo sapiens
  misc_RNA (1)...(19): siRNA sense strand
gaccguagcuuuaugggau

SEQ ID NO: 2249557 - RNA, 19 nt, Homo sapiens
  misc_RNA (1)...(19): siRNA sense strand
aggaaaagauuaugcccuu

SEQ ID NO: 2249558 - RNA, 19 nt, Homo sapiens
  misc_RNA (1)...(19): siRNA sense strand
gugacagugacaaggguga

SEQ ID NO: 2249559 - RNA, 19 nt, Homo sapiens
  misc_RNA (1)...(19): siRNA sense strand
caucaugcagauauggcaa

SEQ ID NO: 2249560 - RNA, 19 nt, Homo sapiens
  misc_RNA (1)...(19): siRNA sense strand
cagcuguuguagaggaugu

SEQ ID NO: 2249561 - RNA, 19 nt, Homo sapiens
  misc_RNA (1)...(19): siRNA sense strand
uggcuuugguucuguaaca

SEQ ID NO: 2249562 - RNA, 19 nt, Homo sapiens
  misc_RNA (1)...(19): siRNA sense strand
augugugggauuuaaguaa

SEQ ID NO: 2249563 - RNA, 19 nt, Homo sapiens
  misc_RNA (1)...(19): siRNA sense strand
acaaugaugaagagucaga

SEQ ID NO: 2249564 - RNA, 19 nt, Homo sapiens
  misc_RNA (1)...(19): siRNA sense strand
uugaagauacuguggagga

SEQ ID NO: 2249565 - RNA, 19 nt, Homo sapiens
  misc_RNA (1)...(19): siRNA sense strand
ccgcagaauccucacauca

SEQ ID NO: 2249566 - RNA, 19 nt, Homo sapiens
  misc_RNA (1)...(19): siRNA sense strand
gugcaaaugaaaugagaaa

SEQ ID NO: 2249567 - RNA, 19 nt, Homo sapiens
  misc_RNA (1)...(19): siRNA sense strand
cagaugaagaggaggaauu

SEQ ID NO: 2249568 - RNA, 19 nt, Homo sapiens
  misc_RNA (1)...(19): siRNA sense strand
ggaagaaaacugaggaaga

SEQ ID NO: 2249569 - RNA, 19 nt, Homo sapiens
  misc_RNA (1)...(19): siRNA sense strand
aagacaaagucaagcagaa

SEQ ID NO: 2249570 - RNA, 19 nt, Homo sapiens
  misc_RNA (1)...(19): siRNA sense strand
cugaagaacauaugcggaa

SEQ ID NO: 2249571 - RNA, 19 nt, Homo sapiens
  misc_RNA (1)...(19): siRNA sense strand
gaggagagacaguggacau

SEQ ID NO: 2249572 - RNA, 19 nt, Homo sapiens
  misc_RNA (1)...(19): siRNA sense strand
uauucagcgucaagagaaa

SEQ ID NO: 2249573 - RNA, 19 nt, Homo sapiens
  misc_RNA (1)...(19): siRNA sense strand
aaggaauacucuacaggaa

SEQ ID NO: 2249574 - RNA, 19 nt, Homo sapiens
  misc_RNA (1)...(19): siRNA sense strand
agacaaagucaagcagaaa

SEQ ID NO: 2249575 - RNA, 19 nt, Homo sapiens
  misc_RNA (1)...(19): siRNA sense strand
ccagcagaagaaagagaaa

SEQ ID NO: 2249576 - RNA, 19 nt, Homo sapiens
  misc_RNA (1)...(19): siRNA sense strand
ccauggaggaugugaacuu

SEQ ID NO: 2249577 - RNA, 19 nt, Homo sapiens
  misc_RNA (1)...(19): siRNA sense strand
agcaagagcagaagggaga

SEQ ID NO: 2249578 - RNA, 19 nt, Homo sapiens
  misc_RNA (1)...(19): siRNA sense strand
agauaugccagcagaagaa

SEQ ID NO: 2249579 - RNA, 19 nt, Homo sapiens
  misc_RNA (1)...(19): siRNA sense strand
cagcagaugaagaggagga

SEQ ID NO: 2249580 - RNA, 19 nt, Homo sapiens
  misc_RNA (1)...(19): siRNA sense strand
aaggaaaucacaagaaaca

SEQ ID NO: 2249581 - RNA, 19 nt, Homo sapiens
  misc_RNA (1)...(19): siRNA sense strand
augucaugauagagaagua

SEQ ID NO: 2249582 - RNA, 19 nt, Homo sapiens
  misc_RNA (1)...(19): siRNA sense strand
caguuaaauccauguagaa

SEQ ID NO: 2249583 - RNA, 19 nt, Homo sapiens
  misc_RNA (1)...(19): siRNA sense strand
aaaauuaggaggagagaca

SEQ ID NO: 2249584 - RNA, 19 nt, Homo sapiens
  misc_RNA (1)...(19): siRNA sense strand
cgguaaagauucuaacacu

SEQ ID NO: 2249585 - RNA, 19 nt, Homo sapiens
  misc_RNA (1)...(19): siRNA sense strand
ggagacugugugauggaua

SEQ ID NO: 2249586 - RNA, 19 nt, Homo sapiens
  misc_RNA (1)...(19): siRNA sense strand
cauaaagagugcugguucu

SEQ ID NO: 2249587 - RNA, 19 nt, Homo sapiens
  misc_RNA (1)...(19): siRNA sense strand
ugcacaaagacuagaagaa

SEQ ID NO: 2249588 - RNA, 19 nt, Homo sapiens
  misc_RNA (1)...(19): siRNA sense strand
uggugauaaacaagacaaa

SEQ ID NO: 2249589 - RNA, 19 nt, Homo sapiens
  misc_RNA (1)...(19): siRNA sense strand
aagaagaaucugaaacuca

SEQ ID NO: 2249590 - RNA, 19 nt, Homo sapiens
  misc_RNA (1)...(19): siRNA sense strand
gugauaaacaagacaaagu

SEQ ID NO: 2249591 - RNA, 19 nt, Homo sapiens
  misc_RNA (1)...(19): siRNA sense strand
aggaagaaagugaacauga

SEQ ID NO: 2249592 - RNA, 19 nt, Homo sapiens
  misc_RNA (1)...(19): siRNA sense strand
cagaagaaagagaaaagaa

SEQ ID NO: 2249593 - RNA, 19 nt, Homo sapiens
  misc_RNA (1)...(19): siRNA sense strand
aagugaaucccuaggugaa

SEQ ID NO: 2249594 - RNA, 19 nt, Homo sapiens
  misc_RNA (1)...(19): siRNA sense strand
ugaggaagaaagugaacau

SEQ ID NO: 2249595 - RNA, 19 nt, Homo sapiens
  misc_RNA (1)...(19): siRNA sense strand
ugagaaugaucaacagcau

SEQ ID NO: 2249596 - RNA, 19 nt, Homo sapiens
  misc_RNA (1)...(19): siRNA sense strand
agacguuauuccagauuca

SEQ ID NO: 2249597 - RNA, 19 nt, Homo sapiens
  misc_RNA (1)...(19): siRNA sense strand
aagccaaggaagugagacu

SEQ ID NO: 2249598 - RNA, 19 nt, Homo sapiens
  misc_RNA (1)...(19): siRNA sense strand
gaagaacauaugcggaaaa

SEQ ID NO: 2249599 - RNA, 19 nt, Homo sapiens
  misc_RNA (1)...(19): siRNA sense strand
uguccgauacauagaacaa

SEQ ID NO: 2249600 - RNA, 19 nt, Homo sapiens
  misc_RNA (1)...(19): siRNA sense strand
aagaaugucaugauagaga

SEQ ID NO: 2249601 - RNA, 19 nt, Homo sapiens
  misc_RNA (1)...(19): siRNA sense strand
agagaaaagccaaggaagu

SEQ ID NO: 2249602 - RNA, 19 nt, Homo sapiens
  misc_RNA (1)...(19): siRNA sense strand
caagagcagaagggagaaa

SEQ ID NO: 2249603 - RNA, 19 nt, Homo sapiens
  misc_RNA (1)...(19): siRNA sense strand
ggcaaggagcagaagacau

SEQ ID NO: 2249604 - RNA, 19 nt, Homo sapiens
  misc_RNA (1)...(19): siRNA sense strand
agcagaaaauugagaauga

SEQ ID NO: 2249605 - RNA, 19 nt, Homo sapiens
  misc_RNA (1)...(19): siRNA sense strand
gcaaaugaaaugagaaaag

SEQ ID NO: 2249606 - RNA, 19 nt, Homo sapiens
  misc_RNA (1)...(19): siRNA sense strand
guuuggagacugagaaugu

SEQ ID NO: 2249607 - RNA, 19 nt, Homo sapiens
  misc_RNA (1)...(19): siRNA sense strand
cuuagaugcacaaagacua

SEQ ID NO: 2249608 - RNA, 19 nt, Homo sapiens
  misc_RNA (1)...(19): siRNA sense strand
uguacauugguuagugaaa

SEQ ID NO: 2249609 - RNA, 19 nt, Homo sapiens
  misc_RNA (1)...(19): siRNA sense strand
uuguauggaaagagguuau

SEQ ID NO: 2249610 - RNA, 19 nt, Homo sapiens
  misc_RNA (1)...(19): siRNA sense strand
cauggaacaagcagcuaua

SEQ ID NO: 2249611 - RNA, 19 nt, Homo sapiens
  misc_RNA (1)...(19): siRNA sense strand
gaguauagauccgggagca

SEQ ID NO: 2249612 - RNA, 19 nt, Homo sapiens
  misc_RNA (1)...(19): siRNA sense strand
ggaauugucuacugccaca

SEQ ID NO: 2249613 - RNA, 19 nt, Homo sapiens
  misc_RNA (1)...(19): siRNA sense strand
accacugucuggaaggaaa

SEQ ID NO: 2249614 - RNA, 19 nt, Homo sapiens
  misc_RNA (1)...(19): siRNA sense strand
ucaugauagagaaguacaa

SEQ ID NO: 2249615 - RNA, 19 nt, Homo sapiens
  misc_RNA (1)...(19): siRNA sense strand
uggauaaaccucuggaucu

SEQ ID NO: 2249616 - RNA, 19 nt, Homo sapiens
  misc_RNA (1)...(19): siRNA sense strand
ucaagaagaaucugaaacu

SEQ ID NO: 2249617 - RNA, 19 nt, Homo sapiens
  misc_RNA (1)...(19): siRNA sense strand
uggaaggaaaucacaagaa

SEQ ID NO: 2249618 - RNA, 19 nt, Homo sapiens
  misc_RNA (1)...(19): siRNA sense strand
gugcaaaugaaaugagaaa

SEQ ID NO: 2249619 - RNA, 19 nt, Homo sapiens
  misc_RNA (1)...(19): siRNA sense strand
cagaugaagaggaggaauu

SEQ ID NO: 2249620 - RNA, 19 nt, Homo sapiens
  misc_RNA (1)...(19): siRNA sense strand
ggaagaaaacugaggaaga

SEQ ID NO: 2249621 - RNA, 19 nt, Homo sapiens
  misc_RNA (1)...(19): siRNA sense strand
aagacaaagucaagcagaa

SEQ ID NO: 2249622 - RNA, 19 nt, Homo sapiens
  misc_RNA (1)...(19): siRNA sense strand
cugaagaacauaugcggaa

SEQ ID NO: 2249623 - RNA, 19 nt, Homo sapiens
  misc_RNA (1)...(19): siRNA sense strand
gaggagagacaguggacau

SEQ ID NO: 2249624 - RNA, 19 nt, Homo sapiens
  misc_RNA (1)...(19): siRNA sense strand
uauucagcgucaagagaaa

SEQ ID NO: 2249625 - RNA, 19 nt, Homo sapiens
  misc_RNA (1)...(19): siRNA sense strand
aaggaauacucuacaggaa

SEQ ID NO: 2249626 - RNA, 19 nt, Homo sapiens
  misc_RNA (1)...(19): siRNA sense strand
agacaaagucaagcagaaa

SEQ ID NO: 2249627 - RNA, 19 nt, Homo sapiens
  misc_RNA (1)...(19): siRNA sense strand
ccagcagaagaaagagaaa

SEQ ID NO: 2249628 - RNA, 19 nt, Homo sapiens
  misc_RNA (1)...(19): siRNA sense strand
ccauggaggaugugaacuu

SEQ ID NO: 2249629 - RNA, 19 nt, Homo sapiens
  misc_RNA (1)...(19): siRNA sense strand
agcaagagcagaagggaga

SEQ ID NO: 2249630 - RNA, 19 nt, Homo sapiens
  misc_RNA (1)...(19): siRNA sense strand
agauaugccagcagaagaa

SEQ ID NO: 2249631 - RNA, 19 nt, Homo sapiens
  misc_RNA (1)...(19): siRNA sense strand
cagcagaugaagaggagga

SEQ ID NO: 2249632 - RNA, 19 nt, Homo sapiens
  misc_RNA (1)...(19): siRNA sense strand
aaggaaaucacaagaaaca

SEQ ID NO: 2249633 - RNA, 19 nt, Homo sapiens
  misc_RNA (1)...(19): siRNA sense strand
augucaugauagagaagua

SEQ ID NO: 2249634 - RNA, 19 nt, Homo sapiens
  misc_RNA (1)...(19): siRNA sense strand
caguuaaauccauguagaa

SEQ ID NO: 2249635 - RNA, 19 nt, Homo sapiens
  misc_RNA (1)...(19): siRNA sense strand
aaaauuaggaggagagaca

SEQ ID NO: 2249636 - RNA, 19 nt, Homo sapiens
  misc_RNA (1)...(19): siRNA sense strand
cgguaaagauucuaacacu

SEQ ID NO: 2249637 - RNA, 19 nt, Homo sapiens
  misc_RNA (1)...(19): siRNA sense strand
ggagacugugugauggaua

SEQ ID NO: 2249638 - RNA, 19 nt, Homo sapiens
  misc_RNA (1)...(19): siRNA sense strand
cauaaagagugcugguucu

SEQ ID NO: 2249639 - RNA, 19 nt, Homo sapiens
  misc_RNA (1)...(19): siRNA sense strand
ugcacaaagacuagaagaa

SEQ ID NO: 2249640 - RNA, 19 nt, Homo sapiens
  misc_RNA (1)...(19): siRNA sense strand
uggugauaaacaagacaaa

SEQ ID NO: 2249641 - RNA, 19 nt, Homo sapiens
  misc_RNA (1)...(19): siRNA sense strand
aagaagaaucugaaacuca

SEQ ID NO: 2249642 - RNA, 19 nt, Homo sapiens
  misc_RNA (1)...(19): siRNA sense strand
gugauaaacaagacaaagu

SEQ ID NO: 2249643 - RNA, 19 nt, Homo sapiens
  misc_RNA (1)...(19): siRNA sense strand
aggaagaaagugaacauga

SEQ ID NO: 2249644 - RNA, 19 nt, Homo sapiens
  misc_RNA (1)...(19): siRNA sense strand
cagaagaaagagaaaagaa

SEQ ID NO: 2249645 - RNA, 19 nt, Homo sapiens
  misc_RNA (1)...(19): siRNA sense strand
aagugaaucccuaggugaa

SEQ ID NO: 2249646 - RNA, 19 nt, Homo sapiens
  misc_RNA (1)...(19): siRNA sense strand
ugaggaagaaagugaacau

SEQ ID NO: 2249647 - RNA, 19 nt, Homo sapiens
  misc_RNA (1)...(19): siRNA sense strand
ugagaaugaucaacagcau

SEQ ID NO: 2249648 - RNA, 19 nt, Homo sapiens
  misc_RNA (1)...(19): siRNA sense strand
agacguuauuccagauuca

SEQ ID NO: 2249649 - RNA, 19 nt, Homo sapiens
  misc_RNA (1)...(19): siRNA sense strand
aagccaaggaagugagacu

SEQ ID NO: 2249650 - RNA, 19 nt, Homo sapiens
  misc_RNA (1)...(19): siRNA sense strand
gaagaacauaugcggaaaa

SEQ ID NO: 2249651 - RNA, 19 nt, Homo sapiens
  misc_RNA (1)...(19): siRNA sense strand
uguccgauacauagaacaa

SEQ ID NO: 2249652 - RNA, 19 nt, Homo sapiens
  misc_RNA (1)...(19): siRNA sense strand
aagaaugucaugauagaga

SEQ ID NO: 2249653 - RNA, 19 nt, Homo sapiens
  misc_RNA (1)...(19): siRNA sense strand
agagaaaagccaaggaagu

SEQ ID NO: 2249654 - RNA, 19 nt, Homo sapiens
  misc_RNA (1)...(19): siRNA sense strand
caagagcagaagggagaaa

SEQ ID NO: 2249655 - RNA, 19 nt, Homo sapiens
  misc_RNA (1)...(19): siRNA sense strand
ggcaaggagcagaagacau

SEQ ID NO: 2249656 - RNA, 19 nt, Homo sapiens
  misc_RNA (1)...(19): siRNA sense strand
agcagaaaauugagaauga

SEQ ID NO: 2249657 - RNA, 19 nt, Homo sapiens
  misc_RNA (1)...(19): siRNA sense strand
gcaaaugaaaugagaaaag

SEQ ID NO: 2249658 - RNA, 19 nt, Homo sapiens
  misc_RNA (1)...(19): siRNA sense strand
guuuggagacugagaaugu

SEQ ID NO: 2249659 - RNA, 19 nt, Homo sapiens
  misc_RNA (1)...(19): siRNA sense strand
cuuagaugcacaaagacua

SEQ ID NO: 2249660 - RNA, 19 nt, Homo sapiens
  misc_RNA (1)...(19): siRNA sense strand
uguacauugguuagugaaa

SEQ ID NO: 2249661 - RNA, 19 nt, Homo sapiens
  misc_RNA (1)...(19): siRNA sense strand
uuguauggaaagagguuau

SEQ ID NO: 2249662 - RNA, 19 nt, Homo sapiens
  misc_RNA (1)...(19): siRNA sense strand
cauggaacaagcagcuaua

SEQ ID NO: 2249663 - RNA, 19 nt, Homo sapiens
  misc_RNA (1)...(19): siRNA sense strand
gaguauagauccgggagca

SEQ ID NO: 2249664 - RNA, 19 nt, Homo sapiens
  misc_RNA (1)...(19): siRNA sense strand
ggaauugucuacugccaca

SEQ ID NO: 2249665 - RNA, 19 nt, Homo sapiens
  misc_RNA (1)...(19): siRNA sense strand
accacugucuggaaggaaa

SEQ ID NO: 2249666 - RNA, 19 nt, Homo sapiens
  misc_RNA (1)...(19): siRNA sense strand
ucaugauagagaaguacaa

SEQ ID NO: 2249667 - RNA, 19 nt, Homo sapiens
  misc_RNA (1)...(19): siRNA sense strand
uggauaaaccucuggaucu

SEQ ID NO: 2249668 - RNA, 19 nt, Homo sapiens
  misc_RNA (1)...(19): siRNA sense strand
ucaagaagaaucugaaacu

SEQ ID NO: 2249669 - RNA, 19 nt, Homo sapiens
  misc_RNA (1)...(19): siRNA sense strand
uggaaggaaaucacaagaa

SEQ ID NO: 2249670 - RNA, 19 nt, Homo sapiens
  misc_RNA (1)...(19): siRNA sense strand
gugcaaaugaaaugagaaa

SEQ ID NO: 2249671 - RNA, 19 nt, Homo sapiens
  misc_RNA (1)...(19): siRNA sense strand
cagaugaagaggaggaauu

SEQ ID NO: 2249672 - RNA, 19 nt, Homo sapiens
  misc_RNA (1)...(19): siRNA sense strand
ggaagaaaacugaggaaga

SEQ ID NO: 2249673 - RNA, 19 nt, Homo sapiens
  misc_RNA (1)...(19): siRNA sense strand
aagacaaagucaagcagaa

SEQ ID NO: 2249674 - RNA, 19 nt, Homo sapiens
  misc_RNA (1)...(19): siRNA sense strand
cugaagaacauaugcggaa

SEQ ID NO: 2249675 - RNA, 19 nt, Homo sapiens
  misc_RNA (1)...(19): siRNA sense strand
gaggagagacaguggacau

SEQ ID NO: 2249676 - RNA, 19 nt, Homo sapiens
  misc_RNA (1)...(19): siRNA sense strand
uauucagcgucaagagaaa

SEQ ID NO: 2249677 - RNA, 19 nt, Homo sapiens
  misc_RNA (1)...(19): siRNA sense strand
aaggaauacucuacaggaa

SEQ ID NO: 2249678 - RNA, 19 nt, Homo sapiens
  misc_RNA (1)...(19): siRNA sense strand
agacaaagucaagcagaaa

SEQ ID NO: 2249679 - RNA, 19 nt, Homo sapiens
  misc_RNA (1)...(19): siRNA sense strand
cagaagacauagacguuga

SEQ ID NO: 2249680 - RNA, 19 nt, Homo sapiens
  misc_RNA (1)...(19): siRNA sense strand
ccagcagaagaaagagaaa

SEQ ID NO: 2249681 - RNA, 19 nt, Homo sapiens
  misc_RNA (1)...(19): siRNA sense strand
ccauggaggaugugaacuu

SEQ ID NO: 2249682 - RNA, 19 nt, Homo sapiens
  misc_RNA (1)...(19): siRNA sense strand
agcaagagcagaagggaga

SEQ ID NO: 2249683 - RNA, 19 nt, Homo sapiens
  misc_RNA (1)...(19): siRNA sense strand
agauaugccagcagaagaa

SEQ ID NO: 2249684 - RNA, 19 nt, Homo sapiens
  misc_RNA (1)...(19): siRNA sense strand
cagcagaugaagaggagga

SEQ ID NO: 2249685 - RNA, 19 nt, Homo sapiens
  misc_RNA (1)...(19): siRNA sense strand
aaggaaaucacaagaaaca

SEQ ID NO: 2249686 - RNA, 19 nt, Homo sapiens
  misc_RNA (1)...(19): siRNA sense strand
augucaugauagagaagua

SEQ ID NO: 2249687 - RNA, 19 nt, Homo sapiens
  misc_RNA (1)...(19): siRNA sense strand
caguuaaauccauguagaa

SEQ ID NO: 2249688 - RNA, 19 nt, Homo sapiens
  misc_RNA (1)...(19): siRNA sense strand
aaaauuaggaggagagaca

SEQ ID NO: 2249689 - RNA, 19 nt, Homo sapiens
  misc_RNA (1)...(19): siRNA sense strand
cgguaaagauucuaacacu

SEQ ID NO: 2249690 - RNA, 19 nt, Homo sapiens
  misc_RNA (1)...(19): siRNA sense strand
ggagacugugugauggaua

SEQ ID NO: 2249691 - RNA, 19 nt, Homo sapiens
  misc_RNA (1)...(19): siRNA sense strand
cauaaagagugcugguucu

SEQ ID NO: 2249692 - RNA, 19 nt, Homo sapiens
  misc_RNA (1)...(19): siRNA sense strand
ugcacaaagacuagaagaa

SEQ ID NO: 2249693 - RNA, 19 nt, Homo sapiens
  misc_RNA (1)...(19): siRNA sense strand
uggugauaaacaagacaaa

SEQ ID NO: 2249694 - RNA, 19 nt, Homo sapiens
  misc_RNA (1)...(19): siRNA sense strand
aagaagaaucugaaacuca

SEQ ID NO: 2249695 - RNA, 19 nt, Homo sapiens
  misc_RNA (1)...(19): siRNA sense strand
gugauaaacaagacaaagu

SEQ ID NO: 2249696 - RNA, 19 nt, Homo sapiens
  misc_RNA (1)...(19): siRNA sense strand
aggaagaaagugaacauga

SEQ ID NO: 2249697 - RNA, 19 nt, Homo sapiens
  misc_RNA (1)...(19): siRNA sense strand
cagaagaaagagaaaagaa

SEQ ID NO: 2249698 - RNA, 19 nt, Homo sapiens
  misc_RNA (1)...(19): siRNA sense strand
aagugaaucccuaggugaa

SEQ ID NO: 2249699 - RNA, 19 nt, Homo sapiens
  misc_RNA (1)...(19): siRNA sense strand
ugaggaagaaagugaacau

SEQ ID NO: 2249700 - RNA, 19 nt, Homo sapiens
  misc_RNA (1)...(19): siRNA sense strand
ugagaaugaucaacagcau

SEQ ID NO: 2249701 - RNA, 19 nt, Homo sapiens
  misc_RNA (1)...(19): siRNA sense strand
agacguuauuccagauuca

SEQ ID NO: 2249702 - RNA, 19 nt, Homo sapiens
  misc_RNA (1)...(19): siRNA sense strand
aagccaaggaagugagacu

SEQ ID NO: 2249703 - RNA, 19 nt, Homo sapiens
  misc_RNA (1)...(19): siRNA sense strand
gaagaacauaugcggaaaa

SEQ ID NO: 2249704 - RNA, 19 nt, Homo sapiens
  misc_RNA (1)...(19): siRNA sense strand
uguccgauacauagaacaa

SEQ ID NO: 2249705 - RNA, 19 nt, Homo sapiens
  misc_RNA (1)...(19): siRNA sense strand
aagaaugucaugauagaga

SEQ ID NO: 2249706 - RNA, 19 nt, Homo sapiens
  misc_RNA (1)...(19): siRNA sense strand
agagaaaagccaaggaagu

SEQ ID NO: 2249707 - RNA, 19 nt, Homo sapiens
  misc_RNA (1)...(19): siRNA sense strand
caagagcagaagggagaaa

SEQ ID NO: 2249708 - RNA, 19 nt, Homo sapiens
  misc_RNA (1)...(19): siRNA sense strand
ggcaaggagcagaagacau

SEQ ID NO: 2249709 - RNA, 19 nt, Homo sapiens
  misc_RNA (1)...(19): siRNA sense strand
agcagaaaauugagaauga

SEQ ID NO: 2249710 - RNA, 19 nt, Homo sapiens
  misc_RNA (1)...(19): siRNA sense strand
gcaaaugaaaugagaaaag

SEQ ID NO: 2249711 - RNA, 19 nt, Homo sapiens
  misc_RNA (1)...(19): siRNA sense strand
guuuggagacugagaaugu

SEQ ID NO: 2249712 - RNA, 19 nt, Homo sapiens
  misc_RNA (1)...(19): siRNA sense strand
uguacauugguuagugaaa

SEQ ID NO: 2249713 - RNA, 19 nt, Homo sapiens
  misc_RNA (1)...(19): siRNA sense strand
cuuagaugcacaaagacua

SEQ ID NO: 2249714 - RNA, 19 nt, Homo sapiens
  misc_RNA (1)...(19): siRNA sense strand
uuguauggaaagagguuau

SEQ ID NO: 2249715 - RNA, 19 nt, Homo sapiens
  misc_RNA (1)...(19): siRNA sense strand
cauggaacaagcagcuaua

SEQ ID NO: 2249716 - RNA, 19 nt, Homo sapiens
  misc_RNA (1)...(19): siRNA sense strand
gaguauagauccgggagca

SEQ ID NO: 2249717 - RNA, 19 nt, Homo sapiens
  misc_RNA (1)...(19): siRNA sense strand
ggaauugucuacugccaca

SEQ ID NO: 2249718 - RNA, 19 nt, Homo sapiens
  misc_RNA (1)...(19): siRNA sense strand
accacugucuggaaggaaa

SEQ ID NO: 2249719 - RNA, 19 nt, Homo sapiens
  misc_RNA (1)...(19): siRNA sense strand
uggauaaaccucuggaucu

SEQ ID NO: 2249720 - RNA, 19 nt, Homo sapiens
  misc_RNA (1)...(19): siRNA sense strand
ucaugauagagaaguacaa

SEQ ID NO: 2249721 - RNA, 19 nt, Homo sapiens
  misc_RNA (1)...(19): siRNA sense strand
ucaagaagaaucugaaacu

SEQ ID NO: 2249722 - RNA, 19 nt, Homo sapiens
  misc_RNA (1)...(19): siRNA sense strand
gaacaaaugcaaagguuau

SEQ ID NO: 2249723 - RNA, 19 nt, Homo sapiens
  misc_RNA (1)...(19): siRNA sense strand
cgaacaaaugcaaagguua

SEQ ID NO: 2249724 - RNA, 19 nt, Homo sapiens
  misc_RNA (1)...(19): siRNA sense strand
cugucaaccauaugggaaa

SEQ ID NO: 2249725 - RNA, 19 nt, Homo sapiens
  misc_RNA (1)...(19): siRNA sense strand
gauaagacaacgaacaaau

SEQ ID NO: 2249726 - RNA, 19 nt, Homo sapiens
  misc_RNA (1)...(19): siRNA sense strand
uggauaagacaacgaacaa

SEQ ID NO: 2249727 - RNA, 19 nt, Homo sapiens
  misc_RNA (1)...(19): siRNA sense strand
cuacaaggauacuacguga

SEQ ID NO: 2249728 - RNA, 19 nt, Homo sapiens
  misc_RNA (1)...(19): siRNA sense strand
ggauaagacaacgaacaaa

SEQ ID NO: 2249729 - RNA, 19 nt, Homo sapiens
  misc_RNA (1)...(19): siRNA sense strand
aguaauaacaacaguagca

SEQ ID NO: 2249730 - RNA, 19 nt, Homo sapiens
  misc_RNA (1)...(19): siRNA sense strand
ugguacaagucgugguguu

SEQ ID NO: 2249731 - RNA, 19 nt, Homo sapiens
  misc_RNA (1)...(19): siRNA sense strand
guucaagcucaaauggcaa

SEQ ID NO: 2249732 - RNA, 19 nt, Homo sapiens
  misc_RNA (1)...(19): siRNA sense strand
ccaaacaaauacaucccua

SEQ ID NO: 2249733 - RNA, 19 nt, Homo sapiens
  misc_RNA (1)...(19): siRNA sense strand
gguucaagcucaaauggca

SEQ ID NO: 2249734 - RNA, 19 nt, Homo sapiens
  misc_RNA (1)...(19): siRNA sense strand
acgaacaaaugcaaagguu

SEQ ID NO: 2249735 - RNA, 19 nt, Homo sapiens
  misc_RNA (1)...(19): siRNA sense strand
ugaggaggcaaguggucaa

SEQ ID NO: 2249736 - RNA, 19 nt, Homo sapiens
  misc_RNA (1)...(19): siRNA sense strand
uguggaaacagcagaugua

SEQ ID NO: 2249737 - RNA, 19 nt, Homo sapiens
  misc_RNA (1)...(19): siRNA sense strand
agacaacgaacaaaugcaa

SEQ ID NO: 2249738 - RNA, 19 nt, Homo sapiens
  misc_RNA (1)...(19): siRNA sense strand
cucaaauggcaaagcaaca

SEQ ID NO: 2249739 - RNA, 19 nt, Homo sapiens
  misc_RNA (1)...(19): siRNA sense strand
ggauggaaucaacagaaaa

SEQ ID NO: 2249740 - RNA, 19 nt, Homo sapiens
  misc_RNA (1)...(19): siRNA sense strand
caguauugcuacaaaccga

SEQ ID NO: 2249741 - RNA, 19 nt, Homo sapiens
  misc_RNA (1)...(19): siRNA sense strand
gugcaaaguccuucgugga

SEQ ID NO: 2249742 - RNA, 19 nt, Homo sapiens
  misc_RNA (1)...(19): siRNA sense strand
ugagcaagaacuagaaaau

SEQ ID NO: 2249743 - RNA, 19 nt, Homo sapiens
  misc_RNA (1)...(19): siRNA sense strand
ugcugauggaggacagaaa

SEQ ID NO: 2249744 - RNA, 19 nt, Homo sapiens
  misc_RNA (1)...(19): siRNA sense strand
agaccauggcauagagaag

SEQ ID NO: 2249745 - RNA, 19 nt, Homo sapiens
  misc_RNA (1)...(19): siRNA sense strand
cugcuauacagaacggauu

SEQ ID NO: 2249746 - RNA, 19 nt, Homo sapiens
  misc_RNA (1)...(19): siRNA sense strand
gcacauaugcagacgacag

SEQ ID NO: 2249747 - RNA, 19 nt, Homo sapiens
  misc_RNA (1)...(19): siRNA sense strand
ucuccauggaugagcaaga

SEQ ID NO: 2249748 - RNA, 19 nt, Homo sapiens
  misc_RNA (1)...(19): siRNA sense strand
gaacaaaugcaaagguuau

SEQ ID NO: 2249749 - RNA, 19 nt, Homo sapiens
  misc_RNA (1)...(19): siRNA sense strand
cgaacaaaugcaaagguua

SEQ ID NO: 2249750 - RNA, 19 nt, Homo sapiens
  misc_RNA (1)...(19): siRNA sense strand
cugucaaccauaugggaaa

SEQ ID NO: 2249751 - RNA, 19 nt, Homo sapiens
  misc_RNA (1)...(19): siRNA sense strand
gauaagacaacgaacaaau

SEQ ID NO: 2249752 - RNA, 19 nt, Homo sapiens
  misc_RNA (1)...(19): siRNA sense strand
uggauaagacaacgaacaa

SEQ ID NO: 2249753 - RNA, 19 nt, Homo sapiens
  misc_RNA (1)...(19): siRNA sense strand
cuacaaggauacuacguga

SEQ ID NO: 2249754 - RNA, 19 nt, Homo sapiens
  misc_RNA (1)...(19): siRNA sense strand
ggauaagacaacgaacaaa

SEQ ID NO: 2249755 - RNA, 19 nt, Homo sapiens
  misc_RNA (1)...(19): siRNA sense strand
aguaauaacaacaguagca

SEQ ID NO: 2249756 - RNA, 19 nt, Homo sapiens
  misc_RNA (1)...(19): siRNA sense strand
ugguacaagucgugguguu

SEQ ID NO: 2249757 - RNA, 19 nt, Homo sapiens
  misc_RNA (1)...(19): siRNA sense strand
guucaagcucaaauggcaa

SEQ ID NO: 2249758 - RNA, 19 nt, Homo sapiens
  misc_RNA (1)...(19): siRNA sense strand
ccaaacaaauacaucccua

SEQ ID NO: 2249759 - RNA, 19 nt, Homo sapiens
  misc_RNA (1)...(19): siRNA sense strand
gguucaagcucaaauggca

SEQ ID NO: 2249760 - RNA, 19 nt, Homo sapiens
  misc_RNA (1)...(19): siRNA sense strand
acgaacaaaugcaaagguu

SEQ ID NO: 2249761 - RNA, 19 nt, Homo sapiens
  misc_RNA (1)...(19): siRNA sense strand
ugaggaggcaaguggucaa

SEQ ID NO: 2249762 - RNA, 19 nt, Homo sapiens
  misc_RNA (1)...(19): siRNA sense strand
uguggaaacagcagaugua

SEQ ID NO: 2249763 - RNA, 19 nt, Homo sapiens
  misc_RNA (1)...(19): siRNA sense strand
agacaacgaacaaaugcaa

SEQ ID NO: 2249764 - RNA, 19 nt, Homo sapiens
  misc_RNA (1)...(19): siRNA sense strand
cucaaauggcaaagcaaca

SEQ ID NO: 2249765 - RNA, 19 nt, Homo sapiens
  misc_RNA (1)...(19): siRNA sense strand
ggauggaaucaacagaaaa

SEQ ID NO: 2249766 - RNA, 19 nt, Homo sapiens
  misc_RNA (1)...(19): siRNA sense strand
caguauugcuacaaaccga

SEQ ID NO: 2249767 - RNA, 19 nt, Homo sapiens
  misc_RNA (1)...(19): siRNA sense strand
gugcaaaguccuucgugga

SEQ ID NO: 2249768 - RNA, 19 nt, Homo sapiens
  misc_RNA (1)...(19): siRNA sense strand
ugagcaagaacuagaaaau

SEQ ID NO: 2249769 - RNA, 19 nt, Homo sapiens
  misc_RNA (1)...(19): siRNA sense strand
ugcugauggaggacagaaa

SEQ ID NO: 2249770 - RNA, 19 nt, Homo sapiens
  misc_RNA (1)...(19): siRNA sense strand
agaccauggcauagagaag

SEQ ID NO: 2249771 - RNA, 19 nt, Homo sapiens
  misc_RNA (1)...(19): siRNA sense strand
cugcuauacagaacggauu

SEQ ID NO: 2249772 - RNA, 19 nt, Homo sapiens
  misc_RNA (1)...(19): siRNA sense strand
gcacauaugcagacgacag

SEQ ID NO: 2249773 - RNA, 19 nt, Homo sapiens
  misc_RNA (1)...(19): siRNA sense strand
ucuccauggaugagcaaga

SEQ ID NO: 2249774 - RNA, 19 nt, Homo sapiens
  misc_RNA (1)...(19): siRNA sense strand
gaacaaaugcaaagguuau

SEQ ID NO: 2249775 - RNA, 19 nt, Homo sapiens
  misc_RNA (1)...(19): siRNA sense strand
cgaacaaaugcaaagguua

SEQ ID NO: 2249776 - RNA, 19 nt, Homo sapiens
  misc_RNA (1)...(19): siRNA sense strand
cugucaaccauaugggaaa

SEQ ID NO: 2249777 - RNA, 19 nt, Homo sapiens
  misc_RNA (1)...(19): siRNA sense strand
gauaagacaacgaacaaau

SEQ ID NO: 2249778 - RNA, 19 nt, Homo sapiens
  misc_RNA (1)...(19): siRNA sense strand
uggauaagacaacgaacaa

SEQ ID NO: 2249779 - RNA, 19 nt, Homo sapiens
  misc_RNA (1)...(19): siRNA sense strand
cuacaaggauacuacguga

SEQ ID NO: 2249780 - RNA, 19 nt, Homo sapiens
  misc_RNA (1)...(19): siRNA sense strand
ggauaagacaacgaacaaa

SEQ ID NO: 2249781 - RNA, 19 nt, Homo sapiens
  misc_RNA (1)...(19): siRNA sense strand
aguaauaacaacaguagca

SEQ ID NO: 2249782 - RNA, 19 nt, Homo sapiens
  misc_RNA (1)...(19): siRNA sense strand
ugguacaagucgugguguu

SEQ ID NO: 2249783 - RNA, 19 nt, Homo sapiens
  misc_RNA (1)...(19): siRNA sense strand
guucaagcucaaauggcaa

SEQ ID NO: 2249784 - RNA, 19 nt, Homo sapiens
  misc_RNA (1)...(19): siRNA sense strand
ccaaacaaauacaucccua

SEQ ID NO: 2249785 - RNA, 19 nt, Homo sapiens
  misc_RNA (1)...(19): siRNA sense strand
gguucaagcucaaauggca

SEQ ID NO: 2249786 - RNA, 19 nt, Homo sapiens
  misc_RNA (1)...(19): siRNA sense strand
acgaacaaaugcaaagguu

SEQ ID NO: 2249787 - RNA, 19 nt, Homo sapiens
  misc_RNA (1)...(19): siRNA sense strand
ugaggaggcaaguggucaa

SEQ ID NO: 2249788 - RNA, 19 nt, Homo sapiens
  misc_RNA (1)...(19): siRNA sense strand
agacaacgaacaaaugcaa

SEQ ID NO: 2249789 - RNA, 19 nt, Homo sapiens
  misc_RNA (1)...(19): siRNA sense strand
cucaaauggcaaagcaaca

SEQ ID NO: 2249790 - RNA, 19 nt, Homo sapiens
  misc_RNA (1)...(19): siRNA sense strand
ggauggaaucaacagaaaa

SEQ ID NO: 2249791 - RNA, 19 nt, Homo sapiens
  misc_RNA (1)...(19): siRNA sense strand
caguauugcuacaaaccga

SEQ ID NO: 2249792 - RNA, 19 nt, Homo sapiens
  misc_RNA (1)...(19): siRNA sense strand
gugcaaaguccuucgugga

SEQ ID NO: 2249793 - RNA, 19 nt, Homo sapiens
  misc_RNA (1)...(19): siRNA sense strand
ugagcaagaacuagaaaau

SEQ ID NO: 2249794 - RNA, 19 nt, Homo sapiens
  misc_RNA (1)...(19): siRNA sense strand
ugcugauggaggacagaaa

SEQ ID NO: 2249795 - RNA, 19 nt, Homo sapiens
  misc_RNA (1)...(19): siRNA sense strand
agaccauggcauagagaag

SEQ ID NO: 2249796 - RNA, 19 nt, Homo sapiens
  misc_RNA (1)...(19): siRNA sense strand
cugcuauacagaacggauu

SEQ ID NO: 2249797 - RNA, 19 nt, Homo sapiens
  misc_RNA (1)...(19): siRNA sense strand
gcacauaugcagacgacag

SEQ ID NO: 2249798 - RNA, 19 nt, Homo sapiens
  misc_RNA (1)...(19): siRNA sense strand
ucuccauggaugagcaaga

SEQ ID NO: 2249799 - RNA, 19 nt, Homo sapiens
  misc_RNA (1)...(19): siRNA sense strand
caaacaaauguaaaggcua

SEQ ID NO: 2249800 - RNA, 19 nt, Homo sapiens
  misc_RNA (1)...(19): siRNA sense strand
guacaggcacagauggcaa

SEQ ID NO: 2249801 - RNA, 19 nt, Homo sapiens
  misc_RNA (1)...(19): siRNA sense strand
gggccaaagaaacgacaga

SEQ ID NO: 2249802 - RNA, 19 nt, Homo sapiens
  misc_RNA (1)...(19): siRNA sense strand
uaguggaagcaauggaaau

SEQ ID NO: 2249803 - RNA, 19 nt, Homo sapiens
  misc_RNA (1)...(19): siRNA sense strand
ugucaauggaugagcagga

SEQ ID NO: 2249804 - RNA, 19 nt, Homo sapiens
  misc_RNA (1)...(19): siRNA sense strand
acgacagaaccaaggaaaa

SEQ ID NO: 2249805 - RNA, 19 nt, Homo sapiens
  misc_RNA (1)...(19): siRNA sense strand
cgacagaaccaaggaaaau

SEQ ID NO: 2249806 - RNA, 19 nt, Homo sapiens
  misc_RNA (1)...(19): siRNA sense strand
ggaaaugaccagcugagca

SEQ ID NO: 2249807 - RNA, 19 nt, Homo sapiens
  misc_RNA (1)...(19): siRNA sense strand
agaaacaacaagaagccau

SEQ ID NO: 2249808 - RNA, 19 nt, Homo sapiens
  misc_RNA (1)...(19): siRNA sense strand
ccaaggaaaauuugugcaa

SEQ ID NO: 2249809 - RNA, 19 nt, Homo sapiens
  misc_RNA (1)...(19): siRNA sense strand
acugaaggccagcggugua

SEQ ID NO: 2249810 - RNA, 19 nt, Homo sapiens
  misc_RNA (1)...(19): siRNA sense strand
cagagaagugugaagccau

SEQ ID NO: 2249811 - RNA, 19 nt, Homo sapiens
  misc_RNA (1)...(19): siRNA sense strand
cugcagaccucaaugguga

SEQ ID NO: 2249812 - RNA, 19 nt, Homo sapiens
  misc_RNA (1)...(19): siRNA sense strand
gggacaaggaugauaaaau

SEQ ID NO: 2249813 - RNA, 19 nt, Homo sapiens
  misc_RNA (1)...(19): siRNA sense strand
aggaaauauuggagaacug

SEQ ID NO: 2249814 - RNA, 19 nt, Homo sapiens
  misc_RNA (1)...(19): siRNA sense strand
gcaaggagaggcuagggaa

SEQ ID NO: 2249815 - RNA, 19 nt, Homo sapiens
  misc_RNA (1)...(19): siRNA sense strand
cgugaugagagaagauuca

SEQ ID NO: 2249816 - RNA, 19 nt, Homo sapiens
  misc_RNA (1)...(19): siRNA sense strand
gguuuguggaucaggauga

SEQ ID NO: 2249817 - RNA, 19 nt, Homo sapiens
  misc_RNA (1)...(19): siRNA sense strand
ggaugaguauauugcggau

SEQ ID NO: 2249818 - RNA, 19 nt, Homo sapiens
  misc_RNA (1)...(19): siRNA sense strand
agggaagauuguugaucga

SEQ ID NO: 2249819 - RNA, 19 nt, Homo sapiens
  misc_RNA (1)...(19): siRNA sense strand
ccacgugaugagagaagau

SEQ ID NO: 2249820 - RNA, 19 nt, Homo sapiens
  misc_RNA (1)...(19): siRNA sense strand
augauagggacaaggauga

SEQ ID NO: 2249821 - RNA, 19 nt, Homo sapiens
  misc_RNA (1)...(19): siRNA sense strand
ugguauaugaaucagacaa

SEQ ID NO: 2249822 - RNA, 19 nt, Homo sapiens
  misc_RNA (1)...(19): siRNA sense strand
ggaaggauuaugauaggga

SEQ ID NO: 2249823 - RNA, 19 nt, Homo sapiens
  misc_RNA (1)...(19): siRNA sense strand
aaggauuaugauagggaca

SEQ ID NO: 2249824 - RNA, 19 nt, Homo sapiens
  misc_RNA (1)...(19): siRNA sense strand
ugaugagagaagauucaaa

SEQ ID NO: 2249825 - RNA, 19 nt, Homo sapiens
  misc_RNA (1)...(19): siRNA sense strand
gagagaagauucaaagcug

SEQ ID NO: 2249826 - RNA, 19 nt, Homo sapiens
  misc_RNA (1)...(19): siRNA sense strand
auucaaagcugcagaccuc

SEQ ID NO: 2249827 - RNA, 19 nt, Homo sapiens
  misc_RNA (1)...(19): siRNA sense strand
cuuuagaagaacaugacaa

SEQ ID NO: 2249828 - RNA, 19 nt, Homo sapiens
  misc_RNA (1)...(19): siRNA sense strand
guugauuauaugacggaau

SEQ ID NO: 2249829 - RNA, 19 nt, Homo sapiens
  misc_RNA (1)...(19): siRNA sense strand
ggugauuacaggugggauc

SEQ ID NO: 2249830 - RNA, 19 nt, Homo sapiens
  misc_RNA (1)...(19): siRNA sense strand
gagaaagacagauucguga

SEQ ID NO: 2249831 - RNA, 19 nt, Homo sapiens
  misc_RNA (1)...(19): siRNA sense strand
aggccgaggagcugcacua

SEQ ID NO: 2249832 - RNA, 19 nt, Homo sapiens
  misc_RNA (1)...(19): siRNA sense strand
gggcauugcacaagaggag

SEQ ID NO: 2249833 - RNA, 19 nt, Homo sapiens
  misc_RNA (1)...(19): siRNA sense strand
cugcaaaugaagauccaga

SEQ ID NO: 2249834 - RNA, 19 nt, Homo sapiens
  misc_RNA (1)...(19): siRNA sense strand
uaaucagggcauugcacaa

SEQ ID NO: 2249835 - RNA, 19 nt, Homo sapiens
  misc_RNA (1)...(19): siRNA sense strand
ucgugaaugauuaugacaa

SEQ ID NO: 2249836 - RNA, 19 nt, Homo sapiens
  misc_RNA (1)...(19): siRNA sense strand
agauaacgauggcaggcuu

SEQ ID NO: 2249837 - RNA, 19 nt, Homo sapiens
  misc_RNA (1)...(19): siRNA sense strand
aggcgaucauaaagaaaau

SEQ ID NO: 2249838 - RNA, 19 nt, Homo sapiens
  misc_RNA (1)...(19): siRNA sense strand
uggauuuguuaguuuggaa

SEQ ID NO: 2249839 - RNA, 19 nt, Homo sapiens
  misc_RNA (1)...(19): siRNA sense strand
cagaaaaggaaaaggaaaa

SEQ ID NO: 2249840 - RNA, 19 nt, Homo sapiens
  misc_RNA (1)...(19): siRNA sense strand
gggaaaaguaacaggaaau

SEQ ID NO: 2249841 - RNA, 19 nt, Homo sapiens
  misc_RNA (1)...(19): siRNA sense strand
gugaaaacaaaguggaaaa

SEQ ID NO: 2249842 - RNA, 19 nt, Homo sapiens
  misc_RNA (1)...(19): siRNA sense strand
cggaauacaaugaagaauu

SEQ ID NO: 2249843 - RNA, 19 nt, Homo sapiens
  misc_RNA (1)...(19): siRNA sense strand
ccauuaaauugaaaggaga

SEQ ID NO: 2249844 - RNA, 19 nt, Homo sapiens
  misc_RNA (1)...(19): siRNA sense strand
ggggaaaaguaacaggaaa

SEQ ID NO: 2249845 - RNA, 19 nt, Homo sapiens
  misc_RNA (1)...(19): siRNA sense strand
aggaaaugucagcaagaaa

SEQ ID NO: 2249846 - RNA, 19 nt, Homo sapiens
  misc_RNA (1)...(19): siRNA sense strand
aauugaaaggagagacaaa

SEQ ID NO: 2249847 - RNA, 19 nt, Homo sapiens
  misc_RNA (1)...(19): siRNA sense strand
aauaccaaguggaaagaaa

SEQ ID NO: 2249848 - RNA, 19 nt, Homo sapiens
  misc_RNA (1)...(19): siRNA sense strand
caguaaagaagaaugagaa

SEQ ID NO: 2249849 - RNA, 19 nt, Homo sapiens
  misc_RNA (1)...(19): siRNA sense strand
augaagaacccaagaccaa

SEQ ID NO: 2249850 - RNA, 19 nt, Homo sapiens
  misc_RNA (1)...(19): siRNA sense strand
guggauaaauauaagccaa

SEQ ID NO: 2249851 - RNA, 19 nt, Homo sapiens
  misc_RNA (1)...(19): siRNA sense strand
ccagaaaaggaaaaggaaa

SEQ ID NO: 2249852 - RNA, 19 nt, Homo sapiens
  misc_RNA (1)...(19): siRNA sense strand
gaugaaagaaagagcuaca

SEQ ID NO: 2249853 - RNA, 19 nt, Homo sapiens
  misc_RNA (1)...(19): siRNA sense strand
gguaaauagcucccguaaa

SEQ ID NO: 2249854 - RNA, 19 nt, Homo sapiens
  misc_RNA (1)...(19): siRNA sense strand
cagaugaaagaaagagcua

SEQ ID NO: 2249855 - RNA, 19 nt, Homo sapiens
  misc_RNA (1)...(19): siRNA sense strand
gcaucuagacacagcacaa

SEQ ID NO: 2249856 - RNA, 19 nt, Homo sapiens
  misc_RNA (1)...(19): siRNA sense strand
agaagaugguggcaagcaa

SEQ ID NO: 2249857 - RNA, 19 nt, Homo sapiens
  misc_RNA (1)...(19): siRNA sense strand
ccuaggaagcaaaguaaau

SEQ ID NO: 2249858 - RNA, 19 nt, Homo sapiens
  misc_RNA (1)...(19): siRNA sense strand
aggagacguugcagguaaa

SEQ ID NO: 2249859 - RNA, 19 nt, Homo sapiens
  misc_RNA (1)...(19): siRNA sense strand
ggaaaugucagcaagaaaa

SEQ ID NO: 2249860 - RNA, 19 nt, Homo sapiens
  misc_RNA (1)...(19): siRNA sense strand
cagaaacagaugaagaaga

SEQ ID NO: 2249861 - RNA, 19 nt, Homo sapiens
  misc_RNA (1)...(19): siRNA sense strand
uuucaaagcuggaucccaa

SEQ ID NO: 2249862 - RNA, 19 nt, Homo sapiens
  misc_RNA (1)...(19): siRNA sense strand
agacaaguggugacagcaa

SEQ ID NO: 2249863 - RNA, 19 nt, Homo sapiens
  misc_RNA (1)...(19): siRNA sense strand
cuauaaaggcaucuagaca

SEQ ID NO: 2249864 - RNA, 19 nt, Homo sapiens
  misc_RNA (1)...(19): siRNA sense strand
gaccaagaugcuauagaaa

SEQ ID NO: 2249865 - RNA, 19 nt, Homo sapiens
  misc_RNA (1)...(19): siRNA sense strand
agaugaagaaagaguccaa

SEQ ID NO: 2249866 - RNA, 19 nt, Homo sapiens
  misc_RNA (1)...(19): siRNA sense strand
caaaaguucuccagcuaaa

SEQ ID NO: 2249867 - RNA, 19 nt, Homo sapiens
  misc_RNA (1)...(19): siRNA sense strand
uggaugaaguagauggcau

SEQ ID NO: 2249868 - RNA, 19 nt, Homo sapiens
  misc_RNA (1)...(19): siRNA sense strand
aaauagucaucuuggaaca

SEQ ID NO: 2249869 - RNA, 19 nt, Homo sapiens
  misc_RNA (1)...(19): siRNA sense strand
agaaagaccaagaugcuau

SEQ ID NO: 2249870 - RNA, 19 nt, Homo sapiens
  misc_RNA (1)...(19): siRNA sense strand
ugucaugggucgugauagu

SEQ ID NO: 2249871 - RNA, 19 nt, Homo sapiens
  misc_RNA (1)...(19): siRNA sense strand
agaacuuacuccagcaaaa

SEQ ID NO: 2249872 - RNA, 19 nt, Homo sapiens
  misc_RNA (1)...(19): siRNA sense strand
aagauaaggagcccagaaa

SEQ ID NO: 2249873 - RNA, 19 nt, Homo sapiens
  misc_RNA (1)...(19): siRNA sense strand
ugcacgaaguaaagcauua

SEQ ID NO: 2249874 - RNA, 19 nt, Homo sapiens
  misc_RNA (1)...(19): siRNA sense strand
gauuaaaugaugaagccau

SEQ ID NO: 2249875 - RNA, 19 nt, Homo sapiens
  misc_RNA (1)...(19): siRNA sense strand
uaaauugaaaggagagaca

SEQ ID NO: 2249876 - RNA, 19 nt, Homo sapiens
  misc_RNA (1)...(19): siRNA sense strand
gcuccaaagaaauaccaaa

SEQ ID NO: 2249877 - RNA, 19 nt, Homo sapiens
  misc_RNA (1)...(19): siRNA sense strand
ucggaaauucuuuggagua

SEQ ID NO: 2249878 - RNA, 19 nt, Homo sapiens
  misc_RNA (1)...(19): siRNA sense strand
guaugugcaaugauagaaa

SEQ ID NO: 2249879 - RNA, 19 nt, Homo sapiens
  misc_RNA (1)...(19): siRNA sense strand
aaagagaauggaagaucua

SEQ ID NO: 2249880 - RNA, 19 nt, Homo sapiens
  misc_RNA (1)...(19): siRNA sense strand
augcggagcuggagaggca

SEQ ID NO: 2249881 - RNA, 19 nt, Homo sapiens
  misc_RNA (1)...(19): siRNA sense strand
auaaagaaauagagccugu

SEQ ID NO: 2249882 - RNA, 19 nt, Homo sapiens
  misc_RNA (1)...(19): siRNA sense strand
aguaauaccaaguggaaag

SEQ ID NO: 2249883 - RNA, 19 nt, Homo sapiens
  misc_RNA (1)...(19): siRNA sense strand
caaaagaaucucagcaaca

SEQ ID NO: 2249884 - RNA, 19 nt, Homo sapiens
  misc_RNA (1)...(19): siRNA sense strand
gcugagucacugaacaaua

SEQ ID NO: 2249885 - RNA, 19 nt, Homo sapiens
  misc_RNA (1)...(19): siRNA sense strand
gaguaauaccaaguggaaa

SEQ ID NO: 2249886 - RNA, 19 nt, Homo sapiens
  misc_RNA (1)...(19): siRNA sense strand
agaugaagaagaugacuuu

SEQ ID NO: 2249887 - RNA, 19 nt, Homo sapiens
  misc_RNA (1)...(19): siRNA sense strand
auaaaggcaucuagacaca

SEQ ID NO: 2249888 - RNA, 19 nt, Homo sapiens
  misc_RNA (1)...(19): siRNA sense strand
uaacaggaaaugucagcaa

SEQ ID NO: 2249889 - RNA, 19 nt, Homo sapiens
  misc_RNA (1)...(19): siRNA sense strand
guaugaaauagcaguugaa

SEQ ID NO: 2249890 - RNA, 19 nt, Homo sapiens
  misc_RNA (1)...(19): siRNA sense strand
gcaaaaggacuguaaacau

SEQ ID NO: 2249891 - RNA, 19 nt, Homo sapiens
  misc_RNA (1)...(19): siRNA sense strand
ugauucagauucagaguca

SEQ ID NO: 2249892 - RNA, 19 nt, Homo sapiens
  misc_RNA (1)...(19): siRNA sense strand
ggaaauucuuuggaguaau

SEQ ID NO: 2249893 - RNA, 19 nt, Homo sapiens
  misc_RNA (1)...(19): siRNA sense strand
cagaugaagaagaugacuu

SEQ ID NO: 2249894 - RNA, 19 nt, Homo sapiens
  misc_RNA (1)...(19): siRNA sense strand
aagaaaacacuaagaccaa

SEQ ID NO: 2249895 - RNA, 19 nt, Homo sapiens
  misc_RNA (1)...(19): siRNA sense strand
ucaaggagcagguggcuga

SEQ ID NO: 2249896 - RNA, 19 nt, Homo sapiens
  misc_RNA (1)...(19): siRNA sense strand
aggcaugcaaggaggucaa

SEQ ID NO: 2249897 - RNA, 19 nt, Homo sapiens
  misc_RNA (1)...(19): siRNA sense strand
aggacaaccugcagagcgu

SEQ ID NO: 2249898 - RNA, 19 nt, Homo sapiens
  misc_RNA (1)...(19): siRNA sense strand
gguucacaaauacggguua

SEQ ID NO: 2249899 - RNA, 19 nt, Homo sapiens
  misc_RNA (1)...(19): siRNA sense strand
cgggcaaggcagacaaaau

SEQ ID NO: 2249900 - RNA, 19 nt, Homo sapiens
  misc_RNA (1)...(19): siRNA sense strand
aggucaagucacaguccaa

SEQ ID NO: 2249901 - RNA, 19 nt, Homo sapiens
  misc_RNA (1)...(19): siRNA sense strand
aggcaugcaaggaggucaa

SEQ ID NO: 2249902 - RNA, 19 nt, Homo sapiens
  misc_RNA (1)...(19): siRNA sense strand
aggacaaccugcagagcgu

SEQ ID NO: 2249903 - RNA, 19 nt, Homo sapiens
  misc_RNA (1)...(19): siRNA sense strand
gguucacaaauacggguua

SEQ ID NO: 2249904 - RNA, 19 nt, Homo sapiens
  misc_RNA (1)...(19): siRNA sense strand
cgggcaaggcagacaaaau

SEQ ID NO: 2249905 - RNA, 19 nt, Homo sapiens
  misc_RNA (1)...(19): siRNA sense strand
aggucaagucacaguccaa

SEQ ID NO: 2249906 - RNA, 19 nt, Homo sapiens
  misc_RNA (1)...(19): siRNA sense strand
aggcaugcaaggaggucaa

SEQ ID NO: 2249907 - RNA, 19 nt, Homo sapiens
  misc_RNA (1)...(19): siRNA sense strand
aggacaaccugcagagcgu

SEQ ID NO: 2249908 - RNA, 19 nt, Homo sapiens
  misc_RNA (1)...(19): siRNA sense strand
gguucacaaauacggguua

SEQ ID NO: 2249909 - RNA, 19 nt, Homo sapiens
  misc_RNA (1)...(19): siRNA sense strand
cgggcaaggcagacaaaau

SEQ ID NO: 2249910 - RNA, 19 nt, Homo sapiens
  misc_RNA (1)...(19): siRNA sense strand
aggucaagucacaguccaa

SEQ ID NO: 2249911 - RNA, 19 nt, Homo sapiens
  misc_RNA (1)...(19): siRNA sense strand
aggcaugcaaggaggucaa

SEQ ID NO: 2249912 - RNA, 19 nt, Homo sapiens
  misc_RNA (1)...(19): siRNA sense strand
aggacaaccugcagagcgu

SEQ ID NO: 2249913 - RNA, 19 nt, Homo sapiens
  misc_RNA (1)...(19): siRNA sense strand
gguucacaaauacggguua

SEQ ID NO: 2249914 - RNA, 19 nt, Homo sapiens
  misc_RNA (1)...(19): siRNA sense strand
cgggcaaggcagacaaaau

SEQ ID NO: 2249915 - RNA, 19 nt, Homo sapiens
  misc_RNA (1)...(19): siRNA sense strand
aggucaagucacaguccaa

SEQ ID NO: 2249916 - RNA, 19 nt, Homo sapiens
  misc_RNA (1)...(19): siRNA sense strand
aggcaugcaaggaggucaa

SEQ ID NO: 2249917 - RNA, 19 nt, Homo sapiens
  misc_RNA (1)...(19): siRNA sense strand
aggacaaccugcagagcgu

SEQ ID NO: 2249918 - RNA, 19 nt, Homo sapiens
  misc_RNA (1)...(19): siRNA sense strand
gguucacaaauacggguua

SEQ ID NO: 2249919 - RNA, 19 nt, Homo sapiens
  misc_RNA (1)...(19): siRNA sense strand
cgggcaaggcagacaaaau

SEQ ID NO: 2249920 - RNA, 19 nt, Homo sapiens
  misc_RNA (1)...(19): siRNA sense strand
aggucaagucacaguccaa

SEQ ID NO: 2249921 - RNA, 19 nt, Homo sapiens
  misc_RNA (1)...(19): siRNA sense strand
aggcaugcaaggaggucaa

SEQ ID NO: 2249922 - RNA, 19 nt, Homo sapiens
  misc_RNA (1)...(19): siRNA sense strand
aggacaaccugcagagcgu

SEQ ID NO: 2249923 - RNA, 19 nt, Homo sapiens
  misc_RNA (1)...(19): siRNA sense strand
gguucacaaauacggguua

SEQ ID NO: 2249924 - RNA, 19 nt, Homo sapiens
  misc_RNA (1)...(19): siRNA sense strand
cgggcaaggcagacaaaau

SEQ ID NO: 2249925 - RNA, 19 nt, Homo sapiens
  misc_RNA (1)...(19): siRNA sense strand
aggucaagucacaguccaa

SEQ ID NO: 2249926 - RNA, 19 nt, Homo sapiens
  misc_RNA (1)...(19): siRNA sense strand
ccucaagagcacagccaaa

SEQ ID NO: 2249927 - RNA, 19 nt, Homo sapiens
  misc_RNA (1)...(19): siRNA sense strand
ccgaggaagaggaagaaga

SEQ ID NO: 2249928 - RNA, 19 nt, Homo sapiens
  misc_RNA (1)...(19): siRNA sense strand
aggaaaaggcaaaggagau

SEQ ID NO: 2249929 - RNA, 19 nt, Homo sapiens
  misc_RNA (1)...(19): siRNA sense strand
aggaagaagauuugccuga

SEQ ID NO: 2249930 - RNA, 19 nt, Homo sapiens
  misc_RNA (1)...(19): siRNA sense strand
ugcucaaacugcagcuaaa

SEQ ID NO: 2249931 - RNA, 19 nt, Homo sapiens
  misc_RNA (1)...(19): siRNA sense strand
cgugaaaagauuuagggaa

SEQ ID NO: 2249932 - RNA, 19 nt, Homo sapiens
  misc_RNA (1)...(19): siRNA sense strand
acacaagcgaaccgaggaa

SEQ ID NO: 2249933 - RNA, 19 nt, Homo sapiens
  misc_RNA (1)...(19): siRNA sense strand
aggcaaaggagaucuacau

SEQ ID NO: 2249934 - RNA, 19 nt, Homo sapiens
  misc_RNA (1)...(19): siRNA sense strand
agacccagaaggcgugaaa

SEQ ID NO: 2249935 - RNA, 19 nt, Homo sapiens
  misc_RNA (1)...(19): siRNA sense strand
caggaaaaggcaaaggaga

SEQ ID NO: 2249936 - RNA, 19 nt, Homo sapiens
  misc_RNA (1)...(19): siRNA sense strand
uccagaaacuccaggacca

SEQ ID NO: 2249937 - RNA, 19 nt, Homo sapiens
  misc_RNA (1)...(19): siRNA sense strand
acaagcgaaccgaggaaga

SEQ ID NO: 2249938 - RNA, 19 nt, Homo sapiens
  misc_RNA (1)...(19): siRNA sense strand
augcauauggaaagggauu

SEQ ID NO: 2249939 - RNA, 19 nt, Homo sapiens
  misc_RNA (1)...(19): siRNA sense strand
uugaagaagcucagaaaau

SEQ ID NO: 2249940 - RNA, 19 nt, Homo sapiens
  misc_RNA (1)...(19): siRNA sense strand
ccacaguccccuagagaga

SEQ ID NO: 2249941 - RNA, 19 nt, Homo sapiens
  misc_RNA (1)...(19): siRNA sense strand
auucaauucuggauggcau

SEQ ID NO: 2249942 - RNA, 19 nt, Homo sapiens
  misc_RNA (1)...(19): siRNA sense strand
agauuuacauccagccaca

SEQ ID NO: 2249943 - RNA, 19 nt, Homo sapiens
  misc_RNA (1)...(19): siRNA sense strand
gccucacgguggagcagaa

SEQ ID NO: 2249944 - RNA, 19 nt, Homo sapiens
  misc_RNA (1)...(19): siRNA sense strand
augcauauggaaagggauu

SEQ ID NO: 2249945 - RNA, 19 nt, Homo sapiens
  misc_RNA (1)...(19): siRNA sense strand
uugaagaagcucagaaaau

SEQ ID NO: 2249946 - RNA, 19 nt, Homo sapiens
  misc_RNA (1)...(19): siRNA sense strand
ccacaguccccuagagaga

SEQ ID NO: 2249947 - RNA, 19 nt, Homo sapiens
  misc_RNA (1)...(19): siRNA sense strand
auucaauucuggauggcau

SEQ ID NO: 2249948 - RNA, 19 nt, Homo sapiens
  misc_RNA (1)...(19): siRNA sense strand
agauuuacauccagccaca

SEQ ID NO: 2249949 - RNA, 19 nt, Homo sapiens
  misc_RNA (1)...(19): siRNA sense strand
gccucacgguggagcagaa

SEQ ID NO: 2249950 - RNA, 19 nt, Homo sapiens
  misc_RNA (1)...(19): siRNA sense strand
acacguacccugauggaga

SEQ ID NO: 2249951 - RNA, 19 nt, Homo sapiens
  misc_RNA (1)...(19): siRNA sense strand
cagaguucagugaggagaa

SEQ ID NO: 2249952 - RNA, 19 nt, Homo sapiens
  misc_RNA (1)...(19): siRNA sense strand
ccaaagaguucaagacacg

SEQ ID NO: 2249953 - RNA, 19 nt, Homo sapiens
  misc_RNA (1)...(19): siRNA sense strand
gggaagacacguacccuga

SEQ ID NO: 2249954 - RNA, 19 nt, Homo sapiens
  misc_RNA (1)...(19): siRNA sense strand
agcaaagagaauagaaacu

SEQ ID NO: 2249955 - RNA, 19 nt, Homo sapiens
  misc_RNA (1)...(19): siRNA sense strand
cugccuggagagagccaaa

SEQ ID NO: 2249956 - RNA, 19 nt, Homo sapiens
  misc_RNA (1)...(19): siRNA sense strand
cagaaaauauggugggcaa

SEQ ID NO: 2249957 - RNA, 19 nt, Homo sapiens
  misc_RNA (1)...(19): siRNA sense strand
gaaaguagcacgacggcaa

SEQ ID NO: 2249958 - RNA, 19 nt, Homo sapiens
  misc_RNA (1)...(19): siRNA sense strand
aauuagaagaggaggaaga

SEQ ID NO: 2249959 - RNA, 19 nt, Homo sapiens
  misc_RNA (1)...(19): siRNA sense strand
acaaagagaacaagcaaau

SEQ ID NO: 2249960 - RNA, 19 nt, Homo sapiens
  misc_RNA (1)...(19): siRNA sense strand
ccagagaagcacaggaaca

SEQ ID NO: 2249961 - RNA, 19 nt, Homo sapiens
  misc_RNA (1)...(19): siRNA sense strand
aagcagacaaagagaacaa

SEQ ID NO: 2249962 - RNA, 19 nt, Homo sapiens
  misc_RNA (1)...(19): siRNA sense strand
gaacaaagauuaucgagca

SEQ ID NO: 2249963 - RNA, 19 nt, Homo sapiens
  misc_RNA (1)...(19): siRNA sense strand
ggaucaggaagcagacaaa

SEQ ID NO: 2249964 - RNA, 19 nt, Homo sapiens
  misc_RNA (1)...(19): siRNA sense strand
ggaggaaagaugauggaga

SEQ ID NO: 2249965 - RNA, 19 nt, Homo sapiens
  misc_RNA (1)...(19): siRNA sense strand
augaaagaggagaagauaa

SEQ ID NO: 2249966 - RNA, 19 nt, Homo sapiens
  misc_RNA (1)...(19): siRNA sense strand
gagagaagggagucagaau

SEQ ID NO: 2249967 - RNA, 19 nt, Homo sapiens
  misc_RNA (1)...(19): siRNA sense strand
gcaauagcgaagaguacaa

SEQ ID NO: 2249968 - RNA, 19 nt, Homo sapiens
  misc_RNA (1)...(19): siRNA sense strand
cgggaaaggacguggaaac

SEQ ID NO: 2249969 - RNA, 19 nt, Homo sapiens
  misc_RNA (1)...(19): siRNA sense strand
augaagaauuagaggaaac

SEQ ID NO: 2249970 - RNA, 19 nt, Homo sapiens
  misc_RNA (1)...(19): siRNA sense strand
ucgacaagguccugugaau

SEQ ID NO: 2249971 - RNA, 19 nt, Homo sapiens
  misc_RNA (1)...(19): siRNA sense strand
agaugaaagcuaugaccaa

SEQ ID NO: 2249972 - RNA, 19 nt, Homo sapiens
  misc_RNA (1)...(19): siRNA sense strand
cagaagaggaagaagacga

SEQ ID NO: 2249973 - RNA, 19 nt, Homo sapiens
  misc_RNA (1)...(19): siRNA sense strand
aggauaugaaagaggagaa

SEQ ID NO: 2249974 - RNA, 19 nt, Homo sapiens
  misc_RNA (1)...(19): siRNA sense strand
aagaauaacuauacgagga

SEQ ID NO: 2249975 - RNA, 19 nt, Homo sapiens
  misc_RNA (1)...(19): siRNA sense strand
aggaagaacuccagcccau

SEQ ID NO: 2249976 - RNA, 19 nt, Homo sapiens
  misc_RNA (1)...(19): siRNA sense strand
auaacaaccaacuggauaa

SEQ ID NO: 2249977 - RNA, 19 nt, Homo sapiens
  misc_RNA (1)...(19): siRNA sense strand
gcgaacaaauccaggugau

SEQ ID NO: 2249978 - RNA, 19 nt, Homo sapiens
  misc_RNA (1)...(19): siRNA sense strand
ggaugauaaagaugaaaga

SEQ ID NO: 2249979 - RNA, 19 nt, Homo sapiens
  misc_RNA (1)...(19): siRNA sense strand
guccaagaguauaagguuu

SEQ ID NO: 2249980 - RNA, 19 nt, Homo sapiens
  misc_RNA (1)...(19): siRNA sense strand
agacaaagagaacaagcaa

SEQ ID NO: 2249981 - RNA, 19 nt, Homo sapiens
  misc_RNA (1)...(19): siRNA sense strand
gaaugguccaagaguauaa

SEQ ID NO: 2249982 - RNA, 19 nt, Homo sapiens
  misc_RNA (1)...(19): siRNA sense strand
cgccagaagaggaagaaga

SEQ ID NO: 2249983 - RNA, 19 nt, Homo sapiens
  misc_RNA (1)...(19): siRNA sense strand
ucaaauaaucccagagauc

SEQ ID NO: 2249984 - RNA, 19 nt, Homo sapiens
  misc_RNA (1)...(19): siRNA sense strand
cgaagaaauauugcagaaa

SEQ ID NO: 2249985 - RNA, 19 nt, Homo sapiens
  misc_RNA (1)...(19): siRNA sense strand
ucagaaagggagucaacua

SEQ ID NO: 2249986 - RNA, 19 nt, Homo sapiens
  misc_RNA (1)...(19): siRNA sense strand
agacagaucaucagacaga

SEQ ID NO: 2249987 - RNA, 19 nt, Homo sapiens
  misc_RNA (1)...(19): siRNA sense strand
gagaguggagacagacaaa

SEQ ID NO: 2249988 - RNA, 19 nt, Homo sapiens
  misc_RNA (1)...(19): siRNA sense strand
ggaacgugagagugaagua

SEQ ID NO: 2249989 - RNA, 19 nt, Homo sapiens
  misc_RNA (1)...(19): siRNA sense strand
gcaucaucacaaaggcaua

SEQ ID NO: 2249990 - RNA, 19 nt, Homo sapiens
  misc_RNA (1)...(19): siRNA sense strand
cagcuaaugcauauggaau

SEQ ID NO: 2249991 - RNA, 19 nt, Homo sapiens
  misc_RNA (1)...(19): siRNA sense strand
ccaagaaacugaaacacca

SEQ ID NO: 2249992 - RNA, 19 nt, Homo sapiens
  misc_RNA (1)...(19): siRNA sense strand
gacaaagagaacaagcaaa

SEQ ID NO: 2249993 - RNA, 19 nt, Homo sapiens
  misc_RNA (1)...(19): siRNA sense strand
auaugaaagaggagaagau

SEQ ID NO: 2249994 - RNA, 19 nt, Homo sapiens
  misc_RNA (1)...(19): siRNA sense strand
acaacaucguggagcaaaa

SEQ ID NO: 2249995 - RNA, 19 nt, Homo sapiens
  misc_RNA (1)...(19): siRNA sense strand
gggaaaggacguggaaaca

SEQ ID NO: 2249996 - RNA, 19 nt, Homo sapiens
  misc_RNA (1)...(19): siRNA sense strand
cagcaauagcgaagaguac

SEQ ID NO: 2249997 - RNA, 19 nt, Homo sapiens
  misc_RNA (1)...(19): siRNA sense strand
cagccaagaaacugaaaca

SEQ ID NO: 2249998 - RNA, 19 nt, Homo sapiens
  misc_RNA (1)...(19): siRNA sense strand
aacaaagauuaucgagcaa

SEQ ID NO: 2249999 - RNA, 19 nt, Homo sapiens
  misc_RNA (1)...(19): siRNA sense strand
aauguaggucgaagaaaua

SEQ ID NO: 2250000 - RNA, 19 nt, Homo sapiens
  misc_RNA (1)...(19): siRNA sense strand
gugugaagcaaccggaaau

SEQ ID NO: 2250001 - RNA, 19 nt, Homo sapiens
  misc_RNA (1)...(19): siRNA sense strand
cagucaaaccucagcaaca

SEQ ID NO: 2250002 - RNA, 19 nt, Homo sapiens
  misc_RNA (1)...(19): siRNA sense strand
gaguggagacagacaaaga

SEQ ID NO: 2250003 - RNA, 19 nt, Homo sapiens
  misc_RNA (1)...(19): siRNA sense strand
acagaucaucagacagaaa

SEQ ID NO: 2250004 - RNA, 19 nt, Homo sapiens
  misc_RNA (1)...(19): siRNA sense strand
gaauuagaggaaacugaaa

SEQ ID NO: 2250005 - RNA, 19 nt, Homo sapiens
  misc_RNA (1)...(19): siRNA sense strand
gaaagaugauggagagcug

SEQ ID NO: 2250006 - RNA, 19 nt, Homo sapiens
  misc_RNA (1)...(19): siRNA sense strand
gcccaaauccagauaugaa

SEQ ID NO: 2250007 - RNA, 19 nt, Homo sapiens
  misc_RNA (1)...(19): siRNA sense strand
aaguagaccugaugaagga

SEQ ID NO: 2250008 - RNA, 19 nt, Homo sapiens
  misc_RNA (1)...(19): siRNA sense strand
gagaaguguuggauggaag

SEQ ID NO: 2250009 - RNA, 19 nt, Homo sapiens
  misc_RNA (1)...(19): siRNA sense strand
gagaaugugaaaacagaaa

SEQ ID NO: 2250010 - RNA, 19 nt, Homo sapiens
  misc_RNA (1)...(19): siRNA sense strand
gugaagagacccaguaacu

SEQ ID NO: 2250011 - RNA, 19 nt, Homo sapiens
  misc_RNA (1)...(19): siRNA sense strand
agaagaggaagaagacgaa

SEQ ID NO: 2250012 - RNA, 19 nt, Homo sapiens
  misc_RNA (1)...(19): siRNA sense strand
gaccuguaguggugccaaa

SEQ ID NO: 2250013 - RNA, 19 nt, Homo sapiens
  misc_RNA (1)...(19): siRNA sense strand
guggaaacaaggcagcaaa

SEQ ID NO: 2250014 - RNA, 19 nt, Homo sapiens
  misc_RNA (1)...(19): siRNA sense strand
aguacaacaucguggagca

SEQ ID NO: 2250015 - RNA, 19 nt, Homo sapiens
  misc_RNA (1)...(19): siRNA sense strand
cagaaaauauggugggcaa

SEQ ID NO: 2250016 - RNA, 19 nt, Homo sapiens
  misc_RNA (1)...(19): siRNA sense strand
gaaaguagcacgacggcaa

SEQ ID NO: 2250017 - RNA, 19 nt, Homo sapiens
  misc_RNA (1)...(19): siRNA sense strand
aauuagaagaggaggaaga

SEQ ID NO: 2250018 - RNA, 19 nt, Homo sapiens
  misc_RNA (1)...(19): siRNA sense strand
acaaagagaacaagcaaau

SEQ ID NO: 2250019 - RNA, 19 nt, Homo sapiens
  misc_RNA (1)...(19): siRNA sense strand
ccagagaagcacaggaaca

SEQ ID NO: 2250020 - RNA, 19 nt, Homo sapiens
  misc_RNA (1)...(19): siRNA sense strand
aagcagacaaagagaacaa

SEQ ID NO: 2250021 - RNA, 19 nt, Homo sapiens
  misc_RNA (1)...(19): siRNA sense strand
gaacaaagauuaucgagca

SEQ ID NO: 2250022 - RNA, 19 nt, Homo sapiens
  misc_RNA (1)...(19): siRNA sense strand
ggaucaggaagcagacaaa

SEQ ID NO: 2250023 - RNA, 19 nt, Homo sapiens
  misc_RNA (1)...(19): siRNA sense strand
ggaggaaagaugauggaga

SEQ ID NO: 2250024 - RNA, 19 nt, Homo sapiens
  misc_RNA (1)...(19): siRNA sense strand
augaaagaggagaagauaa

SEQ ID NO: 2250025 - RNA, 19 nt, Homo sapiens
  misc_RNA (1)...(19): siRNA sense strand
gagagaagggagucagaau

SEQ ID NO: 2250026 - RNA, 19 nt, Homo sapiens
  misc_RNA (1)...(19): siRNA sense strand
gcaauagcgaagaguacaa

SEQ ID NO: 2250027 - RNA, 19 nt, Homo sapiens
  misc_RNA (1)...(19): siRNA sense strand
cgggaaaggacguggaaac

SEQ ID NO: 2250028 - RNA, 19 nt, Homo sapiens
  misc_RNA (1)...(19): siRNA sense strand
augaagaauuagaggaaac

SEQ ID NO: 2250029 - RNA, 19 nt, Homo sapiens
  misc_RNA (1)...(19): siRNA sense strand
ucgacaagguccugugaau

SEQ ID NO: 2250030 - RNA, 19 nt, Homo sapiens
  misc_RNA (1)...(19): siRNA sense strand
agaugaaagcuaugaccaa

SEQ ID NO: 2250031 - RNA, 19 nt, Homo sapiens
  misc_RNA (1)...(19): siRNA sense strand
cagaagaggaagaagacga

SEQ ID NO: 2250032 - RNA, 19 nt, Homo sapiens
  misc_RNA (1)...(19): siRNA sense strand
aggauaugaaagaggagaa

SEQ ID NO: 2250033 - RNA, 19 nt, Homo sapiens
  misc_RNA (1)...(19): siRNA sense strand
aagaauaacuauacgagga

SEQ ID NO: 2250034 - RNA, 19 nt, Homo sapiens
  misc_RNA (1)...(19): siRNA sense strand
aggaagaacuccagcccau

SEQ ID NO: 2250035 - RNA, 19 nt, Homo sapiens
  misc_RNA (1)...(19): siRNA sense strand
auaacaaccaacuggauaa

SEQ ID NO: 2250036 - RNA, 19 nt, Homo sapiens
  misc_RNA (1)...(19): siRNA sense strand
gcgaacaaauccaggugau

SEQ ID NO: 2250037 - RNA, 19 nt, Homo sapiens
  misc_RNA (1)...(19): siRNA sense strand
ggaugauaaagaugaaaga

SEQ ID NO: 2250038 - RNA, 19 nt, Homo sapiens
  misc_RNA (1)...(19): siRNA sense strand
guccaagaguauaagguuu

SEQ ID NO: 2250039 - RNA, 19 nt, Homo sapiens
  misc_RNA (1)...(19): siRNA sense strand
agacaaagagaacaagcaa

SEQ ID NO: 2250040 - RNA, 19 nt, Homo sapiens
  misc_RNA (1)...(19): siRNA sense strand
gaaugguccaagaguauaa

SEQ ID NO: 2250041 - RNA, 19 nt, Homo sapiens
  misc_RNA (1)...(19): siRNA sense strand
cgccagaagaggaagaaga

SEQ ID NO: 2250042 - RNA, 19 nt, Homo sapiens
  misc_RNA (1)...(19): siRNA sense strand
ucaaauaaucccagagauc

SEQ ID NO: 2250043 - RNA, 19 nt, Homo sapiens
  misc_RNA (1)...(19): siRNA sense strand
cgaagaaauauugcagaaa

SEQ ID NO: 2250044 - RNA, 19 nt, Homo sapiens
  misc_RNA (1)...(19): siRNA sense strand
ucagaaagggagucaacua

SEQ ID NO: 2250045 - RNA, 19 nt, Homo sapiens
  misc_RNA (1)...(19): siRNA sense strand
agacagaucaucagacaga

SEQ ID NO: 2250046 - RNA, 19 nt, Homo sapiens
  misc_RNA (1)...(19): siRNA sense strand
gagaguggagacagacaaa

SEQ ID NO: 2250047 - RNA, 19 nt, Homo sapiens
  misc_RNA (1)...(19): siRNA sense strand
ggaacgugagagugaagua

SEQ ID NO: 2250048 - RNA, 19 nt, Homo sapiens
  misc_RNA (1)...(19): siRNA sense strand
gcaucaucacaaaggcaua

SEQ ID NO: 2250049 - RNA, 19 nt, Homo sapiens
  misc_RNA (1)...(19): siRNA sense strand
cagcuaaugcauauggaau

SEQ ID NO: 2250050 - RNA, 19 nt, Homo sapiens
  misc_RNA (1)...(19): siRNA sense strand
ccaagaaacugaaacacca

SEQ ID NO: 2250051 - RNA, 19 nt, Homo sapiens
  misc_RNA (1)...(19): siRNA sense strand
gacaaagagaacaagcaaa

SEQ ID NO: 2250052 - RNA, 19 nt, Homo sapiens
  misc_RNA (1)...(19): siRNA sense strand
auaugaaagaggagaagau

SEQ ID NO: 2250053 - RNA, 19 nt, Homo sapiens
  misc_RNA (1)...(19): siRNA sense strand
acaacaucguggagcaaaa

SEQ ID NO: 2250054 - RNA, 19 nt, Homo sapiens
  misc_RNA (1)...(19): siRNA sense strand
gggaaaggacguggaaaca

SEQ ID NO: 2250055 - RNA, 19 nt, Homo sapiens
  misc_RNA (1)...(19): siRNA sense strand
cagcaauagcgaagaguac

SEQ ID NO: 2250056 - RNA, 19 nt, Homo sapiens
  misc_RNA (1)...(19): siRNA sense strand
cagccaagaaacugaaaca

SEQ ID NO: 2250057 - RNA, 19 nt, Homo sapiens
  misc_RNA (1)...(19): siRNA sense strand
aacaaagauuaucgagcaa

SEQ ID NO: 2250058 - RNA, 19 nt, Homo sapiens
  misc_RNA (1)...(19): siRNA sense strand
aauguaggucgaagaaaua

SEQ ID NO: 2250059 - RNA, 19 nt, Homo sapiens
  misc_RNA (1)...(19): siRNA sense strand
gugugaagcaaccggaaau

SEQ ID NO: 2250060 - RNA, 19 nt, Homo sapiens
  misc_RNA (1)...(19): siRNA sense strand
cagucaaaccucagcaaca

SEQ ID NO: 2250061 - RNA, 19 nt, Homo sapiens
  misc_RNA (1)...(19): siRNA sense strand
gaguggagacagacaaaga

SEQ ID NO: 2250062 - RNA, 19 nt, Homo sapiens
  misc_RNA (1)...(19): siRNA sense strand
acagaucaucagacagaaa

SEQ ID NO: 2250063 - RNA, 19 nt, Homo sapiens
  misc_RNA (1)...(19): siRNA sense strand
gaauuagaggaaacugaaa

SEQ ID NO: 2250064 - RNA, 19 nt, Homo sapiens
  misc_RNA (1)...(19): siRNA sense strand
gaaagaugauggagagcug

SEQ ID NO: 2250065 - RNA, 19 nt, Homo sapiens
  misc_RNA (1)...(19): siRNA sense strand
gcccaaauccagauaugaa

SEQ ID NO: 2250066 - RNA, 19 nt, Homo sapiens
  misc_RNA (1)...(19): siRNA sense strand
aaguagaccugaugaagga

SEQ ID NO: 2250067 - RNA, 19 nt, Homo sapiens
  misc_RNA (1)...(19): siRNA sense strand
gagaaguguuggauggaag

SEQ ID NO: 2250068 - RNA, 19 nt, Homo sapiens
  misc_RNA (1)...(19): siRNA sense strand
gagaaugugaaaacagaaa

SEQ ID NO: 2250069 - RNA, 19 nt, Homo sapiens
  misc_RNA (1)...(19): siRNA sense strand
gugaagagacccaguaacu

SEQ ID NO: 2250070 - RNA, 19 nt, Homo sapiens
  misc_RNA (1)...(19): siRNA sense strand
agaagaggaagaagacgaa

SEQ ID NO: 2250071 - RNA, 19 nt, Homo sapiens
  misc_RNA (1)...(19): siRNA sense strand
gaccuguaguggugccaaa

SEQ ID NO: 2250072 - RNA, 19 nt, Homo sapiens
  misc_RNA (1)...(19): siRNA sense strand
guggaaacaaggcagcaaa

SEQ ID NO: 2250073 - RNA, 19 nt, Homo sapiens
  misc_RNA (1)...(19): siRNA sense strand
aguacaacaucguggagca

SEQ ID NO: 2250074 - RNA, 19 nt, Homo sapiens
  misc_RNA (1)...(19): siRNA sense strand
aggaagucguggaggaaga

SEQ ID NO: 2250075 - RNA, 19 nt, Homo sapiens
  misc_RNA (1)...(19): siRNA sense strand
acaaauggguaccggaaaa

SEQ ID NO: 2250076 - RNA, 19 nt, Homo sapiens
  misc_RNA (1)...(19): siRNA sense strand
ggguaaauccaguucgaga

SEQ ID NO: 2250077 - RNA, 19 nt, Homo sapiens
  misc_RNA (1)...(19): siRNA sense strand
ggacaaagaugcuggaagg

SEQ ID NO: 2250078 - RNA, 19 nt, Homo sapiens
  misc_RNA (1)...(19): siRNA sense strand
caaaacuauuggugugaaa

SEQ ID NO: 2250079 - RNA, 19 nt, Homo sapiens
  misc_RNA (1)...(19): siRNA sense strand
caacaaauggguaccggaa

SEQ ID NO: 2250080 - RNA, 19 nt, Homo sapiens
  misc_RNA (1)...(19): siRNA sense strand
uggaggaagucguggagga

SEQ ID NO: 2250081 - RNA, 19 nt, Homo sapiens
  misc_RNA (1)...(19): siRNA sense strand
gcaaaugaugacaugguau

SEQ ID NO: 2250082 - RNA, 19 nt, Homo sapiens
  misc_RNA (1)...(19): siRNA sense strand
gaagugaggauuaugggaa

SEQ ID NO: 2250083 - RNA, 19 nt, Homo sapiens
  misc_RNA (1)...(19): siRNA sense strand
ggggaaaaugggaagaaau

SEQ ID NO: 2250084 - RNA, 19 nt, Homo sapiens
  misc_RNA (1)...(19): siRNA sense strand
cuggaauuauggagaacuu

SEQ ID NO: 2250085 - RNA, 19 nt, Homo sapiens
  misc_RNA (1)...(19): siRNA sense strand
agaugaaccuggagacacu

SEQ ID NO: 2250086 - RNA, 19 nt, Homo sapiens
  misc_RNA (1)...(19): siRNA sense strand
agccagaacugaagggcca

SEQ ID NO: 2250087 - RNA, 19 nt, Homo sapiens
  misc_RNA (1)...(19): siRNA sense strand
caaaugaugacaugguauu

SEQ ID NO: 2250088 - RNA, 19 nt, Homo sapiens
  misc_RNA (1)...(19): siRNA sense strand
ggaggaagucguggaggaa

SEQ ID NO: 2250089 - RNA, 19 nt, Homo sapiens
  misc_RNA (1)...(19): siRNA sense strand
gaaaauggccugugggugu

SEQ ID NO: 2250090 - RNA, 19 nt, Homo sapiens
  misc_RNA (1)...(19): siRNA sense strand
gcuauaucgaagugaggau

SEQ ID NO: 2250091 - RNA, 19 nt, Homo sapiens
  misc_RNA (1)...(19): siRNA sense strand
cuggaaaggugguguuaac

SEQ ID NO: 2250092 - RNA, 19 nt, Homo sapiens
  misc_RNA (1)...(19): siRNA sense strand
acugugaagagaaggacua

SEQ ID NO: 2250093 - RNA, 19 nt, Homo sapiens
  misc_RNA (1)...(19): siRNA sense strand
auguauagcccucagaauu

SEQ ID NO: 2250094 - RNA, 19 nt, Homo sapiens
  misc_RNA (1)...(19): siRNA sense strand
cuuuacaaccuaugcaaau

SEQ ID NO: 2250095 - RNA, 19 nt, Homo sapiens
  misc_RNA (1)...(19): siRNA sense strand
ggaacugugaagagaagga

SEQ ID NO: 2250096 - RNA, 19 nt, Homo sapiens
  misc_RNA (1)...(19): siRNA sense strand
ggcuauugguccugagaac

SEQ ID NO: 2250097 - RNA, 19 nt, Homo sapiens
  misc_RNA (1)...(19): siRNA sense strand
cagugaaugugaugcuaca

SEQ ID NO: 2250098 - RNA, 19 nt, Homo sapiens
  misc_RNA (1)...(19): siRNA sense strand
ggucacagucguagcagga

SEQ ID NO: 2250099 - RNA, 19 nt, Homo sapiens
  misc_RNA (1)...(19): siRNA sense strand
ugcucauugugaagaaaua

SEQ ID NO: 2250100 - RNA, 19 nt, Homo sapiens
  misc_RNA (1)...(19): siRNA sense strand
cucagaugaucgaggcauu

SEQ ID NO: 2250101 - RNA, 19 nt, Homo sapiens
  misc_RNA (1)...(19): siRNA sense strand
cccugaagauuaugaagau

SEQ ID NO: 2250102 - RNA, 19 nt, Homo sapiens
  misc_RNA (1)...(19): siRNA sense strand
agaagaacaccuaacaaca

SEQ ID NO: 2250103 - RNA, 19 nt, Homo sapiens
  misc_RNA (1)...(19): siRNA sense strand
ccacguuucaacagaucaa

SEQ ID NO: 2250104 - RNA, 19 nt, Homo sapiens
  misc_RNA (1)...(19): siRNA sense strand
aagaaaugcacaagcaacu

SEQ ID NO: 2250105 - RNA, 19 nt, Homo sapiens
  misc_RNA (1)...(19): siRNA sense strand
gggaaaaugggaagaaauc

SEQ ID NO: 2250106 - RNA, 19 nt, Homo sapiens
  misc_RNA (1)...(19): siRNA sense strand
uggaacagccagaacugaa

SEQ ID NO: 2250107 - RNA, 19 nt, Homo sapiens
  misc_RNA (1)...(19): siRNA sense strand
gagugcucauugugaagaa

SEQ ID NO: 2250108 - RNA, 19 nt, Homo sapiens
  misc_RNA (1)...(19): siRNA sense strand
aggauuaugggaagaacuu

SEQ ID NO: 2250109 - RNA, 19 nt, Homo sapiens
  misc_RNA (1)...(19): siRNA sense strand
gugauggcugauaaggaua

SEQ ID NO: 2250110 - RNA, 19 nt, Homo sapiens
  misc_RNA (1)...(19): siRNA sense strand
agucaaauucuguuccaau

SEQ ID NO: 2250111 - RNA, 19 nt, Homo sapiens
  misc_RNA (1)...(19): siRNA sense strand
ccuaacaacaaauggguac

SEQ ID NO: 2250112 - RNA, 19 nt, Homo sapiens
  misc_RNA (1)...(19): siRNA sense strand
aagcaguauguuuggccaa

SEQ ID NO: 2250113 - RNA, 19 nt, Homo sapiens
  misc_RNA (1)...(19): siRNA sense strand
gaaaauuccaggggacaaa

SEQ ID NO: 2250114 - RNA, 19 nt, Homo sapiens
  misc_RNA (1)...(19): siRNA sense strand
gguuccuggugcaucgaua

SEQ ID NO: 2250115 - RNA, 19 nt, Homo sapiens
  misc_RNA (1)...(19): siRNA sense strand
agaggugucuggaggaagu

SEQ ID NO: 2250116 - RNA, 19 nt, Homo sapiens
  misc_RNA (1)...(19): siRNA sense strand
gauguauagcccucagaau

SEQ ID NO: 2250117 - RNA, 19 nt, Homo sapiens
  misc_RNA (1)...(19): siRNA sense strand
uggccuagcuucagaaccu

SEQ ID NO: 2250118 - RNA, 19 nt, Homo sapiens
  misc_RNA (1)...(19): siRNA sense strand
gggacaacgagguggacuu

SEQ ID NO: 2250119 - RNA, 19 nt, Homo sapiens
  misc_RNA (1)...(19): siRNA sense strand
ggggaaaaggacagaugaa

SEQ ID NO: 2250120 - RNA, 19 nt, Homo sapiens
  misc_RNA (1)...(19): siRNA sense strand
acgaauucuuugaaggcuu

SEQ ID NO: 2250121 - RNA, 19 nt, Homo sapiens
  misc_RNA (1)...(19): siRNA sense strand
ggugacaaguucaagcuca

SEQ ID NO: 2250122 - RNA, 19 nt, Homo sapiens
  misc_RNA (1)...(19): siRNA sense strand
gggacaacgagguggacuu

SEQ ID NO: 2250123 - RNA, 19 nt, Homo sapiens
  misc_RNA (1)...(19): siRNA sense strand
ggggaaaaggacagaugaa

SEQ ID NO: 2250124 - RNA, 19 nt, Homo sapiens
  misc_RNA (1)...(19): siRNA sense strand
acgaauucuuugaaggcuu

SEQ ID NO: 2250125 - RNA, 19 nt, Homo sapiens
  misc_RNA (1)...(19): siRNA sense strand
ggugacaaguucaagcuca

SEQ ID NO: 2250126 - RNA, 19 nt, Homo sapiens
  misc_RNA (1)...(19): siRNA sense strand
ugucgcagcuggaacgcaa

SEQ ID NO: 2250127 - RNA, 19 nt, Homo sapiens
  misc_RNA (1)...(19): siRNA sense strand
augcugauggcgaggcuaa

SEQ ID NO: 2250128 - RNA, 19 nt, Homo sapiens
  misc_RNA (1)...(19): siRNA sense strand
cuacaaaccuuaagaggga

SEQ ID NO: 2250129 - RNA, 19 nt, Homo sapiens
  misc_RNA (1)...(19): siRNA sense strand
gagagaagguucaagguca

SEQ ID NO: 2250130 - RNA, 19 nt, Homo sapiens
  misc_RNA (1)...(19): siRNA sense strand
ccuuaagagggaugauaaa

SEQ ID NO: 2250131 - RNA, 19 nt, Homo sapiens
  misc_RNA (1)...(19): siRNA sense strand
agagaagguucaaggucaa

SEQ ID NO: 2250132 - RNA, 19 nt, Homo sapiens
  misc_RNA (1)...(19): siRNA sense strand
aagaagaggguguggaaga

SEQ ID NO: 2250133 - RNA, 19 nt, Homo sapiens
  misc_RNA (1)...(19): siRNA sense strand
aaaaugaaccugugggaaa

SEQ ID NO: 2250134 - RNA, 19 nt, Homo sapiens
  misc_RNA (1)...(19): siRNA sense strand
gcuauagaggacaaagaaa

SEQ ID NO: 2250135 - RNA, 19 nt, Homo sapiens
  misc_RNA (1)...(19): siRNA sense strand
acagaaagcuugcggagga

SEQ ID NO: 2250136 - RNA, 19 nt, Homo sapiens
  misc_RNA (1)...(19): siRNA sense strand
auaacgggcuggaggaaaa

SEQ ID NO: 2250137 - RNA, 19 nt, Homo sapiens
  misc_RNA (1)...(19): siRNA sense strand
ugaaagagcuuccggagca

SEQ ID NO: 2250138 - RNA, 19 nt, Homo sapiens
  misc_RNA (1)...(19): siRNA sense strand
aagagacagugacgggaaa

SEQ ID NO: 2250139 - RNA, 19 nt, Homo sapiens
  misc_RNA (1)...(19): siRNA sense strand
ggaugauaaaugugacaga

SEQ ID NO: 2250140 - RNA, 19 nt, Homo sapiens
  misc_RNA (1)...(19): siRNA sense strand
cuggagaacuugcaggaca

SEQ ID NO: 2250141 - RNA, 19 nt, Homo sapiens
  misc_RNA (1)...(19): siRNA sense strand
uggagaacuugcaggacau

SEQ ID NO: 2250142 - RNA, 19 nt, Homo sapiens
  misc_RNA (1)...(19): siRNA sense strand
ggaacaugcuauagaggac

SEQ ID NO: 2250143 - RNA, 19 nt, Homo sapiens
  misc_RNA (1)...(19): siRNA sense strand
gucggauaguagagagcua

SEQ ID NO: 2250144 - RNA, 19 nt, Homo sapiens
  misc_RNA (1)...(19): siRNA sense strand
acaggaaauugaagagcca

SEQ ID NO: 2250145 - RNA, 19 nt, Homo sapiens
  misc_RNA (1)...(19): siRNA sense strand
ugaagaugaaggugguaau

SEQ ID NO: 2250146 - RNA, 19 nt, Homo sapiens
  misc_RNA (1)...(19): siRNA sense strand
ccuaaagaguccucaacca

SEQ ID NO: 2250147 - RNA, 19 nt, Homo sapiens
  misc_RNA (1)...(19): siRNA sense strand
acgcagugaacgcgaacaa

SEQ ID NO: 2250148 - RNA, 19 nt, Homo sapiens
  misc_RNA (1)...(19): siRNA sense strand
acagaaaagaugaugcuaa

SEQ ID NO: 2250149 - RNA, 19 nt, Homo sapiens
  misc_RNA (1)...(19): siRNA sense strand
acaucgacaucauggauau

SEQ ID NO: 2250150 - RNA, 19 nt, Homo sapiens
  misc_RNA (1)...(19): siRNA sense strand
cgacggaaguggagaaaag

SEQ ID NO: 2250151 - RNA, 19 nt, Homo sapiens
  misc_RNA (1)...(19): siRNA sense strand
gggauggacaggaggaugu

SEQ ID NO: 2250152 - RNA, 19 nt, Homo sapiens
  misc_RNA (1)...(19): siRNA sense strand
cagaaagcuugcggaggaa

SEQ ID NO: 2250153 - RNA, 19 nt, Homo sapiens
  misc_RNA (1)...(19): siRNA sense strand
gagaaaagaguaaggacca

SEQ ID NO: 2250154 - RNA, 19 nt, Homo sapiens
  misc_RNA (1)...(19): siRNA sense strand
ucgcagcaguugugguaga

SEQ ID NO: 2250155 - RNA, 19 nt, Homo sapiens
  misc_RNA (1)...(19): siRNA sense strand
ugggagaacgagaaggaca

SEQ ID NO: 2250156 - RNA, 19 nt, Homo sapiens
  misc_RNA (1)...(19): siRNA sense strand
gcuucaggaacaugcuaua

SEQ ID NO: 2250157 - RNA, 19 nt, Homo sapiens
  misc_RNA (1)...(19): siRNA sense strand
cggaggaagaggaccuauu

SEQ ID NO: 2250158 - RNA, 19 nt, Homo sapiens
  misc_RNA (1)...(19): siRNA sense strand
aaagaagacgggaggaagu

SEQ ID NO: 2250159 - RNA, 19 nt, Homo sapiens
  misc_RNA (1)...(19): siRNA sense strand
aagaugacucggauacaaa

SEQ ID NO: 2250160 - RNA, 19 nt, Homo sapiens
  misc_RNA (1)...(19): siRNA sense strand
ugacgacggaaguggagaa

SEQ ID NO: 2250161 - RNA, 19 nt, Homo sapiens
  misc_RNA (1)...(19): siRNA sense strand
gaaguggagaaaagaguaa

SEQ ID NO: 2250162 - RNA, 19 nt, Homo sapiens
  misc_RNA (1)...(19): siRNA sense strand
gugccugugauuaguguaa

SEQ ID NO: 2250163 - RNA, 19 nt, Homo sapiens
  misc_RNA (1)...(19): siRNA sense strand
caugaugaaccgaggagga

SEQ ID NO: 2250164 - RNA, 19 nt, Homo sapiens
  misc_RNA (1)...(19): siRNA sense strand
uggaugaagcagaaauuga

SEQ ID NO: 2250165 - RNA, 19 nt, Homo sapiens
  misc_RNA (1)...(19): siRNA sense strand
agccagaaaaugagaaaau

SEQ ID NO: 2250166 - RNA, 19 nt, Homo sapiens
  misc_RNA (1)...(19): siRNA sense strand
gauaacgggcuggaggaaa

SEQ ID NO: 2250167 - RNA, 19 nt, Homo sapiens
  misc_RNA (1)...(19): siRNA sense strand
gcguggggccagacagaaa

SEQ ID NO: 2250168 - RNA, 19 nt, Homo sapiens
  misc_RNA (1)...(19): siRNA sense strand
cuauagaggacaaagaaac

SEQ ID NO: 2250169 - RNA, 19 nt, Homo sapiens
  misc_RNA (1)...(19): siRNA sense strand
agaacgagaaggacagcau

SEQ ID NO: 2250170 - RNA, 19 nt, Homo sapiens
  misc_RNA (1)...(19): siRNA sense strand
ggaaacaagaaaacaucaa

SEQ ID NO: 2250171 - RNA, 19 nt, Homo sapiens
  misc_RNA (1)...(19): siRNA sense strand
ggcgcaaaccagaagaaga

SEQ ID NO: 2250172 - RNA, 19 nt, Homo sapiens
  misc_RNA (1)...(19): siRNA sense strand
ggagauugcccgagagagg

SEQ ID NO: 2250173 - RNA, 19 nt, Homo sapiens
  misc_RNA (1)...(19): siRNA sense strand
aaccagaagaagagggugu

SEQ ID NO: 2250174 - RNA, 19 nt, Homo sapiens
  misc_RNA (1)...(19): siRNA sense strand
guuggaugaagcagaaauu

SEQ ID NO: 2250175 - RNA, 19 nt, Homo sapiens
  misc_RNA (1)...(19): siRNA sense strand
agauuuggccagcgaguca

SEQ ID NO: 2250176 - RNA, 19 nt, Homo sapiens
  misc_RNA (1)...(19): siRNA sense strand
aaagagacagugacgggaa

SEQ ID NO: 2250177 - RNA, 19 nt, Homo sapiens
  misc_RNA (1)...(19): siRNA sense strand
ccaaaagccaggaucgcaa

SEQ ID NO: 2250178 - RNA, 19 nt, Homo sapiens
  misc_RNA (1)...(19): siRNA sense strand
cguugcagauugugucgaa

SEQ ID NO: 2250179 - RNA, 19 nt, Homo sapiens
  misc_RNA (1)...(19): siRNA sense strand
uguaaaucugagccaguaa

SEQ ID NO: 2250180 - RNA, 19 nt, Homo sapiens
  misc_RNA (1)...(19): siRNA sense strand
gcaaagggcgcaaaccaga

SEQ ID NO: 2250181 - RNA, 19 nt, Homo sapiens
  misc_RNA (1)...(19): siRNA sense strand
cagauugugucgaagacga

SEQ ID NO: 2250182 - RNA, 19 nt, Homo sapiens
  misc_RNA (1)...(19): siRNA sense strand
gcaaauaugggaagguggu

SEQ ID NO: 2250183 - RNA, 19 nt, Homo sapiens
  misc_RNA (1)...(19): siRNA sense strand
ggagccagaaaaugagaaa

SEQ ID NO: 2250184 - RNA, 19 nt, Homo sapiens
  misc_RNA (1)...(19): siRNA sense strand
gcgaugaggccaagaacaa

SEQ ID NO: 2250185 - RNA, 19 nt, Homo sapiens
  misc_RNA (1)...(19): siRNA sense strand
cugaaggggcugagguaua

SEQ ID NO: 2250186 - RNA, 19 nt, Homo sapiens
  misc_RNA (1)...(19): siRNA sense strand
ccgaauuggagaagaagga

SEQ ID NO: 2250187 - RNA, 19 nt, Homo sapiens
  misc_RNA (1)...(19): siRNA sense strand
cggagaugaucacaggcaa

SEQ ID NO: 2250188 - RNA, 19 nt, Homo sapiens
  misc_RNA (1)...(19): siRNA sense strand
acgaagacugugagcugaa

SEQ ID NO: 2250189 - RNA, 19 nt, Homo sapiens
  misc_RNA (1)...(19): siRNA sense strand
gaacgaagacugugagcug

SEQ ID NO: 2250190 - RNA, 19 nt, Homo sapiens
  misc_RNA (1)...(19): siRNA sense strand
aguccgagcuguucgccaa

SEQ ID NO: 2250191 - RNA, 19 nt, Homo sapiens
  misc_RNA (1)...(19): siRNA sense strand
agaagaugcuggugcugga

SEQ ID NO: 2250192 - RNA, 19 nt, Homo sapiens
  misc_RNA (1)...(19): siRNA sense strand
aaggagaucaugaagguga

SEQ ID NO: 2250193 - RNA, 19 nt, Homo sapiens
  misc_RNA (1)...(19): siRNA sense strand
agaacaacaugaagggccu

SEQ ID NO: 2250194 - RNA, 19 nt, Homo sapiens
  misc_RNA (1)...(19): siRNA sense strand
aggccaagaacaacaugaa

SEQ ID NO: 2250195 - RNA, 19 nt, Homo sapiens
  misc_RNA (1)...(19): siRNA sense strand
agcugaagauccuggacuu

SEQ ID NO: 2250196 - RNA, 19 nt, Homo sapiens
  misc_RNA (1)...(19): siRNA sense strand
cccaacaacaagagaguga

SEQ ID NO: 2250197 - RNA, 19 nt, Homo sapiens
  misc_RNA (1)...(19): siRNA sense strand
cugaagacgugguaccaga

SEQ ID NO: 2250198 - RNA, 19 nt, Homo sapiens
  misc_RNA (1)...(19): siRNA sense strand
gggagugcugccuggagua

SEQ ID NO: 2250199 - RNA, 19 nt, Homo sapiens
  misc_RNA (1)...(19): siRNA sense strand
gucuauaccuccuggcaga

SEQ ID NO: 2250200 - RNA, 19 nt, Homo sapiens
  misc_RNA (1)...(19): siRNA sense strand
gcucaggacuguugccuca

SEQ ID NO: 2250201 - RNA, 19 nt, Homo sapiens
  misc_RNA (1)...(19): siRNA sense strand
aaguacagccaaaggaaga

SEQ ID NO: 2250202 - RNA, 19 nt, Homo sapiens
  misc_RNA (1)...(19): siRNA sense strand
ggaaagggcuccaaaggcu

SEQ ID NO: 2250203 - RNA, 19 nt, Homo sapiens
  misc_RNA (1)...(19): siRNA sense strand
gcaagaaaggaaagggcuc

SEQ ID NO: 2250204 - RNA, 19 nt, Homo sapiens
  misc_RNA (1)...(19): siRNA sense strand
agacuggcaagaaaggaaa

SEQ ID NO: 2250205 - RNA, 19 nt, Homo sapiens
  misc_RNA (1)...(19): siRNA sense strand
aagacuggcaagaaaggaa

SEQ ID NO: 2250206 - RNA, 19 nt, Homo sapiens
  misc_RNA (1)...(19): siRNA sense strand
ugaagaaccuggacgccaa

SEQ ID NO: 2250207 - RNA, 19 nt, Homo sapiens
  misc_RNA (1)...(19): siRNA sense strand
aagaagagauggagcgguu

SEQ ID NO: 2250208 - RNA, 19 nt, Homo sapiens
  misc_RNA (1)...(19): siRNA sense strand
cggccaaagaagagaugga

SEQ ID NO: 2250209 - RNA, 19 nt, Homo sapiens
  misc_RNA (1)...(19): siRNA sense strand
ggaauaagaauauagguuc

SEQ ID NO: 2250210 - RNA, 19 nt, Homo sapiens
  misc_RNA (1)...(19): siRNA sense strand
uaucauaccuggaauggga

SEQ ID NO: 2250211 - RNA, 19 nt, Homo sapiens
  misc_RNA (1)...(19): siRNA sense strand
cugcagaggagcuggagaa

SEQ ID NO: 2250212 - RNA, 19 nt, Homo sapiens
  misc_RNA (1)...(19): siRNA sense strand
cguaaaugaagaacggcua

SEQ ID NO: 2250213 - RNA, 19 nt, Homo sapiens
  misc_RNA (1)...(19): siRNA sense strand
gagaaagcgugcaggguuc

SEQ ID NO: 2250214 - RNA, 19 nt, Homo sapiens
  misc_RNA (1)...(19): siRNA sense strand
gcaaagaaggagaaagcgu

SEQ ID NO: 2250215 - RNA, 19 nt, Homo sapiens
  misc_RNA (1)...(19): siRNA sense strand
ucgaggugguggaggccaa

SEQ ID NO: 2250216 - RNA, 19 nt, Homo sapiens
  misc_RNA (1)...(19): siRNA sense strand
gggauuucgacgugugcaa

SEQ ID NO: 2250217 - RNA, 19 nt, Homo sapiens
  misc_RNA (1)...(19): siRNA sense strand
aauuagaagaagaaggcau

SEQ ID NO: 2250218 - RNA, 19 nt, Homo sapiens
  misc_RNA (1)...(19): siRNA sense strand
ggagaaagcgugcaggguu

SEQ ID NO: 2250219 - RNA, 19 nt, Homo sapiens
  misc_RNA (1)...(19): siRNA sense strand
aaacaauauaccagcaaca

SEQ ID NO: 2250220 - RNA, 19 nt, Homo sapiens
  misc_RNA (1)...(19): siRNA sense strand
ccagacugcugaagaagau

SEQ ID NO: 2250221 - RNA, 19 nt, Homo sapiens
  misc_RNA (1)...(19): siRNA sense strand
acaaagagauuauuccaga

SEQ ID NO: 2250222 - RNA, 19 nt, Homo sapiens
  misc_RNA (1)...(19): siRNA sense strand
ggauguagaugcacccaga

SEQ ID NO: 2250223 - RNA, 19 nt, Homo sapiens
  misc_RNA (1)...(19): siRNA sense strand
ugaagaagauugcaggagu

SEQ ID NO: 2250224 - RNA, 19 nt, Homo sapiens
  misc_RNA (1)...(19): siRNA sense strand
uugaaaguacaguggaaaa

SEQ ID NO: 2250225 - RNA, 19 nt, Homo sapiens
  misc_RNA (1)...(19): siRNA sense strand
cugcaaagaaggagaaagc

SEQ ID NO: 2250226 - RNA, 19 nt, Homo sapiens
  misc_RNA (1)...(19): siRNA sense strand
cacccagacugcugaagaa

SEQ ID NO: 2250227 - RNA, 19 nt, Homo sapiens
  misc_RNA (1)...(19): siRNA sense strand
ucgccaauuagaagaagaa

SEQ ID NO: 2250228 - RNA, 19 nt, Homo sapiens
  misc_RNA (1)...(19): siRNA sense strand
cggcuaaggcgaugcgaag

SEQ ID NO: 2250229 - RNA, 19 nt, Homo sapiens
  misc_RNA (1)...(19): siRNA sense strand
acgacaaacuagaugccga

SEQ ID NO: 2250230 - RNA, 19 nt, Homo sapiens
  misc_RNA (1)...(19): siRNA sense strand
acaucgacaaagagauuau

SEQ ID NO: 2250231 - RNA, 19 nt, Homo sapiens
  misc_RNA (1)...(19): siRNA sense strand
gauugcaggaguugauuau

SEQ ID NO: 2250232 - RNA, 19 nt, Homo sapiens
  misc_RNA (1)...(19): siRNA sense strand
aggagacccacaagggcaa

SEQ ID NO: 2250233 - RNA, 19 nt, Homo sapiens
  misc_RNA (1)...(19): siRNA sense strand
cagucuuugacguggagaa

SEQ ID NO: 2250234 - RNA, 19 nt, Homo sapiens
  misc_RNA (1)...(19): siRNA sense strand
agucuuugacguggagaaa

SEQ ID NO: 2250235 - RNA, 19 nt, Homo sapiens
  misc_RNA (1)...(19): siRNA sense strand
gaagaacggcuaaggcgau

SEQ ID NO: 2250236 - RNA, 19 nt, Homo sapiens
  misc_RNA (1)...(19): siRNA sense strand
ugaaagcgcugcugcggau

SEQ ID NO: 2250237 - RNA, 19 nt, Homo sapiens
  misc_RNA (1)...(19): siRNA sense strand
ucggaggauuucagagguu

SEQ ID NO: 2250238 - RNA, 19 nt, Homo sapiens
  misc_RNA (1)...(19): siRNA sense strand
ucuacauccugcaguggaa

SEQ ID NO: 2250239 - RNA, 19 nt, Homo sapiens
  misc_RNA (1)...(19): siRNA sense strand
aaggcgaugcgaagagaau

SEQ ID NO: 2250240 - RNA, 19 nt, Homo sapiens
  misc_RNA (1)...(19): siRNA sense strand
ucgugggacaccagagaaa

SEQ ID NO: 2250241 - RNA, 19 nt, Homo sapiens
  misc_RNA (1)...(19): siRNA sense strand
cagaaugaaggcugggaca

SEQ ID NO: 2250242 - RNA, 19 nt, Homo sapiens
  misc_RNA (1)...(19): siRNA sense strand
cagaagaaauuuuaggcaa

SEQ ID NO: 2250243 - RNA, 19 nt, Homo sapiens
  misc_RNA (1)...(19): siRNA sense strand
ugauguuauuccagaagaa

SEQ ID NO: 2250244 - RNA, 19 nt, Homo sapiens
  misc_RNA (1)...(19): siRNA sense strand
uugaaagaccuuggagaaa

SEQ ID NO: 2250245 - RNA, 19 nt, Homo sapiens
  misc_RNA (1)...(19): siRNA sense strand
cugaguaauucugaggaaa

SEQ ID NO: 2250246 - RNA, 19 nt, Homo sapiens
  misc_RNA (1)...(19): siRNA sense strand
ccuuucaaaucuacagcaa

SEQ ID NO: 2250247 - RNA, 19 nt, Homo sapiens
  misc_RNA (1)...(19): siRNA sense strand
uggagaaauuggacgagga

SEQ ID NO: 2250248 - RNA, 19 nt, Homo sapiens
  misc_RNA (1)...(19): siRNA sense strand
guuaaaagaauucggucaa

SEQ ID NO: 2250249 - RNA, 19 nt, Homo sapiens
  misc_RNA (1)...(19): siRNA sense strand
cacuuuagcaacugugaaa

SEQ ID NO: 2250250 - RNA, 19 nt, Homo sapiens
  misc_RNA (1)...(19): siRNA sense strand
agaauagacccaagcgcau

SEQ ID NO: 2250251 - RNA, 19 nt, Homo sapiens
  misc_RNA (1)...(19): siRNA sense strand
agaaauuggacgaggagcu

SEQ ID NO: 2250252 - RNA, 19 nt, Homo sapiens
  misc_RNA (1)...(19): siRNA sense strand
caugcaggguaaacgcaaa

SEQ ID NO: 2250253 - RNA, 19 nt, Homo sapiens
  misc_RNA (1)...(19): siRNA sense strand
ccugaacaacacugggauu

SEQ ID NO: 2250254 - RNA, 19 nt, Homo sapiens
  misc_RNA (1)...(19): siRNA sense strand
augucuaccucguuugaua

SEQ ID NO: 2250255 - RNA, 19 nt, Homo sapiens
  misc_RNA (1)...(19): siRNA sense strand
caacaaaaugguccacaaa

SEQ ID NO: 2250256 - RNA, 19 nt, Homo sapiens
  misc_RNA (1)...(19): siRNA sense strand
acuaacacaagucgugaaa

SEQ ID NO: 2250257 - RNA, 19 nt, Homo sapiens
  misc_RNA (1)...(19): siRNA sense strand
gacaagagaugcuggcugu

SEQ ID NO: 2250258 - RNA, 19 nt, Homo sapiens
  misc_RNA (1)...(19): siRNA sense strand
cacaagucgugaaaggaga

SEQ ID NO: 2250259 - RNA, 19 nt, Homo sapiens
  misc_RNA (1)...(19): siRNA sense strand
ggcaaaaucacuuuagcaa

SEQ ID NO: 2250260 - RNA, 19 nt, Homo sapiens
  misc_RNA (1)...(19): siRNA sense strand
uccaaaaggccaaaguaua

SEQ ID NO: 2250261 - RNA, 19 nt, Homo sapiens
  misc_RNA (1)...(19): siRNA sense strand
acauagagagacugagaac

SEQ ID NO: 2250262 - RNA, 19 nt, Homo sapiens
  misc_RNA (1)...(19): siRNA sense strand
ggguaaacgcaaagcacug

SEQ ID NO: 2250263 - RNA, 19 nt, Homo sapiens
  misc_RNA (1)...(19): siRNA sense strand
agaugauguuauuccagaa

SEQ ID NO: 2250264 - RNA, 19 nt, Homo sapiens
  misc_RNA (1)...(19): siRNA sense strand
cauugagucaucaggaaaa

SEQ ID NO: 2250265 - RNA, 19 nt, Homo sapiens
  misc_RNA (1)...(19): siRNA sense strand
ccuuggagaaauuggacga

SEQ ID NO: 2250266 - RNA, 19 nt, Homo sapiens
  misc_RNA (1)...(19): siRNA sense strand
gaagagaacaaacccgaaa

SEQ ID NO: 2250267 - RNA, 19 nt, Homo sapiens
  misc_RNA (1)...(19): siRNA sense strand
guucaggacaagaagaaaa

SEQ ID NO: 2250268 - RNA, 19 nt, Homo sapiens
  misc_RNA (1)...(19): siRNA sense strand
cuauguuauucaugccaaa

SEQ ID NO: 2250269 - RNA, 19 nt, Homo sapiens
  misc_RNA (1)...(19): siRNA sense strand
agacaugaugguacaggaa

SEQ ID NO: 2250270 - RNA, 19 nt, Homo sapiens
  misc_RNA (1)...(19): siRNA sense strand
cugcaggaacagcggagaa

SEQ ID NO: 2250271 - RNA, 19 nt, Homo sapiens
  misc_RNA (1)...(19): siRNA sense strand
caguucaggacaagaagaa

SEQ ID NO: 2250272 - RNA, 19 nt, Homo sapiens
  misc_RNA (1)...(19): siRNA sense strand
gggaagagaggcugcagga

SEQ ID NO: 2250273 - RNA, 19 nt, Homo sapiens
  misc_RNA (1)...(19): siRNA sense strand
acgaggagcugguggacgu

SEQ ID NO: 2250274 - RNA, 19 nt, Homo sapiens
  misc_RNA (1)...(19): siRNA sense strand
gaacaaacccgaaaagagu

SEQ ID NO: 2250275 - RNA, 19 nt, Homo sapiens
  misc_RNA (1)...(19): siRNA sense strand
ggauagacaucacaccaga

SEQ ID NO: 2250276 - RNA, 19 nt, Homo sapiens
  misc_RNA (1)...(19): siRNA sense strand
gaagagaggcugcaggaac

SEQ ID NO: 2250277 - RNA, 19 nt, Homo sapiens
  misc_RNA (1)...(19): siRNA sense strand
gaucggugcaaguguaaaa

SEQ ID NO: 2250278 - RNA, 19 nt, Homo sapiens
  misc_RNA (1)...(19): siRNA sense strand
agagaucagcuuaguaaaa

SEQ ID NO: 2250279 - RNA, 19 nt, Homo sapiens
  misc_RNA (1)...(19): siRNA sense strand
aggagugcccagaagagaa

SEQ ID NO: 2250280 - RNA, 19 nt, Homo sapiens
  misc_RNA (1)...(19): siRNA sense strand
acaugaugguacaggaaag

SEQ ID NO: 2250281 - RNA, 19 nt, Homo sapiens
  misc_RNA (1)...(19): siRNA sense strand
agucccaagaagaacauua

SEQ ID NO: 2250282 - RNA, 19 nt, Homo sapiens
  misc_RNA (1)...(19): siRNA sense strand
gacaagaagaauaaggaga

SEQ ID NO: 2250283 - RNA, 19 nt, Homo sapiens
  misc_RNA (1)...(19): siRNA sense strand
aagaauaaggagaugaagu

SEQ ID NO: 2250284 - RNA, 19 nt, Homo sapiens
  misc_RNA (1)...(19): siRNA sense strand
gccgcaaaguggauggaca

SEQ ID NO: 2250285 - RNA, 19 nt, Homo sapiens
  misc_RNA (1)...(19): siRNA sense strand
cgcugggacaagaagaaua

SEQ ID NO: 2250286 - RNA, 19 nt, Homo sapiens
  misc_RNA (1)...(19): siRNA sense strand
uuucaaaaucgaagagcua

SEQ ID NO: 2250287 - RNA, 19 nt, Homo sapiens
  misc_RNA (1)...(19): siRNA sense strand
ucaaugagcuggagaggcu

SEQ ID NO: 2250288 - RNA, 19 nt, Homo sapiens
  misc_RNA (1)...(19): siRNA sense strand
ucaaaaucgaagagcuaaa

SEQ ID NO: 2250289 - RNA, 19 nt, Homo sapiens
  misc_RNA (1)...(19): siRNA sense strand
aggcgaagucggaccaauu

SEQ ID NO: 2250290 - RNA, 19 nt, Homo sapiens
  misc_RNA (1)...(19): siRNA sense strand
aggacgaaggccagaccaa

SEQ ID NO: 2250291 - RNA, 19 nt, Homo sapiens
  misc_RNA (1)...(19): siRNA sense strand
ccgccaagaccaccagcaa

SEQ ID NO: 2250292 - RNA, 19 nt, Homo sapiens
  misc_RNA (1)...(19): siRNA sense strand
ccaauuucacccuggaaca

SEQ ID NO: 2250293 - RNA, 19 nt, Homo sapiens
  misc_RNA (1)...(19): siRNA sense strand
cgaaagggauggaggacga

SEQ ID NO: 2250294 - RNA, 19 nt, Homo sapiens
  misc_RNA (1)...(19): siRNA sense strand
ggauggaggacgaaggcca

SEQ ID NO: 2250295 - RNA, 19 nt, Homo sapiens
  misc_RNA (1)...(19): siRNA sense strand
uuucaaaaucgaagagcua

SEQ ID NO: 2250296 - RNA, 19 nt, Homo sapiens
  misc_RNA (1)...(19): siRNA sense strand
ucaaugagcuggagaggcu

SEQ ID NO: 2250297 - RNA, 19 nt, Homo sapiens
  misc_RNA (1)...(19): siRNA sense strand
ucaaaaucgaagagcuaaa

SEQ ID NO: 2250298 - RNA, 19 nt, Homo sapiens
  misc_RNA (1)...(19): siRNA sense strand
aggcgaagucggaccaauu

SEQ ID NO: 2250299 - RNA, 19 nt, Homo sapiens
  misc_RNA (1)...(19): siRNA sense strand
aggacgaaggccagaccaa

SEQ ID NO: 2250300 - RNA, 19 nt, Homo sapiens
  misc_RNA (1)...(19): siRNA sense strand
ccgccaagaccaccagcaa

SEQ ID NO: 2250301 - RNA, 19 nt, Homo sapiens
  misc_RNA (1)...(19): siRNA sense strand
ccaauuucacccuggaaca

SEQ ID NO: 2250302 - RNA, 19 nt, Homo sapiens
  misc_RNA (1)...(19): siRNA sense strand
gggccuugcaggugacaau

SEQ ID NO: 2250303 - RNA, 19 nt, Homo sapiens
  misc_RNA (1)...(19): siRNA sense strand
cauaaaugcugcagcugga

SEQ ID NO: 2250304 - RNA, 19 nt, Homo sapiens
  misc_RNA (1)...(19): siRNA sense strand
ggcaagaaauugaacccuu

SEQ ID NO: 2250305 - RNA, 19 nt, Homo sapiens
  misc_RNA (1)...(19): siRNA sense strand
ggcugaucucccagaauaa

SEQ ID NO: 2250306 - RNA, 19 nt, Homo sapiens
  misc_RNA (1)...(19): siRNA sense strand
ccucauaaaugcugcagcu

SEQ ID NO: 2250307 - RNA, 19 nt, Homo sapiens
  misc_RNA (1)...(19): siRNA sense strand
ccaucgucaccgaguuuaa

SEQ ID NO: 2250308 - RNA, 19 nt, Homo sapiens
  misc_RNA (1)...(19): siRNA sense strand
gcacaugggccuugcaggu

SEQ ID NO: 2250309 - RNA, 19 nt, Homo sapiens
  misc_RNA (1)...(19): siRNA sense strand
uggucaaugcugagcugua

SEQ ID NO: 2250310 - RNA, 19 nt, Homo sapiens
  misc_RNA (1)...(19): siRNA sense strand
uagacauuccauugaacua

SEQ ID NO: 2250311 - RNA, 19 nt, Homo sapiens
  misc_RNA (1)...(19): siRNA sense strand
uugaagaggaaacuggcaa

SEQ ID NO: 2250312 - RNA, 19 nt, Homo sapiens
  misc_RNA (1)...(19): siRNA sense strand
acaauaucuaccuggauuu

SEQ ID NO: 2250313 - RNA, 19 nt, Homo sapiens
  misc_RNA (1)...(19): siRNA sense strand
ggaagaauggggaucacaa

SEQ ID NO: 2250314 - RNA, 19 nt, Homo sapiens
  misc_RNA (1)...(19): siRNA sense strand
cauccugauuacagaauuu

SEQ ID NO: 2250315 - RNA, 19 nt, Homo sapiens
  misc_RNA (1)...(19): siRNA sense strand
gggccuugcaggugacaau

SEQ ID NO: 2250316 - RNA, 19 nt, Homo sapiens
  misc_RNA (1)...(19): siRNA sense strand
cauaaaugcugcagcugga

SEQ ID NO: 2250317 - RNA, 19 nt, Homo sapiens
  misc_RNA (1)...(19): siRNA sense strand
ggcaagaaauugaacccuu

SEQ ID NO: 2250318 - RNA, 19 nt, Homo sapiens
  misc_RNA (1)...(19): siRNA sense strand
ggcugaucucccagaauaa

SEQ ID NO: 2250319 - RNA, 19 nt, Homo sapiens
  misc_RNA (1)...(19): siRNA sense strand
ccucauaaaugcugcagcu

SEQ ID NO: 2250320 - RNA, 19 nt, Homo sapiens
  misc_RNA (1)...(19): siRNA sense strand
ccaucgucaccgaguuuaa

SEQ ID NO: 2250321 - RNA, 19 nt, Homo sapiens
  misc_RNA (1)...(19): siRNA sense strand
gcacaugggccuugcaggu

SEQ ID NO: 2250322 - RNA, 19 nt, Homo sapiens
  misc_RNA (1)...(19): siRNA sense strand
uugaagaggaaacuggcaa

SEQ ID NO: 2250323 - RNA, 19 nt, Homo sapiens
  misc_RNA (1)...(19): siRNA sense strand
acaauaucuaccuggauuu

SEQ ID NO: 2250324 - RNA, 19 nt, Homo sapiens
  misc_RNA (1)...(19): siRNA sense strand
gagucaaaggaaugaaaca

SEQ ID NO: 2250325 - RNA, 19 nt, Homo sapiens
  misc_RNA (1)...(19): siRNA sense strand
uggaauauccggaugguca

SEQ ID NO: 2250326 - RNA, 19 nt, Homo sapiens
  misc_RNA (1)...(19): siRNA sense strand
ugaccauaucagugggcua

SEQ ID NO: 2250327 - RNA, 19 nt, Homo sapiens
  misc_RNA (1)...(19): siRNA sense strand
ccagaugcuaagagucaaa

SEQ ID NO: 2250328 - RNA, 19 nt, Homo sapiens
  misc_RNA (1)...(19): siRNA sense strand
uugaagaggcagaggugau

SEQ ID NO: 2250329 - RNA, 19 nt, Homo sapiens
  misc_RNA (1)...(19): siRNA sense strand
aaggaaugaaacacagaaa

SEQ ID NO: 2250330 - RNA, 19 nt, Homo sapiens
  misc_RNA (1)...(19): siRNA sense strand
ccauugugaccgaguggaa

SEQ ID NO: 2250331 - RNA, 19 nt, Homo sapiens
  misc_RNA (1)...(19): siRNA sense strand
gggacgauuugaagaggca

SEQ ID NO: 2250332 - RNA, 19 nt, Homo sapiens
  misc_RNA (1)...(19): siRNA sense strand
ugcuaagagucaaaggaau

SEQ ID NO: 2250333 - RNA, 19 nt, Homo sapiens
  misc_RNA (1)...(19): siRNA sense strand
gaaacaugggugugggagu

SEQ ID NO: 2250334 - RNA, 19 nt, Homo sapiens
  misc_RNA (1)...(19): siRNA sense strand
agucacacaaggauguuaa

SEQ ID NO: 2250335 - RNA, 19 nt, Homo sapiens
  misc_RNA (1)...(19): siRNA sense strand
augcuaagagucaaaggaa

SEQ ID NO: 2250336 - RNA, 19 nt, Homo sapiens
  misc_RNA (1)...(19): siRNA sense strand
cagaggugaucauccgcaa

SEQ ID NO: 2250337 - RNA, 19 nt, Homo sapiens
  misc_RNA (1)...(19): siRNA sense strand
gagugaguuacaagaccua

SEQ ID NO: 2250338 - RNA, 19 nt, Homo sapiens
  misc_RNA (1)...(19): siRNA sense strand
acaagaaaccugagugcca

SEQ ID NO: 2250339 - RNA, 19 nt, Homo sapiens
  misc_RNA (1)...(19): siRNA sense strand
ccagggaagaagagauguu

SEQ ID NO: 2250340 - RNA, 19 nt, Homo sapiens
  misc_RNA (1)...(19): siRNA sense strand
gugccuuagauacaagaaa

SEQ ID NO: 2250341 - RNA, 19 nt, Homo sapiens
  misc_RNA (1)...(19): siRNA sense strand
cccagugacuuauggccaa

SEQ ID NO: 2250342 - RNA, 19 nt, Homo sapiens
  misc_RNA (1)...(19): siRNA sense strand
cuguggaaggcucuggaaa

SEQ ID NO: 2250343 - RNA, 19 nt, Homo sapiens
  misc_RNA (1)...(19): siRNA sense strand
agauggauggccagugcaa

SEQ ID NO: 2250344 - RNA, 19 nt, Homo sapiens
  misc_RNA (1)...(19): siRNA sense strand
ggaaaguccuucaaagcug

SEQ ID NO: 2250345 - RNA, 19 nt, Homo sapiens
  misc_RNA (1)...(19): siRNA sense strand
uagaaagagcugagauaaa

SEQ ID NO: 2250346 - RNA, 19 nt, Homo sapiens
  misc_RNA (1)...(19): siRNA sense strand
cggagaagggcgagaagaa

SEQ ID NO: 2250347 - RNA, 19 nt, Homo sapiens
  misc_RNA (1)...(19): siRNA sense strand
augaagaaagagaggauaa

SEQ ID NO: 2250348 - RNA, 19 nt, Homo sapiens
  misc_RNA (1)...(19): siRNA sense strand
uguagaaagagcugagaua

SEQ ID NO: 2250349 - RNA, 19 nt, Homo sapiens
  misc_RNA (1)...(19): siRNA sense strand
gcgagaagaagaaggagaa

SEQ ID NO: 2250350 - RNA, 19 nt, Homo sapiens
  misc_RNA (1)...(19): siRNA sense strand
gggucaaagggaagcaaua

SEQ ID NO: 2250351 - RNA, 19 nt, Homo sapiens
  misc_RNA (1)...(19): siRNA sense strand
uauacaaauuugagggaga

SEQ ID NO: 2250352 - RNA, 19 nt, Homo sapiens
  misc_RNA (1)...(19): siRNA sense strand
uggauaaacuauuggccaa

SEQ ID NO: 2250353 - RNA, 19 nt, Homo sapiens
  misc_RNA (1)...(19): siRNA sense strand
cagaagagacugaagaaaa

SEQ ID NO: 2250354 - RNA, 19 nt, Homo sapiens
  misc_RNA (1)...(19): siRNA sense strand
acucaaacuugcugcuaaa

SEQ ID NO: 2250355 - RNA, 19 nt, Homo sapiens
  misc_RNA (1)...(19): siRNA sense strand
gcaugaagaaagagaggau

SEQ ID NO: 2250356 - RNA, 19 nt, Homo sapiens
  misc_RNA (1)...(19): siRNA sense strand
ccgaauaaagaaagaugaa

SEQ ID NO: 2250357 - RNA, 19 nt, Homo sapiens
  misc_RNA (1)...(19): siRNA sense strand
cucgagagguagagggcaa

SEQ ID NO: 2250358 - RNA, 19 nt, Homo sapiens
  misc_RNA (1)...(19): siRNA sense strand
ccauaggcgcacagagcaa

SEQ ID NO: 2250359 - RNA, 19 nt, Homo sapiens
  misc_RNA (1)...(19): siRNA sense strand
aaaugguaguucuggauaa

SEQ ID NO: 2250360 - RNA, 19 nt, Homo sapiens
  misc_RNA (1)...(19): siRNA sense strand
gggcuuugauagagaaaau

SEQ ID NO: 2250361 - RNA, 19 nt, Homo sapiens
  misc_RNA (1)...(19): siRNA sense strand
gcgcacagagcaagaagaa

SEQ ID NO: 2250362 - RNA, 19 nt, Homo sapiens
  misc_RNA (1)...(19): siRNA sense strand
agacugaagaaaaggaaaa

SEQ ID NO: 2250363 - RNA, 19 nt, Homo sapiens
  misc_RNA (1)...(19): siRNA sense strand
gaaaagaagaaacgggcaa

SEQ ID NO: 2250364 - RNA, 19 nt, Homo sapiens
  misc_RNA (1)...(19): siRNA sense strand
ccagcaaaggaaagaacua

SEQ ID NO: 2250365 - RNA, 19 nt, Homo sapiens
  misc_RNA (1)...(19): siRNA sense strand
agaacuauacugaggaaga

SEQ ID NO: 2250366 - RNA, 19 nt, Homo sapiens
  misc_RNA (1)...(19): siRNA sense strand
aggaaauggacccagaaua

SEQ ID NO: 2250367 - RNA, 19 nt, Homo sapiens
  misc_RNA (1)...(19): siRNA sense strand
gcuccuaauaguagcaaau

SEQ ID NO: 2250368 - RNA, 19 nt, Homo sapiens
  misc_RNA (1)...(19): siRNA sense strand
aggaagacucauugaccaa

SEQ ID NO: 2250369 - RNA, 19 nt, Homo sapiens
  misc_RNA (1)...(19): siRNA sense strand
aguaagaugcaacgagaau

SEQ ID NO: 2250370 - RNA, 19 nt, Homo sapiens
  misc_RNA (1)...(19): siRNA sense strand
uggccaaacucaaagaaca

SEQ ID NO: 2250371 - RNA, 19 nt, Homo sapiens
  misc_RNA (1)...(19): siRNA sense strand
auuacaggacauugagaaa

SEQ ID NO: 2250372 - RNA, 19 nt, Homo sapiens
  misc_RNA (1)...(19): siRNA sense strand
ggauaaacuauuggccaaa

SEQ ID NO: 2250373 - RNA, 19 nt, Homo sapiens
  misc_RNA (1)...(19): siRNA sense strand
cuuuauuaucggaagacaa

SEQ ID NO: 2250374 - RNA, 19 nt, Homo sapiens
  misc_RNA (1)...(19): siRNA sense strand
cugaggaagaagauagauu

SEQ ID NO: 2250375 - RNA, 19 nt, Homo sapiens
  misc_RNA (1)...(19): siRNA sense strand
uggaaauugaggaaagaga

SEQ ID NO: 2250376 - RNA, 19 nt, Homo sapiens
  misc_RNA (1)...(19): siRNA sense strand
cgagaagaagaaggagaaa

SEQ ID NO: 2250377 - RNA, 19 nt, Homo sapiens
  misc_RNA (1)...(19): siRNA sense strand
ggcgagaagaagaaggaga

SEQ ID NO: 2250378 - RNA, 19 nt, Homo sapiens
  misc_RNA (1)...(19): siRNA sense strand
ugucagcaacagugguaaa

SEQ ID NO: 2250379 - RNA, 19 nt, Homo sapiens
  misc_RNA (1)...(19): siRNA sense strand
ugaagaaagagaggauaaa

SEQ ID NO: 2250380 - RNA, 19 nt, Homo sapiens
  misc_RNA (1)...(19): siRNA sense strand
ggcuggaggucucggaauu

SEQ ID NO: 2250381 - RNA, 19 nt, Homo sapiens
  misc_RNA (1)...(19): siRNA sense strand
agucuaacaagcuggcaaa

SEQ ID NO: 2250382 - RNA, 19 nt, Homo sapiens
  misc_RNA (1)...(19): siRNA sense strand
aauuugagggagaagauua

SEQ ID NO: 2250383 - RNA, 19 nt, Homo sapiens
  misc_RNA (1)...(19): siRNA sense strand
agggagaagauuauagaga

SEQ ID NO: 2250384 - RNA, 19 nt, Homo sapiens
  misc_RNA (1)...(19): siRNA sense strand
ccuaauaguagcaaauuca

SEQ ID NO: 2250385 - RNA, 19 nt, Homo sapiens
  misc_RNA (1)...(19): siRNA sense strand
uauuugagcuccuggaaaa

SEQ ID NO: 2250386 - RNA, 19 nt, Homo sapiens
  misc_RNA (1)...(19): siRNA sense strand
gagcauauugucagcaaca

SEQ ID NO: 2250387 - RNA, 19 nt, Homo sapiens
  misc_RNA (1)...(19): siRNA sense strand
ccagaagagacugaagaaa

SEQ ID NO: 2250388 - RNA, 19 nt, Homo sapiens
  misc_RNA (1)...(19): siRNA sense strand
gcuaaugagaaauauggaa

SEQ ID NO: 2250389 - RNA, 19 nt, Homo sapiens
  misc_RNA (1)...(19): siRNA sense strand
aauugaacguggagaagca

SEQ ID NO: 2250390 - RNA, 19 nt, Homo sapiens
  misc_RNA (1)...(19): siRNA sense strand
gaguaagaugcaacgagaa

SEQ ID NO: 2250391 - RNA, 19 nt, Homo sapiens
  misc_RNA (1)...(19): siRNA sense strand
gagaagaagaaggagaaaa

SEQ ID NO: 2250392 - RNA, 19 nt, Homo sapiens
  misc_RNA (1)...(19): siRNA sense strand
acuaaaacuccaaugguaa

SEQ ID NO: 2250393 - RNA, 19 nt, Homo sapiens
  misc_RNA (1)...(19): siRNA sense strand
agagcaagaagaagaugaa

SEQ ID NO: 2250394 - RNA, 19 nt, Homo sapiens
  misc_RNA (1)...(19): siRNA sense strand
agagauuguucgugaguuc

SEQ ID NO: 2250395 - RNA, 19 nt, Homo sapiens
  misc_RNA (1)...(19): siRNA sense strand
agcaagaagaagaugaaga

SEQ ID NO: 2250396 - RNA, 19 nt, Homo sapiens
  misc_RNA (1)...(19): siRNA sense strand
auacaaauuugagggagaa

SEQ ID NO: 2250397 - RNA, 19 nt, Homo sapiens
  misc_RNA (1)...(19): siRNA sense strand
gagaaauauggaagagaug

SEQ ID NO: 2250398 - RNA, 19 nt, Homo sapiens
  misc_RNA (1)...(19): siRNA sense strand
aauugaggaaagagagaga

SEQ ID NO: 2250399 - RNA, 19 nt, Homo sapiens
  misc_RNA (1)...(19): siRNA sense strand
aaguggaauuucuggguca

SEQ ID NO: 2250400 - RNA, 19 nt, Homo sapiens
  misc_RNA (1)...(19): siRNA sense strand
ucguauuggucagaagaaa

SEQ ID NO: 2250401 - RNA, 19 nt, Homo sapiens
  misc_RNA (1)...(19): siRNA sense strand
caaauuugagggagaagau

SEQ ID NO: 2250402 - RNA, 19 nt, Homo sapiens
  misc_RNA (1)...(19): siRNA sense strand
uagaaagagcugagauaaa

SEQ ID NO: 2250403 - RNA, 19 nt, Homo sapiens
  misc_RNA (1)...(19): siRNA sense strand
cggagaagggcgagaagaa

SEQ ID NO: 2250404 - RNA, 19 nt, Homo sapiens
  misc_RNA (1)...(19): siRNA sense strand
augaagaaagagaggauaa

SEQ ID NO: 2250405 - RNA, 19 nt, Homo sapiens
  misc_RNA (1)...(19): siRNA sense strand
uguagaaagagcugagaua

SEQ ID NO: 2250406 - RNA, 19 nt, Homo sapiens
  misc_RNA (1)...(19): siRNA sense strand
gcgagaagaagaaggagaa

SEQ ID NO: 2250407 - RNA, 19 nt, Homo sapiens
  misc_RNA (1)...(19): siRNA sense strand
gggucaaagggaagcaaua

SEQ ID NO: 2250408 - RNA, 19 nt, Homo sapiens
  misc_RNA (1)...(19): siRNA sense strand
uauacaaauuugagggaga

SEQ ID NO: 2250409 - RNA, 19 nt, Homo sapiens
  misc_RNA (1)...(19): siRNA sense strand
uggauaaacuauuggccaa

SEQ ID NO: 2250410 - RNA, 19 nt, Homo sapiens
  misc_RNA (1)...(19): siRNA sense strand
cagaagagacugaagaaaa

SEQ ID NO: 2250411 - RNA, 19 nt, Homo sapiens
  misc_RNA (1)...(19): siRNA sense strand
acucaaacuugcugcuaaa

SEQ ID NO: 2250412 - RNA, 19 nt, Homo sapiens
  misc_RNA (1)...(19): siRNA sense strand
gcaugaagaaagagaggau

SEQ ID NO: 2250413 - RNA, 19 nt, Homo sapiens
  misc_RNA (1)...(19): siRNA sense strand
ccgaauaaagaaagaugaa

SEQ ID NO: 2250414 - RNA, 19 nt, Homo sapiens
  misc_RNA (1)...(19): siRNA sense strand
cucgagagguagagggcaa

SEQ ID NO: 2250415 - RNA, 19 nt, Homo sapiens
  misc_RNA (1)...(19): siRNA sense strand
ccauaggcgcacagagcaa

SEQ ID NO: 2250416 - RNA, 19 nt, Homo sapiens
  misc_RNA (1)...(19): siRNA sense strand
aaaugguaguucuggauaa

SEQ ID NO: 2250417 - RNA, 19 nt, Homo sapiens
  misc_RNA (1)...(19): siRNA sense strand
gggcuuugauagagaaaau

SEQ ID NO: 2250418 - RNA, 19 nt, Homo sapiens
  misc_RNA (1)...(19): siRNA sense strand
gcgcacagagcaagaagaa

SEQ ID NO: 2250419 - RNA, 19 nt, Homo sapiens
  misc_RNA (1)...(19): siRNA sense strand
agacugaagaaaaggaaaa

SEQ ID NO: 2250420 - RNA, 19 nt, Homo sapiens
  misc_RNA (1)...(19): siRNA sense strand
gaaaagaagaaacgggcaa

SEQ ID NO: 2250421 - RNA, 19 nt, Homo sapiens
  misc_RNA (1)...(19): siRNA sense strand
ccagcaaaggaaagaacua

SEQ ID NO: 2250422 - RNA, 19 nt, Homo sapiens
  misc_RNA (1)...(19): siRNA sense strand
agaacuauacugaggaaga

SEQ ID NO: 2250423 - RNA, 19 nt, Homo sapiens
  misc_RNA (1)...(19): siRNA sense strand
aggaaauggacccagaaua

SEQ ID NO: 2250424 - RNA, 19 nt, Homo sapiens
  misc_RNA (1)...(19): siRNA sense strand
gcuccuaauaguagcaaau

SEQ ID NO: 2250425 - RNA, 19 nt, Homo sapiens
  misc_RNA (1)...(19): siRNA sense strand
aggaagacucauugaccaa

SEQ ID NO: 2250426 - RNA, 19 nt, Homo sapiens
  misc_RNA (1)...(19): siRNA sense strand
aguaagaugcaacgagaau

SEQ ID NO: 2250427 - RNA, 19 nt, Homo sapiens
  misc_RNA (1)...(19): siRNA sense strand
uggccaaacucaaagaaca

SEQ ID NO: 2250428 - RNA, 19 nt, Homo sapiens
  misc_RNA (1)...(19): siRNA sense strand
auuacaggacauugagaaa

SEQ ID NO: 2250429 - RNA, 19 nt, Homo sapiens
  misc_RNA (1)...(19): siRNA sense strand
ggauaaacuauuggccaaa

SEQ ID NO: 2250430 - RNA, 19 nt, Homo sapiens
  misc_RNA (1)...(19): siRNA sense strand
cuuuauuaucggaagacaa

SEQ ID NO: 2250431 - RNA, 19 nt, Homo sapiens
  misc_RNA (1)...(19): siRNA sense strand
cugaggaagaagauagauu

SEQ ID NO: 2250432 - RNA, 19 nt, Homo sapiens
  misc_RNA (1)...(19): siRNA sense strand
uggaaauugaggaaagaga

SEQ ID NO: 2250433 - RNA, 19 nt, Homo sapiens
  misc_RNA (1)...(19): siRNA sense strand
cgagaagaagaaggagaaa

SEQ ID NO: 2250434 - RNA, 19 nt, Homo sapiens
  misc_RNA (1)...(19): siRNA sense strand
ggcgagaagaagaaggaga

SEQ ID NO: 2250435 - RNA, 19 nt, Homo sapiens
  misc_RNA (1)...(19): siRNA sense strand
ugucagcaacagugguaaa

SEQ ID NO: 2250436 - RNA, 19 nt, Homo sapiens
  misc_RNA (1)...(19): siRNA sense strand
ugaagaaagagaggauaaa

SEQ ID NO: 2250437 - RNA, 19 nt, Homo sapiens
  misc_RNA (1)...(19): siRNA sense strand
ggcuggaggucucggaauu

SEQ ID NO: 2250438 - RNA, 19 nt, Homo sapiens
  misc_RNA (1)...(19): siRNA sense strand
agucuaacaagcuggcaaa

SEQ ID NO: 2250439 - RNA, 19 nt, Homo sapiens
  misc_RNA (1)...(19): siRNA sense strand
aauuugagggagaagauua

SEQ ID NO: 2250440 - RNA, 19 nt, Homo sapiens
  misc_RNA (1)...(19): siRNA sense strand
agggagaagauuauagaga

SEQ ID NO: 2250441 - RNA, 19 nt, Homo sapiens
  misc_RNA (1)...(19): siRNA sense strand
ccuaauaguagcaaauuca

SEQ ID NO: 2250442 - RNA, 19 nt, Homo sapiens
  misc_RNA (1)...(19): siRNA sense strand
uauuugagcuccuggaaaa

SEQ ID NO: 2250443 - RNA, 19 nt, Homo sapiens
  misc_RNA (1)...(19): siRNA sense strand
gagcauauugucagcaaca

SEQ ID NO: 2250444 - RNA, 19 nt, Homo sapiens
  misc_RNA (1)...(19): siRNA sense strand
ccagaagagacugaagaaa

SEQ ID NO: 2250445 - RNA, 19 nt, Homo sapiens
  misc_RNA (1)...(19): siRNA sense strand
gcuaaugagaaauauggaa

SEQ ID NO: 2250446 - RNA, 19 nt, Homo sapiens
  misc_RNA (1)...(19): siRNA sense strand
aauugaacguggagaagca

SEQ ID NO: 2250447 - RNA, 19 nt, Homo sapiens
  misc_RNA (1)...(19): siRNA sense strand
gaguaagaugcaacgagaa

SEQ ID NO: 2250448 - RNA, 19 nt, Homo sapiens
  misc_RNA (1)...(19): siRNA sense strand
gagaagaagaaggagaaaa

SEQ ID NO: 2250449 - RNA, 19 nt, Homo sapiens
  misc_RNA (1)...(19): siRNA sense strand
acuaaaacuccaaugguaa

SEQ ID NO: 2250450 - RNA, 19 nt, Homo sapiens
  misc_RNA (1)...(19): siRNA sense strand
agagcaagaagaagaugaa

SEQ ID NO: 2250451 - RNA, 19 nt, Homo sapiens
  misc_RNA (1)...(19): siRNA sense strand
agagauuguucgugaguuc

SEQ ID NO: 2250452 - RNA, 19 nt, Homo sapiens
  misc_RNA (1)...(19): siRNA sense strand
agcaagaagaagaugaaga

SEQ ID NO: 2250453 - RNA, 19 nt, Homo sapiens
  misc_RNA (1)...(19): siRNA sense strand
auacaaauuugagggagaa

SEQ ID NO: 2250454 - RNA, 19 nt, Homo sapiens
  misc_RNA (1)...(19): siRNA sense strand
gagaaauauggaagagaug

SEQ ID NO: 2250455 - RNA, 19 nt, Homo sapiens
  misc_RNA (1)...(19): siRNA sense strand
aauugaggaaagagagaga

SEQ ID NO: 2250456 - RNA, 19 nt, Homo sapiens
  misc_RNA (1)...(19): siRNA sense strand
aaguggaauuucuggguca

SEQ ID NO: 2250457 - RNA, 19 nt, Homo sapiens
  misc_RNA (1)...(19): siRNA sense strand
ucguauuggucagaagaaa

SEQ ID NO: 2250458 - RNA, 19 nt, Homo sapiens
  misc_RNA (1)...(19): siRNA sense strand
caaauuugagggagaagau

SEQ ID NO: 2250459 - RNA, 19 nt, Homo sapiens
  misc_RNA (1)...(19): siRNA sense strand
cgaaaugaaacaagccaaa

SEQ ID NO: 2250460 - RNA, 19 nt, Homo sapiens
  misc_RNA (1)...(19): siRNA sense strand
auaucaaggagaagaguaa

SEQ ID NO: 2250461 - RNA, 19 nt, Homo sapiens
  misc_RNA (1)...(19): siRNA sense strand
acuuaaagccucuggauuu

SEQ ID NO: 2250462 - RNA, 19 nt, Homo sapiens
  misc_RNA (1)...(19): siRNA sense strand
aagcagugauucagaggaa

SEQ ID NO: 2250463 - RNA, 19 nt, Homo sapiens
  misc_RNA (1)...(19): siRNA sense strand
ccugaagaacugagaaaga

SEQ ID NO: 2250464 - RNA, 19 nt, Homo sapiens
  misc_RNA (1)...(19): siRNA sense strand
cuaugaaacuuggaggaaa

SEQ ID NO: 2250465 - RNA, 19 nt, Homo sapiens
  misc_RNA (1)...(19): siRNA sense strand
gaaugguggcauagaacaa

SEQ ID NO: 2250466 - RNA, 19 nt, Homo sapiens
  misc_RNA (1)...(19): siRNA sense strand
gcagaaaaugaaaggcaaa

SEQ ID NO: 2250467 - RNA, 19 nt, Homo sapiens
  misc_RNA (1)...(19): siRNA sense strand
cuuucuaacuagugaugaa

SEQ ID NO: 2250468 - RNA, 19 nt, Homo sapiens
  misc_RNA (1)...(19): siRNA sense strand
cauagaaagcagugauuca

SEQ ID NO: 2250469 - RNA, 19 nt, Homo sapiens
  misc_RNA (1)...(19): siRNA sense strand
aagaagaaucccaacauaa

SEQ ID NO: 2250470 - RNA, 19 nt, Homo sapiens
  misc_RNA (1)...(19): siRNA sense strand
ggaaaauagcaaagaacuu

SEQ ID NO: 2250471 - RNA, 19 nt, Homo sapiens
  misc_RNA (1)...(19): siRNA sense strand
aaugaaaggcaaacugaaa

SEQ ID NO: 2250472 - RNA, 19 nt, Homo sapiens
  misc_RNA (1)...(19): siRNA sense strand
aguauggaguucauggaaa

SEQ ID NO: 2250473 - RNA, 19 nt, Homo sapiens
  misc_RNA (1)...(19): siRNA sense strand
ugauauggguuuggguaaa

SEQ ID NO: 2250474 - RNA, 19 nt, Homo sapiens
  misc_RNA (1)...(19): siRNA sense strand
gcagugauucagaggaaau

SEQ ID NO: 2250475 - RNA, 19 nt, Homo sapiens
  misc_RNA (1)...(19): siRNA sense strand
ggaaauugaaacaagugaa

SEQ ID NO: 2250476 - RNA, 19 nt, Homo sapiens
  misc_RNA (1)...(19): siRNA sense strand
agaacaaagacaagcaaaa

SEQ ID NO: 2250477 - RNA, 19 nt, Homo sapiens
  misc_RNA (1)...(19): siRNA sense strand
uuucagauaucaaggagaa

SEQ ID NO: 2250478 - RNA, 19 nt, Homo sapiens
  misc_RNA (1)...(19): siRNA sense strand
gggagaugaaggaggacuu

SEQ ID NO: 2250479 - RNA, 19 nt, Homo sapiens
  misc_RNA (1)...(19): siRNA sense strand
cuauggaacuaaaggagau

SEQ ID NO: 2250480 - RNA, 19 nt, Homo sapiens
  misc_RNA (1)...(19): siRNA sense strand
agaugaagagagaaagauu

SEQ ID NO: 2250481 - RNA, 19 nt, Homo sapiens
  misc_RNA (1)...(19): siRNA sense strand
uuauagaagauguggcauu

SEQ ID NO: 2250482 - RNA, 19 nt, Homo sapiens
  misc_RNA (1)...(19): siRNA sense strand
caccugaagaacugagaaa

SEQ ID NO: 2250483 - RNA, 19 nt, Homo sapiens
  misc_RNA (1)...(19): siRNA sense strand
cagaagaauuagcacguga

SEQ ID NO: 2250484 - RNA, 19 nt, Homo sapiens
  misc_RNA (1)...(19): siRNA sense strand
ccuauaucauggacaacaa

SEQ ID NO: 2250485 - RNA, 19 nt, Homo sapiens
  misc_RNA (1)...(19): siRNA sense strand
caaugugaauggaaaucaa

SEQ ID NO: 2250486 - RNA, 19 nt, Homo sapiens
  misc_RNA (1)...(19): siRNA sense strand
augauauggguuuggguaa

SEQ ID NO: 2250487 - RNA, 19 nt, Homo sapiens
  misc_RNA (1)...(19): siRNA sense strand
ggagagaccaagaacaaca

SEQ ID NO: 2250488 - RNA, 19 nt, Homo sapiens
  misc_RNA (1)...(19): siRNA sense strand
gugaauugccgcagaaaau

SEQ ID NO: 2250489 - RNA, 19 nt, Homo sapiens
  misc_RNA (1)...(19): siRNA sense strand
cuuagaagaacaaagacaa

SEQ ID NO: 2250490 - RNA, 19 nt, Homo sapiens
  misc_RNA (1)...(19): siRNA sense strand
uggccuauaucauggacaa

SEQ ID NO: 2250491 - RNA, 19 nt, Homo sapiens
  misc_RNA (1)...(19): siRNA sense strand
aucuagauguagugaacaa

SEQ ID NO: 2250492 - RNA, 19 nt, Homo sapiens
  misc_RNA (1)...(19): siRNA sense strand
ucuaacuagugaugaagaa

SEQ ID NO: 2250493 - RNA, 19 nt, Homo sapiens
  misc_RNA (1)...(19): siRNA sense strand
cauucugggaacagcgaaa

SEQ ID NO: 2250494 - RNA, 19 nt, Homo sapiens
  misc_RNA (1)...(19): siRNA sense strand
ugaaaaggcagauggacua

SEQ ID NO: 2250495 - RNA, 19 nt, Homo sapiens
  misc_RNA (1)...(19): siRNA sense strand
guggaggggucaaagaaaa

SEQ ID NO: 2250496 - RNA, 19 nt, Homo sapiens
  misc_RNA (1)...(19): siRNA sense strand
ccauuuaaagaaagagcuu

SEQ ID NO: 2250497 - RNA, 19 nt, Homo sapiens
  misc_RNA (1)...(19): siRNA sense strand
acaacaaauuggcacaaau

SEQ ID NO: 2250498 - RNA, 19 nt, Homo sapiens
  misc_RNA (1)...(19): siRNA sense strand
uggauggugucacgggaaa

SEQ ID NO: 2250499 - RNA, 19 nt, Homo sapiens
  misc_RNA (1)...(19): siRNA sense strand
cagauguacacuugaauuu

SEQ ID NO: 2250500 - RNA, 19 nt, Homo sapiens
  misc_RNA (1)...(19): siRNA sense strand
acuuagaagaacaaagaca

SEQ ID NO: 2250501 - RNA, 19 nt, Homo sapiens
  misc_RNA (1)...(19): siRNA sense strand
cuuaaaagcagguggaguu

SEQ ID NO: 2250502 - RNA, 19 nt, Homo sapiens
  misc_RNA (1)...(19): siRNA sense strand
guugaagaaacauggauuu

SEQ ID NO: 2250503 - RNA, 19 nt, Homo sapiens
  misc_RNA (1)...(19): siRNA sense strand
gaaacuuggaggaaacaau

SEQ ID NO: 2250504 - RNA, 19 nt, Homo sapiens
  misc_RNA (1)...(19): siRNA sense strand
acucaugacuauggaacua

SEQ ID NO: 2250505 - RNA, 19 nt, Homo sapiens
  misc_RNA (1)...(19): siRNA sense strand
ggcacaaauugaaggggua

SEQ ID NO: 2250506 - RNA, 19 nt, Homo sapiens
  misc_RNA (1)...(19): siRNA sense strand
uaugaaacuuggaggaaac

SEQ ID NO: 2250507 - RNA, 19 nt, Homo sapiens
  misc_RNA (1)...(19): siRNA sense strand
gaaacuaaaggcagggcga

SEQ ID NO: 2250508 - RNA, 19 nt, Homo sapiens
  misc_RNA (1)...(19): siRNA sense strand
gguuauagaagauguggca

SEQ ID NO: 2250509 - RNA, 19 nt, Homo sapiens
  misc_RNA (1)...(19): siRNA sense strand
ucagaugaagagagaaaga

SEQ ID NO: 2250510 - RNA, 19 nt, Homo sapiens
  misc_RNA (1)...(19): siRNA sense strand
ccuuuaugcagaaaugaua

SEQ ID NO: 2250511 - RNA, 19 nt, Homo sapiens
  misc_RNA (1)...(19): siRNA sense strand
agaauuagcacgugacagu

SEQ ID NO: 2250512 - RNA, 19 nt, Homo sapiens
  misc_RNA (1)...(19): siRNA sense strand
guaaacaaugugaauggaa

SEQ ID NO: 2250513 - RNA, 19 nt, Homo sapiens
  misc_RNA (1)...(19): siRNA sense strand
cuuccuauugaaagaguua

SEQ ID NO: 2250514 - RNA, 19 nt, Homo sapiens
  misc_RNA (1)...(19): siRNA sense strand
ccaaaagaaaagaguugaa

SEQ ID NO: 2250515 - RNA, 19 nt, Homo sapiens
  misc_RNA (1)...(19): siRNA sense strand
gagagaacuugcagcagga

SEQ ID NO: 2250516 - RNA, 19 nt, Homo sapiens
  misc_RNA (1)...(19): siRNA sense strand
ggcagauggacuaagcaaa

SEQ ID NO: 2250517 - RNA, 19 nt, Homo sapiens
  misc_RNA (1)...(19): siRNA sense strand
aggaaaugauacaccugaa

SEQ ID NO: 2250518 - RNA, 19 nt, Homo sapiens
  misc_RNA (1)...(19): siRNA sense strand
aacuaaaggcagggcgaaa

SEQ ID NO: 2250519 - RNA, 19 nt, Homo sapiens
  misc_RNA (1)...(19): siRNA sense strand
aaaugauacaccugaagaa

SEQ ID NO: 2250520 - RNA, 19 nt, Homo sapiens
  misc_RNA (1)...(19): siRNA sense strand
agaugaggaaugugcaauu

SEQ ID NO: 2250521 - RNA, 19 nt, Homo sapiens
  misc_RNA (1)...(19): siRNA sense strand
uugacugacuuaagaaaga

SEQ ID NO: 2250522 - RNA, 19 nt, Homo sapiens
  misc_RNA (1)...(19): siRNA sense strand
gcauagaacaauacagcgu

SEQ ID NO: 2250523 - RNA, 19 nt, Homo sapiens
  misc_RNA (1)...(19): siRNA sense strand
ccauagacuuggucagaag

SEQ ID NO: 2250524 - RNA, 19 nt, Homo sapiens
  misc_RNA (1)...(19): siRNA sense strand
aaccaaaugcugacgaaau

SEQ ID NO: 2250525 - RNA, 19 nt, Homo sapiens
  misc_RNA (1)...(19): siRNA sense strand
ugucacaaugggagaugaa

SEQ ID NO: 2250526 - RNA, 19 nt, Homo sapiens
  misc_RNA (1)...(19): siRNA sense strand
gugaaaaggcagauggacu

SEQ ID NO: 2250527 - RNA, 19 nt, Homo sapiens
  misc_RNA (1)...(19): siRNA sense strand
aggcagauggacuaagcaa

SEQ ID NO: 2250528 - RNA, 19 nt, Homo sapiens
  misc_RNA (1)...(19): siRNA sense strand
cgaaaugaaacaagccaaa

SEQ ID NO: 2250529 - RNA, 19 nt, Homo sapiens
  misc_RNA (1)...(19): siRNA sense strand
auaucaaggagaagaguaa

SEQ ID NO: 2250530 - RNA, 19 nt, Homo sapiens
  misc_RNA (1)...(19): siRNA sense strand
acuuaaagccucuggauuu

SEQ ID NO: 2250531 - RNA, 19 nt, Homo sapiens
  misc_RNA (1)...(19): siRNA sense strand
aagcagugauucagaggaa

SEQ ID NO: 2250532 - RNA, 19 nt, Homo sapiens
  misc_RNA (1)...(19): siRNA sense strand
ccugaagaacugagaaaga

SEQ ID NO: 2250533 - RNA, 19 nt, Homo sapiens
  misc_RNA (1)...(19): siRNA sense strand
cuaugaaacuuggaggaaa

SEQ ID NO: 2250534 - RNA, 19 nt, Homo sapiens
  misc_RNA (1)...(19): siRNA sense strand
gaaugguggcauagaacaa

SEQ ID NO: 2250535 - RNA, 19 nt, Homo sapiens
  misc_RNA (1)...(19): siRNA sense strand
gcagaaaaugaaaggcaaa

SEQ ID NO: 2250536 - RNA, 19 nt, Homo sapiens
  misc_RNA (1)...(19): siRNA sense strand
cuuucuaacuagugaugaa

SEQ ID NO: 2250537 - RNA, 19 nt, Homo sapiens
  misc_RNA (1)...(19): siRNA sense strand
cauagaaagcagugauuca

SEQ ID NO: 2250538 - RNA, 19 nt, Homo sapiens
  misc_RNA (1)...(19): siRNA sense strand
aagaagaaucccaacauaa

SEQ ID NO: 2250539 - RNA, 19 nt, Homo sapiens
  misc_RNA (1)...(19): siRNA sense strand
ggaaaauagcaaagaacuu

SEQ ID NO: 2250540 - RNA, 19 nt, Homo sapiens
  misc_RNA (1)...(19): siRNA sense strand
aaugaaaggcaaacugaaa

SEQ ID NO: 2250541 - RNA, 19 nt, Homo sapiens
  misc_RNA (1)...(19): siRNA sense strand
aguauggaguucauggaaa

SEQ ID NO: 2250542 - RNA, 19 nt, Homo sapiens
  misc_RNA (1)...(19): siRNA sense strand
ugauauggguuuggguaaa

SEQ ID NO: 2250543 - RNA, 19 nt, Homo sapiens
  misc_RNA (1)...(19): siRNA sense strand
gcagugauucagaggaaau

SEQ ID NO: 2250544 - RNA, 19 nt, Homo sapiens
  misc_RNA (1)...(19): siRNA sense strand
ggaaauugaaacaagugaa

SEQ ID NO: 2250545 - RNA, 19 nt, Homo sapiens
  misc_RNA (1)...(19): siRNA sense strand
agaacaaagacaagcaaaa

SEQ ID NO: 2250546 - RNA, 19 nt, Homo sapiens
  misc_RNA (1)...(19): siRNA sense strand
uuucagauaucaaggagaa

SEQ ID NO: 2250547 - RNA, 19 nt, Homo sapiens
  misc_RNA (1)...(19): siRNA sense strand
gggagaugaaggaggacuu

SEQ ID NO: 2250548 - RNA, 19 nt, Homo sapiens
  misc_RNA (1)...(19): siRNA sense strand
cuauggaacuaaaggagau

SEQ ID NO: 2250549 - RNA, 19 nt, Homo sapiens
  misc_RNA (1)...(19): siRNA sense strand
agaugaagagagaaagauu

SEQ ID NO: 2250550 - RNA, 19 nt, Homo sapiens
  misc_RNA (1)...(19): siRNA sense strand
uuauagaagauguggcauu

SEQ ID NO: 2250551 - RNA, 19 nt, Homo sapiens
  misc_RNA (1)...(19): siRNA sense strand
caccugaagaacugagaaa

SEQ ID NO: 2250552 - RNA, 19 nt, Homo sapiens
  misc_RNA (1)...(19): siRNA sense strand
cagaagaauuagcacguga

SEQ ID NO: 2250553 - RNA, 19 nt, Homo sapiens
  misc_RNA (1)...(19): siRNA sense strand
ccuauaucauggacaacaa

SEQ ID NO: 2250554 - RNA, 19 nt, Homo sapiens
  misc_RNA (1)...(19): siRNA sense strand
caaugugaauggaaaucaa

SEQ ID NO: 2250555 - RNA, 19 nt, Homo sapiens
  misc_RNA (1)...(19): siRNA sense strand
augauauggguuuggguaa

SEQ ID NO: 2250556 - RNA, 19 nt, Homo sapiens
  misc_RNA (1)...(19): siRNA sense strand
ggagagaccaagaacaaca

SEQ ID NO: 2250557 - RNA, 19 nt, Homo sapiens
  misc_RNA (1)...(19): siRNA sense strand
gugaauugccgcagaaaau

SEQ ID NO: 2250558 - RNA, 19 nt, Homo sapiens
  misc_RNA (1)...(19): siRNA sense strand
cuuagaagaacaaagacaa

SEQ ID NO: 2250559 - RNA, 19 nt, Homo sapiens
  misc_RNA (1)...(19): siRNA sense strand
uggccuauaucauggacaa

SEQ ID NO: 2250560 - RNA, 19 nt, Homo sapiens
  misc_RNA (1)...(19): siRNA sense strand
aucuagauguagugaacaa

SEQ ID NO: 2250561 - RNA, 19 nt, Homo sapiens
  misc_RNA (1)...(19): siRNA sense strand
ucuaacuagugaugaagaa

SEQ ID NO: 2250562 - RNA, 19 nt, Homo sapiens
  misc_RNA (1)...(19): siRNA sense strand
cauucugggaacagcgaaa

SEQ ID NO: 2250563 - RNA, 19 nt, Homo sapiens
  misc_RNA (1)...(19): siRNA sense strand
ugaaaaggcagauggacua

SEQ ID NO: 2250564 - RNA, 19 nt, Homo sapiens
  misc_RNA (1)...(19): siRNA sense strand
guggaggggucaaagaaaa

SEQ ID NO: 2250565 - RNA, 19 nt, Homo sapiens
  misc_RNA (1)...(19): siRNA sense strand
ccauuuaaagaaagagcuu

SEQ ID NO: 2250566 - RNA, 19 nt, Homo sapiens
  misc_RNA (1)...(19): siRNA sense strand
acaacaaauuggcacaaau

SEQ ID NO: 2250567 - RNA, 19 nt, Homo sapiens
  misc_RNA (1)...(19): siRNA sense strand
uggauggugucacgggaaa

SEQ ID NO: 2250568 - RNA, 19 nt, Homo sapiens
  misc_RNA (1)...(19): siRNA sense strand
cagauguacacuugaauuu

SEQ ID NO: 2250569 - RNA, 19 nt, Homo sapiens
  misc_RNA (1)...(19): siRNA sense strand
acuuagaagaacaaagaca

SEQ ID NO: 2250570 - RNA, 19 nt, Homo sapiens
  misc_RNA (1)...(19): siRNA sense strand
cuuaaaagcagguggaguu

SEQ ID NO: 2250571 - RNA, 19 nt, Homo sapiens
  misc_RNA (1)...(19): siRNA sense strand
guugaagaaacauggauuu

SEQ ID NO: 2250572 - RNA, 19 nt, Homo sapiens
  misc_RNA (1)...(19): siRNA sense strand
gaaacuuggaggaaacaau

SEQ ID NO: 2250573 - RNA, 19 nt, Homo sapiens
  misc_RNA (1)...(19): siRNA sense strand
acucaugacuauggaacua

SEQ ID NO: 2250574 - RNA, 19 nt, Homo sapiens
  misc_RNA (1)...(19): siRNA sense strand
ggcacaaauugaaggggua

SEQ ID NO: 2250575 - RNA, 19 nt, Homo sapiens
  misc_RNA (1)...(19): siRNA sense strand
uaugaaacuuggaggaaac

SEQ ID NO: 2250576 - RNA, 19 nt, Homo sapiens
  misc_RNA (1)...(19): siRNA sense strand
gaaacuaaaggcagggcga

SEQ ID NO: 2250577 - RNA, 19 nt, Homo sapiens
  misc_RNA (1)...(19): siRNA sense strand
gguuauagaagauguggca

SEQ ID NO: 2250578 - RNA, 19 nt, Homo sapiens
  misc_RNA (1)...(19): siRNA sense strand
ucagaugaagagagaaaga

SEQ ID NO: 2250579 - RNA, 19 nt, Homo sapiens
  misc_RNA (1)...(19): siRNA sense strand
ccuuuaugcagaaaugaua

SEQ ID NO: 2250580 - RNA, 19 nt, Homo sapiens
  misc_RNA (1)...(19): siRNA sense strand
agaauuagcacgugacagu

SEQ ID NO: 2250581 - RNA, 19 nt, Homo sapiens
  misc_RNA (1)...(19): siRNA sense strand
guaaacaaugugaauggaa

SEQ ID NO: 2250582 - RNA, 19 nt, Homo sapiens
  misc_RNA (1)...(19): siRNA sense strand
cuuccuauugaaagaguua

SEQ ID NO: 2250583 - RNA, 19 nt, Homo sapiens
  misc_RNA (1)...(19): siRNA sense strand
ccaaaagaaaagaguugaa

SEQ ID NO: 2250584 - RNA, 19 nt, Homo sapiens
  misc_RNA (1)...(19): siRNA sense strand
gagagaacuugcagcagga

SEQ ID NO: 2250585 - RNA, 19 nt, Homo sapiens
  misc_RNA (1)...(19): siRNA sense strand
ggcagauggacuaagcaaa

SEQ ID NO: 2250586 - RNA, 19 nt, Homo sapiens
  misc_RNA (1)...(19): siRNA sense strand
aggaaaugauacaccugaa

SEQ ID NO: 2250587 - RNA, 19 nt, Homo sapiens
  misc_RNA (1)...(19): siRNA sense strand
aacuaaaggcagggcgaaa

SEQ ID NO: 2250588 - RNA, 19 nt, Homo sapiens
  misc_RNA (1)...(19): siRNA sense strand
aaaugauacaccugaagaa

SEQ ID NO: 2250589 - RNA, 19 nt, Homo sapiens
  misc_RNA (1)...(19): siRNA sense strand
agaugaggaaugugcaauu

SEQ ID NO: 2250590 - RNA, 19 nt, Homo sapiens
  misc_RNA (1)...(19): siRNA sense strand
uugacugacuuaagaaaga

SEQ ID NO: 2250591 - RNA, 19 nt, Homo sapiens
  misc_RNA (1)...(19): siRNA sense strand
gcauagaacaauacagcgu

SEQ ID NO: 2250592 - RNA, 19 nt, Homo sapiens
  misc_RNA (1)...(19): siRNA sense strand
ccauagacuuggucagaag

SEQ ID NO: 2250593 - RNA, 19 nt, Homo sapiens
  misc_RNA (1)...(19): siRNA sense strand
aaccaaaugcugacgaaau

SEQ ID NO: 2250594 - RNA, 19 nt, Homo sapiens
  misc_RNA (1)...(19): siRNA sense strand
ugucacaaugggagaugaa

SEQ ID NO: 2250595 - RNA, 19 nt, Homo sapiens
  misc_RNA (1)...(19): siRNA sense strand
gugaaaaggcagauggacu

SEQ ID NO: 2250596 - RNA, 19 nt, Homo sapiens
  misc_RNA (1)...(19): siRNA sense strand
aggcagauggacuaagcaa

SEQ ID NO: 2250597 - RNA, 19 nt, Homo sapiens
  misc_RNA (1)...(19): siRNA sense strand
gcucagaagaagaggaaga

SEQ ID NO: 2250598 - RNA, 19 nt, Homo sapiens
  misc_RNA (1)...(19): siRNA sense strand
ccgucaaagugaagaucaa

SEQ ID NO: 2250599 - RNA, 19 nt, Homo sapiens
  misc_RNA (1)...(19): siRNA sense strand
gugaggaggaggaggagaa

SEQ ID NO: 2250600 - RNA, 19 nt, Homo sapiens
  misc_RNA (1)...(19): siRNA sense strand
acaaggacgacgagagcaa

SEQ ID NO: 2250601 - RNA, 19 nt, Homo sapiens
  misc_RNA (1)...(19): siRNA sense strand
agaaagagaacgagcggau

SEQ ID NO: 2250602 - RNA, 19 nt, Homo sapiens
  misc_RNA (1)...(19): siRNA sense strand
aggaagaggaggaggagga

SEQ ID NO: 2250603 - RNA, 19 nt, Homo sapiens
  misc_RNA (1)...(19): siRNA sense strand
aagaagaggaagaggagga

SEQ ID NO: 2250604 - RNA, 19 nt, Homo sapiens
  misc_RNA (1)...(19): siRNA sense strand
ccguggaggagaagaagaa

SEQ ID NO: 2250605 - RNA, 19 nt, Homo sapiens
  misc_RNA (1)...(19): siRNA sense strand
gugaaggcgaggagaguga

SEQ ID NO: 2250606 - RNA, 19 nt, Homo sapiens
  misc_RNA (1)...(19): siRNA sense strand
aggaagagggcgaggagga

SEQ ID NO: 2250607 - RNA, 19 nt, Homo sapiens
  misc_RNA (1)...(19): siRNA sense strand
agaucgagcaggagcgcaa

SEQ ID NO: 2250608 - RNA, 19 nt, Homo sapiens
  misc_RNA (1)...(19): siRNA sense strand
aggccuggcucgagaugaa

SEQ ID NO: 2250609 - RNA, 19 nt, Homo sapiens
  misc_RNA (1)...(19): siRNA sense strand
aggaaguggcagcgaagaa

SEQ ID NO: 2250610 - RNA, 19 nt, Homo sapiens
  misc_RNA (1)...(19): siRNA sense strand
cggcagaagcaccaggaau

SEQ ID NO: 2250611 - RNA, 19 nt, Homo sapiens
  misc_RNA (1)...(19): siRNA sense strand
agaaggaagucgaggccca

SEQ ID NO: 2250612 - RNA, 19 nt, Homo sapiens
  misc_RNA (1)...(19): siRNA sense strand
agagugaggaggaggaaga

SEQ ID NO: 2250613 - RNA, 19 nt, Homo sapiens
  misc_RNA (1)...(19): siRNA sense strand
cagaagaagaggaagagga

SEQ ID NO: 2250614 - RNA, 19 nt, Homo sapiens
  misc_RNA (1)...(19): siRNA sense strand
agaaggacaagaagggcaa

SEQ ID NO: 2250615 - RNA, 19 nt, Homo sapiens
  misc_RNA (1)...(19): siRNA sense strand
cggcagacacugugaucau

SEQ ID NO: 2250616 - RNA, 19 nt, Homo sapiens
  misc_RNA (1)...(19): siRNA sense strand
aggaggaggaggagaagau

SEQ ID NO: 2250617 - RNA, 19 nt, Homo sapiens
  misc_RNA (1)...(19): siRNA sense strand
ggaucgagaaggagcgcau

SEQ ID NO: 2250618 - RNA, 19 nt, Homo sapiens
  misc_RNA (1)...(19): siRNA sense strand
agagcaagaagcagaagaa

SEQ ID NO: 2250619 - RNA, 19 nt, Homo sapiens
  misc_RNA (1)...(19): siRNA sense strand
gccaaggauuucaaggaau

SEQ ID NO: 2250620 - RNA, 19 nt, Homo sapiens
  misc_RNA (1)...(19): siRNA sense strand
cagaaaaugcagaaggaca

SEQ ID NO: 2250621 - RNA, 19 nt, Homo sapiens
  misc_RNA (1)...(19): siRNA sense strand
aggaggaggaagagggcga

SEQ ID NO: 2250622 - RNA, 19 nt, Homo sapiens
  misc_RNA (1)...(19): siRNA sense strand
cugaagaugaggaggggua

SEQ ID NO: 2250623 - RNA, 19 nt, Homo sapiens
  misc_RNA (1)...(19): siRNA sense strand
uggagaagcagcagaagau

SEQ ID NO: 2250624 - RNA, 19 nt, Homo sapiens
  misc_RNA (1)...(19): siRNA sense strand
ucaaacaguaccagaucaa

SEQ ID NO: 2250625 - RNA, 19 nt, Homo sapiens
  misc_RNA (1)...(19): siRNA sense strand
gggcguacgaguuugacaa

SEQ ID NO: 2250626 - RNA, 19 nt, Homo sapiens
  misc_RNA (1)...(19): siRNA sense strand
aaaucgagaaggaggauga

SEQ ID NO: 2250627 - RNA, 19 nt, Homo sapiens
  misc_RNA (1)...(19): siRNA sense strand
gagcucagaucauggccua

SEQ ID NO: 2250628 - RNA, 19 nt, Homo sapiens
  misc_RNA (1)...(19): siRNA sense strand
agauggcggugcagggcaa

SEQ ID NO: 2250629 - RNA, 19 nt, Homo sapiens
  misc_RNA (1)...(19): siRNA sense strand
cugaaggacccauggcgaa

SEQ ID NO: 2250630 - RNA, 19 nt, Homo sapiens
  misc_RNA (1)...(19): siRNA sense strand
cagccaaguacaagcucaa

SEQ ID NO: 2250631 - RNA, 19 nt, Homo sapiens
  misc_RNA (1)...(19): siRNA sense strand
gcgaggagagugaggagga

SEQ ID NO: 2250632 - RNA, 19 nt, Homo sapiens
  misc_RNA (1)...(19): siRNA sense strand
aggaggaacaagaggagga

SEQ ID NO: 2250633 - RNA, 19 nt, Homo sapiens
  misc_RNA (1)...(19): siRNA sense strand
cggaagcgcaagcgagaca

SEQ ID NO: 2250634 - RNA, 19 nt, Homo sapiens
  misc_RNA (1)...(19): siRNA sense strand
accaagaagaugaagaaga

SEQ ID NO: 2250635 - RNA, 19 nt, Homo sapiens
  misc_RNA (1)...(19): siRNA sense strand
gagaaggacaagaagggca

SEQ ID NO: 2250636 - RNA, 19 nt, Homo sapiens
  misc_RNA (1)...(19): siRNA sense strand
aguacaugauuguggacga

SEQ ID NO: 2250637 - RNA, 19 nt, Homo sapiens
  misc_RNA (1)...(19): siRNA sense strand
acaacaaccugaacggcau

SEQ ID NO: 2250638 - RNA, 19 nt, Homo sapiens
  misc_RNA (1)...(19): siRNA sense strand
acggagaagcaguggcuca

SEQ ID NO: 2250639 - RNA, 19 nt, Homo sapiens
  misc_RNA (1)...(19): siRNA sense strand
gggaagauccucacaggca

SEQ ID NO: 2250640 - RNA, 19 nt, Homo sapiens
  misc_RNA (1)...(19): siRNA sense strand
gugaucaaguacaaggaca

SEQ ID NO: 2250641 - RNA, 19 nt, Homo sapiens
  misc_RNA (1)...(19): siRNA sense strand
agaagauaaaggagcgcau

SEQ ID NO: 2250642 - RNA, 19 nt, Homo sapiens
  misc_RNA (1)...(19): siRNA sense strand
aggacaagcgccuggccua

SEQ ID NO: 2250643 - RNA, 19 nt, Homo sapiens
  misc_RNA (1)...(19): siRNA sense strand
aagaggaagaggaggagga

SEQ ID NO: 2250644 - RNA, 19 nt, Homo sapiens
  misc_RNA (1)...(19): siRNA sense strand
guggaggagaagaagaaga

SEQ ID NO: 2250645 - RNA, 19 nt, Homo sapiens
  misc_RNA (1)...(19): siRNA sense strand
uggaggagaucgaagagga

SEQ ID NO: 2250646 - RNA, 19 nt, Homo sapiens
  misc_RNA (1)...(19): siRNA sense strand
aggaggugguggugugcau

SEQ ID NO: 2250647 - RNA, 19 nt, Homo sapiens
  misc_RNA (1)...(19): siRNA sense strand
gggagcagaagaaagagaa

SEQ ID NO: 2250648 - RNA, 19 nt, Homo sapiens
  misc_RNA (1)...(19): siRNA sense strand
aaaagaagaaggcagaaaa

SEQ ID NO: 2250649 - RNA, 19 nt, Homo sapiens
  misc_RNA (1)...(19): siRNA sense strand
cggguaaauuugagcuucu

SEQ ID NO: 2250650 - RNA, 19 nt, Homo sapiens
  misc_RNA (1)...(19): siRNA sense strand
ggcagaaaaucgagaagga

SEQ ID NO: 2250651 - RNA, 19 nt, Homo sapiens
  misc_RNA (1)...(19): siRNA sense strand
aguacaucaucaaagacaa

SEQ ID NO: 2250652 - RNA, 19 nt, Homo sapiens
  misc_RNA (1)...(19): siRNA sense strand
ccaucaugcagcugcggaa

SEQ ID NO: 2250653 - RNA, 19 nt, Homo sapiens
  misc_RNA (1)...(19): siRNA sense strand
cagaagaaaucaucacgga

SEQ ID NO: 2250654 - RNA, 19 nt, Homo sapiens
  misc_RNA (1)...(19): siRNA sense strand
gaggagaagaagaagauuc

SEQ ID NO: 2250655 - RNA, 19 nt, Homo sapiens
  misc_RNA (1)...(19): siRNA sense strand
aagaugucgaugaugaaua

SEQ ID NO: 2250656 - RNA, 19 nt, Homo sapiens
  misc_RNA (1)...(19): siRNA sense strand
acuacgagcucauccgcaa

SEQ ID NO: 2250657 - RNA, 19 nt, Homo sapiens
  misc_RNA (1)...(19): siRNA sense strand
cuggagaagcagcagaaga

SEQ ID NO: 2250658 - RNA, 19 nt, Homo sapiens
  misc_RNA (1)...(19): siRNA sense strand
uggaggagaagaagaagau

SEQ ID NO: 2250659 - RNA, 19 nt, Homo sapiens
  misc_RNA (1)...(19): siRNA sense strand
agaagaaaucaucacggaa

SEQ ID NO: 2250660 - RNA, 19 nt, Homo sapiens
  misc_RNA (1)...(19): siRNA sense strand
agcagaagaucgagcagga

SEQ ID NO: 2250661 - RNA, 19 nt, Homo sapiens
  misc_RNA (1)...(19): siRNA sense strand
uaucauggacagagagaaa

SEQ ID NO: 2250662 - RNA, 19 nt, Homo sapiens
  misc_RNA (1)...(19): siRNA sense strand
cagaaagaagagauagaaa

SEQ ID NO: 2250663 - RNA, 19 nt, Homo sapiens
  misc_RNA (1)...(19): siRNA sense strand
cugaaaaggcagaaaauaa

SEQ ID NO: 2250664 - RNA, 19 nt, Homo sapiens
  misc_RNA (1)...(19): siRNA sense strand
cagaaauauacuuggcaua

SEQ ID NO: 2250665 - RNA, 19 nt, Homo sapiens
  misc_RNA (1)...(19): siRNA sense strand
cugcaguggaagaaagaaa

SEQ ID NO: 2250666 - RNA, 19 nt, Homo sapiens
  misc_RNA (1)...(19): siRNA sense strand
gaaaguagacccauggcaa

SEQ ID NO: 2250667 - RNA, 19 nt, Homo sapiens
  misc_RNA (1)...(19): siRNA sense strand
agaaagaagcucuagaaca

SEQ ID NO: 2250668 - RNA, 19 nt, Homo sapiens
  misc_RNA (1)...(19): siRNA sense strand
aguccagaaagaagagaua

SEQ ID NO: 2250669 - RNA, 19 nt, Homo sapiens
  misc_RNA (1)...(19): siRNA sense strand
gcucgaaagaggaaacauu

SEQ ID NO: 2250670 - RNA, 19 nt, Homo sapiens
  misc_RNA (1)...(19): siRNA sense strand
uggaagaaagaaagaucaa

SEQ ID NO: 2250671 - RNA, 19 nt, Homo sapiens
  misc_RNA (1)...(19): siRNA sense strand
caagaaaguacaagaagca

SEQ ID NO: 2250672 - RNA, 19 nt, Homo sapiens
  misc_RNA (1)...(19): siRNA sense strand
cgaaggaaauguugccaca

SEQ ID NO: 2250673 - RNA, 19 nt, Homo sapiens
  misc_RNA (1)...(19): siRNA sense strand
ugauaaagcacaagaugga

SEQ ID NO: 2250674 - RNA, 19 nt, Homo sapiens
  misc_RNA (1)...(19): siRNA sense strand
cggaagaagagugggaaga

SEQ ID NO: 2250675 - RNA, 19 nt, Homo sapiens
  misc_RNA (1)...(19): siRNA sense strand
aggaggaacuguagcggau

SEQ ID NO: 2250676 - RNA, 19 nt, Homo sapiens
  misc_RNA (1)...(19): siRNA sense strand
augugaaccuaaagaaaga

SEQ ID NO: 2250677 - RNA, 19 nt, Homo sapiens
  misc_RNA (1)...(19): siRNA sense strand
agaaagagaaagugauacu

SEQ ID NO: 2250678 - RNA, 19 nt, Homo sapiens
  misc_RNA (1)...(19): siRNA sense strand
gggaagaaaggccaagcua

SEQ ID NO: 2250679 - RNA, 19 nt, Homo sapiens
  misc_RNA (1)...(19): siRNA sense strand
cagcaggaggaaaggaaga

SEQ ID NO: 2250680 - RNA, 19 nt, Homo sapiens
  misc_RNA (1)...(19): siRNA sense strand
uggaauugguugaagcuca

SEQ ID NO: 2250681 - RNA, 19 nt, Homo sapiens
  misc_RNA (1)...(19): siRNA sense strand
aggaagaugccuuugggaa

SEQ ID NO: 2250682 - RNA, 19 nt, Homo sapiens
  misc_RNA (1)...(19): siRNA sense strand
uaaccaaggauauggaaga

SEQ ID NO: 2250683 - RNA, 19 nt, Homo sapiens
  misc_RNA (1)...(19): siRNA sense strand
agaaagaggaagaugagca

SEQ ID NO: 2250684 - RNA, 19 nt, Homo sapiens
  misc_RNA (1)...(19): siRNA sense strand
aagaggaagaugagcaaga

SEQ ID NO: 2250685 - RNA, 19 nt, Homo sapiens
  misc_RNA (1)...(19): siRNA sense strand
uguuaaaggaggaacugua

SEQ ID NO: 2250686 - RNA, 19 nt, Homo sapiens
  misc_RNA (1)...(19): siRNA sense strand
agcacgagccucugggaaa

SEQ ID NO: 2250687 - RNA, 19 nt, Homo sapiens
  misc_RNA (1)...(19): siRNA sense strand
ugaaggugauaaagcacaa

SEQ ID NO: 2250688 - RNA, 19 nt, Homo sapiens
  misc_RNA (1)...(19): siRNA sense strand
ggaagaugccuuugggaag

SEQ ID NO: 2250689 - RNA, 19 nt, Homo sapiens
  misc_RNA (1)...(19): siRNA sense strand
ccucacaagacgaugaaga

SEQ ID NO: 2250690 - RNA, 19 nt, Homo sapiens
  misc_RNA (1)...(19): siRNA sense strand
aggauuaugagguggauga

SEQ ID NO: 2250691 - RNA, 19 nt, Homo sapiens
  misc_RNA (1)...(19): siRNA sense strand
auuaugagguggaugaaaa

SEQ ID NO: 2250692 - RNA, 19 nt, Homo sapiens
  misc_RNA (1)...(19): siRNA sense strand
ggaagaugagcaagaagau

SEQ ID NO: 2250693 - RNA, 19 nt, Homo sapiens
  misc_RNA (1)...(19): siRNA sense strand
caacagaaucacggaagaa

SEQ ID NO: 2250694 - RNA, 19 nt, Homo sapiens
  misc_RNA (1)...(19): siRNA sense strand
cagaagucagaaagaggaa

SEQ ID NO: 2250695 - RNA, 19 nt, Homo sapiens
  misc_RNA (1)...(19): siRNA sense strand
aggaaaggaagaugaagau

SEQ ID NO: 2250696 - RNA, 19 nt, Homo sapiens
  misc_RNA (1)...(19): siRNA sense strand
gcaaagaguaaaggugcua

SEQ ID NO: 2250697 - RNA, 19 nt, Homo sapiens
  misc_RNA (1)...(19): siRNA sense strand
cugaguucuucaauggaaa

SEQ ID NO: 2250698 - RNA, 19 nt, Homo sapiens
  misc_RNA (1)...(19): siRNA sense strand
acauggaacagcugaagua

SEQ ID NO: 2250699 - RNA, 19 nt, Homo sapiens
  misc_RNA (1)...(19): siRNA sense strand
aggaagaugagcaagaaga

SEQ ID NO: 2250700 - RNA, 19 nt, Homo sapiens
  misc_RNA (1)...(19): siRNA sense strand
ggaugaagaaacagucaca

SEQ ID NO: 2250701 - RNA, 19 nt, Homo sapiens
  misc_RNA (1)...(19): siRNA sense strand
ccaagaaaacauuagcaaa

SEQ ID NO: 2250702 - RNA, 19 nt, Homo sapiens
  misc_RNA (1)...(19): siRNA sense strand
ccagaaauauacuuggcau

SEQ ID NO: 2250703 - RNA, 19 nt, Homo sapiens
  misc_RNA (1)...(19): siRNA sense strand
ggacccauaccuugagaau

SEQ ID NO: 2250704 - RNA, 19 nt, Homo sapiens
  misc_RNA (1)...(19): siRNA sense strand
ugucaagaaaguacaagaa

SEQ ID NO: 2250705 - RNA, 19 nt, Homo sapiens
  misc_RNA (1)...(19): siRNA sense strand
cagaagaaaaggagacuga

SEQ ID NO: 2250706 - RNA, 19 nt, Homo sapiens
  misc_RNA (1)...(19): siRNA sense strand
gaagucagaaagaggaaga

SEQ ID NO: 2250707 - RNA, 19 nt, Homo sapiens
  misc_RNA (1)...(19): siRNA sense strand
agaaagugauacugggaag

SEQ ID NO: 2250708 - RNA, 19 nt, Homo sapiens
  misc_RNA (1)...(19): siRNA sense strand
ggacagagagaaagaagcu

SEQ ID NO: 2250709 - RNA, 19 nt, Homo sapiens
  misc_RNA (1)...(19): siRNA sense strand
uggcuaacaaauugaaaga

SEQ ID NO: 2250710 - RNA, 19 nt, Homo sapiens
  misc_RNA (1)...(19): siRNA sense strand
guaaugauguugaugcuga

SEQ ID NO: 2250711 - RNA, 19 nt, Homo sapiens
  misc_RNA (1)...(19): siRNA sense strand
agcacaagauggagaaaau

SEQ ID NO: 2250712 - RNA, 19 nt, Homo sapiens
  misc_RNA (1)...(19): siRNA sense strand
gguccauaguaaugauguu

SEQ ID NO: 2250713 - RNA, 19 nt, Homo sapiens
  misc_RNA (1)...(19): siRNA sense strand
ccuaaagaaagauagugaa

SEQ ID NO: 2250714 - RNA, 19 nt, Homo sapiens
  misc_RNA (1)...(19): siRNA sense strand
ugagcaggaugaagaaaca

SEQ ID NO: 2250715 - RNA, 19 nt, Homo sapiens
  misc_RNA (1)...(19): siRNA sense strand
agacugaagagaacaaaga

SEQ ID NO: 2250716 - RNA, 19 nt, Homo sapiens
  misc_RNA (1)...(19): siRNA sense strand
gcggaugcuccuaccaaua

SEQ ID NO: 2250717 - RNA, 19 nt, Homo sapiens
  misc_RNA (1)...(19): siRNA sense strand
cguaauguggaaauguuua

SEQ ID NO: 2250718 - RNA, 19 nt, Homo sapiens
  misc_RNA (1)...(19): siRNA sense strand
ggguuaaagaggaggaaga

SEQ ID NO: 2250719 - RNA, 19 nt, Homo sapiens
  misc_RNA (1)...(19): siRNA sense strand
uggcaaggcugcugggagu

SEQ ID NO: 2250720 - RNA, 19 nt, Homo sapiens
  misc_RNA (1)...(19): siRNA sense strand
ccaugaagcuggcaggguu

SEQ ID NO: 2250721 - RNA, 19 nt, Homo sapiens
  misc_RNA (1)...(19): siRNA sense strand
ccuaacgaccagaagaaga

SEQ ID NO: 2250722 - RNA, 19 nt, Homo sapiens
  misc_RNA (1)...(19): siRNA sense strand
aggcgauagugcaggaacu

SEQ ID NO: 2250723 - RNA, 19 nt, Homo sapiens
  misc_RNA (1)...(19): siRNA sense strand
gcucgcaagcggauggaga

SEQ ID NO: 2250724 - RNA, 19 nt, Homo sapiens
  misc_RNA (1)...(19): siRNA sense strand
cagcaaggcggaaggcgau

SEQ ID NO: 2250725 - RNA, 19 nt, Homo sapiens
  misc_RNA (1)...(19): siRNA sense strand
gccgagaccucaagaucau

SEQ ID NO: 2250726 - RNA, 19 nt, Homo sapiens
  misc_RNA (1)...(19): siRNA sense strand
aggaggaagauggcagaua

SEQ ID NO: 2250727 - RNA, 19 nt, Homo sapiens
  misc_RNA (1)...(19): siRNA sense strand
agcugaagacccagagaga

SEQ ID NO: 2250728 - RNA, 19 nt, Homo sapiens
  misc_RNA (1)...(19): siRNA sense strand
ggaaggcgauagugcagga

SEQ ID NO: 2250729 - RNA, 19 nt, Homo sapiens
  misc_RNA (1)...(19): siRNA sense strand
acccuaacgaccagaagaa

SEQ ID NO: 2250730 - RNA, 19 nt, Homo sapiens
  misc_RNA (1)...(19): siRNA sense strand
ugacagauguagccggcaa

SEQ ID NO: 2250731 - RNA, 19 nt, Homo sapiens
  misc_RNA (1)...(19): siRNA sense strand
ccagcaaacagaagcggaa

SEQ ID NO: 2250732 - RNA, 19 nt, Homo sapiens
  misc_RNA (1)...(19): siRNA sense strand
ccaugaagcaaaagcggaa

SEQ ID NO: 2250733 - RNA, 19 nt, Homo sapiens
  misc_RNA (1)...(19): siRNA sense strand
cggccaaccagcaggagau

SEQ ID NO: 2250734 - RNA, 19 nt, Homo sapiens
  misc_RNA (1)...(19): siRNA sense strand
acauugacguggaggugga

SEQ ID NO: 2250735 - RNA, 19 nt, Homo sapiens
  misc_RNA (1)...(19): siRNA sense strand
cggacggcuuccaggugaa

SEQ ID NO: 2250736 - RNA, 19 nt, Homo sapiens
  misc_RNA (1)...(19): siRNA sense strand
gggcugaguucuaccacca

SEQ ID NO: 2250737 - RNA, 19 nt, Homo sapiens
  misc_RNA (1)...(19): siRNA sense strand
ucuuggcauuugagaggaa

SEQ ID NO: 2250738 - RNA, 19 nt, Homo sapiens
  misc_RNA (1)...(19): siRNA sense strand
acucccaugacaaggaaua

SEQ ID NO: 2250739 - RNA, 19 nt, Homo sapiens
  misc_RNA (1)...(19): siRNA sense strand
augacaaggaauacaucaa

SEQ ID NO: 2250740 - RNA, 19 nt, Homo sapiens
  misc_RNA (1)...(19): siRNA sense strand
agucgcugguugugcgcaa

SEQ ID NO: 2250741 - RNA, 19 nt, Homo sapiens
  misc_RNA (1)...(19): siRNA sense strand
ccagagaccccaaaggcua

SEQ ID NO: 2250742 - RNA, 19 nt, Homo sapiens
  misc_RNA (1)...(19): siRNA sense strand
cucaagauccagagggacu

SEQ ID NO: 2250743 - RNA, 19 nt, Homo sapiens
  misc_RNA (1)...(19): siRNA sense strand
aggggaagcuccuggauga

SEQ ID NO: 2250744 - RNA, 19 nt, Homo sapiens
  misc_RNA (1)...(19): siRNA sense strand
ccaacaggcugcaggacuc

SEQ ID NO: 2250745 - RNA, 19 nt, Homo sapiens
  misc_RNA (1)...(19): siRNA sense strand
caacaaagaugcugggaag

SEQ ID NO: 2250746 - RNA, 19 nt, Homo sapiens
  misc_RNA (1)...(19): siRNA sense strand
gcaacaaagaugcugggaa

SEQ ID NO: 2250747 - RNA, 19 nt, Homo sapiens
  misc_RNA (1)...(19): siRNA sense strand
ccagaauugaugaggccaa

SEQ ID NO: 2250748 - RNA, 19 nt, Homo sapiens
  misc_RNA (1)...(19): siRNA sense strand
gggcaaugagaucgauaca

SEQ ID NO: 2250749 - RNA, 19 nt, Homo sapiens
  misc_RNA (1)...(19): siRNA sense strand
ggaucauggagaaggcuga

SEQ ID NO: 2250750 - RNA, 19 nt, Homo sapiens
  misc_RNA (1)...(19): siRNA sense strand
aaaugaugcccgagaaaau

SEQ ID NO: 2250751 - RNA, 19 nt, Homo sapiens
  misc_RNA (1)...(19): siRNA sense strand
gggcugaccaguuggcuga

SEQ ID NO: 2250752 - RNA, 19 nt, Homo sapiens
  misc_RNA (1)...(19): siRNA sense strand
gguugaagagaguaaagau

SEQ ID NO: 2250753 - RNA, 19 nt, Homo sapiens
  misc_RNA (1)...(19): siRNA sense strand
gguaacaaaugaugcccga

SEQ ID NO: 2250754 - RNA, 19 nt, Homo sapiens
  misc_RNA (1)...(19): siRNA sense strand
guuggaugaacaaggagaa

SEQ ID NO: 2250755 - RNA, 19 nt, Homo sapiens
  misc_RNA (1)...(19): siRNA sense strand
cagaaucgccagaucgaca

SEQ ID NO: 2250756 - RNA, 19 nt, Homo sapiens
  misc_RNA (1)...(19): siRNA sense strand
ggcuucauccgcaggguaa

SEQ ID NO: 2250757 - RNA, 19 nt, Homo sapiens
  misc_RNA (1)...(19): siRNA sense strand
uaacaaaugaugcccgaga

SEQ ID NO: 2250758 - RNA, 19 nt, Homo sapiens
  misc_RNA (1)...(19): siRNA sense strand
caacaaagaugcugggaag

SEQ ID NO: 2250759 - RNA, 19 nt, Homo sapiens
  misc_RNA (1)...(19): siRNA sense strand
gcaacaaagaugcugggaa

SEQ ID NO: 2250760 - RNA, 19 nt, Homo sapiens
  misc_RNA (1)...(19): siRNA sense strand
ccagaauugaugaggccaa

SEQ ID NO: 2250761 - RNA, 19 nt, Homo sapiens
  misc_RNA (1)...(19): siRNA sense strand
gggcaaugagaucgauaca

SEQ ID NO: 2250762 - RNA, 19 nt, Homo sapiens
  misc_RNA (1)...(19): siRNA sense strand
ggaucauggagaaggcuga

SEQ ID NO: 2250763 - RNA, 19 nt, Homo sapiens
  misc_RNA (1)...(19): siRNA sense strand
aaaugaugcccgagaaaau

SEQ ID NO: 2250764 - RNA, 19 nt, Homo sapiens
  misc_RNA (1)...(19): siRNA sense strand
gggcugaccaguuggcuga

SEQ ID NO: 2250765 - RNA, 19 nt, Homo sapiens
  misc_RNA (1)...(19): siRNA sense strand
gguugaagagaguaaagau

SEQ ID NO: 2250766 - RNA, 19 nt, Homo sapiens
  misc_RNA (1)...(19): siRNA sense strand
gguaacaaaugaugcccga

SEQ ID NO: 2250767 - RNA, 19 nt, Homo sapiens
  misc_RNA (1)...(19): siRNA sense strand
guuggaugaacaaggagaa

SEQ ID NO: 2250768 - RNA, 19 nt, Homo sapiens
  misc_RNA (1)...(19): siRNA sense strand
cagaaucgccagaucgaca

SEQ ID NO: 2250769 - RNA, 19 nt, Homo sapiens
  misc_RNA (1)...(19): siRNA sense strand
ggcuucauccgcaggguaa

SEQ ID NO: 2250770 - RNA, 19 nt, Homo sapiens
  misc_RNA (1)...(19): siRNA sense strand
uaacaaaugaugcccgaga

SEQ ID NO: 2250771 - RNA, 19 nt, Homo sapiens
  misc_RNA (1)...(19): siRNA sense strand
uggugaagagggaggaauu

SEQ ID NO: 2250772 - RNA, 19 nt, Homo sapiens
  misc_RNA (1)...(19): siRNA sense strand
aguaugagccagaggcgua

SEQ ID NO: 2250773 - RNA, 19 nt, Homo sapiens
  misc_RNA (1)...(19): siRNA sense strand
aggaggaauaucaggagua

SEQ ID NO: 2250774 - RNA, 19 nt, Homo sapiens
  misc_RNA (1)...(19): siRNA sense strand
agccagaaggggagaguua

SEQ ID NO: 2250775 - RNA, 19 nt, Homo sapiens
  misc_RNA (1)...(19): siRNA sense strand
gaacaucgcagcagccaca

SEQ ID NO: 2250776 - RNA, 19 nt, Homo sapiens
  misc_RNA (1)...(19): siRNA sense strand
caggacuggugaagaggga

SEQ ID NO: 2250777 - RNA, 19 nt, Homo sapiens
  misc_RNA (1)...(19): siRNA sense strand
agaaagaggaaguggcaga

SEQ ID NO: 2250778 - RNA, 19 nt, Homo sapiens
  misc_RNA (1)...(19): siRNA sense strand
agaccaaggagcaggccaa

SEQ ID NO: 2250779 - RNA, 19 nt, Homo sapiens
  misc_RNA (1)...(19): siRNA sense strand
uggaggaggcggagaacau

SEQ ID NO: 2250780 - RNA, 19 nt, Homo sapiens
  misc_RNA (1)...(19): siRNA sense strand
ccgagaagaccaaggagca

SEQ ID NO: 2250781 - RNA, 19 nt, Homo sapiens
  misc_RNA (1)...(19): siRNA sense strand
auccaaagagaaagaggaa

SEQ ID NO: 2250782 - RNA, 19 nt, Homo sapiens
  misc_RNA (1)...(19): siRNA sense strand
aaggaggacuugaggccau

SEQ ID NO: 2250783 - RNA, 19 nt, Homo sapiens
  misc_RNA (1)...(19): siRNA sense strand
agagaaagaggaaguggca

SEQ ID NO: 2250784 - RNA, 19 nt, Homo sapiens
  misc_RNA (1)...(19): siRNA sense strand
ccucaguggccgagaagac

SEQ ID NO: 2250785 - RNA, 19 nt, Homo sapiens
  misc_RNA (1)...(19): siRNA sense strand
ccgaagaugaagaaggaaa

SEQ ID NO: 2250786 - RNA, 19 nt, Homo sapiens
  misc_RNA (1)...(19): siRNA sense strand
gugaaaaggagaaaggaaa

SEQ ID NO: 2250787 - RNA, 19 nt, Homo sapiens
  misc_RNA (1)...(19): siRNA sense strand
gaaaaggagagaaggaaaa

SEQ ID NO: 2250788 - RNA, 19 nt, Homo sapiens
  misc_RNA (1)...(19): siRNA sense strand
ggucuaacugagaaagaaa

SEQ ID NO: 2250789 - RNA, 19 nt, Homo sapiens
  misc_RNA (1)...(19): siRNA sense strand
gacucaaaccaaagggaaa

SEQ ID NO: 2250790 - RNA, 19 nt, Homo sapiens
  misc_RNA (1)...(19): siRNA sense strand
gugaaaaggucuuggaguu

SEQ ID NO: 2250791 - RNA, 19 nt, Homo sapiens
  misc_RNA (1)...(19): siRNA sense strand
augaagaagcagugaugua

SEQ ID NO: 2250792 - RNA, 19 nt, Homo sapiens
  misc_RNA (1)...(19): siRNA sense strand
gguugaaagagaucugaaa

SEQ ID NO: 2250793 - RNA, 19 nt, Homo sapiens
  misc_RNA (1)...(19): siRNA sense strand
cgaagaugaagaaggaaaa

SEQ ID NO: 2250794 - RNA, 19 nt, Homo sapiens
  misc_RNA (1)...(19): siRNA sense strand
agaagaagcugacuggcaa

SEQ ID NO: 2250795 - RNA, 19 nt, Homo sapiens
  misc_RNA (1)...(19): siRNA sense strand
agauaaaccagcagcaaca

SEQ ID NO: 2250796 - RNA, 19 nt, Homo sapiens
  misc_RNA (1)...(19): siRNA sense strand
cuauaacaaucgagcucaa

SEQ ID NO: 2250797 - RNA, 19 nt, Homo sapiens
  misc_RNA (1)...(19): siRNA sense strand
ucauaaaggacucaagaau

SEQ ID NO: 2250798 - RNA, 19 nt, Homo sapiens
  misc_RNA (1)...(19): siRNA sense strand
agaaaaggagagaaggaaa

SEQ ID NO: 2250799 - RNA, 19 nt, Homo sapiens
  misc_RNA (1)...(19): siRNA sense strand
ccgggaagcuacagaagau

SEQ ID NO: 2250800 - RNA, 19 nt, Homo sapiens
  misc_RNA (1)...(19): siRNA sense strand
ggaugguuauucaggaaau

SEQ ID NO: 2250801 - RNA, 19 nt, Homo sapiens
  misc_RNA (1)...(19): siRNA sense strand
accagaagacccugagaaa

SEQ ID NO: 2250802 - RNA, 19 nt, Homo sapiens
  misc_RNA (1)...(19): siRNA sense strand
gcaccauucaacaaagaaa

SEQ ID NO: 2250803 - RNA, 19 nt, Homo sapiens
  misc_RNA (1)...(19): siRNA sense strand
gggauaaauuugacgugga

SEQ ID NO: 2250804 - RNA, 19 nt, Homo sapiens
  misc_RNA (1)...(19): siRNA sense strand
auaaauuugacguggagaa

SEQ ID NO: 2250805 - RNA, 19 nt, Homo sapiens
  misc_RNA (1)...(19): siRNA sense strand
uauuauaccaggagcauau

SEQ ID NO: 2250806 - RNA, 19 nt, Homo sapiens
  misc_RNA (1)...(19): siRNA sense strand
caaagauggaacuggaaga

SEQ ID NO: 2250807 - RNA, 19 nt, Homo sapiens
  misc_RNA (1)...(19): siRNA sense strand
ugauauaaagaguugggua

SEQ ID NO: 2250808 - RNA, 19 nt, Homo sapiens
  misc_RNA (1)...(19): siRNA sense strand
cgggagaagcugucaccua

SEQ ID NO: 2250809 - RNA, 19 nt, Homo sapiens
  misc_RNA (1)...(19): siRNA sense strand
aagaaaacuccaagggauu

SEQ ID NO: 2250810 - RNA, 19 nt, Homo sapiens
  misc_RNA (1)...(19): siRNA sense strand
ggagaaaggaaaugaagcu

SEQ ID NO: 2250811 - RNA, 19 nt, Homo sapiens
  misc_RNA (1)...(19): siRNA sense strand
cgugaaaaggagaaaggaa

SEQ ID NO: 2250812 - RNA, 19 nt, Homo sapiens
  misc_RNA (1)...(19): siRNA sense strand
gaagaagcugacuggcaaa

SEQ ID NO: 2250813 - RNA, 19 nt, Homo sapiens
  misc_RNA (1)...(19): siRNA sense strand
aggcaaagauggaacugga

SEQ ID NO: 2250814 - RNA, 19 nt, Homo sapiens
  misc_RNA (1)...(19): siRNA sense strand
guggagaaggaauguuuaa

SEQ ID NO: 2250815 - RNA, 19 nt, Homo sapiens
  misc_RNA (1)...(19): siRNA sense strand
gagaaggaaaauugagauu

SEQ ID NO: 2250816 - RNA, 19 nt, Homo sapiens
  misc_RNA (1)...(19): siRNA sense strand
cugauaaugauuuggccaa

SEQ ID NO: 2250817 - RNA, 19 nt, Homo sapiens
  misc_RNA (1)...(19): siRNA sense strand
ugggcaacauccagaagaa

SEQ ID NO: 2250818 - RNA, 19 nt, Homo sapiens
  misc_RNA (1)...(19): siRNA sense strand
augaaacucuagagcagua

SEQ ID NO: 2250819 - RNA, 19 nt, Homo sapiens
  misc_RNA (1)...(19): siRNA sense strand
ccuaauaaugccuaugaau

SEQ ID NO: 2250820 - RNA, 19 nt, Homo sapiens
  misc_RNA (1)...(19): siRNA sense strand
cgguaauagacaagucaca

SEQ ID NO: 2250821 - RNA, 19 nt, Homo sapiens
  misc_RNA (1)...(19): siRNA sense strand
cuaugaaacucuagagcag

SEQ ID NO: 2250822 - RNA, 19 nt, Homo sapiens
  misc_RNA (1)...(19): siRNA sense strand
ugaagauggcgguggagau

SEQ ID NO: 2250823 - RNA, 19 nt, Homo sapiens
  misc_RNA (1)...(19): siRNA sense strand
gcagauagacuguggacuc

SEQ ID NO: 2250824 - RNA, 19 nt, Homo sapiens
  misc_RNA (1)...(19): siRNA sense strand
uaacaaacuugaaggggau

SEQ ID NO: 2250825 - RNA, 19 nt, Homo sapiens
  misc_RNA (1)...(19): siRNA sense strand
gaguuggguaucagaaauu

SEQ ID NO: 2250826 - RNA, 19 nt, Homo sapiens
  misc_RNA (1)...(19): siRNA sense strand
gauuacgcggaaugggaua

SEQ ID NO: 2250827 - RNA, 19 nt, Homo sapiens
  misc_RNA (1)...(19): siRNA sense strand
ugaaaaggagaaaggaaau

SEQ ID NO: 2250828 - RNA, 19 nt, Homo sapiens
  misc_RNA (1)...(19): siRNA sense strand
gagcucaagcagaaaucaa

SEQ ID NO: 2250829 - RNA, 19 nt, Homo sapiens
  misc_RNA (1)...(19): siRNA sense strand
cuagcaaaugacaguguua

SEQ ID NO: 2250830 - RNA, 19 nt, Homo sapiens
  misc_RNA (1)...(19): siRNA sense strand
ugacaguguuaacaggcua

SEQ ID NO: 2250831 - RNA, 19 nt, Homo sapiens
  misc_RNA (1)...(19): siRNA sense strand
cucaguaaauacagcgaau

SEQ ID NO: 2250832 - RNA, 19 nt, Homo sapiens
  misc_RNA (1)...(19): siRNA sense strand
cucaguaccaggaaggaua

SEQ ID NO: 2250833 - RNA, 19 nt, Homo sapiens
  misc_RNA (1)...(19): siRNA sense strand
cagaagaagcugacuggca

SEQ ID NO: 2250834 - RNA, 19 nt, Homo sapiens
  misc_RNA (1)...(19): siRNA sense strand
gagccagcaggaagugaaa

SEQ ID NO: 2250835 - RNA, 19 nt, Homo sapiens
  misc_RNA (1)...(19): siRNA sense strand
aagugaaauugcagaugau

SEQ ID NO: 2250836 - RNA, 19 nt, Homo sapiens
  misc_RNA (1)...(19): siRNA sense strand
guaacaaacuugaagggga

SEQ ID NO: 2250837 - RNA, 19 nt, Homo sapiens
  misc_RNA (1)...(19): siRNA sense strand
gaggaaagauaaaccagca

SEQ ID NO: 2250838 - RNA, 19 nt, Homo sapiens
  misc_RNA (1)...(19): siRNA sense strand
cugagaaagaaaaggauuu

SEQ ID NO: 2250839 - RNA, 19 nt, Homo sapiens
  misc_RNA (1)...(19): siRNA sense strand
cggaagaaaacaugaagau

SEQ ID NO: 2250840 - RNA, 19 nt, Homo sapiens
  misc_RNA (1)...(19): siRNA sense strand
gauggaacuggaagaggua

SEQ ID NO: 2250841 - RNA, 19 nt, Homo sapiens
  misc_RNA (1)...(19): siRNA sense strand
aauuugacguggagaagga

SEQ ID NO: 2250842 - RNA, 19 nt, Homo sapiens
  misc_RNA (1)...(19): siRNA sense strand
aaggaugguuauucaggaa

SEQ ID NO: 2250843 - RNA, 19 nt, Homo sapiens
  misc_RNA (1)...(19): siRNA sense strand
gggaaagcuuauguggauu

SEQ ID NO: 2250844 - RNA, 19 nt, Homo sapiens
  misc_RNA (1)...(19): siRNA sense strand
auaccugaguaaagcagaa

SEQ ID NO: 2250845 - RNA, 19 nt, Homo sapiens
  misc_RNA (1)...(19): siRNA sense strand
ccgaagaugaagaaggaaa

SEQ ID NO: 2250846 - RNA, 19 nt, Homo sapiens
  misc_RNA (1)...(19): siRNA sense strand
gugaaaaggagaaaggaaa

SEQ ID NO: 2250847 - RNA, 19 nt, Homo sapiens
  misc_RNA (1)...(19): siRNA sense strand
gaaaaggagagaaggaaaa

SEQ ID NO: 2250848 - RNA, 19 nt, Homo sapiens
  misc_RNA (1)...(19): siRNA sense strand
ggucuaacugagaaagaaa

SEQ ID NO: 2250849 - RNA, 19 nt, Homo sapiens
  misc_RNA (1)...(19): siRNA sense strand
gacucaaaccaaagggaaa

SEQ ID NO: 2250850 - RNA, 19 nt, Homo sapiens
  misc_RNA (1)...(19): siRNA sense strand
gugaaaaggucuuggaguu

SEQ ID NO: 2250851 - RNA, 19 nt, Homo sapiens
  misc_RNA (1)...(19): siRNA sense strand
augaagaagcagugaugua

SEQ ID NO: 2250852 - RNA, 19 nt, Homo sapiens
  misc_RNA (1)...(19): siRNA sense strand
gguugaaagagaucugaaa

SEQ ID NO: 2250853 - RNA, 19 nt, Homo sapiens
  misc_RNA (1)...(19): siRNA sense strand
cgaagaugaagaaggaaaa

SEQ ID NO: 2250854 - RNA, 19 nt, Homo sapiens
  misc_RNA (1)...(19): siRNA sense strand
agaagaagcugacuggcaa

SEQ ID NO: 2250855 - RNA, 19 nt, Homo sapiens
  misc_RNA (1)...(19): siRNA sense strand
agauaaaccagcagcaaca

SEQ ID NO: 2250856 - RNA, 19 nt, Homo sapiens
  misc_RNA (1)...(19): siRNA sense strand
cuauaacaaucgagcucaa

SEQ ID NO: 2250857 - RNA, 19 nt, Homo sapiens
  misc_RNA (1)...(19): siRNA sense strand
ucauaaaggacucaagaau

SEQ ID NO: 2250858 - RNA, 19 nt, Homo sapiens
  misc_RNA (1)...(19): siRNA sense strand
agaaaaggagagaaggaaa

SEQ ID NO: 2250859 - RNA, 19 nt, Homo sapiens
  misc_RNA (1)...(19): siRNA sense strand
ccgggaagcuacagaagau

SEQ ID NO: 2250860 - RNA, 19 nt, Homo sapiens
  misc_RNA (1)...(19): siRNA sense strand
ggaugguuauucaggaaau

SEQ ID NO: 2250861 - RNA, 19 nt, Homo sapiens
  misc_RNA (1)...(19): siRNA sense strand
accagaagacccugagaaa

SEQ ID NO: 2250862 - RNA, 19 nt, Homo sapiens
  misc_RNA (1)...(19): siRNA sense strand
gcaccauucaacaaagaaa

SEQ ID NO: 2250863 - RNA, 19 nt, Homo sapiens
  misc_RNA (1)...(19): siRNA sense strand
gggauaaauuugacgugga

SEQ ID NO: 2250864 - RNA, 19 nt, Homo sapiens
  misc_RNA (1)...(19): siRNA sense strand
auaaauuugacguggagaa

SEQ ID NO: 2250865 - RNA, 19 nt, Homo sapiens
  misc_RNA (1)...(19): siRNA sense strand
uauuauaccaggagcauau

SEQ ID NO: 2250866 - RNA, 19 nt, Homo sapiens
  misc_RNA (1)...(19): siRNA sense strand
caaagauggaacuggaaga

SEQ ID NO: 2250867 - RNA, 19 nt, Homo sapiens
  misc_RNA (1)...(19): siRNA sense strand
ugauauaaagaguugggua

SEQ ID NO: 2250868 - RNA, 19 nt, Homo sapiens
  misc_RNA (1)...(19): siRNA sense strand
cgggagaagcugucaccua

SEQ ID NO: 2250869 - RNA, 19 nt, Homo sapiens
  misc_RNA (1)...(19): siRNA sense strand
aagaaaacuccaagggauu

SEQ ID NO: 2250870 - RNA, 19 nt, Homo sapiens
  misc_RNA (1)...(19): siRNA sense strand
ggagaaaggaaaugaagcu

SEQ ID NO: 2250871 - RNA, 19 nt, Homo sapiens
  misc_RNA (1)...(19): siRNA sense strand
cgugaaaaggagaaaggaa

SEQ ID NO: 2250872 - RNA, 19 nt, Homo sapiens
  misc_RNA (1)...(19): siRNA sense strand
gaagaagcugacuggcaaa

SEQ ID NO: 2250873 - RNA, 19 nt, Homo sapiens
  misc_RNA (1)...(19): siRNA sense strand
aggcaaagauggaacugga

SEQ ID NO: 2250874 - RNA, 19 nt, Homo sapiens
  misc_RNA (1)...(19): siRNA sense strand
guggagaaggaauguuuaa

SEQ ID NO: 2250875 - RNA, 19 nt, Homo sapiens
  misc_RNA (1)...(19): siRNA sense strand
gagaaggaaaauugagauu

SEQ ID NO: 2250876 - RNA, 19 nt, Homo sapiens
  misc_RNA (1)...(19): siRNA sense strand
cugauaaugauuuggccaa

SEQ ID NO: 2250877 - RNA, 19 nt, Homo sapiens
  misc_RNA (1)...(19): siRNA sense strand
ugggcaacauccagaagaa

SEQ ID NO: 2250878 - RNA, 19 nt, Homo sapiens
  misc_RNA (1)...(19): siRNA sense strand
augaaacucuagagcagua

SEQ ID NO: 2250879 - RNA, 19 nt, Homo sapiens
  misc_RNA (1)...(19): siRNA sense strand
ccuaauaaugccuaugaau

SEQ ID NO: 2250880 - RNA, 19 nt, Homo sapiens
  misc_RNA (1)...(19): siRNA sense strand
cgguaauagacaagucaca

SEQ ID NO: 2250881 - RNA, 19 nt, Homo sapiens
  misc_RNA (1)...(19): siRNA sense strand
cuaugaaacucuagagcag

SEQ ID NO: 2250882 - RNA, 19 nt, Homo sapiens
  misc_RNA (1)...(19): siRNA sense strand
ugaagauggcgguggagau

SEQ ID NO: 2250883 - RNA, 19 nt, Homo sapiens
  misc_RNA (1)...(19): siRNA sense strand
gcagauagacuguggacuc

SEQ ID NO: 2250884 - RNA, 19 nt, Homo sapiens
  misc_RNA (1)...(19): siRNA sense strand
uaacaaacuugaaggggau

SEQ ID NO: 2250885 - RNA, 19 nt, Homo sapiens
  misc_RNA (1)...(19): siRNA sense strand
gaguuggguaucagaaauu

SEQ ID NO: 2250886 - RNA, 19 nt, Homo sapiens
  misc_RNA (1)...(19): siRNA sense strand
gauuacgcggaaugggaua

SEQ ID NO: 2250887 - RNA, 19 nt, Homo sapiens
  misc_RNA (1)...(19): siRNA sense strand
ugaaaaggagaaaggaaau

SEQ ID NO: 2250888 - RNA, 19 nt, Homo sapiens
  misc_RNA (1)...(19): siRNA sense strand
gagcucaagcagaaaucaa

SEQ ID NO: 2250889 - RNA, 19 nt, Homo sapiens
  misc_RNA (1)...(19): siRNA sense strand
cuagcaaaugacaguguua

SEQ ID NO: 2250890 - RNA, 19 nt, Homo sapiens
  misc_RNA (1)...(19): siRNA sense strand
ugacaguguuaacaggcua

SEQ ID NO: 2250891 - RNA, 19 nt, Homo sapiens
  misc_RNA (1)...(19): siRNA sense strand
cucaguaaauacagcgaau

SEQ ID NO: 2250892 - RNA, 19 nt, Homo sapiens
  misc_RNA (1)...(19): siRNA sense strand
cucaguaccaggaaggaua

SEQ ID NO: 2250893 - RNA, 19 nt, Homo sapiens
  misc_RNA (1)...(19): siRNA sense strand
cagaagaagcugacuggca

SEQ ID NO: 2250894 - RNA, 19 nt, Homo sapiens
  misc_RNA (1)...(19): siRNA sense strand
gagccagcaggaagugaaa

SEQ ID NO: 2250895 - RNA, 19 nt, Homo sapiens
  misc_RNA (1)...(19): siRNA sense strand
aagugaaauugcagaugau

SEQ ID NO: 2250896 - RNA, 19 nt, Homo sapiens
  misc_RNA (1)...(19): siRNA sense strand
guaacaaacuugaagggga

SEQ ID NO: 2250897 - RNA, 19 nt, Homo sapiens
  misc_RNA (1)...(19): siRNA sense strand
gaggaaagauaaaccagca

SEQ ID NO: 2250898 - RNA, 19 nt, Homo sapiens
  misc_RNA (1)...(19): siRNA sense strand
cugagaaagaaaaggauuu

SEQ ID NO: 2250899 - RNA, 19 nt, Homo sapiens
  misc_RNA (1)...(19): siRNA sense strand
cggaagaaaacaugaagau

SEQ ID NO: 2250900 - RNA, 19 nt, Homo sapiens
  misc_RNA (1)...(19): siRNA sense strand
gauggaacuggaagaggua

SEQ ID NO: 2250901 - RNA, 19 nt, Homo sapiens
  misc_RNA (1)...(19): siRNA sense strand
aauuugacguggagaagga

SEQ ID NO: 2250902 - RNA, 19 nt, Homo sapiens
  misc_RNA (1)...(19): siRNA sense strand
aaggaugguuauucaggaa

SEQ ID NO: 2250903 - RNA, 19 nt, Homo sapiens
  misc_RNA (1)...(19): siRNA sense strand
gggaaagcuuauguggauu

SEQ ID NO: 2250904 - RNA, 19 nt, Homo sapiens
  misc_RNA (1)...(19): siRNA sense strand
auaccugaguaaagcagaa

SEQ ID NO: 2250905 - RNA, 19 nt, Homo sapiens
  misc_RNA (1)...(19): siRNA sense strand
gagaaugaaccuaaggaga

SEQ ID NO: 2250906 - RNA, 19 nt, Homo sapiens
  misc_RNA (1)...(19): siRNA sense strand
acgauuacgcagacaggaa

SEQ ID NO: 2250907 - RNA, 19 nt, Homo sapiens
  misc_RNA (1)...(19): siRNA sense strand
gcaggaagcucucagcaga

SEQ ID NO: 2250908 - RNA, 19 nt, Homo sapiens
  misc_RNA (1)...(19): siRNA sense strand
cagcaaagggcuccgguca

SEQ ID NO: 2250909 - RNA, 19 nt, Homo sapiens
  misc_RNA (1)...(19): siRNA sense strand
aggugaagauccagauucu

SEQ ID NO: 2250910 - RNA, 19 nt, Homo sapiens
  misc_RNA (1)...(19): siRNA sense strand
ccugggaauugcugggcuu

SEQ ID NO: 2250911 - RNA, 19 nt, Homo sapiens
  misc_RNA (1)...(19): siRNA sense strand
caggaagcucucagcagaa

SEQ ID NO: 2250912 - RNA, 19 nt, Homo sapiens
  misc_RNA (1)...(19): siRNA sense strand
cagccaacagcgagagagu

SEQ ID NO: 2250913 - RNA, 19 nt, Homo sapiens
  misc_RNA (1)...(19): siRNA sense strand
gaaccuaaggagaugcuga

SEQ ID NO: 2250914 - RNA, 19 nt, Homo sapiens
  misc_RNA (1)...(19): siRNA sense strand
cuuuggagaaugaaccuaa

SEQ ID NO: 2250915 - RNA, 19 nt, Homo sapiens
  misc_RNA (1)...(19): siRNA sense strand
gggaagaggaagaagaaaa

SEQ ID NO: 2250916 - RNA, 19 nt, Homo sapiens
  misc_RNA (1)...(19): siRNA sense strand
gauuaaaggaagaagacau

SEQ ID NO: 2250917 - RNA, 19 nt, Homo sapiens
  misc_RNA (1)...(19): siRNA sense strand
cggaacagccacaggagaa

SEQ ID NO: 2250918 - RNA, 19 nt, Homo sapiens
  misc_RNA (1)...(19): siRNA sense strand
gagaauauggagagacaga

SEQ ID NO: 2250919 - RNA, 19 nt, Homo sapiens
  misc_RNA (1)...(19): siRNA sense strand
gaucaaaugaagaggagga

SEQ ID NO: 2250920 - RNA, 19 nt, Homo sapiens
  misc_RNA (1)...(19): siRNA sense strand
aagggaauguugagagaau

SEQ ID NO: 2250921 - RNA, 19 nt, Homo sapiens
  misc_RNA (1)...(19): siRNA sense strand
aaaccaaagacgaggucaa

SEQ ID NO: 2250922 - RNA, 19 nt, Homo sapiens
  misc_RNA (1)...(19): siRNA sense strand
gggaggaagauuggagaaa

SEQ ID NO: 2250923 - RNA, 19 nt, Homo sapiens
  misc_RNA (1)...(19): siRNA sense strand
gggaauguugagagaauau

SEQ ID NO: 2250924 - RNA, 19 nt, Homo sapiens
  misc_RNA (1)...(19): siRNA sense strand
cggaagagugcgauggaga

SEQ ID NO: 2250925 - RNA, 19 nt, Homo sapiens
  misc_RNA (1)...(19): siRNA sense strand
aguccaaagccgaaagaau

SEQ ID NO: 2250926 - RNA, 19 nt, Homo sapiens
  misc_RNA (1)...(19): siRNA sense strand
ggucaagagcugagugcca

SEQ ID NO: 2250927 - RNA, 19 nt, Homo sapiens
  misc_RNA (1)...(19): siRNA sense strand
uccaaauacugcacagaaa

SEQ ID NO: 2250928 - RNA, 19 nt, Homo sapiens
  misc_RNA (1)...(19): siRNA sense strand
uagccaaggaccagacaaa

SEQ ID NO: 2250929 - RNA, 19 nt, Homo sapiens
  misc_RNA (1)...(19): siRNA sense strand
ccagauaugcaguuagaau

SEQ ID NO: 2250930 - RNA, 19 nt, Homo sapiens
  misc_RNA (1)...(19): siRNA sense strand
cagccauaauagaaacuaa

SEQ ID NO: 2250931 - RNA, 19 nt, Homo sapiens
  misc_RNA (1)...(19): siRNA sense strand
cgagaagcggggaggaaaa

SEQ ID NO: 2250932 - RNA, 19 nt, Homo sapiens
  misc_RNA (1)...(19): siRNA sense strand
aaaugaaugcacaaggaaa

SEQ ID NO: 2250933 - RNA, 19 nt, Homo sapiens
  misc_RNA (1)...(19): siRNA sense strand
ucacauuagcacaacgaaa

SEQ ID NO: 2250934 - RNA, 19 nt, Homo sapiens
  misc_RNA (1)...(19): siRNA sense strand
gagcaggugcagaguggaa

SEQ ID NO: 2250935 - RNA, 19 nt, Homo sapiens
  misc_RNA (1)...(19): siRNA sense strand
aagagaagguggaggugga

SEQ ID NO: 2250936 - RNA, 19 nt, Homo sapiens
  misc_RNA (1)...(19): siRNA sense strand
gaagaaagguuuggcguca

SEQ ID NO: 2250937 - RNA, 19 nt, Homo sapiens
  misc_RNA (1)...(19): siRNA sense strand
cucugaagcuugagaucua

SEQ ID NO: 2250938 - RNA, 19 nt, Homo sapiens
  misc_RNA (1)...(19): siRNA sense strand
ggguaggagaguuugcaaa

SEQ ID NO: 2250939 - RNA, 19 nt, Homo sapiens
  misc_RNA (1)...(19): siRNA sense strand
uggcaaagcacuuauggaa

SEQ ID NO: 2250940 - RNA, 19 nt, Homo sapiens
  misc_RNA (1)...(19): siRNA sense strand
agaauagacacgagacaga

SEQ ID NO: 2250941 - RNA, 19 nt, Homo sapiens
  misc_RNA (1)...(19): siRNA sense strand
cugugaaggaggugaugaa

SEQ ID NO: 2250942 - RNA, 19 nt, Homo sapiens
  misc_RNA (1)...(19): siRNA sense strand
ggaugaaaguagaaaagau

SEQ ID NO: 2250943 - RNA, 19 nt, Homo sapiens
  misc_RNA (1)...(19): siRNA sense strand
cuuccaugguggugcuuaa

SEQ ID NO: 2250944 - RNA, 19 nt, Homo sapiens
  misc_RNA (1)...(19): siRNA sense strand
caaaugaagaggaggaaac

SEQ ID NO: 2250945 - RNA, 19 nt, Homo sapiens
  misc_RNA (1)...(19): siRNA sense strand
uaacaaaguuggcgggaug

SEQ ID NO: 2250946 - RNA, 19 nt, Homo sapiens
  misc_RNA (1)...(19): siRNA sense strand
gcagauuaaaggaagaaga

SEQ ID NO: 2250947 - RNA, 19 nt, Homo sapiens
  misc_RNA (1)...(19): siRNA sense strand
ccuauguggucaaguggaa

SEQ ID NO: 2250948 - RNA, 19 nt, Homo sapiens
  misc_RNA (1)...(19): siRNA sense strand
gcgggaagaggaagaagaa

SEQ ID NO: 2250949 - RNA, 19 nt, Homo sapiens
  misc_RNA (1)...(19): siRNA sense strand
agguggagguggagaaugu

SEQ ID NO: 2250950 - RNA, 19 nt, Homo sapiens
  misc_RNA (1)...(19): siRNA sense strand
uauccaaaccauugaagaa

SEQ ID NO: 2250951 - RNA, 19 nt, Homo sapiens
  misc_RNA (1)...(19): siRNA sense strand
agaagguggagguggagaa

SEQ ID NO: 2250952 - RNA, 19 nt, Homo sapiens
  misc_RNA (1)...(19): siRNA sense strand
agucaaagcggaugaaagu

SEQ ID NO: 2250953 - RNA, 19 nt, Homo sapiens
  misc_RNA (1)...(19): siRNA sense strand
gaacaagaucaaggaacaa

SEQ ID NO: 2250954 - RNA, 19 nt, Homo sapiens
  misc_RNA (1)...(19): siRNA sense strand
gcgauauuugggagacuua

SEQ ID NO: 2250955 - RNA, 19 nt, Homo sapiens
  misc_RNA (1)...(19): siRNA sense strand
ugacgauugaggagaggaa

SEQ ID NO: 2250956 - RNA, 19 nt, Homo sapiens
  misc_RNA (1)...(19): siRNA sense strand
uugcaaacgucauagaaaa

SEQ ID NO: 2250957 - RNA, 19 nt, Homo sapiens
  misc_RNA (1)...(19): siRNA sense strand
aggaaggagagacaggaaa

SEQ ID NO: 2250958 - RNA, 19 nt, Homo sapiens
  misc_RNA (1)...(19): siRNA sense strand
gguacaaagcagaaagaag

SEQ ID NO: 2250959 - RNA, 19 nt, Homo sapiens
  misc_RNA (1)...(19): siRNA sense strand
ccggugaauccaaggacua

SEQ ID NO: 2250960 - RNA, 19 nt, Homo sapiens
  misc_RNA (1)...(19): siRNA sense strand
gacacgagacagaggagaa

SEQ ID NO: 2250961 - RNA, 19 nt, Homo sapiens
  misc_RNA (1)...(19): siRNA sense strand
gguagaggguagcgagaac

SEQ ID NO: 2250962 - RNA, 19 nt, Homo sapiens
  misc_RNA (1)...(19): siRNA sense strand
auggagagacagaaagcaa

SEQ ID NO: 2250963 - RNA, 19 nt, Homo sapiens
  misc_RNA (1)...(19): siRNA sense strand
ggaagaggaagaagaaaau

SEQ ID NO: 2250964 - RNA, 19 nt, Homo sapiens
  misc_RNA (1)...(19): siRNA sense strand
ggaagaagaaaaugugcaa

SEQ ID NO: 2250965 - RNA, 19 nt, Homo sapiens
  misc_RNA (1)...(19): siRNA sense strand
guagcgagaacaagggaau

SEQ ID NO: 2250966 - RNA, 19 nt, Homo sapiens
  misc_RNA (1)...(19): siRNA sense strand
caggagaagcucugcaaga

SEQ ID NO: 2250967 - RNA, 19 nt, Homo sapiens
  misc_RNA (1)...(19): siRNA sense strand
ugaugaagccagaugauga

SEQ ID NO: 2250968 - RNA, 19 nt, Homo sapiens
  misc_RNA (1)...(19): siRNA sense strand
agagaucgaaugagaagaa

SEQ ID NO: 2250969 - RNA, 19 nt, Homo sapiens
  misc_RNA (1)...(19): siRNA sense strand
cggaggugcugcugaacau

SEQ ID NO: 2250970 - RNA, 19 nt, Homo sapiens
  misc_RNA (1)...(19): siRNA sense strand
ggagagacagaaagcaaga

SEQ ID NO: 2250971 - RNA, 19 nt, Homo sapiens
  misc_RNA (1)...(19): siRNA sense strand
cagaaagucgagagagcca

SEQ ID NO: 2250972 - RNA, 19 nt, Homo sapiens
  misc_RNA (1)...(19): siRNA sense strand
ggagaagcucugcaagaau

SEQ ID NO: 2250973 - RNA, 19 nt, Homo sapiens
  misc_RNA (1)...(19): siRNA sense strand
cuggcaggauggugaagaa

SEQ ID NO: 2250974 - RNA, 19 nt, Homo sapiens
  misc_RNA (1)...(19): siRNA sense strand
guaaagaaaacuucagcaa

SEQ ID NO: 2250975 - RNA, 19 nt, Homo sapiens
  misc_RNA (1)...(19): siRNA sense strand
uuacguauggcaugggaaa

SEQ ID NO: 2250976 - RNA, 19 nt, Homo sapiens
  misc_RNA (1)...(19): siRNA sense strand
gaagaaaagcggggaggaa

SEQ ID NO: 2250977 - RNA, 19 nt, Homo sapiens
  misc_RNA (1)...(19): siRNA sense strand
gcagagaaguaugggcuga

SEQ ID NO: 2250978 - RNA, 19 nt, Homo sapiens
  misc_RNA (1)...(19): siRNA sense strand
cagaagaggaagccuggaa

SEQ ID NO: 2250979 - RNA, 19 nt, Homo sapiens
  misc_RNA (1)...(19): siRNA sense strand
caagaaguccuguggagau

SEQ ID NO: 2250980 - RNA, 19 nt, Homo sapiens
  misc_RNA (1)...(19): siRNA sense strand
ggaagauaucgaagccaga

SEQ ID NO: 2250981 - RNA, 19 nt, Homo sapiens
  misc_RNA (1)...(19): siRNA sense strand
acucuaagcuuggccgaaa

SEQ ID NO: 2250982 - RNA, 19 nt, Homo sapiens
  misc_RNA (1)...(19): siRNA sense strand
ccucgauacaugagagcca

SEQ ID NO: 2250983 - RNA, 19 nt, Homo sapiens
  misc_RNA (1)...(19): siRNA sense strand
ugggaaaacuauugcucaa

SEQ ID NO: 2250984 - RNA, 19 nt, Homo sapiens
  misc_RNA (1)...(19): siRNA sense strand
uggagauggaugaggacuu

SEQ ID NO: 2250985 - RNA, 19 nt, Homo sapiens
  misc_RNA (1)...(19): siRNA sense strand
caaaagaagaugaacucua

SEQ ID NO: 2250986 - RNA, 19 nt, Homo sapiens
  misc_RNA (1)...(19): siRNA sense strand
gggaagaggaagaagaaaa

SEQ ID NO: 2250987 - RNA, 19 nt, Homo sapiens
  misc_RNA (1)...(19): siRNA sense strand
gauuaaaggaagaagacau

SEQ ID NO: 2250988 - RNA, 19 nt, Homo sapiens
  misc_RNA (1)...(19): siRNA sense strand
cggaacagccacaggagaa

SEQ ID NO: 2250989 - RNA, 19 nt, Homo sapiens
  misc_RNA (1)...(19): siRNA sense strand
gagaauauggagagacaga

SEQ ID NO: 2250990 - RNA, 19 nt, Homo sapiens
  misc_RNA (1)...(19): siRNA sense strand
gaucaaaugaagaggagga

SEQ ID NO: 2250991 - RNA, 19 nt, Homo sapiens
  misc_RNA (1)...(19): siRNA sense strand
aagggaauguugagagaau

SEQ ID NO: 2250992 - RNA, 19 nt, Homo sapiens
  misc_RNA (1)...(19): siRNA sense strand
aaaccaaagacgaggucaa

SEQ ID NO: 2250993 - RNA, 19 nt, Homo sapiens
  misc_RNA (1)...(19): siRNA sense strand
gggaggaagauuggagaaa

SEQ ID NO: 2250994 - RNA, 19 nt, Homo sapiens
  misc_RNA (1)...(19): siRNA sense strand
gggaauguugagagaauau

SEQ ID NO: 2250995 - RNA, 19 nt, Homo sapiens
  misc_RNA (1)...(19): siRNA sense strand
cggaagagugcgauggaga

SEQ ID NO: 2250996 - RNA, 19 nt, Homo sapiens
  misc_RNA (1)...(19): siRNA sense strand
aguccaaagccgaaagaau

SEQ ID NO: 2250997 - RNA, 19 nt, Homo sapiens
  misc_RNA (1)...(19): siRNA sense strand
ggucaagagcugagugcca

SEQ ID NO: 2250998 - RNA, 19 nt, Homo sapiens
  misc_RNA (1)...(19): siRNA sense strand
uccaaauacugcacagaaa

SEQ ID NO: 2250999 - RNA, 19 nt, Homo sapiens
  misc_RNA (1)...(19): siRNA sense strand
uagccaaggaccagacaaa

SEQ ID NO: 2251000 - RNA, 19 nt, Homo sapiens
  misc_RNA (1)...(19): siRNA sense strand
ccagauaugcaguuagaau

SEQ ID NO: 2251001 - RNA, 19 nt, Homo sapiens
  misc_RNA (1)...(19): siRNA sense strand
cagccauaauagaaacuaa

SEQ ID NO: 2251002 - RNA, 19 nt, Homo sapiens
  misc_RNA (1)...(19): siRNA sense strand
cgagaagcggggaggaaaa

SEQ ID NO: 2251003 - RNA, 19 nt, Homo sapiens
  misc_RNA (1)...(19): siRNA sense strand
aaaugaaugcacaaggaaa

SEQ ID NO: 2251004 - RNA, 19 nt, Homo sapiens
  misc_RNA (1)...(19): siRNA sense strand
ucacauuagcacaacgaaa

SEQ ID NO: 2251005 - RNA, 19 nt, Homo sapiens
  misc_RNA (1)...(19): siRNA sense strand
gagcaggugcagaguggaa

SEQ ID NO: 2251006 - RNA, 19 nt, Homo sapiens
  misc_RNA (1)...(19): siRNA sense strand
aagagaagguggaggugga

SEQ ID NO: 2251007 - RNA, 19 nt, Homo sapiens
  misc_RNA (1)...(19): siRNA sense strand
gaagaaagguuuggcguca

SEQ ID NO: 2251008 - RNA, 19 nt, Homo sapiens
  misc_RNA (1)...(19): siRNA sense strand
cucugaagcuugagaucua

SEQ ID NO: 2251009 - RNA, 19 nt, Homo sapiens
  misc_RNA (1)...(19): siRNA sense strand
ggguaggagaguuugcaaa

SEQ ID NO: 2251010 - RNA, 19 nt, Homo sapiens
  misc_RNA (1)...(19): siRNA sense strand
uggcaaagcacuuauggaa

SEQ ID NO: 2251011 - RNA, 19 nt, Homo sapiens
  misc_RNA (1)...(19): siRNA sense strand
agaauagacacgagacaga

SEQ ID NO: 2251012 - RNA, 19 nt, Homo sapiens
  misc_RNA (1)...(19): siRNA sense strand
cugugaaggaggugaugaa

SEQ ID NO: 2251013 - RNA, 19 nt, Homo sapiens
  misc_RNA (1)...(19): siRNA sense strand
ggaugaaaguagaaaagau

SEQ ID NO: 2251014 - RNA, 19 nt, Homo sapiens
  misc_RNA (1)...(19): siRNA sense strand
cuuccaugguggugcuuaa

SEQ ID NO: 2251015 - RNA, 19 nt, Homo sapiens
  misc_RNA (1)...(19): siRNA sense strand
caaaugaagaggaggaaac

SEQ ID NO: 2251016 - RNA, 19 nt, Homo sapiens
  misc_RNA (1)...(19): siRNA sense strand
uaacaaaguuggcgggaug

SEQ ID NO: 2251017 - RNA, 19 nt, Homo sapiens
  misc_RNA (1)...(19): siRNA sense strand
gcagauuaaaggaagaaga

SEQ ID NO: 2251018 - RNA, 19 nt, Homo sapiens
  misc_RNA (1)...(19): siRNA sense strand
ccuauguggucaaguggaa

SEQ ID NO: 2251019 - RNA, 19 nt, Homo sapiens
  misc_RNA (1)...(19): siRNA sense strand
gcgggaagaggaagaagaa

SEQ ID NO: 2251020 - RNA, 19 nt, Homo sapiens
  misc_RNA (1)...(19): siRNA sense strand
agguggagguggagaaugu

SEQ ID NO: 2251021 - RNA, 19 nt, Homo sapiens
  misc_RNA (1)...(19): siRNA sense strand
uauccaaaccauugaagaa

SEQ ID NO: 2251022 - RNA, 19 nt, Homo sapiens
  misc_RNA (1)...(19): siRNA sense strand
agaagguggagguggagaa

SEQ ID NO: 2251023 - RNA, 19 nt, Homo sapiens
  misc_RNA (1)...(19): siRNA sense strand
agucaaagcggaugaaagu

SEQ ID NO: 2251024 - RNA, 19 nt, Homo sapiens
  misc_RNA (1)...(19): siRNA sense strand
gaacaagaucaaggaacaa

SEQ ID NO: 2251025 - RNA, 19 nt, Homo sapiens
  misc_RNA (1)...(19): siRNA sense strand
gcgauauuugggagacuua

SEQ ID NO: 2251026 - RNA, 19 nt, Homo sapiens
  misc_RNA (1)...(19): siRNA sense strand
ugacgauugaggagaggaa

SEQ ID NO: 2251027 - RNA, 19 nt, Homo sapiens
  misc_RNA (1)...(19): siRNA sense strand
uugcaaacgucauagaaaa

SEQ ID NO: 2251028 - RNA, 19 nt, Homo sapiens
  misc_RNA (1)...(19): siRNA sense strand
aggaaggagagacaggaaa

SEQ ID NO: 2251029 - RNA, 19 nt, Homo sapiens
  misc_RNA (1)...(19): siRNA sense strand
gguacaaagcagaaagaag

SEQ ID NO: 2251030 - RNA, 19 nt, Homo sapiens
  misc_RNA (1)...(19): siRNA sense strand
ccggugaauccaaggacua

SEQ ID NO: 2251031 - RNA, 19 nt, Homo sapiens
  misc_RNA (1)...(19): siRNA sense strand
gacacgagacagaggagaa

SEQ ID NO: 2251032 - RNA, 19 nt, Homo sapiens
  misc_RNA (1)...(19): siRNA sense strand
gguagaggguagcgagaac

SEQ ID NO: 2251033 - RNA, 19 nt, Homo sapiens
  misc_RNA (1)...(19): siRNA sense strand
auggagagacagaaagcaa

SEQ ID NO: 2251034 - RNA, 19 nt, Homo sapiens
  misc_RNA (1)...(19): siRNA sense strand
ggaagaggaagaagaaaau

SEQ ID NO: 2251035 - RNA, 19 nt, Homo sapiens
  misc_RNA (1)...(19): siRNA sense strand
ggaagaagaaaaugugcaa

SEQ ID NO: 2251036 - RNA, 19 nt, Homo sapiens
  misc_RNA (1)...(19): siRNA sense strand
guagcgagaacaagggaau

SEQ ID NO: 2251037 - RNA, 19 nt, Homo sapiens
  misc_RNA (1)...(19): siRNA sense strand
caggagaagcucugcaaga

SEQ ID NO: 2251038 - RNA, 19 nt, Homo sapiens
  misc_RNA (1)...(19): siRNA sense strand
ugaugaagccagaugauga

SEQ ID NO: 2251039 - RNA, 19 nt, Homo sapiens
  misc_RNA (1)...(19): siRNA sense strand
agagaucgaaugagaagaa

SEQ ID NO: 2251040 - RNA, 19 nt, Homo sapiens
  misc_RNA (1)...(19): siRNA sense strand
cggaggugcugcugaacau

SEQ ID NO: 2251041 - RNA, 19 nt, Homo sapiens
  misc_RNA (1)...(19): siRNA sense strand
ggagagacagaaagcaaga

SEQ ID NO: 2251042 - RNA, 19 nt, Homo sapiens
  misc_RNA (1)...(19): siRNA sense strand
cagaaagucgagagagcca

SEQ ID NO: 2251043 - RNA, 19 nt, Homo sapiens
  misc_RNA (1)...(19): siRNA sense strand
ggagaagcucugcaagaau

SEQ ID NO: 2251044 - RNA, 19 nt, Homo sapiens
  misc_RNA (1)...(19): siRNA sense strand
cuggcaggauggugaagaa

SEQ ID NO: 2251045 - RNA, 19 nt, Homo sapiens
  misc_RNA (1)...(19): siRNA sense strand
guaaagaaaacuucagcaa

SEQ ID NO: 2251046 - RNA, 19 nt, Homo sapiens
  misc_RNA (1)...(19): siRNA sense strand
uuacguauggcaugggaaa

SEQ ID NO: 2251047 - RNA, 19 nt, Homo sapiens
  misc_RNA (1)...(19): siRNA sense strand
gaagaaaagcggggaggaa

SEQ ID NO: 2251048 - RNA, 19 nt, Homo sapiens
  misc_RNA (1)...(19): siRNA sense strand
gcagagaaguaugggcuga

SEQ ID NO: 2251049 - RNA, 19 nt, Homo sapiens
  misc_RNA (1)...(19): siRNA sense strand
cagaagaggaagccuggaa

SEQ ID NO: 2251050 - RNA, 19 nt, Homo sapiens
  misc_RNA (1)...(19): siRNA sense strand
caagaaguccuguggagau

SEQ ID NO: 2251051 - RNA, 19 nt, Homo sapiens
  misc_RNA (1)...(19): siRNA sense strand
ggaagauaucgaagccaga

SEQ ID NO: 2251052 - RNA, 19 nt, Homo sapiens
  misc_RNA (1)...(19): siRNA sense strand
acucuaagcuuggccgaaa

SEQ ID NO: 2251053 - RNA, 19 nt, Homo sapiens
  misc_RNA (1)...(19): siRNA sense strand
ccucgauacaugagagcca

SEQ ID NO: 2251054 - RNA, 19 nt, Homo sapiens
  misc_RNA (1)...(19): siRNA sense strand
ugggaaaacuauugcucaa

SEQ ID NO: 2251055 - RNA, 19 nt, Homo sapiens
  misc_RNA (1)...(19): siRNA sense strand
uggagauggaugaggacuu

SEQ ID NO: 2251056 - RNA, 19 nt, Homo sapiens
  misc_RNA (1)...(19): siRNA sense strand
caaaagaagaugaacucua

SEQ ID NO: 2251057 - RNA, 19 nt, Homo sapiens
  misc_RNA (1)...(19): siRNA sense strand
acaaagagaugauggagga

SEQ ID NO: 2251058 - RNA, 19 nt, Homo sapiens
  misc_RNA (1)...(19): siRNA sense strand
ccucauagccucauggaca

SEQ ID NO: 2251059 - RNA, 19 nt, Homo sapiens
  misc_RNA (1)...(19): siRNA sense strand
augagaugaucgugaccaa

SEQ ID NO: 2251060 - RNA, 19 nt, Homo sapiens
  misc_RNA (1)...(19): siRNA sense strand
aggaaagaagugaucacaa

SEQ ID NO: 2251061 - RNA, 19 nt, Homo sapiens
  misc_RNA (1)...(19): siRNA sense strand
aguacaauccauuugcaaa

SEQ ID NO: 2251062 - RNA, 19 nt, Homo sapiens
  misc_RNA (1)...(19): siRNA sense strand
gccuguggucugugagcaa

SEQ ID NO: 2251063 - RNA, 19 nt, Homo sapiens
  misc_RNA (1)...(19): siRNA sense strand
gcuucaaggagcucaccaa

SEQ ID NO: 2251064 - RNA, 19 nt, Homo sapiens
  misc_RNA (1)...(19): siRNA sense strand
agaagugaucacaaagaga

SEQ ID NO: 2251065 - RNA, 19 nt, Homo sapiens
  misc_RNA (1)...(19): siRNA sense strand
cagacaucguggacagcca

SEQ ID NO: 2251066 - RNA, 19 nt, Homo sapiens
  misc_RNA (1)...(19): siRNA sense strand
gaggaaaagagaaggauaa

SEQ ID NO: 2251067 - RNA, 19 nt, Homo sapiens
  misc_RNA (1)...(19): siRNA sense strand
aguuaaagguccugaagau

SEQ ID NO: 2251068 - RNA, 19 nt, Homo sapiens
  misc_RNA (1)...(19): siRNA sense strand
cauauuugguggaggaaaa

SEQ ID NO: 2251069 - RNA, 19 nt, Homo sapiens
  misc_RNA (1)...(19): siRNA sense strand
ggauuaaagaggagcuaga

SEQ ID NO: 2251070 - RNA, 19 nt, Homo sapiens
  misc_RNA (1)...(19): siRNA sense strand
aagcaugacaguaaagaaa

SEQ ID NO: 2251071 - RNA, 19 nt, Homo sapiens
  misc_RNA (1)...(19): siRNA sense strand
acugaugaauggagaagaa

SEQ ID NO: 2251072 - RNA, 19 nt, Homo sapiens
  misc_RNA (1)...(19): siRNA sense strand
gagaagaaguugauaugga

SEQ ID NO: 2251073 - RNA, 19 nt, Homo sapiens
  misc_RNA (1)...(19): siRNA sense strand
caguguuucuacagaguaa

SEQ ID NO: 2251074 - RNA, 19 nt, Homo sapiens
  misc_RNA (1)...(19): siRNA sense strand
guacaaugacaacaggaaa

SEQ ID NO: 2251075 - RNA, 19 nt, Homo sapiens
  misc_RNA (1)...(19): siRNA sense strand
gggaaguauggcagagaga

SEQ ID NO: 2251076 - RNA, 19 nt, Homo sapiens
  misc_RNA (1)...(19): siRNA sense strand
agaucagaguggaguggua

SEQ ID NO: 2251077 - RNA, 19 nt, Homo sapiens
  misc_RNA (1)...(19): siRNA sense strand
ggauaaggauagacccaga

SEQ ID NO: 2251078 - RNA, 19 nt, Homo sapiens
  misc_RNA (1)...(19): siRNA sense strand
cuuccgaguuacaggcaua

SEQ ID NO: 2251079 - RNA, 19 nt, Homo sapiens
  misc_RNA (1)...(19): siRNA sense strand
acggaagggaacagguaaa

SEQ ID NO: 2251080 - RNA, 19 nt, Homo sapiens
  misc_RNA (1)...(19): siRNA sense strand
agcauaagcaugacaguaa

SEQ ID NO: 2251081 - RNA, 19 nt, Homo sapiens
  misc_RNA (1)...(19): siRNA sense strand
agaaaggagacaagggcuu

SEQ ID NO: 2251082 - RNA, 19 nt, Homo sapiens
  misc_RNA (1)...(19): siRNA sense strand
agcaaacaguguagaauau

SEQ ID NO: 2251083 - RNA, 19 nt, Homo sapiens
  misc_RNA (1)...(19): siRNA sense strand
cuccagggcucucgaaaua

SEQ ID NO: 2251084 - RNA, 19 nt, Homo sapiens
  misc_RNA (1)...(19): siRNA sense strand
guucauaaucuuuguccua

SEQ ID NO: 2251085 - RNA, 19 nt, Homo sapiens
  misc_RNA (1)...(19): siRNA sense strand
cugcagucagugugaauaa

SEQ ID NO: 2251086 - RNA, 19 nt, Homo sapiens
  misc_RNA (1)...(19): siRNA sense strand
gcgauuugguggagacagu

SEQ ID NO: 2251087 - RNA, 19 nt, Homo sapiens
  misc_RNA (1)...(19): siRNA sense strand
ggaggaaaagagaaggaua

SEQ ID NO: 2251088 - RNA, 19 nt, Homo sapiens
  misc_RNA (1)...(19): siRNA sense strand
uagacaaaauaguggcaua

SEQ ID NO: 2251089 - RNA, 19 nt, Homo sapiens
  misc_RNA (1)...(19): siRNA sense strand
gcaaagauauucagccguu

SEQ ID NO: 2251090 - RNA, 19 nt, Homo sapiens
  misc_RNA (1)...(19): siRNA sense strand
caaccaagaagcugcaaau

SEQ ID NO: 2251091 - RNA, 19 nt, Homo sapiens
  misc_RNA (1)...(19): siRNA sense strand
gaggagauugauauggaua

SEQ ID NO: 2251092 - RNA, 19 nt, Homo sapiens
  misc_RNA (1)...(19): siRNA sense strand
cagaaugaacaggaagaaa

SEQ ID NO: 2251093 - RNA, 19 nt, Homo sapiens
  misc_RNA (1)...(19): siRNA sense strand
gguagaucaacuuuggaaa

SEQ ID NO: 2251094 - RNA, 19 nt, Homo sapiens
  misc_RNA (1)...(19): siRNA sense strand
uuaaagaggagcuagacaa

SEQ ID NO: 2251095 - RNA, 19 nt, Homo sapiens
  misc_RNA (1)...(19): siRNA sense strand
uaccauaauuccagaguca

SEQ ID NO: 2251096 - RNA, 19 nt, Homo sapiens
  misc_RNA (1)...(19): siRNA sense strand
gaacaagcaccuuuggaga

SEQ ID NO: 2251097 - RNA, 19 nt, Homo sapiens
  misc_RNA (1)...(19): siRNA sense strand
aaacauaagcacaaacaca

SEQ ID NO: 2251098 - RNA, 19 nt, Homo sapiens
  misc_RNA (1)...(19): siRNA sense strand
gaugaauggagaagaaguu

SEQ ID NO: 2251099 - RNA, 19 nt, Homo sapiens
  misc_RNA (1)...(19): siRNA sense strand
accaagaagcugcaaauaa

SEQ ID NO: 2251100 - RNA, 19 nt, Homo sapiens
  misc_RNA (1)...(19): siRNA sense strand
aagaugaggaggagauuga

SEQ ID NO: 2251101 - RNA, 19 nt, Homo sapiens
  misc_RNA (1)...(19): siRNA sense strand
agcacaaacacaagcauaa

SEQ ID NO: 2251102 - RNA, 19 nt, Homo sapiens
  misc_RNA (1)...(19): siRNA sense strand
caugauaugaggaagaaaa

SEQ ID NO: 2251103 - RNA, 19 nt, Homo sapiens
  misc_RNA (1)...(19): siRNA sense strand
guuaaagguccugaagaua

SEQ ID NO: 2251104 - RNA, 19 nt, Homo sapiens
  misc_RNA (1)...(19): siRNA sense strand
cagaaguuccagucacaua

SEQ ID NO: 2251105 - RNA, 19 nt, Homo sapiens
  misc_RNA (1)...(19): siRNA sense strand
uccaaaaguagaaggaaua

SEQ ID NO: 2251106 - RNA, 19 nt, Homo sapiens
  misc_RNA (1)...(19): siRNA sense strand
cuacagaguaagaauguca

SEQ ID NO: 2251107 - RNA, 19 nt, Homo sapiens
  misc_RNA (1)...(19): siRNA sense strand
gugaaucaaaacagagaaa

SEQ ID NO: 2251108 - RNA, 19 nt, Homo sapiens
  misc_RNA (1)...(19): siRNA sense strand
ccgccagaaugaacaggaa

SEQ ID NO: 2251109 - RNA, 19 nt, Homo sapiens
  misc_RNA (1)...(19): siRNA sense strand
gaauuguguacauggaaau

SEQ ID NO: 2251110 - RNA, 19 nt, Homo sapiens
  misc_RNA (1)...(19): siRNA sense strand
gcaaacuugaauagaauca

SEQ ID NO: 2251111 - RNA, 19 nt, Homo sapiens
  misc_RNA (1)...(19): siRNA sense strand
gaugaggaggagauugaua

SEQ ID NO: 2251112 - RNA, 19 nt, Homo sapiens
  misc_RNA (1)...(19): siRNA sense strand
agaagaagaagcauaaaca

SEQ ID NO: 2251113 - RNA, 19 nt, Homo sapiens
  misc_RNA (1)...(19): siRNA sense strand
gagaaaaucuguuguggga

SEQ ID NO: 2251114 - RNA, 19 nt, Homo sapiens
  misc_RNA (1)...(19): siRNA sense strand
ugacagugcaggaguuaga

SEQ ID NO: 2251115 - RNA, 19 nt, Homo sapiens
  misc_RNA (1)...(19): siRNA sense strand
cagccuuaaacaugauaua

SEQ ID NO: 2251116 - RNA, 19 nt, Homo sapiens
  misc_RNA (1)...(19): siRNA sense strand
guucuuaaucuaaaggaga

SEQ ID NO: 2251117 - RNA, 19 nt, Homo sapiens
  misc_RNA (1)...(19): siRNA sense strand
gaacuugcacggaagggaa

SEQ ID NO: 2251118 - RNA, 19 nt, Homo sapiens
  misc_RNA (1)...(19): siRNA sense strand
uuucaaaugucucuggcaa

SEQ ID NO: 2251119 - RNA, 19 nt, Homo sapiens
  misc_RNA (1)...(19): siRNA sense strand
aagcauaaacauaagcaca

SEQ ID NO: 2251120 - RNA, 19 nt, Homo sapiens
  misc_RNA (1)...(19): siRNA sense strand
agcauaaacauaagcacaa

SEQ ID NO: 2251121 - RNA, 19 nt, Homo sapiens
  misc_RNA (1)...(19): siRNA sense strand
uagaagguguuuagcccaa

SEQ ID NO: 2251122 - RNA, 19 nt, Homo sapiens
  misc_RNA (1)...(19): siRNA sense strand
gcaaauaauccaagcaguc

SEQ ID NO: 2251123 - RNA, 19 nt, Homo sapiens
  misc_RNA (1)...(19): siRNA sense strand
guauggaauuuaugcuaca

SEQ ID NO: 2251124 - RNA, 19 nt, Homo sapiens
  misc_RNA (1)...(19): siRNA sense strand
auacuaaaguggacagaag

SEQ ID NO: 2251125 - RNA, 19 nt, Homo sapiens
  misc_RNA (1)...(19): siRNA sense strand
caugauuauagaugagaca

SEQ ID NO: 2251126 - RNA, 19 nt, Homo sapiens
  misc_RNA (1)...(19): siRNA sense strand
aaugggugcugaagggaau

SEQ ID NO: 2251127 - RNA, 19 nt, Homo sapiens
  misc_RNA (1)...(19): siRNA sense strand
aagaggagcuagacaaaau

SEQ ID NO: 2251128 - RNA, 19 nt, Homo sapiens
  misc_RNA (1)...(19): siRNA sense strand
ugcaggaaauggagaacuu

SEQ ID NO: 2251129 - RNA, 19 nt, Homo sapiens
  misc_RNA (1)...(19): siRNA sense strand
aaauacugguagauccaua

SEQ ID NO: 2251130 - RNA, 19 nt, Homo sapiens
  misc_RNA (1)...(19): siRNA sense strand
acgagaaaguggugagcga

SEQ ID NO: 2251131 - RNA, 19 nt, Homo sapiens
  misc_RNA (1)...(19): siRNA sense strand
ggcugaaacagaaggcaaa

SEQ ID NO: 2251132 - RNA, 19 nt, Homo sapiens
  misc_RNA (1)...(19): siRNA sense strand
ccacggaaacuauggaaaa

SEQ ID NO: 2251133 - RNA, 19 nt, Homo sapiens
  misc_RNA (1)...(19): siRNA sense strand
aggcugaaacagaaggcaa

SEQ ID NO: 2251134 - RNA, 19 nt, Homo sapiens
  misc_RNA (1)...(19): siRNA sense strand
aaacagaaggcaaaggaga

SEQ ID NO: 2251135 - RNA, 19 nt, Homo sapiens
  misc_RNA (1)...(19): siRNA sense strand
agacaguucacgcgacaaa

SEQ ID NO: 2251136 - RNA, 19 nt, Homo sapiens
  misc_RNA (1)...(19): siRNA sense strand
agaaaaugaacgugagaca

SEQ ID NO: 2251137 - RNA, 19 nt, Homo sapiens
  misc_RNA (1)...(19): siRNA sense strand
gcgccuuugcagagaagaa

SEQ ID NO: 2251138 - RNA, 19 nt, Homo sapiens
  misc_RNA (1)...(19): siRNA sense strand
caaagaaucacgcggguca

SEQ ID NO: 2251139 - RNA, 19 nt, Homo sapiens
  misc_RNA (1)...(19): siRNA sense strand
ccagaacaguuaaggcuga

SEQ ID NO: 2251140 - RNA, 19 nt, Homo sapiens
  misc_RNA (1)...(19): siRNA sense strand
aaacaugguauaacggaau

SEQ ID NO: 2251141 - RNA, 19 nt, Homo sapiens
  misc_RNA (1)...(19): siRNA sense strand
cagcgagguggacgagaaa

SEQ ID NO: 2251142 - RNA, 19 nt, Homo sapiens
  misc_RNA (1)...(19): siRNA sense strand
aggcaaaggagaugcagca

SEQ ID NO: 2251143 - RNA, 19 nt, Homo sapiens
  misc_RNA (1)...(19): siRNA sense strand
gcgagguggacgagaaagu

SEQ ID NO: 2251144 - RNA, 19 nt, Homo sapiens
  misc_RNA (1)...(19): siRNA sense strand
gaauuuacuggauggaaaa

SEQ ID NO: 2251145 - RNA, 19 nt, Homo sapiens
  misc_RNA (1)...(19): siRNA sense strand
gcucggaucugcuggacga

SEQ ID NO: 2251146 - RNA, 19 nt, Homo sapiens
  misc_RNA (1)...(19): siRNA sense strand
cagcuugaucaaaucgaaa

SEQ ID NO: 2251147 - RNA, 19 nt, Homo sapiens
  misc_RNA (1)...(19): siRNA sense strand
aggaugagcaggagcggga

SEQ ID NO: 2251148 - RNA, 19 nt, Homo sapiens
  misc_RNA (1)...(19): siRNA sense strand
uggaaaacgugaagaaaug

SEQ ID NO: 2251149 - RNA, 19 nt, Homo sapiens
  misc_RNA (1)...(19): siRNA sense strand
agaggaaggaugagcagga

SEQ ID NO: 2251150 - RNA, 19 nt, Homo sapiens
  misc_RNA (1)...(19): siRNA sense strand
ccagacaguucacgcgaca

SEQ ID NO: 2251151 - RNA, 19 nt, Homo sapiens
  misc_RNA (1)...(19): siRNA sense strand
gucagaagaaagugcaaga

SEQ ID NO: 2251152 - RNA, 19 nt, Homo sapiens
  misc_RNA (1)...(19): siRNA sense strand
gcaucgauggcuggaguaa

SEQ ID NO: 2251153 - RNA, 19 nt, Homo sapiens
  misc_RNA (1)...(19): siRNA sense strand
cugucagccuggucaacaa

SEQ ID NO: 2251154 - RNA, 19 nt, Homo sapiens
  misc_RNA (1)...(19): siRNA sense strand
cuauggaaaacgugaagaa

SEQ ID NO: 2251155 - RNA, 19 nt, Homo sapiens
  misc_RNA (1)...(19): siRNA sense strand
ucuacaaagcauuccuuaa

SEQ ID NO: 2251156 - RNA, 19 nt, Homo sapiens
  misc_RNA (1)...(19): siRNA sense strand
aguaaacuugucagaagaa

SEQ ID NO: 2251157 - RNA, 19 nt, Homo sapiens
  misc_RNA (1)...(19): siRNA sense strand
cagcauggucaucgggcca

SEQ ID NO: 2251158 - RNA, 19 nt, Homo sapiens
  misc_RNA (1)...(19): siRNA sense strand
ccucguccgaagugagaau

SEQ ID NO: 2251159 - RNA, 19 nt, Homo sapiens
  misc_RNA (1)...(19): siRNA sense strand
cuaccauaauuaagcaagu

SEQ ID NO: 2251160 - RNA, 19 nt, Homo sapiens
  misc_RNA (1)...(19): siRNA sense strand
gccacggaaacuauggaaa

SEQ ID NO: 2251161 - RNA, 19 nt, Homo sapiens
  misc_RNA (1)...(19): siRNA sense strand
aguccaaaaucgagaagaa

SEQ ID NO: 2251162 - RNA, 19 nt, Homo sapiens
  misc_RNA (1)...(19): siRNA sense strand
gggaauucacagagagcca

SEQ ID NO: 2251163 - RNA, 19 nt, Homo sapiens
  misc_RNA (1)...(19): siRNA sense strand
ccaaaaucgagaagaagua

SEQ ID NO: 2251164 - RNA, 19 nt, Homo sapiens
  misc_RNA (1)...(19): siRNA sense strand
ugaagaaagcgcaggagca

SEQ ID NO: 2251165 - RNA, 19 nt, Homo sapiens
  misc_RNA (1)...(19): siRNA sense strand
caggagcauaagagggaau

SEQ ID NO: 2251166 - RNA, 19 nt, Homo sapiens
  misc_RNA (1)...(19): siRNA sense strand
gccagcugcaggagggaaa

SEQ ID NO: 2251167 - RNA, 19 nt, Homo sapiens
  misc_RNA (1)...(19): siRNA sense strand
gcaaagacauggcagcagu

SEQ ID NO: 2251168 - RNA, 19 nt, Homo sapiens
  misc_RNA (1)...(19): siRNA sense strand
agaagaaguaugacgagga

SEQ ID NO: 2251169 - RNA, 19 nt, Homo sapiens
  misc_RNA (1)...(19): siRNA sense strand
cagaggacccugauggcuu

SEQ ID NO: 2251170 - RNA, 19 nt, Homo sapiens
  misc_RNA (1)...(19): siRNA sense strand
cuucagaugggcagcaaca

SEQ ID NO: 2251171 - RNA, 19 nt, Homo sapiens
  misc_RNA (1)...(19): siRNA sense strand
cacacuaggcaaagaacuu

SEQ ID NO: 2251172 - RNA, 19 nt, Homo sapiens
  misc_RNA (1)...(19): siRNA sense strand
ggguauuauucuuugggaa

SEQ ID NO: 2251173 - RNA, 19 nt, Homo sapiens
  misc_RNA (1)...(19): siRNA sense strand
agugauaacgcgucggaaa

SEQ ID NO: 2251174 - RNA, 19 nt, Homo sapiens
  misc_RNA (1)...(19): siRNA sense strand
cagaugaaggacagagcaa

SEQ ID NO: 2251175 - RNA, 19 nt, Homo sapiens
  misc_RNA (1)...(19): siRNA sense strand
augaaaaggaccagcaaaa

SEQ ID NO: 2251176 - RNA, 19 nt, Homo sapiens
  misc_RNA (1)...(19): siRNA sense strand
uggaggaaauugugaaaau

SEQ ID NO: 2251177 - RNA, 19 nt, Homo sapiens
  misc_RNA (1)...(19): siRNA sense strand
acaaggagaucgaggugga

SEQ ID NO: 2251178 - RNA, 19 nt, Homo sapiens
  misc_RNA (1)...(19): siRNA sense strand
uggaagagguuguuggaag

SEQ ID NO: 2251179 - RNA, 19 nt, Homo sapiens
  misc_RNA (1)...(19): siRNA sense strand
ggagcaaguuccugccaca

SEQ ID NO: 2251180 - RNA, 19 nt, Homo sapiens
  misc_RNA (1)...(19): siRNA sense strand
gcagaaacgacaaggcacu

SEQ ID NO: 2251181 - RNA, 19 nt, Homo sapiens
  misc_RNA (1)...(19): siRNA sense strand
ucuacaaauacgaguaaca

SEQ ID NO: 2251182 - RNA, 19 nt, Homo sapiens
  misc_RNA (1)...(19): siRNA sense strand
ucagauaacuccaucccaa

SEQ ID NO: 2251183 - RNA, 19 nt, Homo sapiens
  misc_RNA (1)...(19): siRNA sense strand
aggagaucgagguggaaga

SEQ ID NO: 2251184 - RNA, 19 nt, Homo sapiens
  misc_RNA (1)...(19): siRNA sense strand
gaugaaggacagagcaacu

SEQ ID NO: 2251185 - RNA, 19 nt, Homo sapiens
  misc_RNA (1)...(19): siRNA sense strand
ucugagggcaagaggauga

SEQ ID NO: 2251186 - RNA, 19 nt, Homo sapiens
  misc_RNA (1)...(19): siRNA sense strand
cagccaagacguagaucca

SEQ ID NO: 2251187 - RNA, 19 nt, Homo sapiens
  misc_RNA (1)...(19): siRNA sense strand
caugcaacccaaagcgcua

SEQ ID NO: 2251188 - RNA, 19 nt, Homo sapiens
  misc_RNA (1)...(19): siRNA sense strand
ccuuuggaguuguuugcaa

SEQ ID NO: 2251189 - RNA, 19 nt, Homo sapiens
  misc_RNA (1)...(19): siRNA sense strand
gguauuauucuuugggaag

SEQ ID NO: 2251190 - RNA, 19 nt, Homo sapiens
  misc_RNA (1)...(19): siRNA sense strand
gagaucgacuacaaggaga

SEQ ID NO: 2251191 - RNA, 19 nt, Homo sapiens
  misc_RNA (1)...(19): siRNA sense strand
aauggaggaaauugugaaa

SEQ ID NO: 2251192 - RNA, 19 nt, Homo sapiens
  misc_RNA (1)...(19): siRNA sense strand
ugaaauagaagcuaggauc

SEQ ID NO: 2251193 - RNA, 19 nt, Homo sapiens
  misc_RNA (1)...(19): siRNA sense strand
guucccaaggaguggcuua

SEQ ID NO: 2251194 - RNA, 19 nt, Homo sapiens
  misc_RNA (1)...(19): siRNA sense strand
caggugagcaguaggucau

SEQ ID NO: 2251195 - RNA, 19 nt, Homo sapiens
  misc_RNA (1)...(19): siRNA sense strand
cguuguuggucuaaagauc

SEQ ID NO: 2251196 - RNA, 19 nt, Homo sapiens
  misc_RNA (1)...(19): siRNA sense strand
gcuucuacaaauacgagua

SEQ ID NO: 2251197 - RNA, 19 nt, Homo sapiens
  misc_RNA (1)...(19): siRNA sense strand
ugacacuaauauggagcaa

SEQ ID NO: 2251198 - RNA, 19 nt, Homo sapiens
  misc_RNA (1)...(19): siRNA sense strand
uguuggaagaggagccuuu

SEQ ID NO: 2251199 - RNA, 19 nt, Homo sapiens
  misc_RNA (1)...(19): siRNA sense strand
uugcaaagcuaaguggaga

SEQ ID NO: 2251200 - RNA, 19 nt, Homo sapiens
  misc_RNA (1)...(19): siRNA sense strand
ggguauuauucuuugggaa

SEQ ID NO: 2251201 - RNA, 19 nt, Homo sapiens
  misc_RNA (1)...(19): siRNA sense strand
agugauaacgcgucggaaa

SEQ ID NO: 2251202 - RNA, 19 nt, Homo sapiens
  misc_RNA (1)...(19): siRNA sense strand
cagaugaaggacagagcaa

SEQ ID NO: 2251203 - RNA, 19 nt, Homo sapiens
  misc_RNA (1)...(19): siRNA sense strand
augaaaaggaccagcaaaa

SEQ ID NO: 2251204 - RNA, 19 nt, Homo sapiens
  misc_RNA (1)...(19): siRNA sense strand
uggaggaaauugugaaaau

SEQ ID NO: 2251205 - RNA, 19 nt, Homo sapiens
  misc_RNA (1)...(19): siRNA sense strand
acaaggagaucgaggugga

SEQ ID NO: 2251206 - RNA, 19 nt, Homo sapiens
  misc_RNA (1)...(19): siRNA sense strand
uggaagagguuguuggaag

SEQ ID NO: 2251207 - RNA, 19 nt, Homo sapiens
  misc_RNA (1)...(19): siRNA sense strand
ggagcaaguuccugccaca

SEQ ID NO: 2251208 - RNA, 19 nt, Homo sapiens
  misc_RNA (1)...(19): siRNA sense strand
gcagaaacgacaaggcacu

SEQ ID NO: 2251209 - RNA, 19 nt, Homo sapiens
  misc_RNA (1)...(19): siRNA sense strand
ucuacaaauacgaguaaca

SEQ ID NO: 2251210 - RNA, 19 nt, Homo sapiens
  misc_RNA (1)...(19): siRNA sense strand
ucagauaacuccaucccaa

SEQ ID NO: 2251211 - RNA, 19 nt, Homo sapiens
  misc_RNA (1)...(19): siRNA sense strand
aggagaucgagguggaaga

SEQ ID NO: 2251212 - RNA, 19 nt, Homo sapiens
  misc_RNA (1)...(19): siRNA sense strand
gaugaaggacagagcaacu

SEQ ID NO: 2251213 - RNA, 19 nt, Homo sapiens
  misc_RNA (1)...(19): siRNA sense strand
ucugagggcaagaggauga

SEQ ID NO: 2251214 - RNA, 19 nt, Homo sapiens
  misc_RNA (1)...(19): siRNA sense strand
cagccaagacguagaucca

SEQ ID NO: 2251215 - RNA, 19 nt, Homo sapiens
  misc_RNA (1)...(19): siRNA sense strand
caugcaacccaaagcgcua

SEQ ID NO: 2251216 - RNA, 19 nt, Homo sapiens
  misc_RNA (1)...(19): siRNA sense strand
ccuuuggaguuguuugcaa

SEQ ID NO: 2251217 - RNA, 19 nt, Homo sapiens
  misc_RNA (1)...(19): siRNA sense strand
gguauuauucuuugggaag

SEQ ID NO: 2251218 - RNA, 19 nt, Homo sapiens
  misc_RNA (1)...(19): siRNA sense strand
gagaucgacuacaaggaga

SEQ ID NO: 2251219 - RNA, 19 nt, Homo sapiens
  misc_RNA (1)...(19): siRNA sense strand
aauggaggaaauugugaaa

SEQ ID NO: 2251220 - RNA, 19 nt, Homo sapiens
  misc_RNA (1)...(19): siRNA sense strand
ugaaauagaagcuaggauc

SEQ ID NO: 2251221 - RNA, 19 nt, Homo sapiens
  misc_RNA (1)...(19): siRNA sense strand
guucccaaggaguggcuua

SEQ ID NO: 2251222 - RNA, 19 nt, Homo sapiens
  misc_RNA (1)...(19): siRNA sense strand
caggugagcaguaggucau

SEQ ID NO: 2251223 - RNA, 19 nt, Homo sapiens
  misc_RNA (1)...(19): siRNA sense strand
cguuguuggucuaaagauc

SEQ ID NO: 2251224 - RNA, 19 nt, Homo sapiens
  misc_RNA (1)...(19): siRNA sense strand
gcuucuacaaauacgagua

SEQ ID NO: 2251225 - RNA, 19 nt, Homo sapiens
  misc_RNA (1)...(19): siRNA sense strand
ugacacuaauauggagcaa

SEQ ID NO: 2251226 - RNA, 19 nt, Homo sapiens
  misc_RNA (1)...(19): siRNA sense strand
uguuggaagaggagccuuu

SEQ ID NO: 2251227 - RNA, 19 nt, Homo sapiens
  misc_RNA (1)...(19): siRNA sense strand
uugcaaagcuaaguggaga

SEQ ID NO: 2251228 - RNA, 19 nt, Homo sapiens
  misc_RNA (1)...(19): siRNA sense strand
ggguauuauucuuugggaa

SEQ ID NO: 2251229 - RNA, 19 nt, Homo sapiens
  misc_RNA (1)...(19): siRNA sense strand
agugauaacgcgucggaaa

SEQ ID NO: 2251230 - RNA, 19 nt, Homo sapiens
  misc_RNA (1)...(19): siRNA sense strand
cagaugaaggacagagcaa

SEQ ID NO: 2251231 - RNA, 19 nt, Homo sapiens
  misc_RNA (1)...(19): siRNA sense strand
uggaggaaauugugaaaau

SEQ ID NO: 2251232 - RNA, 19 nt, Homo sapiens
  misc_RNA (1)...(19): siRNA sense strand
acaaggagaucgaggugga

SEQ ID NO: 2251233 - RNA, 19 nt, Homo sapiens
  misc_RNA (1)...(19): siRNA sense strand
uggaagagguuguuggaag

SEQ ID NO: 2251234 - RNA, 19 nt, Homo sapiens
  misc_RNA (1)...(19): siRNA sense strand
ggagcaaguuccugccaca

SEQ ID NO: 2251235 - RNA, 19 nt, Homo sapiens
  misc_RNA (1)...(19): siRNA sense strand
ucuacaaauacgaguaaca

SEQ ID NO: 2251236 - RNA, 19 nt, Homo sapiens
  misc_RNA (1)...(19): siRNA sense strand
ucagauaacuccaucccaa

SEQ ID NO: 2251237 - RNA, 19 nt, Homo sapiens
  misc_RNA (1)...(19): siRNA sense strand
aggagaucgagguggaaga

SEQ ID NO: 2251238 - RNA, 19 nt, Homo sapiens
  misc_RNA (1)...(19): siRNA sense strand
gaugaaggacagagcaacu

SEQ ID NO: 2251239 - RNA, 19 nt, Homo sapiens
  misc_RNA (1)...(19): siRNA sense strand
ucugagggcaagaggauga

SEQ ID NO: 2251240 - RNA, 19 nt, Homo sapiens
  misc_RNA (1)...(19): siRNA sense strand
cagccaagacguagaucca

SEQ ID NO: 2251241 - RNA, 19 nt, Homo sapiens
  misc_RNA (1)...(19): siRNA sense strand
caugcaacccaaagcgcua

SEQ ID NO: 2251242 - RNA, 19 nt, Homo sapiens
  misc_RNA (1)...(19): siRNA sense strand
ccuuuggaguuguuugcaa

SEQ ID NO: 2251243 - RNA, 19 nt, Homo sapiens
  misc_RNA (1)...(19): siRNA sense strand
gguauuauucuuugggaag

SEQ ID NO: 2251244 - RNA, 19 nt, Homo sapiens
  misc_RNA (1)...(19): siRNA sense strand
gagaucgacuacaaggaga

SEQ ID NO: 2251245 - RNA, 19 nt, Homo sapiens
  misc_RNA (1)...(19): siRNA sense strand
aauggaggaaauugugaaa

SEQ ID NO: 2251246 - RNA, 19 nt, Homo sapiens
  misc_RNA (1)...(19): siRNA sense strand
ugaaauagaagcuaggauc

SEQ ID NO: 2251247 - RNA, 19 nt, Homo sapiens
  misc_RNA (1)...(19): siRNA sense strand
guucccaaggaguggcuua

SEQ ID NO: 2251248 - RNA, 19 nt, Homo sapiens
  misc_RNA (1)...(19): siRNA sense strand
caggugagcaguaggucau

SEQ ID NO: 2251249 - RNA, 19 nt, Homo sapiens
  misc_RNA (1)...(19): siRNA sense strand
cguuguuggucuaaagauc

SEQ ID NO: 2251250 - RNA, 19 nt, Homo sapiens
  misc_RNA (1)...(19): siRNA sense strand
gcuucuacaaauacgagua

SEQ ID NO: 2251251 - RNA, 19 nt, Homo sapiens
  misc_RNA (1)...(19): siRNA sense strand
ugacacuaauauggagcaa

SEQ ID NO: 2251252 - RNA, 19 nt, Homo sapiens
  misc_RNA (1)...(19): siRNA sense strand
uguuggaagaggagccuuu

SEQ ID NO: 2251253 - RNA, 19 nt, Homo sapiens
  misc_RNA (1)...(19): siRNA sense strand
uugcaaagcuaaguggaga

SEQ ID NO: 2251254 - RNA, 19 nt, Homo sapiens
  misc_RNA (1)...(19): siRNA sense strand
ggguauuauucuuugggaa

SEQ ID NO: 2251255 - RNA, 19 nt, Homo sapiens
  misc_RNA (1)...(19): siRNA sense strand
agugauaacgcgucggaaa

SEQ ID NO: 2251256 - RNA, 19 nt, Homo sapiens
  misc_RNA (1)...(19): siRNA sense strand
cagaugaaggacagagcaa

SEQ ID NO: 2251257 - RNA, 19 nt, Homo sapiens
  misc_RNA (1)...(19): siRNA sense strand
uggaggaaauugugaaaau

SEQ ID NO: 2251258 - RNA, 19 nt, Homo sapiens
  misc_RNA (1)...(19): siRNA sense strand
acaaggagaucgaggugga

SEQ ID NO: 2251259 - RNA, 19 nt, Homo sapiens
  misc_RNA (1)...(19): siRNA sense strand
uggaagagguuguuggaag

SEQ ID NO: 2251260 - RNA, 19 nt, Homo sapiens
  misc_RNA (1)...(19): siRNA sense strand
ggagcaaguuccugccaca

SEQ ID NO: 2251261 - RNA, 19 nt, Homo sapiens
  misc_RNA (1)...(19): siRNA sense strand
ucuacaaauacgaguaaca

SEQ ID NO: 2251262 - RNA, 19 nt, Homo sapiens
  misc_RNA (1)...(19): siRNA sense strand
ucagauaacuccaucccaa

SEQ ID NO: 2251263 - RNA, 19 nt, Homo sapiens
  misc_RNA (1)...(19): siRNA sense strand
aggagaucgagguggaaga

SEQ ID NO: 2251264 - RNA, 19 nt, Homo sapiens
  misc_RNA (1)...(19): siRNA sense strand
gaugaaggacagagcaacu

SEQ ID NO: 2251265 - RNA, 19 nt, Homo sapiens
  misc_RNA (1)...(19): siRNA sense strand
ucugagggcaagaggauga

SEQ ID NO: 2251266 - RNA, 19 nt, Homo sapiens
  misc_RNA (1)...(19): siRNA sense strand
cagccaagacguagaucca

SEQ ID NO: 2251267 - RNA, 19 nt, Homo sapiens
  misc_RNA (1)...(19): siRNA sense strand
caugcaacccaaagcgcua

SEQ ID NO: 2251268 - RNA, 19 nt, Homo sapiens
  misc_RNA (1)...(19): siRNA sense strand
ccuuuggaguuguuugcaa

SEQ ID NO: 2251269 - RNA, 19 nt, Homo sapiens
  misc_RNA (1)...(19): siRNA sense strand
gguauuauucuuugggaag

SEQ ID NO: 2251270 - RNA, 19 nt, Homo sapiens
  misc_RNA (1)...(19): siRNA sense strand
gagaucgacuacaaggaga

SEQ ID NO: 2251271 - RNA, 19 nt, Homo sapiens
  misc_RNA (1)...(19): siRNA sense strand
aauggaggaaauugugaaa

SEQ ID NO: 2251272 - RNA, 19 nt, Homo sapiens
  misc_RNA (1)...(19): siRNA sense strand
ugaaauagaagcuaggauc

SEQ ID NO: 2251273 - RNA, 19 nt, Homo sapiens
  misc_RNA (1)...(19): siRNA sense strand
guucccaaggaguggcuua

SEQ ID NO: 2251274 - RNA, 19 nt, Homo sapiens
  misc_RNA (1)...(19): siRNA sense strand
caggugagcaguaggucau

SEQ ID NO: 2251275 - RNA, 19 nt, Homo sapiens
  misc_RNA (1)...(19): siRNA sense strand
cguuguuggucuaaagauc

SEQ ID NO: 2251276 - RNA, 19 nt, Homo sapiens
  misc_RNA (1)...(19): siRNA sense strand
gcuucuacaaauacgagua

SEQ ID NO: 2251277 - RNA, 19 nt, Homo sapiens
  misc_RNA (1)...(19): siRNA sense strand
ugacacuaauauggagcaa

SEQ ID NO: 2251278 - RNA, 19 nt, Homo sapiens
  misc_RNA (1)...(19): siRNA sense strand
uguuggaagaggagccuuu

SEQ ID NO: 2251279 - RNA, 19 nt, Homo sapiens
  misc_RNA (1)...(19): siRNA sense strand
uugcaaagcuaaguggaga

SEQ ID NO: 2251280 - RNA, 19 nt, Homo sapiens
  misc_RNA (1)...(19): siRNA sense strand
ccaagaaggcggaaggaga

SEQ ID NO: 2251281 - RNA, 19 nt, Homo sapiens
  misc_RNA (1)...(19): siRNA sense strand
cgaaauauccagugggacu

SEQ ID NO: 2251282 - RNA, 19 nt, Homo sapiens
  misc_RNA (1)...(19): siRNA sense strand
gguuuagauaggagcaaaa

SEQ ID NO: 2251283 - RNA, 19 nt, Homo sapiens
  misc_RNA (1)...(19): siRNA sense strand
gcuucagagacgcgaacaa

SEQ ID NO: 2251284 - RNA, 19 nt, Homo sapiens
  misc_RNA (1)...(19): siRNA sense strand
aggagguagagaaggagaa

SEQ ID NO: 2251285 - RNA, 19 nt, Homo sapiens
  misc_RNA (1)...(19): siRNA sense strand
ggaaguugaaaggcggaaa

SEQ ID NO: 2251286 - RNA, 19 nt, Homo sapiens
  misc_RNA (1)...(19): siRNA sense strand
auacacaguacgaaagaca

SEQ ID NO: 2251287 - RNA, 19 nt, Homo sapiens
  misc_RNA (1)...(19): siRNA sense strand
cggagaucgacaaggacuu

SEQ ID NO: 2251288 - RNA, 19 nt, Homo sapiens
  misc_RNA (1)...(19): siRNA sense strand
agaaccaggagguagagaa

SEQ ID NO: 2251289 - RNA, 19 nt, Homo sapiens
  misc_RNA (1)...(19): siRNA sense strand
agguagagaaggagaacag

SEQ ID NO: 2251290 - RNA, 19 nt, Homo sapiens
  misc_RNA (1)...(19): siRNA sense strand
ugguuuagauaggagcaaa

SEQ ID NO: 2251291 - RNA, 19 nt, Homo sapiens
  misc_RNA (1)...(19): siRNA sense strand
guggaggacugcaguggga

SEQ ID NO: 2251292 - RNA, 19 nt, Homo sapiens
  misc_RNA (1)...(19): siRNA sense strand
acaaggacuucgagagcuc

SEQ ID NO: 2251293 - RNA, 19 nt, Homo sapiens
  misc_RNA (1)...(19): siRNA sense strand
ccucaaucaaacaggaaua

SEQ ID NO: 2251294 - RNA, 19 nt, Homo sapiens
  misc_RNA (1)...(19): siRNA sense strand
aguugaaguuaauggagaa

SEQ ID NO: 2251295 - RNA, 19 nt, Homo sapiens
  misc_RNA (1)...(19): siRNA sense strand
agaagauggaccagaggaa

SEQ ID NO: 2251296 - RNA, 19 nt, Homo sapiens
  misc_RNA (1)...(19): siRNA sense strand
gaguugaaguuaauggaga

SEQ ID NO: 2251297 - RNA, 19 nt, Homo sapiens
  misc_RNA (1)...(19): siRNA sense strand
gagaaaucgagcuggaaaa

SEQ ID NO: 2251298 - RNA, 19 nt, Homo sapiens
  misc_RNA (1)...(19): siRNA sense strand
gcagagaaaucgagcugga

SEQ ID NO: 2251299 - RNA, 19 nt, Homo sapiens
  misc_RNA (1)...(19): siRNA sense strand
ggaagauagaaaagagcaa

SEQ ID NO: 2251300 - RNA, 19 nt, Homo sapiens
  misc_RNA (1)...(19): siRNA sense strand
cugaagacgcugaacaaau

SEQ ID NO: 2251301 - RNA, 19 nt, Homo sapiens
  misc_RNA (1)...(19): siRNA sense strand
ggaaauaaaccuguggaga

SEQ ID NO: 2251302 - RNA, 19 nt, Homo sapiens
  misc_RNA (1)...(19): siRNA sense strand
ugaccaaagaggacaaaga

SEQ ID NO: 2251303 - RNA, 19 nt, Homo sapiens
  misc_RNA (1)...(19): siRNA sense strand
aguauuaacuggaacgcuu

SEQ ID NO: 2251304 - RNA, 19 nt, Homo sapiens
  misc_RNA (1)...(19): siRNA sense strand
ccuuaaugucagugaaaau

SEQ ID NO: 2251305 - RNA, 19 nt, Homo sapiens
  misc_RNA (1)...(19): siRNA sense strand
gaaauaaaccuguggagac

SEQ ID NO: 2251306 - RNA, 19 nt, Homo sapiens
  misc_RNA (1)...(19): siRNA sense strand
ggacaaagaagcagagacg

SEQ ID NO: 2251307 - RNA, 19 nt, Homo sapiens
  misc_RNA (1)...(19): siRNA sense strand
aagauggaccagaggaaga

SEQ ID NO: 2251308 - RNA, 19 nt, Homo sapiens
  misc_RNA (1)...(19): siRNA sense strand
aguaaguugugcuggugaa

SEQ ID NO: 2251309 - RNA, 19 nt, Homo sapiens
  misc_RNA (1)...(19): siRNA sense strand
gguuaggaguagaauggga

SEQ ID NO: 2251310 - RNA, 19 nt, Homo sapiens
  misc_RNA (1)...(19): siRNA sense strand
aucagaaaguccuggagaa

SEQ ID NO: 2251311 - RNA, 19 nt, Homo sapiens
  misc_RNA (1)...(19): siRNA sense strand
cgacaaucagauaucacaa

SEQ ID NO: 2251312 - RNA, 19 nt, Homo sapiens
  misc_RNA (1)...(19): siRNA sense strand
ggaaaauggagauugucua

SEQ ID NO: 2251313 - RNA, 19 nt, Homo sapiens
  misc_RNA (1)...(19): siRNA sense strand
guccuuaaugucagugaaa

SEQ ID NO: 2251314 - RNA, 19 nt, Homo sapiens
  misc_RNA (1)...(19): siRNA sense strand
gagcuagagaaguuaccaa

SEQ ID NO: 2251315 - RNA, 19 nt, Homo sapiens
  misc_RNA (1)...(19): siRNA sense strand
agcaaagucagcugagcaa

SEQ ID NO: 2251316 - RNA, 19 nt, Homo sapiens
  misc_RNA (1)...(19): siRNA sense strand
ggaaacaggcugguggaca

SEQ ID NO: 2251317 - RNA, 19 nt, Homo sapiens
  misc_RNA (1)...(19): siRNA sense strand
ggaaaugaguggaaacagg

SEQ ID NO: 2251318 - RNA, 19 nt, Homo sapiens
  misc_RNA (1)...(19): siRNA sense strand
agcugaagacgcugaacaa

SEQ ID NO: 2251319 - RNA, 19 nt, Homo sapiens
  misc_RNA (1)...(19): siRNA sense strand
gacauaaggauccggaaaa

SEQ ID NO: 2251320 - RNA, 19 nt, Homo sapiens
  misc_RNA (1)...(19): siRNA sense strand
gacaaucccgagagaggaa

SEQ ID NO: 2251321 - RNA, 19 nt, Homo sapiens
  misc_RNA (1)...(19): siRNA sense strand
ccgagagaggaaagcauga

SEQ ID NO: 2251322 - RNA, 19 nt, Homo sapiens
  misc_RNA (1)...(19): siRNA sense strand
agacuuucuuacugcaauu

SEQ ID NO: 2251323 - RNA, 19 nt, Homo sapiens
  misc_RNA (1)...(19): siRNA sense strand
ccgcuauguguuagaagau

SEQ ID NO: 2251324 - RNA, 19 nt, Homo sapiens
  misc_RNA (1)...(19): siRNA sense strand
acgcugaacaaaugugaga

SEQ ID NO: 2251325 - RNA, 19 nt, Homo sapiens
  misc_RNA (1)...(19): siRNA sense strand
cagucaaguuauuagaucu

SEQ ID NO: 2251326 - RNA, 19 nt, Homo sapiens
  misc_RNA (1)...(19): siRNA sense strand
gaucagaaaguccuggaga

SEQ ID NO: 2251327 - RNA, 19 nt, Homo sapiens
  misc_RNA (1)...(19): siRNA sense strand
ugaacaaaugugagauucu

SEQ ID NO: 2251328 - RNA, 19 nt, Homo sapiens
  misc_RNA (1)...(19): siRNA sense strand
ccugaaauauggugcaccu

SEQ ID NO: 2251329 - RNA, 19 nt, Homo sapiens
  misc_RNA (1)...(19): siRNA sense strand
uuaugaaacagcaaaguca

SEQ ID NO: 2251330 - RNA, 19 nt, Homo sapiens
  misc_RNA (1)...(19): siRNA sense strand
ccuaauaucagaaagguag

SEQ ID NO: 2251331 - RNA, 19 nt, Homo sapiens
  misc_RNA (1)...(19): siRNA sense strand
cugaagauugggaacucaa

SEQ ID NO: 2251332 - RNA, 19 nt, Homo sapiens
  misc_RNA (1)...(19): siRNA sense strand
agaaauuagaugacgacaa

SEQ ID NO: 2251333 - RNA, 19 nt, Homo sapiens
  misc_RNA (1)...(19): siRNA sense strand
cggacaaagagcugaguga

SEQ ID NO: 2251334 - RNA, 19 nt, Homo sapiens
  misc_RNA (1)...(19): siRNA sense strand
augcaggaauguugggcaa

SEQ ID NO: 2251335 - RNA, 19 nt, Homo sapiens
  misc_RNA (1)...(19): siRNA sense strand
caacaaugcccgagagcgu

SEQ ID NO: 2251336 - RNA, 19 nt, Homo sapiens
  misc_RNA (1)...(19): siRNA sense strand
gugacauggauaugggcaa

SEQ ID NO: 2251337 - RNA, 19 nt, Homo sapiens
  misc_RNA (1)...(19): siRNA sense strand
aggcaugccaccaggacua

SEQ ID NO: 2251338 - RNA, 19 nt, Homo sapiens
  misc_RNA (1)...(19): siRNA sense strand
acaagaaauuagaugacga

SEQ ID NO: 2251339 - RNA, 19 nt, Homo sapiens
  misc_RNA (1)...(19): siRNA sense strand
gcucaaauguagaagacag

SEQ ID NO: 2251340 - RNA, 19 nt, Homo sapiens
  misc_RNA (1)...(19): siRNA sense strand
caucgaaucacaugggaca

SEQ ID NO: 2251341 - RNA, 19 nt, Homo sapiens
  misc_RNA (1)...(19): siRNA sense strand
guuuagaaagacuggauga

SEQ ID NO: 2251342 - RNA, 19 nt, Homo sapiens
  misc_RNA (1)...(19): siRNA sense strand
aauuagaugacgacaagaa

SEQ ID NO: 2251343 - RNA, 19 nt, Homo sapiens
  misc_RNA (1)...(19): siRNA sense strand
ccuuagggacggacaaaga

SEQ ID NO: 2251344 - RNA, 19 nt, Homo sapiens
  misc_RNA (1)...(19): siRNA sense strand
ugaaaagaagggaggaaga

SEQ ID NO: 2251345 - RNA, 19 nt, Homo sapiens
  misc_RNA (1)...(19): siRNA sense strand
gcaauaaugacgaugagga

SEQ ID NO: 2251346 - RNA, 19 nt, Homo sapiens
  misc_RNA (1)...(19): siRNA sense strand
gaaucaaacuuacaggguu

SEQ ID NO: 2251347 - RNA, 19 nt, Homo sapiens
  misc_RNA (1)...(19): siRNA sense strand
aaucaaacuuacaggguug

SEQ ID NO: 2251348 - RNA, 19 nt, Homo sapiens
  misc_RNA (1)...(19): siRNA sense strand
acgacaagaaggauaucaa

SEQ ID NO: 2251349 - RNA, 19 nt, Homo sapiens
  misc_RNA (1)...(19): siRNA sense strand
agcagaaggcagagcguga

SEQ ID NO: 2251350 - RNA, 19 nt, Homo sapiens
  misc_RNA (1)...(19): siRNA sense strand
caccagagcagaaggcaga

SEQ ID NO: 2251351 - RNA, 19 nt, Homo sapiens
  misc_RNA (1)...(19): siRNA sense strand
gaacuauggagaugggacu

SEQ ID NO: 2251352 - RNA, 19 nt, Homo sapiens
  misc_RNA (1)...(19): siRNA sense strand
caguauaauggcaaauaga

SEQ ID NO: 2251353 - RNA, 19 nt, Homo sapiens
  misc_RNA (1)...(19): siRNA sense strand
ccaacgggacagacaguau

SEQ ID NO: 2251354 - RNA, 19 nt, Homo sapiens
  misc_RNA (1)...(19): siRNA sense strand
gugacaagccccagaccaa

SEQ ID NO: 2251355 - RNA, 19 nt, Homo sapiens
  misc_RNA (1)...(19): siRNA sense strand
aggacaagaaauuagauga

SEQ ID NO: 2251356 - RNA, 19 nt, Homo sapiens
  misc_RNA (1)...(19): siRNA sense strand
uccugugagcagugggaaa

SEQ ID NO: 2251357 - RNA, 19 nt, Homo sapiens
  misc_RNA (1)...(19): siRNA sense strand
ucaucuuaugggagagaau

SEQ ID NO: 2251358 - RNA, 19 nt, Homo sapiens
  misc_RNA (1)...(19): siRNA sense strand
aauccgaugacgaggguga

SEQ ID NO: 2251359 - RNA, 19 nt, Homo sapiens
  misc_RNA (1)...(19): siRNA sense strand
ccgagaaaggaaucugaau

SEQ ID NO: 2251360 - RNA, 19 nt, Homo sapiens
  misc_RNA (1)...(19): siRNA sense strand
caguagugccauggaggua

SEQ ID NO: 2251361 - RNA, 19 nt, Homo sapiens
  misc_RNA (1)...(19): siRNA sense strand
agguacagacaaagaaagu

SEQ ID NO: 2251362 - RNA, 19 nt, Homo sapiens
  misc_RNA (1)...(19): siRNA sense strand
uggucugggcucaggguau

SEQ ID NO: 2251363 - RNA, 19 nt, Homo sapiens
  misc_RNA (1)...(19): siRNA sense strand
agaucaaauccgaugacga

SEQ ID NO: 2251364 - RNA, 19 nt, Homo sapiens
  misc_RNA (1)...(19): siRNA sense strand
uggagaugcucuggggaaa

SEQ ID NO: 2251365 - RNA, 19 nt, Homo sapiens
  misc_RNA (1)...(19): siRNA sense strand
cgugagaaggagcggagga

SEQ ID NO: 2251366 - RNA, 19 nt, Homo sapiens
  misc_RNA (1)...(19): siRNA sense strand
gacaaagaaaguucgaaaa

SEQ ID NO: 2251367 - RNA, 19 nt, Homo sapiens
  misc_RNA (1)...(19): siRNA sense strand
guacaaaccauuacagcac

SEQ ID NO: 2251368 - RNA, 19 nt, Homo sapiens
  misc_RNA (1)...(19): siRNA sense strand
auacucaucuuaugggaga

SEQ ID NO: 2251369 - RNA, 19 nt, Homo sapiens
  misc_RNA (1)...(19): siRNA sense strand
gguacaaaccauuacagca

SEQ ID NO: 2251370 - RNA, 19 nt, Homo sapiens
  misc_RNA (1)...(19): siRNA sense strand
auaauggcaaauagaggaa

SEQ ID NO: 2251371 - RNA, 19 nt, Homo sapiens
  misc_RNA (1)...(19): siRNA sense strand
gugacaucaacgaggcuuu

SEQ ID NO: 2251372 - RNA, 19 nt, Homo sapiens
  misc_RNA (1)...(19): siRNA sense strand
acagacaguauaauggcaa

SEQ ID NO: 2251373 - RNA, 19 nt, Homo sapiens
  misc_RNA (1)...(19): siRNA sense strand
ggaagcagguccagcgcaa

SEQ ID NO: 2251374 - RNA, 19 nt, Homo sapiens
  misc_RNA (1)...(19): siRNA sense strand
acaaauacgagaacgggua

SEQ ID NO: 2251375 - RNA, 19 nt, Homo sapiens
  misc_RNA (1)...(19): siRNA sense strand
ugaaaauggauucgaacaa

SEQ ID NO: 2251376 - RNA, 19 nt, Homo sapiens
  misc_RNA (1)...(19): siRNA sense strand
ccgagagugaccugaaaga

SEQ ID NO: 2251377 - RNA, 19 nt, Homo sapiens
  misc_RNA (1)...(19): siRNA sense strand
ggaagcagguccagcgcaa

SEQ ID NO: 2251378 - RNA, 19 nt, Homo sapiens
  misc_RNA (1)...(19): siRNA sense strand
acaaauacgagaacgggua

SEQ ID NO: 2251379 - RNA, 19 nt, Homo sapiens
  misc_RNA (1)...(19): siRNA sense strand
ugaaaauggauucgaacaa

SEQ ID NO: 2251380 - RNA, 19 nt, Homo sapiens
  misc_RNA (1)...(19): siRNA sense strand
ccgagagugaccugaaaga

SEQ ID NO: 2251381 - RNA, 19 nt, Homo sapiens
  misc_RNA (1)...(19): siRNA sense strand
gggaaauaacaguggaguu

SEQ ID NO: 2251382 - RNA, 19 nt, Homo sapiens
  misc_RNA (1)...(19): siRNA sense strand
ccaucagagucaugaacaa

SEQ ID NO: 2251383 - RNA, 19 nt, Homo sapiens
  misc_RNA (1)...(19): siRNA sense strand
gugcauaugaccuggacaa

SEQ ID NO: 2251384 - RNA, 19 nt, Homo sapiens
  misc_RNA (1)...(19): siRNA sense strand
ccacugaagcagagaaaau

SEQ ID NO: 2251385 - RNA, 19 nt, Homo sapiens
  misc_RNA (1)...(19): siRNA sense strand
uggaauugaucuagaagca

SEQ ID NO: 2251386 - RNA, 19 nt, Homo sapiens
  misc_RNA (1)...(19): siRNA sense strand
ccaacaaccuuauggggaa

SEQ ID NO: 2251387 - RNA, 19 nt, Homo sapiens
  misc_RNA (1)...(19): siRNA sense strand
gaagaguaggagugaaaca

SEQ ID NO: 2251388 - RNA, 19 nt, Homo sapiens
  misc_RNA (1)...(19): siRNA sense strand
gaauggauguggaacgaga

SEQ ID NO: 2251389 - RNA, 19 nt, Homo sapiens
  misc_RNA (1)...(19): siRNA sense strand
agaaaaggacugugucaaa

SEQ ID NO: 2251390 - RNA, 19 nt, Homo sapiens
  misc_RNA (1)...(19): siRNA sense strand
acgucgaggucuacagcua

SEQ ID NO: 2251391 - RNA, 19 nt, Homo sapiens
  misc_RNA (1)...(19): siRNA sense strand
gguuggugauggugcaaga

SEQ ID NO: 2251392 - RNA, 19 nt, Homo sapiens
  misc_RNA (1)...(19): siRNA sense strand
uuauggacgucgaggucua

SEQ ID NO: 2251393 - RNA, 19 nt, Homo sapiens
  misc_RNA (1)...(19): siRNA sense strand
ggccacugaagcagagaaa

SEQ ID NO: 2251394 - RNA, 19 nt, Homo sapiens
  misc_RNA (1)...(19): siRNA sense strand
gggauggagcauugagguu

SEQ ID NO: 2251395 - RNA, 19 nt, Homo sapiens
  misc_RNA (1)...(19): siRNA sense strand
ucuuauagcaggaaugaca

SEQ ID NO: 2251396 - RNA, 19 nt, Homo sapiens
  misc_RNA (1)...(19): siRNA sense strand
guacucugagggugggaaa

SEQ ID NO: 2251397 - RNA, 19 nt, Homo sapiens
  misc_RNA (1)...(19): siRNA sense strand
agcaaaauaucuagagaca

SEQ ID NO: 2251398 - RNA, 19 nt, Homo sapiens
  misc_RNA (1)...(19): siRNA sense strand
ugauggugcaagagccaaa

SEQ ID NO: 2251399 - RNA, 19 nt, Homo sapiens
  misc_RNA (1)...(19): siRNA sense strand
ccuugauccugcaaagcua

SEQ ID NO: 2251400 - RNA, 19 nt, Homo sapiens
  misc_RNA (1)...(19): siRNA sense strand
cagcuaugcaaguagaaga

SEQ ID NO: 2251401 - RNA, 19 nt, Homo sapiens
  misc_RNA (1)...(19): siRNA sense strand
auucagaggugucggcuca

SEQ ID NO: 2251402 - RNA, 19 nt, Homo sapiens
  misc_RNA (1)...(19): siRNA sense strand
cguggauggcugugcauau

SEQ ID NO: 2251403 - RNA, 19 nt, Homo sapiens
  misc_RNA (1)...(19): siRNA sense strand
cgaugaaagggaaauaaca

SEQ ID NO: 2251404 - RNA, 19 nt, Homo sapiens
  misc_RNA (1)...(19): siRNA sense strand
cucacuaugugcaagguaa

SEQ ID NO: 2251405 - RNA, 19 nt, Homo sapiens
  misc_RNA (1)...(19): siRNA sense strand
gcugcaugacaauggaauu

SEQ ID NO: 2251406 - RNA, 19 nt, Homo sapiens
  misc_RNA (1)...(19): siRNA sense strand
ggauuuuccuccaagcaaa

SEQ ID NO: 2251407 - RNA, 19 nt, Homo sapiens
  misc_RNA (1)...(19): siRNA sense strand
ccuugugacuucagggaac

SEQ ID NO: 2251408 - RNA, 19 nt, Homo sapiens
  misc_RNA (1)...(19): siRNA sense strand
gagcauugagguuggugau

SEQ ID NO: 2251409 - RNA, 19 nt, Homo sapiens
  misc_RNA (1)...(19): siRNA sense strand
ggugauggugcaagagcca

SEQ ID NO: 2251410 - RNA, 19 nt, Homo sapiens
  misc_RNA (1)...(19): siRNA sense strand
gagacagugaguucagaau

SEQ ID NO: 2251411 - RNA, 19 nt, Homo sapiens
  misc_RNA (1)...(19): siRNA sense strand
uuagaugacugcugggcga

SEQ ID NO: 2251412 - RNA, 19 nt, Homo sapiens
  misc_RNA (1)...(19): siRNA sense strand
gagacaguauccaugguga

SEQ ID NO: 2251413 - RNA, 19 nt, Homo sapiens
  misc_RNA (1)...(19): siRNA sense strand
agacaguauccauggugau

SEQ ID NO: 2251414 - RNA, 19 nt, Homo sapiens
  misc_RNA (1)...(19): siRNA sense strand
cgucuaugaaaacgaaaua

SEQ ID NO: 2251415 - RNA, 19 nt, Homo sapiens
  misc_RNA (1)...(19): siRNA sense strand
agauaauuccuaccaacaa

SEQ ID NO: 2251416 - RNA, 19 nt, Homo sapiens
  misc_RNA (1)...(19): siRNA sense strand
caacaaccuuauggggaaa

SEQ ID NO: 2251417 - RNA, 19 nt, Homo sapiens
  misc_RNA (1)...(19): siRNA sense strand
cauggaagugagaguccua

SEQ ID NO: 2251418 - RNA, 19 nt, Homo sapiens
  misc_RNA (1)...(19): siRNA sense strand
uggaagugagaguccuaaa

SEQ ID NO: 2251419 - RNA, 19 nt, Homo sapiens
  misc_RNA (1)...(19): siRNA sense strand
cgagaaaaggacuguguca

SEQ ID NO: 2251420 - RNA, 19 nt, Homo sapiens
  misc_RNA (1)...(19): siRNA sense strand
gaauugaucuagaagcaac

SEQ ID NO: 2251421 - RNA, 19 nt, Homo sapiens
  misc_RNA (1)...(19): siRNA sense strand
cagauaauuccuaccaaca

SEQ ID NO: 2251422 - RNA, 19 nt, Homo sapiens
  misc_RNA (1)...(19): siRNA sense strand
gggacaaaacacagauaua

SEQ ID NO: 2251423 - RNA, 19 nt, Homo sapiens
  misc_RNA (1)...(19): siRNA sense strand
gggauuggcuguaugagca

SEQ ID NO: 2251424 - RNA, 19 nt, Homo sapiens
  misc_RNA (1)...(19): siRNA sense strand
ugccuauccuucagagcaa

SEQ ID NO: 2251425 - RNA, 19 nt, Homo sapiens
  misc_RNA (1)...(19): siRNA sense strand
gagauggagcuucaggcaa

SEQ ID NO: 2251426 - RNA, 19 nt, Homo sapiens
  misc_RNA (1)...(19): siRNA sense strand
gaugaggacagcauggaca

SEQ ID NO: 2251427 - RNA, 19 nt, Homo sapiens
  misc_RNA (1)...(19): siRNA sense strand
gggacaaaacacagauaua

SEQ ID NO: 2251428 - RNA, 19 nt, Homo sapiens
  misc_RNA (1)...(19): siRNA sense strand
gggauuggcuguaugagca

SEQ ID NO: 2251429 - RNA, 19 nt, Homo sapiens
  misc_RNA (1)...(19): siRNA sense strand
ugccuauccuucagagcaa

SEQ ID NO: 2251430 - RNA, 19 nt, Homo sapiens
  misc_RNA (1)...(19): siRNA sense strand
gagauggagcuucaggcaa

SEQ ID NO: 2251431 - RNA, 19 nt, Homo sapiens
  misc_RNA (1)...(19): siRNA sense strand
gaugaggacagcauggaca

SEQ ID NO: 2251432 - RNA, 19 nt, Homo sapiens
  misc_RNA (1)...(19): siRNA sense strand
gggacaaaacacagauaua

SEQ ID NO: 2251433 - RNA, 19 nt, Homo sapiens
  misc_RNA (1)...(19): siRNA sense strand
gggauuggcuguaugagca

SEQ ID NO: 2251434 - RNA, 19 nt, Homo sapiens
  misc_RNA (1)...(19): siRNA sense strand
ugccuauccuucagagcaa

SEQ ID NO: 2251435 - RNA, 19 nt, Homo sapiens
  misc_RNA (1)...(19): siRNA sense strand
gagauggagcuucaggcaa

SEQ ID NO: 2251436 - RNA, 19 nt, Homo sapiens
  misc_RNA (1)...(19): siRNA sense strand
gaugaggacagcauggaca

SEQ ID NO: 2251437 - RNA, 19 nt, Homo sapiens
  misc_RNA (1)...(19): siRNA sense strand
gggacaaaacacagauaua

SEQ ID NO: 2251438 - RNA, 19 nt, Homo sapiens
  misc_RNA (1)...(19): siRNA sense strand
gggauuggcuguaugagca

SEQ ID NO: 2251439 - RNA, 19 nt, Homo sapiens
  misc_RNA (1)...(19): siRNA sense strand
ugccuauccuucagagcaa

SEQ ID NO: 2251440 - RNA, 19 nt, Homo sapiens
  misc_RNA (1)...(19): siRNA sense strand
gagauggagcuucaggcaa

SEQ ID NO: 2251441 - RNA, 19 nt, Homo sapiens
  misc_RNA (1)...(19): siRNA sense strand
gaugaggacagcauggaca

SEQ ID NO: 2251442 - RNA, 19 nt, Homo sapiens
  misc_RNA (1)...(19): siRNA sense strand
gggacaaaacacagauaua

SEQ ID NO: 2251443 - RNA, 19 nt, Homo sapiens
  misc_RNA (1)...(19): siRNA sense strand
gggauuggcuguaugagca

SEQ ID NO: 2251444 - RNA, 19 nt, Homo sapiens
  misc_RNA (1)...(19): siRNA sense strand
ugccuauccuucagagcaa

SEQ ID NO: 2251445 - RNA, 19 nt, Homo sapiens
  misc_RNA (1)...(19): siRNA sense strand
gagauggagcuucaggcaa

SEQ ID NO: 2251446 - RNA, 19 nt, Homo sapiens
  misc_RNA (1)...(19): siRNA sense strand
gggacaaaacacagauaua

SEQ ID NO: 2251447 - RNA, 19 nt, Homo sapiens
  misc_RNA (1)...(19): siRNA sense strand
gggauuggcuguaugagca

SEQ ID NO: 2251448 - RNA, 19 nt, Homo sapiens
  misc_RNA (1)...(19): siRNA sense strand
ugccuauccuucagagcaa

SEQ ID NO: 2251449 - RNA, 19 nt, Homo sapiens
  misc_RNA (1)...(19): siRNA sense strand
gagauggagcuucaggcaa

SEQ ID NO: 2251450 - RNA, 19 nt, Homo sapiens
  misc_RNA (1)...(19): siRNA sense strand
gggacaaaacacagauaua

SEQ ID NO: 2251451 - RNA, 19 nt, Homo sapiens
  misc_RNA (1)...(19): siRNA sense strand
gggauuggcuguaugagca

SEQ ID NO: 2251452 - RNA, 19 nt, Homo sapiens
  misc_RNA (1)...(19): siRNA sense strand
ugccuauccuucagagcaa

SEQ ID NO: 2251453 - RNA, 19 nt, Homo sapiens
  misc_RNA (1)...(19): siRNA sense strand
gagauggagcuucaggcaa

SEQ ID NO: 2251454 - RNA, 19 nt, Homo sapiens
  misc_RNA (1)...(19): siRNA sense strand
gggacaaaacacagauaua

SEQ ID NO: 2251455 - RNA, 19 nt, Homo sapiens
  misc_RNA (1)...(19): siRNA sense strand
gggauuggcuguaugagca

SEQ ID NO: 2251456 - RNA, 19 nt, Homo sapiens
  misc_RNA (1)...(19): siRNA sense strand
ugccuauccuucagagcaa

SEQ ID NO: 2251457 - RNA, 19 nt, Homo sapiens
  misc_RNA (1)...(19): siRNA sense strand
gagauggagcuucaggcaa

SEQ ID NO: 2251458 - RNA, 19 nt, Homo sapiens
  misc_RNA (1)...(19): siRNA sense strand
guuaaaugcuauuggggua

SEQ ID NO: 2251459 - RNA, 19 nt, Homo sapiens
  misc_RNA (1)...(19): siRNA sense strand
agacauggcaacuggaaaa

SEQ ID NO: 2251460 - RNA, 19 nt, Homo sapiens
  misc_RNA (1)...(19): siRNA sense strand
ccuaaaaguacacaagaaa

SEQ ID NO: 2251461 - RNA, 19 nt, Homo sapiens
  misc_RNA (1)...(19): siRNA sense strand
ccaugaaagugcagcccau

SEQ ID NO: 2251462 - RNA, 19 nt, Homo sapiens
  misc_RNA (1)...(19): siRNA sense strand
auaacaaacuggaugcaga

SEQ ID NO: 2251463 - RNA, 19 nt, Homo sapiens
  misc_RNA (1)...(19): siRNA sense strand
aggauuuggaguagaucaa

SEQ ID NO: 2251464 - RNA, 19 nt, Homo sapiens
  misc_RNA (1)...(19): siRNA sense strand
guacuacgauugaaggaca

SEQ ID NO: 2251465 - RNA, 19 nt, Homo sapiens
  misc_RNA (1)...(19): siRNA sense strand
gguuaacagaucagcuuau

SEQ ID NO: 2251466 - RNA, 19 nt, Homo sapiens
  misc_RNA (1)...(19): siRNA sense strand
cugcuaugaaugggagaaa

SEQ ID NO: 2251467 - RNA, 19 nt, Homo sapiens
  misc_RNA (1)...(19): siRNA sense strand
gcauacaagcaaugaccca

SEQ ID NO: 2251468 - RNA, 19 nt, Homo sapiens
  misc_RNA (1)...(19): siRNA sense strand
ugggaaaggaggucaaagu

SEQ ID NO: 2251469 - RNA, 19 nt, Homo sapiens
  misc_RNA (1)...(19): siRNA sense strand
gucaaaguaaacugggcaa

SEQ ID NO: 2251470 - RNA, 19 nt, Homo sapiens
  misc_RNA (1)...(19): siRNA sense strand
ggucaaaguaaacugggca

SEQ ID NO: 2251471 - RNA, 19 nt, Homo sapiens
  misc_RNA (1)...(19): siRNA sense strand
aauccaaaggcuaugguuu

SEQ ID NO: 2251472 - RNA, 19 nt, Homo sapiens
  misc_RNA (1)...(19): siRNA sense strand
guaguuaaagacauggcaa

SEQ ID NO: 2251473 - RNA, 19 nt, Homo sapiens
  misc_RNA (1)...(19): siRNA sense strand
aagacauggcaacuggaaa

SEQ ID NO: 2251474 - RNA, 19 nt, Homo sapiens
  misc_RNA (1)...(19): siRNA sense strand
auggacaguauauggcaaa

SEQ ID NO: 2251475 - RNA, 19 nt, Homo sapiens
  misc_RNA (1)...(19): siRNA sense strand
guuaaaugcuauuggggua

SEQ ID NO: 2251476 - RNA, 19 nt, Homo sapiens
  misc_RNA (1)...(19): siRNA sense strand
agacauggcaacuggaaaa

SEQ ID NO: 2251477 - RNA, 19 nt, Homo sapiens
  misc_RNA (1)...(19): siRNA sense strand
ccuaaaaguacacaagaaa

SEQ ID NO: 2251478 - RNA, 19 nt, Homo sapiens
  misc_RNA (1)...(19): siRNA sense strand
ccaugaaagugcagcccau

SEQ ID NO: 2251479 - RNA, 19 nt, Homo sapiens
  misc_RNA (1)...(19): siRNA sense strand
auaacaaacuggaugcaga

SEQ ID NO: 2251480 - RNA, 19 nt, Homo sapiens
  misc_RNA (1)...(19): siRNA sense strand
guacuacgauugaaggaca

SEQ ID NO: 2251481 - RNA, 19 nt, Homo sapiens
  misc_RNA (1)...(19): siRNA sense strand
gguuaacagaucagcuuau

SEQ ID NO: 2251482 - RNA, 19 nt, Homo sapiens
  misc_RNA (1)...(19): siRNA sense strand
cugcuaugaaugggagaaa

SEQ ID NO: 2251483 - RNA, 19 nt, Homo sapiens
  misc_RNA (1)...(19): siRNA sense strand
gcauacaagcaaugaccca

SEQ ID NO: 2251484 - RNA, 19 nt, Homo sapiens
  misc_RNA (1)...(19): siRNA sense strand
ugggaaaggaggucaaagu

SEQ ID NO: 2251485 - RNA, 19 nt, Homo sapiens
  misc_RNA (1)...(19): siRNA sense strand
gucaaaguaaacugggcaa

SEQ ID NO: 2251486 - RNA, 19 nt, Homo sapiens
  misc_RNA (1)...(19): siRNA sense strand
ggucaaaguaaacugggca

SEQ ID NO: 2251487 - RNA, 19 nt, Homo sapiens
  misc_RNA (1)...(19): siRNA sense strand
aauccaaaggcuaugguuu

SEQ ID NO: 2251488 - RNA, 19 nt, Homo sapiens
  misc_RNA (1)...(19): siRNA sense strand
guaguuaaagacauggcaa

SEQ ID NO: 2251489 - RNA, 19 nt, Homo sapiens
  misc_RNA (1)...(19): siRNA sense strand
aagacauggcaacuggaaa

SEQ ID NO: 2251490 - RNA, 19 nt, Homo sapiens
  misc_RNA (1)...(19): siRNA sense strand
gugugaaacuagaagccaa

SEQ ID NO: 2251491 - RNA, 19 nt, Homo sapiens
  misc_RNA (1)...(19): siRNA sense strand
cgguaugaaaucaaacaga

SEQ ID NO: 2251492 - RNA, 19 nt, Homo sapiens
  misc_RNA (1)...(19): siRNA sense strand
uaaagauguucaaaggguu

SEQ ID NO: 2251493 - RNA, 19 nt, Homo sapiens
  misc_RNA (1)...(19): siRNA sense strand
ggccaagaaaggagaggaa

SEQ ID NO: 2251494 - RNA, 19 nt, Homo sapiens
  misc_RNA (1)...(19): siRNA sense strand
aggaugaggaagaggaaaa

SEQ ID NO: 2251495 - RNA, 19 nt, Homo sapiens
  misc_RNA (1)...(19): siRNA sense strand
guggaaaagaagaagauaa

SEQ ID NO: 2251496 - RNA, 19 nt, Homo sapiens
  misc_RNA (1)...(19): siRNA sense strand
gcucauaacuggaggaagg

SEQ ID NO: 2251497 - RNA, 19 nt, Homo sapiens
  misc_RNA (1)...(19): siRNA sense strand
ccaccaauaugauggguca

SEQ ID NO: 2251498 - RNA, 19 nt, Homo sapiens
  misc_RNA (1)...(19): siRNA sense strand
caguaguggaaauggaaau

SEQ ID NO: 2251499 - RNA, 19 nt, Homo sapiens
  misc_RNA (1)...(19): siRNA sense strand
aggaagaugaggaggggaa

SEQ ID NO: 2251500 - RNA, 19 nt, Homo sapiens
  misc_RNA (1)...(19): siRNA sense strand
caaaagaggaacuggaaca

SEQ ID NO: 2251501 - RNA, 19 nt, Homo sapiens
  misc_RNA (1)...(19): siRNA sense strand
gggauugugaagaggauga

SEQ ID NO: 2251502 - RNA, 19 nt, Homo sapiens
  misc_RNA (1)...(19): siRNA sense strand
caaagugggcaaaggccaa

SEQ ID NO: 2251503 - RNA, 19 nt, Homo sapiens
  misc_RNA (1)...(19): siRNA sense strand
ccagcacaguaguggaaau

SEQ ID NO: 2251504 - RNA, 19 nt, Homo sapiens
  misc_RNA (1)...(19): siRNA sense strand
agaaaugagaguagguguu

SEQ ID NO: 2251505 - RNA, 19 nt, Homo sapiens
  misc_RNA (1)...(19): siRNA sense strand
aggaaaagucagacaguga

SEQ ID NO: 2251506 - RNA, 19 nt, Homo sapiens
  misc_RNA (1)...(19): siRNA sense strand
cuaaagaagagaaggcugu

SEQ ID NO: 2251507 - RNA, 19 nt, Homo sapiens
  misc_RNA (1)...(19): siRNA sense strand
agauaaaggaaaagcugaa

SEQ ID NO: 2251508 - RNA, 19 nt, Homo sapiens
  misc_RNA (1)...(19): siRNA sense strand
ugaaaguggaaaagaagaa

SEQ ID NO: 2251509 - RNA, 19 nt, Homo sapiens
  misc_RNA (1)...(19): siRNA sense strand
auauaaaggaugagaagac

SEQ ID NO: 2251510 - RNA, 19 nt, Homo sapiens
  misc_RNA (1)...(19): siRNA sense strand
auaaaggaugagaagacaa

SEQ ID NO: 2251511 - RNA, 19 nt, Homo sapiens
  misc_RNA (1)...(19): siRNA sense strand
gugaaaaggaagaauccaa

SEQ ID NO: 2251512 - RNA, 19 nt, Homo sapiens
  misc_RNA (1)...(19): siRNA sense strand
augagaagucugaaaccaa

SEQ ID NO: 2251513 - RNA, 19 nt, Homo sapiens
  misc_RNA (1)...(19): siRNA sense strand
agaggaaaaugauggagaa

SEQ ID NO: 2251514 - RNA, 19 nt, Homo sapiens
  misc_RNA (1)...(19): siRNA sense strand
gaccaaaagcagacuuaaa

SEQ ID NO: 2251515 - RNA, 19 nt, Homo sapiens
  misc_RNA (1)...(19): siRNA sense strand
ggacagugacaggagggaa

SEQ ID NO: 2251516 - RNA, 19 nt, Homo sapiens
  misc_RNA (1)...(19): siRNA sense strand
gaggaaaaugauggagaaa

SEQ ID NO: 2251517 - RNA, 19 nt, Homo sapiens
  misc_RNA (1)...(19): siRNA sense strand
ggaaaagcugaaaguggaa

SEQ ID NO: 2251518 - RNA, 19 nt, Homo sapiens
  misc_RNA (1)...(19): siRNA sense strand
aggaaaagcugaaagugga

SEQ ID NO: 2251519 - RNA, 19 nt, Homo sapiens
  misc_RNA (1)...(19): siRNA sense strand
agaggaugaggaagaggaa

SEQ ID NO: 2251520 - RNA, 19 nt, Homo sapiens
  misc_RNA (1)...(19): siRNA sense strand
ccaagaaaggagaggaagc

SEQ ID NO: 2251521 - RNA, 19 nt, Homo sapiens
  misc_RNA (1)...(19): siRNA sense strand
uggauggaaaugaggugua

SEQ ID NO: 2251522 - RNA, 19 nt, Homo sapiens
  misc_RNA (1)...(19): siRNA sense strand
accaggaaaucauggaaca

SEQ ID NO: 2251523 - RNA, 19 nt, Homo sapiens
  misc_RNA (1)...(19): siRNA sense strand
auucagacacggacaguga

SEQ ID NO: 2251524 - RNA, 19 nt, Homo sapiens
  misc_RNA (1)...(19): siRNA sense strand
cuuaaagaaagaugagaag

SEQ ID NO: 2251525 - RNA, 19 nt, Homo sapiens
  misc_RNA (1)...(19): siRNA sense strand
uugugaagaggaugaggaa

SEQ ID NO: 2251526 - RNA, 19 nt, Homo sapiens
  misc_RNA (1)...(19): siRNA sense strand
cagaaaugagaguaggugu

SEQ ID NO: 2251527 - RNA, 19 nt, Homo sapiens
  misc_RNA (1)...(19): siRNA sense strand
aguccgacagugaggaaaa

SEQ ID NO: 2251528 - RNA, 19 nt, Homo sapiens
  misc_RNA (1)...(19): siRNA sense strand
ggauccaggaaguugguga

SEQ ID NO: 2251529 - RNA, 19 nt, Homo sapiens
  misc_RNA (1)...(19): siRNA sense strand
ugacaggagggaagaugau

SEQ ID NO: 2251530 - RNA, 19 nt, Homo sapiens
  misc_RNA (1)...(19): siRNA sense strand
aagaggaacuggaacagca

SEQ ID NO: 2251531 - RNA, 19 nt, Homo sapiens
  misc_RNA (1)...(19): siRNA sense strand
acuuaaaugugguugguaa

SEQ ID NO: 2251532 - RNA, 19 nt, Homo sapiens
  misc_RNA (1)...(19): siRNA sense strand
agaaauagacagacagaca

SEQ ID NO: 2251533 - RNA, 19 nt, Homo sapiens
  misc_RNA (1)...(19): siRNA sense strand
caauaaaauucaagcgcua

SEQ ID NO: 2251534 - RNA, 19 nt, Homo sapiens
  misc_RNA (1)...(19): siRNA sense strand
ccuuaaugaaauugggcaa

SEQ ID NO: 2251535 - RNA, 19 nt, Homo sapiens
  misc_RNA (1)...(19): siRNA sense strand
gcaaaagauucaagguaca

SEQ ID NO: 2251536 - RNA, 19 nt, Homo sapiens
  misc_RNA (1)...(19): siRNA sense strand
caucaaaagaagcagaaaa

SEQ ID NO: 2251537 - RNA, 19 nt, Homo sapiens
  misc_RNA (1)...(19): siRNA sense strand
uaaugauauuccaggcaua

SEQ ID NO: 2251538 - RNA, 19 nt, Homo sapiens
  misc_RNA (1)...(19): siRNA sense strand
auggagaggucuagaaaau

SEQ ID NO: 2251539 - RNA, 19 nt, Homo sapiens
  misc_RNA (1)...(19): siRNA sense strand
uuugagggcuggaggauau

SEQ ID NO: 2251540 - RNA, 19 nt, Homo sapiens
  misc_RNA (1)...(19): siRNA sense strand
cagaagaaucucauaacau

SEQ ID NO: 2251541 - RNA, 19 nt, Homo sapiens
  misc_RNA (1)...(19): siRNA sense strand
accuuaacauggaagauaa

SEQ ID NO: 2251542 - RNA, 19 nt, Homo sapiens
  misc_RNA (1)...(19): siRNA sense strand
ccaggaauggagaggucua

SEQ ID NO: 2251543 - RNA, 19 nt, Homo sapiens
  misc_RNA (1)...(19): siRNA sense strand
acaacauagccaacauaaa

SEQ ID NO: 2251544 - RNA, 19 nt, Homo sapiens
  misc_RNA (1)...(19): siRNA sense strand
uuugauugcacgugugaaa

SEQ ID NO: 2251545 - RNA, 19 nt, Homo sapiens
  misc_RNA (1)...(19): siRNA sense strand
gccuauaaagauaaggauu

SEQ ID NO: 2251546 - RNA, 19 nt, Homo sapiens
  misc_RNA (1)...(19): siRNA sense strand
ggaaaaucuccaagagcuu

SEQ ID NO: 2251547 - RNA, 19 nt, Homo sapiens
  misc_RNA (1)...(19): siRNA sense strand
ccugaaauacuuaagucua

SEQ ID NO: 2251548 - RNA, 19 nt, Homo sapiens
  misc_RNA (1)...(19): siRNA sense strand
gagccagaauugugccaga

SEQ ID NO: 2251549 - RNA, 19 nt, Homo sapiens
  misc_RNA (1)...(19): siRNA sense strand
ggucuugagaaacuagaaa

SEQ ID NO: 2251550 - RNA, 19 nt, Homo sapiens
  misc_RNA (1)...(19): siRNA sense strand
ggauuuaacaccaucucaa

SEQ ID NO: 2251551 - RNA, 19 nt, Homo sapiens
  misc_RNA (1)...(19): siRNA sense strand
gguacaucaugcaguucaa

SEQ ID NO: 2251552 - RNA, 19 nt, Homo sapiens
  misc_RNA (1)...(19): siRNA sense strand
uugucaagcagaagaauuu

SEQ ID NO: 2251553 - RNA, 19 nt, Homo sapiens
  misc_RNA (1)...(19): siRNA sense strand
ccuauaaagauaaggauug

SEQ ID NO: 2251554 - RNA, 19 nt, Homo sapiens
  misc_RNA (1)...(19): siRNA sense strand
guguugaaccuuacccaua

SEQ ID NO: 2251555 - RNA, 19 nt, Homo sapiens
  misc_RNA (1)...(19): siRNA sense strand
gcaacaacaacauagccaa

SEQ ID NO: 2251556 - RNA, 19 nt, Homo sapiens
  misc_RNA (1)...(19): siRNA sense strand
uggauuaacgagacccaua

SEQ ID NO: 2251557 - RNA, 19 nt, Homo sapiens
  misc_RNA (1)...(19): siRNA sense strand
aagcaauuguuaacagcau

SEQ ID NO: 2251558 - RNA, 19 nt, Homo sapiens
  misc_RNA (1)...(19): siRNA sense strand
ugaggagauuccagauuau

SEQ ID NO: 2251559 - RNA, 19 nt, Homo sapiens
  misc_RNA (1)...(19): siRNA sense strand
gcgaagaggaauguuuaaa

SEQ ID NO: 2251560 - RNA, 19 nt, Homo sapiens
  misc_RNA (1)...(19): siRNA sense strand
aaagugaagaacuggauau

SEQ ID NO: 2251561 - RNA, 19 nt, Homo sapiens
  misc_RNA (1)...(19): siRNA sense strand
gaguuagauaugcgcuuua

SEQ ID NO: 2251562 - RNA, 19 nt, Homo sapiens
  misc_RNA (1)...(19): siRNA sense strand
ugaucuacccacaaacaua

SEQ ID NO: 2251563 - RNA, 19 nt, Homo sapiens
  misc_RNA (1)...(19): siRNA sense strand
cauaaucaacucagaagau

SEQ ID NO: 2251564 - RNA, 19 nt, Homo sapiens
  misc_RNA (1)...(19): siRNA sense strand
ccgccaacuucacaaggua

SEQ ID NO: 2251565 - RNA, 19 nt, Homo sapiens
  misc_RNA (1)...(19): siRNA sense strand
cagaauugugccagaaacu

SEQ ID NO: 2251566 - RNA, 19 nt, Homo sapiens
  misc_RNA (1)...(19): siRNA sense strand
ccuuaacauggaagauaau

SEQ ID NO: 2251567 - RNA, 19 nt, Homo sapiens
  misc_RNA (1)...(19): siRNA sense strand
ggcaagaacucacaggcca

SEQ ID NO: 2251568 - RNA, 19 nt, Homo sapiens
  misc_RNA (1)...(19): siRNA sense strand
aaagauaaggauugggucu

SEQ ID NO: 2251569 - RNA, 19 nt, Homo sapiens
  misc_RNA (1)...(19): siRNA sense strand
aggagauuccagauuauaa

SEQ ID NO: 2251570 - RNA, 19 nt, Homo sapiens
  misc_RNA (1)...(19): siRNA sense strand
ccuccagcacaaugagcua

SEQ ID NO: 2251571 - RNA, 19 nt, Homo sapiens
  misc_RNA (1)...(19): siRNA sense strand
ggucccagccuuacagaga

SEQ ID NO: 2251572 - RNA, 19 nt, Homo sapiens
  misc_RNA (1)...(19): siRNA sense strand
ucaaccuaaccaagaauaa

SEQ ID NO: 2251573 - RNA, 19 nt, Homo sapiens
  misc_RNA (1)...(19): siRNA sense strand
cagacagacagaacaguuu

SEQ ID NO: 2251574 - RNA, 19 nt, Homo sapiens
  misc_RNA (1)...(19): siRNA sense strand
agaaacuucccauguuaaa

SEQ ID NO: 2251575 - RNA, 19 nt, Homo sapiens
  misc_RNA (1)...(19): siRNA sense strand
ccaacauaaaugaugacau

SEQ ID NO: 2251576 - RNA, 19 nt, Homo sapiens
  misc_RNA (1)...(19): siRNA sense strand
aaagaaauagacagacaga

SEQ ID NO: 2251577 - RNA, 19 nt, Homo sapiens
  misc_RNA (1)...(19): siRNA sense strand
aaauagacagacagacaga

SEQ ID NO: 2251578 - RNA, 19 nt, Homo sapiens
  misc_RNA (1)...(19): siRNA sense strand
gaagauuaccagccgccaa

SEQ ID NO: 2251579 - RNA, 19 nt, Homo sapiens
  misc_RNA (1)...(19): siRNA sense strand
cagaaacuucccauguuaa

SEQ ID NO: 2251580 - RNA, 19 nt, Homo sapiens
  misc_RNA (1)...(19): siRNA sense strand
agcaauauguucacaggau

SEQ ID NO: 2251581 - RNA, 19 nt, Homo sapiens
  misc_RNA (1)...(19): siRNA sense strand
augacauguuggagggucu

SEQ ID NO: 2251582 - RNA, 19 nt, Homo sapiens
  misc_RNA (1)...(19): siRNA sense strand
ucauaacauccguugagaa

SEQ ID NO: 2251583 - RNA, 19 nt, Homo sapiens
  misc_RNA (1)...(19): siRNA sense strand
ccauaaucaacucagaaga

SEQ ID NO: 2251584 - RNA, 19 nt, Homo sapiens
  misc_RNA (1)...(19): siRNA sense strand
gccaacuucacaagguaua

SEQ ID NO: 2251585 - RNA, 19 nt, Homo sapiens
  misc_RNA (1)...(19): siRNA sense strand
ccaacucaauccagaaaau

SEQ ID NO: 2251586 - RNA, 19 nt, Homo sapiens
  misc_RNA (1)...(19): siRNA sense strand
uggagggucuugagaaacu

SEQ ID NO: 2251587 - RNA, 19 nt, Homo sapiens
  misc_RNA (1)...(19): siRNA sense strand
acucagguucagcuggaaa

SEQ ID NO: 2251588 - RNA, 19 nt, Homo sapiens
  misc_RNA (1)...(19): siRNA sense strand
guucaaacuucuugggcuu

SEQ ID NO: 2251589 - RNA, 19 nt, Homo sapiens
  misc_RNA (1)...(19): siRNA sense strand
ccuuaauauugacaggaaa

SEQ ID NO: 2251590 - RNA, 19 nt, Homo sapiens
  misc_RNA (1)...(19): siRNA sense strand
caggaugaggacuggguaa

SEQ ID NO: 2251591 - RNA, 19 nt, Homo sapiens
  misc_RNA (1)...(19): siRNA sense strand
aaaguaugguagaggugaa

SEQ ID NO: 2251592 - RNA, 19 nt, Homo sapiens
  misc_RNA (1)...(19): siRNA sense strand
gugacuauugaaaggguaa

SEQ ID NO: 2251593 - RNA, 19 nt, Homo sapiens
  misc_RNA (1)...(19): siRNA sense strand
gcuuagaacaacuagaaca

SEQ ID NO: 2251594 - RNA, 19 nt, Homo sapiens
  misc_RNA (1)...(19): siRNA sense strand
ugguggaaguugaacgaau

SEQ ID NO: 2251595 - RNA, 19 nt, Homo sapiens
  misc_RNA (1)...(19): siRNA sense strand
guacuaaauaugagccaca

SEQ ID NO: 2251596 - RNA, 19 nt, Homo sapiens
  misc_RNA (1)...(19): siRNA sense strand
cauaaaagccgaaagguga

SEQ ID NO: 2251597 - RNA, 19 nt, Homo sapiens
  misc_RNA (1)...(19): siRNA sense strand
acgaauggaaugugcaaca

SEQ ID NO: 2251598 - RNA, 19 nt, Homo sapiens
  misc_RNA (1)...(19): siRNA sense strand
ggguaaggaaugagcuagu

SEQ ID NO: 2251599 - RNA, 19 nt, Homo sapiens
  misc_RNA (1)...(19): siRNA sense strand
cuuagaacaacuagaacau

SEQ ID NO: 2251600 - RNA, 19 nt, Homo sapiens
  misc_RNA (1)...(19): siRNA sense strand
ccucauuuaccuugacauu

SEQ ID NO: 2251601 - RNA, 19 nt, Homo sapiens
  misc_RNA (1)...(19): siRNA sense strand
augaaggaaacuuggaaaa

SEQ ID NO: 2251602 - RNA, 19 nt, Homo sapiens
  misc_RNA (1)...(19): siRNA sense strand
ccuuauaagugucugaacu

SEQ ID NO: 2251603 - RNA, 19 nt, Homo sapiens
  misc_RNA (1)...(19): siRNA sense strand
aaugaaggaaacuuggaaa

SEQ ID NO: 2251604 - RNA, 19 nt, Homo sapiens
  misc_RNA (1)...(19): siRNA sense strand
cuugugaacaccagaguuu

SEQ ID NO: 2251605 - RNA, 19 nt, Homo sapiens
  misc_RNA (1)...(19): siRNA sense strand
cuucagauaagcagggcau

SEQ ID NO: 2251606 - RNA, 19 nt, Homo sapiens
  misc_RNA (1)...(19): siRNA sense strand
cagaaggaacaguggguac

SEQ ID NO: 2251607 - RNA, 19 nt, Homo sapiens
  misc_RNA (1)...(19): siRNA sense strand
cuggguaaggaaugagcua

SEQ ID NO: 2251608 - RNA, 19 nt, Homo sapiens
  misc_RNA (1)...(19): siRNA sense strand
ccauugaagaauuccgauu

SEQ ID NO: 2251609 - RNA, 19 nt, Homo sapiens
  misc_RNA (1)...(19): siRNA sense strand
ugguggcuguggagacaaa

SEQ ID NO: 2251610 - RNA, 19 nt, Homo sapiens
  misc_RNA (1)...(19): siRNA sense strand
ccucagugugcuuguagua

SEQ ID NO: 2251611 - RNA, 19 nt, Homo sapiens
  misc_RNA (1)...(19): siRNA sense strand
ggaugguaaaucauggaau

SEQ ID NO: 2251612 - RNA, 19 nt, Homo sapiens
  misc_RNA (1)...(19): siRNA sense strand
aacuagaacaucuggauuu

SEQ ID NO: 2251613 - RNA, 19 nt, Homo sapiens
  misc_RNA (1)...(19): siRNA sense strand
ucacauaaugacuuccaaa

SEQ ID NO: 2251614 - RNA, 19 nt, Homo sapiens
  misc_RNA (1)...(19): siRNA sense strand
aagcccugcuggaugguaa

SEQ ID NO: 2251615 - RNA, 19 nt, Homo sapiens
  misc_RNA (1)...(19): siRNA sense strand
aagaauuccgauuagcaua

SEQ ID NO: 2251616 - RNA, 19 nt, Homo sapiens
  misc_RNA (1)...(19): siRNA sense strand
gugagugugacuauugaaa

SEQ ID NO: 2251617 - RNA, 19 nt, Homo sapiens
  misc_RNA (1)...(19): siRNA sense strand
ucuucacagagcugagaaa

SEQ ID NO: 2251618 - RNA, 19 nt, Homo sapiens
  misc_RNA (1)...(19): siRNA sense strand
ugugcaacaccuucagaua

SEQ ID NO: 2251619 - RNA, 19 nt, Homo sapiens
  misc_RNA (1)...(19): siRNA sense strand
gcuuguaguaucuguugua

SEQ ID NO: 2251620 - RNA, 19 nt, Homo sapiens
  misc_RNA (1)...(19): siRNA sense strand
gauuagcauacuuagacua

SEQ ID NO: 2251621 - RNA, 19 nt, Homo sapiens
  misc_RNA (1)...(19): siRNA sense strand
accuuaauauugacaggaa

SEQ ID NO: 2251622 - RNA, 19 nt, Homo sapiens
  misc_RNA (1)...(19): siRNA sense strand
guucaaacuucuugggcuu

SEQ ID NO: 2251623 - RNA, 19 nt, Homo sapiens
  misc_RNA (1)...(19): siRNA sense strand
ccuuaauauugacaggaaa

SEQ ID NO: 2251624 - RNA, 19 nt, Homo sapiens
  misc_RNA (1)...(19): siRNA sense strand
caggaugaggacuggguaa

SEQ ID NO: 2251625 - RNA, 19 nt, Homo sapiens
  misc_RNA (1)...(19): siRNA sense strand
aaaguaugguagaggugaa

SEQ ID NO: 2251626 - RNA, 19 nt, Homo sapiens
  misc_RNA (1)...(19): siRNA sense strand
gugacuauugaaaggguaa

SEQ ID NO: 2251627 - RNA, 19 nt, Homo sapiens
  misc_RNA (1)...(19): siRNA sense strand
gcuuagaacaacuagaaca

SEQ ID NO: 2251628 - RNA, 19 nt, Homo sapiens
  misc_RNA (1)...(19): siRNA sense strand
ugguggaaguugaacgaau

SEQ ID NO: 2251629 - RNA, 19 nt, Homo sapiens
  misc_RNA (1)...(19): siRNA sense strand
guacuaaauaugagccaca

SEQ ID NO: 2251630 - RNA, 19 nt, Homo sapiens
  misc_RNA (1)...(19): siRNA sense strand
cauaaaagccgaaagguga

SEQ ID NO: 2251631 - RNA, 19 nt, Homo sapiens
  misc_RNA (1)...(19): siRNA sense strand
acgaauggaaugugcaaca

SEQ ID NO: 2251632 - RNA, 19 nt, Homo sapiens
  misc_RNA (1)...(19): siRNA sense strand
ggguaaggaaugagcuagu

SEQ ID NO: 2251633 - RNA, 19 nt, Homo sapiens
  misc_RNA (1)...(19): siRNA sense strand
cuuagaacaacuagaacau

SEQ ID NO: 2251634 - RNA, 19 nt, Homo sapiens
  misc_RNA (1)...(19): siRNA sense strand
ccucauuuaccuugacauu

SEQ ID NO: 2251635 - RNA, 19 nt, Homo sapiens
  misc_RNA (1)...(19): siRNA sense strand
augaaggaaacuuggaaaa

SEQ ID NO: 2251636 - RNA, 19 nt, Homo sapiens
  misc_RNA (1)...(19): siRNA sense strand
ccuuauaagugucugaacu

SEQ ID NO: 2251637 - RNA, 19 nt, Homo sapiens
  misc_RNA (1)...(19): siRNA sense strand
aaugaaggaaacuuggaaa

SEQ ID NO: 2251638 - RNA, 19 nt, Homo sapiens
  misc_RNA (1)...(19): siRNA sense strand
cuugugaacaccagaguuu

SEQ ID NO: 2251639 - RNA, 19 nt, Homo sapiens
  misc_RNA (1)...(19): siRNA sense strand
cuucagauaagcagggcau

SEQ ID NO: 2251640 - RNA, 19 nt, Homo sapiens
  misc_RNA (1)...(19): siRNA sense strand
cagaaggaacaguggguac

SEQ ID NO: 2251641 - RNA, 19 nt, Homo sapiens
  misc_RNA (1)...(19): siRNA sense strand
cuggguaaggaaugagcua

SEQ ID NO: 2251642 - RNA, 19 nt, Homo sapiens
  misc_RNA (1)...(19): siRNA sense strand
ccauugaagaauuccgauu

SEQ ID NO: 2251643 - RNA, 19 nt, Homo sapiens
  misc_RNA (1)...(19): siRNA sense strand
ugguggcuguggagacaaa

SEQ ID NO: 2251644 - RNA, 19 nt, Homo sapiens
  misc_RNA (1)...(19): siRNA sense strand
ccucagugugcuuguagua

SEQ ID NO: 2251645 - RNA, 19 nt, Homo sapiens
  misc_RNA (1)...(19): siRNA sense strand
ggaugguaaaucauggaau

SEQ ID NO: 2251646 - RNA, 19 nt, Homo sapiens
  misc_RNA (1)...(19): siRNA sense strand
aacuagaacaucuggauuu

SEQ ID NO: 2251647 - RNA, 19 nt, Homo sapiens
  misc_RNA (1)...(19): siRNA sense strand
ucacauaaugacuuccaaa

SEQ ID NO: 2251648 - RNA, 19 nt, Homo sapiens
  misc_RNA (1)...(19): siRNA sense strand
aagcccugcuggaugguaa

SEQ ID NO: 2251649 - RNA, 19 nt, Homo sapiens
  misc_RNA (1)...(19): siRNA sense strand
aagaauuccgauuagcaua

SEQ ID NO: 2251650 - RNA, 19 nt, Homo sapiens
  misc_RNA (1)...(19): siRNA sense strand
gugagugugacuauugaaa

SEQ ID NO: 2251651 - RNA, 19 nt, Homo sapiens
  misc_RNA (1)...(19): siRNA sense strand
ucuucacagagcugagaaa

SEQ ID NO: 2251652 - RNA, 19 nt, Homo sapiens
  misc_RNA (1)...(19): siRNA sense strand
ugugcaacaccuucagaua

SEQ ID NO: 2251653 - RNA, 19 nt, Homo sapiens
  misc_RNA (1)...(19): siRNA sense strand
gcuuguaguaucuguugua

SEQ ID NO: 2251654 - RNA, 19 nt, Homo sapiens
  misc_RNA (1)...(19): siRNA sense strand
accuuaauauugacaggaa

SEQ ID NO: 2251655 - RNA, 19 nt, Homo sapiens
  misc_RNA (1)...(19): siRNA sense strand
gauuagcauacuuagacua

SEQ ID NO: 2251656 - RNA, 19 nt, Homo sapiens
  misc_RNA (1)...(19): siRNA sense strand
guucaaacuucuugggcuu

SEQ ID NO: 2251657 - RNA, 19 nt, Homo sapiens
  misc_RNA (1)...(19): siRNA sense strand
ccuuaauauugacaggaaa

SEQ ID NO: 2251658 - RNA, 19 nt, Homo sapiens
  misc_RNA (1)...(19): siRNA sense strand
caggaugaggacuggguaa

SEQ ID NO: 2251659 - RNA, 19 nt, Homo sapiens
  misc_RNA (1)...(19): siRNA sense strand
aaaguaugguagaggugaa

SEQ ID NO: 2251660 - RNA, 19 nt, Homo sapiens
  misc_RNA (1)...(19): siRNA sense strand
gugacuauugaaaggguaa

SEQ ID NO: 2251661 - RNA, 19 nt, Homo sapiens
  misc_RNA (1)...(19): siRNA sense strand
gcuuagaacaacuagaaca

SEQ ID NO: 2251662 - RNA, 19 nt, Homo sapiens
  misc_RNA (1)...(19): siRNA sense strand
ugguggaaguugaacgaau

SEQ ID NO: 2251663 - RNA, 19 nt, Homo sapiens
  misc_RNA (1)...(19): siRNA sense strand
guacuaaauaugagccaca

SEQ ID NO: 2251664 - RNA, 19 nt, Homo sapiens
  misc_RNA (1)...(19): siRNA sense strand
cauaaaagccgaaagguga

SEQ ID NO: 2251665 - RNA, 19 nt, Homo sapiens
  misc_RNA (1)...(19): siRNA sense strand
acgaauggaaugugcaaca

SEQ ID NO: 2251666 - RNA, 19 nt, Homo sapiens
  misc_RNA (1)...(19): siRNA sense strand
ggguaaggaaugagcuagu

SEQ ID NO: 2251667 - RNA, 19 nt, Homo sapiens
  misc_RNA (1)...(19): siRNA sense strand
cuuagaacaacuagaacau

SEQ ID NO: 2251668 - RNA, 19 nt, Homo sapiens
  misc_RNA (1)...(19): siRNA sense strand
ccucauuuaccuugacauu

SEQ ID NO: 2251669 - RNA, 19 nt, Homo sapiens
  misc_RNA (1)...(19): siRNA sense strand
augaaggaaacuuggaaaa

SEQ ID NO: 2251670 - RNA, 19 nt, Homo sapiens
  misc_RNA (1)...(19): siRNA sense strand
ccuuauaagugucugaacu

SEQ ID NO: 2251671 - RNA, 19 nt, Homo sapiens
  misc_RNA (1)...(19): siRNA sense strand
aaugaaggaaacuuggaaa

SEQ ID NO: 2251672 - RNA, 19 nt, Homo sapiens
  misc_RNA (1)...(19): siRNA sense strand
cuugugaacaccagaguuu

SEQ ID NO: 2251673 - RNA, 19 nt, Homo sapiens
  misc_RNA (1)...(19): siRNA sense strand
cuucagauaagcagggcau

SEQ ID NO: 2251674 - RNA, 19 nt, Homo sapiens
  misc_RNA (1)...(19): siRNA sense strand
cagaaggaacaguggguac

SEQ ID NO: 2251675 - RNA, 19 nt, Homo sapiens
  misc_RNA (1)...(19): siRNA sense strand
cuggguaaggaaugagcua

SEQ ID NO: 2251676 - RNA, 19 nt, Homo sapiens
  misc_RNA (1)...(19): siRNA sense strand
ccauugaagaauuccgauu

SEQ ID NO: 2251677 - RNA, 19 nt, Homo sapiens
  misc_RNA (1)...(19): siRNA sense strand
ugguggcuguggagacaaa

SEQ ID NO: 2251678 - RNA, 19 nt, Homo sapiens
  misc_RNA (1)...(19): siRNA sense strand
ccucagugugcuuguagua

SEQ ID NO: 2251679 - RNA, 19 nt, Homo sapiens
  misc_RNA (1)...(19): siRNA sense strand
ggaugguaaaucauggaau

SEQ ID NO: 2251680 - RNA, 19 nt, Homo sapiens
  misc_RNA (1)...(19): siRNA sense strand
aacuagaacaucuggauuu

SEQ ID NO: 2251681 - RNA, 19 nt, Homo sapiens
  misc_RNA (1)...(19): siRNA sense strand
ucacauaaugacuuccaaa

SEQ ID NO: 2251682 - RNA, 19 nt, Homo sapiens
  misc_RNA (1)...(19): siRNA sense strand
aagcccugcuggaugguaa

SEQ ID NO: 2251683 - RNA, 19 nt, Homo sapiens
  misc_RNA (1)...(19): siRNA sense strand
aagaauuccgauuagcaua

SEQ ID NO: 2251684 - RNA, 19 nt, Homo sapiens
  misc_RNA (1)...(19): siRNA sense strand
gugagugugacuauugaaa

SEQ ID NO: 2251685 - RNA, 19 nt, Homo sapiens
  misc_RNA (1)...(19): siRNA sense strand
ucuucacagagcugagaaa

SEQ ID NO: 2251686 - RNA, 19 nt, Homo sapiens
  misc_RNA (1)...(19): siRNA sense strand
ugugcaacaccuucagaua

SEQ ID NO: 2251687 - RNA, 19 nt, Homo sapiens
  misc_RNA (1)...(19): siRNA sense strand
gcuuguaguaucuguugua

SEQ ID NO: 2251688 - RNA, 19 nt, Homo sapiens
  misc_RNA (1)...(19): siRNA sense strand
gauuagcauacuuagacua

SEQ ID NO: 2251689 - RNA, 19 nt, Homo sapiens
  misc_RNA (1)...(19): siRNA sense strand
accuuaauauugacaggaa

SEQ ID NO: 2251690 - RNA, 19 nt, Homo sapiens
  misc_RNA (1)...(19): siRNA sense strand
guucaaacuucuugggcuu

SEQ ID NO: 2251691 - RNA, 19 nt, Homo sapiens
  misc_RNA (1)...(19): siRNA sense strand
caggaugaggacuggguaa

SEQ ID NO: 2251692 - RNA, 19 nt, Homo sapiens
  misc_RNA (1)...(19): siRNA sense strand
aaaguaugguagaggugaa

SEQ ID NO: 2251693 - RNA, 19 nt, Homo sapiens
  misc_RNA (1)...(19): siRNA sense strand
gugacuauugaaaggguaa

SEQ ID NO: 2251694 - RNA, 19 nt, Homo sapiens
  misc_RNA (1)...(19): siRNA sense strand
gcuuagaacaacuagaaca

SEQ ID NO: 2251695 - RNA, 19 nt, Homo sapiens
  misc_RNA (1)...(19): siRNA sense strand
ugguggaaguugaacgaau

SEQ ID NO: 2251696 - RNA, 19 nt, Homo sapiens
  misc_RNA (1)...(19): siRNA sense strand
guacuaaauaugagccaca

SEQ ID NO: 2251697 - RNA, 19 nt, Homo sapiens
  misc_RNA (1)...(19): siRNA sense strand
cauaaaagccgaaagguga

SEQ ID NO: 2251698 - RNA, 19 nt, Homo sapiens
  misc_RNA (1)...(19): siRNA sense strand
acgaauggaaugugcaaca

SEQ ID NO: 2251699 - RNA, 19 nt, Homo sapiens
  misc_RNA (1)...(19): siRNA sense strand
ggguaaggaaugagcuagu

SEQ ID NO: 2251700 - RNA, 19 nt, Homo sapiens
  misc_RNA (1)...(19): siRNA sense strand
cuuagaacaacuagaacau

SEQ ID NO: 2251701 - RNA, 19 nt, Homo sapiens
  misc_RNA (1)...(19): siRNA sense strand
ccucauuuaccuugacauu

SEQ ID NO: 2251702 - RNA, 19 nt, Homo sapiens
  misc_RNA (1)...(19): siRNA sense strand
augaaggaaacuuggaaaa

SEQ ID NO: 2251703 - RNA, 19 nt, Homo sapiens
  misc_RNA (1)...(19): siRNA sense strand
ccuuauaagugucugaacu

SEQ ID NO: 2251704 - RNA, 19 nt, Homo sapiens
  misc_RNA (1)...(19): siRNA sense strand
aaugaaggaaacuuggaaa

SEQ ID NO: 2251705 - RNA, 19 nt, Homo sapiens
  misc_RNA (1)...(19): siRNA sense strand
cuugugaacaccagaguuu

SEQ ID NO: 2251706 - RNA, 19 nt, Homo sapiens
  misc_RNA (1)...(19): siRNA sense strand
cuucagauaagcagggcau

SEQ ID NO: 2251707 - RNA, 19 nt, Homo sapiens
  misc_RNA (1)...(19): siRNA sense strand
cagaaggaacaguggguac

SEQ ID NO: 2251708 - RNA, 19 nt, Homo sapiens
  misc_RNA (1)...(19): siRNA sense strand
cuggguaaggaaugagcua

SEQ ID NO: 2251709 - RNA, 19 nt, Homo sapiens
  misc_RNA (1)...(19): siRNA sense strand
ccauugaagaauuccgauu

SEQ ID NO: 2251710 - RNA, 19 nt, Homo sapiens
  misc_RNA (1)...(19): siRNA sense strand
ccucagugugcuuguagua

SEQ ID NO: 2251711 - RNA, 19 nt, Homo sapiens
  misc_RNA (1)...(19): siRNA sense strand
ggaugguaaaucauggaau

SEQ ID NO: 2251712 - RNA, 19 nt, Homo sapiens
  misc_RNA (1)...(19): siRNA sense strand
aacuagaacaucuggauuu

SEQ ID NO: 2251713 - RNA, 19 nt, Homo sapiens
  misc_RNA (1)...(19): siRNA sense strand
ucacauaaugacuuccaaa

SEQ ID NO: 2251714 - RNA, 19 nt, Homo sapiens
  misc_RNA (1)...(19): siRNA sense strand
aagcccugcuggaugguaa

SEQ ID NO: 2251715 - RNA, 19 nt, Homo sapiens
  misc_RNA (1)...(19): siRNA sense strand
aagaauuccgauuagcaua

SEQ ID NO: 2251716 - RNA, 19 nt, Homo sapiens
  misc_RNA (1)...(19): siRNA sense strand
gugagugugacuauugaaa

SEQ ID NO: 2251717 - RNA, 19 nt, Homo sapiens
  misc_RNA (1)...(19): siRNA sense strand
ucuucacagagcugagaaa

SEQ ID NO: 2251718 - RNA, 19 nt, Homo sapiens
  misc_RNA (1)...(19): siRNA sense strand
ugugcaacaccuucagaua

SEQ ID NO: 2251719 - RNA, 19 nt, Homo sapiens
  misc_RNA (1)...(19): siRNA sense strand
gcuuguaguaucuguugua

SEQ ID NO: 2251720 - RNA, 19 nt, Homo sapiens
  misc_RNA (1)...(19): siRNA sense strand
gauuagcauacuuagacua

SEQ ID NO: 2251721 - RNA, 19 nt, Homo sapiens
  misc_RNA (1)...(19): siRNA sense strand
augcagacaaaguaaacaa

SEQ ID NO: 2251722 - RNA, 19 nt, Homo sapiens
  misc_RNA (1)...(19): siRNA sense strand
caguauaacucuacaggag

SEQ ID NO: 2251723 - RNA, 19 nt, Homo sapiens
  misc_RNA (1)...(19): siRNA sense strand
cgauuauagagauuggaca

SEQ ID NO: 2251724 - RNA, 19 nt, Homo sapiens
  misc_RNA (1)...(19): siRNA sense strand
uccuaagaguugcuguaaa

SEQ ID NO: 2251725 - RNA, 19 nt, Homo sapiens
  misc_RNA (1)...(19): siRNA sense strand
ccauuauagagucagaaau

SEQ ID NO: 2251726 - RNA, 19 nt, Homo sapiens
  misc_RNA (1)...(19): siRNA sense strand
ggagaagcaagcaggcgaa

SEQ ID NO: 2251727 - RNA, 19 nt, Homo sapiens
  misc_RNA (1)...(19): siRNA sense strand
ugaagaagacagagacgca

SEQ ID NO: 2251728 - RNA, 19 nt, Homo sapiens
  misc_RNA (1)...(19): siRNA sense strand
aaacgauugaacaggagaa

SEQ ID NO: 2251729 - RNA, 19 nt, Homo sapiens
  misc_RNA (1)...(19): siRNA sense strand
acuacgacaagaagaacua

SEQ ID NO: 2251730 - RNA, 19 nt, Homo sapiens
  misc_RNA (1)...(19): siRNA sense strand
ccgccuuccuggaccacaa

SEQ ID NO: 2251731 - RNA, 19 nt, Homo sapiens
  misc_RNA (1)...(19): siRNA sense strand
gggaggaagcagacagcau

SEQ ID NO: 2251732 - RNA, 19 nt, Homo sapiens
  misc_RNA (1)...(19): siRNA sense strand
ccguuuaagcagaaaguga

SEQ ID NO: 2251733 - RNA, 19 nt, Homo sapiens
  misc_RNA (1)...(19): siRNA sense strand
cggaaugaaagcagagguu

SEQ ID NO: 2251734 - RNA, 19 nt, Homo sapiens
  misc_RNA (1)...(19): siRNA sense strand
cugaaggaguggagcaacu

SEQ ID NO: 2251735 - RNA, 19 nt, Homo sapiens
  misc_RNA (1)...(19): siRNA sense strand
ccguggaggacaaguacaa

SEQ ID NO: 2251736 - RNA, 19 nt, Homo sapiens
  misc_RNA (1)...(19): siRNA sense strand
cagagaaacugaaggagcu

SEQ ID NO: 2251737 - RNA, 19 nt, Homo sapiens
  misc_RNA (1)...(19): siRNA sense strand
ugaccgagcuggagagcgu

SEQ ID NO: 2251738 - RNA, 19 nt, Homo sapiens
  misc_RNA (1)...(19): siRNA sense strand
gggcaaguggcucggaaca

SEQ ID NO: 2251739 - RNA, 19 nt, Homo sapiens
  misc_RNA (1)...(19): siRNA sense strand
aggacaaguacaaguguga

SEQ ID NO: 2251740 - RNA, 19 nt, Homo sapiens
  misc_RNA (1)...(19): siRNA sense strand
ggcuauaagaugugugcca

SEQ ID NO: 2251741 - RNA, 19 nt, Homo sapiens
  misc_RNA (1)...(19): siRNA sense strand
cuagaaaaugggacauaua

SEQ ID NO: 2251742 - RNA, 19 nt, Homo sapiens
  misc_RNA (1)...(19): siRNA sense strand
acguggagaaggcguguaa

SEQ ID NO: 2251743 - RNA, 19 nt, Homo sapiens
  misc_RNA (1)...(19): siRNA sense strand
ugaggaaagaccugcgaga

SEQ ID NO: 2251744 - RNA, 19 nt, Homo sapiens
  misc_RNA (1)...(19): siRNA sense strand
aggaaaaguuugugaagac

SEQ ID NO: 2251745 - RNA, 19 nt, Homo sapiens
  misc_RNA (1)...(19): siRNA sense strand
cagcgugucaagagagcau

SEQ ID NO: 2251746 - RNA, 19 nt, Homo sapiens
  misc_RNA (1)...(19): siRNA sense strand
ugucaucaugcguggagaa

SEQ ID NO: 2251747 - RNA, 19 nt, Homo sapiens
  misc_RNA (1)...(19): siRNA sense strand
gcagacagcaugaagagca

SEQ ID NO: 2251748 - RNA, 19 nt, Homo sapiens
  misc_RNA (1)...(19): siRNA sense strand
cggcagaacugggaggaag

SEQ ID NO: 2251749 - RNA, 19 nt, Homo sapiens
  misc_RNA (1)...(19): siRNA sense strand
aagcagagguugugcagag

SEQ ID NO: 2251750 - RNA, 19 nt, Homo sapiens
  misc_RNA (1)...(19): siRNA sense strand
ggaaagaccugcgagacca

SEQ ID NO: 2251751 - RNA, 19 nt, Homo sapiens
  misc_RNA (1)...(19): siRNA sense strand
ucaagaagcccacuggaga

SEQ ID NO: 2251752 - RNA, 19 nt, Homo sapiens
  misc_RNA (1)...(19): siRNA sense strand
agauaagguguuuaaggau

SEQ ID NO: 2251753 - RNA, 19 nt, Homo sapiens
  misc_RNA (1)...(19): siRNA sense strand
gcguguaaauaccgggaag

SEQ ID NO: 2251754 - RNA, 19 nt, Homo sapiens
  misc_RNA (1)...(19): siRNA sense strand
agaccguggaggacaagua

SEQ ID NO: 2251755 - RNA, 19 nt, Homo sapiens
  misc_RNA (1)...(19): siRNA sense strand
ugcgagaccacguggagaa

SEQ ID NO: 2251756 - RNA, 19 nt, Homo sapiens
  misc_RNA (1)...(19): siRNA sense strand
acgucaaccugcugaagga

SEQ ID NO: 2251757 - RNA, 19 nt, Homo sapiens
  misc_RNA (1)...(19): siRNA sense strand
auugagagacaaaaggaaa

SEQ ID NO: 2251758 - RNA, 19 nt, Homo sapiens
  misc_RNA (1)...(19): siRNA sense strand
cuucauuuacagcgaguga

SEQ ID NO: 2251759 - RNA, 19 nt, Homo sapiens
  misc_RNA (1)...(19): siRNA sense strand
ucguuaaagauaagguguu

SEQ ID NO: 2251760 - RNA, 19 nt, Homo sapiens
  misc_RNA (1)...(19): siRNA sense strand
gggaggaagcagacagcau

SEQ ID NO: 2251761 - RNA, 19 nt, Homo sapiens
  misc_RNA (1)...(19): siRNA sense strand
ccguuuaagcagaaaguga

SEQ ID NO: 2251762 - RNA, 19 nt, Homo sapiens
  misc_RNA (1)...(19): siRNA sense strand
cggaaugaaagcagagguu

SEQ ID NO: 2251763 - RNA, 19 nt, Homo sapiens
  misc_RNA (1)...(19): siRNA sense strand
cugaaggaguggagcaacu

SEQ ID NO: 2251764 - RNA, 19 nt, Homo sapiens
  misc_RNA (1)...(19): siRNA sense strand
ccguggaggacaaguacaa

SEQ ID NO: 2251765 - RNA, 19 nt, Homo sapiens
  misc_RNA (1)...(19): siRNA sense strand
cagagaaacugaaggagcu

SEQ ID NO: 2251766 - RNA, 19 nt, Homo sapiens
  misc_RNA (1)...(19): siRNA sense strand
ugaccgagcuggagagcgu

SEQ ID NO: 2251767 - RNA, 19 nt, Homo sapiens
  misc_RNA (1)...(19): siRNA sense strand
gggcaaguggcucggaaca

SEQ ID NO: 2251768 - RNA, 19 nt, Homo sapiens
  misc_RNA (1)...(19): siRNA sense strand
aggacaaguacaaguguga

SEQ ID NO: 2251769 - RNA, 19 nt, Homo sapiens
  misc_RNA (1)...(19): siRNA sense strand
ggcuauaagaugugugcca

SEQ ID NO: 2251770 - RNA, 19 nt, Homo sapiens
  misc_RNA (1)...(19): siRNA sense strand
cuagaaaaugggacauaua

SEQ ID NO: 2251771 - RNA, 19 nt, Homo sapiens
  misc_RNA (1)...(19): siRNA sense strand
acguggagaaggcguguaa

SEQ ID NO: 2251772 - RNA, 19 nt, Homo sapiens
  misc_RNA (1)...(19): siRNA sense strand
ugaggaaagaccugcgaga

SEQ ID NO: 2251773 - RNA, 19 nt, Homo sapiens
  misc_RNA (1)...(19): siRNA sense strand
aggaaaaguuugugaagac

SEQ ID NO: 2251774 - RNA, 19 nt, Homo sapiens
  misc_RNA (1)...(19): siRNA sense strand
cagcgugucaagagagcau

SEQ ID NO: 2251775 - RNA, 19 nt, Homo sapiens
  misc_RNA (1)...(19): siRNA sense strand
ugucaucaugcguggagaa

SEQ ID NO: 2251776 - RNA, 19 nt, Homo sapiens
  misc_RNA (1)...(19): siRNA sense strand
gcagacagcaugaagagca

SEQ ID NO: 2251777 - RNA, 19 nt, Homo sapiens
  misc_RNA (1)...(19): siRNA sense strand
cggcagaacugggaggaag

SEQ ID NO: 2251778 - RNA, 19 nt, Homo sapiens
  misc_RNA (1)...(19): siRNA sense strand
aagcagagguugugcagag

SEQ ID NO: 2251779 - RNA, 19 nt, Homo sapiens
  misc_RNA (1)...(19): siRNA sense strand
ggaaagaccugcgagacca

SEQ ID NO: 2251780 - RNA, 19 nt, Homo sapiens
  misc_RNA (1)...(19): siRNA sense strand
ucaagaagcccacuggaga

SEQ ID NO: 2251781 - RNA, 19 nt, Homo sapiens
  misc_RNA (1)...(19): siRNA sense strand
agauaagguguuuaaggau

SEQ ID NO: 2251782 - RNA, 19 nt, Homo sapiens
  misc_RNA (1)...(19): siRNA sense strand
gcguguaaauaccgggaag

SEQ ID NO: 2251783 - RNA, 19 nt, Homo sapiens
  misc_RNA (1)...(19): siRNA sense strand
agaccguggaggacaagua

SEQ ID NO: 2251784 - RNA, 19 nt, Homo sapiens
  misc_RNA (1)...(19): siRNA sense strand
ugcgagaccacguggagaa

SEQ ID NO: 2251785 - RNA, 19 nt, Homo sapiens
  misc_RNA (1)...(19): siRNA sense strand
acgucaaccugcugaagga

SEQ ID NO: 2251786 - RNA, 19 nt, Homo sapiens
  misc_RNA (1)...(19): siRNA sense strand
auugagagacaaaaggaaa

SEQ ID NO: 2251787 - RNA, 19 nt, Homo sapiens
  misc_RNA (1)...(19): siRNA sense strand
cuucauuuacagcgaguga

SEQ ID NO: 2251788 - RNA, 19 nt, Homo sapiens
  misc_RNA (1)...(19): siRNA sense strand
ucguuaaagauaagguguu

SEQ ID NO: 2251789 - RNA, 19 nt, Homo sapiens
  misc_RNA (1)...(19): siRNA sense strand
gggaggaagcagacagcau

SEQ ID NO: 2251790 - RNA, 19 nt, Homo sapiens
  misc_RNA (1)...(19): siRNA sense strand
ccguuuaagcagaaaguga

SEQ ID NO: 2251791 - RNA, 19 nt, Homo sapiens
  misc_RNA (1)...(19): siRNA sense strand
cggaaugaaagcagagguu

SEQ ID NO: 2251792 - RNA, 19 nt, Homo sapiens
  misc_RNA (1)...(19): siRNA sense strand
cugaaggaguggagcaacu

SEQ ID NO: 2251793 - RNA, 19 nt, Homo sapiens
  misc_RNA (1)...(19): siRNA sense strand
ccguggaggacaaguacaa

SEQ ID NO: 2251794 - RNA, 19 nt, Homo sapiens
  misc_RNA (1)...(19): siRNA sense strand
cagagaaacugaaggagcu

SEQ ID NO: 2251795 - RNA, 19 nt, Homo sapiens
  misc_RNA (1)...(19): siRNA sense strand
ugaccgagcuggagagcgu

SEQ ID NO: 2251796 - RNA, 19 nt, Homo sapiens
  misc_RNA (1)...(19): siRNA sense strand
gggcaaguggcucggaaca

SEQ ID NO: 2251797 - RNA, 19 nt, Homo sapiens
  misc_RNA (1)...(19): siRNA sense strand
aggacaaguacaaguguga

SEQ ID NO: 2251798 - RNA, 19 nt, Homo sapiens
  misc_RNA (1)...(19): siRNA sense strand
ggcuauaagaugugugcca

SEQ ID NO: 2251799 - RNA, 19 nt, Homo sapiens
  misc_RNA (1)...(19): siRNA sense strand
cuagaaaaugggacauaua

SEQ ID NO: 2251800 - RNA, 19 nt, Homo sapiens
  misc_RNA (1)...(19): siRNA sense strand
acguggagaaggcguguaa

SEQ ID NO: 2251801 - RNA, 19 nt, Homo sapiens
  misc_RNA (1)...(19): siRNA sense strand
ugaggaaagaccugcgaga

SEQ ID NO: 2251802 - RNA, 19 nt, Homo sapiens
  misc_RNA (1)...(19): siRNA sense strand
aggaaaaguuugugaagac

SEQ ID NO: 2251803 - RNA, 19 nt, Homo sapiens
  misc_RNA (1)...(19): siRNA sense strand
cagcgugucaagagagcau

SEQ ID NO: 2251804 - RNA, 19 nt, Homo sapiens
  misc_RNA (1)...(19): siRNA sense strand
ugucaucaugcguggagaa

SEQ ID NO: 2251805 - RNA, 19 nt, Homo sapiens
  misc_RNA (1)...(19): siRNA sense strand
gcagacagcaugaagagca

SEQ ID NO: 2251806 - RNA, 19 nt, Homo sapiens
  misc_RNA (1)...(19): siRNA sense strand
cggcagaacugggaggaag

SEQ ID NO: 2251807 - RNA, 19 nt, Homo sapiens
  misc_RNA (1)...(19): siRNA sense strand
aagcagagguugugcagag

SEQ ID NO: 2251808 - RNA, 19 nt, Homo sapiens
  misc_RNA (1)...(19): siRNA sense strand
ggaaagaccugcgagacca

SEQ ID NO: 2251809 - RNA, 19 nt, Homo sapiens
  misc_RNA (1)...(19): siRNA sense strand
ucaagaagcccacuggaga

SEQ ID NO: 2251810 - RNA, 19 nt, Homo sapiens
  misc_RNA (1)...(19): siRNA sense strand
agauaagguguuuaaggau

SEQ ID NO: 2251811 - RNA, 19 nt, Homo sapiens
  misc_RNA (1)...(19): siRNA sense strand
gcguguaaauaccgggaag

SEQ ID NO: 2251812 - RNA, 19 nt, Homo sapiens
  misc_RNA (1)...(19): siRNA sense strand
agaccguggaggacaagua

SEQ ID NO: 2251813 - RNA, 19 nt, Homo sapiens
  misc_RNA (1)...(19): siRNA sense strand
ugcgagaccacguggagaa

SEQ ID NO: 2251814 - RNA, 19 nt, Homo sapiens
  misc_RNA (1)...(19): siRNA sense strand
acgucaaccugcugaagga

SEQ ID NO: 2251815 - RNA, 19 nt, Homo sapiens
  misc_RNA (1)...(19): siRNA sense strand
auugagagacaaaaggaaa

SEQ ID NO: 2251816 - RNA, 19 nt, Homo sapiens
  misc_RNA (1)...(19): siRNA sense strand
cuucauuuacagcgaguga

SEQ ID NO: 2251817 - RNA, 19 nt, Homo sapiens
  misc_RNA (1)...(19): siRNA sense strand
ucguuaaagauaagguguu

SEQ ID NO: 2251818 - RNA, 19 nt, Homo sapiens
  misc_RNA (1)...(19): siRNA sense strand
ggagacgacuguaagguga

SEQ ID NO: 2251819 - RNA, 19 nt, Homo sapiens
  misc_RNA (1)...(19): siRNA sense strand
uggaggaugccgaaggaau

SEQ ID NO: 2251820 - RNA, 19 nt, Homo sapiens
  misc_RNA (1)...(19): siRNA sense strand
aaggugaaguucugggaca

SEQ ID NO: 2251821 - RNA, 19 nt, Homo sapiens
  misc_RNA (1)...(19): siRNA sense strand
accucaaacugcagaaaca

SEQ ID NO: 2251822 - RNA, 19 nt, Homo sapiens
  misc_RNA (1)...(19): siRNA sense strand
caacagaacuucagacagc

SEQ ID NO: 2251823 - RNA, 19 nt, Homo sapiens
  misc_RNA (1)...(19): siRNA sense strand
ccgugaagacccuggagga

SEQ ID NO: 2251824 - RNA, 19 nt, Homo sapiens
  misc_RNA (1)...(19): siRNA sense strand
ccaccuacgaggagcacga

SEQ ID NO: 2251825 - RNA, 19 nt, Homo sapiens
  misc_RNA (1)...(19): siRNA sense strand
cugcagaaacagaugccau

SEQ ID NO: 2251826 - RNA, 19 nt, Homo sapiens
  misc_RNA (1)...(19): siRNA sense strand
ugguagacgacgaugacau

SEQ ID NO: 2251827 - RNA, 19 nt, Homo sapiens
  misc_RNA (1)...(19): siRNA sense strand
gagacgacuguaaggugaa

SEQ ID NO: 2251828 - RNA, 19 nt, Homo sapiens
  misc_RNA (1)...(19): siRNA sense strand
ugugggagccaaugggaga

SEQ ID NO: 2251829 - RNA, 19 nt, Homo sapiens
  misc_RNA (1)...(19): siRNA sense strand
agccaaugggagaugggaa

SEQ ID NO: 2251830 - RNA, 19 nt, Homo sapiens
  misc_RNA (1)...(19): siRNA sense strand
gcucugggcugguaggcaa

SEQ ID NO: 2251831 - RNA, 19 nt, Homo sapiens
  misc_RNA (1)...(19): siRNA sense strand
acaaugaaguggagcccau

SEQ ID NO: 2251832 - RNA, 19 nt, Homo sapiens
  misc_RNA (1)...(19): siRNA sense strand
ggaugaucgacgugcagaa

SEQ ID NO: 2251833 - RNA, 19 nt, Homo sapiens
  misc_RNA (1)...(19): siRNA sense strand
ucguaugccaagaggauga

SEQ ID NO: 2251834 - RNA, 19 nt, Homo sapiens
  misc_RNA (1)...(19): siRNA sense strand
ggugugggguacagggaau

SEQ ID NO: 2251835 - RNA, 19 nt, Homo sapiens
  misc_RNA (1)...(19): siRNA sense strand
caaccaagucggaugggca

SEQ ID NO: 2251836 - RNA, 19 nt, Homo sapiens
  misc_RNA (1)...(19): siRNA sense strand
caguuuaagaagacagcca

SEQ ID NO: 2251837 - RNA, 19 nt, Homo sapiens
  misc_RNA (1)...(19): siRNA sense strand
ccagaaggugguagcagau

SEQ ID NO: 2251838 - RNA, 19 nt, Homo sapiens
  misc_RNA (1)...(19): siRNA sense strand
gugaaggagaccugugcuu

SEQ ID NO: 2251839 - RNA, 19 nt, Homo sapiens
  misc_RNA (1)...(19): siRNA sense strand
gguagcagauggagcugga

SEQ ID NO: 2251840 - RNA, 19 nt, Homo sapiens
  misc_RNA (1)...(19): siRNA sense strand
ccggaauaucaaauacaau

SEQ ID NO: 2251841 - RNA, 19 nt, Homo sapiens
  misc_RNA (1)...(19): siRNA sense strand
acucguaugccaagaggau

SEQ ID NO: 2251842 - RNA, 19 nt, Homo sapiens
  misc_RNA (1)...(19): siRNA sense strand
ugguggaggccauggacuu

SEQ ID NO: 2251843 - RNA, 19 nt, Homo sapiens
  misc_RNA (1)...(19): siRNA sense strand
aggaagaagaggaggagga

SEQ ID NO: 2251844 - RNA, 19 nt, Homo sapiens
  misc_RNA (1)...(19): siRNA sense strand
acgaggaggacgaggaaga

SEQ ID NO: 2251845 - RNA, 19 nt, Homo sapiens
  misc_RNA (1)...(19): siRNA sense strand
aagaggaggcagaggaaaa

SEQ ID NO: 2251846 - RNA, 19 nt, Homo sapiens
  misc_RNA (1)...(19): siRNA sense strand
acgaggaggaggaggaaga

SEQ ID NO: 2251847 - RNA, 19 nt, Homo sapiens
  misc_RNA (1)...(19): siRNA sense strand
gggagaauuucaucgggaa

SEQ ID NO: 2251848 - RNA, 19 nt, Homo sapiens
  misc_RNA (1)...(19): siRNA sense strand
agggcaaagccaaaggaaa

SEQ ID NO: 2251849 - RNA, 19 nt, Homo sapiens
  misc_RNA (1)...(19): siRNA sense strand
ggaaggaggaagaagagga

SEQ ID NO: 2251850 - RNA, 19 nt, Homo sapiens
  misc_RNA (1)...(19): siRNA sense strand
gguccaaccuccuggggaa

SEQ ID NO: 2251851 - RNA, 19 nt, Homo sapiens
  misc_RNA (1)...(19): siRNA sense strand
aggcagaggaaaagaaaga

SEQ ID NO: 2251852 - RNA, 19 nt, Homo sapiens
  misc_RNA (1)...(19): siRNA sense strand
aggaggaagaggaggacga

SEQ ID NO: 2251853 - RNA, 19 nt, Homo sapiens
  misc_RNA (1)...(19): siRNA sense strand
cugaaggagaggagggcca

SEQ ID NO: 2251854 - RNA, 19 nt, Homo sapiens
  misc_RNA (1)...(19): siRNA sense strand
acgaggaagaggaggcaga

SEQ ID NO: 2251855 - RNA, 19 nt, Homo sapiens
  misc_RNA (1)...(19): siRNA sense strand
agaggaaaagaaagagaaa

SEQ ID NO: 2251856 - RNA, 19 nt, Homo sapiens
  misc_RNA (1)...(19): siRNA sense strand
aaaccaacgugcugggcuu

SEQ ID NO: 2251857 - RNA, 19 nt, Homo sapiens
  misc_RNA (1)...(19): siRNA sense strand
aggaagaggaggacgagga

SEQ ID NO: 2251858 - RNA, 19 nt, Homo sapiens
  misc_RNA (1)...(19): siRNA sense strand
ucaaaagggcaaagccaaa

SEQ ID NO: 2251859 - RNA, 19 nt, Homo sapiens
  misc_RNA (1)...(19): siRNA sense strand
agccaaaggaaaaggcaaa

SEQ ID NO: 2251860 - RNA, 19 nt, Homo sapiens
  misc_RNA (1)...(19): siRNA sense strand
aggaggaggaagaggagga

SEQ ID NO: 2251861 - RNA, 19 nt, Homo sapiens
  misc_RNA (1)...(19): siRNA sense strand
ccaagaugagaaagaccaa

SEQ ID NO: 2251862 - RNA, 19 nt, Homo sapiens
  misc_RNA (1)...(19): siRNA sense strand
aggaggaagaagaggagga

SEQ ID NO: 2251863 - RNA, 19 nt, Homo sapiens
  misc_RNA (1)...(19): siRNA sense strand
aggacgaggaggaggagga

SEQ ID NO: 2251864 - RNA, 19 nt, Homo sapiens
  misc_RNA (1)...(19): siRNA sense strand
aagaggaggacgaggagga

SEQ ID NO: 2251865 - RNA, 19 nt, Homo sapiens
  misc_RNA (1)...(19): siRNA sense strand
aggcuaaggaagaagagga

SEQ ID NO: 2251866 - RNA, 19 nt, Homo sapiens
  misc_RNA (1)...(19): siRNA sense strand
augagaaagaccaagaaga

SEQ ID NO: 2251867 - RNA, 19 nt, Homo sapiens
  misc_RNA (1)...(19): siRNA sense strand
aggaggacgaggaggacga

SEQ ID NO: 2251868 - RNA, 19 nt, Homo sapiens
  misc_RNA (1)...(19): siRNA sense strand
ccgcagaccugaaggagag

SEQ ID NO: 2251869 - RNA, 19 nt, Homo sapiens
  misc_RNA (1)...(19): siRNA sense strand
cagaacaagacgcuggaga

SEQ ID NO: 2251870 - RNA, 19 nt, Homo sapiens
  misc_RNA (1)...(19): siRNA sense strand
aaacgaaaacggagcaaga

SEQ ID NO: 2251871 - RNA, 19 nt, Homo sapiens
  misc_RNA (1)...(19): siRNA sense strand
gggaugaaacccuccgaga

SEQ ID NO: 2251872 - RNA, 19 nt, Homo sapiens
  misc_RNA (1)...(19): siRNA sense strand
aggaagaggaggcagagga

SEQ ID NO: 2251873 - RNA, 19 nt, Homo sapiens
  misc_RNA (1)...(19): siRNA sense strand
aggaggaggaggaagagga

SEQ ID NO: 2251874 - RNA, 19 nt, Homo sapiens
  misc_RNA (1)...(19): siRNA sense strand
gaggaaaagaaagagaaaa

SEQ ID NO: 2251875 - RNA, 19 nt, Homo sapiens
  misc_RNA (1)...(19): siRNA sense strand
gcagaggaaaagaaagaga

SEQ ID NO: 2251876 - RNA, 19 nt, Homo sapiens
  misc_RNA (1)...(19): siRNA sense strand
acaagacgcuggagagccu

SEQ ID NO: 2251877 - RNA, 19 nt, Homo sapiens
  misc_RNA (1)...(19): siRNA sense strand
gggacaauuucgugggcaa

SEQ ID NO: 2251878 - RNA, 19 nt, Homo sapiens
  misc_RNA (1)...(19): siRNA sense strand
aggaagaagacuuggaaaa

SEQ ID NO: 2251879 - RNA, 19 nt, Homo sapiens
  misc_RNA (1)...(19): siRNA sense strand
cgaaagagaagaaggagca

SEQ ID NO: 2251880 - RNA, 19 nt, Homo sapiens
  misc_RNA (1)...(19): siRNA sense strand
augcagaauuggaggaagu

SEQ ID NO: 2251881 - RNA, 19 nt, Homo sapiens
  misc_RNA (1)...(19): siRNA sense strand
agaaagugucagaggcaca

SEQ ID NO: 2251882 - RNA, 19 nt, Homo sapiens
  misc_RNA (1)...(19): siRNA sense strand
ugacagaggccuugggaac

SEQ ID NO: 2251883 - RNA, 19 nt, Homo sapiens
  misc_RNA (1)...(19): siRNA sense strand
gaagaaagugucagaggca

SEQ ID NO: 2251884 - RNA, 19 nt, Homo sapiens
  misc_RNA (1)...(19): siRNA sense strand
aagagaagaaggagcaaaa

SEQ ID NO: 2251885 - RNA, 19 nt, Homo sapiens
  misc_RNA (1)...(19): siRNA sense strand
cgucgugggacaaggagaa

SEQ ID NO: 2251886 - RNA, 19 nt, Homo sapiens
  misc_RNA (1)...(19): siRNA sense strand
aggaggacauggaagccua

SEQ ID NO: 2251887 - RNA, 19 nt, Homo sapiens
  misc_RNA (1)...(19): siRNA sense strand
gggacaaggagaacggugu

SEQ ID NO: 2251888 - RNA, 19 nt, Homo sapiens
  misc_RNA (1)...(19): siRNA sense strand
agccagaaccagcgaauca

SEQ ID NO: 2251889 - RNA, 19 nt, Homo sapiens
  misc_RNA (1)...(19): siRNA sense strand
aaggaagaagacuuggaaa

SEQ ID NO: 2251890 - RNA, 19 nt, Homo sapiens
  misc_RNA (1)...(19): siRNA sense strand
acacauucaccauggacuu

SEQ ID NO: 2251891 - RNA, 19 nt, Homo sapiens
  misc_RNA (1)...(19): siRNA sense strand
gcgaaagagaagaaggagc

SEQ ID NO: 2251892 - RNA, 19 nt, Homo sapiens
  misc_RNA (1)...(19): siRNA sense strand
aaagagaagaaggagcaaa

SEQ ID NO: 2251893 - RNA, 19 nt, Homo sapiens
  misc_RNA (1)...(19): siRNA sense strand
gacacauugaugagagaca

SEQ ID NO: 2251894 - RNA, 19 nt, Homo sapiens
  misc_RNA (1)...(19): siRNA sense strand
gaaucaauguccagccacu

SEQ ID NO: 2251895 - RNA, 19 nt, Homo sapiens
  misc_RNA (1)...(19): siRNA sense strand
ucccaaacaccaagaacau

SEQ ID NO: 2251896 - RNA, 19 nt, Homo sapiens
  misc_RNA (1)...(19): siRNA sense strand
gugacuguguauaugaaaa

SEQ ID NO: 2251897 - RNA, 19 nt, Homo sapiens
  misc_RNA (1)...(19): siRNA sense strand
aggaauacugcccggauca

SEQ ID NO: 2251898 - RNA, 19 nt, Homo sapiens
  misc_RNA (1)...(19): siRNA sense strand
aaacaaacguacuuggauu

SEQ ID NO: 2251899 - RNA, 19 nt, Homo sapiens
  misc_RNA (1)...(19): siRNA sense strand
cuacuugagaagaggcaaa

SEQ ID NO: 2251900 - RNA, 19 nt, Homo sapiens
  misc_RNA (1)...(19): siRNA sense strand
gagaaaguuaugucggcaa

SEQ ID NO: 2251901 - RNA, 19 nt, Homo sapiens
  misc_RNA (1)...(19): siRNA sense strand
uuuaaagguccuaggaaaa

SEQ ID NO: 2251902 - RNA, 19 nt, Homo sapiens
  misc_RNA (1)...(19): siRNA sense strand
ggaaaaugucugugaucau

SEQ ID NO: 2251903 - RNA, 19 nt, Homo sapiens
  misc_RNA (1)...(19): siRNA sense strand
cauuuauggugcagcccaa

SEQ ID NO: 2251904 - RNA, 19 nt, Homo sapiens
  misc_RNA (1)...(19): siRNA sense strand
agaacagaacuauggaaaa

SEQ ID NO: 2251905 - RNA, 19 nt, Homo sapiens
  misc_RNA (1)...(19): siRNA sense strand
uggaagaagaugcugaaaa

SEQ ID NO: 2251906 - RNA, 19 nt, Homo sapiens
  misc_RNA (1)...(19): siRNA sense strand
gcagcuagaaagcggaaaa

SEQ ID NO: 2251907 - RNA, 19 nt, Homo sapiens
  misc_RNA (1)...(19): siRNA sense strand
ggauaaaaggggaauggau

SEQ ID NO: 2251908 - RNA, 19 nt, Homo sapiens
  misc_RNA (1)...(19): siRNA sense strand
augaggagacugauggaau

SEQ ID NO: 2251909 - RNA, 19 nt, Homo sapiens
  misc_RNA (1)...(19): siRNA sense strand
gagcagacucccuugguga

SEQ ID NO: 2251910 - RNA, 19 nt, Homo sapiens
  misc_RNA (1)...(19): siRNA sense strand
agacgaaguucaugcucca

SEQ ID NO: 2251911 - RNA, 19 nt, Homo sapiens
  misc_RNA (1)...(19): siRNA sense strand
aagcaugauaucucugaaa

SEQ ID NO: 2251912 - RNA, 19 nt, Homo sapiens
  misc_RNA (1)...(19): siRNA sense strand
cuggaaugacacugaauca

SEQ ID NO: 2251913 - RNA, 19 nt, Homo sapiens
  misc_RNA (1)...(19): siRNA sense strand
gcaugauaucucugaaagu

SEQ ID NO: 2251914 - RNA, 19 nt, Homo sapiens
  misc_RNA (1)...(19): siRNA sense strand
acauagacgaccuggagga

SEQ ID NO: 2251915 - RNA, 19 nt, Homo sapiens
  misc_RNA (1)...(19): siRNA sense strand
gugugaacuucgaugagga

SEQ ID NO: 2251916 - RNA, 19 nt, Homo sapiens
  misc_RNA (1)...(19): siRNA sense strand
cgacaggcuaagcuggauu

SEQ ID NO: 2251917 - RNA, 19 nt, Homo sapiens
  misc_RNA (1)...(19): siRNA sense strand
caguacaggccuuuggcau

SEQ ID NO: 2251918 - RNA, 19 nt, Homo sapiens
  misc_RNA (1)...(19): siRNA sense strand
ucgugaaggagaaaguuau

SEQ ID NO: 2251919 - RNA, 19 nt, Homo sapiens
  misc_RNA (1)...(19): siRNA sense strand
acacugaaucauaagcaga

SEQ ID NO: 2251920 - RNA, 19 nt, Homo sapiens
  misc_RNA (1)...(19): siRNA sense strand
ggaaaugcagccaggccaa

SEQ ID NO: 2251921 - RNA, 19 nt, Homo sapiens
  misc_RNA (1)...(19): siRNA sense strand
ccaagauucgagaggaaca

SEQ ID NO: 2251922 - RNA, 19 nt, Homo sapiens
  misc_RNA (1)...(19): siRNA sense strand
cgaauauaagaaggagaaa

SEQ ID NO: 2251923 - RNA, 19 nt, Homo sapiens
  misc_RNA (1)...(19): siRNA sense strand
ggaacaagcuauugcuggu

SEQ ID NO: 2251924 - RNA, 19 nt, Homo sapiens
  misc_RNA (1)...(19): siRNA sense strand
cccaaaaggaggaugaaau

SEQ ID NO: 2251925 - RNA, 19 nt, Homo sapiens
  misc_RNA (1)...(19): siRNA sense strand
ccaucaaaauccuggugaa

SEQ ID NO: 2251926 - RNA, 19 nt, Homo sapiens
  misc_RNA (1)...(19): siRNA sense strand
gggaaaugcagccaggcca

SEQ ID NO: 2251927 - RNA, 19 nt, Homo sapiens
  misc_RNA (1)...(19): siRNA sense strand
ccucuguaauucagggacu

SEQ ID NO: 2251928 - RNA, 19 nt, Homo sapiens
  misc_RNA (1)...(19): siRNA sense strand
aaaucaugaaggugcagaa

SEQ ID NO: 2251929 - RNA, 19 nt, Homo sapiens
  misc_RNA (1)...(19): siRNA sense strand
caacagaauagcucgggaa

SEQ ID NO: 2251930 - RNA, 19 nt, Homo sapiens
  misc_RNA (1)...(19): siRNA sense strand
cuacaauaauggggccaaa

SEQ ID NO: 2251931 - RNA, 19 nt, Homo sapiens
  misc_RNA (1)...(19): siRNA sense strand
caacagaauagcucgggaa

SEQ ID NO: 2251932 - RNA, 19 nt, Homo sapiens
  misc_RNA (1)...(19): siRNA sense strand
cuacaauaauggggccaaa

SEQ ID NO: 2251933 - RNA, 19 nt, Homo sapiens
  misc_RNA (1)...(19): siRNA sense strand
ggcaagaggcggauggaca

SEQ ID NO: 2251934 - RNA, 19 nt, Homo sapiens
  misc_RNA (1)...(19): siRNA sense strand
ccagaagaauacaagcaga

SEQ ID NO: 2251935 - RNA, 19 nt, Homo sapiens
  misc_RNA (1)...(19): siRNA sense strand
cgcugaaagaacaggaaga

SEQ ID NO: 2251936 - RNA, 19 nt, Homo sapiens
  misc_RNA (1)...(19): siRNA sense strand
agaaauacgccacggagga

SEQ ID NO: 2251937 - RNA, 19 nt, Homo sapiens
  misc_RNA (1)...(19): siRNA sense strand
aguuauuggccuauccuaa

SEQ ID NO: 2251938 - RNA, 19 nt, Homo sapiens
  misc_RNA (1)...(19): siRNA sense strand
cgagaguaaacaugagguu

SEQ ID NO: 2251939 - RNA, 19 nt, Homo sapiens
  misc_RNA (1)...(19): siRNA sense strand
aagaacaggaagaggguac

SEQ ID NO: 2251940 - RNA, 19 nt, Homo sapiens
  misc_RNA (1)...(19): siRNA sense strand
ggucaagcucaucgagagu

SEQ ID NO: 2251941 - RNA, 19 nt, Homo sapiens
  misc_RNA (1)...(19): siRNA sense strand
gaguauggaaaguuagagu

SEQ ID NO: 2251942 - RNA, 19 nt, Homo sapiens
  misc_RNA (1)...(19): siRNA sense strand
cggacguggucaagcucau

SEQ ID NO: 2251943 - RNA, 19 nt, Homo sapiens
  misc_RNA (1)...(19): siRNA sense strand
ggcaagaggcggauggaca

SEQ ID NO: 2251944 - RNA, 19 nt, Homo sapiens
  misc_RNA (1)...(19): siRNA sense strand
ccagaagaauacaagcaga

SEQ ID NO: 2251945 - RNA, 19 nt, Homo sapiens
  misc_RNA (1)...(19): siRNA sense strand
cgcugaaagaacaggaaga

SEQ ID NO: 2251946 - RNA, 19 nt, Homo sapiens
  misc_RNA (1)...(19): siRNA sense strand
agaaauacgccacggagga

SEQ ID NO: 2251947 - RNA, 19 nt, Homo sapiens
  misc_RNA (1)...(19): siRNA sense strand
aguuauuggccuauccuaa

SEQ ID NO: 2251948 - RNA, 19 nt, Homo sapiens
  misc_RNA (1)...(19): siRNA sense strand
cgagaguaaacaugagguu

SEQ ID NO: 2251949 - RNA, 19 nt, Homo sapiens
  misc_RNA (1)...(19): siRNA sense strand
aagaacaggaagaggguac

SEQ ID NO: 2251950 - RNA, 19 nt, Homo sapiens
  misc_RNA (1)...(19): siRNA sense strand
ggucaagcucaucgagagu

SEQ ID NO: 2251951 - RNA, 19 nt, Homo sapiens
  misc_RNA (1)...(19): siRNA sense strand
gaguauggaaaguuagagu

SEQ ID NO: 2251952 - RNA, 19 nt, Homo sapiens
  misc_RNA (1)...(19): siRNA sense strand
cggacguggucaagcucau

SEQ ID NO: 2251953 - RNA, 19 nt, Homo sapiens
  misc_RNA (1)...(19): siRNA sense strand
aagcaaacugagugaugaa

SEQ ID NO: 2251954 - RNA, 19 nt, Homo sapiens
  misc_RNA (1)...(19): siRNA sense strand
acugagugaugaaggaaga

SEQ ID NO: 2251955 - RNA, 19 nt, Homo sapiens
  misc_RNA (1)...(19): siRNA sense strand
cgucuuaccugaagucaca

SEQ ID NO: 2251956 - RNA, 19 nt, Homo sapiens
  misc_RNA (1)...(19): siRNA sense strand
caaacugagugaugaagga

SEQ ID NO: 2251957 - RNA, 19 nt, Homo sapiens
  misc_RNA (1)...(19): siRNA sense strand
ccugaagucacaaagcaaa

SEQ ID NO: 2251958 - RNA, 19 nt, Homo sapiens
  misc_RNA (1)...(19): siRNA sense strand
aggaagacuugaaccuaga

SEQ ID NO: 2251959 - RNA, 19 nt, Homo sapiens
  misc_RNA (1)...(19): siRNA sense strand
guaaauaguucuaauggag

SEQ ID NO: 2251960 - RNA, 19 nt, Homo sapiens
  misc_RNA (1)...(19): siRNA sense strand
agacuugaaccuagaaaau

SEQ ID NO: 2251961 - RNA, 19 nt, Homo sapiens
  misc_RNA (1)...(19): siRNA sense strand
ugaugaaggaagacuugaa

SEQ ID NO: 2251962 - RNA, 19 nt, Homo sapiens
  misc_RNA (1)...(19): siRNA sense strand
cgcccgaaggacaguguua

SEQ ID NO: 2251963 - RNA, 19 nt, Homo sapiens
  misc_RNA (1)...(19): siRNA sense strand
gcaucaaaguuguccugca

SEQ ID NO: 2251964 - RNA, 19 nt, Homo sapiens
  misc_RNA (1)...(19): siRNA sense strand
gagugaugaaggaagacuu

SEQ ID NO: 2251965 - RNA, 19 nt, Homo sapiens
  misc_RNA (1)...(19): siRNA sense strand
guucaagcgucuuaccuga

SEQ ID NO: 2251966 - RNA, 19 nt, Homo sapiens
  misc_RNA (1)...(19): siRNA sense strand
guaaauaguucuaauggag

SEQ ID NO: 2251967 - RNA, 19 nt, Homo sapiens
  misc_RNA (1)...(19): siRNA sense strand
aggaagacuugaaccuaga

SEQ ID NO: 2251968 - RNA, 19 nt, Homo sapiens
  misc_RNA (1)...(19): siRNA sense strand
agacuugaaccuagaaaau

SEQ ID NO: 2251969 - RNA, 19 nt, Homo sapiens
  misc_RNA (1)...(19): siRNA sense strand
cgcccgaaggacaguguua

SEQ ID NO: 2251970 - RNA, 19 nt, Homo sapiens
  misc_RNA (1)...(19): siRNA sense strand
gcaucaaaguuguccugca

SEQ ID NO: 2251971 - RNA, 19 nt, Homo sapiens
  misc_RNA (1)...(19): siRNA sense strand
aagcaaacugagugaugaa

SEQ ID NO: 2251972 - RNA, 19 nt, Homo sapiens
  misc_RNA (1)...(19): siRNA sense strand
acugagugaugaaggaaga

SEQ ID NO: 2251973 - RNA, 19 nt, Homo sapiens
  misc_RNA (1)...(19): siRNA sense strand
cgucuuaccugaagucaca

SEQ ID NO: 2251974 - RNA, 19 nt, Homo sapiens
  misc_RNA (1)...(19): siRNA sense strand
caaacugagugaugaagga

SEQ ID NO: 2251975 - RNA, 19 nt, Homo sapiens
  misc_RNA (1)...(19): siRNA sense strand
ccugaagucacaaagcaaa

SEQ ID NO: 2251976 - RNA, 19 nt, Homo sapiens
  misc_RNA (1)...(19): siRNA sense strand
aggaagacuugaaccuaga

SEQ ID NO: 2251977 - RNA, 19 nt, Homo sapiens
  misc_RNA (1)...(19): siRNA sense strand
guaaauaguucuaauggag

SEQ ID NO: 2251978 - RNA, 19 nt, Homo sapiens
  misc_RNA (1)...(19): siRNA sense strand
agacuugaaccuagaaaau

SEQ ID NO: 2251979 - RNA, 19 nt, Homo sapiens
  misc_RNA (1)...(19): siRNA sense strand
ugaugaaggaagacuugaa

SEQ ID NO: 2251980 - RNA, 19 nt, Homo sapiens
  misc_RNA (1)...(19): siRNA sense strand
cgcccgaaggacaguguua

SEQ ID NO: 2251981 - RNA, 19 nt, Homo sapiens
  misc_RNA (1)...(19): siRNA sense strand
gcaucaaaguuguccugca

SEQ ID NO: 2251982 - RNA, 19 nt, Homo sapiens
  misc_RNA (1)...(19): siRNA sense strand
gagugaugaaggaagacuu

SEQ ID NO: 2251983 - RNA, 19 nt, Homo sapiens
  misc_RNA (1)...(19): siRNA sense strand
guucaagcgucuuaccuga

SEQ ID NO: 2251984 - RNA, 19 nt, Homo sapiens
  misc_RNA (1)...(19): siRNA sense strand
aguuguacuucaagagcua

SEQ ID NO: 2251985 - RNA, 19 nt, Homo sapiens
  misc_RNA (1)...(19): siRNA sense strand
auaaauaauuccaguggga

SEQ ID NO: 2251986 - RNA, 19 nt, Homo sapiens
  misc_RNA (1)...(19): siRNA sense strand
gaugaagauaugacacuua

SEQ ID NO: 2251987 - RNA, 19 nt, Homo sapiens
  misc_RNA (1)...(19): siRNA sense strand
aggcaugauuauugggcca

SEQ ID NO: 2251988 - RNA, 19 nt, Homo sapiens
  misc_RNA (1)...(19): siRNA sense strand
agaacuugaagaaggacaa

SEQ ID NO: 2251989 - RNA, 19 nt, Homo sapiens
  misc_RNA (1)...(19): siRNA sense strand
cuuacaagguggacaggca

SEQ ID NO: 2251990 - RNA, 19 nt, Homo sapiens
  misc_RNA (1)...(19): siRNA sense strand
uggaagaacuugaagaagg

SEQ ID NO: 2251991 - RNA, 19 nt, Homo sapiens
  misc_RNA (1)...(19): siRNA sense strand
aggaguaggcgacgguaca

SEQ ID NO: 2251992 - RNA, 19 nt, Homo sapiens
  misc_RNA (1)...(19): siRNA sense strand
aaauaauuccagugggaug

SEQ ID NO: 2251993 - RNA, 19 nt, Homo sapiens
  misc_RNA (1)...(19): siRNA sense strand
uauucgacucggugggcaa

SEQ ID NO: 2251994 - RNA, 19 nt, Homo sapiens
  misc_RNA (1)...(19): siRNA sense strand
cugucaaagucaaggcaga

SEQ ID NO: 2251995 - RNA, 19 nt, Homo sapiens
  misc_RNA (1)...(19): siRNA sense strand
ggcaguauucauugggcaa

SEQ ID NO: 2251996 - RNA, 19 nt, Homo sapiens
  misc_RNA (1)...(19): siRNA sense strand
gcuccagguccaaggugaa

SEQ ID NO: 2251997 - RNA, 19 nt, Homo sapiens
  misc_RNA (1)...(19): siRNA sense strand
caaucaccgcugugguaaa

SEQ ID NO: 2251998 - RNA, 19 nt, Homo sapiens
  misc_RNA (1)...(19): siRNA sense strand
guauaaagguguccuggga

SEQ ID NO: 2251999 - RNA, 19 nt, Homo sapiens
  misc_RNA (1)...(19): siRNA sense strand
acuuauaaugcguacagaa

SEQ ID NO: 2252000 - RNA, 19 nt, Homo sapiens
  misc_RNA (1)...(19): siRNA sense strand
aauaauagcaacaaccgaa

SEQ ID NO: 2252001 - RNA, 19 nt, Homo sapiens
  misc_RNA (1)...(19): siRNA sense strand
uugaacaacugaaacgaga

SEQ ID NO: 2252002 - RNA, 19 nt, Homo sapiens
  misc_RNA (1)...(19): siRNA sense strand
ggugaaugcccgacgucca

SEQ ID NO: 2252003 - RNA, 19 nt, Homo sapiens
  misc_RNA (1)...(19): siRNA sense strand
uaguuuaggaagcaagauu

SEQ ID NO: 2252004 - RNA, 19 nt, Homo sapiens
  misc_RNA (1)...(19): siRNA sense strand
acaacauauuagcagauga

SEQ ID NO: 2252005 - RNA, 19 nt, Homo sapiens
  misc_RNA (1)...(19): siRNA sense strand
caggauaugaaguugcaaa

SEQ ID NO: 2252006 - RNA, 19 nt, Homo sapiens
  misc_RNA (1)...(19): siRNA sense strand
gaagauuacuuuauggcca

SEQ ID NO: 2252007 - RNA, 19 nt, Homo sapiens
  misc_RNA (1)...(19): siRNA sense strand
ugauaguggaauaagagua

SEQ ID NO: 2252008 - RNA, 19 nt, Homo sapiens
  misc_RNA (1)...(19): siRNA sense strand
aguacauugccgaagauua

SEQ ID NO: 2252009 - RNA, 19 nt, Homo sapiens
  misc_RNA (1)...(19): siRNA sense strand
aagauuacuuuauggccaa

SEQ ID NO: 2252010 - RNA, 19 nt, Homo sapiens
  misc_RNA (1)...(19): siRNA sense strand
acaagaaggcaacugacaa

SEQ ID NO: 2252011 - RNA, 19 nt, Homo sapiens
  misc_RNA (1)...(19): siRNA sense strand
cugacauggugaaucaaau

SEQ ID NO: 2252012 - RNA, 19 nt, Homo sapiens
  misc_RNA (1)...(19): siRNA sense strand
agaaugaucagguggacca

SEQ ID NO: 2252013 - RNA, 19 nt, Homo sapiens
  misc_RNA (1)...(19): siRNA sense strand
cauguguucagaugggaua

SEQ ID NO: 2252014 - RNA, 19 nt, Homo sapiens
  misc_RNA (1)...(19): siRNA sense strand
cagccauugauguauguaa

SEQ ID NO: 2252015 - RNA, 19 nt, Homo sapiens
  misc_RNA (1)...(19): siRNA sense strand
cagauaaccuguauugcaa

SEQ ID NO: 2252016 - RNA, 19 nt, Homo sapiens
  misc_RNA (1)...(19): siRNA sense strand
gagaaauggccacagggaa

SEQ ID NO: 2252017 - RNA, 19 nt, Homo sapiens
  misc_RNA (1)...(19): siRNA sense strand
caugaaacagccugggaau

SEQ ID NO: 2252018 - RNA, 19 nt, Homo sapiens
  misc_RNA (1)...(19): siRNA sense strand
aggcauuguuggaaaagaa

SEQ ID NO: 2252019 - RNA, 19 nt, Homo sapiens
  misc_RNA (1)...(19): siRNA sense strand
aggccguguuuguggaaga

SEQ ID NO: 2252020 - RNA, 19 nt, Homo sapiens
  misc_RNA (1)...(19): siRNA sense strand
caguuguggcaaaggagaa

SEQ ID NO: 2252021 - RNA, 19 nt, Homo sapiens
  misc_RNA (1)...(19): siRNA sense strand
augaacaguaccagaagua

SEQ ID NO: 2252022 - RNA, 19 nt, Homo sapiens
  misc_RNA (1)...(19): siRNA sense strand
ucaaaagaaaagaaggcua

SEQ ID NO: 2252023 - RNA, 19 nt, Homo sapiens
  misc_RNA (1)...(19): siRNA sense strand
ggaaaagaauuuaucgacu

SEQ ID NO: 2252024 - RNA, 19 nt, Homo sapiens
  misc_RNA (1)...(19): siRNA sense strand
ggagaaauggccacaggga

SEQ ID NO: 2252025 - RNA, 19 nt, Homo sapiens
  misc_RNA (1)...(19): siRNA sense strand
uugaugaagcucaggcauu

SEQ ID NO: 2252026 - RNA, 19 nt, Homo sapiens
  misc_RNA (1)...(19): siRNA sense strand
gcagauaaccuguauugca

SEQ ID NO: 2252027 - RNA, 19 nt, Homo sapiens
  misc_RNA (1)...(19): siRNA sense strand
acucaauggagaccagauu

SEQ ID NO: 2252028 - RNA, 19 nt, Homo sapiens
  misc_RNA (1)...(19): siRNA sense strand
ggaaggaacucgugggcca

SEQ ID NO: 2252029 - RNA, 19 nt, Homo sapiens
  misc_RNA (1)...(19): siRNA sense strand
ccuugugggaccaggauaa

SEQ ID NO: 2252030 - RNA, 19 nt, Homo sapiens
  misc_RNA (1)...(19): siRNA sense strand
gagaaugaguugcugcaga

SEQ ID NO: 2252031 - RNA, 19 nt, Homo sapiens
  misc_RNA (1)...(19): siRNA sense strand
cgggaugaaucgagaccca

SEQ ID NO: 2252032 - RNA, 19 nt, Homo sapiens
  misc_RNA (1)...(19): siRNA sense strand
ggcuaugacuacaagguga

SEQ ID NO: 2252033 - RNA, 19 nt, Homo sapiens
  misc_RNA (1)...(19): siRNA sense strand
agcgagagguccaggccaa

SEQ ID NO: 2252034 - RNA, 19 nt, Homo sapiens
  misc_RNA (1)...(19): siRNA sense strand
ccaggaaccucacggccua

SEQ ID NO: 2252035 - RNA, 19 nt, Homo sapiens
  misc_RNA (1)...(19): siRNA sense strand
ccuaccaagaggacauaua

SEQ ID NO: 2252036 - RNA, 19 nt, Homo sapiens
  misc_RNA (1)...(19): siRNA sense strand
cagaaaagcuggcugcaga

SEQ ID NO: 2252037 - RNA, 19 nt, Homo sapiens
  misc_RNA (1)...(19): siRNA sense strand
cugaagaagcugaugucca

SEQ ID NO: 2252038 - RNA, 19 nt, Homo sapiens
  misc_RNA (1)...(19): siRNA sense strand
cucuugaaucagacagaaa

SEQ ID NO: 2252039 - RNA, 19 nt, Homo sapiens
  misc_RNA (1)...(19): siRNA sense strand
acaauuaagaucuggagca

SEQ ID NO: 2252040 - RNA, 19 nt, Homo sapiens
  misc_RNA (1)...(19): siRNA sense strand
gaacacaggcuggaggaga

SEQ ID NO: 2252041 - RNA, 19 nt, Homo sapiens
  misc_RNA (1)...(19): siRNA sense strand
gagaagaaaaccuggcuga

SEQ ID NO: 2252042 - RNA, 19 nt, Homo sapiens
  misc_RNA (1)...(19): siRNA sense strand
gcuacgacuccgugccuau

SEQ ID NO: 2252043 - RNA, 19 nt, Homo sapiens
  misc_RNA (1)...(19): siRNA sense strand
gcugauguccacaggcaca

SEQ ID NO: 2252044 - RNA, 19 nt, Homo sapiens
  misc_RNA (1)...(19): siRNA sense strand
caacaggaggagauccgaa

SEQ ID NO: 2252045 - RNA, 19 nt, Homo sapiens
  misc_RNA (1)...(19): siRNA sense strand
ggaaggaacucgugggcca

SEQ ID NO: 2252046 - RNA, 19 nt, Homo sapiens
  misc_RNA (1)...(19): siRNA sense strand
ccuugugggaccaggauaa

SEQ ID NO: 2252047 - RNA, 19 nt, Homo sapiens
  misc_RNA (1)...(19): siRNA sense strand
gagaaugaguugcugcaga

SEQ ID NO: 2252048 - RNA, 19 nt, Homo sapiens
  misc_RNA (1)...(19): siRNA sense strand
cgggaugaaucgagaccca

SEQ ID NO: 2252049 - RNA, 19 nt, Homo sapiens
  misc_RNA (1)...(19): siRNA sense strand
ggcuaugacuacaagguga

SEQ ID NO: 2252050 - RNA, 19 nt, Homo sapiens
  misc_RNA (1)...(19): siRNA sense strand
agcgagagguccaggccaa

SEQ ID NO: 2252051 - RNA, 19 nt, Homo sapiens
  misc_RNA (1)...(19): siRNA sense strand
ccaggaaccucacggccua

SEQ ID NO: 2252052 - RNA, 19 nt, Homo sapiens
  misc_RNA (1)...(19): siRNA sense strand
ccuaccaagaggacauaua

SEQ ID NO: 2252053 - RNA, 19 nt, Homo sapiens
  misc_RNA (1)...(19): siRNA sense strand
cagaaaagcuggcugcaga

SEQ ID NO: 2252054 - RNA, 19 nt, Homo sapiens
  misc_RNA (1)...(19): siRNA sense strand
cugaagaagcugaugucca

SEQ ID NO: 2252055 - RNA, 19 nt, Homo sapiens
  misc_RNA (1)...(19): siRNA sense strand
cucuugaaucagacagaaa

SEQ ID NO: 2252056 - RNA, 19 nt, Homo sapiens
  misc_RNA (1)...(19): siRNA sense strand
acaauuaagaucuggagca

SEQ ID NO: 2252057 - RNA, 19 nt, Homo sapiens
  misc_RNA (1)...(19): siRNA sense strand
gaacacaggcuggaggaga

SEQ ID NO: 2252058 - RNA, 19 nt, Homo sapiens
  misc_RNA (1)...(19): siRNA sense strand
gagaagaaaaccuggcuga

SEQ ID NO: 2252059 - RNA, 19 nt, Homo sapiens
  misc_RNA (1)...(19): siRNA sense strand
gcuacgacuccgugccuau

SEQ ID NO: 2252060 - RNA, 19 nt, Homo sapiens
  misc_RNA (1)...(19): siRNA sense strand
gcugauguccacaggcaca

SEQ ID NO: 2252061 - RNA, 19 nt, Homo sapiens
  misc_RNA (1)...(19): siRNA sense strand
caacaggaggagauccgaa

SEQ ID NO: 2252062 - RNA, 19 nt, Homo sapiens
  misc_RNA (1)...(19): siRNA sense strand
cgcacaaacccgggagaaa

SEQ ID NO: 2252063 - RNA, 19 nt, Homo sapiens
  misc_RNA (1)...(19): siRNA sense strand
cggacuacugccuggagaa

SEQ ID NO: 2252064 - RNA, 19 nt, Homo sapiens
  misc_RNA (1)...(19): siRNA sense strand
gcagugacaaugugggcuu

SEQ ID NO: 2252065 - RNA, 19 nt, Homo sapiens
  misc_RNA (1)...(19): siRNA sense strand
cagccaugaaccugcacaa

SEQ ID NO: 2252066 - RNA, 19 nt, Homo sapiens
  misc_RNA (1)...(19): siRNA sense strand
gaacaaaacgcuagggcug

SEQ ID NO: 2252067 - RNA, 19 nt, Homo sapiens
  misc_RNA (1)...(19): siRNA sense strand
uugaagaaugcaaguauca

SEQ ID NO: 2252068 - RNA, 19 nt, Homo sapiens
  misc_RNA (1)...(19): siRNA sense strand
cugaaaaccugaagcggaa

SEQ ID NO: 2252069 - RNA, 19 nt, Homo sapiens
  misc_RNA (1)...(19): siRNA sense strand
ggcucuaagcaaugagauu

SEQ ID NO: 2252070 - RNA, 19 nt, Homo sapiens
  misc_RNA (1)...(19): siRNA sense strand
gcaaugagauucugggccu

SEQ ID NO: 2252071 - RNA, 19 nt, Homo sapiens
  misc_RNA (1)...(19): siRNA sense strand
augcaagugucauggcaca

SEQ ID NO: 2252072 - RNA, 19 nt, Homo sapiens
  misc_RNA (1)...(19): siRNA sense strand
ccgcaauucuggagccuuc

SEQ ID NO: 2252073 - RNA, 19 nt, Homo sapiens
  misc_RNA (1)...(19): siRNA sense strand
cggaaaugcaagugucaug

SEQ ID NO: 2252074 - RNA, 19 nt, Homo sapiens
  misc_RNA (1)...(19): siRNA sense strand
agugggugaauguguguaa

SEQ ID NO: 2252075 - RNA, 19 nt, Homo sapiens
  misc_RNA (1)...(19): siRNA sense strand
ggcugaagcuggagcggaa

SEQ ID NO: 2252076 - RNA, 19 nt, Homo sapiens
  misc_RNA (1)...(19): siRNA sense strand
acaacaaccucgugggugu

SEQ ID NO: 2252077 - RNA, 19 nt, Homo sapiens
  misc_RNA (1)...(19): siRNA sense strand
agaagaacugcgagagcau

SEQ ID NO: 2252078 - RNA, 19 nt, Homo sapiens
  misc_RNA (1)...(19): siRNA sense strand
cgugagaagaacugcgaga

SEQ ID NO: 2252079 - RNA, 19 nt, Homo sapiens
  misc_RNA (1)...(19): siRNA sense strand
ugguggaggccgugagcau

SEQ ID NO: 2252080 - RNA, 19 nt, Homo sapiens
  misc_RNA (1)...(19): siRNA sense strand
cggcaugagcgcuggaacu

SEQ ID NO: 2252081 - RNA, 19 nt, Homo sapiens
  misc_RNA (1)...(19): siRNA sense strand
guguaagugccauggcgua

SEQ ID NO: 2252082 - RNA, 19 nt, Homo sapiens
  misc_RNA (1)...(19): siRNA sense strand
gcugcuacguggagugcca

SEQ ID NO: 2252083 - RNA, 19 nt, Homo sapiens
  misc_RNA (1)...(19): siRNA sense strand
caauuauggucaugggaca

SEQ ID NO: 2252084 - RNA, 19 nt, Homo sapiens
  misc_RNA (1)...(19): siRNA sense strand
ccaaggagcugaaccgcaa

SEQ ID NO: 2252085 - RNA, 19 nt, Homo sapiens
  misc_RNA (1)...(19): siRNA sense strand
gaaaugauaccaagggaga

SEQ ID NO: 2252086 - RNA, 19 nt, Homo sapiens
  misc_RNA (1)...(19): siRNA sense strand
gcccaaaggcacaguggau

SEQ ID NO: 2252087 - RNA, 19 nt, Homo sapiens
  misc_RNA (1)...(19): siRNA sense strand
aaugauaccaagggagaaa

SEQ ID NO: 2252088 - RNA, 19 nt, Homo sapiens
  misc_RNA (1)...(19): siRNA sense strand
ggcgaaugguggaggccuu

SEQ ID NO: 2252089 - RNA, 19 nt, Homo sapiens
  misc_RNA (1)...(19): siRNA sense strand
uggagaagaacgugcccaa

SEQ ID NO: 2252090 - RNA, 19 nt, Homo sapiens
  misc_RNA (1)...(19): siRNA sense strand
acacaaagccacuggaccu

SEQ ID NO: 2252091 - RNA, 19 nt, Homo sapiens
  misc_RNA (1)...(19): siRNA sense strand
augaguggccagugggauu

SEQ ID NO: 2252092 - RNA, 19 nt, Homo sapiens
  misc_RNA (1)...(19): siRNA sense strand
ggauggagaauuugggauc

SEQ ID NO: 2252093 - RNA, 19 nt, Homo sapiens
  misc_RNA (1)...(19): siRNA sense strand
caaccaaucuuguggaccu

SEQ ID NO: 2252094 - RNA, 19 nt, Homo sapiens
  misc_RNA (1)...(19): siRNA sense strand
uggauugggaccagcuaua

SEQ ID NO: 2252095 - RNA, 19 nt, Homo sapiens
  misc_RNA (1)...(19): siRNA sense strand
aggcagugaagaacagcaa

SEQ ID NO: 2252096 - RNA, 19 nt, Homo sapiens
  misc_RNA (1)...(19): siRNA sense strand
cuggagggcguguggguuu

SEQ ID NO: 2252097 - RNA, 19 nt, Homo sapiens
  misc_RNA (1)...(19): siRNA sense strand
gugacagcauccaggccua

SEQ ID NO: 2252098 - RNA, 19 nt, Homo sapiens
  misc_RNA (1)...(19): siRNA sense strand
aggcacaguggaugaguuu

SEQ ID NO: 2252099 - RNA, 19 nt, Homo sapiens
  misc_RNA (1)...(19): siRNA sense strand
aggccuacucauugggaga

SEQ ID NO: 2252100 - RNA, 19 nt, Homo sapiens
  misc_RNA (1)...(19): siRNA sense strand
auguaugggaucuaugaaa

SEQ ID NO: 2252101 - RNA, 19 nt, Homo sapiens
  misc_RNA (1)...(19): siRNA sense strand
caguggugacuaugaagaa

SEQ ID NO: 2252102 - RNA, 19 nt, Homo sapiens
  misc_RNA (1)...(19): siRNA sense strand
ucgcuauggccaagggcau

SEQ ID NO: 2252103 - RNA, 19 nt, Homo sapiens
  misc_RNA (1)...(19): siRNA sense strand
ugguaucauuugugcccua

SEQ ID NO: 2252104 - RNA, 19 nt, Homo sapiens
  misc_RNA (1)...(19): siRNA sense strand
cagcagaugcagacccaga

SEQ ID NO: 2252105 - RNA, 19 nt, Homo sapiens
  misc_RNA (1)...(19): siRNA sense strand
guuacuauaaggauggaga

SEQ ID NO: 2252106 - RNA, 19 nt, Homo sapiens
  misc_RNA (1)...(19): siRNA sense strand
gugagaaauuguuccacca

SEQ ID NO: 2252107 - RNA, 19 nt, Homo sapiens
  misc_RNA (1)...(19): siRNA sense strand
gggagcacuuggcaggaga

SEQ ID NO: 2252108 - RNA, 19 nt, Homo sapiens
  misc_RNA (1)...(19): siRNA sense strand
gaaaguaucuggcguccga

SEQ ID NO: 2252109 - RNA, 19 nt, Homo sapiens
  misc_RNA (1)...(19): siRNA sense strand
cauugggagaugugaggau

SEQ ID NO: 2252110 - RNA, 19 nt, Homo sapiens
  misc_RNA (1)...(19): siRNA sense strand
gggagaaggucacgggaca

SEQ ID NO: 2252111 - RNA, 19 nt, Homo sapiens
  misc_RNA (1)...(19): siRNA sense strand
gggcaaagcugaugggcuc

SEQ ID NO: 2252112 - RNA, 19 nt, Homo sapiens
  misc_RNA (1)...(19): siRNA sense strand
cuggauacgagguggacaa

SEQ ID NO: 2252113 - RNA, 19 nt, Homo sapiens
  misc_RNA (1)...(19): siRNA sense strand
ccaucagguuucugcgcaa

SEQ ID NO: 2252114 - RNA, 19 nt, Homo sapiens
  misc_RNA (1)...(19): siRNA sense strand
ccguagacaaggagcgcuu

SEQ ID NO: 2252115 - RNA, 19 nt, Homo sapiens
  misc_RNA (1)...(19): siRNA sense strand
ugaagaagaugaaucccaa

SEQ ID NO: 2252116 - RNA, 19 nt, Homo sapiens
  misc_RNA (1)...(19): siRNA sense strand
gcaagaagagaguggugca

SEQ ID NO: 2252117 - RNA, 19 nt, Homo sapiens
  misc_RNA (1)...(19): siRNA sense strand
agaagagaguggugcagca

SEQ ID NO: 2252118 - RNA, 19 nt, Homo sapiens
  misc_RNA (1)...(19): siRNA sense strand
ugguacaggacuuggccaa

SEQ ID NO: 2252119 - RNA, 19 nt, Homo sapiens
  misc_RNA (1)...(19): siRNA sense strand
ccuauguggaugcuggaua

SEQ ID NO: 2252120 - RNA, 19 nt, Homo sapiens
  misc_RNA (1)...(19): siRNA sense strand
uuccauggcucuugggaga

SEQ ID NO: 2252121 - RNA, 19 nt, Homo sapiens
  misc_RNA (1)...(19): siRNA sense strand
cugaagacccuguuagcca

SEQ ID NO: 2252122 - RNA, 19 nt, Homo sapiens
  misc_RNA (1)...(19): siRNA sense strand
aaggagggaugcuggccua

SEQ ID NO: 2252123 - RNA, 19 nt, Homo sapiens
  misc_RNA (1)...(19): siRNA sense strand
gggccaccaaacagagaau

SEQ ID NO: 2252124 - RNA, 19 nt, Homo sapiens
  misc_RNA (1)...(19): siRNA sense strand
uugucaaccuuauggccua

SEQ ID NO: 2252125 - RNA, 19 nt, Homo sapiens
  misc_RNA (1)...(19): siRNA sense strand
augaaauaguggaggaaca

SEQ ID NO: 2252126 - RNA, 19 nt, Homo sapiens
  misc_RNA (1)...(19): siRNA sense strand
aguaaaugcugcaggaagu

SEQ ID NO: 2252127 - RNA, 19 nt, Homo sapiens
  misc_RNA (1)...(19): siRNA sense strand
caaaugaaauaguggagga

SEQ ID NO: 2252128 - RNA, 19 nt, Homo sapiens
  misc_RNA (1)...(19): siRNA sense strand
caggaagaggugagagaca

SEQ ID NO: 2252129 - RNA, 19 nt, Homo sapiens
  misc_RNA (1)...(19): siRNA sense strand
gaaagaaagcuuaagcaca

SEQ ID NO: 2252130 - RNA, 19 nt, Homo sapiens
  misc_RNA (1)...(19): siRNA sense strand
aggagaaaauagagaguca

SEQ ID NO: 2252131 - RNA, 19 nt, Homo sapiens
  misc_RNA (1)...(19): siRNA sense strand
gagagacagcaaagagaau

SEQ ID NO: 2252132 - RNA, 19 nt, Homo sapiens
  misc_RNA (1)...(19): siRNA sense strand
ggauggaugaggagcaaaa

SEQ ID NO: 2252133 - RNA, 19 nt, Homo sapiens
  misc_RNA (1)...(19): siRNA sense strand
gagaaaauagagagucaaa

SEQ ID NO: 2252134 - RNA, 19 nt, Homo sapiens
  misc_RNA (1)...(19): siRNA sense strand
ggaaagagaguaaagacca

SEQ ID NO: 2252135 - RNA, 19 nt, Homo sapiens
  misc_RNA (1)...(19): siRNA sense strand
gagacagcaaagagaauau

SEQ ID NO: 2252136 - RNA, 19 nt, Homo sapiens
  misc_RNA (1)...(19): siRNA sense strand
ggccagaaagaaagcuuaa

SEQ ID NO: 2252137 - RNA, 19 nt, Homo sapiens
  misc_RNA (1)...(19): siRNA sense strand
aagaagacuggaugagaau

SEQ ID NO: 2252138 - RNA, 19 nt, Homo sapiens
  misc_RNA (1)...(19): siRNA sense strand
aaaucaacgaugagaugaa

SEQ ID NO: 2252139 - RNA, 19 nt, Homo sapiens
  misc_RNA (1)...(19): siRNA sense strand
cuaagagagcaauggaaaa

SEQ ID NO: 2252140 - RNA, 19 nt, Homo sapiens
  misc_RNA (1)...(19): siRNA sense strand
acgacaaggaucaagaauu

SEQ ID NO: 2252141 - RNA, 19 nt, Homo sapiens
  misc_RNA (1)...(19): siRNA sense strand
aggaagaggaacaaauuga

SEQ ID NO: 2252142 - RNA, 19 nt, Homo sapiens
  misc_RNA (1)...(19): siRNA sense strand
cggaugaugaagaugauau

SEQ ID NO: 2252143 - RNA, 19 nt, Homo sapiens
  misc_RNA (1)...(19): siRNA sense strand
cuuuaaacgcacaaaugaa

SEQ ID NO: 2252144 - RNA, 19 nt, Homo sapiens
  misc_RNA (1)...(19): siRNA sense strand
cccaggaagaggugagaga

SEQ ID NO: 2252145 - RNA, 19 nt, Homo sapiens
  misc_RNA (1)...(19): siRNA sense strand
ugaucagggcuuuggagua

SEQ ID NO: 2252146 - RNA, 19 nt, Homo sapiens
  misc_RNA (1)...(19): siRNA sense strand
agcaguggccagaaagaaa

SEQ ID NO: 2252147 - RNA, 19 nt, Homo sapiens
  misc_RNA (1)...(19): siRNA sense strand
ugaaauaguggaggaacaa

SEQ ID NO: 2252148 - RNA, 19 nt, Homo sapiens
  misc_RNA (1)...(19): siRNA sense strand
gagugcagcaaaucagaaa

SEQ ID NO: 2252149 - RNA, 19 nt, Homo sapiens
  misc_RNA (1)...(19): siRNA sense strand
augaaaaccugaacgacaa

SEQ ID NO: 2252150 - RNA, 19 nt, Homo sapiens
  misc_RNA (1)...(19): siRNA sense strand
gggagaagccgaauggauc

SEQ ID NO: 2252151 - RNA, 19 nt, Homo sapiens
  misc_RNA (1)...(19): siRNA sense strand
caaaagaaaauaagcccua

SEQ ID NO: 2252152 - RNA, 19 nt, Homo sapiens
  misc_RNA (1)...(19): siRNA sense strand
ggccaggaugcuaguuaaa

SEQ ID NO: 2252153 - RNA, 19 nt, Homo sapiens
  misc_RNA (1)...(19): siRNA sense strand
gugagagacagcaaagaga

SEQ ID NO: 2252154 - RNA, 19 nt, Homo sapiens
  misc_RNA (1)...(19): siRNA sense strand
agcaaagagaauauaggaa

SEQ ID NO: 2252155 - RNA, 19 nt, Homo sapiens
  misc_RNA (1)...(19): siRNA sense strand
gugaugauuaugagacaca

SEQ ID NO: 2252156 - RNA, 19 nt, Homo sapiens
  misc_RNA (1)...(19): siRNA sense strand
gcacaaaugaaauagugga

SEQ ID NO: 2252157 - RNA, 19 nt, Homo sapiens
  misc_RNA (1)...(19): siRNA sense strand
ggaaagggccaccaggcuu

SEQ ID NO: 2252158 - RNA, 19 nt, Homo sapiens
  misc_RNA (1)...(19): siRNA sense strand
aagaauuaggugaguacuu

SEQ ID NO: 2252159 - RNA, 19 nt, Homo sapiens
  misc_RNA (1)...(19): siRNA sense strand
uggacaugagugaugauua

SEQ ID NO: 2252160 - RNA, 19 nt, Homo sapiens
  misc_RNA (1)...(19): siRNA sense strand
gagguuacagaaugggcaa

SEQ ID NO: 2252161 - RNA, 19 nt, Homo sapiens
  misc_RNA (1)...(19): siRNA sense strand
guuaguaaaugcugcagga

SEQ ID NO: 2252162 - RNA, 19 nt, Homo sapiens
  misc_RNA (1)...(19): siRNA sense strand
caaaccaagugaagcgagu

SEQ ID NO: 2252163 - RNA, 19 nt, Homo sapiens
  misc_RNA (1)...(19): siRNA sense strand
gagaauaauacucgaagcu

SEQ ID NO: 2252164 - RNA, 19 nt, Homo sapiens
  misc_RNA (1)...(19): siRNA sense strand
caaacaaccagaaacguga

SEQ ID NO: 2252165 - RNA, 19 nt, Homo sapiens
  misc_RNA (1)...(19): siRNA sense strand
gcucaaaacuggggagaag

SEQ ID NO: 2252166 - RNA, 19 nt, Homo sapiens
  misc_RNA (1)...(19): siRNA sense strand
cccuuauggugcuggaaga

SEQ ID NO: 2252167 - RNA, 19 nt, Homo sapiens
  misc_RNA (1)...(19): siRNA sense strand
agacuggaugagaauaaua

SEQ ID NO: 2252168 - RNA, 19 nt, Homo sapiens
  misc_RNA (1)...(19): siRNA sense strand
uccuauguaugaagagaau

SEQ ID NO: 2252169 - RNA, 19 nt, Homo sapiens
  misc_RNA (1)...(19): siRNA sense strand
gugagaggauggaugagga

SEQ ID NO: 2252170 - RNA, 19 nt, Homo sapiens
  misc_RNA (1)...(19): siRNA sense strand
gccgaauggaucaguggaa

SEQ ID NO: 2252171 - RNA, 19 nt, Homo sapiens
  misc_RNA (1)...(19): siRNA sense strand
aguuaaauacccugagauc

SEQ ID NO: 2252172 - RNA, 19 nt, Homo sapiens
  misc_RNA (1)...(19): siRNA sense strand
gggcuuuggaguacauaga

SEQ ID NO: 2252173 - RNA, 19 nt, Homo sapiens
  misc_RNA (1)...(19): siRNA sense strand
accagaaacgugagaggau

SEQ ID NO: 2252174 - RNA, 19 nt, Homo sapiens
  misc_RNA (1)...(19): siRNA sense strand
ccaucaaggcauaggguua

SEQ ID NO: 2252175 - RNA, 19 nt, Homo sapiens
  misc_RNA (1)...(19): siRNA sense strand
augcaaaguuacagaauca

SEQ ID NO: 2252176 - RNA, 19 nt, Homo sapiens
  misc_RNA (1)...(19): siRNA sense strand
augaaaagcuggaagauau

SEQ ID NO: 2252177 - RNA, 19 nt, Homo sapiens
  misc_RNA (1)...(19): siRNA sense strand
gguacaauuuagugaugau

SEQ ID NO: 2252178 - RNA, 19 nt, Homo sapiens
  misc_RNA (1)...(19): siRNA sense strand
gagaaagcaaccagcgaga

SEQ ID NO: 2252179 - RNA, 19 nt, Homo sapiens
  misc_RNA (1)...(19): siRNA sense strand
cauccuaaaguaugugaaa

SEQ ID NO: 2252180 - RNA, 19 nt, Homo sapiens
  misc_RNA (1)...(19): siRNA sense strand
gguagagacaauagaacca

SEQ ID NO: 2252181 - RNA, 19 nt, Homo sapiens
  misc_RNA (1)...(19): siRNA sense strand
cagcaaugauuaagaaccu

SEQ ID NO: 2252182 - RNA, 19 nt, Homo sapiens
  misc_RNA (1)...(19): siRNA sense strand
caauagaaccagagccgga

SEQ ID NO: 2252183 - RNA, 19 nt, Homo sapiens
  misc_RNA (1)...(19): siRNA sense strand
cucagaacuuaaugugaaa

SEQ ID NO: 2252184 - RNA, 19 nt, Homo sapiens
  misc_RNA (1)...(19): siRNA sense strand
uguaucaaacuguggcaaa

SEQ ID NO: 2252185 - RNA, 19 nt, Homo sapiens
  misc_RNA (1)...(19): siRNA sense strand
gguugaauggacagaugaa

SEQ ID NO: 2252186 - RNA, 19 nt, Homo sapiens
  misc_RNA (1)...(19): siRNA sense strand
agauuuugcuagugaagua

SEQ ID NO: 2252187 - RNA, 19 nt, Homo sapiens
  misc_RNA (1)...(19): siRNA sense strand
auaccaaguuaaugaacga

SEQ ID NO: 2252188 - RNA, 19 nt, Homo sapiens
  misc_RNA (1)...(19): siRNA sense strand
guggaaaggugaaacccau

SEQ ID NO: 2252189 - RNA, 19 nt, Homo sapiens
  misc_RNA (1)...(19): siRNA sense strand
gaugaaaagcuggaagaua

SEQ ID NO: 2252190 - RNA, 19 nt, Homo sapiens
  misc_RNA (1)...(19): siRNA sense strand
ccaccaacaugaaggccga

SEQ ID NO: 2252191 - RNA, 19 nt, Homo sapiens
  misc_RNA (1)...(19): siRNA sense strand
aguuacagaaucagccaua

SEQ ID NO: 2252192 - RNA, 19 nt, Homo sapiens
  misc_RNA (1)...(19): siRNA sense strand
ccagaaugcaggaccuaau

SEQ ID NO: 2252193 - RNA, 19 nt, Homo sapiens
  misc_RNA (1)...(19): siRNA sense strand
auguucagguagagacaau

SEQ ID NO: 2252194 - RNA, 19 nt, Homo sapiens
  misc_RNA (1)...(19): siRNA sense strand
uugaauggacagaugaauu

SEQ ID NO: 2252195 - RNA, 19 nt, Homo sapiens
  misc_RNA (1)...(19): siRNA sense strand
ucuauuaugagaagaguga

SEQ ID NO: 2252196 - RNA, 19 nt, Homo sapiens
  misc_RNA (1)...(19): siRNA sense strand
guaucaaacuguggcaaaa

SEQ ID NO: 2252197 - RNA, 19 nt, Homo sapiens
  misc_RNA (1)...(19): siRNA sense strand
cuuaaggaacaaggaguua

SEQ ID NO: 2252198 - RNA, 19 nt, Homo sapiens
  misc_RNA (1)...(19): siRNA sense strand
ucuuaugguugaauggaca

SEQ ID NO: 2252199 - RNA, 19 nt, Homo sapiens
  misc_RNA (1)...(19): siRNA sense strand
gagaagaagacgguacaau

SEQ ID NO: 2252200 - RNA, 19 nt, Homo sapiens
  misc_RNA (1)...(19): siRNA sense strand
cucucaggcugcagaacaa

SEQ ID NO: 2252201 - RNA, 19 nt, Homo sapiens
  misc_RNA (1)...(19): siRNA sense strand
cagagaagaagacgguaca

SEQ ID NO: 2252202 - RNA, 19 nt, Homo sapiens
  misc_RNA (1)...(19): siRNA sense strand
ugaaagugauggaggcccu

SEQ ID NO: 2252203 - RNA, 19 nt, Homo sapiens
  misc_RNA (1)...(19): siRNA sense strand
gaugaauacugcugaggac

SEQ ID NO: 2252204 - RNA, 19 nt, Homo sapiens
  misc_RNA (1)...(19): siRNA sense strand
caggauguugagaaagcaa

SEQ ID NO: 2252205 - RNA, 19 nt, Homo sapiens
  misc_RNA (1)...(19): siRNA sense strand
ccgcuuacccaaauacaau

SEQ ID NO: 2252206 - RNA, 19 nt, Homo sapiens
  misc_RNA (1)...(19): siRNA sense strand
cugaaccagaaaugauuaa

SEQ ID NO: 2252207 - RNA, 19 nt, Homo sapiens
  misc_RNA (1)...(19): siRNA sense strand
uagugaugauguucaggua

SEQ ID NO: 2252208 - RNA, 19 nt, Homo sapiens
  misc_RNA (1)...(19): siRNA sense strand
cagccuuuauugaugaaga

SEQ ID NO: 2252209 - RNA, 19 nt, Homo sapiens
  misc_RNA (1)...(19): siRNA sense strand
ggaaagaaaugaaggucuc

SEQ ID NO: 2252210 - RNA, 19 nt, Homo sapiens
  misc_RNA (1)...(19): siRNA sense strand
aaggaaaagaucuggaaaa

SEQ ID NO: 2252211 - RNA, 19 nt, Homo sapiens
  misc_RNA (1)...(19): siRNA sense strand
ggaacagcgugcagggacu

SEQ ID NO: 2252212 - RNA, 19 nt, Homo sapiens
  misc_RNA (1)...(19): siRNA sense strand
agagagacccucaaggcaa

SEQ ID NO: 2252213 - RNA, 19 nt, Homo sapiens
  misc_RNA (1)...(19): siRNA sense strand
ggaucugcuuugagagagu

SEQ ID NO: 2252214 - RNA, 19 nt, Homo sapiens
  misc_RNA (1)...(19): siRNA sense strand
aagaaggagaggaguguga

SEQ ID NO: 2252215 - RNA, 19 nt, Homo sapiens
  misc_RNA (1)...(19): siRNA sense strand
gcagcgauuaauagagauu

SEQ ID NO: 2252216 - RNA, 19 nt, Homo sapiens
  misc_RNA (1)...(19): siRNA sense strand
gcgagaugagagaugcuaa

SEQ ID NO: 2252217 - RNA, 19 nt, Homo sapiens
  misc_RNA (1)...(19): siRNA sense strand
agcaaagaacugaucauaa

SEQ ID NO: 2252218 - RNA, 19 nt, Homo sapiens
  misc_RNA (1)...(19): siRNA sense strand
agucaauucugcaggugau

SEQ ID NO: 2252219 - RNA, 19 nt, Homo sapiens
  misc_RNA (1)...(19): siRNA sense strand
ccugaaucgucaaugucaa

SEQ ID NO: 2252220 - RNA, 19 nt, Homo sapiens
  misc_RNA (1)...(19): siRNA sense strand
acaaaugcucuguaaguca

SEQ ID NO: 2252221 - RNA, 19 nt, Homo sapiens
  misc_RNA (1)...(19): siRNA sense strand
gauuuguggaagaaggaga

SEQ ID NO: 2252222 - RNA, 19 nt, Homo sapiens
  misc_RNA (1)...(19): siRNA sense strand
gugaagacugccagcugaa

SEQ ID NO: 2252223 - RNA, 19 nt, Homo sapiens
  misc_RNA (1)...(19): siRNA sense strand
gacuacaacgggaaagcaa

SEQ ID NO: 2252224 - RNA, 19 nt, Homo sapiens
  misc_RNA (1)...(19): siRNA sense strand
acacgguaauucuggguca

SEQ ID NO: 2252225 - RNA, 19 nt, Homo sapiens
  misc_RNA (1)...(19): siRNA sense strand
cgauuaauagagauugcua

SEQ ID NO: 2252226 - RNA, 19 nt, Homo sapiens
  misc_RNA (1)...(19): siRNA sense strand
gucaggauguggacggcua

SEQ ID NO: 2252227 - RNA, 19 nt, Homo sapiens
  misc_RNA (1)...(19): siRNA sense strand
gcuucgacuccaagaauca

SEQ ID NO: 2252228 - RNA, 19 nt, Homo sapiens
  misc_RNA (1)...(19): siRNA sense strand
cugaaucgucaaugucaaa

SEQ ID NO: 2252229 - RNA, 19 nt, Homo sapiens
  misc_RNA (1)...(19): siRNA sense strand
gaaccaaugaaaagugcaa

SEQ ID NO: 2252230 - RNA, 19 nt, Homo sapiens
  misc_RNA (1)...(19): siRNA sense strand
caacuaaguauguggagcu

SEQ ID NO: 2252231 - RNA, 19 nt, Homo sapiens
  misc_RNA (1)...(19): siRNA sense strand
guggaaugacauggacaaa

SEQ ID NO: 2252232 - RNA, 19 nt, Homo sapiens
  misc_RNA (1)...(19): siRNA sense strand
acuacaacgggaaagcaaa

SEQ ID NO: 2252233 - RNA, 19 nt, Homo sapiens
  misc_RNA (1)...(19): siRNA sense strand
uggaaagaaaugaaggucu

SEQ ID NO: 2252234 - RNA, 19 nt, Homo sapiens
  misc_RNA (1)...(19): siRNA sense strand
uguggaaugacauggacaa

SEQ ID NO: 2252235 - RNA, 19 nt, Homo sapiens
  misc_RNA (1)...(19): siRNA sense strand
ggaaggacuuggagaccag

SEQ ID NO: 2252236 - RNA, 19 nt, Homo sapiens
  misc_RNA (1)...(19): siRNA sense strand
gugugcaacaacaggaaga

SEQ ID NO: 2252237 - RNA, 19 nt, Homo sapiens
  misc_RNA (1)...(19): siRNA sense strand
gggaaagcaaagaacugau

SEQ ID NO: 2252238 - RNA, 19 nt, Homo sapiens
  misc_RNA (1)...(19): siRNA sense strand
cgaagaagcugaaaagcgu

SEQ ID NO: 2252239 - RNA, 19 nt, Homo sapiens
  misc_RNA (1)...(19): siRNA sense strand
cggaagucagggagucuuu

SEQ ID NO: 2252240 - RNA, 19 nt, Homo sapiens
  misc_RNA (1)...(19): siRNA sense strand
caggugauccuuauggcaa

SEQ ID NO: 2252241 - RNA, 19 nt, Homo sapiens
  misc_RNA (1)...(19): siRNA sense strand
cagacaaccgagaguuuca

SEQ ID NO: 2252242 - RNA, 19 nt, Homo sapiens
  misc_RNA (1)...(19): siRNA sense strand
ggaaagaaaugaaggucuc

SEQ ID NO: 2252243 - RNA, 19 nt, Homo sapiens
  misc_RNA (1)...(19): siRNA sense strand
aaggaaaagaucuggaaaa

SEQ ID NO: 2252244 - RNA, 19 nt, Homo sapiens
  misc_RNA (1)...(19): siRNA sense strand
ggaacagcgugcagggacu

SEQ ID NO: 2252245 - RNA, 19 nt, Homo sapiens
  misc_RNA (1)...(19): siRNA sense strand
agagagacccucaaggcaa

SEQ ID NO: 2252246 - RNA, 19 nt, Homo sapiens
  misc_RNA (1)...(19): siRNA sense strand
ggaucugcuuugagagagu

SEQ ID NO: 2252247 - RNA, 19 nt, Homo sapiens
  misc_RNA (1)...(19): siRNA sense strand
aagaaggagaggaguguga

SEQ ID NO: 2252248 - RNA, 19 nt, Homo sapiens
  misc_RNA (1)...(19): siRNA sense strand
gcagcgauuaauagagauu

SEQ ID NO: 2252249 - RNA, 19 nt, Homo sapiens
  misc_RNA (1)...(19): siRNA sense strand
gcgagaugagagaugcuaa

SEQ ID NO: 2252250 - RNA, 19 nt, Homo sapiens
  misc_RNA (1)...(19): siRNA sense strand
agcaaagaacugaucauaa

SEQ ID NO: 2252251 - RNA, 19 nt, Homo sapiens
  misc_RNA (1)...(19): siRNA sense strand
agucaauucugcaggugau

SEQ ID NO: 2252252 - RNA, 19 nt, Homo sapiens
  misc_RNA (1)...(19): siRNA sense strand
ccugaaucgucaaugucaa

SEQ ID NO: 2252253 - RNA, 19 nt, Homo sapiens
  misc_RNA (1)...(19): siRNA sense strand
acaaaugcucuguaaguca

SEQ ID NO: 2252254 - RNA, 19 nt, Homo sapiens
  misc_RNA (1)...(19): siRNA sense strand
gauuuguggaagaaggaga

SEQ ID NO: 2252255 - RNA, 19 nt, Homo sapiens
  misc_RNA (1)...(19): siRNA sense strand
gugaagacugccagcugaa

SEQ ID NO: 2252256 - RNA, 19 nt, Homo sapiens
  misc_RNA (1)...(19): siRNA sense strand
gacuacaacgggaaagcaa

SEQ ID NO: 2252257 - RNA, 19 nt, Homo sapiens
  misc_RNA (1)...(19): siRNA sense strand
acacgguaauucuggguca

SEQ ID NO: 2252258 - RNA, 19 nt, Homo sapiens
  misc_RNA (1)...(19): siRNA sense strand
cgauuaauagagauugcua

SEQ ID NO: 2252259 - RNA, 19 nt, Homo sapiens
  misc_RNA (1)...(19): siRNA sense strand
gucaggauguggacggcua

SEQ ID NO: 2252260 - RNA, 19 nt, Homo sapiens
  misc_RNA (1)...(19): siRNA sense strand
gcuucgacuccaagaauca

SEQ ID NO: 2252261 - RNA, 19 nt, Homo sapiens
  misc_RNA (1)...(19): siRNA sense strand
cugaaucgucaaugucaaa

SEQ ID NO: 2252262 - RNA, 19 nt, Homo sapiens
  misc_RNA (1)...(19): siRNA sense strand
gaaccaaugaaaagugcaa

SEQ ID NO: 2252263 - RNA, 19 nt, Homo sapiens
  misc_RNA (1)...(19): siRNA sense strand
caacuaaguauguggagcu

SEQ ID NO: 2252264 - RNA, 19 nt, Homo sapiens
  misc_RNA (1)...(19): siRNA sense strand
guggaaugacauggacaaa

SEQ ID NO: 2252265 - RNA, 19 nt, Homo sapiens
  misc_RNA (1)...(19): siRNA sense strand
acuacaacgggaaagcaaa

SEQ ID NO: 2252266 - RNA, 19 nt, Homo sapiens
  misc_RNA (1)...(19): siRNA sense strand
uggaaagaaaugaaggucu

SEQ ID NO: 2252267 - RNA, 19 nt, Homo sapiens
  misc_RNA (1)...(19): siRNA sense strand
uguggaaugacauggacaa

SEQ ID NO: 2252268 - RNA, 19 nt, Homo sapiens
  misc_RNA (1)...(19): siRNA sense strand
ggaaggacuuggagaccag

SEQ ID NO: 2252269 - RNA, 19 nt, Homo sapiens
  misc_RNA (1)...(19): siRNA sense strand
gugugcaacaacaggaaga

SEQ ID NO: 2252270 - RNA, 19 nt, Homo sapiens
  misc_RNA (1)...(19): siRNA sense strand
gggaaagcaaagaacugau

SEQ ID NO: 2252271 - RNA, 19 nt, Homo sapiens
  misc_RNA (1)...(19): siRNA sense strand
cgaagaagcugaaaagcgu

SEQ ID NO: 2252272 - RNA, 19 nt, Homo sapiens
  misc_RNA (1)...(19): siRNA sense strand
cggaagucagggagucuuu

SEQ ID NO: 2252273 - RNA, 19 nt, Homo sapiens
  misc_RNA (1)...(19): siRNA sense strand
caggugauccuuauggcaa

SEQ ID NO: 2252274 - RNA, 19 nt, Homo sapiens
  misc_RNA (1)...(19): siRNA sense strand
cagacaaccgagaguuuca

SEQ ID NO: 2252275 - RNA, 19 nt, Homo sapiens
  misc_RNA (1)...(19): siRNA sense strand
uuacacaacaaguggaaaa

SEQ ID NO: 2252276 - RNA, 19 nt, Homo sapiens
  misc_RNA (1)...(19): siRNA sense strand
acaacaaguggaaaagaaa

SEQ ID NO: 2252277 - RNA, 19 nt, Homo sapiens
  misc_RNA (1)...(19): siRNA sense strand
cucaugagucggagaucua

SEQ ID NO: 2252278 - RNA, 19 nt, Homo sapiens
  misc_RNA (1)...(19): siRNA sense strand
gguuaugggagguggcaag

SEQ ID NO: 2252279 - RNA, 19 nt, Homo sapiens
  misc_RNA (1)...(19): siRNA sense strand
guuuggaggccuuacacaa

SEQ ID NO: 2252280 - RNA, 19 nt, Homo sapiens
  misc_RNA (1)...(19): siRNA sense strand
ccuuacacaacaaguggaa

SEQ ID NO: 2252281 - RNA, 19 nt, Homo sapiens
  misc_RNA (1)...(19): siRNA sense strand
ggucaauagucaacgagga

SEQ ID NO: 2252282 - RNA, 19 nt, Homo sapiens
  misc_RNA (1)...(19): siRNA sense strand
acucaagcgacuccagaaa

SEQ ID NO: 2252283 - RNA, 19 nt, Homo sapiens
  misc_RNA (1)...(19): siRNA sense strand
cgaugugacucaagcgacu

SEQ ID NO: 2252284 - RNA, 19 nt, Homo sapiens
  misc_RNA (1)...(19): siRNA sense strand
agugcugggaugagaaauu

SEQ ID NO: 2252285 - RNA, 19 nt, Homo sapiens
  misc_RNA (1)...(19): siRNA sense strand
agaaacauucacagaagau

SEQ ID NO: 2252286 - RNA, 19 nt, Homo sapiens
  misc_RNA (1)...(19): siRNA sense strand
ggacagaacuacagcgguu

SEQ ID NO: 2252287 - RNA, 19 nt, Homo sapiens
  misc_RNA (1)...(19): siRNA sense strand
acaaauaagaagaccggaa

SEQ ID NO: 2252288 - RNA, 19 nt, Homo sapiens
  misc_RNA (1)...(19): siRNA sense strand
gaaaagaauuccauggcaa

SEQ ID NO: 2252289 - RNA, 19 nt, Homo sapiens
  misc_RNA (1)...(19): siRNA sense strand
ccggaaaaccaaugauaaa

SEQ ID NO: 2252290 - RNA, 19 nt, Homo sapiens
  misc_RNA (1)...(19): siRNA sense strand
uaucauucacaaagggaaa

SEQ ID NO: 2252291 - RNA, 19 nt, Homo sapiens
  misc_RNA (1)...(19): siRNA sense strand
cuauggugguuaugagaau

SEQ ID NO: 2252292 - RNA, 19 nt, Homo sapiens
  misc_RNA (1)...(19): siRNA sense strand
acagaaaugaucagcgcaa

SEQ ID NO: 2252293 - RNA, 19 nt, Homo sapiens
  misc_RNA (1)...(19): siRNA sense strand
aggcaaaaugggaggaaga

SEQ ID NO: 2252294 - RNA, 19 nt, Homo sapiens
  misc_RNA (1)...(19): siRNA sense strand
cauauaauaaccagggaca

SEQ ID NO: 2252295 - RNA, 19 nt, Homo sapiens
  misc_RNA (1)...(19): siRNA sense strand
uugacugguuugauggaaa

SEQ ID NO: 2252296 - RNA, 19 nt, Homo sapiens
  misc_RNA (1)...(19): siRNA sense strand
caugagaggagguggaagu

SEQ ID NO: 2252297 - RNA, 19 nt, Homo sapiens
  misc_RNA (1)...(19): siRNA sense strand
gagaggagguggaagugga

SEQ ID NO: 2252298 - RNA, 19 nt, Homo sapiens
  misc_RNA (1)...(19): siRNA sense strand
ccucuuauggacagaacua

SEQ ID NO: 2252299 - RNA, 19 nt, Homo sapiens
  misc_RNA (1)...(19): siRNA sense strand
agaccgaggagguggcuau

SEQ ID NO: 2252300 - RNA, 19 nt, Homo sapiens
  misc_RNA (1)...(19): siRNA sense strand
aggcuaugguggagaccga

SEQ ID NO: 2252301 - RNA, 19 nt, Homo sapiens
  misc_RNA (1)...(19): siRNA sense strand
aggcuauggaggagacaga

SEQ ID NO: 2252302 - RNA, 19 nt, Homo sapiens
  misc_RNA (1)...(19): siRNA sense strand
aagccaagguggaagagca

SEQ ID NO: 2252303 - RNA, 19 nt, Homo sapiens
  misc_RNA (1)...(19): siRNA sense strand
agacaaggacacaggaaag

SEQ ID NO: 2252304 - RNA, 19 nt, Homo sapiens
  misc_RNA (1)...(19): siRNA sense strand
gcaaaaugggaggaagaaa

SEQ ID NO: 2252305 - RNA, 19 nt, Homo sapiens
  misc_RNA (1)...(19): siRNA sense strand
ccgaggaggcuauggagga

SEQ ID NO: 2252306 - RNA, 19 nt, Homo sapiens
  misc_RNA (1)...(19): siRNA sense strand
aggagaucgaggagguuau

SEQ ID NO: 2252307 - RNA, 19 nt, Homo sapiens
  misc_RNA (1)...(19): siRNA sense strand
ucgaggagguuauggagga

SEQ ID NO: 2252308 - RNA, 19 nt, Homo sapiens
  misc_RNA (1)...(19): siRNA sense strand
cggcuauggaggagaccga

SEQ ID NO: 2252309 - RNA, 19 nt, Homo sapiens
  misc_RNA (1)...(19): siRNA sense strand
cggcuauggaggagaccga

SEQ ID NO: 2252310 - RNA, 19 nt, Homo sapiens
  misc_RNA (1)...(19): siRNA sense strand
ggaaucaucaggaagccaa

SEQ ID NO: 2252311 - RNA, 19 nt, Homo sapiens
  misc_RNA (1)...(19): siRNA sense strand
ugacaaggauggaagaggu

SEQ ID NO: 2252312 - RNA, 19 nt, Homo sapiens
  misc_RNA (1)...(19): siRNA sense strand
uggaggagaucgaggaggu

SEQ ID NO: 2252313 - RNA, 19 nt, Homo sapiens
  misc_RNA (1)...(19): siRNA sense strand
aggagaucgaggaggcuau

SEQ ID NO: 2252314 - RNA, 19 nt, Homo sapiens
  misc_RNA (1)...(19): siRNA sense strand
agguggcuauggaggcaaa

SEQ ID NO: 2252315 - RNA, 19 nt, Homo sapiens
  misc_RNA (1)...(19): siRNA sense strand
aaucaaaagcagagcucau

SEQ ID NO: 2252316 - RNA, 19 nt, Homo sapiens
  misc_RNA (1)...(19): siRNA sense strand
aggagguuauggaggagau

SEQ ID NO: 2252317 - RNA, 19 nt, Homo sapiens
  misc_RNA (1)...(19): siRNA sense strand
aggcuauggaggagaucga

SEQ ID NO: 2252318 - RNA, 19 nt, Homo sapiens
  misc_RNA (1)...(19): siRNA sense strand
aggaagccaagguggaaga

SEQ ID NO: 2252319 - RNA, 19 nt, Homo sapiens
  misc_RNA (1)...(19): siRNA sense strand
uagaggauauggcggguca

SEQ ID NO: 2252320 - RNA, 19 nt, Homo sapiens
  misc_RNA (1)...(19): siRNA sense strand
ggauaugacaaggauggaa

SEQ ID NO: 2252321 - RNA, 19 nt, Homo sapiens
  misc_RNA (1)...(19): siRNA sense strand
uggcuacagcggagauaga

SEQ ID NO: 2252322 - RNA, 19 nt, Homo sapiens
  misc_RNA (1)...(19): siRNA sense strand
aggagaucgagguggcuau

SEQ ID NO: 2252323 - RNA, 19 nt, Homo sapiens
  misc_RNA (1)...(19): siRNA sense strand
aggcuauggacaagcauca

SEQ ID NO: 2252324 - RNA, 19 nt, Homo sapiens
  misc_RNA (1)...(19): siRNA sense strand
aaauaagaagaccggaaaa

SEQ ID NO: 2252325 - RNA, 19 nt, Homo sapiens
  misc_RNA (1)...(19): siRNA sense strand
ugacugguuugauggaaaa

SEQ ID NO: 2252326 - RNA, 19 nt, Homo sapiens
  misc_RNA (1)...(19): siRNA sense strand
uggaggagaccgaggugga

SEQ ID NO: 2252327 - RNA, 19 nt, Homo sapiens
  misc_RNA (1)...(19): siRNA sense strand
ucauauagccagcaaccau

SEQ ID NO: 2252328 - RNA, 19 nt, Homo sapiens
  misc_RNA (1)...(19): siRNA sense strand
ggacagaacuacagcgguu

SEQ ID NO: 2252329 - RNA, 19 nt, Homo sapiens
  misc_RNA (1)...(19): siRNA sense strand
acaaauaagaagaccggaa

SEQ ID NO: 2252330 - RNA, 19 nt, Homo sapiens
  misc_RNA (1)...(19): siRNA sense strand
gaaaagaauuccauggcaa

SEQ ID NO: 2252331 - RNA, 19 nt, Homo sapiens
  misc_RNA (1)...(19): siRNA sense strand
ccggaaaaccaaugauaaa

SEQ ID NO: 2252332 - RNA, 19 nt, Homo sapiens
  misc_RNA (1)...(19): siRNA sense strand
uaucauucacaaagggaaa

SEQ ID NO: 2252333 - RNA, 19 nt, Homo sapiens
  misc_RNA (1)...(19): siRNA sense strand
cuauggugguuaugagaau

SEQ ID NO: 2252334 - RNA, 19 nt, Homo sapiens
  misc_RNA (1)...(19): siRNA sense strand
acagaaaugaucagcgcaa

SEQ ID NO: 2252335 - RNA, 19 nt, Homo sapiens
  misc_RNA (1)...(19): siRNA sense strand
aggcaaaaugggaggaaga

SEQ ID NO: 2252336 - RNA, 19 nt, Homo sapiens
  misc_RNA (1)...(19): siRNA sense strand
cauauaauaaccagggaca

SEQ ID NO: 2252337 - RNA, 19 nt, Homo sapiens
  misc_RNA (1)...(19): siRNA sense strand
uugacugguuugauggaaa

SEQ ID NO: 2252338 - RNA, 19 nt, Homo sapiens
  misc_RNA (1)...(19): siRNA sense strand
caugagaggagguggaagu

SEQ ID NO: 2252339 - RNA, 19 nt, Homo sapiens
  misc_RNA (1)...(19): siRNA sense strand
gagaggagguggaagugga

SEQ ID NO: 2252340 - RNA, 19 nt, Homo sapiens
  misc_RNA (1)...(19): siRNA sense strand
ccucuuauggacagaacua

SEQ ID NO: 2252341 - RNA, 19 nt, Homo sapiens
  misc_RNA (1)...(19): siRNA sense strand
agaccgaggagguggcuau

SEQ ID NO: 2252342 - RNA, 19 nt, Homo sapiens
  misc_RNA (1)...(19): siRNA sense strand
aggcuaugguggagaccga

SEQ ID NO: 2252343 - RNA, 19 nt, Homo sapiens
  misc_RNA (1)...(19): siRNA sense strand
aggcuauggaggagacaga

SEQ ID NO: 2252344 - RNA, 19 nt, Homo sapiens
  misc_RNA (1)...(19): siRNA sense strand
aagccaagguggaagagca

SEQ ID NO: 2252345 - RNA, 19 nt, Homo sapiens
  misc_RNA (1)...(19): siRNA sense strand
agacaaggacacaggaaag

SEQ ID NO: 2252346 - RNA, 19 nt, Homo sapiens
  misc_RNA (1)...(19): siRNA sense strand
gcaaaaugggaggaagaaa

SEQ ID NO: 2252347 - RNA, 19 nt, Homo sapiens
  misc_RNA (1)...(19): siRNA sense strand
ccgaggaggcuauggagga

SEQ ID NO: 2252348 - RNA, 19 nt, Homo sapiens
  misc_RNA (1)...(19): siRNA sense strand
aggagaucgaggagguuau

SEQ ID NO: 2252349 - RNA, 19 nt, Homo sapiens
  misc_RNA (1)...(19): siRNA sense strand
ucgaggagguuauggagga

SEQ ID NO: 2252350 - RNA, 19 nt, Homo sapiens
  misc_RNA (1)...(19): siRNA sense strand
cggcuauggaggagaccga

SEQ ID NO: 2252351 - RNA, 19 nt, Homo sapiens
  misc_RNA (1)...(19): siRNA sense strand
cggcuauggaggagaccga

SEQ ID NO: 2252352 - RNA, 19 nt, Homo sapiens
  misc_RNA (1)...(19): siRNA sense strand
ggaaucaucaggaagccaa

SEQ ID NO: 2252353 - RNA, 19 nt, Homo sapiens
  misc_RNA (1)...(19): siRNA sense strand
ugacaaggauggaagaggu

SEQ ID NO: 2252354 - RNA, 19 nt, Homo sapiens
  misc_RNA (1)...(19): siRNA sense strand
uggaggagaucgaggaggu

SEQ ID NO: 2252355 - RNA, 19 nt, Homo sapiens
  misc_RNA (1)...(19): siRNA sense strand
aggagaucgaggaggcuau

SEQ ID NO: 2252356 - RNA, 19 nt, Homo sapiens
  misc_RNA (1)...(19): siRNA sense strand
agguggcuauggaggcaaa

SEQ ID NO: 2252357 - RNA, 19 nt, Homo sapiens
  misc_RNA (1)...(19): siRNA sense strand
aaucaaaagcagagcucau

SEQ ID NO: 2252358 - RNA, 19 nt, Homo sapiens
  misc_RNA (1)...(19): siRNA sense strand
aggagguuauggaggagau

SEQ ID NO: 2252359 - RNA, 19 nt, Homo sapiens
  misc_RNA (1)...(19): siRNA sense strand
aggcuauggaggagaucga

SEQ ID NO: 2252360 - RNA, 19 nt, Homo sapiens
  misc_RNA (1)...(19): siRNA sense strand
aggaagccaagguggaaga

SEQ ID NO: 2252361 - RNA, 19 nt, Homo sapiens
  misc_RNA (1)...(19): siRNA sense strand
uagaggauauggcggguca

SEQ ID NO: 2252362 - RNA, 19 nt, Homo sapiens
  misc_RNA (1)...(19): siRNA sense strand
ggauaugacaaggauggaa

SEQ ID NO: 2252363 - RNA, 19 nt, Homo sapiens
  misc_RNA (1)...(19): siRNA sense strand
uggcuacagcggagauaga

SEQ ID NO: 2252364 - RNA, 19 nt, Homo sapiens
  misc_RNA (1)...(19): siRNA sense strand
aggagaucgagguggcuau

SEQ ID NO: 2252365 - RNA, 19 nt, Homo sapiens
  misc_RNA (1)...(19): siRNA sense strand
aggcuauggacaagcauca

SEQ ID NO: 2252366 - RNA, 19 nt, Homo sapiens
  misc_RNA (1)...(19): siRNA sense strand
aaauaagaagaccggaaaa

SEQ ID NO: 2252367 - RNA, 19 nt, Homo sapiens
  misc_RNA (1)...(19): siRNA sense strand
ugacugguuugauggaaaa

SEQ ID NO: 2252368 - RNA, 19 nt, Homo sapiens
  misc_RNA (1)...(19): siRNA sense strand
uggaggagaccgaggugga

SEQ ID NO: 2252369 - RNA, 19 nt, Homo sapiens
  misc_RNA (1)...(19): siRNA sense strand
ucauauagccagcaaccau

SEQ ID NO: 2252370 - RNA, 19 nt, Homo sapiens
  misc_RNA (1)...(19): siRNA sense strand
gggaagaagauaaggggaa

SEQ ID NO: 2252371 - RNA, 19 nt, Homo sapiens
  misc_RNA (1)...(19): siRNA sense strand
gcacuuagucggucggcua

SEQ ID NO: 2252372 - RNA, 19 nt, Homo sapiens
  misc_RNA (1)...(19): siRNA sense strand
gggagaucgaggugccaaa

SEQ ID NO: 2252373 - RNA, 19 nt, Homo sapiens
  misc_RNA (1)...(19): siRNA sense strand
gaucagaguccucgggcau

SEQ ID NO: 2252374 - RNA, 19 nt, Homo sapiens
  misc_RNA (1)...(19): siRNA sense strand
gugacaaguuacaguccaa

SEQ ID NO: 2252375 - RNA, 19 nt, Homo sapiens
  misc_RNA (1)...(19): siRNA sense strand
auagaaaugaggagagcuu

SEQ ID NO: 2252376 - RNA, 19 nt, Homo sapiens
  misc_RNA (1)...(19): siRNA sense strand
uggaauuggagaacagcaa

SEQ ID NO: 2252377 - RNA, 19 nt, Homo sapiens
  misc_RNA (1)...(19): siRNA sense strand
auagaaaugaggagggcuu

SEQ ID NO: 2252378 - RNA, 19 nt, Homo sapiens
  misc_RNA (1)...(19): siRNA sense strand
auagaaaugaggagggcuu

SEQ ID NO: 2252379 - RNA, 19 nt, Homo sapiens
  misc_RNA (1)...(19): siRNA sense strand
auagaaaugaggagggcuu

SEQ ID NO: 2252380 - RNA, 19 nt, Homo sapiens
  misc_RNA (1)...(19): siRNA sense strand
gggaagaaguucaaagagc

SEQ ID NO: 2252381 - RNA, 19 nt, Homo sapiens
  misc_RNA (1)...(19): siRNA sense strand
ggggagagggcaagagaga

SEQ ID NO: 2252382 - RNA, 19 nt, Homo sapiens
  misc_RNA (1)...(19): siRNA sense strand
aggaagaguauguagcaga

SEQ ID NO: 2252383 - RNA, 19 nt, Homo sapiens
  misc_RNA (1)...(19): siRNA sense strand
ggaagaaguucaaagagcu

SEQ ID NO: 2252384 - RNA, 19 nt, Homo sapiens
  misc_RNA (1)...(19): siRNA sense strand
agaccaacgaaguggagau

SEQ ID NO: 2252385 - RNA, 19 nt, Homo sapiens
  misc_RNA (1)...(19): siRNA sense strand
ccaaguagguucaucgagu

SEQ ID NO: 2252386 - RNA, 19 nt, Homo sapiens
  misc_RNA (1)...(19): siRNA sense strand
gcgcugaacuugauuggga

SEQ ID NO: 2252387 - RNA, 19 nt, Homo sapiens
  misc_RNA (1)...(19): siRNA sense strand
uggauagaaaugaggagau

SEQ ID NO: 2252388 - RNA, 19 nt, Homo sapiens
  misc_RNA (1)...(19): siRNA sense strand
uagacaaagcgcugaacuu

SEQ ID NO: 2252389 - RNA, 19 nt, Homo sapiens
  misc_RNA (1)...(19): siRNA sense strand
aguauguagcagagaaguu

SEQ ID NO: 2252390 - RNA, 19 nt, Homo sapiens
  misc_RNA (1)...(19): siRNA sense strand
uggaggucauuguggucaa

SEQ ID NO: 2252391 - RNA, 19 nt, Homo sapiens
  misc_RNA (1)...(19): siRNA sense strand
ccaccaaagaccuacguga

SEQ ID NO: 2252392 - RNA, 19 nt, Homo sapiens
  misc_RNA (1)...(19): siRNA sense strand
gcaucaccguggaggucau

SEQ ID NO: 2252393 - RNA, 19 nt, Homo sapiens
  misc_RNA (1)...(19): siRNA sense strand
cggauauaagagggugaaa

SEQ ID NO: 2252394 - RNA, 19 nt, Homo sapiens
  misc_RNA (1)...(19): siRNA sense strand
uggugaagccaaaucgauu

SEQ ID NO: 2252395 - RNA, 19 nt, Homo sapiens
  misc_RNA (1)...(19): siRNA sense strand
ggaagagagcuguguccca

SEQ ID NO: 2252396 - RNA, 19 nt, Homo sapiens
  misc_RNA (1)...(19): siRNA sense strand
gcaaacaucuggugccaag

SEQ ID NO: 2252397 - RNA, 19 nt, Homo sapiens
  misc_RNA (1)...(19): siRNA sense strand
cagugcaggaggaagagua

SEQ ID NO: 2252398 - RNA, 19 nt, Homo sapiens
  misc_RNA (1)...(19): siRNA sense strand
aaugaggagagcuuggaua

SEQ ID NO: 2252399 - RNA, 19 nt, Homo sapiens
  misc_RNA (1)...(19): siRNA sense strand
aaugaggagagcuuggaua

SEQ ID NO: 2252400 - RNA, 19 nt, Homo sapiens
  misc_RNA (1)...(19): siRNA sense strand
acaccacagacaugagauu

SEQ ID NO: 2252401 - RNA, 19 nt, Homo sapiens
  misc_RNA (1)...(19): siRNA sense strand
ucgagggagaacugggcaa

SEQ ID NO: 2252402 - RNA, 19 nt, Homo sapiens
  misc_RNA (1)...(19): siRNA sense strand
ccauggaugcggaagcaga

SEQ ID NO: 2252403 - RNA, 19 nt, Homo sapiens
  misc_RNA (1)...(19): siRNA sense strand
gggugaaaguagacgugcu

SEQ ID NO: 2252404 - RNA, 19 nt, Homo sapiens
  misc_RNA (1)...(19): siRNA sense strand
ccaagugaucucagaagca

SEQ ID NO: 2252405 - RNA, 19 nt, Homo sapiens
  misc_RNA (1)...(19): siRNA sense strand
ugggcaaugaggagagcuu

SEQ ID NO: 2252406 - RNA, 19 nt, Homo sapiens
  misc_RNA (1)...(19): siRNA sense strand
gggaagaagauaaggggaa

SEQ ID NO: 2252407 - RNA, 19 nt, Homo sapiens
  misc_RNA (1)...(19): siRNA sense strand
gaucagaguccucgggcau

SEQ ID NO: 2252408 - RNA, 19 nt, Homo sapiens
  misc_RNA (1)...(19): siRNA sense strand
auagaaaugaggagagcuu

SEQ ID NO: 2252409 - RNA, 19 nt, Homo sapiens
  misc_RNA (1)...(19): siRNA sense strand
uggaauuggagaacagcaa

SEQ ID NO: 2252410 - RNA, 19 nt, Homo sapiens
  misc_RNA (1)...(19): siRNA sense strand
auagaaaugaggagggcuu

SEQ ID NO: 2252411 - RNA, 19 nt, Homo sapiens
  misc_RNA (1)...(19): siRNA sense strand
auagaaaugaggagggcuu

SEQ ID NO: 2252412 - RNA, 19 nt, Homo sapiens
  misc_RNA (1)...(19): siRNA sense strand
auagaaaugaggagggcuu

SEQ ID NO: 2252413 - RNA, 19 nt, Homo sapiens
  misc_RNA (1)...(19): siRNA sense strand
ggggagagggcaagagaga

SEQ ID NO: 2252414 - RNA, 19 nt, Homo sapiens
  misc_RNA (1)...(19): siRNA sense strand
aggaagaguauguagcaga

SEQ ID NO: 2252415 - RNA, 19 nt, Homo sapiens
  misc_RNA (1)...(19): siRNA sense strand
ccaaguagguucaucgagu

SEQ ID NO: 2252416 - RNA, 19 nt, Homo sapiens
  misc_RNA (1)...(19): siRNA sense strand
uggauagaaaugaggagau

SEQ ID NO: 2252417 - RNA, 19 nt, Homo sapiens
  misc_RNA (1)...(19): siRNA sense strand
aguauguagcagagaaguu

SEQ ID NO: 2252418 - RNA, 19 nt, Homo sapiens
  misc_RNA (1)...(19): siRNA sense strand
ccaccaaagaccuacguga

SEQ ID NO: 2252419 - RNA, 19 nt, Homo sapiens
  misc_RNA (1)...(19): siRNA sense strand
uggugaagccaaaucgauu

SEQ ID NO: 2252420 - RNA, 19 nt, Homo sapiens
  misc_RNA (1)...(19): siRNA sense strand
ggaagagagcuguguccca

SEQ ID NO: 2252421 - RNA, 19 nt, Homo sapiens
  misc_RNA (1)...(19): siRNA sense strand
cagugcaggaggaagagua

SEQ ID NO: 2252422 - RNA, 19 nt, Homo sapiens
  misc_RNA (1)...(19): siRNA sense strand
aaugaggagagcuuggaua

SEQ ID NO: 2252423 - RNA, 19 nt, Homo sapiens
  misc_RNA (1)...(19): siRNA sense strand
aaugaggagagcuuggaua

SEQ ID NO: 2252424 - RNA, 19 nt, Homo sapiens
  misc_RNA (1)...(19): siRNA sense strand
acaccacagacaugagauu

SEQ ID NO: 2252425 - RNA, 19 nt, Homo sapiens
  misc_RNA (1)...(19): siRNA sense strand
ucgagggagaacugggcaa

SEQ ID NO: 2252426 - RNA, 19 nt, Homo sapiens
  misc_RNA (1)...(19): siRNA sense strand
ccauggaugcggaagcaga

SEQ ID NO: 2252427 - RNA, 19 nt, Homo sapiens
  misc_RNA (1)...(19): siRNA sense strand
ccaagugaucucagaagca

SEQ ID NO: 2252428 - RNA, 19 nt, Homo sapiens
  misc_RNA (1)...(19): siRNA sense strand
ugggcaaugaggagagcuu

SEQ ID NO: 2252429 - RNA, 19 nt, Homo sapiens
  misc_RNA (1)...(19): siRNA sense strand
gaacaaauacugaugguga

SEQ ID NO: 2252430 - RNA, 19 nt, Homo sapiens
  misc_RNA (1)...(19): siRNA sense strand
cguaaaggcaaacaggaua

SEQ ID NO: 2252431 - RNA, 19 nt, Homo sapiens
  misc_RNA (1)...(19): siRNA sense strand
ccaacaaagggaagaguga

SEQ ID NO: 2252432 - RNA, 19 nt, Homo sapiens
  misc_RNA (1)...(19): siRNA sense strand
aacaaagggaagagugaaa

SEQ ID NO: 2252433 - RNA, 19 nt, Homo sapiens
  misc_RNA (1)...(19): siRNA sense strand
acaauagccauaugggaaa

SEQ ID NO: 2252434 - RNA, 19 nt, Homo sapiens
  misc_RNA (1)...(19): siRNA sense strand
agaugaaaguacucaggaa

SEQ ID NO: 2252435 - RNA, 19 nt, Homo sapiens
  misc_RNA (1)...(19): siRNA sense strand
ccucaaggagcaaggauau

SEQ ID NO: 2252436 - RNA, 19 nt, Homo sapiens
  misc_RNA (1)...(19): siRNA sense strand
agacccaccaggagagaaa

SEQ ID NO: 2252437 - RNA, 19 nt, Homo sapiens
  misc_RNA (1)...(19): siRNA sense strand
cgauaaagaaagaaucaga

SEQ ID NO: 2252438 - RNA, 19 nt, Homo sapiens
  misc_RNA (1)...(19): siRNA sense strand
ccguaaaggcaaacaggau

SEQ ID NO: 2252439 - RNA, 19 nt, Homo sapiens
  misc_RNA (1)...(19): siRNA sense strand
cgugcuaacgauaaagaaa

SEQ ID NO: 2252440 - RNA, 19 nt, Homo sapiens
  misc_RNA (1)...(19): siRNA sense strand
augaagaggaucagaacuu

SEQ ID NO: 2252441 - RNA, 19 nt, Homo sapiens
  misc_RNA (1)...(19): siRNA sense strand
ccgauagguaugauugaua

SEQ ID NO: 2252442 - RNA, 19 nt, Homo sapiens
  misc_RNA (1)...(19): siRNA sense strand
gaacacaggaguugggcca

SEQ ID NO: 2252443 - RNA, 19 nt, Homo sapiens
  misc_RNA (1)...(19): siRNA sense strand
uugcaagcaugguggaaaa

SEQ ID NO: 2252444 - RNA, 19 nt, Homo sapiens
  misc_RNA (1)...(19): siRNA sense strand
gcaaagacccaccaggaga

SEQ ID NO: 2252445 - RNA, 19 nt, Homo sapiens
  misc_RNA (1)...(19): siRNA sense strand
ggcauaaugaagaggauca

SEQ ID NO: 2252446 - RNA, 19 nt, Homo sapiens
  misc_RNA (1)...(19): siRNA sense strand
gccucaaggagcaaggaua

SEQ ID NO: 2252447 - RNA, 19 nt, Homo sapiens
  misc_RNA (1)...(19): siRNA sense strand
ggccauaagaaugaagaaa

SEQ ID NO: 2252448 - RNA, 19 nt, Homo sapiens
  misc_RNA (1)...(19): siRNA sense strand
aaucaagcagcaagugaaa

SEQ ID NO: 2252449 - RNA, 19 nt, Homo sapiens
  misc_RNA (1)...(19): siRNA sense strand
gggaagcgugcuaacgaua

SEQ ID NO: 2252450 - RNA, 19 nt, Homo sapiens
  misc_RNA (1)...(19): siRNA sense strand
cuguauggguccuugcuua

SEQ ID NO: 2252451 - RNA, 19 nt, Homo sapiens
  misc_RNA (1)...(19): siRNA sense strand
gugcuaugguguugcauca

SEQ ID NO: 2252452 - RNA, 19 nt, Homo sapiens
  misc_RNA (1)...(19): siRNA sense strand
aacaaauacugauggugaa

SEQ ID NO: 2252453 - RNA, 19 nt, Homo sapiens
  misc_RNA (1)...(19): siRNA sense strand
agguacugccguugacaaa

SEQ ID NO: 2252454 - RNA, 19 nt, Homo sapiens
  misc_RNA (1)...(19): siRNA sense strand
aaacacaagacaaggacau

SEQ ID NO: 2252455 - RNA, 19 nt, Homo sapiens
  misc_RNA (1)...(19): siRNA sense strand
gccauaagaaugaagaaaa

SEQ ID NO: 2252456 - RNA, 19 nt, Homo sapiens
  misc_RNA (1)...(19): siRNA sense strand
aacaaaugcaguugaagaa

SEQ ID NO: 2252457 - RNA, 19 nt, Homo sapiens
  misc_RNA (1)...(19): siRNA sense strand
agucgauugcuaagacaaa

SEQ ID NO: 2252458 - RNA, 19 nt, Homo sapiens
  misc_RNA (1)...(19): siRNA sense strand
ccagaaggauguuggcagu

SEQ ID NO: 2252459 - RNA, 19 nt, Homo sapiens
  misc_RNA (1)...(19): siRNA sense strand
acucaauggaccuuacaaa

SEQ ID NO: 2252460 - RNA, 19 nt, Homo sapiens
  misc_RNA (1)...(19): siRNA sense strand
uugcauggucccuaagaaa

SEQ ID NO: 2252461 - RNA, 19 nt, Homo sapiens
  misc_RNA (1)...(19): siRNA sense strand
ggaaugcagcaaagcggaa

SEQ ID NO: 2252462 - RNA, 19 nt, Homo sapiens
  misc_RNA (1)...(19): siRNA sense strand
cagcaaagcggaagaggcu

SEQ ID NO: 2252463 - RNA, 19 nt, Homo sapiens
  misc_RNA (1)...(19): siRNA sense strand
gaucaagauaccucaaaga

SEQ ID NO: 2252464 - RNA, 19 nt, Homo sapiens
  misc_RNA (1)...(19): siRNA sense strand
ucaagauaccucaaagaau

SEQ ID NO: 2252465 - RNA, 19 nt, Homo sapiens
  misc_RNA (1)...(19): siRNA sense strand
cagacaggagucacagaaa

SEQ ID NO: 2252466 - RNA, 19 nt, Homo sapiens
  misc_RNA (1)...(19): siRNA sense strand
gcuuguagccaguuagcau

SEQ ID NO: 2252467 - RNA, 19 nt, Homo sapiens
  misc_RNA (1)...(19): siRNA sense strand
cucaaagaauucuaagcua

SEQ ID NO: 2252468 - RNA, 19 nt, Homo sapiens
  misc_RNA (1)...(19): siRNA sense strand
gcuacuuggccauaagaau

SEQ ID NO: 2252469 - RNA, 19 nt, Homo sapiens
  misc_RNA (1)...(19): siRNA sense strand
uuccaugcccagugagaaa

SEQ ID NO: 2252470 - RNA, 19 nt, Homo sapiens
  misc_RNA (1)...(19): siRNA sense strand
uacaauagccauaugggaa

SEQ ID NO: 2252471 - RNA, 19 nt, Homo sapiens
  misc_RNA (1)...(19): siRNA sense strand
caguguccguaaaggcaaa

SEQ ID NO: 2252472 - RNA, 19 nt, Homo sapiens
  misc_RNA (1)...(19): siRNA sense strand
ucaagcagcaagugaaaga

SEQ ID NO: 2252473 - RNA, 19 nt, Homo sapiens
  misc_RNA (1)...(19): siRNA sense strand
gaaguaacucuguggcuga

SEQ ID NO: 2252474 - RNA, 19 nt, Homo sapiens
  misc_RNA (1)...(19): siRNA sense strand
cuuuaaauggacugaugua

SEQ ID NO: 2252475 - RNA, 19 nt, Homo sapiens
  misc_RNA (1)...(19): siRNA sense strand
cagagagagcuuuaaguga

SEQ ID NO: 2252476 - RNA, 19 nt, Homo sapiens
  misc_RNA (1)...(19): siRNA sense strand
acaaauacugauggugaaa

SEQ ID NO: 2252477 - RNA, 19 nt, Homo sapiens
  misc_RNA (1)...(19): siRNA sense strand
acacagcgcaaauggagaa

SEQ ID NO: 2252478 - RNA, 19 nt, Homo sapiens
  misc_RNA (1)...(19): siRNA sense strand
agacuauaccuaagccaau

SEQ ID NO: 2252479 - RNA, 19 nt, Homo sapiens
  misc_RNA (1)...(19): siRNA sense strand
cuuaagagaugaaaguacu

SEQ ID NO: 2252480 - RNA, 19 nt, Homo sapiens
  misc_RNA (1)...(19): siRNA sense strand
cugcuaagucgauugcuaa

SEQ ID NO: 2252481 - RNA, 19 nt, Homo sapiens
  misc_RNA (1)...(19): siRNA sense strand
agagagagcaaaagcuuua

SEQ ID NO: 2252482 - RNA, 19 nt, Homo sapiens
  misc_RNA (1)...(19): siRNA sense strand
gagagaaaccagcccaaaa

SEQ ID NO: 2252483 - RNA, 19 nt, Homo sapiens
  misc_RNA (1)...(19): siRNA sense strand
cagaaauaaugaaauggca

SEQ ID NO: 2252484 - RNA, 19 nt, Homo sapiens
  misc_RNA (1)...(19): siRNA sense strand
ucuccaagauugaccaaaa

SEQ ID NO: 2252485 - RNA, 19 nt, Homo sapiens
  misc_RNA (1)...(19): siRNA sense strand
ggaagaaggugaauggaga

SEQ ID NO: 2252486 - RNA, 19 nt, Homo sapiens
  misc_RNA (1)...(19): siRNA sense strand
caagugaagacgaggccaa

SEQ ID NO: 2252487 - RNA, 19 nt, Homo sapiens
  misc_RNA (1)...(19): siRNA sense strand
cuacaaggcuuacaggaga

SEQ ID NO: 2252488 - RNA, 19 nt, Homo sapiens
  misc_RNA (1)...(19): siRNA sense strand
gaaagaucaaaguggaaaa

SEQ ID NO: 2252489 - RNA, 19 nt, Homo sapiens
  misc_RNA (1)...(19): siRNA sense strand
uggccaugacagagaggua

SEQ ID NO: 2252490 - RNA, 19 nt, Homo sapiens
  misc_RNA (1)...(19): siRNA sense strand
cuggaaugggaaagaucaa

SEQ ID NO: 2252491 - RNA, 19 nt, Homo sapiens
  misc_RNA (1)...(19): siRNA sense strand
ggauccaacuacaaggcuu

SEQ ID NO: 2252492 - RNA, 19 nt, Homo sapiens
  misc_RNA (1)...(19): siRNA sense strand
aggugaauggagagauuga

SEQ ID NO: 2252493 - RNA, 19 nt, Homo sapiens
  misc_RNA (1)...(19): siRNA sense strand
ugggaaagaucaaagugga

SEQ ID NO: 2252494 - RNA, 19 nt, Homo sapiens
  misc_RNA (1)...(19): siRNA sense strand
aggccaaggcugaaaccau

SEQ ID NO: 2252495 - RNA, 19 nt, Homo sapiens
  misc_RNA (1)...(19): siRNA sense strand
acuaacagccucagcacau

SEQ ID NO: 2252496 - RNA, 19 nt, Homo sapiens
  misc_RNA (1)...(19): siRNA sense strand
aagacgaggccaaggcuga

SEQ ID NO: 2252497 - RNA, 19 nt, Homo sapiens
  misc_RNA (1)...(19): siRNA sense strand
agaucaaaguggaaaacca

SEQ ID NO: 2252498 - RNA, 19 nt, Homo sapiens
  misc_RNA (1)...(19): siRNA sense strand
agcaaggauggcagagauu

SEQ ID NO: 2252499 - RNA, 19 nt, Homo sapiens
  misc_RNA (1)...(19): siRNA sense strand
ggaagaaggugaauggaga

SEQ ID NO: 2252500 - RNA, 19 nt, Homo sapiens
  misc_RNA (1)...(19): siRNA sense strand
cuacaaggcuuacaggaga

SEQ ID NO: 2252501 - RNA, 19 nt, Homo sapiens
  misc_RNA (1)...(19): siRNA sense strand
gaaagaucaaaguggaaaa

SEQ ID NO: 2252502 - RNA, 19 nt, Homo sapiens
  misc_RNA (1)...(19): siRNA sense strand
uggccaugacagagaggua

SEQ ID NO: 2252503 - RNA, 19 nt, Homo sapiens
  misc_RNA (1)...(19): siRNA sense strand
cuggaaugggaaagaucaa

SEQ ID NO: 2252504 - RNA, 19 nt, Homo sapiens
  misc_RNA (1)...(19): siRNA sense strand
ggauccaacuacaaggcuu

SEQ ID NO: 2252505 - RNA, 19 nt, Homo sapiens
  misc_RNA (1)...(19): siRNA sense strand
aggugaauggagagauuga

SEQ ID NO: 2252506 - RNA, 19 nt, Homo sapiens
  misc_RNA (1)...(19): siRNA sense strand
ugggaaagaucaaagugga

SEQ ID NO: 2252507 - RNA, 19 nt, Homo sapiens
  misc_RNA (1)...(19): siRNA sense strand
agaucaaaguggaaaacca

SEQ ID NO: 2252508 - RNA, 19 nt, Homo sapiens
  misc_RNA (1)...(19): siRNA sense strand
agcaaggauggcagagauu

SEQ ID NO: 2252509 - RNA, 19 nt, Homo sapiens
  misc_RNA (1)...(19): siRNA sense strand
ggaagaaggugaauggaga

SEQ ID NO: 2252510 - RNA, 19 nt, Homo sapiens
  misc_RNA (1)...(19): siRNA sense strand
cuacaaggcuuacaggaga

SEQ ID NO: 2252511 - RNA, 19 nt, Homo sapiens
  misc_RNA (1)...(19): siRNA sense strand
gaaagaucaaaguggaaaa

SEQ ID NO: 2252512 - RNA, 19 nt, Homo sapiens
  misc_RNA (1)...(19): siRNA sense strand
uggccaugacagagaggua

SEQ ID NO: 2252513 - RNA, 19 nt, Homo sapiens
  misc_RNA (1)...(19): siRNA sense strand
cuggaaugggaaagaucaa

SEQ ID NO: 2252514 - RNA, 19 nt, Homo sapiens
  misc_RNA (1)...(19): siRNA sense strand
ggauccaacuacaaggcuu

SEQ ID NO: 2252515 - RNA, 19 nt, Homo sapiens
  misc_RNA (1)...(19): siRNA sense strand
aggugaauggagagauuga

SEQ ID NO: 2252516 - RNA, 19 nt, Homo sapiens
  misc_RNA (1)...(19): siRNA sense strand
ugggaaagaucaaagugga

SEQ ID NO: 2252517 - RNA, 19 nt, Homo sapiens
  misc_RNA (1)...(19): siRNA sense strand
agaucaaaguggaaaacca

SEQ ID NO: 2252518 - RNA, 19 nt, Homo sapiens
  misc_RNA (1)...(19): siRNA sense strand
agcaaggauggcagagauu

SEQ ID NO: 2252519 - RNA, 19 nt, Homo sapiens
  misc_RNA (1)...(19): siRNA sense strand
ugaagaagccgcaccgcua

SEQ ID NO: 2252520 - RNA, 19 nt, Homo sapiens
  misc_RNA (1)...(19): siRNA sense strand
ccaucaugccuaaggacau

SEQ ID NO: 2252521 - RNA, 19 nt, Homo sapiens
  misc_RNA (1)...(19): siRNA sense strand
agacacaggaggagaggaa

SEQ ID NO: 2252522 - RNA, 19 nt, Homo sapiens
  misc_RNA (1)...(19): siRNA sense strand
uggacaagacugagagcaa

SEQ ID NO: 2252523 - RNA, 19 nt, Homo sapiens
  misc_RNA (1)...(19): siRNA sense strand
cuguauggaaugagggauu

SEQ ID NO: 2252524 - RNA, 19 nt, Homo sapiens
  misc_RNA (1)...(19): siRNA sense strand
acaucaagccuguggucaa

SEQ ID NO: 2252525 - RNA, 19 nt, Homo sapiens
  misc_RNA (1)...(19): siRNA sense strand
aggaggacauugaaagcaa

SEQ ID NO: 2252526 - RNA, 19 nt, Homo sapiens
  misc_RNA (1)...(19): siRNA sense strand
cuacauuguccgagcauuu

SEQ ID NO: 2252527 - RNA, 19 nt, Homo sapiens
  misc_RNA (1)...(19): siRNA sense strand
acacaggaggagaggaaga

SEQ ID NO: 2252528 - RNA, 19 nt, Homo sapiens
  misc_RNA (1)...(19): siRNA sense strand
cugaagacaaggaggacau

SEQ ID NO: 2252529 - RNA, 19 nt, Homo sapiens
  misc_RNA (1)...(19): siRNA sense strand
gaggagaaauagaagagga

SEQ ID NO: 2252530 - RNA, 19 nt, Homo sapiens
  misc_RNA (1)...(19): siRNA sense strand
cugaaauauccgauggaga

SEQ ID NO: 2252531 - RNA, 19 nt, Homo sapiens
  misc_RNA (1)...(19): siRNA sense strand
acacagaggaccagggacu

SEQ ID NO: 2252532 - RNA, 19 nt, Homo sapiens
  misc_RNA (1)...(19): siRNA sense strand
ucuuuggcuucgagaguaa

SEQ ID NO: 2252533 - RNA, 19 nt, Homo sapiens
  misc_RNA (1)...(19): siRNA sense strand
acggagagccagaagguuu

SEQ ID NO: 2252534 - RNA, 19 nt, Homo sapiens
  misc_RNA (1)...(19): siRNA sense strand
aggaagacacagaggacca

SEQ ID NO: 2252535 - RNA, 19 nt, Homo sapiens
  misc_RNA (1)...(19): siRNA sense strand
uggcaagaauugugggaag

SEQ ID NO: 2252536 - RNA, 19 nt, Homo sapiens
  misc_RNA (1)...(19): siRNA sense strand
cagugagugaccaggauaa

SEQ ID NO: 2252537 - RNA, 19 nt, Homo sapiens
  misc_RNA (1)...(19): siRNA sense strand
cggccaacccucaguggaa

SEQ ID NO: 2252538 - RNA, 19 nt, Homo sapiens
  misc_RNA (1)...(19): siRNA sense strand
uggagaauguggaggccuu

SEQ ID NO: 2252539 - RNA, 19 nt, Homo sapiens
  misc_RNA (1)...(19): siRNA sense strand
agauuguagcagagaguga

SEQ ID NO: 2252540 - RNA, 19 nt, Homo sapiens
  misc_RNA (1)...(19): siRNA sense strand
ggugaagaagagaaccaaa

SEQ ID NO: 2252541 - RNA, 19 nt, Homo sapiens
  misc_RNA (1)...(19): siRNA sense strand
ggggagaagaugagcgaca

SEQ ID NO: 2252542 - RNA, 19 nt, Homo sapiens
  misc_RNA (1)...(19): siRNA sense strand
uugaagaacacaagcaaaa

SEQ ID NO: 2252543 - RNA, 19 nt, Homo sapiens
  misc_RNA (1)...(19): siRNA sense strand
uggaaaugaccuuggagau

SEQ ID NO: 2252544 - RNA, 19 nt, Homo sapiens
  misc_RNA (1)...(19): siRNA sense strand
gaggagaggaagacacaga

SEQ ID NO: 2252545 - RNA, 19 nt, Homo sapiens
  misc_RNA (1)...(19): siRNA sense strand
cgugauggacaacgugaaa

SEQ ID NO: 2252546 - RNA, 19 nt, Homo sapiens
  misc_RNA (1)...(19): siRNA sense strand
gagcucauccagagagaga

SEQ ID NO: 2252547 - RNA, 19 nt, Homo sapiens
  misc_RNA (1)...(19): siRNA sense strand
ggagauuguagcagagagu

SEQ ID NO: 2252548 - RNA, 19 nt, Homo sapiens
  misc_RNA (1)...(19): siRNA sense strand
aagaagagaaccaaaguca

SEQ ID NO: 2252549 - RNA, 19 nt, Homo sapiens
  misc_RNA (1)...(19): siRNA sense strand
ggauguaguggcagacaca

SEQ ID NO: 2252550 - RNA, 19 nt, Homo sapiens
  misc_RNA (1)...(19): siRNA sense strand
gagaguaacaagaagaacu

SEQ ID NO: 2252551 - RNA, 19 nt, Homo sapiens
  misc_RNA (1)...(19): siRNA sense strand
ggagaagaugagcgacauu

SEQ ID NO: 2252552 - RNA, 19 nt, Homo sapiens
  misc_RNA (1)...(19): siRNA sense strand
guguagcagaagaggguga

SEQ ID NO: 2252553 - RNA, 19 nt, Homo sapiens
  misc_RNA (1)...(19): siRNA sense strand
gcgugaacccuguauggaa

SEQ ID NO: 2252554 - RNA, 19 nt, Homo sapiens
  misc_RNA (1)...(19): siRNA sense strand
cgugaacccuguauggaau

SEQ ID NO: 2252555 - RNA, 19 nt, Homo sapiens
  misc_RNA (1)...(19): siRNA sense strand
agaagaugagcgacauuua

SEQ ID NO: 2252556 - RNA, 19 nt, Homo sapiens
  misc_RNA (1)...(19): siRNA sense strand
gccauagaaucgagacuca

SEQ ID NO: 2252557 - RNA, 19 nt, Homo sapiens
  misc_RNA (1)...(19): siRNA sense strand
uggaugagaaggaguucaa

SEQ ID NO: 2252558 - RNA, 19 nt, Homo sapiens
  misc_RNA (1)...(19): siRNA sense strand
ugaaacagaucuuuggcuu

SEQ ID NO: 2252559 - RNA, 19 nt, Homo sapiens
  misc_RNA (1)...(19): siRNA sense strand
ccaaggaccccaauggaaa

SEQ ID NO: 2252560 - RNA, 19 nt, Homo sapiens
  misc_RNA (1)...(19): siRNA sense strand
ccagagaguucacaggcuu

SEQ ID NO: 2252561 - RNA, 19 nt, Homo sapiens
  misc_RNA (1)...(19): siRNA sense strand
gugaacagaagguggagga

SEQ ID NO: 2252562 - RNA, 19 nt, Homo sapiens
  misc_RNA (1)...(19): siRNA sense strand
gaaucgagacucagaacca

SEQ ID NO: 2252563 - RNA, 19 nt, Homo sapiens
  misc_RNA (1)...(19): siRNA sense strand
gaagagggugagaagaaaa

SEQ ID NO: 2252564 - RNA, 19 nt, Homo sapiens
  misc_RNA (1)...(19): siRNA sense strand
ccuuggagauuguagcaga

SEQ ID NO: 2252565 - RNA, 19 nt, Homo sapiens
  misc_RNA (1)...(19): siRNA sense strand
gaaccagcugcuugggauu

SEQ ID NO: 2252566 - RNA, 19 nt, Homo sapiens
  misc_RNA (1)...(19): siRNA sense strand
ucuggaugcugcagggaga

SEQ ID NO: 2252567 - RNA, 19 nt, Homo sapiens
  misc_RNA (1)...(19): siRNA sense strand
ugauggacaacgugaaaca

SEQ ID NO: 2252568 - RNA, 19 nt, Homo sapiens
  misc_RNA (1)...(19): siRNA sense strand
ggaagagguguuugagaac

SEQ ID NO: 2252569 - RNA, 19 nt, Homo sapiens
  misc_RNA (1)...(19): siRNA sense strand
gcggcgugauggaugacaa

SEQ ID NO: 2252570 - RNA, 19 nt, Homo sapiens
  misc_RNA (1)...(19): siRNA sense strand
ugauggaugacaagaguga

SEQ ID NO: 2252571 - RNA, 19 nt, Homo sapiens
  misc_RNA (1)...(19): siRNA sense strand
agacgcaggaggagacaga

SEQ ID NO: 2252572 - RNA, 19 nt, Homo sapiens
  misc_RNA (1)...(19): siRNA sense strand
aagagguguuugagaacca

SEQ ID NO: 2252573 - RNA, 19 nt, Homo sapiens
  misc_RNA (1)...(19): siRNA sense strand
gcuggaagugggaagauga

SEQ ID NO: 2252574 - RNA, 19 nt, Homo sapiens
  misc_RNA (1)...(19): siRNA sense strand
gacaagacugagagcaaaa

SEQ ID NO: 2252575 - RNA, 19 nt, Homo sapiens
  misc_RNA (1)...(19): siRNA sense strand
gagcaaaaucccagcacga

SEQ ID NO: 2252576 - RNA, 19 nt, Homo sapiens
  misc_RNA (1)...(19): siRNA sense strand
cagccaagacagccaagaa

SEQ ID NO: 2252577 - RNA, 19 nt, Homo sapiens
  misc_RNA (1)...(19): siRNA sense strand
cagaacagccugccggaca

SEQ ID NO: 2252578 - RNA, 19 nt, Homo sapiens
  misc_RNA (1)...(19): siRNA sense strand
ugggaggacaucagccaua

SEQ ID NO: 2252579 - RNA, 19 nt, Homo sapiens
  misc_RNA (1)...(19): siRNA sense strand
ccgccauggacguggucua

SEQ ID NO: 2252580 - RNA, 19 nt, Homo sapiens
  misc_RNA (1)...(19): siRNA sense strand
gcaaaggagguaagggccu

SEQ ID NO: 2252581 - RNA, 19 nt, Homo sapiens
  misc_RNA (1)...(19): siRNA sense strand
agguaagggccuggggaaa

SEQ ID NO: 2252582 - RNA, 19 nt, Homo sapiens
  misc_RNA (1)...(19): siRNA sense strand
gagguaagggccuggggaa

SEQ ID NO: 2252583 - RNA, 19 nt, Homo sapiens
  misc_RNA (1)...(19): siRNA sense strand
gaguuuagcuguaaggaca

SEQ ID NO: 2252584 - RNA, 19 nt, Homo sapiens
  misc_RNA (1)...(19): siRNA sense strand
ggacauaucuucagggccu

SEQ ID NO: 2252585 - RNA, 19 nt, Homo sapiens
  misc_RNA (1)...(19): siRNA sense strand
gguuccuggugaagagcua

SEQ ID NO: 2252586 - RNA, 19 nt, Homo sapiens
  misc_RNA (1)...(19): siRNA sense strand
ccuuaaauauacacagagu

SEQ ID NO: 2252587 - RNA, 19 nt, Homo sapiens
  misc_RNA (1)...(19): siRNA sense strand
gugagaacacagugcucua

SEQ ID NO: 2252588 - RNA, 19 nt, Homo sapiens
  misc_RNA (1)...(19): siRNA sense strand
gugaagagcuaccugcaga

SEQ ID NO: 2252589 - RNA, 19 nt, Homo sapiens
  misc_RNA (1)...(19): siRNA sense strand
agaaaaugaaccagcgauu

SEQ ID NO: 2252590 - RNA, 19 nt, Homo sapiens
  misc_RNA (1)...(19): siRNA sense strand
agacacaacagcagaaacu

SEQ ID NO: 2252591 - RNA, 19 nt, Homo sapiens
  misc_RNA (1)...(19): siRNA sense strand
cugcagaaggccuguguca

SEQ ID NO: 2252592 - RNA, 19 nt, Homo sapiens
  misc_RNA (1)...(19): siRNA sense strand
aggaaaguugagagcauca

SEQ ID NO: 2252593 - RNA, 19 nt, Homo sapiens
  misc_RNA (1)...(19): siRNA sense strand
ccaagauggacuuugauca

SEQ ID NO: 2252594 - RNA, 19 nt, Homo sapiens
  misc_RNA (1)...(19): siRNA sense strand
gcucuggagaaacuagaaa

SEQ ID NO: 2252595 - RNA, 19 nt, Homo sapiens
  misc_RNA (1)...(19): siRNA sense strand
ggaauauauaagaccacuu

SEQ ID NO: 2252596 - RNA, 19 nt, Homo sapiens
  misc_RNA (1)...(19): siRNA sense strand
guguuuaaauucagcccuu

SEQ ID NO: 2252597 - RNA, 19 nt, Homo sapiens
  misc_RNA (1)...(19): siRNA sense strand
cgucaaacucgguacagca

SEQ ID NO: 2252598 - RNA, 19 nt, Homo sapiens
  misc_RNA (1)...(19): siRNA sense strand
cagucagccucuuggaguu

SEQ ID NO: 2252599 - RNA, 19 nt, Homo sapiens
  misc_RNA (1)...(19): siRNA sense strand
ggagaaacuagaaaaugaa

SEQ ID NO: 2252600 - RNA, 19 nt, Homo sapiens
  misc_RNA (1)...(19): siRNA sense strand
cagaggagcagauugccaa

SEQ ID NO: 2252601 - RNA, 19 nt, Homo sapiens
  misc_RNA (1)...(19): siRNA sense strand
agaguugggacaugggaca

SEQ ID NO: 2252602 - RNA, 19 nt, Homo sapiens
  misc_RNA (1)...(19): siRNA sense strand
uugcacaggucuugccaga

SEQ ID NO: 2252603 - RNA, 19 nt, Homo sapiens
  misc_RNA (1)...(19): siRNA sense strand
gcacgggcaugaaggccau

SEQ ID NO: 2252604 - RNA, 19 nt, Homo sapiens
  misc_RNA (1)...(19): siRNA sense strand
aggaaauaccagugcuuga

SEQ ID NO: 2252605 - RNA, 19 nt, Homo sapiens
  misc_RNA (1)...(19): siRNA sense strand
cauacgaaggugacaacaa

SEQ ID NO: 2252606 - RNA, 19 nt, Homo sapiens
  misc_RNA (1)...(19): siRNA sense strand
ccagcaaggaauucaggaa

SEQ ID NO: 2252607 - RNA, 19 nt, Homo sapiens
  misc_RNA (1)...(19): siRNA sense strand
gaggauacuucuccgguga

SEQ ID NO: 2252608 - RNA, 19 nt, Homo sapiens
  misc_RNA (1)...(19): siRNA sense strand
cgggagaaguguuggagag

SEQ ID NO: 2252609 - RNA, 19 nt, Homo sapiens
  misc_RNA (1)...(19): siRNA sense strand
ucacggaaggggagggcaa

SEQ ID NO: 2252610 - RNA, 19 nt, Homo sapiens
  misc_RNA (1)...(19): siRNA sense strand
aggcagagcuuggacguga

SEQ ID NO: 2252611 - RNA, 19 nt, Homo sapiens
  misc_RNA (1)...(19): siRNA sense strand
cgaauuaagccacggcagu

SEQ ID NO: 2252612 - RNA, 19 nt, Homo sapiens
  misc_RNA (1)...(19): siRNA sense strand
gcaguaauaccaaggccau

SEQ ID NO: 2252613 - RNA, 19 nt, Homo sapiens
  misc_RNA (1)...(19): siRNA sense strand
ccaugaaccgguugggugu

SEQ ID NO: 2252614 - RNA, 19 nt, Homo sapiens
  misc_RNA (1)...(19): siRNA sense strand
gguuggcgacauaggaaaa

SEQ ID NO: 2252615 - RNA, 19 nt, Homo sapiens
  misc_RNA (1)...(19): siRNA sense strand
gugucgaagcaauguucaa

SEQ ID NO: 2252616 - RNA, 19 nt, Homo sapiens
  misc_RNA (1)...(19): siRNA sense strand
gagaaguguuggagagcgc

SEQ ID NO: 2252617 - RNA, 19 nt, Homo sapiens
  misc_RNA (1)...(19): siRNA sense strand
cuuaaaugaagaugaggaa

SEQ ID NO: 2252618 - RNA, 19 nt, Homo sapiens
  misc_RNA (1)...(19): siRNA sense strand
aggagaagaucaucggcaa

SEQ ID NO: 2252619 - RNA, 19 nt, Homo sapiens
  misc_RNA (1)...(19): siRNA sense strand
aggagaacccugagagcau

SEQ ID NO: 2252620 - RNA, 19 nt, Homo sapiens
  misc_RNA (1)...(19): siRNA sense strand
gcauggaggaggaagguga

SEQ ID NO: 2252621 - RNA, 19 nt, Homo sapiens
  misc_RNA (1)...(19): siRNA sense strand
cggagaagaaccagaaaau

SEQ ID NO: 2252622 - RNA, 19 nt, Homo sapiens
  misc_RNA (1)...(19): siRNA sense strand
aggagagcgugcaggucaa

SEQ ID NO: 2252623 - RNA, 19 nt, Homo sapiens
  misc_RNA (1)...(19): siRNA sense strand
gcaaaguggagaaggugga

SEQ ID NO: 2252624 - RNA, 19 nt, Homo sapiens
  misc_RNA (1)...(19): siRNA sense strand
ggugagacuucgacggcca

SEQ ID NO: 2252625 - RNA, 19 nt, Homo sapiens
  misc_RNA (1)...(19): siRNA sense strand
gggagaugcaggagagcgu

SEQ ID NO: 2252626 - RNA, 19 nt, Homo sapiens
  misc_RNA (1)...(19): siRNA sense strand
ccuuaaaugaagaugagga

SEQ ID NO: 2252627 - RNA, 19 nt, Homo sapiens
  misc_RNA (1)...(19): siRNA sense strand
augaagaugaggaauggaa

SEQ ID NO: 2252628 - RNA, 19 nt, Homo sapiens
  misc_RNA (1)...(19): siRNA sense strand
uggcauuaaaggugagacu

SEQ ID NO: 2252629 - RNA, 19 nt, Homo sapiens
  misc_RNA (1)...(19): siRNA sense strand
aagcagcaccgcagggaga

SEQ ID NO: 2252630 - RNA, 19 nt, Homo sapiens
  misc_RNA (1)...(19): siRNA sense strand
gcggagaagaaccagaaaa

SEQ ID NO: 2252631 - RNA, 19 nt, Homo sapiens
  misc_RNA (1)...(19): siRNA sense strand
gaauauacgaggacaggcu

SEQ ID NO: 2252632 - RNA, 19 nt, Homo sapiens
  misc_RNA (1)...(19): siRNA sense strand
cgaacgaggagaagaggcu

SEQ ID NO: 2252633 - RNA, 19 nt, Homo sapiens
  misc_RNA (1)...(19): siRNA sense strand
aggccacuauggaggaaaa

SEQ ID NO: 2252634 - RNA, 19 nt, Homo sapiens
  misc_RNA (1)...(19): siRNA sense strand
caugagaacuccagacccu

SEQ ID NO: 2252635 - RNA, 19 nt, Homo sapiens
  misc_RNA (1)...(19): siRNA sense strand
gggugguguuugaggaggu

SEQ ID NO: 2252636 - RNA, 19 nt, Homo sapiens
  misc_RNA (1)...(19): siRNA sense strand
acagcaucguuguggcgua

SEQ ID NO: 2252637 - RNA, 19 nt, Homo sapiens
  misc_RNA (1)...(19): siRNA sense strand
caggagagcgugcagguca

SEQ ID NO: 2252638 - RNA, 19 nt, Homo sapiens
  misc_RNA (1)...(19): siRNA sense strand
ccgaggagaagcuggagga

SEQ ID NO: 2252639 - RNA, 19 nt, Homo sapiens
  misc_RNA (1)...(19): siRNA sense strand
cuuaaaugaagaugaggaa

SEQ ID NO: 2252640 - RNA, 19 nt, Homo sapiens
  misc_RNA (1)...(19): siRNA sense strand
aggagaagaucaucggcaa

SEQ ID NO: 2252641 - RNA, 19 nt, Homo sapiens
  misc_RNA (1)...(19): siRNA sense strand
aggagaacccugagagcau

SEQ ID NO: 2252642 - RNA, 19 nt, Homo sapiens
  misc_RNA (1)...(19): siRNA sense strand
gcauggaggaggaagguga

SEQ ID NO: 2252643 - RNA, 19 nt, Homo sapiens
  misc_RNA (1)...(19): siRNA sense strand
cggagaagaaccagaaaau

SEQ ID NO: 2252644 - RNA, 19 nt, Homo sapiens
  misc_RNA (1)...(19): siRNA sense strand
aggagagcgugcaggucaa

SEQ ID NO: 2252645 - RNA, 19 nt, Homo sapiens
  misc_RNA (1)...(19): siRNA sense strand
gcaaaguggagaaggugga

SEQ ID NO: 2252646 - RNA, 19 nt, Homo sapiens
  misc_RNA (1)...(19): siRNA sense strand
ggugagacuucgacggcca

SEQ ID NO: 2252647 - RNA, 19 nt, Homo sapiens
  misc_RNA (1)...(19): siRNA sense strand
gggagaugcaggagagcgu

SEQ ID NO: 2252648 - RNA, 19 nt, Homo sapiens
  misc_RNA (1)...(19): siRNA sense strand
ccuuaaaugaagaugagga

SEQ ID NO: 2252649 - RNA, 19 nt, Homo sapiens
  misc_RNA (1)...(19): siRNA sense strand
augaagaugaggaauggaa

SEQ ID NO: 2252650 - RNA, 19 nt, Homo sapiens
  misc_RNA (1)...(19): siRNA sense strand
uggcauuaaaggugagacu

SEQ ID NO: 2252651 - RNA, 19 nt, Homo sapiens
  misc_RNA (1)...(19): siRNA sense strand
aagcagcaccgcagggaga

SEQ ID NO: 2252652 - RNA, 19 nt, Homo sapiens
  misc_RNA (1)...(19): siRNA sense strand
gcggagaagaaccagaaaa

SEQ ID NO: 2252653 - RNA, 19 nt, Homo sapiens
  misc_RNA (1)...(19): siRNA sense strand
gaauauacgaggacaggcu

SEQ ID NO: 2252654 - RNA, 19 nt, Homo sapiens
  misc_RNA (1)...(19): siRNA sense strand
cgaacgaggagaagaggcu

SEQ ID NO: 2252655 - RNA, 19 nt, Homo sapiens
  misc_RNA (1)...(19): siRNA sense strand
aggccacuauggaggaaaa

SEQ ID NO: 2252656 - RNA, 19 nt, Homo sapiens
  misc_RNA (1)...(19): siRNA sense strand
caugagaacuccagacccu

SEQ ID NO: 2252657 - RNA, 19 nt, Homo sapiens
  misc_RNA (1)...(19): siRNA sense strand
gggugguguuugaggaggu

SEQ ID NO: 2252658 - RNA, 19 nt, Homo sapiens
  misc_RNA (1)...(19): siRNA sense strand
acagcaucguuguggcgua

SEQ ID NO: 2252659 - RNA, 19 nt, Homo sapiens
  misc_RNA (1)...(19): siRNA sense strand
caggagagcgugcagguca

SEQ ID NO: 2252660 - RNA, 19 nt, Homo sapiens
  misc_RNA (1)...(19): siRNA sense strand
ccgaggagaagcuggagga

SEQ ID NO: 2252661 - RNA, 19 nt, Homo sapiens
  misc_RNA (1)...(19): siRNA sense strand
ccacauaaucacaggaaac

SEQ ID NO: 2252662 - RNA, 19 nt, Homo sapiens
  misc_RNA (1)...(19): siRNA sense strand
gcaaagaaguuccagcaca

SEQ ID NO: 2252663 - RNA, 19 nt, Homo sapiens
  misc_RNA (1)...(19): siRNA sense strand
cugcuaugcaacagauaaa

SEQ ID NO: 2252664 - RNA, 19 nt, Homo sapiens
  misc_RNA (1)...(19): siRNA sense strand
aggacaauacucagggaau

SEQ ID NO: 2252665 - RNA, 19 nt, Homo sapiens
  misc_RNA (1)...(19): siRNA sense strand
uaguaauagcugugagcau

SEQ ID NO: 2252666 - RNA, 19 nt, Homo sapiens
  misc_RNA (1)...(19): siRNA sense strand
guuuaagauugaggacaaa

SEQ ID NO: 2252667 - RNA, 19 nt, Homo sapiens
  misc_RNA (1)...(19): siRNA sense strand
aaguaggaccugaagagaa

SEQ ID NO: 2252668 - RNA, 19 nt, Homo sapiens
  misc_RNA (1)...(19): siRNA sense strand
aagauaaugucaugggagu

SEQ ID NO: 2252669 - RNA, 19 nt, Homo sapiens
  misc_RNA (1)...(19): siRNA sense strand
ggagggaucuguaggccuu

SEQ ID NO: 2252670 - RNA, 19 nt, Homo sapiens
  misc_RNA (1)...(19): siRNA sense strand
aagaauugcagcugaacuu

SEQ ID NO: 2252671 - RNA, 19 nt, Homo sapiens
  misc_RNA (1)...(19): siRNA sense strand
caauuuagaaggcuggaau

SEQ ID NO: 2252672 - RNA, 19 nt, Homo sapiens
  misc_RNA (1)...(19): siRNA sense strand
cggaaaggagggaucugua

SEQ ID NO: 2252673 - RNA, 19 nt, Homo sapiens
  misc_RNA (1)...(19): siRNA sense strand
agaucuaaauccagcuuca

SEQ ID NO: 2252674 - RNA, 19 nt, Homo sapiens
  misc_RNA (1)...(19): siRNA sense strand
cagaagaagcuuuguugca

SEQ ID NO: 2252675 - RNA, 19 nt, Homo sapiens
  misc_RNA (1)...(19): siRNA sense strand
caagaauaacagcagaaga

SEQ ID NO: 2252676 - RNA, 19 nt, Homo sapiens
  misc_RNA (1)...(19): siRNA sense strand
cuauaagaauugcagcuga

SEQ ID NO: 2252677 - RNA, 19 nt, Homo sapiens
  misc_RNA (1)...(19): siRNA sense strand
uucaagaaguacgggaaua

SEQ ID NO: 2252678 - RNA, 19 nt, Homo sapiens
  misc_RNA (1)...(19): siRNA sense strand
ucaagaaguacgggaauau

SEQ ID NO: 2252679 - RNA, 19 nt, Homo sapiens
  misc_RNA (1)...(19): siRNA sense strand
auuaggggauccagagaaa

SEQ ID NO: 2252680 - RNA, 19 nt, Homo sapiens
  misc_RNA (1)...(19): siRNA sense strand
cuuucaagaaguacgggaa

SEQ ID NO: 2252681 - RNA, 19 nt, Homo sapiens
  misc_RNA (1)...(19): siRNA sense strand
guuaaaagacccuacacaa

SEQ ID NO: 2252682 - RNA, 19 nt, Homo sapiens
  misc_RNA (1)...(19): siRNA sense strand
cugucuagaaaguuagcaa

SEQ ID NO: 2252683 - RNA, 19 nt, Homo sapiens
  misc_RNA (1)...(19): siRNA sense strand
cccaaguuaacaagugaua

SEQ ID NO: 2252684 - RNA, 19 nt, Homo sapiens
  misc_RNA (1)...(19): siRNA sense strand
ggacaaaauuggagaaggc

SEQ ID NO: 2252685 - RNA, 19 nt, Homo sapiens
  misc_RNA (1)...(19): siRNA sense strand
uuaaaagacccuacacaaa

SEQ ID NO: 2252686 - RNA, 19 nt, Homo sapiens
  misc_RNA (1)...(19): siRNA sense strand
auauaauaggcgccugaaa

SEQ ID NO: 2252687 - RNA, 19 nt, Homo sapiens
  misc_RNA (1)...(19): siRNA sense strand
cgaaaauagagcuucuuaa

SEQ ID NO: 2252688 - RNA, 19 nt, Homo sapiens
  misc_RNA (1)...(19): siRNA sense strand
cccacauaaucacaggaaa

SEQ ID NO: 2252689 - RNA, 19 nt, Homo sapiens
  misc_RNA (1)...(19): siRNA sense strand
gcaccagaggucuugacaa

SEQ ID NO: 2252690 - RNA, 19 nt, Homo sapiens
  misc_RNA (1)...(19): siRNA sense strand
guuacaaguaggaccugaa

SEQ ID NO: 2252691 - RNA, 19 nt, Homo sapiens
  misc_RNA (1)...(19): siRNA sense strand
aagaaguacgggaauauau

SEQ ID NO: 2252692 - RNA, 19 nt, Homo sapiens
  misc_RNA (1)...(19): siRNA sense strand
uauaauaggcgccugaaaa

SEQ ID NO: 2252693 - RNA, 19 nt, Homo sapiens
  misc_RNA (1)...(19): siRNA sense strand
gucuagaaaguuagcaaca

SEQ ID NO: 2252694 - RNA, 19 nt, Homo sapiens
  misc_RNA (1)...(19): siRNA sense strand
ggguauggauucuagcacu

SEQ ID NO: 2252695 - RNA, 19 nt, Homo sapiens
  misc_RNA (1)...(19): siRNA sense strand
gguuagaagaggagauagu

SEQ ID NO: 2252696 - RNA, 19 nt, Homo sapiens
  misc_RNA (1)...(19): siRNA sense strand
gcaaagaguucuacgaggu

SEQ ID NO: 2252697 - RNA, 19 nt, Homo sapiens
  misc_RNA (1)...(19): siRNA sense strand
augaagaggaggaugaaga

SEQ ID NO: 2252698 - RNA, 19 nt, Homo sapiens
  misc_RNA (1)...(19): siRNA sense strand
gagcaaaccaugcggagga

SEQ ID NO: 2252699 - RNA, 19 nt, Homo sapiens
  misc_RNA (1)...(19): siRNA sense strand
gaaggauggcucagggaca

SEQ ID NO: 2252700 - RNA, 19 nt, Homo sapiens
  misc_RNA (1)...(19): siRNA sense strand
gggaaaugauugaagaguc

SEQ ID NO: 2252701 - RNA, 19 nt, Homo sapiens
  misc_RNA (1)...(19): siRNA sense strand
gcaagauccuucaggccuu

SEQ ID NO: 2252702 - RNA, 19 nt, Homo sapiens
  misc_RNA (1)...(19): siRNA sense strand
aagaggagauaguggagca

SEQ ID NO: 2252703 - RNA, 19 nt, Homo sapiens
  misc_RNA (1)...(19): siRNA sense strand
aggagauaguggagcaaac

SEQ ID NO: 2252704 - RNA, 19 nt, Homo sapiens
  misc_RNA (1)...(19): siRNA sense strand
gcacacgguuagaagagga

SEQ ID NO: 2252705 - RNA, 19 nt, Homo sapiens
  misc_RNA (1)...(19): siRNA sense strand
acaacgauacccagaucaa

SEQ ID NO: 2252706 - RNA, 19 nt, Homo sapiens
  misc_RNA (1)...(19): siRNA sense strand
acgaggugguccagagcca

SEQ ID NO: 2252707 - RNA, 19 nt, Homo sapiens
  misc_RNA (1)...(19): siRNA sense strand
aaauuugggaugaaggaca

SEQ ID NO: 2252708 - RNA, 19 nt, Homo sapiens
  misc_RNA (1)...(19): siRNA sense strand
ggaugaaggacaugcgcgu

SEQ ID NO: 2252709 - RNA, 19 nt, Homo sapiens
  misc_RNA (1)...(19): siRNA sense strand
agaugaugaccuugaaguu

SEQ ID NO: 2252710 - RNA, 19 nt, Homo sapiens
  misc_RNA (1)...(19): siRNA sense strand
ccuugaaguucccgccuau

SEQ ID NO: 2252711 - RNA, 19 nt, Homo sapiens
  misc_RNA (1)...(19): siRNA sense strand
aagcagaaguuccaggcca

SEQ ID NO: 2252712 - RNA, 19 nt, Homo sapiens
  misc_RNA (1)...(19): siRNA sense strand
acucaaaugaaauacguga

SEQ ID NO: 2252713 - RNA, 19 nt, Homo sapiens
  misc_RNA (1)...(19): siRNA sense strand
gcugaggaucggagcaagu

SEQ ID NO: 2252714 - RNA, 19 nt, Homo sapiens
  misc_RNA (1)...(19): siRNA sense strand
aggccuuguuccaguguga

SEQ ID NO: 2252715 - RNA, 19 nt, Homo sapiens
  misc_RNA (1)...(19): siRNA sense strand
ucucauaaacuguggagcu

SEQ ID NO: 2252716 - RNA, 19 nt, Homo sapiens
  misc_RNA (1)...(19): siRNA sense strand
agcagaaguuccaggccau

SEQ ID NO: 2252717 - RNA, 19 nt, Homo sapiens
  misc_RNA (1)...(19): siRNA sense strand
ugauugaagagucugcaaa

SEQ ID NO: 2252718 - RNA, 19 nt, Homo sapiens
  misc_RNA (1)...(19): siRNA sense strand
cugaggaggaggcgccuaa

SEQ ID NO: 2252719 - RNA, 19 nt, Homo sapiens
  misc_RNA (1)...(19): siRNA sense strand
ggccagaacacguccgaca

SEQ ID NO: 2252720 - RNA, 19 nt, Homo sapiens
  misc_RNA (1)...(19): siRNA sense strand
cgaccaagguguaugggcu

SEQ ID NO: 2252721 - RNA, 19 nt, Homo sapiens
  misc_RNA (1)...(19): siRNA sense strand
gcaccaagaaggagggcug

SEQ ID NO: 2252722 - RNA, 19 nt, Homo sapiens
  misc_RNA (1)...(19): siRNA sense strand
gcaccaucaugaagcacga

SEQ ID NO: 2252723 - RNA, 19 nt, Homo sapiens
  misc_RNA (1)...(19): siRNA sense strand
gcaccaagaaggagggcug

SEQ ID NO: 2252724 - RNA, 19 nt, Homo sapiens
  misc_RNA (1)...(19): siRNA sense strand
ugauguacuuuaaggagga

SEQ ID NO: 2252725 - RNA, 19 nt, Homo sapiens
  misc_RNA (1)...(19): siRNA sense strand
agacuuagccacagcagca

SEQ ID NO: 2252726 - RNA, 19 nt, Homo sapiens
  misc_RNA (1)...(19): siRNA sense strand
ugaccaugaucgucggcau

SEQ ID NO: 2252727 - RNA, 19 nt, Homo sapiens
  misc_RNA (1)...(19): siRNA sense strand
gugccaacggccugaugua

SEQ ID NO: 2252728 - RNA, 19 nt, Homo sapiens
  misc_RNA (1)...(19): siRNA sense strand
cuggagaagcucaugguca

SEQ ID NO: 2252729 - RNA, 19 nt, Homo sapiens
  misc_RNA (1)...(19): siRNA sense strand
uggucuugcacaugacuaa

SEQ ID NO: 2252730 - RNA, 19 nt, Homo sapiens
  misc_RNA (1)...(19): siRNA sense strand
ucaacaagcuucugggcaa

SEQ ID NO: 2252731 - RNA, 19 nt, Homo sapiens
  misc_RNA (1)...(19): siRNA sense strand
ccaagaagaccgagagcca

SEQ ID NO: 2252732 - RNA, 19 nt, Homo sapiens
  misc_RNA (1)...(19): siRNA sense strand
accacaaggcgaagggcaa

SEQ ID NO: 2252733 - RNA, 19 nt, Homo sapiens
  misc_RNA (1)...(19): siRNA sense strand
aggcaaagcucgcgccaag

SEQ ID NO: 2252734 - RNA, 19 nt, Homo sapiens
  misc_RNA (1)...(19): siRNA sense strand
accacaaggccaagggcaa

SEQ ID NO: 2252735 - RNA, 19 nt, Homo sapiens
  misc_RNA (1)...(19): siRNA sense strand
ccgccgagauccuggaacu

SEQ ID NO: 2252736 - RNA, 19 nt, Homo sapiens
  misc_RNA (1)...(19): siRNA sense strand
cuaagaaaacugagagcca

SEQ ID NO: 2252737 - RNA, 19 nt, Homo sapiens
  misc_RNA (1)...(19): siRNA sense strand
acgacgaggagcucaacaa

SEQ ID NO: 2252738 - RNA, 19 nt, Homo sapiens
  misc_RNA (1)...(19): siRNA sense strand
ucaacaagcugcugggcaa

SEQ ID NO: 2252739 - RNA, 19 nt, Homo sapiens
  misc_RNA (1)...(19): siRNA sense strand
cggcaagcagggaggcaaa

SEQ ID NO: 2252740 - RNA, 19 nt, Homo sapiens
  misc_RNA (1)...(19): siRNA sense strand
accacaaggccaaaggcaa

SEQ ID NO: 2252741 - RNA, 19 nt, Homo sapiens
  misc_RNA (1)...(19): siRNA sense strand
gcaaaguaaccaucgcuca

SEQ ID NO: 2252742 - RNA, 19 nt, Homo sapiens
  misc_RNA (1)...(19): siRNA sense strand
acgacgaggagcucaacaa

SEQ ID NO: 2252743 - RNA, 19 nt, Homo sapiens
  misc_RNA (1)...(19): siRNA sense strand
accacaaggccaagggcaa

SEQ ID NO: 2252744 - RNA, 19 nt, Homo sapiens
  misc_RNA (1)...(19): siRNA sense strand
gucuggacgugguaagcaa

SEQ ID NO: 2252745 - RNA, 19 nt, Homo sapiens
  misc_RNA (1)...(19): siRNA sense strand
cugccuaagaagaccgaga

SEQ ID NO: 2252746 - RNA, 19 nt, Homo sapiens
  misc_RNA (1)...(19): siRNA sense strand
acgacgaggagcucaacaa

SEQ ID NO: 2252747 - RNA, 19 nt, Homo sapiens
  misc_RNA (1)...(19): siRNA sense strand
ccaagaagacugagagcca

SEQ ID NO: 2252748 - RNA, 19 nt, Homo sapiens
  misc_RNA (1)...(19): siRNA sense strand
accacaaagcuaagggcaa

SEQ ID NO: 2252749 - RNA, 19 nt, Homo sapiens
  misc_RNA (1)...(19): siRNA sense strand
ccacaaagcuaagggcaag

SEQ ID NO: 2252750 - RNA, 19 nt, Homo sapiens
  misc_RNA (1)...(19): siRNA sense strand
acgacgaggagcucaacaa

SEQ ID NO: 2252751 - RNA, 19 nt, Homo sapiens
  misc_RNA (1)...(19): siRNA sense strand
ugaacaagcugcugggcaa

SEQ ID NO: 2252752 - RNA, 19 nt, Homo sapiens
  misc_RNA (1)...(19): siRNA sense strand
gcaacuacgcggagcgagu

SEQ ID NO: 2252753 - RNA, 19 nt, Homo sapiens
  misc_RNA (1)...(19): siRNA sense strand
acgacgaggaacugaacaa

SEQ ID NO: 2252754 - RNA, 19 nt, Homo sapiens
  misc_RNA (1)...(19): siRNA sense strand
accacaaggcaaagggcaa

SEQ ID NO: 2252755 - RNA, 19 nt, Homo sapiens
  misc_RNA (1)...(19): siRNA sense strand
ugaacaagcugcugggcaa

SEQ ID NO: 2252756 - RNA, 19 nt, Homo sapiens
  misc_RNA (1)...(19): siRNA sense strand
acgacgaggaacugaacaa

SEQ ID NO: 2252757 - RNA, 19 nt, Homo sapiens
  misc_RNA (1)...(19): siRNA sense strand
ccgaaagccacaaagccaa

SEQ ID NO: 2252758 - RNA, 19 nt, Homo sapiens
  misc_RNA (1)...(19): siRNA sense strand
uggcaaacaaggaggcaag

SEQ ID NO: 2252759 - RNA, 19 nt, Homo sapiens
  misc_RNA (1)...(19): siRNA sense strand
caaagaaaaccgaaagcca

SEQ ID NO: 2252760 - RNA, 19 nt, Homo sapiens
  misc_RNA (1)...(19): siRNA sense strand
cuucuaaggccaugggaau

SEQ ID NO: 2252761 - RNA, 19 nt, Homo sapiens
  misc_RNA (1)...(19): siRNA sense strand
cccagaagaaggauggcaa

SEQ ID NO: 2252762 - RNA, 19 nt, Homo sapiens
  misc_RNA (1)...(19): siRNA sense strand
cagaagaaggauggcaaga

SEQ ID NO: 2252763 - RNA, 19 nt, Homo sapiens
  misc_RNA (1)...(19): siRNA sense strand
acgacaucuucgagcgcau

SEQ ID NO: 2252764 - RNA, 19 nt, Homo sapiens
  misc_RNA (1)...(19): siRNA sense strand
cguccaaggccaugggcau

SEQ ID NO: 2252765 - RNA, 19 nt, Homo sapiens
  misc_RNA (1)...(19): siRNA sense strand
cccagaagaaggacggcaa

SEQ ID NO: 2252766 - RNA, 19 nt, Homo sapiens
  misc_RNA (1)...(19): siRNA sense strand
cucagaagaaggauggaaa

SEQ ID NO: 2252767 - RNA, 19 nt, Homo sapiens
  misc_RNA (1)...(19): siRNA sense strand
ggaaagaagcgcaaacgca

SEQ ID NO: 2252768 - RNA, 19 nt, Homo sapiens
  misc_RNA (1)...(19): siRNA sense strand
acgacaucuuugagcguau

SEQ ID NO: 2252769 - RNA, 19 nt, Homo sapiens
  misc_RNA (1)...(19): siRNA sense strand
aggauggaaagaagcgcaa

SEQ ID NO: 2252770 - RNA, 19 nt, Homo sapiens
  misc_RNA (1)...(19): siRNA sense strand
gguaagaagcgcaagcgua

SEQ ID NO: 2252771 - RNA, 19 nt, Homo sapiens
  misc_RNA (1)...(19): siRNA sense strand
cauccaaggccaugggcau

SEQ ID NO: 2252772 - RNA, 19 nt, Homo sapiens
  misc_RNA (1)...(19): siRNA sense strand
acguguacaaggugcuaaa

SEQ ID NO: 2252773 - RNA, 19 nt, Homo sapiens
  misc_RNA (1)...(19): siRNA sense strand
aagcguagccgcaaggaga

SEQ ID NO: 2252774 - RNA, 19 nt, Homo sapiens
  misc_RNA (1)...(19): siRNA sense strand
acgauaucuucgagcgcau

SEQ ID NO: 2252775 - RNA, 19 nt, Homo sapiens
  misc_RNA (1)...(19): siRNA sense strand
guaagaagcgcaagcguag

SEQ ID NO: 2252776 - RNA, 19 nt, Homo sapiens
  misc_RNA (1)...(19): siRNA sense strand
acgacaucuucgagcgcau

SEQ ID NO: 2252777 - RNA, 19 nt, Homo sapiens
  misc_RNA (1)...(19): siRNA sense strand
ccucuaaagccauggggau

SEQ ID NO: 2252778 - RNA, 19 nt, Homo sapiens
  misc_RNA (1)...(19): siRNA sense strand
cgcagaagaaggauggcaa

SEQ ID NO: 2252779 - RNA, 19 nt, Homo sapiens
  misc_RNA (1)...(19): siRNA sense strand
acgauaucuucgagcgcau

SEQ ID NO: 2252780 - RNA, 19 nt, Homo sapiens
  misc_RNA (1)...(19): siRNA sense strand
aggauggcaagaagcguaa

SEQ ID NO: 2252781 - RNA, 19 nt, Homo sapiens
  misc_RNA (1)...(19): siRNA sense strand
cagaagaaggauggcaaga

SEQ ID NO: 2252782 - RNA, 19 nt, Homo sapiens
  misc_RNA (1)...(19): siRNA sense strand
cacagaagaaggauggcaa

SEQ ID NO: 2252783 - RNA, 19 nt, Homo sapiens
  misc_RNA (1)...(19): siRNA sense strand
cagaagaaggauggcaaga

SEQ ID NO: 2252784 - RNA, 19 nt, Homo sapiens
  misc_RNA (1)...(19): siRNA sense strand
cauuauaacaagcgcucga

SEQ ID NO: 2252785 - RNA, 19 nt, Homo sapiens
  misc_RNA (1)...(19): siRNA sense strand
cgcagaagaaagauggcaa

SEQ ID NO: 2252786 - RNA, 19 nt, Homo sapiens
  misc_RNA (1)...(19): siRNA sense strand
cuuccaaggccaugggcau

SEQ ID NO: 2252787 - RNA, 19 nt, Homo sapiens
  misc_RNA (1)...(19): siRNA sense strand
acgacauauuugagcgcau

SEQ ID NO: 2252788 - RNA, 19 nt, Homo sapiens
  misc_RNA (1)...(19): siRNA sense strand
caucgaaggccaugggcau

SEQ ID NO: 2252789 - RNA, 19 nt, Homo sapiens
  misc_RNA (1)...(19): siRNA sense strand
cguccaaggccaugggcau

SEQ ID NO: 2252790 - RNA, 19 nt, Homo sapiens
  misc_RNA (1)...(19): siRNA sense strand
cccagaagaaagacggcaa

SEQ ID NO: 2252791 - RNA, 19 nt, Homo sapiens
  misc_RNA (1)...(19): siRNA sense strand
acgacaucuucgagcgcau

SEQ ID NO: 2252792 - RNA, 19 nt, Homo sapiens
  misc_RNA (1)...(19): siRNA sense strand
ccacuaaggcagcccgcaa

SEQ ID NO: 2252793 - RNA, 19 nt, Homo sapiens
  misc_RNA (1)...(19): siRNA sense strand
cuaucaugcccaaggacau

SEQ ID NO: 2252794 - RNA, 19 nt, Homo sapiens
  misc_RNA (1)...(19): siRNA sense strand
ggcuauuugaggacacuaa

SEQ ID NO: 2252795 - RNA, 19 nt, Homo sapiens
  misc_RNA (1)...(19): siRNA sense strand
acgccaagcgagugacuau

SEQ ID NO: 2252796 - RNA, 19 nt, Homo sapiens
  misc_RNA (1)...(19): siRNA sense strand
gcgucuaguccgugagauc

SEQ ID NO: 2252797 - RNA, 19 nt, Homo sapiens
  misc_RNA (1)...(19): siRNA sense strand
cgaaagagcgcuccagcca

SEQ ID NO: 2252798 - RNA, 19 nt, Homo sapiens
  misc_RNA (1)...(19): siRNA sense strand
gugagaucgcgcaggacuu

SEQ ID NO: 2252799 - RNA, 19 nt, Homo sapiens
  misc_RNA (1)...(19): siRNA sense strand
ugaagaaaccucaucgcua

SEQ ID NO: 2252800 - RNA, 19 nt, Homo sapiens
  misc_RNA (1)...(19): siRNA sense strand
ccacuaaggcagcucgcaa

SEQ ID NO: 2252801 - RNA, 19 nt, Homo sapiens
  misc_RNA (1)...(19): siRNA sense strand
ccaucaugccuaaagacau

SEQ ID NO: 2252802 - RNA, 19 nt, Homo sapiens
  misc_RNA (1)...(19): siRNA sense strand
gggagaucgcacaggacuu

SEQ ID NO: 2252803 - RNA, 19 nt, Homo sapiens
  misc_RNA (1)...(19): siRNA sense strand
acuauuaugccuaaagaca

SEQ ID NO: 2252804 - RNA, 19 nt, Homo sapiens
  misc_RNA (1)...(19): siRNA sense strand
ugaagaaaccucaucgcua

SEQ ID NO: 2252805 - RNA, 19 nt, Homo sapiens
  misc_RNA (1)...(19): siRNA sense strand
ccacuaaggcggcucggaa

SEQ ID NO: 2252806 - RNA, 19 nt, Homo sapiens
  misc_RNA (1)...(19): siRNA sense strand
augcuaagcgagugacuau

SEQ ID NO: 2252807 - RNA, 19 nt, Homo sapiens
  misc_RNA (1)...(19): siRNA sense strand
cuaucaugcccaaggacau

SEQ ID NO: 2252808 - RNA, 19 nt, Homo sapiens
  misc_RNA (1)...(19): siRNA sense strand
cacuaaggcggcucggaaa

SEQ ID NO: 2252809 - RNA, 19 nt, Homo sapiens
  misc_RNA (1)...(19): siRNA sense strand
cuauuaugccuaaggacau

SEQ ID NO: 2252810 - RNA, 19 nt, Homo sapiens
  misc_RNA (1)...(19): siRNA sense strand
aggccuaucuggugggucu

SEQ ID NO: 2252811 - RNA, 19 nt, Homo sapiens
  misc_RNA (1)...(19): siRNA sense strand
cggugauggcgcugcaaga

SEQ ID NO: 2252812 - RNA, 19 nt, Homo sapiens
  misc_RNA (1)...(19): siRNA sense strand
acuauuaugccuaaggaca

SEQ ID NO: 2252813 - RNA, 19 nt, Homo sapiens
  misc_RNA (1)...(19): siRNA sense strand
ucgcggagaaagagcguaa

SEQ ID NO: 2252814 - RNA, 19 nt, Homo sapiens
  misc_RNA (1)...(19): siRNA sense strand
augcuaagcgagugacuau

SEQ ID NO: 2252815 - RNA, 19 nt, Homo sapiens
  misc_RNA (1)...(19): siRNA sense strand
cuaccaaggcugcucgcaa

SEQ ID NO: 2252816 - RNA, 19 nt, Homo sapiens
  misc_RNA (1)...(19): siRNA sense strand
cccaagacuucaagaccga

SEQ ID NO: 2252817 - RNA, 19 nt, Homo sapiens
  misc_RNA (1)...(19): siRNA sense strand
acuauuaugcccaaagaca

SEQ ID NO: 2252818 - RNA, 19 nt, Homo sapiens
  misc_RNA (1)...(19): siRNA sense strand
gugacaacauccagggcau

SEQ ID NO: 2252819 - RNA, 19 nt, Homo sapiens
  misc_RNA (1)...(19): siRNA sense strand
cugccauggacguggucua

SEQ ID NO: 2252820 - RNA, 19 nt, Homo sapiens
  misc_RNA (1)...(19): siRNA sense strand
uggagaacgugauccguga

SEQ ID NO: 2252821 - RNA, 19 nt, Homo sapiens
  misc_RNA (1)...(19): siRNA sense strand
cggaacacgccaaacgcaa

SEQ ID NO: 2252822 - RNA, 19 nt, Homo sapiens
  misc_RNA (1)...(19): siRNA sense strand
cagccauggacguggugua

SEQ ID NO: 2252823 - RNA, 19 nt, Homo sapiens
  misc_RNA (1)...(19): siRNA sense strand
ugacaauauccaaggaauc

SEQ ID NO: 2252824 - RNA, 19 nt, Homo sapiens
  misc_RNA (1)...(19): siRNA sense strand
cgguaagggcggaaagggu

SEQ ID NO: 2252825 - RNA, 19 nt, Homo sapiens
  misc_RNA (1)...(19): siRNA sense strand
gugacaacauacagggcau

SEQ ID NO: 2252826 - RNA, 19 nt, Homo sapiens
  misc_RNA (1)...(19): siRNA sense strand
cugcaauggauguugucua

SEQ ID NO: 2252827 - RNA, 19 nt, Homo sapiens
  misc_RNA (1)...(19): siRNA sense strand
agguguuccuggagaaugu

SEQ ID NO: 2252828 - RNA, 19 nt, Homo sapiens
  misc_RNA (1)...(19): siRNA sense strand
cgccaagcgccaucgcaaa

SEQ ID NO: 2252829 - RNA, 19 nt, Homo sapiens
  misc_RNA (1)...(19): siRNA sense strand
gcgacaauauccagggcau

SEQ ID NO: 2252830 - RNA, 19 nt, Homo sapiens
  misc_RNA (1)...(19): siRNA sense strand
cguaaaguacugcgcgaca

SEQ ID NO: 2252831 - RNA, 19 nt, Homo sapiens
  misc_RNA (1)...(19): siRNA sense strand
gcgggaagggucuuggcaa

SEQ ID NO: 2252832 - RNA, 19 nt, Homo sapiens
  misc_RNA (1)...(19): siRNA sense strand
gcaaaggcgggaagggucu

SEQ ID NO: 2252833 - RNA, 19 nt, Homo sapiens
  misc_RNA (1)...(19): siRNA sense strand
cagagcacgccaagcgcaa

SEQ ID NO: 2252834 - RNA, 19 nt, Homo sapiens
  misc_RNA (1)...(19): siRNA sense strand
gcgacaauauccagggcau

SEQ ID NO: 2252835 - RNA, 19 nt, Homo sapiens
  misc_RNA (1)...(19): siRNA sense strand
cguaaaguacugcgcgaca

SEQ ID NO: 2252836 - RNA, 19 nt, Homo sapiens
  misc_RNA (1)...(19): siRNA sense strand
gcgggaagggucuuggcaa

SEQ ID NO: 2252837 - RNA, 19 nt, Homo sapiens
  misc_RNA (1)...(19): siRNA sense strand
gcaaaggcgggaagggucu

SEQ ID NO: 2252838 - RNA, 19 nt, Homo sapiens
  misc_RNA (1)...(19): siRNA sense strand
cagagcacgccaagcgcaa

SEQ ID NO: 2252839 - RNA, 19 nt, Homo sapiens
  misc_RNA (1)...(19): siRNA sense strand
gcggaaaaggcuuggggaa

SEQ ID NO: 2252840 - RNA, 19 nt, Homo sapiens
  misc_RNA (1)...(19): siRNA sense strand
cagccauggauguaguaua

SEQ ID NO: 2252841 - RNA, 19 nt, Homo sapiens
  misc_RNA (1)...(19): siRNA sense strand
ggucuuaucuaugaggaga

SEQ ID NO: 2252842 - RNA, 19 nt, Homo sapiens
  misc_RNA (1)...(19): siRNA sense strand
uagagaacguuauucgaga

SEQ ID NO: 2252843 - RNA, 19 nt, Homo sapiens
  misc_RNA (1)...(19): siRNA sense strand
gcgauaacauccagggcau

SEQ ID NO: 2252844 - RNA, 19 nt, Homo sapiens
  misc_RNA (1)...(19): siRNA sense strand
guggaaaagguuuggguaa

SEQ ID NO: 2252845 - RNA, 19 nt, Homo sapiens
  misc_RNA (1)...(19): siRNA sense strand
gagcuaagcgucaucgcaa

SEQ ID NO: 2252846 - RNA, 19 nt, Homo sapiens
  misc_RNA (1)...(19): siRNA sense strand
ggguaagggaggagcuaag

SEQ ID NO: 2252847 - RNA, 19 nt, Homo sapiens
  misc_RNA (1)...(19): siRNA sense strand
ccgugguaaagguggaaaa

SEQ ID NO: 2252848 - RNA, 19 nt, Homo sapiens
  misc_RNA (1)...(19): siRNA sense strand
agggaggagcuaagcguca

SEQ ID NO: 2252849 - RNA, 19 nt, Homo sapiens
  misc_RNA (1)...(19): siRNA sense strand
uggagaacgugauucguga

SEQ ID NO: 2252850 - RNA, 19 nt, Homo sapiens
  misc_RNA (1)...(19): siRNA sense strand
cugccauggaugugguuua

SEQ ID NO: 2252851 - RNA, 19 nt, Homo sapiens
  misc_RNA (1)...(19): siRNA sense strand
cgguaaagguuuggguaag

SEQ ID NO: 2252852 - RNA, 19 nt, Homo sapiens
  misc_RNA (1)...(19): siRNA sense strand
cggcaaaggcggaaaggga

SEQ ID NO: 2252853 - RNA, 19 nt, Homo sapiens
  misc_RNA (1)...(19): siRNA sense strand
gagauaacauccagggcau

SEQ ID NO: 2252854 - RNA, 19 nt, Homo sapiens
  misc_RNA (1)...(19): siRNA sense strand
cggaaagggacuggguaaa

SEQ ID NO: 2252855 - RNA, 19 nt, Homo sapiens
  misc_RNA (1)...(19): siRNA sense strand
cagcgauggauguggucua

SEQ ID NO: 2252856 - RNA, 19 nt, Homo sapiens
  misc_RNA (1)...(19): siRNA sense strand
gcaaaggcggaaagggacu

SEQ ID NO: 2252857 - RNA, 19 nt, Homo sapiens
  misc_RNA (1)...(19): siRNA sense strand
ggguaaaggaggcgcuaag

SEQ ID NO: 2252858 - RNA, 19 nt, Homo sapiens
  misc_RNA (1)...(19): siRNA sense strand
gcgacaacauucagggcau

SEQ ID NO: 2252859 - RNA, 19 nt, Homo sapiens
  misc_RNA (1)...(19): siRNA sense strand
cagccauggacgugguuua

SEQ ID NO: 2252860 - RNA, 19 nt, Homo sapiens
  misc_RNA (1)...(19): siRNA sense strand
gcaaaggcgggaagggucu

SEQ ID NO: 2252861 - RNA, 19 nt, Homo sapiens
  misc_RNA (1)...(19): siRNA sense strand
guggaggcguuaagcgcau

SEQ ID NO: 2252862 - RNA, 19 nt, Homo sapiens
  misc_RNA (1)...(19): siRNA sense strand
agaaaauagcagagagauu

SEQ ID NO: 2252863 - RNA, 19 nt, Homo sapiens
  misc_RNA (1)...(19): siRNA sense strand
gcagaaaauagcagagaga

SEQ ID NO: 2252864 - RNA, 19 nt, Homo sapiens
  misc_RNA (1)...(19): siRNA sense strand
acgcagaagcagugguuca

SEQ ID NO: 2252865 - RNA, 19 nt, Homo sapiens
  misc_RNA (1)...(19): siRNA sense strand
gaauagaagaccuguggga

SEQ ID NO: 2252866 - RNA, 19 nt, Homo sapiens
  misc_RNA (1)...(19): siRNA sense strand
gggaaguggaggcuggaca

SEQ ID NO: 2252867 - RNA, 19 nt, Homo sapiens
  misc_RNA (1)...(19): siRNA sense strand
ggucaacuguucaggccuu

SEQ ID NO: 2252868 - RNA, 19 nt, Homo sapiens
  misc_RNA (1)...(19): siRNA sense strand
ccacuauggccaugggagu

SEQ ID NO: 2252869 - RNA, 19 nt, Homo sapiens
  misc_RNA (1)...(19): siRNA sense strand
auagaagaccugugggaac

SEQ ID NO: 2252870 - RNA, 19 nt, Homo sapiens
  misc_RNA (1)...(19): siRNA sense strand
agguuuggugccagagauu

SEQ ID NO: 2252871 - RNA, 19 nt, Homo sapiens
  misc_RNA (1)...(19): siRNA sense strand
agagacaggcucauggaca

SEQ ID NO: 2252872 - RNA, 19 nt, Homo sapiens
  misc_RNA (1)...(19): siRNA sense strand
agaaaauagcagagagauu

SEQ ID NO: 2252873 - RNA, 19 nt, Homo sapiens
  misc_RNA (1)...(19): siRNA sense strand
gcagaaaauagcagagaga

SEQ ID NO: 2252874 - RNA, 19 nt, Homo sapiens
  misc_RNA (1)...(19): siRNA sense strand
acgcagaagcagugguuca

SEQ ID NO: 2252875 - RNA, 19 nt, Homo sapiens
  misc_RNA (1)...(19): siRNA sense strand
gaauagaagaccuguggga

SEQ ID NO: 2252876 - RNA, 19 nt, Homo sapiens
  misc_RNA (1)...(19): siRNA sense strand
gggaaguggaggcuggaca

SEQ ID NO: 2252877 - RNA, 19 nt, Homo sapiens
  misc_RNA (1)...(19): siRNA sense strand
ggucaacuguucaggccuu

SEQ ID NO: 2252878 - RNA, 19 nt, Homo sapiens
  misc_RNA (1)...(19): siRNA sense strand
ccacuauggccaugggagu

SEQ ID NO: 2252879 - RNA, 19 nt, Homo sapiens
  misc_RNA (1)...(19): siRNA sense strand
auagaagaccugugggaac

SEQ ID NO: 2252880 - RNA, 19 nt, Homo sapiens
  misc_RNA (1)...(19): siRNA sense strand
agguuuggugccagagauu

SEQ ID NO: 2252881 - RNA, 19 nt, Homo sapiens
  misc_RNA (1)...(19): siRNA sense strand
agagacaggcucauggaca

SEQ ID NO: 2252882 - RNA, 19 nt, Homo sapiens
  misc_RNA (1)...(19): siRNA sense strand
cggaaaaggccuugggaaa

SEQ ID NO: 2252883 - RNA, 19 nt, Homo sapiens
  misc_RNA (1)...(19): siRNA sense strand
gcgauaauauucagggcau

SEQ ID NO: 2252884 - RNA, 19 nt, Homo sapiens
  misc_RNA (1)...(19): siRNA sense strand
cgauaauauucagggcauu

SEQ ID NO: 2252885 - RNA, 19 nt, Homo sapiens
  misc_RNA (1)...(19): siRNA sense strand
aggagcagcuggagcgcaa

SEQ ID NO: 2252886 - RNA, 19 nt, Homo sapiens
  misc_RNA (1)...(19): siRNA sense strand
ggaagaagcgcgagaccca

SEQ ID NO: 2252887 - RNA, 19 nt, Homo sapiens
  misc_RNA (1)...(19): siRNA sense strand
gguugaaggucgaggagcu

SEQ ID NO: 2252888 - RNA, 19 nt, Homo sapiens
  misc_RNA (1)...(19): siRNA sense strand
aggaaagagcagagcagau

SEQ ID NO: 2252889 - RNA, 19 nt, Homo sapiens
  misc_RNA (1)...(19): siRNA sense strand
gggagaugagagagaccaa

SEQ ID NO: 2252890 - RNA, 19 nt, Homo sapiens
  misc_RNA (1)...(19): siRNA sense strand
cguccaaggagguggcaga

SEQ ID NO: 2252891 - RNA, 19 nt, Homo sapiens
  misc_RNA (1)...(19): siRNA sense strand
aggagaagaugcaggagca

SEQ ID NO: 2252892 - RNA, 19 nt, Homo sapiens
  misc_RNA (1)...(19): siRNA sense strand
gaacugcaguggagcguga

SEQ ID NO: 2252893 - RNA, 19 nt, Homo sapiens
  misc_RNA (1)...(19): siRNA sense strand
aggaagagcuggaagggcu

SEQ ID NO: 2252894 - RNA, 19 nt, Homo sapiens
  misc_RNA (1)...(19): siRNA sense strand
agaggaugcuggaggcaca

SEQ ID NO: 2252895 - RNA, 19 nt, Homo sapiens
  misc_RNA (1)...(19): siRNA sense strand
gagcagaccacgagcagca

SEQ ID NO: 2252896 - RNA, 19 nt, Homo sapiens
  misc_RNA (1)...(19): siRNA sense strand
acgagaggcugcuggccaa

SEQ ID NO: 2252897 - RNA, 19 nt, Homo sapiens
  misc_RNA (1)...(19): siRNA sense strand
gagaggaagaagcgcgaga

SEQ ID NO: 2252898 - RNA, 19 nt, Homo sapiens
  misc_RNA (1)...(19): siRNA sense strand
cugaagaaccagcggcuca

SEQ ID NO: 2252899 - RNA, 19 nt, Homo sapiens
  misc_RNA (1)...(19): siRNA sense strand
cugcgggagaugagagaga

SEQ ID NO: 2252900 - RNA, 19 nt, Homo sapiens
  misc_RNA (1)...(19): siRNA sense strand
ucgaggagcuggaaggcga

SEQ ID NO: 2252901 - RNA, 19 nt, Homo sapiens
  misc_RNA (1)...(19): siRNA sense strand
caggagaagaugcaggaga

SEQ ID NO: 2252902 - RNA, 19 nt, Homo sapiens
  misc_RNA (1)...(19): siRNA sense strand
ccaggaacuacgagcguga

SEQ ID NO: 2252903 - RNA, 19 nt, Homo sapiens
  misc_RNA (1)...(19): siRNA sense strand
gaguggagcuggagagagc

SEQ ID NO: 2252904 - RNA, 19 nt, Homo sapiens
  misc_RNA (1)...(19): siRNA sense strand
gugagaaagaggacagucu

SEQ ID NO: 2252905 - RNA, 19 nt, Homo sapiens
  misc_RNA (1)...(19): siRNA sense strand
gcgugauggaccaggagau

SEQ ID NO: 2252906 - RNA, 19 nt, Homo sapiens
  misc_RNA (1)...(19): siRNA sense strand
agcaagaggcugcgugaga

SEQ ID NO: 2252907 - RNA, 19 nt, Homo sapiens
  misc_RNA (1)...(19): siRNA sense strand
gcugcaaagcugggagaga

SEQ ID NO: 2252908 - RNA, 19 nt, Homo sapiens
  misc_RNA (1)...(19): siRNA sense strand
ccaagaagcaagagcagac

SEQ ID NO: 2252909 - RNA, 19 nt, Homo sapiens
  misc_RNA (1)...(19): siRNA sense strand
agguggagcgggagaaaau

SEQ ID NO: 2252910 - RNA, 19 nt, Homo sapiens
  misc_RNA (1)...(19): siRNA sense strand
cggagaagcaggacgugca

SEQ ID NO: 2252911 - RNA, 19 nt, Homo sapiens
  misc_RNA (1)...(19): siRNA sense strand
aggagguggcagagcugaa

SEQ ID NO: 2252912 - RNA, 19 nt, Homo sapiens
  misc_RNA (1)...(19): siRNA sense strand
aggagaagaugcaggagac

SEQ ID NO: 2252913 - RNA, 19 nt, Homo sapiens
  misc_RNA (1)...(19): siRNA sense strand
cuguuggaggagaggaaga

SEQ ID NO: 2252914 - RNA, 19 nt, Homo sapiens
  misc_RNA (1)...(19): siRNA sense strand
gaccaggagaugcggguga

SEQ ID NO: 2252915 - RNA, 19 nt, Homo sapiens
  misc_RNA (1)...(19): siRNA sense strand
cugaagaagcagguggaga

SEQ ID NO: 2252916 - RNA, 19 nt, Homo sapiens
  misc_RNA (1)...(19): siRNA sense strand
ggaggaaagagcagagcag

SEQ ID NO: 2252917 - RNA, 19 nt, Homo sapiens
  misc_RNA (1)...(19): siRNA sense strand
cagauggagcugagucaca

SEQ ID NO: 2252918 - RNA, 19 nt, Homo sapiens
  misc_RNA (1)...(19): siRNA sense strand
agcuguuggaggagaggaa

SEQ ID NO: 2252919 - RNA, 19 nt, Homo sapiens
  misc_RNA (1)...(19): siRNA sense strand
aggauauggugcagaaggu

SEQ ID NO: 2252920 - RNA, 19 nt, Homo sapiens
  misc_RNA (1)...(19): siRNA sense strand
cccugagaucuuugaacaa

SEQ ID NO: 2252921 - RNA, 19 nt, Homo sapiens
  misc_RNA (1)...(19): siRNA sense strand
gcgacaaggagaaggccaa

SEQ ID NO: 2252922 - RNA, 19 nt, Homo sapiens
  misc_RNA (1)...(19): siRNA sense strand
cgaucaaugagcugagcaa

SEQ ID NO: 2252923 - RNA, 19 nt, Homo sapiens
  misc_RNA (1)...(19): siRNA sense strand
aggagaaggccaaggacuu

SEQ ID NO: 2252924 - RNA, 19 nt, Homo sapiens
  misc_RNA (1)...(19): siRNA sense strand
augugggagaggagaguaa

SEQ ID NO: 2252925 - RNA, 19 nt, Homo sapiens
  misc_RNA (1)...(19): siRNA sense strand
aguuuauaguggaguguca

SEQ ID NO: 2252926 - RNA, 19 nt, Homo sapiens
  misc_RNA (1)...(19): siRNA sense strand
uggagaaacugaagcggga

SEQ ID NO: 2252927 - RNA, 19 nt, Homo sapiens
  misc_RNA (1)...(19): siRNA sense strand
acuucaaagccuacagcaa

SEQ ID NO: 2252928 - RNA, 19 nt, Homo sapiens
  misc_RNA (1)...(19): siRNA sense strand
gggugaaccacacgaucaa

SEQ ID NO: 2252929 - RNA, 19 nt, Homo sapiens
  misc_RNA (1)...(19): siRNA sense strand
cagaugacuucaaagccua

SEQ ID NO: 2252930 - RNA, 19 nt, Homo sapiens
  misc_RNA (1)...(19): siRNA sense strand
ccucaaggguucuacgguu

SEQ ID NO: 2252931 - RNA, 19 nt, Homo sapiens
  misc_RNA (1)...(19): siRNA sense strand
aguaugaccucaaggguuc

SEQ ID NO: 2252932 - RNA, 19 nt, Homo sapiens
  misc_RNA (1)...(19): siRNA sense strand
aagcgagcgacaaggagaa

SEQ ID NO: 2252933 - RNA, 19 nt, Homo sapiens
  misc_RNA (1)...(19): siRNA sense strand
agaagcugcaugugggaga

SEQ ID NO: 2252934 - RNA, 19 nt, Homo sapiens
  misc_RNA (1)...(19): siRNA sense strand
acagcaagaucaaggugga

SEQ ID NO: 2252935 - RNA, 19 nt, Homo sapiens
  misc_RNA (1)...(19): siRNA sense strand
gaagcgagcgacaaggaga

SEQ ID NO: 2252936 - RNA, 19 nt, Homo sapiens
  misc_RNA (1)...(19): siRNA sense strand
gcgacaaggagaaggccaa

SEQ ID NO: 2252937 - RNA, 19 nt, Homo sapiens
  misc_RNA (1)...(19): siRNA sense strand
cgaucaaugagcugagcaa

SEQ ID NO: 2252938 - RNA, 19 nt, Homo sapiens
  misc_RNA (1)...(19): siRNA sense strand
aggagaaggccaaggacuu

SEQ ID NO: 2252939 - RNA, 19 nt, Homo sapiens
  misc_RNA (1)...(19): siRNA sense strand
augugggagaggagaguaa

SEQ ID NO: 2252940 - RNA, 19 nt, Homo sapiens
  misc_RNA (1)...(19): siRNA sense strand
aguuuauaguggaguguca

SEQ ID NO: 2252941 - RNA, 19 nt, Homo sapiens
  misc_RNA (1)...(19): siRNA sense strand
uggagaaacugaagcggga

SEQ ID NO: 2252942 - RNA, 19 nt, Homo sapiens
  misc_RNA (1)...(19): siRNA sense strand
acuucaaagccuacagcaa

SEQ ID NO: 2252943 - RNA, 19 nt, Homo sapiens
  misc_RNA (1)...(19): siRNA sense strand
gggugaaccacacgaucaa

SEQ ID NO: 2252944 - RNA, 19 nt, Homo sapiens
  misc_RNA (1)...(19): siRNA sense strand
cagaugacuucaaagccua

SEQ ID NO: 2252945 - RNA, 19 nt, Homo sapiens
  misc_RNA (1)...(19): siRNA sense strand
ccucaaggguucuacgguu

SEQ ID NO: 2252946 - RNA, 19 nt, Homo sapiens
  misc_RNA (1)...(19): siRNA sense strand
aguaugaccucaaggguuc

SEQ ID NO: 2252947 - RNA, 19 nt, Homo sapiens
  misc_RNA (1)...(19): siRNA sense strand
aagcgagcgacaaggagaa

SEQ ID NO: 2252948 - RNA, 19 nt, Homo sapiens
  misc_RNA (1)...(19): siRNA sense strand
agaagcugcaugugggaga

SEQ ID NO: 2252949 - RNA, 19 nt, Homo sapiens
  misc_RNA (1)...(19): siRNA sense strand
acagcaagaucaaggugga

SEQ ID NO: 2252950 - RNA, 19 nt, Homo sapiens
  misc_RNA (1)...(19): siRNA sense strand
gaagcgagcgacaaggaga

SEQ ID NO: 2252951 - RNA, 19 nt, Homo sapiens
  misc_RNA (1)...(19): siRNA sense strand
ccuaagaaauccaaggaga

SEQ ID NO: 2252952 - RNA, 19 nt, Homo sapiens
  misc_RNA (1)...(19): siRNA sense strand
gcaagaacgugaucggguu

SEQ ID NO: 2252953 - RNA, 19 nt, Homo sapiens
  misc_RNA (1)...(19): siRNA sense strand
agaaacaauaugaugcaga

SEQ ID NO: 2252954 - RNA, 19 nt, Homo sapiens
  misc_RNA (1)...(19): siRNA sense strand
caagagggcaagaacguga

SEQ ID NO: 2252955 - RNA, 19 nt, Homo sapiens
  misc_RNA (1)...(19): siRNA sense strand
ccuucaagcagauggagca

SEQ ID NO: 2252956 - RNA, 19 nt, Homo sapiens
  misc_RNA (1)...(19): siRNA sense strand
gaacauggccugugugcag

SEQ ID NO: 2252957 - RNA, 19 nt, Homo sapiens
  misc_RNA (1)...(19): siRNA sense strand
agaaggagcuggaggagga

SEQ ID NO: 2252958 - RNA, 19 nt, Homo sapiens
  misc_RNA (1)...(19): siRNA sense strand
gaugaugaugacagggaaa

SEQ ID NO: 2252959 - RNA, 19 nt, Homo sapiens
  misc_RNA (1)...(19): siRNA sense strand
ucaugaaagcccuggaaau

SEQ ID NO: 2252960 - RNA, 19 nt, Homo sapiens
  misc_RNA (1)...(19): siRNA sense strand
ggacauaauugaaagacac

SEQ ID NO: 2252961 - RNA, 19 nt, Homo sapiens
  misc_RNA (1)...(19): siRNA sense strand
aguucgagauggagagcuu

SEQ ID NO: 2252962 - RNA, 19 nt, Homo sapiens
  misc_RNA (1)...(19): siRNA sense strand
gagaaggggcagugggaca

SEQ ID NO: 2252963 - RNA, 19 nt, Homo sapiens
  misc_RNA (1)...(19): siRNA sense strand
gggcagcaaaggugcacaa

SEQ ID NO: 2252964 - RNA, 19 nt, Homo sapiens
  misc_RNA (1)...(19): siRNA sense strand
uggacauaauugaaagaca

SEQ ID NO: 2252965 - RNA, 19 nt, Homo sapiens
  misc_RNA (1)...(19): siRNA sense strand
gugaaaucaugcugaacca

SEQ ID NO: 2252966 - RNA, 19 nt, Homo sapiens
  misc_RNA (1)...(19): siRNA sense strand
agggaaagaccuugggaac

SEQ ID NO: 2252967 - RNA, 19 nt, Homo sapiens
  misc_RNA (1)...(19): siRNA sense strand
agaaacagcugaagcccuu

SEQ ID NO: 2252968 - RNA, 19 nt, Homo sapiens
  misc_RNA (1)...(19): siRNA sense strand
ugaagaaggagcuggagga

SEQ ID NO: 2252969 - RNA, 19 nt, Homo sapiens
  misc_RNA (1)...(19): siRNA sense strand
cgaccagagcugugaaauc

SEQ ID NO: 2252970 - RNA, 19 nt, Homo sapiens
  misc_RNA (1)...(19): siRNA sense strand
agucaaucagacagagaga

SEQ ID NO: 2252971 - RNA, 19 nt, Homo sapiens
  misc_RNA (1)...(19): siRNA sense strand
gcaugaaggcagagagucc

SEQ ID NO: 2252972 - RNA, 19 nt, Homo sapiens
  misc_RNA (1)...(19): siRNA sense strand
cagaauuugcccaggggaa

SEQ ID NO: 2252973 - RNA, 19 nt, Homo sapiens
  misc_RNA (1)...(19): siRNA sense strand
acacaauggccaucggcau

SEQ ID NO: 2252974 - RNA, 19 nt, Homo sapiens
  misc_RNA (1)...(19): siRNA sense strand
ggcucaacucagaggccaa

SEQ ID NO: 2252975 - RNA, 19 nt, Homo sapiens
  misc_RNA (1)...(19): siRNA sense strand
gugcaguaccaguucgaga

SEQ ID NO: 2252976 - RNA, 19 nt, Homo sapiens
  misc_RNA (1)...(19): siRNA sense strand
cggcagcucagauggagaa

SEQ ID NO: 2252977 - RNA, 19 nt, Homo sapiens
  misc_RNA (1)...(19): siRNA sense strand
gcgguggaacugaaggauu

SEQ ID NO: 2252978 - RNA, 19 nt, Homo sapiens
  misc_RNA (1)...(19): siRNA sense strand
ugacguuaauggagcgcca

SEQ ID NO: 2252979 - RNA, 19 nt, Homo sapiens
  misc_RNA (1)...(19): siRNA sense strand
cagggaaagaccuugggaa

SEQ ID NO: 2252980 - RNA, 19 nt, Homo sapiens
  misc_RNA (1)...(19): siRNA sense strand
ucugaagagaugaggagga

SEQ ID NO: 2252981 - RNA, 19 nt, Homo sapiens
  misc_RNA (1)...(19): siRNA sense strand
auugaaagacacaacacaa

SEQ ID NO: 2252982 - RNA, 19 nt, Homo sapiens
  misc_RNA (1)...(19): siRNA sense strand
gccacagaucacaagguua

SEQ ID NO: 2252983 - RNA, 19 nt, Homo sapiens
  misc_RNA (1)...(19): siRNA sense strand
gaaugaaaucugcaagacu

SEQ ID NO: 2252984 - RNA, 19 nt, Homo sapiens
  misc_RNA (1)...(19): siRNA sense strand
ggaagaaccucgcucagca

SEQ ID NO: 2252985 - RNA, 19 nt, Homo sapiens
  misc_RNA (1)...(19): siRNA sense strand
cggcaggggagcaaagcua

SEQ ID NO: 2252986 - RNA, 19 nt, Homo sapiens
  misc_RNA (1)...(19): siRNA sense strand
cuguggaauaugugaaguu

SEQ ID NO: 2252987 - RNA, 19 nt, Homo sapiens
  misc_RNA (1)...(19): siRNA sense strand
cccaccagucagagagcua

SEQ ID NO: 2252988 - RNA, 19 nt, Homo sapiens
  misc_RNA (1)...(19): siRNA sense strand
gagcauggacugcaggguu

SEQ ID NO: 2252989 - RNA, 19 nt, Homo sapiens
  misc_RNA (1)...(19): siRNA sense strand
cggcauugcaguggacauu

SEQ ID NO: 2252990 - RNA, 19 nt, Homo sapiens
  misc_RNA (1)...(19): siRNA sense strand
augcugaaccauuuggcaa

SEQ ID NO: 2252991 - RNA, 19 nt, Homo sapiens
  misc_RNA (1)...(19): siRNA sense strand
ggugccuggaggagcauua

SEQ ID NO: 2252992 - RNA, 19 nt, Homo sapiens
  misc_RNA (1)...(19): siRNA sense strand
ugaacugaacccagcguuu

SEQ ID NO: 2252993 - RNA, 19 nt, Homo sapiens
  misc_RNA (1)...(19): siRNA sense strand
uugaaagacacaacacaau

SEQ ID NO: 2252994 - RNA, 19 nt, Homo sapiens
  misc_RNA (1)...(19): siRNA sense strand
augaaugaaaucugcaaga

SEQ ID NO: 2252995 - RNA, 19 nt, Homo sapiens
  misc_RNA (1)...(19): siRNA sense strand
caaccggagcagagagcaa

SEQ ID NO: 2252996 - RNA, 19 nt, Homo sapiens
  misc_RNA (1)...(19): siRNA sense strand
cuggaaucauugacuauaa

SEQ ID NO: 2252997 - RNA, 19 nt, Homo sapiens
  misc_RNA (1)...(19): siRNA sense strand
aguuugacgcccaggaauu

SEQ ID NO: 2252998 - RNA, 19 nt, Homo sapiens
  misc_RNA (1)...(19): siRNA sense strand
cagucuucacccagcgaaa

SEQ ID NO: 2252999 - RNA, 19 nt, Homo sapiens
  misc_RNA (1)...(19): siRNA sense strand
aggaccuagcagagaggaa

SEQ ID NO: 2253000 - RNA, 19 nt, Homo sapiens
  misc_RNA (1)...(19): siRNA sense strand
gaucaguaccagcggagca

SEQ ID NO: 2253001 - RNA, 19 nt, Homo sapiens
  misc_RNA (1)...(19): siRNA sense strand
gaugaagucucuacaggca

SEQ ID NO: 2253002 - RNA, 19 nt, Homo sapiens
  misc_RNA (1)...(19): siRNA sense strand
aggcagcacuuuccggcaa

SEQ ID NO: 2253003 - RNA, 19 nt, Homo sapiens
  misc_RNA (1)...(19): siRNA sense strand
cauugaaauucuugccacu

SEQ ID NO: 2253004 - RNA, 19 nt, Homo sapiens
  misc_RNA (1)...(19): siRNA sense strand
uggcagaacaagaugucca

SEQ ID NO: 2253005 - RNA, 19 nt, Homo sapiens
  misc_RNA (1)...(19): siRNA sense strand
gaggcggagcucagggaaa

SEQ ID NO: 2253006 - RNA, 19 nt, Homo sapiens
  misc_RNA (1)...(19): siRNA sense strand
gggagagagauguugaaaa

SEQ ID NO: 2253007 - RNA, 19 nt, Homo sapiens
  misc_RNA (1)...(19): siRNA sense strand
agaaagucugaaagaagaa

SEQ ID NO: 2253008 - RNA, 19 nt, Homo sapiens
  misc_RNA (1)...(19): siRNA sense strand
ggcgagugguaguggacuu

SEQ ID NO: 2253009 - RNA, 19 nt, Homo sapiens
  misc_RNA (1)...(19): siRNA sense strand
gugaggcagucuuggaaaa

SEQ ID NO: 2253010 - RNA, 19 nt, Homo sapiens
  misc_RNA (1)...(19): siRNA sense strand
gaaagaagaacuuggcucu

SEQ ID NO: 2253011 - RNA, 19 nt, Homo sapiens
  misc_RNA (1)...(19): siRNA sense strand
caagaaacuaugaagagga

SEQ ID NO: 2253012 - RNA, 19 nt, Homo sapiens
  misc_RNA (1)...(19): siRNA sense strand
aggcggagcagcagcaaca

SEQ ID NO: 2253013 - RNA, 19 nt, Homo sapiens
  misc_RNA (1)...(19): siRNA sense strand
acuaugaagaggaugugaa

SEQ ID NO: 2253014 - RNA, 19 nt, Homo sapiens
  misc_RNA (1)...(19): siRNA sense strand
agaugacuuuaaagagaga

SEQ ID NO: 2253015 - RNA, 19 nt, Homo sapiens
  misc_RNA (1)...(19): siRNA sense strand
cgaucagaauucaguggga

SEQ ID NO: 2253016 - RNA, 19 nt, Homo sapiens
  misc_RNA (1)...(19): siRNA sense strand
ggcucaugcugcagacaga

SEQ ID NO: 2253017 - RNA, 19 nt, Homo sapiens
  misc_RNA (1)...(19): siRNA sense strand
ugaaacgaggccuggagaa

SEQ ID NO: 2253018 - RNA, 19 nt, Homo sapiens
  misc_RNA (1)...(19): siRNA sense strand
acgacauccuugagacgau

SEQ ID NO: 2253019 - RNA, 19 nt, Homo sapiens
  misc_RNA (1)...(19): siRNA sense strand
augaagaggaugugaagcu

SEQ ID NO: 2253020 - RNA, 19 nt, Homo sapiens
  misc_RNA (1)...(19): siRNA sense strand
ggacacaauauuugaugua

SEQ ID NO: 2253021 - RNA, 19 nt, Homo sapiens
  misc_RNA (1)...(19): siRNA sense strand
ggguuuaaugugugccaaa

SEQ ID NO: 2253022 - RNA, 19 nt, Homo sapiens
  misc_RNA (1)...(19): siRNA sense strand
ugauguaccuguugaaaga

SEQ ID NO: 2253023 - RNA, 19 nt, Homo sapiens
  misc_RNA (1)...(19): siRNA sense strand
guuagaugauaaaggccaa

SEQ ID NO: 2253024 - RNA, 19 nt, Homo sapiens
  misc_RNA (1)...(19): siRNA sense strand
gcugauuggcugaagaaaa

SEQ ID NO: 2253025 - RNA, 19 nt, Homo sapiens
  misc_RNA (1)...(19): siRNA sense strand
cagaaauuguagauggguu

SEQ ID NO: 2253026 - RNA, 19 nt, Homo sapiens
  misc_RNA (1)...(19): siRNA sense strand
cagacauuggaguggauua

SEQ ID NO: 2253027 - RNA, 19 nt, Homo sapiens
  misc_RNA (1)...(19): siRNA sense strand
ccaucuagaaggagcuuau

SEQ ID NO: 2253028 - RNA, 19 nt, Homo sapiens
  misc_RNA (1)...(19): siRNA sense strand
aagacaaaaucgaugcaaa

SEQ ID NO: 2253029 - RNA, 19 nt, Homo sapiens
  misc_RNA (1)...(19): siRNA sense strand
cuucguaucuuaaggcaga

SEQ ID NO: 2253030 - RNA, 19 nt, Homo sapiens
  misc_RNA (1)...(19): siRNA sense strand
acagugaauuccaggcuga

SEQ ID NO: 2253031 - RNA, 19 nt, Homo sapiens
  misc_RNA (1)...(19): siRNA sense strand
ccaaaaggcagaagcacuu

SEQ ID NO: 2253032 - RNA, 19 nt, Homo sapiens
  misc_RNA (1)...(19): siRNA sense strand
gcgcuuacuucauggccga

SEQ ID NO: 2253033 - RNA, 19 nt, Homo sapiens
  misc_RNA (1)...(19): siRNA sense strand
agaggguggagaauggaaa

SEQ ID NO: 2253034 - RNA, 19 nt, Homo sapiens
  misc_RNA (1)...(19): siRNA sense strand
ucugguaugaugaggaaga

SEQ ID NO: 2253035 - RNA, 19 nt, Homo sapiens
  misc_RNA (1)...(19): siRNA sense strand
cagcuguaugguugagaga

SEQ ID NO: 2253036 - RNA, 19 nt, Homo sapiens
  misc_RNA (1)...(19): siRNA sense strand
uuggcaagugcaagacaaa

SEQ ID NO: 2253037 - RNA, 19 nt, Homo sapiens
  misc_RNA (1)...(19): siRNA sense strand
cuucacugcauaaagcaaa

SEQ ID NO: 2253038 - RNA, 19 nt, Homo sapiens
  misc_RNA (1)...(19): siRNA sense strand
ucacauggcccgaugagca

SEQ ID NO: 2253039 - RNA, 19 nt, Homo sapiens
  misc_RNA (1)...(19): siRNA sense strand
ggauuaaacaggaggagca

SEQ ID NO: 2253040 - RNA, 19 nt, Homo sapiens
  misc_RNA (1)...(19): siRNA sense strand
gagaagaccuacagccgua

SEQ ID NO: 2253041 - RNA, 19 nt, Homo sapiens
  misc_RNA (1)...(19): siRNA sense strand
ggaucaagcaggaggagca

SEQ ID NO: 2253042 - RNA, 19 nt, Homo sapiens
  misc_RNA (1)...(19): siRNA sense strand
ccgaagacgaguggaagaa

SEQ ID NO: 2253043 - RNA, 19 nt, Homo sapiens
  misc_RNA (1)...(19): siRNA sense strand
gcuacaaggagucgcucaa

SEQ ID NO: 2253044 - RNA, 19 nt, Homo sapiens
  misc_RNA (1)...(19): siRNA sense strand
ucuccgaagacgaguggaa

SEQ ID NO: 2253045 - RNA, 19 nt, Homo sapiens
  misc_RNA (1)...(19): siRNA sense strand
aggauuuggcagacagaga

SEQ ID NO: 2253046 - RNA, 19 nt, Homo sapiens
  misc_RNA (1)...(19): siRNA sense strand
gcaagagcuucauccgcaa

SEQ ID NO: 2253047 - RNA, 19 nt, Homo sapiens
  misc_RNA (1)...(19): siRNA sense strand
ggcuggagaacuuggagaa

SEQ ID NO: 2253048 - RNA, 19 nt, Homo sapiens
  misc_RNA (1)...(19): siRNA sense strand
gcgacucaauggacggaga

SEQ ID NO: 2253049 - RNA, 19 nt, Homo sapiens
  misc_RNA (1)...(19): siRNA sense strand
ccucccaggugaagcguga

SEQ ID NO: 2253050 - RNA, 19 nt, Homo sapiens
  misc_RNA (1)...(19): siRNA sense strand
cucaauggacggagagcuu

SEQ ID NO: 2253051 - RNA, 19 nt, Homo sapiens
  misc_RNA (1)...(19): siRNA sense strand
ugucauggaucaagcagga

SEQ ID NO: 2253052 - RNA, 19 nt, Homo sapiens
  misc_RNA (1)...(19): siRNA sense strand
cggagugcgagaagaccua

SEQ ID NO: 2253053 - RNA, 19 nt, Homo sapiens
  misc_RNA (1)...(19): siRNA sense strand
ggaagaaccuugugugugg

SEQ ID NO: 2253054 - RNA, 19 nt, Homo sapiens
  misc_RNA (1)...(19): siRNA sense strand
ggauuagacucuggcccua

SEQ ID NO: 2253055 - RNA, 19 nt, Homo sapiens
  misc_RNA (1)...(19): siRNA sense strand
caucagugcgugugggauc

SEQ ID NO: 2253056 - RNA, 19 nt, Homo sapiens
  misc_RNA (1)...(19): siRNA sense strand
agaggaagguggaugccca

SEQ ID NO: 2253057 - RNA, 19 nt, Homo sapiens
  misc_RNA (1)...(19): siRNA sense strand
ccgagaagaagcuggccga

SEQ ID NO: 2253058 - RNA, 19 nt, Homo sapiens
  misc_RNA (1)...(19): siRNA sense strand
gaggaaagagccaucccua

SEQ ID NO: 2253059 - RNA, 19 nt, Homo sapiens
  misc_RNA (1)...(19): siRNA sense strand
agcaggaggagcagccaua

SEQ ID NO: 2253060 - RNA, 19 nt, Homo sapiens
  misc_RNA (1)...(19): siRNA sense strand
gcgagugcggcaagagcuu

SEQ ID NO: 2253061 - RNA, 19 nt, Homo sapiens
  misc_RNA (1)...(19): siRNA sense strand
caguggaggcaguggccaa

SEQ ID NO: 2253062 - RNA, 19 nt, Homo sapiens
  misc_RNA (1)...(19): siRNA sense strand
cagcagcaguggaggcagu

SEQ ID NO: 2253063 - RNA, 19 nt, Homo sapiens
  misc_RNA (1)...(19): siRNA sense strand
cccaagaugcugugaccuu

SEQ ID NO: 2253064 - RNA, 19 nt, Homo sapiens
  misc_RNA (1)...(19): siRNA sense strand
agauaaaagcaguggaaaa

SEQ ID NO: 2253065 - RNA, 19 nt, Homo sapiens
  misc_RNA (1)...(19): siRNA sense strand
gggaaguauuauuugcaaa

SEQ ID NO: 2253066 - RNA, 19 nt, Homo sapiens
  misc_RNA (1)...(19): siRNA sense strand
auaaagaagcagagaagau

SEQ ID NO: 2253067 - RNA, 19 nt, Homo sapiens
  misc_RNA (1)...(19): siRNA sense strand
ugaaaguauuugugagcuu

SEQ ID NO: 2253068 - RNA, 19 nt, Homo sapiens
  misc_RNA (1)...(19): siRNA sense strand
gacaugaaguugugggaga

SEQ ID NO: 2253069 - RNA, 19 nt, Homo sapiens
  misc_RNA (1)...(19): siRNA sense strand
agguaacauuguagaagaa

SEQ ID NO: 2253070 - RNA, 19 nt, Homo sapiens
  misc_RNA (1)...(19): siRNA sense strand
caauaaagaagcagagaag

SEQ ID NO: 2253071 - RNA, 19 nt, Homo sapiens
  misc_RNA (1)...(19): siRNA sense strand
uuguauuguuggaggaaaa

SEQ ID NO: 2253072 - RNA, 19 nt, Homo sapiens
  misc_RNA (1)...(19): siRNA sense strand
gcagaaaagaauaugagaa

SEQ ID NO: 2253073 - RNA, 19 nt, Homo sapiens
  misc_RNA (1)...(19): siRNA sense strand
ugggagaaaggaagcauaa

SEQ ID NO: 2253074 - RNA, 19 nt, Homo sapiens
  misc_RNA (1)...(19): siRNA sense strand
augaggaacccaacggaua

SEQ ID NO: 2253075 - RNA, 19 nt, Homo sapiens
  misc_RNA (1)...(19): siRNA sense strand
cauuguuguucuaaagcaa

SEQ ID NO: 2253076 - RNA, 19 nt, Homo sapiens
  misc_RNA (1)...(19): siRNA sense strand
gauacuauugcuaagguaa

SEQ ID NO: 2253077 - RNA, 19 nt, Homo sapiens
  misc_RNA (1)...(19): siRNA sense strand
cacacaaacugccgagaau

SEQ ID NO: 2253078 - RNA, 19 nt, Homo sapiens
  misc_RNA (1)...(19): siRNA sense strand
ggcaagaguuugaucgcuu

SEQ ID NO: 2253079 - RNA, 19 nt, Homo sapiens
  misc_RNA (1)...(19): siRNA sense strand
gauacauaccucaggccaa

SEQ ID NO: 2253080 - RNA, 19 nt, Homo sapiens
  misc_RNA (1)...(19): siRNA sense strand
ggccaaguacuuuagguaa

SEQ ID NO: 2253081 - RNA, 19 nt, Homo sapiens
  misc_RNA (1)...(19): siRNA sense strand
gauaaaagcaguggaaaau

SEQ ID NO: 2253082 - RNA, 19 nt, Homo sapiens
  misc_RNA (1)...(19): siRNA sense strand
caaugagcucugugaagua

SEQ ID NO: 2253083 - RNA, 19 nt, Homo sapiens
  misc_RNA (1)...(19): siRNA sense strand
cucuauuaguccacaauua

SEQ ID NO: 2253084 - RNA, 19 nt, Homo sapiens
  misc_RNA (1)...(19): siRNA sense strand
cugaagaauuguauaccuu

SEQ ID NO: 2253085 - RNA, 19 nt, Homo sapiens
  misc_RNA (1)...(19): siRNA sense strand
agagauguggaaagcaaua

SEQ ID NO: 2253086 - RNA, 19 nt, Homo sapiens
  misc_RNA (1)...(19): siRNA sense strand
ccaaaggugcauacccaaa

SEQ ID NO: 2253087 - RNA, 19 nt, Homo sapiens
  misc_RNA (1)...(19): siRNA sense strand
acaugaaguugugggagaa

SEQ ID NO: 2253088 - RNA, 19 nt, Homo sapiens
  misc_RNA (1)...(19): siRNA sense strand
cagaccacauggagcacaa

SEQ ID NO: 2253089 - RNA, 19 nt, Homo sapiens
  misc_RNA (1)...(19): siRNA sense strand
aaucuuauccaaugaggaa

SEQ ID NO: 2253090 - RNA, 19 nt, Homo sapiens
  misc_RNA (1)...(19): siRNA sense strand
caacaggccaacagaacuu

SEQ ID NO: 2253091 - RNA, 19 nt, Homo sapiens
  misc_RNA (1)...(19): siRNA sense strand
cauaguaaaucucggggaa

SEQ ID NO: 2253092 - RNA, 19 nt, Homo sapiens
  misc_RNA (1)...(19): siRNA sense strand
ucugugaaguaaaccgaaa

SEQ ID NO: 2253093 - RNA, 19 nt, Homo sapiens
  misc_RNA (1)...(19): siRNA sense strand
gggcagaaugggcgcacuu

SEQ ID NO: 2253094 - RNA, 19 nt, Homo sapiens
  misc_RNA (1)...(19): siRNA sense strand
cgagaauacugucaagcca

SEQ ID NO: 2253095 - RNA, 19 nt, Homo sapiens
  misc_RNA (1)...(19): siRNA sense strand
agagaauccugauguccaa

SEQ ID NO: 2253096 - RNA, 19 nt, Homo sapiens
  misc_RNA (1)...(19): siRNA sense strand
agagacaaugguugaaauu

SEQ ID NO: 2253097 - RNA, 19 nt, Homo sapiens
  misc_RNA (1)...(19): siRNA sense strand
cggaaauggagauuguuga

SEQ ID NO: 2253098 - RNA, 19 nt, Homo sapiens
  misc_RNA (1)...(19): siRNA sense strand
cauucaaaggauaaccaaa

SEQ ID NO: 2253099 - RNA, 19 nt, Homo sapiens
  misc_RNA (1)...(19): siRNA sense strand
ccaaaaugccugcaagaga

SEQ ID NO: 2253100 - RNA, 19 nt, Homo sapiens
  misc_RNA (1)...(19): siRNA sense strand
agaacaaauucccugaaga

SEQ ID NO: 2253101 - RNA, 19 nt, Homo sapiens
  misc_RNA (1)...(19): siRNA sense strand
ccuccaagaccaucaguuu

SEQ ID NO: 2253102 - RNA, 19 nt, Homo sapiens
  misc_RNA (1)...(19): siRNA sense strand
agauuauugcccagagaca

SEQ ID NO: 2253103 - RNA, 19 nt, Homo sapiens
  misc_RNA (1)...(19): siRNA sense strand
gcccagagacaaugguuga

SEQ ID NO: 2253104 - RNA, 19 nt, Homo sapiens
  misc_RNA (1)...(19): siRNA sense strand
ggauguagccaguaugagu

SEQ ID NO: 2253105 - RNA, 19 nt, Homo sapiens
  misc_RNA (1)...(19): siRNA sense strand
ggcacaauggugagaccua

SEQ ID NO: 2253106 - RNA, 19 nt, Homo sapiens
  misc_RNA (1)...(19): siRNA sense strand
aggccaaguacuuuaggua

SEQ ID NO: 2253107 - RNA, 19 nt, Homo sapiens
  misc_RNA (1)...(19): siRNA sense strand
uuguagaagaagugacuca

SEQ ID NO: 2253108 - RNA, 19 nt, Homo sapiens
  misc_RNA (1)...(19): siRNA sense strand
gucaaaggauccauguaau

SEQ ID NO: 2253109 - RNA, 19 nt, Homo sapiens
  misc_RNA (1)...(19): siRNA sense strand
gccaaguacuuuagguaac

SEQ ID NO: 2253110 - RNA, 19 nt, Homo sapiens
  misc_RNA (1)...(19): siRNA sense strand
acacagaccacauggagca

SEQ ID NO: 2253111 - RNA, 19 nt, Homo sapiens
  misc_RNA (1)...(19): siRNA sense strand
guaacauuguagaagaagu

SEQ ID NO: 2253112 - RNA, 19 nt, Homo sapiens
  misc_RNA (1)...(19): siRNA sense strand
aauccuaaucccugccaaa

SEQ ID NO: 2253113 - RNA, 19 nt, Homo sapiens
  misc_RNA (1)...(19): siRNA sense strand
ccugacgacuuuugauaaa

SEQ ID NO: 2253114 - RNA, 19 nt, Homo sapiens
  misc_RNA (1)...(19): siRNA sense strand
gugggagaaaggaagcaua

SEQ ID NO: 2253115 - RNA, 19 nt, Homo sapiens
  misc_RNA (1)...(19): siRNA sense strand
gggagaaaggaagcauaaa

SEQ ID NO: 2253116 - RNA, 19 nt, Homo sapiens
  misc_RNA (1)...(19): siRNA sense strand
acaaauucccugaagacca

SEQ ID NO: 2253117 - RNA, 19 nt, Homo sapiens
  misc_RNA (1)...(19): siRNA sense strand
ccucaggccaaguacuuua

SEQ ID NO: 2253118 - RNA, 19 nt, Homo sapiens
  misc_RNA (1)...(19): siRNA sense strand
cuuggcagcuggaugcaaa

SEQ ID NO: 2253119 - RNA, 19 nt, Homo sapiens
  misc_RNA (1)...(19): siRNA sense strand
ccagauuauugcccagaga

SEQ ID NO: 2253120 - RNA, 19 nt, Homo sapiens
  misc_RNA (1)...(19): siRNA sense strand
ccuuuaguauugacugcaa

SEQ ID NO: 2253121 - RNA, 19 nt, Homo sapiens
  misc_RNA (1)...(19): siRNA sense strand
acuucaacauguagggaac

SEQ ID NO: 2253122 - RNA, 19 nt, Homo sapiens
  misc_RNA (1)...(19): siRNA sense strand
aguuuauauugcugugaca

SEQ ID NO: 2253123 - RNA, 19 nt, Homo sapiens
  misc_RNA (1)...(19): siRNA sense strand
caauacacagaguuggcaa

SEQ ID NO: 2253124 - RNA, 19 nt, Homo sapiens
  misc_RNA (1)...(19): siRNA sense strand
cggcagaagaauugcuuga

SEQ ID NO: 2253125 - RNA, 19 nt, Homo sapiens
  misc_RNA (1)...(19): siRNA sense strand
cggaaauccagcagugaga

SEQ ID NO: 2253126 - RNA, 19 nt, Homo sapiens
  misc_RNA (1)...(19): siRNA sense strand
gguacaaugagguugggaa

SEQ ID NO: 2253127 - RNA, 19 nt, Homo sapiens
  misc_RNA (1)...(19): siRNA sense strand
accaaaagcuggaaggauu

SEQ ID NO: 2253128 - RNA, 19 nt, Homo sapiens
  misc_RNA (1)...(19): siRNA sense strand
uggaagaggaggauggcuu

SEQ ID NO: 2253129 - RNA, 19 nt, Homo sapiens
  misc_RNA (1)...(19): siRNA sense strand
gugaaauuccugugggagu

SEQ ID NO: 2253130 - RNA, 19 nt, Homo sapiens
  misc_RNA (1)...(19): siRNA sense strand
ucauaugugacgagggaca

SEQ ID NO: 2253131 - RNA, 19 nt, Homo sapiens
  misc_RNA (1)...(19): siRNA sense strand
ggaccauugaggagaagau

SEQ ID NO: 2253132 - RNA, 19 nt, Homo sapiens
  misc_RNA (1)...(19): siRNA sense strand
aggaugaaauagaccaaaa

SEQ ID NO: 2253133 - RNA, 19 nt, Homo sapiens
  misc_RNA (1)...(19): siRNA sense strand
augauaaguguguggaaga

SEQ ID NO: 2253134 - RNA, 19 nt, Homo sapiens
  misc_RNA (1)...(19): siRNA sense strand
agccaaaccggcagaagaa

SEQ ID NO: 2253135 - RNA, 19 nt, Homo sapiens
  misc_RNA (1)...(19): siRNA sense strand
uggaaggauucaugaacca

SEQ ID NO: 2253136 - RNA, 19 nt, Homo sapiens
  misc_RNA (1)...(19): siRNA sense strand
aagccguagcagugacaaa

SEQ ID NO: 2253137 - RNA, 19 nt, Homo sapiens
  misc_RNA (1)...(19): siRNA sense strand
gagugaaauuccuguggga

SEQ ID NO: 2253138 - RNA, 19 nt, Homo sapiens
  misc_RNA (1)...(19): siRNA sense strand
ccauugaggagaagaucuu

SEQ ID NO: 2253139 - RNA, 19 nt, Homo sapiens
  misc_RNA (1)...(19): siRNA sense strand
gaaugaucugcuugaguau

SEQ ID NO: 2253140 - RNA, 19 nt, Homo sapiens
  misc_RNA (1)...(19): siRNA sense strand
gggcaagaugagugugucu

SEQ ID NO: 2253141 - RNA, 19 nt, Homo sapiens
  misc_RNA (1)...(19): siRNA sense strand
caucagagagagggaguga

SEQ ID NO: 2253142 - RNA, 19 nt, Homo sapiens
  misc_RNA (1)...(19): siRNA sense strand
acuccuaggaaacggaaau

SEQ ID NO: 2253143 - RNA, 19 nt, Homo sapiens
  misc_RNA (1)...(19): siRNA sense strand
guuucugagacaagccaaa

SEQ ID NO: 2253144 - RNA, 19 nt, Homo sapiens
  misc_RNA (1)...(19): siRNA sense strand
gggaaauggcucggaggga

SEQ ID NO: 2253145 - RNA, 19 nt, Homo sapiens
  misc_RNA (1)...(19): siRNA sense strand
gaaaggaaguguuggucug

SEQ ID NO: 2253146 - RNA, 19 nt, Homo sapiens
  misc_RNA (1)...(19): siRNA sense strand
augagaugggccuaggaaa

SEQ ID NO: 2253147 - RNA, 19 nt, Homo sapiens
  misc_RNA (1)...(19): siRNA sense strand
gccagaguccagagugcaa

SEQ ID NO: 2253148 - RNA, 19 nt, Homo sapiens
  misc_RNA (1)...(19): siRNA sense strand
cgauggaggaucuaaggau

SEQ ID NO: 2253149 - RNA, 19 nt, Homo sapiens
  misc_RNA (1)...(19): siRNA sense strand
ccuccugguuacagcucua

SEQ ID NO: 2253150 - RNA, 19 nt, Homo sapiens
  misc_RNA (1)...(19): siRNA sense strand
gggcuaaccggcuggucau

SEQ ID NO: 2253151 - RNA, 19 nt, Homo sapiens
  misc_RNA (1)...(19): siRNA sense strand
cagaaauugacaaggcagu

SEQ ID NO: 2253152 - RNA, 19 nt, Homo sapiens
  misc_RNA (1)...(19): siRNA sense strand
ugagaugggccuaggaaag

SEQ ID NO: 2253153 - RNA, 19 nt, Homo sapiens
  misc_RNA (1)...(19): siRNA sense strand
cccaugaauucaagaagca

SEQ ID NO: 2253154 - RNA, 19 nt, Homo sapiens
  misc_RNA (1)...(19): siRNA sense strand
aagccaaaccggcagaaga

SEQ ID NO: 2253155 - RNA, 19 nt, Homo sapiens
  misc_RNA (1)...(19): siRNA sense strand
cuaugauaaguguguggaa

SEQ ID NO: 2253156 - RNA, 19 nt, Homo sapiens
  misc_RNA (1)...(19): siRNA sense strand
ugugaauagaugccugaua

SEQ ID NO: 2253157 - RNA, 19 nt, Homo sapiens
  misc_RNA (1)...(19): siRNA sense strand
cugugaagauugagcaggu

SEQ ID NO: 2253158 - RNA, 19 nt, Homo sapiens
  misc_RNA (1)...(19): siRNA sense strand
ggucuggcgagauggucaa

SEQ ID NO: 2253159 - RNA, 19 nt, Homo sapiens
  misc_RNA (1)...(19): siRNA sense strand
caugaauucaagaagcauu

SEQ ID NO: 2253160 - RNA, 19 nt, Homo sapiens
  misc_RNA (1)...(19): siRNA sense strand
uuguaaucauccagcucua

SEQ ID NO: 2253161 - RNA, 19 nt, Homo sapiens
  misc_RNA (1)...(19): siRNA sense strand
uggaugaggagcaggaugu

SEQ ID NO: 2253162 - RNA, 19 nt, Homo sapiens
  misc_RNA (1)...(19): siRNA sense strand
aguugaaggagcuguuuau

SEQ ID NO: 2253163 - RNA, 19 nt, Homo sapiens
  misc_RNA (1)...(19): siRNA sense strand
agugcaagccagaaauuga

SEQ ID NO: 2253164 - RNA, 19 nt, Homo sapiens
  misc_RNA (1)...(19): siRNA sense strand
cagacaggcagcuaggaga

SEQ ID NO: 2253165 - RNA, 19 nt, Homo sapiens
  misc_RNA (1)...(19): siRNA sense strand
ucccaauaauggaggguau

SEQ ID NO: 2253166 - RNA, 19 nt, Homo sapiens
  misc_RNA (1)...(19): siRNA sense strand
ccuaugagaaacuggaaau

SEQ ID NO: 2253167 - RNA, 19 nt, Homo sapiens
  misc_RNA (1)...(19): siRNA sense strand
cuggagaggaugaaggaga

SEQ ID NO: 2253168 - RNA, 19 nt, Homo sapiens
  misc_RNA (1)...(19): siRNA sense strand
aagaauuuggcaacagaaa

SEQ ID NO: 2253169 - RNA, 19 nt, Homo sapiens
  misc_RNA (1)...(19): siRNA sense strand
aagaaaagacauggaguua

SEQ ID NO: 2253170 - RNA, 19 nt, Homo sapiens
  misc_RNA (1)...(19): siRNA sense strand
cuacuguuucucaggguaa

SEQ ID NO: 2253171 - RNA, 19 nt, Homo sapiens
  misc_RNA (1)...(19): siRNA sense strand
cugcaauccuucugaacca

SEQ ID NO: 2253172 - RNA, 19 nt, Homo sapiens
  misc_RNA (1)...(19): siRNA sense strand
acuuaaugucagaaaccaa

SEQ ID NO: 2253173 - RNA, 19 nt, Homo sapiens
  misc_RNA (1)...(19): siRNA sense strand
gguccaaaugccaagaaaa

SEQ ID NO: 2253174 - RNA, 19 nt, Homo sapiens
  misc_RNA (1)...(19): siRNA sense strand
agggaaacggguaguuaau

SEQ ID NO: 2253175 - RNA, 19 nt, Homo sapiens
  misc_RNA (1)...(19): siRNA sense strand
gcaguuuacaggagaucau

SEQ ID NO: 2253176 - RNA, 19 nt, Homo sapiens
  misc_RNA (1)...(19): siRNA sense strand
cagaacaagcccugaagca

SEQ ID NO: 2253177 - RNA, 19 nt, Homo sapiens
  misc_RNA (1)...(19): siRNA sense strand
caagaaaagacauggaguu

SEQ ID NO: 2253178 - RNA, 19 nt, Homo sapiens
  misc_RNA (1)...(19): siRNA sense strand
acugguaguaugaacguua

SEQ ID NO: 2253179 - RNA, 19 nt, Homo sapiens
  misc_RNA (1)...(19): siRNA sense strand
agaacaagcccugaagcaa

SEQ ID NO: 2253180 - RNA, 19 nt, Homo sapiens
  misc_RNA (1)...(19): siRNA sense strand
cgauaugaggugcugaaaa

SEQ ID NO: 2253181 - RNA, 19 nt, Homo sapiens
  misc_RNA (1)...(19): siRNA sense strand
uggauggaggugagaugaa

SEQ ID NO: 2253182 - RNA, 19 nt, Homo sapiens
  misc_RNA (1)...(19): siRNA sense strand
cagaaaucaucuuaggaag

SEQ ID NO: 2253183 - RNA, 19 nt, Homo sapiens
  misc_RNA (1)...(19): siRNA sense strand
gugagaugaagguagaaca

SEQ ID NO: 2253184 - RNA, 19 nt, Homo sapiens
  misc_RNA (1)...(19): siRNA sense strand
cuaugagaaacuggaaaua

SEQ ID NO: 2253185 - RNA, 19 nt, Homo sapiens
  misc_RNA (1)...(19): siRNA sense strand
ugauggagcuucuagggau

SEQ ID NO: 2253186 - RNA, 19 nt, Homo sapiens
  misc_RNA (1)...(19): siRNA sense strand
gccuaugagaaacuggaaa

SEQ ID NO: 2253187 - RNA, 19 nt, Homo sapiens
  misc_RNA (1)...(19): siRNA sense strand
uggccagggucuaugauca

SEQ ID NO: 2253188 - RNA, 19 nt, Homo sapiens
  misc_RNA (1)...(19): siRNA sense strand
agguccaaaugccaagaaa

SEQ ID NO: 2253189 - RNA, 19 nt, Homo sapiens
  misc_RNA (1)...(19): siRNA sense strand
cccuaaagauggugcggaa

SEQ ID NO: 2253190 - RNA, 19 nt, Homo sapiens
  misc_RNA (1)...(19): siRNA sense strand
ugauugaacuguugggcau

SEQ ID NO: 2253191 - RNA, 19 nt, Homo sapiens
  misc_RNA (1)...(19): siRNA sense strand
cuaagaagcgccagggcau

SEQ ID NO: 2253192 - RNA, 19 nt, Homo sapiens
  misc_RNA (1)...(19): siRNA sense strand
cggaagcaggacaaggaua

SEQ ID NO: 2253193 - RNA, 19 nt, Homo sapiens
  misc_RNA (1)...(19): siRNA sense strand
ugacagaugccaaugggaa

SEQ ID NO: 2253194 - RNA, 19 nt, Homo sapiens
  misc_RNA (1)...(19): siRNA sense strand
gcuuccaaacugaggacua

SEQ ID NO: 2253195 - RNA, 19 nt, Homo sapiens
  misc_RNA (1)...(19): siRNA sense strand
cagcaggguagaagcggua

SEQ ID NO: 2253196 - RNA, 19 nt, Homo sapiens
  misc_RNA (1)...(19): siRNA sense strand
gcuuugggcagguggucaa

SEQ ID NO: 2253197 - RNA, 19 nt, Homo sapiens
  misc_RNA (1)...(19): siRNA sense strand
uguuaaagcagcaggguag

SEQ ID NO: 2253198 - RNA, 19 nt, Homo sapiens
  misc_RNA (1)...(19): siRNA sense strand
ggcagguggucaaggccua

SEQ ID NO: 2253199 - RNA, 19 nt, Homo sapiens
  misc_RNA (1)...(19): siRNA sense strand
ccucaaggucauugggaag

SEQ ID NO: 2253200 - RNA, 19 nt, Homo sapiens
  misc_RNA (1)...(19): siRNA sense strand
gcuuacaacagugggcaaa

SEQ ID NO: 2253201 - RNA, 19 nt, Homo sapiens
  misc_RNA (1)...(19): siRNA sense strand
aggacaaggauaacacaau

SEQ ID NO: 2253202 - RNA, 19 nt, Homo sapiens
  misc_RNA (1)...(19): siRNA sense strand
accuuaagcccgagaacau

SEQ ID NO: 2253203 - RNA, 19 nt, Homo sapiens
  misc_RNA (1)...(19): siRNA sense strand
gugaaaaggauaacugaga

SEQ ID NO: 2253204 - RNA, 19 nt, Homo sapiens
  misc_RNA (1)...(19): siRNA sense strand
gggaauauucagcagagga

SEQ ID NO: 2253205 - RNA, 19 nt, Homo sapiens
  misc_RNA (1)...(19): siRNA sense strand
ggcaagcagcggaggagau

SEQ ID NO: 2253206 - RNA, 19 nt, Homo sapiens
  misc_RNA (1)...(19): siRNA sense strand
cugaggaggcgguugccaa

SEQ ID NO: 2253207 - RNA, 19 nt, Homo sapiens
  misc_RNA (1)...(19): siRNA sense strand
cugaacaagcaaugaagca

SEQ ID NO: 2253208 - RNA, 19 nt, Homo sapiens
  misc_RNA (1)...(19): siRNA sense strand
gcuaagaagcgccagggca

SEQ ID NO: 2253209 - RNA, 19 nt, Homo sapiens
  misc_RNA (1)...(19): siRNA sense strand
uggucaaggccuacgauca

SEQ ID NO: 2253210 - RNA, 19 nt, Homo sapiens
  misc_RNA (1)...(19): siRNA sense strand
uugugagcuccaaggguua

SEQ ID NO: 2253211 - RNA, 19 nt, Homo sapiens
  misc_RNA (1)...(19): siRNA sense strand
ggcuuacaacagugggcaa

SEQ ID NO: 2253212 - RNA, 19 nt, Homo sapiens
  misc_RNA (1)...(19): siRNA sense strand
ggggagaaaacgucaguga

SEQ ID NO: 2253213 - RNA, 19 nt, Homo sapiens
  misc_RNA (1)...(19): siRNA sense strand
ugaacaagcaaugaagcaa

SEQ ID NO: 2253214 - RNA, 19 nt, Homo sapiens
  misc_RNA (1)...(19): siRNA sense strand
aggauaacacaaugaaugu

SEQ ID NO: 2253215 - RNA, 19 nt, Homo sapiens
  misc_RNA (1)...(19): siRNA sense strand
cccuaaagauggugcggaa

SEQ ID NO: 2253216 - RNA, 19 nt, Homo sapiens
  misc_RNA (1)...(19): siRNA sense strand
ugauugaacuguugggcau

SEQ ID NO: 2253217 - RNA, 19 nt, Homo sapiens
  misc_RNA (1)...(19): siRNA sense strand
cuaagaagcgccagggcau

SEQ ID NO: 2253218 - RNA, 19 nt, Homo sapiens
  misc_RNA (1)...(19): siRNA sense strand
cggaagcaggacaaggaua

SEQ ID NO: 2253219 - RNA, 19 nt, Homo sapiens
  misc_RNA (1)...(19): siRNA sense strand
ugacagaugccaaugggaa

SEQ ID NO: 2253220 - RNA, 19 nt, Homo sapiens
  misc_RNA (1)...(19): siRNA sense strand
gcuuccaaacugaggacua

SEQ ID NO: 2253221 - RNA, 19 nt, Homo sapiens
  misc_RNA (1)...(19): siRNA sense strand
cagcaggguagaagcggua

SEQ ID NO: 2253222 - RNA, 19 nt, Homo sapiens
  misc_RNA (1)...(19): siRNA sense strand
gcuuugggcagguggucaa

SEQ ID NO: 2253223 - RNA, 19 nt, Homo sapiens
  misc_RNA (1)...(19): siRNA sense strand
uguuaaagcagcaggguag

SEQ ID NO: 2253224 - RNA, 19 nt, Homo sapiens
  misc_RNA (1)...(19): siRNA sense strand
ggcagguggucaaggccua

SEQ ID NO: 2253225 - RNA, 19 nt, Homo sapiens
  misc_RNA (1)...(19): siRNA sense strand
ccucaaggucauugggaag

SEQ ID NO: 2253226 - RNA, 19 nt, Homo sapiens
  misc_RNA (1)...(19): siRNA sense strand
gcuuacaacagugggcaaa

SEQ ID NO: 2253227 - RNA, 19 nt, Homo sapiens
  misc_RNA (1)...(19): siRNA sense strand
aggacaaggauaacacaau

SEQ ID NO: 2253228 - RNA, 19 nt, Homo sapiens
  misc_RNA (1)...(19): siRNA sense strand
accuuaagcccgagaacau

SEQ ID NO: 2253229 - RNA, 19 nt, Homo sapiens
  misc_RNA (1)...(19): siRNA sense strand
gugaaaaggauaacugaga

SEQ ID NO: 2253230 - RNA, 19 nt, Homo sapiens
  misc_RNA (1)...(19): siRNA sense strand
gggaauauucagcagagga

SEQ ID NO: 2253231 - RNA, 19 nt, Homo sapiens
  misc_RNA (1)...(19): siRNA sense strand
ggcaagcagcggaggagau

SEQ ID NO: 2253232 - RNA, 19 nt, Homo sapiens
  misc_RNA (1)...(19): siRNA sense strand
cugaggaggcgguugccaa

SEQ ID NO: 2253233 - RNA, 19 nt, Homo sapiens
  misc_RNA (1)...(19): siRNA sense strand
cugaacaagcaaugaagca

SEQ ID NO: 2253234 - RNA, 19 nt, Homo sapiens
  misc_RNA (1)...(19): siRNA sense strand
gcuaagaagcgccagggca

SEQ ID NO: 2253235 - RNA, 19 nt, Homo sapiens
  misc_RNA (1)...(19): siRNA sense strand
uggucaaggccuacgauca

SEQ ID NO: 2253236 - RNA, 19 nt, Homo sapiens
  misc_RNA (1)...(19): siRNA sense strand
caguaagcacacaaugaau

SEQ ID NO: 2253237 - RNA, 19 nt, Homo sapiens
  misc_RNA (1)...(19): siRNA sense strand
uugugagcuccaaggguua

SEQ ID NO: 2253238 - RNA, 19 nt, Homo sapiens
  misc_RNA (1)...(19): siRNA sense strand
ggcuuacaacagugggcaa

SEQ ID NO: 2253239 - RNA, 19 nt, Homo sapiens
  misc_RNA (1)...(19): siRNA sense strand
ggggagaaaacgucaguga

SEQ ID NO: 2253240 - RNA, 19 nt, Homo sapiens
  misc_RNA (1)...(19): siRNA sense strand
ugaacaagcaaugaagcaa

SEQ ID NO: 2253241 - RNA, 19 nt, Homo sapiens
  misc_RNA (1)...(19): siRNA sense strand
aggauaacacaaugaaugu

SEQ ID NO: 2253242 - RNA, 19 nt, Homo sapiens
  misc_RNA (1)...(19): siRNA sense strand
ggauagaagaaggugguau

SEQ ID NO: 2253243 - RNA, 19 nt, Homo sapiens
  misc_RNA (1)...(19): siRNA sense strand
ugcaacaaucagucagaaa

SEQ ID NO: 2253244 - RNA, 19 nt, Homo sapiens
  misc_RNA (1)...(19): siRNA sense strand
acaaaauccgagaacaaaa

SEQ ID NO: 2253245 - RNA, 19 nt, Homo sapiens
  misc_RNA (1)...(19): siRNA sense strand
caacaaucagucagaaaau

SEQ ID NO: 2253246 - RNA, 19 nt, Homo sapiens
  misc_RNA (1)...(19): siRNA sense strand
gccaagaagaagggcggaa

SEQ ID NO: 2253247 - RNA, 19 nt, Homo sapiens
  misc_RNA (1)...(19): siRNA sense strand
gcuuagaaagacaaaacua

SEQ ID NO: 2253248 - RNA, 19 nt, Homo sapiens
  misc_RNA (1)...(19): siRNA sense strand
ccgagaacaaaaugaagaa

SEQ ID NO: 2253249 - RNA, 19 nt, Homo sapiens
  misc_RNA (1)...(19): siRNA sense strand
cuauuauaaaccagaggau

SEQ ID NO: 2253250 - RNA, 19 nt, Homo sapiens
  misc_RNA (1)...(19): siRNA sense strand
uggacaagacugaagacaa

SEQ ID NO: 2253251 - RNA, 19 nt, Homo sapiens
  misc_RNA (1)...(19): siRNA sense strand
ugaagaagcugaaacccaa

SEQ ID NO: 2253252 - RNA, 19 nt, Homo sapiens
  misc_RNA (1)...(19): siRNA sense strand
gccugaagaacaaggacaa

SEQ ID NO: 2253253 - RNA, 19 nt, Homo sapiens
  misc_RNA (1)...(19): siRNA sense strand
agaacaaggacaagcgcau

SEQ ID NO: 2253254 - RNA, 19 nt, Homo sapiens
  misc_RNA (1)...(19): siRNA sense strand
ggauuacgacauuggaaaa

SEQ ID NO: 2253255 - RNA, 19 nt, Homo sapiens
  misc_RNA (1)...(19): siRNA sense strand
cugaagaagcugaaaccca

SEQ ID NO: 2253256 - RNA, 19 nt, Homo sapiens
  misc_RNA (1)...(19): siRNA sense strand
gcaccaucaccaaggccaa

SEQ ID NO: 2253257 - RNA, 19 nt, Homo sapiens
  misc_RNA (1)...(19): siRNA sense strand
ccauggacgccaacggcua

SEQ ID NO: 2253258 - RNA, 19 nt, Homo sapiens
  misc_RNA (1)...(19): siRNA sense strand
gccaagggccugaagccaa

SEQ ID NO: 2253259 - RNA, 19 nt, Homo sapiens
  misc_RNA (1)...(19): siRNA sense strand
cugugugugacgaggacaa

SEQ ID NO: 2253260 - RNA, 19 nt, Homo sapiens
  misc_RNA (1)...(19): siRNA sense strand
gguuugacugccugaagaa

SEQ ID NO: 2253261 - RNA, 19 nt, Homo sapiens
  misc_RNA (1)...(19): siRNA sense strand
augaagacaugauccgcaa

SEQ ID NO: 2253262 - RNA, 19 nt, Homo sapiens
  misc_RNA (1)...(19): siRNA sense strand
acgacgaggauguggacca

SEQ ID NO: 2253263 - RNA, 19 nt, Homo sapiens
  misc_RNA (1)...(19): siRNA sense strand
ccaggagccaguaaggcaa

SEQ ID NO: 2253264 - RNA, 19 nt, Homo sapiens
  misc_RNA (1)...(19): siRNA sense strand
aggacaaauuccggcacaa

SEQ ID NO: 2253265 - RNA, 19 nt, Homo sapiens
  misc_RNA (1)...(19): siRNA sense strand
gaggaguucuguuacgaga

SEQ ID NO: 2253266 - RNA, 19 nt, Homo sapiens
  misc_RNA (1)...(19): siRNA sense strand
ccaagaagucccuggaggu

SEQ ID NO: 2253267 - RNA, 19 nt, Homo sapiens
  misc_RNA (1)...(19): siRNA sense strand
cggaguuuaaugaggaguu

SEQ ID NO: 2253268 - RNA, 19 nt, Homo sapiens
  misc_RNA (1)...(19): siRNA sense strand
ccacauggaacgagacccu

SEQ ID NO: 2253269 - RNA, 19 nt, Homo sapiens
  misc_RNA (1)...(19): siRNA sense strand
ggaucacagaugaagacau

SEQ ID NO: 2253270 - RNA, 19 nt, Homo sapiens
  misc_RNA (1)...(19): siRNA sense strand
cuacgggaucacagaugaa

SEQ ID NO: 2253271 - RNA, 19 nt, Homo sapiens
  misc_RNA (1)...(19): siRNA sense strand
ccagauguggacaagaaau

SEQ ID NO: 2253272 - RNA, 19 nt, Homo sapiens
  misc_RNA (1)...(19): siRNA sense strand
acgaagacucagaggaaca

SEQ ID NO: 2253273 - RNA, 19 nt, Homo sapiens
  misc_RNA (1)...(19): siRNA sense strand
cuguaaggccaauaagcua

SEQ ID NO: 2253274 - RNA, 19 nt, Homo sapiens
  misc_RNA (1)...(19): siRNA sense strand
ccaucaacauccaggagca

SEQ ID NO: 2253275 - RNA, 19 nt, Homo sapiens
  misc_RNA (1)...(19): siRNA sense strand
gggacuaugacauuggcaa

SEQ ID NO: 2253276 - RNA, 19 nt, Homo sapiens
  misc_RNA (1)...(19): siRNA sense strand
ccgucugugaugaggacaa

SEQ ID NO: 2253277 - RNA, 19 nt, Homo sapiens
  misc_RNA (1)...(19): siRNA sense strand
uaggcaagcuggaguuuga

SEQ ID NO: 2253278 - RNA, 19 nt, Homo sapiens
  misc_RNA (1)...(19): siRNA sense strand
aggaagaagaggaggaaga

SEQ ID NO: 2253279 - RNA, 19 nt, Homo sapiens
  misc_RNA (1)...(19): siRNA sense strand
acgagaagagcuaggguaa

SEQ ID NO: 2253280 - RNA, 19 nt, Homo sapiens
  misc_RNA (1)...(19): siRNA sense strand
gagaaagggaagaagaaaa

SEQ ID NO: 2253281 - RNA, 19 nt, Homo sapiens
  misc_RNA (1)...(19): siRNA sense strand
gagagaagcuugaggaccu

SEQ ID NO: 2253282 - RNA, 19 nt, Homo sapiens
  misc_RNA (1)...(19): siRNA sense strand
cugagaaagggaagaagaa

SEQ ID NO: 2253283 - RNA, 19 nt, Homo sapiens
  misc_RNA (1)...(19): siRNA sense strand
ucaagauggccgaggaaga

SEQ ID NO: 2253284 - RNA, 19 nt, Homo sapiens
  misc_RNA (1)...(19): siRNA sense strand
ccacucagcuccaggguga

SEQ ID NO: 2253285 - RNA, 19 nt, Homo sapiens
  misc_RNA (1)...(19): siRNA sense strand
gguuauacaaacaagggua

SEQ ID NO: 2253286 - RNA, 19 nt, Homo sapiens
  misc_RNA (1)...(19): siRNA sense strand
caggaagaagcgugaggaa

SEQ ID NO: 2253287 - RNA, 19 nt, Homo sapiens
  misc_RNA (1)...(19): siRNA sense strand
ugacaggacaggaggagau

SEQ ID NO: 2253288 - RNA, 19 nt, Homo sapiens
  misc_RNA (1)...(19): siRNA sense strand
uggcuaagcgggagcgaga

SEQ ID NO: 2253289 - RNA, 19 nt, Homo sapiens
  misc_RNA (1)...(19): siRNA sense strand
ccacagugccugagaucca

SEQ ID NO: 2253290 - RNA, 19 nt, Homo sapiens
  misc_RNA (1)...(19): siRNA sense strand
gggaacggacagagcguga

SEQ ID NO: 2253291 - RNA, 19 nt, Homo sapiens
  misc_RNA (1)...(19): siRNA sense strand
cuuauagguuacuggaaga

SEQ ID NO: 2253292 - RNA, 19 nt, Homo sapiens
  misc_RNA (1)...(19): siRNA sense strand
caucauugaaggcgagaca

SEQ ID NO: 2253293 - RNA, 19 nt, Homo sapiens
  misc_RNA (1)...(19): siRNA sense strand
cacgaaaggcagugguaga

SEQ ID NO: 2253294 - RNA, 19 nt, Homo sapiens
  misc_RNA (1)...(19): siRNA sense strand
gugaggaagaagaggagga

SEQ ID NO: 2253295 - RNA, 19 nt, Homo sapiens
  misc_RNA (1)...(19): siRNA sense strand
aguaaacagcagacagaga

SEQ ID NO: 2253296 - RNA, 19 nt, Homo sapiens
  misc_RNA (1)...(19): siRNA sense strand
gggugugaagcuugggaau

SEQ ID NO: 2253297 - RNA, 19 nt, Homo sapiens
  misc_RNA (1)...(19): siRNA sense strand
gggaacagcuggaagggcu

SEQ ID NO: 2253298 - RNA, 19 nt, Homo sapiens
  misc_RNA (1)...(19): siRNA sense strand
gaggaagaccggaaggcca

SEQ ID NO: 2253299 - RNA, 19 nt, Homo sapiens
  misc_RNA (1)...(19): siRNA sense strand
caggacaggaggagauuga

SEQ ID NO: 2253300 - RNA, 19 nt, Homo sapiens
  misc_RNA (1)...(19): siRNA sense strand
ccugagauccagaggacca

SEQ ID NO: 2253301 - RNA, 19 nt, Homo sapiens
  misc_RNA (1)...(19): siRNA sense strand
caaaacacgagaagagcua

SEQ ID NO: 2253302 - RNA, 19 nt, Homo sapiens
  misc_RNA (1)...(19): siRNA sense strand
ugagaaagggaagaagaaa

SEQ ID NO: 2253303 - RNA, 19 nt, Homo sapiens
  misc_RNA (1)...(19): siRNA sense strand
gccgagaguaccuggcuaa

SEQ ID NO: 2253304 - RNA, 19 nt, Homo sapiens
  misc_RNA (1)...(19): siRNA sense strand
gcuaagaaaaugcccaaaa

SEQ ID NO: 2253305 - RNA, 19 nt, Homo sapiens
  misc_RNA (1)...(19): siRNA sense strand
gcuaagcgggagcgagaga

SEQ ID NO: 2253306 - RNA, 19 nt, Homo sapiens
  misc_RNA (1)...(19): siRNA sense strand
aggagaagcuggaggccac

SEQ ID NO: 2253307 - RNA, 19 nt, Homo sapiens
  misc_RNA (1)...(19): siRNA sense strand
uggaggaggaggagaccau

SEQ ID NO: 2253308 - RNA, 19 nt, Homo sapiens
  misc_RNA (1)...(19): siRNA sense strand
ggccaaggagcuagaagau

SEQ ID NO: 2253309 - RNA, 19 nt, Homo sapiens
  misc_RNA (1)...(19): siRNA sense strand
cagagaagccagagucgga

SEQ ID NO: 2253310 - RNA, 19 nt, Homo sapiens
  misc_RNA (1)...(19): siRNA sense strand
acaaacaaggguaugaaga

SEQ ID NO: 2253311 - RNA, 19 nt, Homo sapiens
  misc_RNA (1)...(19): siRNA sense strand
agccagagucggaagauga

SEQ ID NO: 2253312 - RNA, 19 nt, Homo sapiens
  misc_RNA (1)...(19): siRNA sense strand
aggccaaggagcuagaaga

SEQ ID NO: 2253313 - RNA, 19 nt, Homo sapiens
  misc_RNA (1)...(19): siRNA sense strand
aggcuuaugaagaggcuca

SEQ ID NO: 2253314 - RNA, 19 nt, Homo sapiens
  misc_RNA (1)...(19): siRNA sense strand
aggaagaccggaaggccau

SEQ ID NO: 2253315 - RNA, 19 nt, Homo sapiens
  misc_RNA (1)...(19): siRNA sense strand
cgagacaggcucagggaag

SEQ ID NO: 2253316 - RNA, 19 nt, Homo sapiens
  misc_RNA (1)...(19): siRNA sense strand
cgaaaggcagugguagaaa

SEQ ID NO: 2253317 - RNA, 19 nt, Homo sapiens
  misc_RNA (1)...(19): siRNA sense strand
cuguggaucuaguggagga

SEQ ID NO: 2253318 - RNA, 19 nt, Homo sapiens
  misc_RNA (1)...(19): siRNA sense strand
gcacagugaaacagcagca

SEQ ID NO: 2253319 - RNA, 19 nt, Homo sapiens
  misc_RNA (1)...(19): siRNA sense strand
gaagagagcagugaggaga

SEQ ID NO: 2253320 - RNA, 19 nt, Homo sapiens
  misc_RNA (1)...(19): siRNA sense strand
ucugagaaagggaagaaga

SEQ ID NO: 2253321 - RNA, 19 nt, Homo sapiens
  misc_RNA (1)...(19): siRNA sense strand
cggucagacaagaaggcuu

SEQ ID NO: 2253322 - RNA, 19 nt, Homo sapiens
  misc_RNA (1)...(19): siRNA sense strand
cuacaugacagaugggaug

SEQ ID NO: 2253323 - RNA, 19 nt, Homo sapiens
  misc_RNA (1)...(19): siRNA sense strand
gcagcaaggccucagccaa

SEQ ID NO: 2253324 - RNA, 19 nt, Homo sapiens
  misc_RNA (1)...(19): siRNA sense strand
agcacgagcuugaggaaac

SEQ ID NO: 2253325 - RNA, 19 nt, Homo sapiens
  misc_RNA (1)...(19): siRNA sense strand
caaggaaacccgaggacag

SEQ ID NO: 2253326 - RNA, 19 nt, Homo sapiens
  misc_RNA (1)...(19): siRNA sense strand
gcuacaugacagaugggau

SEQ ID NO: 2253327 - RNA, 19 nt, Homo sapiens
  misc_RNA (1)...(19): siRNA sense strand
gcccugagacucuggaaca

SEQ ID NO: 2253328 - RNA, 19 nt, Homo sapiens
  misc_RNA (1)...(19): siRNA sense strand
agucggaagaugaguggga

SEQ ID NO: 2253329 - RNA, 19 nt, Homo sapiens
  misc_RNA (1)...(19): siRNA sense strand
ggaucuaguggaggaggaa

SEQ ID NO: 2253330 - RNA, 19 nt, Homo sapiens
  misc_RNA (1)...(19): siRNA sense strand
uugaggaggguuauacaaa

SEQ ID NO: 2253331 - RNA, 19 nt, Homo sapiens
  misc_RNA (1)...(19): siRNA sense strand
ggaagacagugaagagagc

SEQ ID NO: 2253332 - RNA, 19 nt, Homo sapiens
  misc_RNA (1)...(19): siRNA sense strand
uggaacggucagacaagaa

SEQ ID NO: 2253333 - RNA, 19 nt, Homo sapiens
  misc_RNA (1)...(19): siRNA sense strand
ccuaucagcacgagcuuga

SEQ ID NO: 2253334 - RNA, 19 nt, Homo sapiens
  misc_RNA (1)...(19): siRNA sense strand
auuggagacaagagagaaa

SEQ ID NO: 2253335 - RNA, 19 nt, Homo sapiens
  misc_RNA (1)...(19): siRNA sense strand
ggagaguggugcugggaug

SEQ ID NO: 2253336 - RNA, 19 nt, Homo sapiens
  misc_RNA (1)...(19): siRNA sense strand
gcacugaccuggaugccau

SEQ ID NO: 2253337 - RNA, 19 nt, Homo sapiens
  misc_RNA (1)...(19): siRNA sense strand
aguugaaggaugauagcuu

SEQ ID NO: 2253338 - RNA, 19 nt, Homo sapiens
  misc_RNA (1)...(19): siRNA sense strand
ucauuggagacaagagaga

SEQ ID NO: 2253339 - RNA, 19 nt, Homo sapiens
  misc_RNA (1)...(19): siRNA sense strand
ccucauuggagacaagaga

SEQ ID NO: 2253340 - RNA, 19 nt, Homo sapiens
  misc_RNA (1)...(19): siRNA sense strand
ucgacaagaugcaagagga

SEQ ID NO: 2253341 - RNA, 19 nt, Homo sapiens
  misc_RNA (1)...(19): siRNA sense strand
ggaaagaucccauugcugu

SEQ ID NO: 2253342 - RNA, 19 nt, Homo sapiens
  misc_RNA (1)...(19): siRNA sense strand
caagagaaguagaaggcaa

SEQ ID NO: 2253343 - RNA, 19 nt, Homo sapiens
  misc_RNA (1)...(19): siRNA sense strand
augaagaguuagaggaaaa

SEQ ID NO: 2253344 - RNA, 19 nt, Homo sapiens
  misc_RNA (1)...(19): siRNA sense strand
gaacagagcaagaggagga

SEQ ID NO: 2253345 - RNA, 19 nt, Homo sapiens
  misc_RNA (1)...(19): siRNA sense strand
aggcaaaacuccagaagaa

SEQ ID NO: 2253346 - RNA, 19 nt, Homo sapiens
  misc_RNA (1)...(19): siRNA sense strand
ggguaaacugagagauuau

SEQ ID NO: 2253347 - RNA, 19 nt, Homo sapiens
  misc_RNA (1)...(19): siRNA sense strand
gauuauugcauguggagaa

SEQ ID NO: 2253348 - RNA, 19 nt, Homo sapiens
  misc_RNA (1)...(19): siRNA sense strand
ugacaaggguauuggacau

SEQ ID NO: 2253349 - RNA, 19 nt, Homo sapiens
  misc_RNA (1)...(19): siRNA sense strand
acgccgagauggaggaaau

SEQ ID NO: 2253350 - RNA, 19 nt, Homo sapiens
  misc_RNA (1)...(19): siRNA sense strand
augcaaagggaaugguaua

SEQ ID NO: 2253351 - RNA, 19 nt, Homo sapiens
  misc_RNA (1)...(19): siRNA sense strand
gcgagaauucaaagaagaa

SEQ ID NO: 2253352 - RNA, 19 nt, Homo sapiens
  misc_RNA (1)...(19): siRNA sense strand
aagagaaguagaaggcaaa

SEQ ID NO: 2253353 - RNA, 19 nt, Homo sapiens
  misc_RNA (1)...(19): siRNA sense strand
ugucagaaauagugaggga

SEQ ID NO: 2253354 - RNA, 19 nt, Homo sapiens
  misc_RNA (1)...(19): siRNA sense strand
ucagaaauagugagggaau

SEQ ID NO: 2253355 - RNA, 19 nt, Homo sapiens
  misc_RNA (1)...(19): siRNA sense strand
cggauauuaaugaaggaua

SEQ ID NO: 2253356 - RNA, 19 nt, Homo sapiens
  misc_RNA (1)...(19): siRNA sense strand
ugaugaagaguuagaggaa

SEQ ID NO: 2253357 - RNA, 19 nt, Homo sapiens
  misc_RNA (1)...(19): siRNA sense strand
cuccaaagaaggaaguaaa

SEQ ID NO: 2253358 - RNA, 19 nt, Homo sapiens
  misc_RNA (1)...(19): siRNA sense strand
cugcagagaugaaugaaaa

SEQ ID NO: 2253359 - RNA, 19 nt, Homo sapiens
  misc_RNA (1)...(19): siRNA sense strand
acauggaacuagaagaaaa

SEQ ID NO: 2253360 - RNA, 19 nt, Homo sapiens
  misc_RNA (1)...(19): siRNA sense strand
cagaaauagugagggaauu

SEQ ID NO: 2253361 - RNA, 19 nt, Homo sapiens
  misc_RNA (1)...(19): siRNA sense strand
caccuaaacgagaaagaaa

SEQ ID NO: 2253362 - RNA, 19 nt, Homo sapiens
  misc_RNA (1)...(19): siRNA sense strand
uccuaaugcaguugagaaa

SEQ ID NO: 2253363 - RNA, 19 nt, Homo sapiens
  misc_RNA (1)...(19): siRNA sense strand
augaagauaucgaugguau

SEQ ID NO: 2253364 - RNA, 19 nt, Homo sapiens
  misc_RNA (1)...(19): siRNA sense strand
ccaauuggaauaagagaga

SEQ ID NO: 2253365 - RNA, 19 nt, Homo sapiens
  misc_RNA (1)...(19): siRNA sense strand
ugguauacucggauauuaa

SEQ ID NO: 2253366 - RNA, 19 nt, Homo sapiens
  misc_RNA (1)...(19): siRNA sense strand
cugaagaagaagaucguuu

SEQ ID NO: 2253367 - RNA, 19 nt, Homo sapiens
  misc_RNA (1)...(19): siRNA sense strand
augaaaugggccuaggaaa

SEQ ID NO: 2253368 - RNA, 19 nt, Homo sapiens
  misc_RNA (1)...(19): siRNA sense strand
uuaucagguccgaggauua

SEQ ID NO: 2253369 - RNA, 19 nt, Homo sapiens
  misc_RNA (1)...(19): siRNA sense strand
gagcaacagcagcaacaaa

SEQ ID NO: 2253370 - RNA, 19 nt, Homo sapiens
  misc_RNA (1)...(19): siRNA sense strand
cuggaaagcaaaaggaaau

SEQ ID NO: 2253371 - RNA, 19 nt, Homo sapiens
  misc_RNA (1)...(19): siRNA sense strand
agaaagaauaguagaacgu

SEQ ID NO: 2253372 - RNA, 19 nt, Homo sapiens
  misc_RNA (1)...(19): siRNA sense strand
acacaaagauuggacggua

SEQ ID NO: 2253373 - RNA, 19 nt, Homo sapiens
  misc_RNA (1)...(19): siRNA sense strand
ccaccuuauacaacagaua

SEQ ID NO: 2253374 - RNA, 19 nt, Homo sapiens
  misc_RNA (1)...(19): siRNA sense strand
aggagaagacuauagagaa

SEQ ID NO: 2253375 - RNA, 19 nt, Homo sapiens
  misc_RNA (1)...(19): siRNA sense strand
cagagcaagaggaggauga

SEQ ID NO: 2253376 - RNA, 19 nt, Homo sapiens
  misc_RNA (1)...(19): siRNA sense strand
ugaaaugggccuaggaaag

SEQ ID NO: 2253377 - RNA, 19 nt, Homo sapiens
  misc_RNA (1)...(19): siRNA sense strand
aagagaagucuguguucaa

SEQ ID NO: 2253378 - RNA, 19 nt, Homo sapiens
  misc_RNA (1)...(19): siRNA sense strand
gcuucaaaggaaagugaga

SEQ ID NO: 2253379 - RNA, 19 nt, Homo sapiens
  misc_RNA (1)...(19): siRNA sense strand
aaaggagaaggcagagaaa

SEQ ID NO: 2253380 - RNA, 19 nt, Homo sapiens
  misc_RNA (1)...(19): siRNA sense strand
ccgagauggaggaaauauu

SEQ ID NO: 2253381 - RNA, 19 nt, Homo sapiens
  misc_RNA (1)...(19): siRNA sense strand
gcacauagaauugggcaga

SEQ ID NO: 2253382 - RNA, 19 nt, Homo sapiens
  misc_RNA (1)...(19): siRNA sense strand
uuuauaacuucgaaggaga

SEQ ID NO: 2253383 - RNA, 19 nt, Homo sapiens
  misc_RNA (1)...(19): siRNA sense strand
gggauuuaccaauuggaau

SEQ ID NO: 2253384 - RNA, 19 nt, Homo sapiens
  misc_RNA (1)...(19): siRNA sense strand
cagcaggcaagauggacaa

SEQ ID NO: 2253385 - RNA, 19 nt, Homo sapiens
  misc_RNA (1)...(19): siRNA sense strand
ucucuuugauggagcagaa

SEQ ID NO: 2253386 - RNA, 19 nt, Homo sapiens
  misc_RNA (1)...(19): siRNA sense strand
ggaggaaauauuugaugau

SEQ ID NO: 2253387 - RNA, 19 nt, Homo sapiens
  misc_RNA (1)...(19): siRNA sense strand
uagagaagauuauggcuca

SEQ ID NO: 2253388 - RNA, 19 nt, Homo sapiens
  misc_RNA (1)...(19): siRNA sense strand
aagaaaaggagaaggcaga

SEQ ID NO: 2253389 - RNA, 19 nt, Homo sapiens
  misc_RNA (1)...(19): siRNA sense strand
ccuccaaagaaggaaguaa

SEQ ID NO: 2253390 - RNA, 19 nt, Homo sapiens
  misc_RNA (1)...(19): siRNA sense strand
augcauacaaugaaccaaa

SEQ ID NO: 2253391 - RNA, 19 nt, Homo sapiens
  misc_RNA (1)...(19): siRNA sense strand
aaggagaagacuauagaga

SEQ ID NO: 2253392 - RNA, 19 nt, Homo sapiens
  misc_RNA (1)...(19): siRNA sense strand
agcaagaggaggaugaaga

SEQ ID NO: 2253393 - RNA, 19 nt, Homo sapiens
  misc_RNA (1)...(19): siRNA sense strand
ccuggaaagcaaaaggaaa

SEQ ID NO: 2253394 - RNA, 19 nt, Homo sapiens
  misc_RNA (1)...(19): siRNA sense strand
acacuguagaagaaagaau

SEQ ID NO: 2253395 - RNA, 19 nt, Homo sapiens
  misc_RNA (1)...(19): siRNA sense strand
uuucaucagcugagaauau

SEQ ID NO: 2253396 - RNA, 19 nt, Homo sapiens
  misc_RNA (1)...(19): siRNA sense strand
cagcaaaaugcaaagggaa

SEQ ID NO: 2253397 - RNA, 19 nt, Homo sapiens
  misc_RNA (1)...(19): siRNA sense strand
aagggaggcuuguggauca

SEQ ID NO: 2253398 - RNA, 19 nt, Homo sapiens
  misc_RNA (1)...(19): siRNA sense strand
cuucaacacagaaacguaa

SEQ ID NO: 2253399 - RNA, 19 nt, Homo sapiens
  misc_RNA (1)...(19): siRNA sense strand
acaccguagaacagagcaa

SEQ ID NO: 2253400 - RNA, 19 nt, Homo sapiens
  misc_RNA (1)...(19): siRNA sense strand
cugauaacacuguagaaga

SEQ ID NO: 2253401 - RNA, 19 nt, Homo sapiens
  misc_RNA (1)...(19): siRNA sense strand
accugauggucgaggaaga

SEQ ID NO: 2253402 - RNA, 19 nt, Homo sapiens
  misc_RNA (1)...(19): siRNA sense strand
uggaaagaggugcaaagaa

SEQ ID NO: 2253403 - RNA, 19 nt, Homo sapiens
  misc_RNA (1)...(19): siRNA sense strand
ugccaaagugagauauaaa

SEQ ID NO: 2253404 - RNA, 19 nt, Homo sapiens
  misc_RNA (1)...(19): siRNA sense strand
agucagaggaugcuggaca

SEQ ID NO: 2253405 - RNA, 19 nt, Homo sapiens
  misc_RNA (1)...(19): siRNA sense strand
cggaacgggaguuuggcaa

SEQ ID NO: 2253406 - RNA, 19 nt, Homo sapiens
  misc_RNA (1)...(19): siRNA sense strand
cuaugaugccaaagugaga

SEQ ID NO: 2253407 - RNA, 19 nt, Homo sapiens
  misc_RNA (1)...(19): siRNA sense strand
ccuucaaucaugacaucaa

SEQ ID NO: 2253408 - RNA, 19 nt, Homo sapiens
  misc_RNA (1)...(19): siRNA sense strand
ugaaacuuggagaggauau

SEQ ID NO: 2253409 - RNA, 19 nt, Homo sapiens
  misc_RNA (1)...(19): siRNA sense strand
gaaaguggcagcuacggaa

SEQ ID NO: 2253410 - RNA, 19 nt, Homo sapiens
  misc_RNA (1)...(19): siRNA sense strand
acaucaauaaugagcugaa

SEQ ID NO: 2253411 - RNA, 19 nt, Homo sapiens
  misc_RNA (1)...(19): siRNA sense strand
gagcugaagaaacuggcua

SEQ ID NO: 2253412 - RNA, 19 nt, Homo sapiens
  misc_RNA (1)...(19): siRNA sense strand
aauaaugagcugaagaaac

SEQ ID NO: 2253413 - RNA, 19 nt, Homo sapiens
  misc_RNA (1)...(19): siRNA sense strand
gauauuacauuguggggca

SEQ ID NO: 2253414 - RNA, 19 nt, Homo sapiens
  misc_RNA (1)...(19): siRNA sense strand
ugaaggacgucauccgaga

SEQ ID NO: 2253415 - RNA, 19 nt, Homo sapiens
  misc_RNA (1)...(19): siRNA sense strand
gcgcguuaaaccagggagu

SEQ ID NO: 2253416 - RNA, 19 nt, Homo sapiens
  misc_RNA (1)...(19): siRNA sense strand
auguggauaaagagaaaga

SEQ ID NO: 2253417 - RNA, 19 nt, Homo sapiens
  misc_RNA (1)...(19): siRNA sense strand
agaagugcaccaagggaaa

SEQ ID NO: 2253418 - RNA, 19 nt, Homo sapiens
  misc_RNA (1)...(19): siRNA sense strand
gagaagugcaccaagggaa

SEQ ID NO: 2253419 - RNA, 19 nt, Homo sapiens
  misc_RNA (1)...(19): siRNA sense strand
gaucaaagugcgagcagga

SEQ ID NO: 2253420 - RNA, 19 nt, Homo sapiens
  misc_RNA (1)...(19): siRNA sense strand
gcucagacaucuaaggagu

SEQ ID NO: 2253421 - RNA, 19 nt, Homo sapiens
  misc_RNA (1)...(19): siRNA sense strand
ggaagagaagagagugaca

SEQ ID NO: 2253422 - RNA, 19 nt, Homo sapiens
  misc_RNA (1)...(19): siRNA sense strand
ggaaagaagaggaacucca

SEQ ID NO: 2253423 - RNA, 19 nt, Homo sapiens
  misc_RNA (1)...(19): siRNA sense strand
gggagaacaccacgggaga

SEQ ID NO: 2253424 - RNA, 19 nt, Homo sapiens
  misc_RNA (1)...(19): siRNA sense strand
caaaaggugcugaggacua

SEQ ID NO: 2253425 - RNA, 19 nt, Homo sapiens
  misc_RNA (1)...(19): siRNA sense strand
ggaaugaagaugagcugga

SEQ ID NO: 2253426 - RNA, 19 nt, Homo sapiens
  misc_RNA (1)...(19): siRNA sense strand
cggucugagccaaggagua

SEQ ID NO: 2253427 - RNA, 19 nt, Homo sapiens
  misc_RNA (1)...(19): siRNA sense strand
cagaggaagagaagagagu

SEQ ID NO: 2253428 - RNA, 19 nt, Homo sapiens
  misc_RNA (1)...(19): siRNA sense strand
uggaggucgucaagaagaa

SEQ ID NO: 2253429 - RNA, 19 nt, Homo sapiens
  misc_RNA (1)...(19): siRNA sense strand
ucauugaugucauggaaaa

SEQ ID NO: 2253430 - RNA, 19 nt, Homo sapiens
  misc_RNA (1)...(19): siRNA sense strand
ugguacaagacgauguuua

SEQ ID NO: 2253431 - RNA, 19 nt, Homo sapiens
  misc_RNA (1)...(19): siRNA sense strand
gagaaaucggagaagcuau

SEQ ID NO: 2253432 - RNA, 19 nt, Homo sapiens
  misc_RNA (1)...(19): siRNA sense strand
cggagaaaucggagaagcu

SEQ ID NO: 2253433 - RNA, 19 nt, Homo sapiens
  misc_RNA (1)...(19): siRNA sense strand
gaaacuacgucaagaggcu

SEQ ID NO: 2253434 - RNA, 19 nt, Homo sapiens
  misc_RNA (1)...(19): siRNA sense strand
acugagaaagggagauaga

SEQ ID NO: 2253435 - RNA, 19 nt, Homo sapiens
  misc_RNA (1)...(19): siRNA sense strand
auguggaggucgucaagaa

SEQ ID NO: 2253436 - RNA, 19 nt, Homo sapiens
  misc_RNA (1)...(19): siRNA sense strand
acuucaacgcagacacaaa

SEQ ID NO: 2253437 - RNA, 19 nt, Homo sapiens
  misc_RNA (1)...(19): siRNA sense strand
ugagaaagggagauagagu

SEQ ID NO: 2253438 - RNA, 19 nt, Homo sapiens
  misc_RNA (1)...(19): siRNA sense strand
aagaagaggaacuccagaa

SEQ ID NO: 2253439 - RNA, 19 nt, Homo sapiens
  misc_RNA (1)...(19): siRNA sense strand
aagggaaagaagaggaacu

SEQ ID NO: 2253440 - RNA, 19 nt, Homo sapiens
  misc_RNA (1)...(19): siRNA sense strand
ucgucaagaagaacacaaa

SEQ ID NO: 2253441 - RNA, 19 nt, Homo sapiens
  misc_RNA (1)...(19): siRNA sense strand
uggagcugucacugagaaa

SEQ ID NO: 2253442 - RNA, 19 nt, Homo sapiens
  misc_RNA (1)...(19): siRNA sense strand
cuggaaagacccaugaguu

SEQ ID NO: 2253443 - RNA, 19 nt, Homo sapiens
  misc_RNA (1)...(19): siRNA sense strand
cacagcuauucuagugaua

SEQ ID NO: 2253444 - RNA, 19 nt, Homo sapiens
  misc_RNA (1)...(19): siRNA sense strand
gguaugagggagaacacca

SEQ ID NO: 2253445 - RNA, 19 nt, Homo sapiens
  misc_RNA (1)...(19): siRNA sense strand
ucggagaagcuauagccaa

SEQ ID NO: 2253446 - RNA, 19 nt, Homo sapiens
  misc_RNA (1)...(19): siRNA sense strand
agaagugcaccaagggaaa

SEQ ID NO: 2253447 - RNA, 19 nt, Homo sapiens
  misc_RNA (1)...(19): siRNA sense strand
gagaagugcaccaagggaa

SEQ ID NO: 2253448 - RNA, 19 nt, Homo sapiens
  misc_RNA (1)...(19): siRNA sense strand
gaucaaagugcgagcagga

SEQ ID NO: 2253449 - RNA, 19 nt, Homo sapiens
  misc_RNA (1)...(19): siRNA sense strand
gcucagacaucuaaggagu

SEQ ID NO: 2253450 - RNA, 19 nt, Homo sapiens
  misc_RNA (1)...(19): siRNA sense strand
ggaagagaagagagugaca

SEQ ID NO: 2253451 - RNA, 19 nt, Homo sapiens
  misc_RNA (1)...(19): siRNA sense strand
ggaaagaagaggaacucca

SEQ ID NO: 2253452 - RNA, 19 nt, Homo sapiens
  misc_RNA (1)...(19): siRNA sense strand
gggagaacaccacgggaga

SEQ ID NO: 2253453 - RNA, 19 nt, Homo sapiens
  misc_RNA (1)...(19): siRNA sense strand
caaaaggugcugaggacua

SEQ ID NO: 2253454 - RNA, 19 nt, Homo sapiens
  misc_RNA (1)...(19): siRNA sense strand
ggaaugaagaugagcugga

SEQ ID NO: 2253455 - RNA, 19 nt, Homo sapiens
  misc_RNA (1)...(19): siRNA sense strand
cggucugagccaaggagua

SEQ ID NO: 2253456 - RNA, 19 nt, Homo sapiens
  misc_RNA (1)...(19): siRNA sense strand
cagaggaagagaagagagu

SEQ ID NO: 2253457 - RNA, 19 nt, Homo sapiens
  misc_RNA (1)...(19): siRNA sense strand
uggaggucgucaagaagaa

SEQ ID NO: 2253458 - RNA, 19 nt, Homo sapiens
  misc_RNA (1)...(19): siRNA sense strand
ucauugaugucauggaaaa

SEQ ID NO: 2253459 - RNA, 19 nt, Homo sapiens
  misc_RNA (1)...(19): siRNA sense strand
ugguacaagacgauguuua

SEQ ID NO: 2253460 - RNA, 19 nt, Homo sapiens
  misc_RNA (1)...(19): siRNA sense strand
gagaaaucggagaagcuau

SEQ ID NO: 2253461 - RNA, 19 nt, Homo sapiens
  misc_RNA (1)...(19): siRNA sense strand
cggagaaaucggagaagcu

SEQ ID NO: 2253462 - RNA, 19 nt, Homo sapiens
  misc_RNA (1)...(19): siRNA sense strand
gaaacuacgucaagaggcu

SEQ ID NO: 2253463 - RNA, 19 nt, Homo sapiens
  misc_RNA (1)...(19): siRNA sense strand
acugagaaagggagauaga

SEQ ID NO: 2253464 - RNA, 19 nt, Homo sapiens
  misc_RNA (1)...(19): siRNA sense strand
auguggaggucgucaagaa

SEQ ID NO: 2253465 - RNA, 19 nt, Homo sapiens
  misc_RNA (1)...(19): siRNA sense strand
acuucaacgcagacacaaa

SEQ ID NO: 2253466 - RNA, 19 nt, Homo sapiens
  misc_RNA (1)...(19): siRNA sense strand
ugagaaagggagauagagu

SEQ ID NO: 2253467 - RNA, 19 nt, Homo sapiens
  misc_RNA (1)...(19): siRNA sense strand
aagaagaggaacuccagaa

SEQ ID NO: 2253468 - RNA, 19 nt, Homo sapiens
  misc_RNA (1)...(19): siRNA sense strand
aagggaaagaagaggaacu

SEQ ID NO: 2253469 - RNA, 19 nt, Homo sapiens
  misc_RNA (1)...(19): siRNA sense strand
ucgucaagaagaacacaaa

SEQ ID NO: 2253470 - RNA, 19 nt, Homo sapiens
  misc_RNA (1)...(19): siRNA sense strand
uggagcugucacugagaaa

SEQ ID NO: 2253471 - RNA, 19 nt, Homo sapiens
  misc_RNA (1)...(19): siRNA sense strand
cuggaaagacccaugaguu

SEQ ID NO: 2253472 - RNA, 19 nt, Homo sapiens
  misc_RNA (1)...(19): siRNA sense strand
cacagcuauucuagugaua

SEQ ID NO: 2253473 - RNA, 19 nt, Homo sapiens
  misc_RNA (1)...(19): siRNA sense strand
gguaugagggagaacacca

SEQ ID NO: 2253474 - RNA, 19 nt, Homo sapiens
  misc_RNA (1)...(19): siRNA sense strand
ucggagaagcuauagccaa

SEQ ID NO: 2253475 - RNA, 19 nt, Homo sapiens
  misc_RNA (1)...(19): siRNA sense strand
ggaaaaucucugaagaaaa

SEQ ID NO: 2253476 - RNA, 19 nt, Homo sapiens
  misc_RNA (1)...(19): siRNA sense strand
uggaggaacugguggaaaa

SEQ ID NO: 2253477 - RNA, 19 nt, Homo sapiens
  misc_RNA (1)...(19): siRNA sense strand
ggaaaggauccgaugguga

SEQ ID NO: 2253478 - RNA, 19 nt, Homo sapiens
  misc_RNA (1)...(19): siRNA sense strand
acuaaaagagagagcaaua

SEQ ID NO: 2253479 - RNA, 19 nt, Homo sapiens
  misc_RNA (1)...(19): siRNA sense strand
aggcucaggaagugggaaa

SEQ ID NO: 2253480 - RNA, 19 nt, Homo sapiens
  misc_RNA (1)...(19): siRNA sense strand
cuauugaggaagaggguga

SEQ ID NO: 2253481 - RNA, 19 nt, Homo sapiens
  misc_RNA (1)...(19): siRNA sense strand
gaggaugacucaaaggaca

SEQ ID NO: 2253482 - RNA, 19 nt, Homo sapiens
  misc_RNA (1)...(19): siRNA sense strand
aagccaaagaagugaaaga

SEQ ID NO: 2253483 - RNA, 19 nt, Homo sapiens
  misc_RNA (1)...(19): siRNA sense strand
aagaagagcaggagagaag

SEQ ID NO: 2253484 - RNA, 19 nt, Homo sapiens
  misc_RNA (1)...(19): siRNA sense strand
ccacacaugagcagagaga

SEQ ID NO: 2253485 - RNA, 19 nt, Homo sapiens
  misc_RNA (1)...(19): siRNA sense strand
ggggaggggccuagacaaa

SEQ ID NO: 2253486 - RNA, 19 nt, Homo sapiens
  misc_RNA (1)...(19): siRNA sense strand
gccucauccucgagagcaa

SEQ ID NO: 2253487 - RNA, 19 nt, Homo sapiens
  misc_RNA (1)...(19): siRNA sense strand
agccauagcucgggaggaa

SEQ ID NO: 2253488 - RNA, 19 nt, Homo sapiens
  misc_RNA (1)...(19): siRNA sense strand
acacaugagcagagagaag

SEQ ID NO: 2253489 - RNA, 19 nt, Homo sapiens
  misc_RNA (1)...(19): siRNA sense strand
aggaugacucaaaggacaa

SEQ ID NO: 2253490 - RNA, 19 nt, Homo sapiens
  misc_RNA (1)...(19): siRNA sense strand
cuucaaagccuucagguga

SEQ ID NO: 2253491 - RNA, 19 nt, Homo sapiens
  misc_RNA (1)...(19): siRNA sense strand
cggcuggaauacuacgaaa

SEQ ID NO: 2253492 - RNA, 19 nt, Homo sapiens
  misc_RNA (1)...(19): siRNA sense strand
aauaaagcuaagagaccua

SEQ ID NO: 2253493 - RNA, 19 nt, Homo sapiens
  misc_RNA (1)...(19): siRNA sense strand
uugaugaagaugaggauga

SEQ ID NO: 2253494 - RNA, 19 nt, Homo sapiens
  misc_RNA (1)...(19): siRNA sense strand
acuacaugccuaugaacaa

SEQ ID NO: 2253495 - RNA, 19 nt, Homo sapiens
  misc_RNA (1)...(19): siRNA sense strand
cgaugguggccgagaacga

SEQ ID NO: 2253496 - RNA, 19 nt, Homo sapiens
  misc_RNA (1)...(19): siRNA sense strand
ucacuaaaagagagagcaa

SEQ ID NO: 2253497 - RNA, 19 nt, Homo sapiens
  misc_RNA (1)...(19): siRNA sense strand
guggaaaaucucugaagaa

SEQ ID NO: 2253498 - RNA, 19 nt, Homo sapiens
  misc_RNA (1)...(19): siRNA sense strand
ggauauaaaaucaagccaa

SEQ ID NO: 2253499 - RNA, 19 nt, Homo sapiens
  misc_RNA (1)...(19): siRNA sense strand
gcaaagaagaucaggaagg

SEQ ID NO: 2253500 - RNA, 19 nt, Homo sapiens
  misc_RNA (1)...(19): siRNA sense strand
uggaaaaucucugaagaaa

SEQ ID NO: 2253501 - RNA, 19 nt, Homo sapiens
  misc_RNA (1)...(19): siRNA sense strand
ccuugugugcagacgaaua

SEQ ID NO: 2253502 - RNA, 19 nt, Homo sapiens
  misc_RNA (1)...(19): siRNA sense strand
aaagcaagcaacagcaaau

SEQ ID NO: 2253503 - RNA, 19 nt, Homo sapiens
  misc_RNA (1)...(19): siRNA sense strand
ucgcuaugaugcugaaaca

SEQ ID NO: 2253504 - RNA, 19 nt, Homo sapiens
  misc_RNA (1)...(19): siRNA sense strand
cauaauugcugaacccaga

SEQ ID NO: 2253505 - RNA, 19 nt, Homo sapiens
  misc_RNA (1)...(19): siRNA sense strand
ccaaagaagugaaagaugc

SEQ ID NO: 2253506 - RNA, 19 nt, Homo sapiens
  misc_RNA (1)...(19): siRNA sense strand
cagaaugacaacagugagu

SEQ ID NO: 2253507 - RNA, 19 nt, Homo sapiens
  misc_RNA (1)...(19): siRNA sense strand
ggaaggaagcggaggugac

SEQ ID NO: 2253508 - RNA, 19 nt, Homo sapiens
  misc_RNA (1)...(19): siRNA sense strand
caaauuaacucaaagcaag

SEQ ID NO: 2253509 - RNA, 19 nt, Homo sapiens
  misc_RNA (1)...(19): siRNA sense strand
acgaaagaaugcaaagaag

SEQ ID NO: 2253510 - RNA, 19 nt, Homo sapiens
  misc_RNA (1)...(19): siRNA sense strand
aggaagagggugacuacau

SEQ ID NO: 2253511 - RNA, 19 nt, Homo sapiens
  misc_RNA (1)...(19): siRNA sense strand
gagaauggauuuugccaga

SEQ ID NO: 2253512 - RNA, 19 nt, Homo sapiens
  misc_RNA (1)...(19): siRNA sense strand
cugcagaagccccgaacaa

SEQ ID NO: 2253513 - RNA, 19 nt, Homo sapiens
  misc_RNA (1)...(19): siRNA sense strand
ggaggugacuacaugccua

SEQ ID NO: 2253514 - RNA, 19 nt, Homo sapiens
  misc_RNA (1)...(19): siRNA sense strand
agccagagcuuuugaugaa

SEQ ID NO: 2253515 - RNA, 19 nt, Homo sapiens
  misc_RNA (1)...(19): siRNA sense strand
ggucgaugacugugugguu

SEQ ID NO: 2253516 - RNA, 19 nt, Homo sapiens
  misc_RNA (1)...(19): siRNA sense strand
augcaaagaagccaaagaa

SEQ ID NO: 2253517 - RNA, 19 nt, Homo sapiens
  misc_RNA (1)...(19): siRNA sense strand
caaagaagugaaagaugca

SEQ ID NO: 2253518 - RNA, 19 nt, Homo sapiens
  misc_RNA (1)...(19): siRNA sense strand
agaacgagucggagcagga

SEQ ID NO: 2253519 - RNA, 19 nt, Homo sapiens
  misc_RNA (1)...(19): siRNA sense strand
ugccaauguuaccuggaaa

SEQ ID NO: 2253520 - RNA, 19 nt, Homo sapiens
  misc_RNA (1)...(19): siRNA sense strand
ggaaacagaagcaugggca

SEQ ID NO: 2253521 - RNA, 19 nt, Homo sapiens
  misc_RNA (1)...(19): siRNA sense strand
agaggagccacgaaagaau

SEQ ID NO: 2253522 - RNA, 19 nt, Homo sapiens
  misc_RNA (1)...(19): siRNA sense strand
ccaagcgacaagaagacua

SEQ ID NO: 2253523 - RNA, 19 nt, Homo sapiens
  misc_RNA (1)...(19): siRNA sense strand
ugauggugaacguggaaaa

SEQ ID NO: 2253524 - RNA, 19 nt, Homo sapiens
  misc_RNA (1)...(19): siRNA sense strand
ucccaaaagaggucgguaa

SEQ ID NO: 2253525 - RNA, 19 nt, Homo sapiens
  misc_RNA (1)...(19): siRNA sense strand
guggacacucggagcagua

SEQ ID NO: 2253526 - RNA, 19 nt, Homo sapiens
  misc_RNA (1)...(19): siRNA sense strand
gcucaaauggccagggcuc

SEQ ID NO: 2253527 - RNA, 19 nt, Homo sapiens
  misc_RNA (1)...(19): siRNA sense strand
aagaagacuaagaggugca

SEQ ID NO: 2253528 - RNA, 19 nt, Homo sapiens
  misc_RNA (1)...(19): siRNA sense strand
acagaggagccacgaaaga

SEQ ID NO: 2253529 - RNA, 19 nt, Homo sapiens
  misc_RNA (1)...(19): siRNA sense strand
aagaaugcaaagaagccaa

SEQ ID NO: 2253530 - RNA, 19 nt, Homo sapiens
  misc_RNA (1)...(19): siRNA sense strand
ucaacauggacuucacuaa

SEQ ID NO: 2253531 - RNA, 19 nt, Homo sapiens
  misc_RNA (1)...(19): siRNA sense strand
gggcauaauugcugaaccc

SEQ ID NO: 2253532 - RNA, 19 nt, Homo sapiens
  misc_RNA (1)...(19): siRNA sense strand
gggaagacgagaugcuuuu

SEQ ID NO: 2253533 - RNA, 19 nt, Homo sapiens
  misc_RNA (1)...(19): siRNA sense strand
cgauggugauggugaacgu

SEQ ID NO: 2253534 - RNA, 19 nt, Homo sapiens
  misc_RNA (1)...(19): siRNA sense strand
ggagcucaccuuugggaca

SEQ ID NO: 2253535 - RNA, 19 nt, Homo sapiens
  misc_RNA (1)...(19): siRNA sense strand
ucuauaaagauguguggca

SEQ ID NO: 2253536 - RNA, 19 nt, Homo sapiens
  misc_RNA (1)...(19): siRNA sense strand
cgauauugcugaaggaaaa

SEQ ID NO: 2253537 - RNA, 19 nt, Homo sapiens
  misc_RNA (1)...(19): siRNA sense strand
agagaaagucaaagugaaa

SEQ ID NO: 2253538 - RNA, 19 nt, Homo sapiens
  misc_RNA (1)...(19): siRNA sense strand
aguuagaagaagagguuaa

SEQ ID NO: 2253539 - RNA, 19 nt, Homo sapiens
  misc_RNA (1)...(19): siRNA sense strand
cugaagaauuggaggcauu

SEQ ID NO: 2253540 - RNA, 19 nt, Homo sapiens
  misc_RNA (1)...(19): siRNA sense strand
gauccagaaaugagaaaua

SEQ ID NO: 2253541 - RNA, 19 nt, Homo sapiens
  misc_RNA (1)...(19): siRNA sense strand
caacaauaugaacgagaaa

SEQ ID NO: 2253542 - RNA, 19 nt, Homo sapiens
  misc_RNA (1)...(19): siRNA sense strand
cugagaaugagaagaauaa

SEQ ID NO: 2253543 - RNA, 19 nt, Homo sapiens
  misc_RNA (1)...(19): siRNA sense strand
ucagaaaggaauaggaaca

SEQ ID NO: 2253544 - RNA, 19 nt, Homo sapiens
  misc_RNA (1)...(19): siRNA sense strand
aggaauaggaacagcauau

SEQ ID NO: 2253545 - RNA, 19 nt, Homo sapiens
  misc_RNA (1)...(19): siRNA sense strand
gaaauaauucaguggguca

SEQ ID NO: 2253546 - RNA, 19 nt, Homo sapiens
  misc_RNA (1)...(19): siRNA sense strand
uauuagaguuggugacaau

SEQ ID NO: 2253547 - RNA, 19 nt, Homo sapiens
  misc_RNA (1)...(19): siRNA sense strand
agucaggauuucuaagaua

SEQ ID NO: 2253548 - RNA, 19 nt, Homo sapiens
  misc_RNA (1)...(19): siRNA sense strand
caggaaagucggacaguau

SEQ ID NO: 2253549 - RNA, 19 nt, Homo sapiens
  misc_RNA (1)...(19): siRNA sense strand
acaagaaagagaagaucua

SEQ ID NO: 2253550 - RNA, 19 nt, Homo sapiens
  misc_RNA (1)...(19): siRNA sense strand
acacugagaaugagaagaa

SEQ ID NO: 2253551 - RNA, 19 nt, Homo sapiens
  misc_RNA (1)...(19): siRNA sense strand
acaccaaccuuaaggaaaa

SEQ ID NO: 2253552 - RNA, 19 nt, Homo sapiens
  misc_RNA (1)...(19): siRNA sense strand
ugucauuagucaagugauu

SEQ ID NO: 2253553 - RNA, 19 nt, Homo sapiens
  misc_RNA (1)...(19): siRNA sense strand
caugcaagucggaaagaua

SEQ ID NO: 2253554 - RNA, 19 nt, Homo sapiens
  misc_RNA (1)...(19): siRNA sense strand
uccaagaagaguugaauaa

SEQ ID NO: 2253555 - RNA, 19 nt, Homo sapiens
  misc_RNA (1)...(19): siRNA sense strand
agaagagguuaaagaucua

SEQ ID NO: 2253556 - RNA, 19 nt, Homo sapiens
  misc_RNA (1)...(19): siRNA sense strand
cggagcuguuuaagaguua

SEQ ID NO: 2253557 - RNA, 19 nt, Homo sapiens
  misc_RNA (1)...(19): siRNA sense strand
cagcauagaacaucagcaa

SEQ ID NO: 2253558 - RNA, 19 nt, Homo sapiens
  misc_RNA (1)...(19): siRNA sense strand
augcagcagaggagggaaa

SEQ ID NO: 2253559 - RNA, 19 nt, Homo sapiens
  misc_RNA (1)...(19): siRNA sense strand
augaaaugcuuuacggaga

SEQ ID NO: 2253560 - RNA, 19 nt, Homo sapiens
  misc_RNA (1)...(19): siRNA sense strand
cuaaagacugauuuggaaa

SEQ ID NO: 2253561 - RNA, 19 nt, Homo sapiens
  misc_RNA (1)...(19): siRNA sense strand
aggaauacaugcaaaugaa

SEQ ID NO: 2253562 - RNA, 19 nt, Homo sapiens
  misc_RNA (1)...(19): siRNA sense strand
ggugauagcaauugacuca

SEQ ID NO: 2253563 - RNA, 19 nt, Homo sapiens
  misc_RNA (1)...(19): siRNA sense strand
aagagaaagucaaagugaa

SEQ ID NO: 2253564 - RNA, 19 nt, Homo sapiens
  misc_RNA (1)...(19): siRNA sense strand
gaucuagacaacaggaauu

SEQ ID NO: 2253565 - RNA, 19 nt, Homo sapiens
  misc_RNA (1)...(19): siRNA sense strand
acacauggguccuggagau

SEQ ID NO: 2253566 - RNA, 19 nt, Homo sapiens
  misc_RNA (1)...(19): siRNA sense strand
acaacaagaaagagaagau

SEQ ID NO: 2253567 - RNA, 19 nt, Homo sapiens
  misc_RNA (1)...(19): siRNA sense strand
gugaagaaaggguggcaga

SEQ ID NO: 2253568 - RNA, 19 nt, Homo sapiens
  misc_RNA (1)...(19): siRNA sense strand
acugagaaugagaagaaua

SEQ ID NO: 2253569 - RNA, 19 nt, Homo sapiens
  misc_RNA (1)...(19): siRNA sense strand
aauuaagcgccuugagcaa

SEQ ID NO: 2253570 - RNA, 19 nt, Homo sapiens
  misc_RNA (1)...(19): siRNA sense strand
cguuacaacaagaaagaga

SEQ ID NO: 2253571 - RNA, 19 nt, Homo sapiens
  misc_RNA (1)...(19): siRNA sense strand
gguuaaagaucuagcagac

SEQ ID NO: 2253572 - RNA, 19 nt, Homo sapiens
  misc_RNA (1)...(19): siRNA sense strand
ccuccuugaugguggguuu

SEQ ID NO: 2253573 - RNA, 19 nt, Homo sapiens
  misc_RNA (1)...(19): siRNA sense strand
acgauauugcugaaggaaa

SEQ ID NO: 2253574 - RNA, 19 nt, Homo sapiens
  misc_RNA (1)...(19): siRNA sense strand
uagcagacacugagaauga

SEQ ID NO: 2253575 - RNA, 19 nt, Homo sapiens
  misc_RNA (1)...(19): siRNA sense strand
ggaggaagcuacagugcca

SEQ ID NO: 2253576 - RNA, 19 nt, Homo sapiens
  misc_RNA (1)...(19): siRNA sense strand
ggaacagcaacuugaagaa

SEQ ID NO: 2253577 - RNA, 19 nt, Homo sapiens
  misc_RNA (1)...(19): siRNA sense strand
cuugaauggagaaggaaau

SEQ ID NO: 2253578 - RNA, 19 nt, Homo sapiens
  misc_RNA (1)...(19): siRNA sense strand
gcacagaauggcagcgcau

SEQ ID NO: 2253579 - RNA, 19 nt, Homo sapiens
  misc_RNA (1)...(19): siRNA sense strand
aauuggaggcauuaagaaa

SEQ ID NO: 2253580 - RNA, 19 nt, Homo sapiens
  misc_RNA (1)...(19): siRNA sense strand
ugacaugagggaugaagaa

SEQ ID NO: 2253581 - RNA, 19 nt, Homo sapiens
  misc_RNA (1)...(19): siRNA sense strand
cuuaaacaaugaaggauca

SEQ ID NO: 2253582 - RNA, 19 nt, Homo sapiens
  misc_RNA (1)...(19): siRNA sense strand
gcugaagcaucuaaagaca

SEQ ID NO: 2253583 - RNA, 19 nt, Homo sapiens
  misc_RNA (1)...(19): siRNA sense strand
agaacaucagcaagagaua

SEQ ID NO: 2253584 - RNA, 19 nt, Homo sapiens
  misc_RNA (1)...(19): siRNA sense strand
gggugggagugcugaguga

SEQ ID NO: 2253585 - RNA, 19 nt, Homo sapiens
  misc_RNA (1)...(19): siRNA sense strand
gcuucaguguggagacauu

SEQ ID NO: 2253586 - RNA, 19 nt, Homo sapiens
  misc_RNA (1)...(19): siRNA sense strand
agcccaaaucacagaaaua

SEQ ID NO: 2253587 - RNA, 19 nt, Homo sapiens
  misc_RNA (1)...(19): siRNA sense strand
aaaucgaacagcugauaaa

SEQ ID NO: 2253588 - RNA, 19 nt, Homo sapiens
  misc_RNA (1)...(19): siRNA sense strand
agauaauagucggaaacaa

SEQ ID NO: 2253589 - RNA, 19 nt, Homo sapiens
  misc_RNA (1)...(19): siRNA sense strand
gcucauuuguagcagagaa

SEQ ID NO: 2253590 - RNA, 19 nt, Homo sapiens
  misc_RNA (1)...(19): siRNA sense strand
uagaagaagagguuaaaga

SEQ ID NO: 2253591 - RNA, 19 nt, Homo sapiens
  misc_RNA (1)...(19): siRNA sense strand
gugaagaaagggauguauu

SEQ ID NO: 2253592 - RNA, 19 nt, Homo sapiens
  misc_RNA (1)...(19): siRNA sense strand
ugaaaugcuuuacggagaa

SEQ ID NO: 2253593 - RNA, 19 nt, Homo sapiens
  misc_RNA (1)...(19): siRNA sense strand
ugguggagacauacggaaa

SEQ ID NO: 2253594 - RNA, 19 nt, Homo sapiens
  misc_RNA (1)...(19): siRNA sense strand
ccucagaaaggaauaggaa

SEQ ID NO: 2253595 - RNA, 19 nt, Homo sapiens
  misc_RNA (1)...(19): siRNA sense strand
ggaaaugcuacgagaucca

SEQ ID NO: 2253596 - RNA, 19 nt, Homo sapiens
  misc_RNA (1)...(19): siRNA sense strand
gcacaagauuuugaagaaa

SEQ ID NO: 2253597 - RNA, 19 nt, Homo sapiens
  misc_RNA (1)...(19): siRNA sense strand
gcugagauggugauagcaa

SEQ ID NO: 2253598 - RNA, 19 nt, Homo sapiens
  misc_RNA (1)...(19): siRNA sense strand
gucugaagcugauggaaga

SEQ ID NO: 2253599 - RNA, 19 nt, Homo sapiens
  misc_RNA (1)...(19): siRNA sense strand
uagaaaacuucaagaguca

SEQ ID NO: 2253600 - RNA, 19 nt, Homo sapiens
  misc_RNA (1)...(19): siRNA sense strand
agacauuaaaccugacaau

SEQ ID NO: 2253601 - RNA, 19 nt, Homo sapiens
  misc_RNA (1)...(19): siRNA sense strand
gcaagcaaagauuuagaaa

SEQ ID NO: 2253602 - RNA, 19 nt, Homo sapiens
  misc_RNA (1)...(19): siRNA sense strand
agaucuagcagacaagaaa

SEQ ID NO: 2253603 - RNA, 19 nt, Homo sapiens
  misc_RNA (1)...(19): siRNA sense strand
agaauaagugggugggagu

SEQ ID NO: 2253604 - RNA, 19 nt, Homo sapiens
  misc_RNA (1)...(19): siRNA sense strand
cgauauugcugaaggaaaa

SEQ ID NO: 2253605 - RNA, 19 nt, Homo sapiens
  misc_RNA (1)...(19): siRNA sense strand
agagaaagucaaagugaaa

SEQ ID NO: 2253606 - RNA, 19 nt, Homo sapiens
  misc_RNA (1)...(19): siRNA sense strand
aguuagaagaagagguuaa

SEQ ID NO: 2253607 - RNA, 19 nt, Homo sapiens
  misc_RNA (1)...(19): siRNA sense strand
cugaagaauuggaggcauu

SEQ ID NO: 2253608 - RNA, 19 nt, Homo sapiens
  misc_RNA (1)...(19): siRNA sense strand
gauccagaaaugagaaaua

SEQ ID NO: 2253609 - RNA, 19 nt, Homo sapiens
  misc_RNA (1)...(19): siRNA sense strand
caacaauaugaacgagaaa

SEQ ID NO: 2253610 - RNA, 19 nt, Homo sapiens
  misc_RNA (1)...(19): siRNA sense strand
cugagaaugagaagaauaa

SEQ ID NO: 2253611 - RNA, 19 nt, Homo sapiens
  misc_RNA (1)...(19): siRNA sense strand
ucagaaaggaauaggaaca

SEQ ID NO: 2253612 - RNA, 19 nt, Homo sapiens
  misc_RNA (1)...(19): siRNA sense strand
aggaauaggaacagcauau

SEQ ID NO: 2253613 - RNA, 19 nt, Homo sapiens
  misc_RNA (1)...(19): siRNA sense strand
gaaauaauucaguggguca

SEQ ID NO: 2253614 - RNA, 19 nt, Homo sapiens
  misc_RNA (1)...(19): siRNA sense strand
uauuagaguuggugacaau

SEQ ID NO: 2253615 - RNA, 19 nt, Homo sapiens
  misc_RNA (1)...(19): siRNA sense strand
agucaggauuucuaagaua

SEQ ID NO: 2253616 - RNA, 19 nt, Homo sapiens
  misc_RNA (1)...(19): siRNA sense strand
caggaaagucggacaguau

SEQ ID NO: 2253617 - RNA, 19 nt, Homo sapiens
  misc_RNA (1)...(19): siRNA sense strand
acaagaaagagaagaucua

SEQ ID NO: 2253618 - RNA, 19 nt, Homo sapiens
  misc_RNA (1)...(19): siRNA sense strand
acacugagaaugagaagaa

SEQ ID NO: 2253619 - RNA, 19 nt, Homo sapiens
  misc_RNA (1)...(19): siRNA sense strand
acaccaaccuuaaggaaaa

SEQ ID NO: 2253620 - RNA, 19 nt, Homo sapiens
  misc_RNA (1)...(19): siRNA sense strand
ugucauuagucaagugauu

SEQ ID NO: 2253621 - RNA, 19 nt, Homo sapiens
  misc_RNA (1)...(19): siRNA sense strand
caugcaagucggaaagaua

SEQ ID NO: 2253622 - RNA, 19 nt, Homo sapiens
  misc_RNA (1)...(19): siRNA sense strand
uccaagaagaguugaauaa

SEQ ID NO: 2253623 - RNA, 19 nt, Homo sapiens
  misc_RNA (1)...(19): siRNA sense strand
agaagagguuaaagaucua

SEQ ID NO: 2253624 - RNA, 19 nt, Homo sapiens
  misc_RNA (1)...(19): siRNA sense strand
cggagcuguuuaagaguua

SEQ ID NO: 2253625 - RNA, 19 nt, Homo sapiens
  misc_RNA (1)...(19): siRNA sense strand
cagcauagaacaucagcaa

SEQ ID NO: 2253626 - RNA, 19 nt, Homo sapiens
  misc_RNA (1)...(19): siRNA sense strand
augcagcagaggagggaaa

SEQ ID NO: 2253627 - RNA, 19 nt, Homo sapiens
  misc_RNA (1)...(19): siRNA sense strand
augaaaugcuuuacggaga

SEQ ID NO: 2253628 - RNA, 19 nt, Homo sapiens
  misc_RNA (1)...(19): siRNA sense strand
cuaaagacugauuuggaaa

SEQ ID NO: 2253629 - RNA, 19 nt, Homo sapiens
  misc_RNA (1)...(19): siRNA sense strand
aggaauacaugcaaaugaa

SEQ ID NO: 2253630 - RNA, 19 nt, Homo sapiens
  misc_RNA (1)...(19): siRNA sense strand
ggugauagcaauugacuca

SEQ ID NO: 2253631 - RNA, 19 nt, Homo sapiens
  misc_RNA (1)...(19): siRNA sense strand
aagagaaagucaaagugaa

SEQ ID NO: 2253632 - RNA, 19 nt, Homo sapiens
  misc_RNA (1)...(19): siRNA sense strand
gaucuagacaacaggaauu

SEQ ID NO: 2253633 - RNA, 19 nt, Homo sapiens
  misc_RNA (1)...(19): siRNA sense strand
acacauggguccuggagau

SEQ ID NO: 2253634 - RNA, 19 nt, Homo sapiens
  misc_RNA (1)...(19): siRNA sense strand
acaacaagaaagagaagau

SEQ ID NO: 2253635 - RNA, 19 nt, Homo sapiens
  misc_RNA (1)...(19): siRNA sense strand
gugaagaaaggguggcaga

SEQ ID NO: 2253636 - RNA, 19 nt, Homo sapiens
  misc_RNA (1)...(19): siRNA sense strand
acugagaaugagaagaaua

SEQ ID NO: 2253637 - RNA, 19 nt, Homo sapiens
  misc_RNA (1)...(19): siRNA sense strand
aauuaagcgccuugagcaa

SEQ ID NO: 2253638 - RNA, 19 nt, Homo sapiens
  misc_RNA (1)...(19): siRNA sense strand
cguuacaacaagaaagaga

SEQ ID NO: 2253639 - RNA, 19 nt, Homo sapiens
  misc_RNA (1)...(19): siRNA sense strand
gguuaaagaucuagcagac

SEQ ID NO: 2253640 - RNA, 19 nt, Homo sapiens
  misc_RNA (1)...(19): siRNA sense strand
ccuccuugaugguggguuu

SEQ ID NO: 2253641 - RNA, 19 nt, Homo sapiens
  misc_RNA (1)...(19): siRNA sense strand
acgauauugcugaaggaaa

SEQ ID NO: 2253642 - RNA, 19 nt, Homo sapiens
  misc_RNA (1)...(19): siRNA sense strand
uagcagacacugagaauga

SEQ ID NO: 2253643 - RNA, 19 nt, Homo sapiens
  misc_RNA (1)...(19): siRNA sense strand
ggaggaagcuacagugcca

SEQ ID NO: 2253644 - RNA, 19 nt, Homo sapiens
  misc_RNA (1)...(19): siRNA sense strand
ggaacagcaacuugaagaa

SEQ ID NO: 2253645 - RNA, 19 nt, Homo sapiens
  misc_RNA (1)...(19): siRNA sense strand
cuugaauggagaaggaaau

SEQ ID NO: 2253646 - RNA, 19 nt, Homo sapiens
  misc_RNA (1)...(19): siRNA sense strand
gcacagaauggcagcgcau

SEQ ID NO: 2253647 - RNA, 19 nt, Homo sapiens
  misc_RNA (1)...(19): siRNA sense strand
aauuggaggcauuaagaaa

SEQ ID NO: 2253648 - RNA, 19 nt, Homo sapiens
  misc_RNA (1)...(19): siRNA sense strand
ugacaugagggaugaagaa

SEQ ID NO: 2253649 - RNA, 19 nt, Homo sapiens
  misc_RNA (1)...(19): siRNA sense strand
cuuaaacaaugaaggauca

SEQ ID NO: 2253650 - RNA, 19 nt, Homo sapiens
  misc_RNA (1)...(19): siRNA sense strand
gcugaagcaucuaaagaca

SEQ ID NO: 2253651 - RNA, 19 nt, Homo sapiens
  misc_RNA (1)...(19): siRNA sense strand
agaacaucagcaagagaua

SEQ ID NO: 2253652 - RNA, 19 nt, Homo sapiens
  misc_RNA (1)...(19): siRNA sense strand
gggugggagugcugaguga

SEQ ID NO: 2253653 - RNA, 19 nt, Homo sapiens
  misc_RNA (1)...(19): siRNA sense strand
gcuucaguguggagacauu

SEQ ID NO: 2253654 - RNA, 19 nt, Homo sapiens
  misc_RNA (1)...(19): siRNA sense strand
agcccaaaucacagaaaua

SEQ ID NO: 2253655 - RNA, 19 nt, Homo sapiens
  misc_RNA (1)...(19): siRNA sense strand
aaaucgaacagcugauaaa

SEQ ID NO: 2253656 - RNA, 19 nt, Homo sapiens
  misc_RNA (1)...(19): siRNA sense strand
agauaauagucggaaacaa

SEQ ID NO: 2253657 - RNA, 19 nt, Homo sapiens
  misc_RNA (1)...(19): siRNA sense strand
gcucauuuguagcagagaa

SEQ ID NO: 2253658 - RNA, 19 nt, Homo sapiens
  misc_RNA (1)...(19): siRNA sense strand
uagaagaagagguuaaaga

SEQ ID NO: 2253659 - RNA, 19 nt, Homo sapiens
  misc_RNA (1)...(19): siRNA sense strand
gugaagaaagggauguauu

SEQ ID NO: 2253660 - RNA, 19 nt, Homo sapiens
  misc_RNA (1)...(19): siRNA sense strand
ugaaaugcuuuacggagaa

SEQ ID NO: 2253661 - RNA, 19 nt, Homo sapiens
  misc_RNA (1)...(19): siRNA sense strand
ugguggagacauacggaaa

SEQ ID NO: 2253662 - RNA, 19 nt, Homo sapiens
  misc_RNA (1)...(19): siRNA sense strand
ccucagaaaggaauaggaa

SEQ ID NO: 2253663 - RNA, 19 nt, Homo sapiens
  misc_RNA (1)...(19): siRNA sense strand
ggaaaugcuacgagaucca

SEQ ID NO: 2253664 - RNA, 19 nt, Homo sapiens
  misc_RNA (1)...(19): siRNA sense strand
gcacaagauuuugaagaaa

SEQ ID NO: 2253665 - RNA, 19 nt, Homo sapiens
  misc_RNA (1)...(19): siRNA sense strand
gcugagauggugauagcaa

SEQ ID NO: 2253666 - RNA, 19 nt, Homo sapiens
  misc_RNA (1)...(19): siRNA sense strand
gucugaagcugauggaaga

SEQ ID NO: 2253667 - RNA, 19 nt, Homo sapiens
  misc_RNA (1)...(19): siRNA sense strand
uagaaaacuucaagaguca

SEQ ID NO: 2253668 - RNA, 19 nt, Homo sapiens
  misc_RNA (1)...(19): siRNA sense strand
agacauuaaaccugacaau

SEQ ID NO: 2253669 - RNA, 19 nt, Homo sapiens
  misc_RNA (1)...(19): siRNA sense strand
gcaagcaaagauuuagaaa

SEQ ID NO: 2253670 - RNA, 19 nt, Homo sapiens
  misc_RNA (1)...(19): siRNA sense strand
agaucuagcagacaagaaa

SEQ ID NO: 2253671 - RNA, 19 nt, Homo sapiens
  misc_RNA (1)...(19): siRNA sense strand
agaauaagugggugggagu

SEQ ID NO: 2253672 - RNA, 19 nt, Homo sapiens
  misc_RNA (1)...(19): siRNA sense strand
aagaagaggaugaggaaaa

SEQ ID NO: 2253673 - RNA, 19 nt, Homo sapiens
  misc_RNA (1)...(19): siRNA sense strand
aggaaguggaggaggaaga

SEQ ID NO: 2253674 - RNA, 19 nt, Homo sapiens
  misc_RNA (1)...(19): siRNA sense strand
aagagaaagaagaggauga

SEQ ID NO: 2253675 - RNA, 19 nt, Homo sapiens
  misc_RNA (1)...(19): siRNA sense strand
uggaggaggaagagaaaga

SEQ ID NO: 2253676 - RNA, 19 nt, Homo sapiens
  misc_RNA (1)...(19): siRNA sense strand
aggaggaaguggaggagga

SEQ ID NO: 2253677 - RNA, 19 nt, Homo sapiens
  misc_RNA (1)...(19): siRNA sense strand
gagaggagcuguaagcaga

SEQ ID NO: 2253678 - RNA, 19 nt, Homo sapiens
  misc_RNA (1)...(19): siRNA sense strand
ugaugaggcugaagcgcua

SEQ ID NO: 2253679 - RNA, 19 nt, Homo sapiens
  misc_RNA (1)...(19): siRNA sense strand
gcgcuaggcaugaagggua

SEQ ID NO: 2253680 - RNA, 19 nt, Homo sapiens
  misc_RNA (1)...(19): siRNA sense strand
agaaagaagaggaugagga

SEQ ID NO: 2253681 - RNA, 19 nt, Homo sapiens
  misc_RNA (1)...(19): siRNA sense strand
acucagacagcgaggaaga

SEQ ID NO: 2253682 - RNA, 19 nt, Homo sapiens
  misc_RNA (1)...(19): siRNA sense strand
gcaaagaagguggagggaa

SEQ ID NO: 2253683 - RNA, 19 nt, Homo sapiens
  misc_RNA (1)...(19): siRNA sense strand
ugacagugggagagauaga

SEQ ID NO: 2253684 - RNA, 19 nt, Homo sapiens
  misc_RNA (1)...(19): siRNA sense strand
gagaggaggaaguggagga

SEQ ID NO: 2253685 - RNA, 19 nt, Homo sapiens
  misc_RNA (1)...(19): siRNA sense strand
aagaaagugaggagagcga

SEQ ID NO: 2253686 - RNA, 19 nt, Homo sapiens
  misc_RNA (1)...(19): siRNA sense strand
ggggaagacuaggaagaaa

SEQ ID NO: 2253687 - RNA, 19 nt, Homo sapiens
  misc_RNA (1)...(19): siRNA sense strand
gggaagacuaggaagaaac

SEQ ID NO: 2253688 - RNA, 19 nt, Homo sapiens
  misc_RNA (1)...(19): siRNA sense strand
aguggaggaggaagagaaa

SEQ ID NO: 2253689 - RNA, 19 nt, Homo sapiens
  misc_RNA (1)...(19): siRNA sense strand
aggaagagaaagaagagga

SEQ ID NO: 2253690 - RNA, 19 nt, Homo sapiens
  misc_RNA (1)...(19): siRNA sense strand
gggagaaggagaugcagga

SEQ ID NO: 2253691 - RNA, 19 nt, Homo sapiens
  misc_RNA (1)...(19): siRNA sense strand
gggcagaacuggaagcgcu

SEQ ID NO: 2253692 - RNA, 19 nt, Homo sapiens
  misc_RNA (1)...(19): siRNA sense strand
acaagaagcuguugggcuc

SEQ ID NO: 2253693 - RNA, 19 nt, Homo sapiens
  misc_RNA (1)...(19): siRNA sense strand
gggaagaaagugaggagag

SEQ ID NO: 2253694 - RNA, 19 nt, Homo sapiens
  misc_RNA (1)...(19): siRNA sense strand
gugaggagagcgaggcaga

SEQ ID NO: 2253695 - RNA, 19 nt, Homo sapiens
  misc_RNA (1)...(19): siRNA sense strand
ggagaaagucagcuaggga

SEQ ID NO: 2253696 - RNA, 19 nt, Homo sapiens
  misc_RNA (1)...(19): siRNA sense strand
cgaggaagacagugggaag

SEQ ID NO: 2253697 - RNA, 19 nt, Homo sapiens
  misc_RNA (1)...(19): siRNA sense strand
aaguggaggaggaagagaa

SEQ ID NO: 2253698 - RNA, 19 nt, Homo sapiens
  misc_RNA (1)...(19): siRNA sense strand
gguaagugacagcgaggca

SEQ ID NO: 2253699 - RNA, 19 nt, Homo sapiens
  misc_RNA (1)...(19): siRNA sense strand
aggaggaagagaaagaaga

SEQ ID NO: 2253700 - RNA, 19 nt, Homo sapiens
  misc_RNA (1)...(19): siRNA sense strand
acagcgaggaagagcagaa

SEQ ID NO: 2253701 - RNA, 19 nt, Homo sapiens
  misc_RNA (1)...(19): siRNA sense strand
aggacaggacccagcuuaa

SEQ ID NO: 2253702 - RNA, 19 nt, Homo sapiens
  misc_RNA (1)...(19): siRNA sense strand
guggagggaaauaaaggaa

SEQ ID NO: 2253703 - RNA, 19 nt, Homo sapiens
  misc_RNA (1)...(19): siRNA sense strand
accuggagcccgaggagaa
